United States Patent Application Publication US 2018/0305689 A1 - sequence listing, part 19

SEQ ID NO: 252524 - RNA, 19 nt, Artificial Sequence
  Description of Artificial Sequence: Synthetic oligonucleotide
  Sense strand starting at position 3241 SEQ ID NO: 3248
ugcagagagcucuagcauu

SEQ ID NO: 252525 - RNA, 19 nt, Artificial Sequence
  Description of Artificial Sequence: Synthetic oligonucleotide
  Antisense strand to SEQ ID NO: 252524
aaugcuagagcucucugca

SEQ ID NO: 252526 - RNA, 19 nt, Artificial Sequence
  Description of Artificial Sequence: Synthetic oligonucleotide
  Sense strand starting at position 3774 SEQ ID NO: 3248
gagaucugcuaagugucau

SEQ ID NO: 252527 - RNA, 19 nt, Artificial Sequence
  Description of Artificial Sequence: Synthetic oligonucleotide
  Antisense strand to SEQ ID NO: 252526
augacacuuagcagaucuc

SEQ ID NO: 252528 - RNA, 19 nt, Artificial Sequence
  Description of Artificial Sequence: Synthetic oligonucleotide
  Sense strand starting at position 3858 SEQ ID NO: 3248
ugacgugcccaagaucauu

SEQ ID NO: 252529 - RNA, 19 nt, Artificial Sequence
  Description of Artificial Sequence: Synthetic oligonucleotide
  Antisense strand to SEQ ID NO: 252528
aaugaucuugggcacguca

SEQ ID NO: 252530 - RNA, 19 nt, Artificial Sequence
  Description of Artificial Sequence: Synthetic oligonucleotide
  Sense strand starting at position 3864 SEQ ID NO: 3248
gcccaagaucauuggacca

SEQ ID NO: 252531 - RNA, 19 nt, Artificial Sequence
  Description of Artificial Sequence: Synthetic oligonucleotide
  Antisense strand to SEQ ID NO: 252530
ugguccaaugaucuugggc

SEQ ID NO: 252532 - RNA, 19 nt, Artificial Sequence
  Description of Artificial Sequence: Synthetic oligonucleotide
  Sense strand starting at position 3918 SEQ ID NO: 3248
gcuauuguaccaggaucau

SEQ ID NO: 252533 - RNA, 19 nt, Artificial Sequence
  Description of Artificial Sequence: Synthetic oligonucleotide
  Antisense strand to SEQ ID NO: 252532
augauccugguacaauagc

SEQ ID NO: 252534 - RNA, 19 nt, Artificial Sequence
  Description of Artificial Sequence: Synthetic oligonucleotide
  Sense strand starting at position 3927 SEQ ID NO: 3248
ccaggaucauucuuuguuu

SEQ ID NO: 252535 - RNA, 19 nt, Artificial Sequence
  Description of Artificial Sequence: Synthetic oligonucleotide
  Antisense strand to SEQ ID NO: 252534
aaacaaagaaugauccugg

SEQ ID NO: 252536 - RNA, 19 nt, Artificial Sequence
  Description of Artificial Sequence: Synthetic oligonucleotide
  Sense strand starting at position 81 SEQ ID NO: 3250
auacuauuccagcacugga

SEQ ID NO: 252537 - RNA, 19 nt, Artificial Sequence
  Description of Artificial Sequence: Synthetic oligonucleotide
  Antisense strand to SEQ ID NO: 252536
uccagugcuggaauaguau

SEQ ID NO: 252538 - RNA, 19 nt, Artificial Sequence
  Description of Artificial Sequence: Synthetic oligonucleotide
  Sense strand starting at position 89 SEQ ID NO: 3250
ccagcacuggaguaaauua

SEQ ID NO: 252539 - RNA, 19 nt, Artificial Sequence
  Description of Artificial Sequence: Synthetic oligonucleotide
  Antisense strand to SEQ ID NO: 252538
uaauuuacuccagugcugg

SEQ ID NO: 252540 - RNA, 19 nt, Artificial Sequence
  Description of Artificial Sequence: Synthetic oligonucleotide
  Sense strand starting at position 119 SEQ ID NO: 3250
uagagauaguggcucucua

SEQ ID NO: 252541 - RNA, 19 nt, Artificial Sequence
  Description of Artificial Sequence: Synthetic oligonucleotide
  Antisense strand to SEQ ID NO: 252540
uagagagccacuaucucua

SEQ ID NO: 252542 - RNA, 19 nt, Artificial Sequence
  Description of Artificial Sequence: Synthetic oligonucleotide
  Sense strand starting at position 123 SEQ ID NO: 3250
gauaguggcucucuauguu

SEQ ID NO: 252543 - RNA, 19 nt, Artificial Sequence
  Description of Artificial Sequence: Synthetic oligonucleotide
  Antisense strand to SEQ ID NO: 252542
aacauagagagccacuauc

SEQ ID NO: 252544 - RNA, 19 nt, Artificial Sequence
  Description of Artificial Sequence: Synthetic oligonucleotide
  Sense strand starting at position 459 SEQ ID NO: 3250
gggaauugauuauaaucac

SEQ ID NO: 252545 - RNA, 19 nt, Artificial Sequence
  Description of Artificial Sequence: Synthetic oligonucleotide
  Antisense strand to SEQ ID NO: 252544
gugauuauaaucaauuccc

SEQ ID NO: 252546 - RNA, 19 nt, Artificial Sequence
  Description of Artificial Sequence: Synthetic oligonucleotide
  Sense strand starting at position 737 SEQ ID NO: 3250
gacaaucagugcuugcaca

SEQ ID NO: 252547 - RNA, 19 nt, Artificial Sequence
  Description of Artificial Sequence: Synthetic oligonucleotide
  Antisense strand to SEQ ID NO: 252546
ugugcaagcacugauuguc

SEQ ID NO: 252548 - RNA, 19 nt, Artificial Sequence
  Description of Artificial Sequence: Synthetic oligonucleotide
  Sense strand starting at position 738 SEQ ID NO: 3250
acaaucagugcuugcacaa

SEQ ID NO: 252549 - RNA, 19 nt, Artificial Sequence
  Description of Artificial Sequence: Synthetic oligonucleotide
  Antisense strand to SEQ ID NO: 252548
uugugcaagcacugauugu

SEQ ID NO: 252550 - RNA, 19 nt, Artificial Sequence
  Description of Artificial Sequence: Synthetic oligonucleotide
  Sense strand starting at position 1115 SEQ ID NO: 3250
aggcgugagccucaaagau

SEQ ID NO: 252551 - RNA, 19 nt, Artificial Sequence
  Description of Artificial Sequence: Synthetic oligonucleotide
  Antisense strand to SEQ ID NO: 252550
aucuuugaggcucacgccu

SEQ ID NO: 252552 - RNA, 19 nt, Artificial Sequence
  Description of Artificial Sequence: Synthetic oligonucleotide
  Sense strand starting at position 1141 SEQ ID NO: 3250
aaaggaaaugcugaguguu

SEQ ID NO: 252553 - RNA, 19 nt, Artificial Sequence
  Description of Artificial Sequence: Synthetic oligonucleotide
  Antisense strand to SEQ ID NO: 252552
aacacucagcauuuccuuu

SEQ ID NO: 252554 - RNA, 19 nt, Artificial Sequence
  Description of Artificial Sequence: Synthetic oligonucleotide
  Sense strand starting at position 1180 SEQ ID NO: 3250
uccuaucgccagugggaaa

SEQ ID NO: 252555 - RNA, 19 nt, Artificial Sequence
  Description of Artificial Sequence: Synthetic oligonucleotide
  Antisense strand to SEQ ID NO: 252554
uuucccacuggcgauagga

SEQ ID NO: 252556 - RNA, 19 nt, Artificial Sequence
  Description of Artificial Sequence: Synthetic oligonucleotide
  Sense strand starting at position 1252 SEQ ID NO: 3250
ggugaguugggagaaaugu

SEQ ID NO: 252557 - RNA, 19 nt, Artificial Sequence
  Description of Artificial Sequence: Synthetic oligonucleotide
  Antisense strand to SEQ ID NO: 252556
acauuucucccaacucacc

SEQ ID NO: 252558 - RNA, 19 nt, Artificial Sequence
  Description of Artificial Sequence: Synthetic oligonucleotide
  Sense strand starting at position 1533 SEQ ID NO: 3250
cggcgaagaggucagcaaa

SEQ ID NO: 252559 - RNA, 19 nt, Artificial Sequence
  Description of Artificial Sequence: Synthetic oligonucleotide
  Antisense strand to SEQ ID NO: 252558
uuugcugaccucuucgccg

SEQ ID NO: 252560 - RNA, 19 nt, Artificial Sequence
  Description of Artificial Sequence: Synthetic oligonucleotide
  Sense strand starting at position 1700 SEQ ID NO: 3250
aggagcugugcccaugaca

SEQ ID NO: 252561 - RNA, 19 nt, Artificial Sequence
  Description of Artificial Sequence: Synthetic oligonucleotide
  Antisense strand to SEQ ID NO: 252560
ugucaugggcacagcuccu

SEQ ID NO: 252562 - RNA, 19 nt, Artificial Sequence
  Description of Artificial Sequence: Synthetic oligonucleotide
  Sense strand starting at position 1703 SEQ ID NO: 3250
agcugugcccaugacagaa

SEQ ID NO: 252563 - RNA, 19 nt, Artificial Sequence
  Description of Artificial Sequence: Synthetic oligonucleotide
  Antisense strand to SEQ ID NO: 252562
uucugucaugggcacagcu

SEQ ID NO: 252564 - RNA, 19 nt, Artificial Sequence
  Description of Artificial Sequence: Synthetic oligonucleotide
  Sense strand starting at position 1724 SEQ ID NO: 3250
accuuauaaugggugaucu

SEQ ID NO: 252565 - RNA, 19 nt, Artificial Sequence
  Description of Artificial Sequence: Synthetic oligonucleotide
  Antisense strand to SEQ ID NO: 252564
agaucacccauuauaaggu

SEQ ID NO: 252566 - RNA, 19 nt, Artificial Sequence
  Description of Artificial Sequence: Synthetic oligonucleotide
  Sense strand starting at position 1728 SEQ ID NO: 3250
uauaaugggugaucugacu

SEQ ID NO: 252567 - RNA, 19 nt, Artificial Sequence
  Description of Artificial Sequence: Synthetic oligonucleotide
  Antisense strand to SEQ ID NO: 252566
agucagaucacccauuaua

SEQ ID NO: 252568 - RNA, 19 nt, Artificial Sequence
  Description of Artificial Sequence: Synthetic oligonucleotide
  Sense strand starting at position 1734 SEQ ID NO: 3250
gggugaucugacuggcaug

SEQ ID NO: 252569 - RNA, 19 nt, Artificial Sequence
  Description of Artificial Sequence: Synthetic oligonucleotide
  Antisense strand to SEQ ID NO: 252568
caugccagucagaucaccc

SEQ ID NO: 252570 - RNA, 19 nt, Artificial Sequence
  Description of Artificial Sequence: Synthetic oligonucleotide
  Sense strand starting at position 1764 SEQ ID NO: 3250
aguauucuggcaggaaagu

SEQ ID NO: 252571 - RNA, 19 nt, Artificial Sequence
  Description of Artificial Sequence: Synthetic oligonucleotide
  Antisense strand to SEQ ID NO: 252570
acuuuccugccagaauacu

SEQ ID NO: 252572 - RNA, 19 nt, Artificial Sequence
  Description of Artificial Sequence: Synthetic oligonucleotide
  Sense strand starting at position 1868 SEQ ID NO: 3250
ugcagcaagucauugguua

SEQ ID NO: 252573 - RNA, 19 nt, Artificial Sequence
  Description of Artificial Sequence: Synthetic oligonucleotide
  Antisense strand to SEQ ID NO: 252572
uaaccaaugacuugcugca

SEQ ID NO: 252574 - RNA, 19 nt, Artificial Sequence
  Description of Artificial Sequence: Synthetic oligonucleotide
  Sense strand starting at position 1869 SEQ ID NO: 3250
gcagcaagucauugguuag

SEQ ID NO: 252575 - RNA, 19 nt, Artificial Sequence
  Description of Artificial Sequence: Synthetic oligonucleotide
  Antisense strand to SEQ ID NO: 252574
cuaaccaaugacuugcugc

SEQ ID NO: 252576 - RNA, 19 nt, Artificial Sequence
  Description of Artificial Sequence: Synthetic oligonucleotide
  Sense strand starting at position 2014 SEQ ID NO: 3250
guggaacccuuacuuuaua

SEQ ID NO: 252577 - RNA, 19 nt, Artificial Sequence
  Description of Artificial Sequence: Synthetic oligonucleotide
  Antisense strand to SEQ ID NO: 252576
uauaaaguaaggguuccac

SEQ ID NO: 252578 - RNA, 19 nt, Artificial Sequence
  Description of Artificial Sequence: Synthetic oligonucleotide
  Sense strand starting at position 2081 SEQ ID NO: 3250
uuaacuggguuaucuauga

SEQ ID NO: 252579 - RNA, 19 nt, Artificial Sequence
  Description of Artificial Sequence: Synthetic oligonucleotide
  Antisense strand to SEQ ID NO: 252578
ucauagauaacccaguuaa

SEQ ID NO: 252580 - RNA, 19 nt, Artificial Sequence
  Description of Artificial Sequence: Synthetic oligonucleotide
  Sense strand starting at position 2085 SEQ ID NO: 3250
cuggguuaucuaugaucac

SEQ ID NO: 252581 - RNA, 19 nt, Artificial Sequence
  Description of Artificial Sequence: Synthetic oligonucleotide
  Antisense strand to SEQ ID NO: 252580
gugaucauagauaacccag

SEQ ID NO: 252582 - RNA, 19 nt, Artificial Sequence
  Description of Artificial Sequence: Synthetic oligonucleotide
  Sense strand starting at position 2088 SEQ ID NO: 3250
gguuaucuaugaucacaaa

SEQ ID NO: 252583 - RNA, 19 nt, Artificial Sequence
  Description of Artificial Sequence: Synthetic oligonucleotide
  Antisense strand to SEQ ID NO: 252582
uuugugaucauagauaacc

SEQ ID NO: 252584 - RNA, 19 nt, Artificial Sequence
  Description of Artificial Sequence: Synthetic oligonucleotide
  Sense strand starting at position 3029 SEQ ID NO: 3250
auauguaucuuuccaguuu

SEQ ID NO: 252585 - RNA, 19 nt, Artificial Sequence
  Description of Artificial Sequence: Synthetic oligonucleotide
  Antisense strand to SEQ ID NO: 252584
aaacuggaaagauacauau

SEQ ID NO: 252586 - RNA, 19 nt, Artificial Sequence
  Description of Artificial Sequence: Synthetic oligonucleotide
  Sense strand starting at position 3081 SEQ ID NO: 3250
gucagaaugccuggguuua

SEQ ID NO: 252587 - RNA, 19 nt, Artificial Sequence
  Description of Artificial Sequence: Synthetic oligonucleotide
  Antisense strand to SEQ ID NO: 252586
uaaacccaggcauucugac

SEQ ID NO: 252588 - RNA, 19 nt, Artificial Sequence
  Description of Artificial Sequence: Synthetic oligonucleotide
  Sense strand starting at position 3146 SEQ ID NO: 3250
accuguagaauguggauaa

SEQ ID NO: 252589 - RNA, 19 nt, Artificial Sequence
  Description of Artificial Sequence: Synthetic oligonucleotide
  Antisense strand to SEQ ID NO: 252588
uuauccacauucuacaggu

SEQ ID NO: 252590 - RNA, 19 nt, Artificial Sequence
  Description of Artificial Sequence: Synthetic oligonucleotide
  Sense strand starting at position 3202 SEQ ID NO: 3250
guagcauguauacaacagu

SEQ ID NO: 252591 - RNA, 19 nt, Artificial Sequence
  Description of Artificial Sequence: Synthetic oligonucleotide
  Antisense strand to SEQ ID NO: 252590
acuguuguauacaugcuac

SEQ ID NO: 252592 - RNA, 19 nt, Artificial Sequence
  Description of Artificial Sequence: Synthetic oligonucleotide
  Sense strand starting at position 3205 SEQ ID NO: 3250
gcauguauacaacaguaca

SEQ ID NO: 252593 - RNA, 19 nt, Artificial Sequence
  Description of Artificial Sequence: Synthetic oligonucleotide
  Antisense strand to SEQ ID NO: 252592
uguacuguuguauacaugc

SEQ ID NO: 252594 - RNA, 19 nt, Artificial Sequence
  Description of Artificial Sequence: Synthetic oligonucleotide
  Sense strand starting at position 3218 SEQ ID NO: 3250
aguacagcucagggaucau

SEQ ID NO: 252595 - RNA, 19 nt, Artificial Sequence
  Description of Artificial Sequence: Synthetic oligonucleotide
  Antisense strand to SEQ ID NO: 252594
augaucccugagcuguacu

SEQ ID NO: 252596 - RNA, 19 nt, Artificial Sequence
  Description of Artificial Sequence: Synthetic oligonucleotide
  Sense strand starting at position 3222 SEQ ID NO: 3250
cagcucagggaucauuauu

SEQ ID NO: 252597 - RNA, 19 nt, Artificial Sequence
  Description of Artificial Sequence: Synthetic oligonucleotide
  Antisense strand to SEQ ID NO: 252596
aauaaugaucccugagcug

SEQ ID NO: 252598 - RNA, 19 nt, Artificial Sequence
  Description of Artificial Sequence: Synthetic oligonucleotide
  Sense strand starting at position 3230 SEQ ID NO: 3250
ggaucauuauuauuacgua

SEQ ID NO: 252599 - RNA, 19 nt, Artificial Sequence
  Description of Artificial Sequence: Synthetic oligonucleotide
  Antisense strand to SEQ ID NO: 252598
uacguaauaauaaugaucc

SEQ ID NO: 252600 - RNA, 19 nt, Artificial Sequence
  Description of Artificial Sequence: Synthetic oligonucleotide
  Sense strand starting at position 3257 SEQ ID NO: 3250
uggaaacguguauaacauu

SEQ ID NO: 252601 - RNA, 19 nt, Artificial Sequence
  Description of Artificial Sequence: Synthetic oligonucleotide
  Antisense strand to SEQ ID NO: 252600
aauguuauacacguuucca

SEQ ID NO: 252602 - RNA, 19 nt, Artificial Sequence
  Description of Artificial Sequence: Synthetic oligonucleotide
  Sense strand starting at position 3303 SEQ ID NO: 3250
ggaauuaugccauauguau

SEQ ID NO: 252603 - RNA, 19 nt, Artificial Sequence
  Description of Artificial Sequence: Synthetic oligonucleotide
  Antisense strand to SEQ ID NO: 252602
auacauauggcauaauucc

SEQ ID NO: 252604 - RNA, 19 nt, Artificial Sequence
  Description of Artificial Sequence: Synthetic oligonucleotide
  Sense strand starting at position 3351 SEQ ID NO: 3250
uagaguucugccuguauca

SEQ ID NO: 252605 - RNA, 19 nt, Artificial Sequence
  Description of Artificial Sequence: Synthetic oligonucleotide
  Antisense strand to SEQ ID NO: 252604
ugauacaggcagaacucua

SEQ ID NO: 252606 - RNA, 19 nt, Artificial Sequence
  Description of Artificial Sequence: Synthetic oligonucleotide
  Sense strand starting at position 3353 SEQ ID NO: 3250
gaguucugccuguaucaga

SEQ ID NO: 252607 - RNA, 19 nt, Artificial Sequence
  Description of Artificial Sequence: Synthetic oligonucleotide
  Antisense strand to SEQ ID NO: 252606
ucugauacaggcagaacuc

SEQ ID NO: 252608 - RNA, 19 nt, Artificial Sequence
  Description of Artificial Sequence: Synthetic oligonucleotide
  Sense strand starting at position 3401 SEQ ID NO: 3250
agcuuuccacagcaagaau

SEQ ID NO: 252609 - RNA, 19 nt, Artificial Sequence
  Description of Artificial Sequence: Synthetic oligonucleotide
  Antisense strand to SEQ ID NO: 252608
auucuugcuguggaaagcu

SEQ ID NO: 252610 - RNA, 19 nt, Artificial Sequence
  Description of Artificial Sequence: Synthetic oligonucleotide
  Sense strand starting at position 3657 SEQ ID NO: 3250
ugcaaauugucuuccaagu

SEQ ID NO: 252611 - RNA, 19 nt, Artificial Sequence
  Description of Artificial Sequence: Synthetic oligonucleotide
  Antisense strand to SEQ ID NO: 252610
acuuggaagacaauuugca

SEQ ID NO: 252612 - RNA, 19 nt, Artificial Sequence
  Description of Artificial Sequence: Synthetic oligonucleotide
  Sense strand starting at position 3789 SEQ ID NO: 3250
cugauuauuuaagagguga

SEQ ID NO: 252613 - RNA, 19 nt, Artificial Sequence
  Description of Artificial Sequence: Synthetic oligonucleotide
  Antisense strand to SEQ ID NO: 252612
ucaccucuuaaauaaucag

SEQ ID NO: 252614 - RNA, 19 nt, Artificial Sequence
  Description of Artificial Sequence: Synthetic oligonucleotide
  Sense strand starting at position 3802 SEQ ID NO: 3250
aggugaagcucuucuuguu

SEQ ID NO: 252615 - RNA, 19 nt, Artificial Sequence
  Description of Artificial Sequence: Synthetic oligonucleotide
  Antisense strand to SEQ ID NO: 252614
aacaagaagagcuucaccu

SEQ ID NO: 252616 - RNA, 19 nt, Artificial Sequence
  Description of Artificial Sequence: Synthetic oligonucleotide
  Sense strand starting at position 80 SEQ ID NO: 3251
uaaagcaagcucuggugaa

SEQ ID NO: 252617 - RNA, 19 nt, Artificial Sequence
  Description of Artificial Sequence: Synthetic oligonucleotide
  Antisense strand to SEQ ID NO: 252616
uucaccagagcuugcuuua

SEQ ID NO: 252618 - RNA, 19 nt, Artificial Sequence
  Description of Artificial Sequence: Synthetic oligonucleotide
  Sense strand starting at position 129 SEQ ID NO: 3251
agaauuccacuucggaauu

SEQ ID NO: 252619 - RNA, 19 nt, Artificial Sequence
  Description of Artificial Sequence: Synthetic oligonucleotide
  Antisense strand to SEQ ID NO: 252618
aauuccgaaguggaauucu

SEQ ID NO: 252620 - RNA, 19 nt, Artificial Sequence
  Description of Artificial Sequence: Synthetic oligonucleotide
  Sense strand starting at position 325 SEQ ID NO: 3251
auaaauagcugucuggaga

SEQ ID NO: 252621 - RNA, 19 nt, Artificial Sequence
  Description of Artificial Sequence: Synthetic oligonucleotide
  Antisense strand to SEQ ID NO: 252620
ucuccagacagcuauuuau

SEQ ID NO: 252622 - RNA, 19 nt, Artificial Sequence
  Description of Artificial Sequence: Synthetic oligonucleotide
  Sense strand starting at position 326 SEQ ID NO: 3251
uaaauagcugucuggagaa

SEQ ID NO: 252623 - RNA, 19 nt, Artificial Sequence
  Description of Artificial Sequence: Synthetic oligonucleotide
  Antisense strand to SEQ ID NO: 252622
uucuccagacagcuauuua

SEQ ID NO: 252624 - RNA, 19 nt, Artificial Sequence
  Description of Artificial Sequence: Synthetic oligonucleotide
  Sense strand starting at position 341 SEQ ID NO: 3251
agaaaugauggcugggauu

SEQ ID NO: 252625 - RNA, 19 nt, Artificial Sequence
  Description of Artificial Sequence: Synthetic oligonucleotide
  Antisense strand to SEQ ID NO: 252624
aaucccagccaucauuucu

SEQ ID NO: 252626 - RNA, 19 nt, Artificial Sequence
  Description of Artificial Sequence: Synthetic oligonucleotide
  Sense strand starting at position 371 SEQ ID NO: 3251
guuucaugggaacauggua

SEQ ID NO: 252627 - RNA, 19 nt, Artificial Sequence
  Description of Artificial Sequence: Synthetic oligonucleotide
  Antisense strand to SEQ ID NO: 252626
uaccauguucccaugaaac

SEQ ID NO: 252628 - RNA, 19 nt, Artificial Sequence
  Description of Artificial Sequence: Synthetic oligonucleotide
  Sense strand starting at position 472 SEQ ID NO: 3251
cagccacagccugauaguu

SEQ ID NO: 252629 - RNA, 19 nt, Artificial Sequence
  Description of Artificial Sequence: Synthetic oligonucleotide
  Antisense strand to SEQ ID NO: 252628
aacuaucaggcuguggcug

SEQ ID NO: 252630 - RNA, 19 nt, Artificial Sequence
  Description of Artificial Sequence: Synthetic oligonucleotide
  Sense strand starting at position 481 SEQ ID NO: 3251
ccugauaguucuguccuga

SEQ ID NO: 252631 - RNA, 19 nt, Artificial Sequence
  Description of Artificial Sequence: Synthetic oligonucleotide
  Antisense strand to SEQ ID NO: 252630
ucaggacagaacuaucagg

SEQ ID NO: 252632 - RNA, 19 nt, Artificial Sequence
  Description of Artificial Sequence: Synthetic oligonucleotide
  Sense strand starting at position 486 SEQ ID NO: 3251
uaguucuguccugacaaag

SEQ ID NO: 252633 - RNA, 19 nt, Artificial Sequence
  Description of Artificial Sequence: Synthetic oligonucleotide
  Antisense strand to SEQ ID NO: 252632
cuuugucaggacagaacua

SEQ ID NO: 252634 - RNA, 19 nt, Artificial Sequence
  Description of Artificial Sequence: Synthetic oligonucleotide
  Sense strand starting at position 497 SEQ ID NO: 3251
ugacaaagacucugccuua

SEQ ID NO: 252635 - RNA, 19 nt, Artificial Sequence
  Description of Artificial Sequence: Synthetic oligonucleotide
  Antisense strand to SEQ ID NO: 252634
uaaggcagagucuuuguca

SEQ ID NO: 252636 - RNA, 19 nt, Artificial Sequence
  Description of Artificial Sequence: Synthetic oligonucleotide
  Sense strand starting at position 771 SEQ ID NO: 3251
ucauuuaccagucguggga

SEQ ID NO: 252637 - RNA, 19 nt, Artificial Sequence
  Description of Artificial Sequence: Synthetic oligonucleotide
  Antisense strand to SEQ ID NO: 252636
ucccacgacugguaaauga

SEQ ID NO: 252638 - RNA, 19 nt, Artificial Sequence
  Description of Artificial Sequence: Synthetic oligonucleotide
  Sense strand starting at position 1037 SEQ ID NO: 3251
uaguuaagccucugaagau

SEQ ID NO: 252639 - RNA, 19 nt, Artificial Sequence
  Description of Artificial Sequence: Synthetic oligonucleotide
  Antisense strand to SEQ ID NO: 252638
aucuucagaggcuuaacua

SEQ ID NO: 252640 - RNA, 19 nt, Artificial Sequence
  Description of Artificial Sequence: Synthetic oligonucleotide
  Sense strand starting at position 2340 SEQ ID NO: 3251
gguauuccagagugggaga

SEQ ID NO: 252641 - RNA, 19 nt, Artificial Sequence
  Description of Artificial Sequence: Synthetic oligonucleotide
  Antisense strand to SEQ ID NO: 252640
ucucccacucuggaauacc

SEQ ID NO: 252642 - RNA, 19 nt, Artificial Sequence
  Description of Artificial Sequence: Synthetic oligonucleotide
  Sense strand starting at position 2453 SEQ ID NO: 3251
ugcagaaauaaauguguga

SEQ ID NO: 252643 - RNA, 19 nt, Artificial Sequence
  Description of Artificial Sequence: Synthetic oligonucleotide
  Antisense strand to SEQ ID NO: 252642
ucacacauuuauuucugca

SEQ ID NO: 252644 - RNA, 19 nt, Artificial Sequence
  Description of Artificial Sequence: Synthetic oligonucleotide
  Sense strand starting at position 2457 SEQ ID NO: 3251
gaaauaaaugugugaccug

SEQ ID NO: 252645 - RNA, 19 nt, Artificial Sequence
  Description of Artificial Sequence: Synthetic oligonucleotide
  Antisense strand to SEQ ID NO: 252644
caggucacacauuuauuuc

SEQ ID NO: 252646 - RNA, 19 nt, Artificial Sequence
  Description of Artificial Sequence: Synthetic oligonucleotide
  Sense strand starting at position 2460 SEQ ID NO: 3251
auaaaugugugaccugaaa

SEQ ID NO: 252647 - RNA, 19 nt, Artificial Sequence
  Description of Artificial Sequence: Synthetic oligonucleotide
  Antisense strand to SEQ ID NO: 252646
uuucaggucacacauuuau

SEQ ID NO: 252648 - RNA, 19 nt, Artificial Sequence
  Description of Artificial Sequence: Synthetic oligonucleotide
  Sense strand starting at position 2511 SEQ ID NO: 3251
uuucuaucccaggaggcua

SEQ ID NO: 252649 - RNA, 19 nt, Artificial Sequence
  Description of Artificial Sequence: Synthetic oligonucleotide
  Antisense strand to SEQ ID NO: 252648
uagccuccugggauagaaa

SEQ ID NO: 252650 - RNA, 19 nt, Artificial Sequence
  Description of Artificial Sequence: Synthetic oligonucleotide
  Sense strand starting at position 2631 SEQ ID NO: 3251
cagucacuguccucagaga

SEQ ID NO: 252651 - RNA, 19 nt, Artificial Sequence
  Description of Artificial Sequence: Synthetic oligonucleotide
  Antisense strand to SEQ ID NO: 252650
ucucugaggacagugacug

SEQ ID NO: 252652 - RNA, 19 nt, Artificial Sequence
  Description of Artificial Sequence: Synthetic oligonucleotide
  Sense strand starting at position 2774 SEQ ID NO: 3251
gccagaaauuccuuuaugg

SEQ ID NO: 252653 - RNA, 19 nt, Artificial Sequence
  Description of Artificial Sequence: Synthetic oligonucleotide
  Antisense strand to SEQ ID NO: 252652
ccauaaaggaauuucuggc

SEQ ID NO: 252654 - RNA, 19 nt, Artificial Sequence
  Description of Artificial Sequence: Synthetic oligonucleotide
  Sense strand starting at position 2808 SEQ ID NO: 3251
acgauuauguaacuucuca

SEQ ID NO: 252655 - RNA, 19 nt, Artificial Sequence
  Description of Artificial Sequence: Synthetic oligonucleotide
  Antisense strand to SEQ ID NO: 252654
ugagaaguuacauaaucgu

SEQ ID NO: 252656 - RNA, 19 nt, Artificial Sequence
  Description of Artificial Sequence: Synthetic oligonucleotide
  Sense strand starting at position 2856 SEQ ID NO: 3251
aggugacauccuuggcuga

SEQ ID NO: 252657 - RNA, 19 nt, Artificial Sequence
  Description of Artificial Sequence: Synthetic oligonucleotide
  Antisense strand to SEQ ID NO: 252656
ucagccaaggaugucaccu

SEQ ID NO: 252658 - RNA, 19 nt, Artificial Sequence
  Description of Artificial Sequence: Synthetic oligonucleotide
  Sense strand starting at position 2857 SEQ ID NO: 3251
ggugacauccuuggcugaa

SEQ ID NO: 252659 - RNA, 19 nt, Artificial Sequence
  Description of Artificial Sequence: Synthetic oligonucleotide
  Antisense strand to SEQ ID NO: 252658
uucagccaaggaugucacc

SEQ ID NO: 252660 - RNA, 19 nt, Artificial Sequence
  Description of Artificial Sequence: Synthetic oligonucleotide
  Sense strand starting at position 2858 SEQ ID NO: 3251
gugacauccuuggcugaaa

SEQ ID NO: 252661 - RNA, 19 nt, Artificial Sequence
  Description of Artificial Sequence: Synthetic oligonucleotide
  Antisense strand to SEQ ID NO: 252660
uuucagccaaggaugucac

SEQ ID NO: 252662 - RNA, 19 nt, Artificial Sequence
  Description of Artificial Sequence: Synthetic oligonucleotide
  Sense strand starting at position 2861 SEQ ID NO: 3251
acauccuuggcugaaacau

SEQ ID NO: 252663 - RNA, 19 nt, Artificial Sequence
  Description of Artificial Sequence: Synthetic oligonucleotide
  Antisense strand to SEQ ID NO: 252662
auguuucagccaaggaugu

SEQ ID NO: 252664 - RNA, 19 nt, Artificial Sequence
  Description of Artificial Sequence: Synthetic oligonucleotide
  Sense strand starting at position 3107 SEQ ID NO: 3251
ggcuguguggccuagaaca

SEQ ID NO: 252665 - RNA, 19 nt, Artificial Sequence
  Description of Artificial Sequence: Synthetic oligonucleotide
  Antisense strand to SEQ ID NO: 252664
uguucuaggccacacagcc

SEQ ID NO: 252666 - RNA, 19 nt, Artificial Sequence
  Description of Artificial Sequence: Synthetic oligonucleotide
  Sense strand starting at position 3171 SEQ ID NO: 3251
uaaugaugguaaucucagu

SEQ ID NO: 252667 - RNA, 19 nt, Artificial Sequence
  Description of Artificial Sequence: Synthetic oligonucleotide
  Antisense strand to SEQ ID NO: 252666
acugagauuaccaucauua

SEQ ID NO: 252668 - RNA, 19 nt, Artificial Sequence
  Description of Artificial Sequence: Synthetic oligonucleotide
  Sense strand starting at position 3178 SEQ ID NO: 3251
gguaaucucaguugagcag

SEQ ID NO: 252669 - RNA, 19 nt, Artificial Sequence
  Description of Artificial Sequence: Synthetic oligonucleotide
  Antisense strand to SEQ ID NO: 252668
cugcucaacugagauuacc

SEQ ID NO: 252670 - RNA, 19 nt, Artificial Sequence
  Description of Artificial Sequence: Synthetic oligonucleotide
  Sense strand starting at position 3185 SEQ ID NO: 3251
ucaguugagcagggagaau

SEQ ID NO: 252671 - RNA, 19 nt, Artificial Sequence
  Description of Artificial Sequence: Synthetic oligonucleotide
  Antisense strand to SEQ ID NO: 252670
auucucccugcucaacuga

SEQ ID NO: 252672 - RNA, 19 nt, Artificial Sequence
  Description of Artificial Sequence: Synthetic oligonucleotide
  Sense strand starting at position 3196 SEQ ID NO: 3251
gggagaauuaccugcacac

SEQ ID NO: 252673 - RNA, 19 nt, Artificial Sequence
  Description of Artificial Sequence: Synthetic oligonucleotide
  Antisense strand to SEQ ID NO: 252672
gugugcagguaauucuccc

SEQ ID NO: 252674 - RNA, 19 nt, Artificial Sequence
  Description of Artificial Sequence: Synthetic oligonucleotide
  Sense strand starting at position 3228 SEQ ID NO: 3251
acucauauccucuggaagu

SEQ ID NO: 252675 - RNA, 19 nt, Artificial Sequence
  Description of Artificial Sequence: Synthetic oligonucleotide
  Antisense strand to SEQ ID NO: 252674
acuuccagaggauaugagu

SEQ ID NO: 252676 - RNA, 19 nt, Artificial Sequence
  Description of Artificial Sequence: Synthetic oligonucleotide
  Sense strand starting at position 3346 SEQ ID NO: 3251
auguuaggcacuuauagga

SEQ ID NO: 252677 - RNA, 19 nt, Artificial Sequence
  Description of Artificial Sequence: Synthetic oligonucleotide
  Antisense strand to SEQ ID NO: 252676
uccuauaagugccuaacau

SEQ ID NO: 252678 - RNA, 19 nt, Artificial Sequence
  Description of Artificial Sequence: Synthetic oligonucleotide
  Sense strand starting at position 3377 SEQ ID NO: 3251
uugaaagcauacuuuagua

SEQ ID NO: 252679 - RNA, 19 nt, Artificial Sequence
  Description of Artificial Sequence: Synthetic oligonucleotide
  Antisense strand to SEQ ID NO: 252678
uacuaaaguaugcuuucaa

SEQ ID NO: 252680 - RNA, 19 nt, Artificial Sequence
  Description of Artificial Sequence: Synthetic oligonucleotide
  Sense strand starting at position 3441 SEQ ID NO: 3251
gcaguaguucuuuaucauu

SEQ ID NO: 252681 - RNA, 19 nt, Artificial Sequence
  Description of Artificial Sequence: Synthetic oligonucleotide
  Antisense strand to SEQ ID NO: 252680
aaugauaaagaacuacugc

SEQ ID NO: 252682 - RNA, 19 nt, Artificial Sequence
  Description of Artificial Sequence: Synthetic oligonucleotide
  Sense strand starting at position 3455 SEQ ID NO: 3251
ucauuaacugagugacaca

SEQ ID NO: 252683 - RNA, 19 nt, Artificial Sequence
  Description of Artificial Sequence: Synthetic oligonucleotide
  Antisense strand to SEQ ID NO: 252682
ugugucacucaguuaauga

SEQ ID NO: 252684 - RNA, 19 nt, Artificial Sequence
  Description of Artificial Sequence: Synthetic oligonucleotide
  Sense strand starting at position 3488 SEQ ID NO: 3251
acaugugauggugguuaaa

SEQ ID NO: 252685 - RNA, 19 nt, Artificial Sequence
  Description of Artificial Sequence: Synthetic oligonucleotide
  Antisense strand to SEQ ID NO: 252684
uuuaaccaccaucacaugu

SEQ ID NO: 252686 - RNA, 19 nt, Artificial Sequence
  Description of Artificial Sequence: Synthetic oligonucleotide
  Sense strand starting at position 3490 SEQ ID NO: 3251
augugauggugguuaaaga

SEQ ID NO: 252687 - RNA, 19 nt, Artificial Sequence
  Description of Artificial Sequence: Synthetic oligonucleotide
  Antisense strand to SEQ ID NO: 252686
ucuuuaaccaccaucacau

SEQ ID NO: 252688 - RNA, 19 nt, Artificial Sequence
  Description of Artificial Sequence: Synthetic oligonucleotide
  Sense strand starting at position 3511 SEQ ID NO: 3251
cggugucucgcguucaaau

SEQ ID NO: 252689 - RNA, 19 nt, Artificial Sequence
  Description of Artificial Sequence: Synthetic oligonucleotide
  Antisense strand to SEQ ID NO: 252688
auuugaacgcgagacaccg

SEQ ID NO: 252690 - RNA, 19 nt, Artificial Sequence
  Description of Artificial Sequence: Synthetic oligonucleotide
  Sense strand starting at position 3512 SEQ ID NO: 3251
ggugucucgcguucaaauc

SEQ ID NO: 252691 - RNA, 19 nt, Artificial Sequence
  Description of Artificial Sequence: Synthetic oligonucleotide
  Antisense strand to SEQ ID NO: 252690
gauuugaacgcgagacacc

SEQ ID NO: 252692 - RNA, 19 nt, Artificial Sequence
  Description of Artificial Sequence: Synthetic oligonucleotide
  Sense strand starting at position 3691 SEQ ID NO: 3251
gggacauaguaagcacuua

SEQ ID NO: 252693 - RNA, 19 nt, Artificial Sequence
  Description of Artificial Sequence: Synthetic oligonucleotide
  Antisense strand to SEQ ID NO: 252692
uaagugcuuacuauguccc

SEQ ID NO: 252694 - RNA, 19 nt, Artificial Sequence
  Description of Artificial Sequence: Synthetic oligonucleotide
  Sense strand starting at position 3815 SEQ ID NO: 3251
aaauaugucgggugacaaa

SEQ ID NO: 252695 - RNA, 19 nt, Artificial Sequence
  Description of Artificial Sequence: Synthetic oligonucleotide
  Antisense strand to SEQ ID NO: 252694
uuugucacccgacauauuu

SEQ ID NO: 252696 - RNA, 19 nt, Artificial Sequence
  Description of Artificial Sequence: Synthetic oligonucleotide
  Sense strand starting at position 212 SEQ ID NO: 3252
ggaucucaguuucuucuaa

SEQ ID NO: 252697 - RNA, 19 nt, Artificial Sequence
  Description of Artificial Sequence: Synthetic oligonucleotide
  Antisense strand to SEQ ID NO: 252696
uuagaagaaacugagaucc

SEQ ID NO: 252698 - RNA, 19 nt, Artificial Sequence
  Description of Artificial Sequence: Synthetic oligonucleotide
  Sense strand starting at position 225 SEQ ID NO: 3252
uucuaaucuguaugauaag

SEQ ID NO: 252699 - RNA, 19 nt, Artificial Sequence
  Description of Artificial Sequence: Synthetic oligonucleotide
  Antisense strand to SEQ ID NO: 252698
cuuaucauacagauuagaa

SEQ ID NO: 252700 - RNA, 19 nt, Artificial Sequence
  Description of Artificial Sequence: Synthetic oligonucleotide
  Sense strand starting at position 337 SEQ ID NO: 3252
aggccuguugcauggauuu

SEQ ID NO: 252701 - RNA, 19 nt, Artificial Sequence
  Description of Artificial Sequence: Synthetic oligonucleotide
  Antisense strand to SEQ ID NO: 252700
aaauccaugcaacaggccu

SEQ ID NO: 252702 - RNA, 19 nt, Artificial Sequence
  Description of Artificial Sequence: Synthetic oligonucleotide
  Sense strand starting at position 339 SEQ ID NO: 3252
gccuguugcauggauuugu

SEQ ID NO: 252703 - RNA, 19 nt, Artificial Sequence
  Description of Artificial Sequence: Synthetic oligonucleotide
  Antisense strand to SEQ ID NO: 252702
acaaauccaugcaacaggc

SEQ ID NO: 252704 - RNA, 19 nt, Artificial Sequence
  Description of Artificial Sequence: Synthetic oligonucleotide
  Sense strand starting at position 343 SEQ ID NO: 3252
guugcauggauuuguggau

SEQ ID NO: 252705 - RNA, 19 nt, Artificial Sequence
  Description of Artificial Sequence: Synthetic oligonucleotide
  Antisense strand to SEQ ID NO: 252704
auccacaaauccaugcaac

SEQ ID NO: 252706 - RNA, 19 nt, Artificial Sequence
  Description of Artificial Sequence: Synthetic oligonucleotide
  Sense strand starting at position 488 SEQ ID NO: 3252
ccagaaggccuuuaacuuu

SEQ ID NO: 252707 - RNA, 19 nt, Artificial Sequence
  Description of Artificial Sequence: Synthetic oligonucleotide
  Antisense strand to SEQ ID NO: 252706
aaaguuaaaggccuucugg

SEQ ID NO: 252708 - RNA, 19 nt, Artificial Sequence
  Description of Artificial Sequence: Synthetic oligonucleotide
  Sense strand starting at position 539 SEQ ID NO: 3252
gugagucuccucuaugaaa

SEQ ID NO: 252709 - RNA, 19 nt, Artificial Sequence
  Description of Artificial Sequence: Synthetic oligonucleotide
  Antisense strand to SEQ ID NO: 252708
uuucauagaggagacucac

SEQ ID NO: 252710 - RNA, 19 nt, Artificial Sequence
  Description of Artificial Sequence: Synthetic oligonucleotide
  Sense strand starting at position 879 SEQ ID NO: 3252
acugauuaguagucaccua

SEQ ID NO: 252711 - RNA, 19 nt, Artificial Sequence
  Description of Artificial Sequence: Synthetic oligonucleotide
  Antisense strand to SEQ ID NO: 252710
uaggugacuacuaaucagu

SEQ ID NO: 252712 - RNA, 19 nt, Artificial Sequence
  Description of Artificial Sequence: Synthetic oligonucleotide
  Sense strand starting at position 1182 SEQ ID NO: 3252
gggccuuugguccauuaga

SEQ ID NO: 252713 - RNA, 19 nt, Artificial Sequence
  Description of Artificial Sequence: Synthetic oligonucleotide
  Antisense strand to SEQ ID NO: 252712
ucuaauggaccaaaggccc

SEQ ID NO: 252714 - RNA, 19 nt, Artificial Sequence
  Description of Artificial Sequence: Synthetic oligonucleotide
  Sense strand starting at position 1192 SEQ ID NO: 3252
uccauuagaccaugagacu

SEQ ID NO: 252715 - RNA, 19 nt, Artificial Sequence
  Description of Artificial Sequence: Synthetic oligonucleotide
  Antisense strand to SEQ ID NO: 252714
agucucauggucuaaugga

SEQ ID NO: 252716 - RNA, 19 nt, Artificial Sequence
  Description of Artificial Sequence: Synthetic oligonucleotide
  Sense strand starting at position 1243 SEQ ID NO: 3252
gcggcuugugugcucacua

SEQ ID NO: 252717 - RNA, 19 nt, Artificial Sequence
  Description of Artificial Sequence: Synthetic oligonucleotide
  Antisense strand to SEQ ID NO: 252716
uagugagcacacaagccgc

SEQ ID NO: 252718 - RNA, 19 nt, Artificial Sequence
  Description of Artificial Sequence: Synthetic oligonucleotide
  Sense strand starting at position 1397 SEQ ID NO: 3252
cucaaaggccuguaagacu

SEQ ID NO: 252719 - RNA, 19 nt, Artificial Sequence
  Description of Artificial Sequence: Synthetic oligonucleotide
  Antisense strand to SEQ ID NO: 252718
agucuuacaggccuuugag

SEQ ID NO: 252720 - RNA, 19 nt, Artificial Sequence
  Description of Artificial Sequence: Synthetic oligonucleotide
  Sense strand starting at position 1408 SEQ ID NO: 3252
guaagacuucucuggcaga

SEQ ID NO: 252721 - RNA, 19 nt, Artificial Sequence
  Description of Artificial Sequence: Synthetic oligonucleotide
  Antisense strand to SEQ ID NO: 252720
ucugccagagaagucuuac

SEQ ID NO: 252722 - RNA, 19 nt, Artificial Sequence
  Description of Artificial Sequence: Synthetic oligonucleotide
  Sense strand starting at position 1502 SEQ ID NO: 3252
gagguuccugaauaguucu

SEQ ID NO: 252723 - RNA, 19 nt, Artificial Sequence
  Description of Artificial Sequence: Synthetic oligonucleotide
  Antisense strand to SEQ ID NO: 252722
agaacuauucaggaaccuc

SEQ ID NO: 252724 - RNA, 19 nt, Artificial Sequence
  Description of Artificial Sequence: Synthetic oligonucleotide
  Sense strand starting at position 1609 SEQ ID NO: 3252
ggguucucaucacccuaaa

SEQ ID NO: 252725 - RNA, 19 nt, Artificial Sequence
  Description of Artificial Sequence: Synthetic oligonucleotide
  Antisense strand to SEQ ID NO: 252724
uuuagggugaugagaaccc

SEQ ID NO: 252726 - RNA, 19 nt, Artificial Sequence
  Description of Artificial Sequence: Synthetic oligonucleotide
  Sense strand starting at position 1636 SEQ ID NO: 3252
gaaauuugauagggcaaag

SEQ ID NO: 252727 - RNA, 19 nt, Artificial Sequence
  Description of Artificial Sequence: Synthetic oligonucleotide
  Antisense strand to SEQ ID NO: 252726
cuuugcccuaucaaauuuc

SEQ ID NO: 252728 - RNA, 19 nt, Artificial Sequence
  Description of Artificial Sequence: Synthetic oligonucleotide
  Sense strand starting at position 2197 SEQ ID NO: 3252
gagauuuaauggcaaaugu

SEQ ID NO: 252729 - RNA, 19 nt, Artificial Sequence
  Description of Artificial Sequence: Synthetic oligonucleotide
  Antisense strand to SEQ ID NO: 252728
acauuugccauuaaaucuc

SEQ ID NO: 252730 - RNA, 19 nt, Artificial Sequence
  Description of Artificial Sequence: Synthetic oligonucleotide
  Sense strand starting at position 2232 SEQ ID NO: 3252
ggaguucugaauugaguga

SEQ ID NO: 252731 - RNA, 19 nt, Artificial Sequence
  Description of Artificial Sequence: Synthetic oligonucleotide
  Antisense strand to SEQ ID NO: 252730
ucacucaauucagaacucc

SEQ ID NO: 252732 - RNA, 19 nt, Artificial Sequence
  Description of Artificial Sequence: Synthetic oligonucleotide
  Sense strand starting at position 2236 SEQ ID NO: 3252
uucugaauugagugaguug

SEQ ID NO: 252733 - RNA, 19 nt, Artificial Sequence
  Description of Artificial Sequence: Synthetic oligonucleotide
  Antisense strand to SEQ ID NO: 252732
caacucacucaauucagaa

SEQ ID NO: 252734 - RNA, 19 nt, Artificial Sequence
  Description of Artificial Sequence: Synthetic oligonucleotide
  Sense strand starting at position 2237 SEQ ID NO: 3252
ucugaauugagugaguugu

SEQ ID NO: 252735 - RNA, 19 nt, Artificial Sequence
  Description of Artificial Sequence: Synthetic oligonucleotide
  Antisense strand to SEQ ID NO: 252734
acaacucacucaauucaga

SEQ ID NO: 252736 - RNA, 19 nt, Artificial Sequence
  Description of Artificial Sequence: Synthetic oligonucleotide
  Sense strand starting at position 2239 SEQ ID NO: 3252
ugaauugagugaguuguga

SEQ ID NO: 252737 - RNA, 19 nt, Artificial Sequence
  Description of Artificial Sequence: Synthetic oligonucleotide
  Antisense strand to SEQ ID NO: 252736
ucacaacucacucaauuca

SEQ ID NO: 252738 - RNA, 19 nt, Artificial Sequence
  Description of Artificial Sequence: Synthetic oligonucleotide
  Sense strand starting at position 2308 SEQ ID NO: 3252
ucgcuauacccacaucaga

SEQ ID NO: 252739 - RNA, 19 nt, Artificial Sequence
  Description of Artificial Sequence: Synthetic oligonucleotide
  Antisense strand to SEQ ID NO: 252738
ucugauguggguauagcga

SEQ ID NO: 252740 - RNA, 19 nt, Artificial Sequence
  Description of Artificial Sequence: Synthetic oligonucleotide
  Sense strand starting at position 2451 SEQ ID NO: 3252
cccaguaauuucucuuggu

SEQ ID NO: 252741 - RNA, 19 nt, Artificial Sequence
  Description of Artificial Sequence: Synthetic oligonucleotide
  Antisense strand to SEQ ID NO: 252740
accaagagaaauuacuggg

SEQ ID NO: 252742 - RNA, 19 nt, Artificial Sequence
  Description of Artificial Sequence: Synthetic oligonucleotide
  Sense strand starting at position 2455 SEQ ID NO: 3252
guaauuucucuugguggua

SEQ ID NO: 252743 - RNA, 19 nt, Artificial Sequence
  Description of Artificial Sequence: Synthetic oligonucleotide
  Antisense strand to SEQ ID NO: 252742
uaccaccaagagaaauuac

SEQ ID NO: 252744 - RNA, 19 nt, Artificial Sequence
  Description of Artificial Sequence: Synthetic oligonucleotide
  Sense strand starting at position 2470 SEQ ID NO: 3252
gguaaaugcuuucuuauuu

SEQ ID NO: 252745 - RNA, 19 nt, Artificial Sequence
  Description of Artificial Sequence: Synthetic oligonucleotide
  Antisense strand to SEQ ID NO: 252744
aaauaagaaagcauuuacc

SEQ ID NO: 252746 - RNA, 19 nt, Artificial Sequence
  Description of Artificial Sequence: Synthetic oligonucleotide
  Sense strand starting at position 2515 SEQ ID NO: 3252
guaucucuucuauagauug

SEQ ID NO: 252747 - RNA, 19 nt, Artificial Sequence
  Description of Artificial Sequence: Synthetic oligonucleotide
  Antisense strand to SEQ ID NO: 252746
caaucuauagaagagauac

SEQ ID NO: 252748 - RNA, 19 nt, Artificial Sequence
  Description of Artificial Sequence: Synthetic oligonucleotide
  Sense strand starting at position 2597 SEQ ID NO: 3252
guaaguccucaguaaagau

SEQ ID NO: 252749 - RNA, 19 nt, Artificial Sequence
  Description of Artificial Sequence: Synthetic oligonucleotide
  Antisense strand to SEQ ID NO: 252748
aucuuuacugaggacuuac

SEQ ID NO: 252750 - RNA, 19 nt, Artificial Sequence
  Description of Artificial Sequence: Synthetic oligonucleotide
  Sense strand starting at position 2679 SEQ ID NO: 3252
uaggcuagaccuuguaaca

SEQ ID NO: 252751 - RNA, 19 nt, Artificial Sequence
  Description of Artificial Sequence: Synthetic oligonucleotide
  Antisense strand to SEQ ID NO: 252750
uguuacaaggucuagccua

SEQ ID NO: 252752 - RNA, 19 nt, Artificial Sequence
  Description of Artificial Sequence: Synthetic oligonucleotide
  Sense strand starting at position 2718 SEQ ID NO: 3252
guuuaagcuccacauugaa

SEQ ID NO: 252753 - RNA, 19 nt, Artificial Sequence
  Description of Artificial Sequence: Synthetic oligonucleotide
  Antisense strand to SEQ ID NO: 252752
uucaauguggagcuuaaac

SEQ ID NO: 252754 - RNA, 19 nt, Artificial Sequence
  Description of Artificial Sequence: Synthetic oligonucleotide
  Sense strand starting at position 2964 SEQ ID NO: 3252
caaggauucuguuuggauu

SEQ ID NO: 252755 - RNA, 19 nt, Artificial Sequence
  Description of Artificial Sequence: Synthetic oligonucleotide
  Antisense strand to SEQ ID NO: 252754
aauccaaacagaauccuug

SEQ ID NO: 252756 - RNA, 19 nt, Artificial Sequence
  Description of Artificial Sequence: Synthetic oligonucleotide
  Sense strand starting at position 2965 SEQ ID NO: 3252
aaggauucuguuuggauuc

SEQ ID NO: 252757 - RNA, 19 nt, Artificial Sequence
  Description of Artificial Sequence: Synthetic oligonucleotide
  Antisense strand to SEQ ID NO: 252756
gaauccaaacagaauccuu

SEQ ID NO: 252758 - RNA, 19 nt, Artificial Sequence
  Description of Artificial Sequence: Synthetic oligonucleotide
  Sense strand starting at position 3037 SEQ ID NO: 3252
auuuaaggcuuugaagaga

SEQ ID NO: 252759 - RNA, 19 nt, Artificial Sequence
  Description of Artificial Sequence: Synthetic oligonucleotide
  Antisense strand to SEQ ID NO: 252758
ucucuucaaagccuuaaau

SEQ ID NO: 252760 - RNA, 19 nt, Artificial Sequence
  Description of Artificial Sequence: Synthetic oligonucleotide
  Sense strand starting at position 3054 SEQ ID NO: 3252
gaggaaauauaagaauaga

SEQ ID NO: 252761 - RNA, 19 nt, Artificial Sequence
  Description of Artificial Sequence: Synthetic oligonucleotide
  Antisense strand to SEQ ID NO: 252760
ucuauucuuauauuuccuc

SEQ ID NO: 252762 - RNA, 19 nt, Artificial Sequence
  Description of Artificial Sequence: Synthetic oligonucleotide
  Sense strand starting at position 3144 SEQ ID NO: 3252
gaggguagauuauuauuau

SEQ ID NO: 252763 - RNA, 19 nt, Artificial Sequence
  Description of Artificial Sequence: Synthetic oligonucleotide
  Antisense strand to SEQ ID NO: 252762
auaauaauaaucuacccuc

SEQ ID NO: 252764 - RNA, 19 nt, Artificial Sequence
  Description of Artificial Sequence: Synthetic oligonucleotide
  Sense strand starting at position 3419 SEQ ID NO: 3252
aguaguuguggccauaaca

SEQ ID NO: 252765 - RNA, 19 nt, Artificial Sequence
  Description of Artificial Sequence: Synthetic oligonucleotide
  Antisense strand to SEQ ID NO: 252764
uguuauggccacaacuacu

SEQ ID NO: 252766 - RNA, 19 nt, Artificial Sequence
  Description of Artificial Sequence: Synthetic oligonucleotide
  Sense strand starting at position 3515 SEQ ID NO: 3252
aucaacagagcaugucaua

SEQ ID NO: 252767 - RNA, 19 nt, Artificial Sequence
  Description of Artificial Sequence: Synthetic oligonucleotide
  Antisense strand to SEQ ID NO: 252766
uaugacaugcucuguugau

SEQ ID NO: 252768 - RNA, 19 nt, Artificial Sequence
  Description of Artificial Sequence: Synthetic oligonucleotide
  Sense strand starting at position 3563 SEQ ID NO: 3252
gugucuguugaauaauaga

SEQ ID NO: 252769 - RNA, 19 nt, Artificial Sequence
  Description of Artificial Sequence: Synthetic oligonucleotide
  Antisense strand to SEQ ID NO: 252768
ucuauuauucaacagacac

SEQ ID NO: 252770 - RNA, 19 nt, Artificial Sequence
  Description of Artificial Sequence: Synthetic oligonucleotide
  Sense strand starting at position 3608 SEQ ID NO: 3252
guagaugcucaguaaacua

SEQ ID NO: 252771 - RNA, 19 nt, Artificial Sequence
  Description of Artificial Sequence: Synthetic oligonucleotide
  Antisense strand to SEQ ID NO: 252770
uaguuuacugagcaucuac

SEQ ID NO: 252772 - RNA, 19 nt, Artificial Sequence
  Description of Artificial Sequence: Synthetic oligonucleotide
  Sense strand starting at position 3671 SEQ ID NO: 3252
gcuggaucuaucuggauau

SEQ ID NO: 252773 - RNA, 19 nt, Artificial Sequence
  Description of Artificial Sequence: Synthetic oligonucleotide
  Antisense strand to SEQ ID NO: 252772
auauccagauagauccagc

SEQ ID NO: 252774 - RNA, 19 nt, Artificial Sequence
  Description of Artificial Sequence: Synthetic oligonucleotide
  Sense strand starting at position 3697 SEQ ID NO: 3252
guaauuauacaugacgacu

SEQ ID NO: 252775 - RNA, 19 nt, Artificial Sequence
  Description of Artificial Sequence: Synthetic oligonucleotide
  Antisense strand to SEQ ID NO: 252774
agucgucauguauaauuac

SEQ ID NO: 252776 - RNA, 19 nt, Artificial Sequence
  Description of Artificial Sequence: Synthetic oligonucleotide
  Sense strand starting at position 94 SEQ ID NO: 3254
cauguaugaugguuacgga

SEQ ID NO: 252777 - RNA, 19 nt, Artificial Sequence
  Description of Artificial Sequence: Synthetic oligonucleotide
  Antisense strand to SEQ ID NO: 252776
uccguaaccaucauacaug

SEQ ID NO: 252778 - RNA, 19 nt, Artificial Sequence
  Description of Artificial Sequence: Synthetic oligonucleotide
  Sense strand starting at position 95 SEQ ID NO: 3254
auguaugaugguuacggau

SEQ ID NO: 252779 - RNA, 19 nt, Artificial Sequence
  Description of Artificial Sequence: Synthetic oligonucleotide
  Antisense strand to SEQ ID NO: 252778
auccguaaccaucauacau

SEQ ID NO: 252780 - RNA, 19 nt, Artificial Sequence
  Description of Artificial Sequence: Synthetic oligonucleotide
  Sense strand starting at position 101 SEQ ID NO: 3254
gaugguuacggaugcacaa

SEQ ID NO: 252781 - RNA, 19 nt, Artificial Sequence
  Description of Artificial Sequence: Synthetic oligonucleotide
  Antisense strand to SEQ ID NO: 252780
uugugcauccguaaccauc

SEQ ID NO: 252782 - RNA, 19 nt, Artificial Sequence
  Description of Artificial Sequence: Synthetic oligonucleotide
  Sense strand starting at position 114 SEQ ID NO: 3254
gcacaauaauuugaaugaa

SEQ ID NO: 252783 - RNA, 19 nt, Artificial Sequence
  Description of Artificial Sequence: Synthetic oligonucleotide
  Antisense strand to SEQ ID NO: 252782
uucauucaaauuauugugc

SEQ ID NO: 252784 - RNA, 19 nt, Artificial Sequence
  Description of Artificial Sequence: Synthetic oligonucleotide
  Sense strand starting at position 264 SEQ ID NO: 3254
cuacauauccguuauucuu

SEQ ID NO: 252785 - RNA, 19 nt, Artificial Sequence
  Description of Artificial Sequence: Synthetic oligonucleotide
  Antisense strand to SEQ ID NO: 252784
aagaauaacggauauguag

SEQ ID NO: 252786 - RNA, 19 nt, Artificial Sequence
  Description of Artificial Sequence: Synthetic oligonucleotide
  Sense strand starting at position 379 SEQ ID NO: 3254
aucaaaucuugagcuuuga

SEQ ID NO: 252787 - RNA, 19 nt, Artificial Sequence
  Description of Artificial Sequence: Synthetic oligonucleotide
  Antisense strand to SEQ ID NO: 252786
ucaaagcucaagauuugau

SEQ ID NO: 252788 - RNA, 19 nt, Artificial Sequence
  Description of Artificial Sequence: Synthetic oligonucleotide
  Sense strand starting at position 427 SEQ ID NO: 3254
aggcgugcacuucuguaau

SEQ ID NO: 252789 - RNA, 19 nt, Artificial Sequence
  Description of Artificial Sequence: Synthetic oligonucleotide
  Antisense strand to SEQ ID NO: 252788
auuacagaagugcacgccu

SEQ ID NO: 252790 - RNA, 19 nt, Artificial Sequence
  Description of Artificial Sequence: Synthetic oligonucleotide
  Sense strand starting at position 430 SEQ ID NO: 3254
cgugcacuucuguaauaga

SEQ ID NO: 252791 - RNA, 19 nt, Artificial Sequence
  Description of Artificial Sequence: Synthetic oligonucleotide
  Antisense strand to SEQ ID NO: 252790
ucuauuacagaagugcacg

SEQ ID NO: 252792 - RNA, 19 nt, Artificial Sequence
  Description of Artificial Sequence: Synthetic oligonucleotide
  Sense strand starting at position 435 SEQ ID NO: 3254
acuucuguaauagagcgau

SEQ ID NO: 252793 - RNA, 19 nt, Artificial Sequence
  Description of Artificial Sequence: Synthetic oligonucleotide
  Antisense strand to SEQ ID NO: 252792
aucgcucuauuacagaagu

SEQ ID NO: 252794 - RNA, 19 nt, Artificial Sequence
  Description of Artificial Sequence: Synthetic oligonucleotide
  Sense strand starting at position 438 SEQ ID NO: 3254
ucuguaauagagcgaugag

SEQ ID NO: 252795 - RNA, 19 nt, Artificial Sequence
  Description of Artificial Sequence: Synthetic oligonucleotide
  Antisense strand to SEQ ID NO: 252794
cucaucgcucuauuacaga

SEQ ID NO: 252796 - RNA, 19 nt, Artificial Sequence
  Description of Artificial Sequence: Synthetic oligonucleotide
  Sense strand starting at position 447 SEQ ID NO: 3254
gagcgaugagcugaauuaa

SEQ ID NO: 252797 - RNA, 19 nt, Artificial Sequence
  Description of Artificial Sequence: Synthetic oligonucleotide
  Antisense strand to SEQ ID NO: 252796
uuaauucagcucaucgcuc

SEQ ID NO: 252798 - RNA, 19 nt, Artificial Sequence
  Description of Artificial Sequence: Synthetic oligonucleotide
  Sense strand starting at position 531 SEQ ID NO: 3254
ccuguauugccggacacuu

SEQ ID NO: 252799 - RNA, 19 nt, Artificial Sequence
  Description of Artificial Sequence: Synthetic oligonucleotide
  Antisense strand to SEQ ID NO: 252798
aaguguccggcaauacagg

SEQ ID NO: 252800 - RNA, 19 nt, Artificial Sequence
  Description of Artificial Sequence: Synthetic oligonucleotide
  Sense strand starting at position 539 SEQ ID NO: 3254
gccggacacuuccuugaaa

SEQ ID NO: 252801 - RNA, 19 nt, Artificial Sequence
  Description of Artificial Sequence: Synthetic oligonucleotide
  Antisense strand to SEQ ID NO: 252800
uuucaaggaaguguccggc

SEQ ID NO: 252802 - RNA, 19 nt, Artificial Sequence
  Description of Artificial Sequence: Synthetic oligonucleotide
  Sense strand starting at position 541 SEQ ID NO: 3254
cggacacuuccuugaaacu

SEQ ID NO: 252803 - RNA, 19 nt, Artificial Sequence
  Description of Artificial Sequence: Synthetic oligonucleotide
  Antisense strand to SEQ ID NO: 252802
aguuucaaggaaguguccg

SEQ ID NO: 252804 - RNA, 19 nt, Artificial Sequence
  Description of Artificial Sequence: Synthetic oligonucleotide
  Sense strand starting at position 714 SEQ ID NO: 3254
aaucaauagcgaugguaac

SEQ ID NO: 252805 - RNA, 19 nt, Artificial Sequence
  Description of Artificial Sequence: Synthetic oligonucleotide
  Antisense strand to SEQ ID NO: 252804
guuaccaucgcuauugauu

SEQ ID NO: 252806 - RNA, 19 nt, Artificial Sequence
  Description of Artificial Sequence: Synthetic oligonucleotide
  Sense strand starting at position 724 SEQ ID NO: 3254
gaugguaacgaauguuauu

SEQ ID NO: 252807 - RNA, 19 nt, Artificial Sequence
  Description of Artificial Sequence: Synthetic oligonucleotide
  Antisense strand to SEQ ID NO: 252806
aauaacauucguuaccauc

SEQ ID NO: 252808 - RNA, 19 nt, Artificial Sequence
  Description of Artificial Sequence: Synthetic oligonucleotide
  Sense strand starting at position 735 SEQ ID NO: 3254
auguuauucggcgcuauua

SEQ ID NO: 252809 - RNA, 19 nt, Artificial Sequence
  Description of Artificial Sequence: Synthetic oligonucleotide
  Antisense strand to SEQ ID NO: 252808
uaauagcgccgaauaacau

SEQ ID NO: 252810 - RNA, 19 nt, Artificial Sequence
  Description of Artificial Sequence: Synthetic oligonucleotide
  Sense strand starting at position 736 SEQ ID NO: 3254
uguuauucggcgcuauuaa

SEQ ID NO: 252811 - RNA, 19 nt, Artificial Sequence
  Description of Artificial Sequence: Synthetic oligonucleotide
  Antisense strand to SEQ ID NO: 252810
uuaauagcgccgaauaaca

SEQ ID NO: 252812 - RNA, 19 nt, Artificial Sequence
  Description of Artificial Sequence: Synthetic oligonucleotide
  Sense strand starting at position 807 SEQ ID NO: 3254
acgacaaauauaugguguu

SEQ ID NO: 252813 - RNA, 19 nt, Artificial Sequence
  Description of Artificial Sequence: Synthetic oligonucleotide
  Antisense strand to SEQ ID NO: 252812
aacaccauauauuugucgu

SEQ ID NO: 252814 - RNA, 19 nt, Artificial Sequence
  Description of Artificial Sequence: Synthetic oligonucleotide
  Sense strand starting at position 820 SEQ ID NO: 3254
gguguuacaauggguaaca

SEQ ID NO: 252815 - RNA, 19 nt, Artificial Sequence
  Description of Artificial Sequence: Synthetic oligonucleotide
  Antisense strand to SEQ ID NO: 252814
uguuacccauuguaacacc

SEQ ID NO: 252816 - RNA, 19 nt, Artificial Sequence
  Description of Artificial Sequence: Synthetic oligonucleotide
  Sense strand starting at position 1101 SEQ ID NO: 3254
acuacacaucuguguaaga

SEQ ID NO: 252817 - RNA, 19 nt, Artificial Sequence
  Description of Artificial Sequence: Synthetic oligonucleotide
  Antisense strand to SEQ ID NO: 252816
ucuuacacagauguguagu

SEQ ID NO: 252818 - RNA, 19 nt, Artificial Sequence
  Description of Artificial Sequence: Synthetic oligonucleotide
  Sense strand starting at position 1102 SEQ ID NO: 3254
cuacacaucuguguaagau

SEQ ID NO: 252819 - RNA, 19 nt, Artificial Sequence
  Description of Artificial Sequence: Synthetic oligonucleotide
  Antisense strand to SEQ ID NO: 252818
aucuuacacagauguguag

SEQ ID NO: 252820 - RNA, 19 nt, Artificial Sequence
  Description of Artificial Sequence: Synthetic oligonucleotide
  Sense strand starting at position 1181 SEQ ID NO: 3254
cguaguugucucuacuaag

SEQ ID NO: 252821 - RNA, 19 nt, Artificial Sequence
  Description of Artificial Sequence: Synthetic oligonucleotide
  Antisense strand to SEQ ID NO: 252820
cuuaguagagacaacuacg

SEQ ID NO: 252822 - RNA, 19 nt, Artificial Sequence
  Description of Artificial Sequence: Synthetic oligonucleotide
  Sense strand starting at position 1287 SEQ ID NO: 3254
aaaugugguauguacguua

SEQ ID NO: 252823 - RNA, 19 nt, Artificial Sequence
  Description of Artificial Sequence: Synthetic oligonucleotide
  Antisense strand to SEQ ID NO: 252822
uaacguacauaccacauuu

SEQ ID NO: 252824 - RNA, 19 nt, Artificial Sequence
  Description of Artificial Sequence: Synthetic oligonucleotide
  Sense strand starting at position 1292 SEQ ID NO: 3254
ugguauguacguuaacaua

SEQ ID NO: 252825 - RNA, 19 nt, Artificial Sequence
  Description of Artificial Sequence: Synthetic oligonucleotide
  Antisense strand to SEQ ID NO: 252824
uauguuaacguacauacca

SEQ ID NO: 252826 - RNA, 19 nt, Artificial Sequence
  Description of Artificial Sequence: Synthetic oligonucleotide
  Sense strand starting at position 1365 SEQ ID NO: 3254
uaguacagucuauggagau

SEQ ID NO: 252827 - RNA, 19 nt, Artificial Sequence
  Description of Artificial Sequence: Synthetic oligonucleotide
  Antisense strand to SEQ ID NO: 252826
aucuccauagacuguacua

SEQ ID NO: 252828 - RNA, 19 nt, Artificial Sequence
  Description of Artificial Sequence: Synthetic oligonucleotide
  Sense strand starting at position 1450 SEQ ID NO: 3254
ucccuacugcuagaagaua

SEQ ID NO: 252829 - RNA, 19 nt, Artificial Sequence
  Description of Artificial Sequence: Synthetic oligonucleotide
  Antisense strand to SEQ ID NO: 252828
uaucuucuagcaguaggga

SEQ ID NO: 252830 - RNA, 19 nt, Artificial Sequence
  Description of Artificial Sequence: Synthetic oligonucleotide
  Sense strand starting at position 1468 SEQ ID NO: 3254
aaaugauuagcucggcaaa

SEQ ID NO: 252831 - RNA, 19 nt, Artificial Sequence
  Description of Artificial Sequence: Synthetic oligonucleotide
  Antisense strand to SEQ ID NO: 252830
uuugccgagcuaaucauuu

SEQ ID NO: 252832 - RNA, 19 nt, Artificial Sequence
  Description of Artificial Sequence: Synthetic oligonucleotide
  Sense strand starting at position 1469 SEQ ID NO: 3254
aaugauuagcucggcaaau

SEQ ID NO: 252833 - RNA, 19 nt, Artificial Sequence
  Description of Artificial Sequence: Synthetic oligonucleotide
  Antisense strand to SEQ ID NO: 252832
auuugccgagcuaaucauu

SEQ ID NO: 252834 - RNA, 19 nt, Artificial Sequence
  Description of Artificial Sequence: Synthetic oligonucleotide
  Sense strand starting at position 1470 SEQ ID NO: 3254
augauuagcucggcaaaua

SEQ ID NO: 252835 - RNA, 19 nt, Artificial Sequence
  Description of Artificial Sequence: Synthetic oligonucleotide
  Antisense strand to SEQ ID NO: 252834
uauuugccgagcuaaucau

SEQ ID NO: 252836 - RNA, 19 nt, Artificial Sequence
  Description of Artificial Sequence: Synthetic oligonucleotide
  Sense strand starting at position 1471 SEQ ID NO: 3254
ugauuagcucggcaaauac

SEQ ID NO: 252837 - RNA, 19 nt, Artificial Sequence
  Description of Artificial Sequence: Synthetic oligonucleotide
  Antisense strand to SEQ ID NO: 252836
guauuugccgagcuaauca

SEQ ID NO: 252838 - RNA, 19 nt, Artificial Sequence
  Description of Artificial Sequence: Synthetic oligonucleotide
  Sense strand starting at position 1488 SEQ ID NO: 3254
acugauuugucuuauggaa

SEQ ID NO: 252839 - RNA, 19 nt, Artificial Sequence
  Description of Artificial Sequence: Synthetic oligonucleotide
  Antisense strand to SEQ ID NO: 252838
uuccauaagacaaaucagu

SEQ ID NO: 252840 - RNA, 19 nt, Artificial Sequence
  Description of Artificial Sequence: Synthetic oligonucleotide
  Sense strand starting at position 2237 SEQ ID NO: 3254
ggccgaguucccuacaaca

SEQ ID NO: 252841 - RNA, 19 nt, Artificial Sequence
  Description of Artificial Sequence: Synthetic oligonucleotide
  Antisense strand to SEQ ID NO: 252840
uguuguagggaacucggcc

SEQ ID NO: 252842 - RNA, 19 nt, Artificial Sequence
  Description of Artificial Sequence: Synthetic oligonucleotide
  Sense strand starting at position 2239 SEQ ID NO: 3254
ccgaguucccuacaacaag

SEQ ID NO: 252843 - RNA, 19 nt, Artificial Sequence
  Description of Artificial Sequence: Synthetic oligonucleotide
  Antisense strand to SEQ ID NO: 252842
cuuguuguagggaacucgg

SEQ ID NO: 252844 - RNA, 19 nt, Artificial Sequence
  Description of Artificial Sequence: Synthetic oligonucleotide
  Sense strand starting at position 2541 SEQ ID NO: 3254
aguuaaccuuucuuggaga

SEQ ID NO: 252845 - RNA, 19 nt, Artificial Sequence
  Description of Artificial Sequence: Synthetic oligonucleotide
  Antisense strand to SEQ ID NO: 252844
ucuccaagaaagguuaacu

SEQ ID NO: 252846 - RNA, 19 nt, Artificial Sequence
  Description of Artificial Sequence: Synthetic oligonucleotide
  Sense strand starting at position 2543 SEQ ID NO: 3254
uuaaccuuucuuggagagu

SEQ ID NO: 252847 - RNA, 19 nt, Artificial Sequence
  Description of Artificial Sequence: Synthetic oligonucleotide
  Antisense strand to SEQ ID NO: 252846
acucuccaagaaagguuaa

SEQ ID NO: 252848 - RNA, 19 nt, Artificial Sequence
  Description of Artificial Sequence: Synthetic oligonucleotide
  Sense strand starting at position 3001 SEQ ID NO: 3254
gggcauaaaugaucucucu

SEQ ID NO: 252849 - RNA, 19 nt, Artificial Sequence
  Description of Artificial Sequence: Synthetic oligonucleotide
  Antisense strand to SEQ ID NO: 252848
agagagaucauuuaugccc

SEQ ID NO: 252850 - RNA, 19 nt, Artificial Sequence
  Description of Artificial Sequence: Synthetic oligonucleotide
  Sense strand starting at position 3020 SEQ ID NO: 3254
caggauaccugauucugua

SEQ ID NO: 252851 - RNA, 19 nt, Artificial Sequence
  Description of Artificial Sequence: Synthetic oligonucleotide
  Antisense strand to SEQ ID NO: 252850
uacagaaucagguauccug

SEQ ID NO: 252852 - RNA, 19 nt, Artificial Sequence
  Description of Artificial Sequence: Synthetic oligonucleotide
  Sense strand starting at position 3124 SEQ ID NO: 3254
auguccucacaugaaagua

SEQ ID NO: 252853 - RNA, 19 nt, Artificial Sequence
  Description of Artificial Sequence: Synthetic oligonucleotide
  Antisense strand to SEQ ID NO: 252852
uacuuucaugugaggacau

SEQ ID NO: 252854 - RNA, 19 nt, Artificial Sequence
  Description of Artificial Sequence: Synthetic oligonucleotide
  Sense strand starting at position 3251 SEQ ID NO: 3254
uaagguuggaguggugaga

SEQ ID NO: 252855 - RNA, 19 nt, Artificial Sequence
  Description of Artificial Sequence: Synthetic oligonucleotide
  Antisense strand to SEQ ID NO: 252854
ucucaccacuccaaccuua

SEQ ID NO: 252856 - RNA, 19 nt, Artificial Sequence
  Description of Artificial Sequence: Synthetic oligonucleotide
  Sense strand starting at position 16 SEQ ID NO: 3258
ccugauuauguaugugaau

SEQ ID NO: 252857 - RNA, 19 nt, Artificial Sequence
  Description of Artificial Sequence: Synthetic oligonucleotide
  Antisense strand to SEQ ID NO: 252856
auucacauacauaaucagg

SEQ ID NO: 252858 - RNA, 19 nt, Artificial Sequence
  Description of Artificial Sequence: Synthetic oligonucleotide
  Sense strand starting at position 17 SEQ ID NO: 3258
cugauuauguaugugaaug

SEQ ID NO: 252859 - RNA, 19 nt, Artificial Sequence
  Description of Artificial Sequence: Synthetic oligonucleotide
  Antisense strand to SEQ ID NO: 252858
cauucacauacauaaucag

SEQ ID NO: 252860 - RNA, 19 nt, Artificial Sequence
  Description of Artificial Sequence: Synthetic oligonucleotide
  Sense strand starting at position 95 SEQ ID NO: 3258
acaugcaaucgguaucacu

SEQ ID NO: 252861 - RNA, 19 nt, Artificial Sequence
  Description of Artificial Sequence: Synthetic oligonucleotide
  Antisense strand to SEQ ID NO: 252860
agugauaccgauugcaugu

SEQ ID NO: 252862 - RNA, 19 nt, Artificial Sequence
  Description of Artificial Sequence: Synthetic oligonucleotide
  Sense strand starting at position 114 SEQ ID NO: 3258
cuuaauguucuugaagguu

SEQ ID NO: 252863 - RNA, 19 nt, Artificial Sequence
  Description of Artificial Sequence: Synthetic oligonucleotide
  Antisense strand to SEQ ID NO: 252862
aaccuucaagaacauuaag

SEQ ID NO: 252864 - RNA, 19 nt, Artificial Sequence
  Description of Artificial Sequence: Synthetic oligonucleotide
  Sense strand starting at position 123 SEQ ID NO: 3258
cuugaagguuaacuguaaa

SEQ ID NO: 252865 - RNA, 19 nt, Artificial Sequence
  Description of Artificial Sequence: Synthetic oligonucleotide
  Antisense strand to SEQ ID NO: 252864
uuuacaguuaaccuucaag

SEQ ID NO: 252866 - RNA, 19 nt, Artificial Sequence
  Description of Artificial Sequence: Synthetic oligonucleotide
  Sense strand starting at position 163 SEQ ID NO: 3258
uuuaaaucucuaggaaguc

SEQ ID NO: 252867 - RNA, 19 nt, Artificial Sequence
  Description of Artificial Sequence: Synthetic oligonucleotide
  Antisense strand to SEQ ID NO: 252866
gacuuccuagagauuuaaa

SEQ ID NO: 252868 - RNA, 19 nt, Artificial Sequence
  Description of Artificial Sequence: Synthetic oligonucleotide
  Sense strand starting at position 173 SEQ ID NO: 3258
uaggaaguccacuguauaa

SEQ ID NO: 252869 - RNA, 19 nt, Artificial Sequence
  Description of Artificial Sequence: Synthetic oligonucleotide
  Antisense strand to SEQ ID NO: 252868
uuauacaguggacuuccua

SEQ ID NO: 252870 - RNA, 19 nt, Artificial Sequence
  Description of Artificial Sequence: Synthetic oligonucleotide
  Sense strand starting at position 213 SEQ ID NO: 3258
aaagauucuucugugggua

SEQ ID NO: 252871 - RNA, 19 nt, Artificial Sequence
  Description of Artificial Sequence: Synthetic oligonucleotide
  Antisense strand to SEQ ID NO: 252870
uacccacagaagaaucuuu

SEQ ID NO: 252872 - RNA, 19 nt, Artificial Sequence
  Description of Artificial Sequence: Synthetic oligonucleotide
  Sense strand starting at position 214 SEQ ID NO: 3258
aagauucuucuguggguaa

SEQ ID NO: 252873 - RNA, 19 nt, Artificial Sequence
  Description of Artificial Sequence: Synthetic oligonucleotide
  Antisense strand to SEQ ID NO: 252872
uuacccacagaagaaucuu

SEQ ID NO: 252874 - RNA, 19 nt, Artificial Sequence
  Description of Artificial Sequence: Synthetic oligonucleotide
  Sense strand starting at position 217 SEQ ID NO: 3258
auucuucuguggguaaaua

SEQ ID NO: 252875 - RNA, 19 nt, Artificial Sequence
  Description of Artificial Sequence: Synthetic oligonucleotide
  Antisense strand to SEQ ID NO: 252874
uauuuacccacagaagaau

SEQ ID NO: 252876 - RNA, 19 nt, Artificial Sequence
  Description of Artificial Sequence: Synthetic oligonucleotide
  Sense strand starting at position 218 SEQ ID NO: 3258
uucuucuguggguaaauaa

SEQ ID NO: 252877 - RNA, 19 nt, Artificial Sequence
  Description of Artificial Sequence: Synthetic oligonucleotide
  Antisense strand to SEQ ID NO: 252876
uuauuuacccacagaagaa

SEQ ID NO: 252878 - RNA, 19 nt, Artificial Sequence
  Description of Artificial Sequence: Synthetic oligonucleotide
  Sense strand starting at position 264 SEQ ID NO: 3258
guaggucugaggcauuaca

SEQ ID NO: 252879 - RNA, 19 nt, Artificial Sequence
  Description of Artificial Sequence: Synthetic oligonucleotide
  Antisense strand to SEQ ID NO: 252878
uguaaugccucagaccuac

SEQ ID NO: 252880 - RNA, 19 nt, Artificial Sequence
  Description of Artificial Sequence: Synthetic oligonucleotide
  Sense strand starting at position 376 SEQ ID NO: 3258
ggucaagaaggcugaaauu

SEQ ID NO: 252881 - RNA, 19 nt, Artificial Sequence
  Description of Artificial Sequence: Synthetic oligonucleotide
  Antisense strand to SEQ ID NO: 252880
aauuucagccuucuugacc

SEQ ID NO: 252882 - RNA, 19 nt, Artificial Sequence
  Description of Artificial Sequence: Synthetic oligonucleotide
  Sense strand starting at position 387 SEQ ID NO: 3258
cugaaauuacaucacguau

SEQ ID NO: 252883 - RNA, 19 nt, Artificial Sequence
  Description of Artificial Sequence: Synthetic oligonucleotide
  Antisense strand to SEQ ID NO: 252882
auacgugauguaauuucag

SEQ ID NO: 252884 - RNA, 19 nt, Artificial Sequence
  Description of Artificial Sequence: Synthetic oligonucleotide
  Sense strand starting at position 431 SEQ ID NO: 3258
cuagaauaguuucuaaagu

SEQ ID NO: 252885 - RNA, 19 nt, Artificial Sequence
  Description of Artificial Sequence: Synthetic oligonucleotide
  Antisense strand to SEQ ID NO: 252884
acuuuagaaacuauucuag

SEQ ID NO: 252886 - RNA, 19 nt, Artificial Sequence
  Description of Artificial Sequence: Synthetic oligonucleotide
  Sense strand starting at position 835 SEQ ID NO: 3258
agaguuugucaacagguac

SEQ ID NO: 252887 - RNA, 19 nt, Artificial Sequence
  Description of Artificial Sequence: Synthetic oligonucleotide
  Antisense strand to SEQ ID NO: 252886
guaccuguugacaaacucu

SEQ ID NO: 252888 - RNA, 19 nt, Artificial Sequence
  Description of Artificial Sequence: Synthetic oligonucleotide
  Sense strand starting at position 878 SEQ ID NO: 3258
ugaucuauuguacagcaaa

SEQ ID NO: 252889 - RNA, 19 nt, Artificial Sequence
  Description of Artificial Sequence: Synthetic oligonucleotide
  Antisense strand to SEQ ID NO: 252888
uuugcuguacaauagauca

SEQ ID NO: 252890 - RNA, 19 nt, Artificial Sequence
  Description of Artificial Sequence: Synthetic oligonucleotide
  Sense strand starting at position 889 SEQ ID NO: 3258
acagcaaagugauuauaau

SEQ ID NO: 252891 - RNA, 19 nt, Artificial Sequence
  Description of Artificial Sequence: Synthetic oligonucleotide
  Antisense strand to SEQ ID NO: 252890
auuauaaucacuuugcugu

SEQ ID NO: 252892 - RNA, 19 nt, Artificial Sequence
  Description of Artificial Sequence: Synthetic oligonucleotide
  Sense strand starting at position 973 SEQ ID NO: 3258
agugauauuugagaugauu

SEQ ID NO: 252893 - RNA, 19 nt, Artificial Sequence
  Description of Artificial Sequence: Synthetic oligonucleotide
  Antisense strand to SEQ ID NO: 252892
aaucaucucaaauaucacu

SEQ ID NO: 252894 - RNA, 19 nt, Artificial Sequence
  Description of Artificial Sequence: Synthetic oligonucleotide
  Sense strand starting at position 1012 SEQ ID NO: 3258
uuggucauuguacaaugua

SEQ ID NO: 252895 - RNA, 19 nt, Artificial Sequence
  Description of Artificial Sequence: Synthetic oligonucleotide
  Antisense strand to SEQ ID NO: 252894
uacauuguacaaugaccaa

SEQ ID NO: 252896 - RNA, 19 nt, Artificial Sequence
  Description of Artificial Sequence: Synthetic oligonucleotide
  Sense strand starting at position 1243 SEQ ID NO: 3258
gacccuaggcagcagaaau

SEQ ID NO: 252897 - RNA, 19 nt, Artificial Sequence
  Description of Artificial Sequence: Synthetic oligonucleotide
  Antisense strand to SEQ ID NO: 252896
auuucugcugccuaggguc

SEQ ID NO: 252898 - RNA, 19 nt, Artificial Sequence
  Description of Artificial Sequence: Synthetic oligonucleotide
  Sense strand starting at position 1316 SEQ ID NO: 3258
auagaaggcucugcaggau

SEQ ID NO: 252899 - RNA, 19 nt, Artificial Sequence
  Description of Artificial Sequence: Synthetic oligonucleotide
  Antisense strand to SEQ ID NO: 252898
auccugcagagccuucuau

SEQ ID NO: 252900 - RNA, 19 nt, Artificial Sequence
  Description of Artificial Sequence: Synthetic oligonucleotide
  Sense strand starting at position 1319 SEQ ID NO: 3258
gaaggcucugcaggauaua

SEQ ID NO: 252901 - RNA, 19 nt, Artificial Sequence
  Description of Artificial Sequence: Synthetic oligonucleotide
  Antisense strand to SEQ ID NO: 252900
uauauccugcagagccuuc

SEQ ID NO: 252902 - RNA, 19 nt, Artificial Sequence
  Description of Artificial Sequence: Synthetic oligonucleotide
  Sense strand starting at position 1320 SEQ ID NO: 3258
aaggcucugcaggauauaa

SEQ ID NO: 252903 - RNA, 19 nt, Artificial Sequence
  Description of Artificial Sequence: Synthetic oligonucleotide
  Antisense strand to SEQ ID NO: 252902
uuauauccugcagagccuu

SEQ ID NO: 252904 - RNA, 19 nt, Artificial Sequence
  Description of Artificial Sequence: Synthetic oligonucleotide
  Sense strand starting at position 1625 SEQ ID NO: 3258
cugagaaagguaggucaua

SEQ ID NO: 252905 - RNA, 19 nt, Artificial Sequence
  Description of Artificial Sequence: Synthetic oligonucleotide
  Antisense strand to SEQ ID NO: 252904
uaugaccuaccuuucucag

SEQ ID NO: 252906 - RNA, 19 nt, Artificial Sequence
  Description of Artificial Sequence: Synthetic oligonucleotide
  Sense strand starting at position 1985 SEQ ID NO: 3258
ugaacuauauuugagccaa

SEQ ID NO: 252907 - RNA, 19 nt, Artificial Sequence
  Description of Artificial Sequence: Synthetic oligonucleotide
  Antisense strand to SEQ ID NO: 252906
uuggcucaaauauaguuca

SEQ ID NO: 252908 - RNA, 19 nt, Artificial Sequence
  Description of Artificial Sequence: Synthetic oligonucleotide
  Sense strand starting at position 2461 SEQ ID NO: 3258
cccagauaucccugacaga

SEQ ID NO: 252909 - RNA, 19 nt, Artificial Sequence
  Description of Artificial Sequence: Synthetic oligonucleotide
  Antisense strand to SEQ ID NO: 252908
ucugucagggauaucuggg

SEQ ID NO: 252910 - RNA, 19 nt, Artificial Sequence
  Description of Artificial Sequence: Synthetic oligonucleotide
  Sense strand starting at position 2519 SEQ ID NO: 3258
cacauauccgacugaguca

SEQ ID NO: 252911 - RNA, 19 nt, Artificial Sequence
  Description of Artificial Sequence: Synthetic oligonucleotide
  Antisense strand to SEQ ID NO: 252910
ugacucagucggauaugug

SEQ ID NO: 252912 - RNA, 19 nt, Artificial Sequence
  Description of Artificial Sequence: Synthetic oligonucleotide
  Sense strand starting at position 2558 SEQ ID NO: 3258
ccaaguuuccacuggagaa

SEQ ID NO: 252913 - RNA, 19 nt, Artificial Sequence
  Description of Artificial Sequence: Synthetic oligonucleotide
  Antisense strand to SEQ ID NO: 252912
uucuccaguggaaacuugg

SEQ ID NO: 252914 - RNA, 19 nt, Artificial Sequence
  Description of Artificial Sequence: Synthetic oligonucleotide
  Sense strand starting at position 2877 SEQ ID NO: 3258
ggaguucaggcccagacua

SEQ ID NO: 252915 - RNA, 19 nt, Artificial Sequence
  Description of Artificial Sequence: Synthetic oligonucleotide
  Antisense strand to SEQ ID NO: 252914
uagucugggccugaacucc

SEQ ID NO: 252916 - RNA, 19 nt, Artificial Sequence
  Description of Artificial Sequence: Synthetic oligonucleotide
  Sense strand starting at position 2905 SEQ ID NO: 3258
gggagaccaugucucugaa

SEQ ID NO: 252917 - RNA, 19 nt, Artificial Sequence
  Description of Artificial Sequence: Synthetic oligonucleotide
  Antisense strand to SEQ ID NO: 252916
uucagagacauggucuccc

SEQ ID NO: 252918 - RNA, 19 nt, Artificial Sequence
  Description of Artificial Sequence: Synthetic oligonucleotide
  Sense strand starting at position 3119 SEQ ID NO: 3258
ggugacuauuuacagggaa

SEQ ID NO: 252919 - RNA, 19 nt, Artificial Sequence
  Description of Artificial Sequence: Synthetic oligonucleotide
  Antisense strand to SEQ ID NO: 252918
uucccuguaaauagucacc

SEQ ID NO: 252920 - RNA, 19 nt, Artificial Sequence
  Description of Artificial Sequence: Synthetic oligonucleotide
  Sense strand starting at position 3139 SEQ ID NO: 3258
gguuuagugcuugaaagag

SEQ ID NO: 252921 - RNA, 19 nt, Artificial Sequence
  Description of Artificial Sequence: Synthetic oligonucleotide
  Antisense strand to SEQ ID NO: 252920
cucuuucaagcacuaaacc

SEQ ID NO: 252922 - RNA, 19 nt, Artificial Sequence
  Description of Artificial Sequence: Synthetic oligonucleotide
  Sense strand starting at position 3454 SEQ ID NO: 3258
gggacaguccuaugucaug

SEQ ID NO: 252923 - RNA, 19 nt, Artificial Sequence
  Description of Artificial Sequence: Synthetic oligonucleotide
  Antisense strand to SEQ ID NO: 252922
caugacauaggacuguccc

SEQ ID NO: 252924 - RNA, 19 nt, Artificial Sequence
  Description of Artificial Sequence: Synthetic oligonucleotide
  Sense strand starting at position 3460 SEQ ID NO: 3258
guccuaugucauggacaua

SEQ ID NO: 252925 - RNA, 19 nt, Artificial Sequence
  Description of Artificial Sequence: Synthetic oligonucleotide
  Antisense strand to SEQ ID NO: 252924
uauguccaugacauaggac

SEQ ID NO: 252926 - RNA, 19 nt, Artificial Sequence
  Description of Artificial Sequence: Synthetic oligonucleotide
  Sense strand starting at position 3528 SEQ ID NO: 3258
gaagucuucugagcuacag

SEQ ID NO: 252927 - RNA, 19 nt, Artificial Sequence
  Description of Artificial Sequence: Synthetic oligonucleotide
  Antisense strand to SEQ ID NO: 252926
cuguagcucagaagacuuc

SEQ ID NO: 252928 - RNA, 19 nt, Artificial Sequence
  Description of Artificial Sequence: Synthetic oligonucleotide
  Sense strand starting at position 3579 SEQ ID NO: 3258
gcucgugaugcugcaguua

SEQ ID NO: 252929 - RNA, 19 nt, Artificial Sequence
  Description of Artificial Sequence: Synthetic oligonucleotide
  Antisense strand to SEQ ID NO: 252928
uaacugcagcaucacgagc

SEQ ID NO: 252930 - RNA, 19 nt, Artificial Sequence
  Description of Artificial Sequence: Synthetic oligonucleotide
  Sense strand starting at position 3825 SEQ ID NO: 3258
acaguuuaucuggaaaguu

SEQ ID NO: 252931 - RNA, 19 nt, Artificial Sequence
  Description of Artificial Sequence: Synthetic oligonucleotide
  Antisense strand to SEQ ID NO: 252930
aacuuuccagauaaacugu

SEQ ID NO: 252932 - RNA, 19 nt, Artificial Sequence
  Description of Artificial Sequence: Synthetic oligonucleotide
  Sense strand starting at position 3893 SEQ ID NO: 3258
ccaacaaggucuguuugau

SEQ ID NO: 252933 - RNA, 19 nt, Artificial Sequence
  Description of Artificial Sequence: Synthetic oligonucleotide
  Antisense strand to SEQ ID NO: 252932
aucaaacagaccuuguugg

SEQ ID NO: 252934 - RNA, 19 nt, Artificial Sequence
  Description of Artificial Sequence: Synthetic oligonucleotide
  Sense strand starting at position 3968 SEQ ID NO: 3258
cccgaagaguuuguaaaua

SEQ ID NO: 252935 - RNA, 19 nt, Artificial Sequence
  Description of Artificial Sequence: Synthetic oligonucleotide
  Antisense strand to SEQ ID NO: 252934
uauuuacaaacucuucggg

SEQ ID NO: 252936 - RNA, 19 nt, Artificial Sequence
  Description of Artificial Sequence: Synthetic oligonucleotide
  Sense strand starting at position 181 SEQ ID NO: 3257
ccugauuauguaugugaau

SEQ ID NO: 252937 - RNA, 19 nt, Artificial Sequence
  Description of Artificial Sequence: Synthetic oligonucleotide
  Antisense strand to SEQ ID NO: 252936
auucacauacauaaucagg

SEQ ID NO: 252938 - RNA, 19 nt, Artificial Sequence
  Description of Artificial Sequence: Synthetic oligonucleotide
  Sense strand starting at position 182 SEQ ID NO: 3257
cugauuauguaugugaaug

SEQ ID NO: 252939 - RNA, 19 nt, Artificial Sequence
  Description of Artificial Sequence: Synthetic oligonucleotide
  Antisense strand to SEQ ID NO: 252938
cauucacauacauaaucag

SEQ ID NO: 252940 - RNA, 19 nt, Artificial Sequence
  Description of Artificial Sequence: Synthetic oligonucleotide
  Sense strand starting at position 260 SEQ ID NO: 3257
acaugcaaucgguaucacu

SEQ ID NO: 252941 - RNA, 19 nt, Artificial Sequence
  Description of Artificial Sequence: Synthetic oligonucleotide
  Antisense strand to SEQ ID NO: 252940
agugauaccgauugcaugu

SEQ ID NO: 252942 - RNA, 19 nt, Artificial Sequence
  Description of Artificial Sequence: Synthetic oligonucleotide
  Sense strand starting at position 279 SEQ ID NO: 3257
cuuaauguucuugaagguu

SEQ ID NO: 252943 - RNA, 19 nt, Artificial Sequence
  Description of Artificial Sequence: Synthetic oligonucleotide
  Antisense strand to SEQ ID NO: 252942
aaccuucaagaacauuaag

SEQ ID NO: 252944 - RNA, 19 nt, Artificial Sequence
  Description of Artificial Sequence: Synthetic oligonucleotide
  Sense strand starting at position 288 SEQ ID NO: 3257
cuugaagguuaacuguaaa

SEQ ID NO: 252945 - RNA, 19 nt, Artificial Sequence
  Description of Artificial Sequence: Synthetic oligonucleotide
  Antisense strand to SEQ ID NO: 252944
uuuacaguuaaccuucaag

SEQ ID NO: 252946 - RNA, 19 nt, Artificial Sequence
  Description of Artificial Sequence: Synthetic oligonucleotide
  Sense strand starting at position 328 SEQ ID NO: 3257
uuuaaaucucuaggaaguc

SEQ ID NO: 252947 - RNA, 19 nt, Artificial Sequence
  Description of Artificial Sequence: Synthetic oligonucleotide
  Antisense strand to SEQ ID NO: 252946
gacuuccuagagauuuaaa

SEQ ID NO: 252948 - RNA, 19 nt, Artificial Sequence
  Description of Artificial Sequence: Synthetic oligonucleotide
  Sense strand starting at position 338 SEQ ID NO: 3257
uaggaaguccacuguauaa

SEQ ID NO: 252949 - RNA, 19 nt, Artificial Sequence
  Description of Artificial Sequence: Synthetic oligonucleotide
  Antisense strand to SEQ ID NO: 252948
uuauacaguggacuuccua

SEQ ID NO: 252950 - RNA, 19 nt, Artificial Sequence
  Description of Artificial Sequence: Synthetic oligonucleotide
  Sense strand starting at position 378 SEQ ID NO: 3257
aaagauucuucugugggua

SEQ ID NO: 252951 - RNA, 19 nt, Artificial Sequence
  Description of Artificial Sequence: Synthetic oligonucleotide
  Antisense strand to SEQ ID NO: 252950
uacccacagaagaaucuuu

SEQ ID NO: 252952 - RNA, 19 nt, Artificial Sequence
  Description of Artificial Sequence: Synthetic oligonucleotide
  Sense strand starting at position 379 SEQ ID NO: 3257
aagauucuucuguggguaa

SEQ ID NO: 252953 - RNA, 19 nt, Artificial Sequence
  Description of Artificial Sequence: Synthetic oligonucleotide
  Antisense strand to SEQ ID NO: 252952
uuacccacagaagaaucuu

SEQ ID NO: 252954 - RNA, 19 nt, Artificial Sequence
  Description of Artificial Sequence: Synthetic oligonucleotide
  Sense strand starting at position 381 SEQ ID NO: 3257
gauucuucuguggguaaau

SEQ ID NO: 252955 - RNA, 19 nt, Artificial Sequence
  Description of Artificial Sequence: Synthetic oligonucleotide
  Antisense strand to SEQ ID NO: 252954
auuuacccacagaagaauc

SEQ ID NO: 252956 - RNA, 19 nt, Artificial Sequence
  Description of Artificial Sequence: Synthetic oligonucleotide
  Sense strand starting at position 382 SEQ ID NO: 3257
auucuucuguggguaaaua

SEQ ID NO: 252957 - RNA, 19 nt, Artificial Sequence
  Description of Artificial Sequence: Synthetic oligonucleotide
  Antisense strand to SEQ ID NO: 252956
uauuuacccacagaagaau

SEQ ID NO: 252958 - RNA, 19 nt, Artificial Sequence
  Description of Artificial Sequence: Synthetic oligonucleotide
  Sense strand starting at position 383 SEQ ID NO: 3257
uucuucuguggguaaauaa

SEQ ID NO: 252959 - RNA, 19 nt, Artificial Sequence
  Description of Artificial Sequence: Synthetic oligonucleotide
  Antisense strand to SEQ ID NO: 252958
uuauuuacccacagaagaa

SEQ ID NO: 252960 - RNA, 19 nt, Artificial Sequence
  Description of Artificial Sequence: Synthetic oligonucleotide
  Sense strand starting at position 429 SEQ ID NO: 3257
guaggucugaggcauuaca

SEQ ID NO: 252961 - RNA, 19 nt, Artificial Sequence
  Description of Artificial Sequence: Synthetic oligonucleotide
  Antisense strand to SEQ ID NO: 252960
uguaaugccucagaccuac

SEQ ID NO: 252962 - RNA, 19 nt, Artificial Sequence
  Description of Artificial Sequence: Synthetic oligonucleotide
  Sense strand starting at position 541 SEQ ID NO: 3257
ggucaagaaggcugaaauu

SEQ ID NO: 252963 - RNA, 19 nt, Artificial Sequence
  Description of Artificial Sequence: Synthetic oligonucleotide
  Antisense strand to SEQ ID NO: 252962
aauuucagccuucuugacc

SEQ ID NO: 252964 - RNA, 19 nt, Artificial Sequence
  Description of Artificial Sequence: Synthetic oligonucleotide
  Sense strand starting at position 552 SEQ ID NO: 3257
cugaaauuacaucacguau

SEQ ID NO: 252965 - RNA, 19 nt, Artificial Sequence
  Description of Artificial Sequence: Synthetic oligonucleotide
  Antisense strand to SEQ ID NO: 252964
auacgugauguaauuucag

SEQ ID NO: 252966 - RNA, 19 nt, Artificial Sequence
  Description of Artificial Sequence: Synthetic oligonucleotide
  Sense strand starting at position 596 SEQ ID NO: 3257
cuagaauaguuucuaaagu

SEQ ID NO: 252967 - RNA, 19 nt, Artificial Sequence
  Description of Artificial Sequence: Synthetic oligonucleotide
  Antisense strand to SEQ ID NO: 252966
acuuuagaaacuauucuag

SEQ ID NO: 252968 - RNA, 19 nt, Artificial Sequence
  Description of Artificial Sequence: Synthetic oligonucleotide
  Sense strand starting at position 1000 SEQ ID NO: 3257
agaguuugucaacagguac

SEQ ID NO: 252969 - RNA, 19 nt, Artificial Sequence
  Description of Artificial Sequence: Synthetic oligonucleotide
  Antisense strand to SEQ ID NO: 252968
guaccuguugacaaacucu

SEQ ID NO: 252970 - RNA, 19 nt, Artificial Sequence
  Description of Artificial Sequence: Synthetic oligonucleotide
  Sense strand starting at position 1043 SEQ ID NO: 3257
ugaucuauuguacagcaaa

SEQ ID NO: 252971 - RNA, 19 nt, Artificial Sequence
  Description of Artificial Sequence: Synthetic oligonucleotide
  Antisense strand to SEQ ID NO: 252970
uuugcuguacaauagauca

SEQ ID NO: 252972 - RNA, 19 nt, Artificial Sequence
  Description of Artificial Sequence: Synthetic oligonucleotide
  Sense strand starting at position 1054 SEQ ID NO: 3257
acagcaaagugauuauaau

SEQ ID NO: 252973 - RNA, 19 nt, Artificial Sequence
  Description of Artificial Sequence: Synthetic oligonucleotide
  Antisense strand to SEQ ID NO: 252972
auuauaaucacuuugcugu

SEQ ID NO: 252974 - RNA, 19 nt, Artificial Sequence
  Description of Artificial Sequence: Synthetic oligonucleotide
  Sense strand starting at position 1138 SEQ ID NO: 3257
agugauauuugagaugauu

SEQ ID NO: 252975 - RNA, 19 nt, Artificial Sequence
  Description of Artificial Sequence: Synthetic oligonucleotide
  Antisense strand to SEQ ID NO: 252974
aaucaucucaaauaucacu

SEQ ID NO: 252976 - RNA, 19 nt, Artificial Sequence
  Description of Artificial Sequence: Synthetic oligonucleotide
  Sense strand starting at position 1177 SEQ ID NO: 3257
uuggucauuguacaaugua

SEQ ID NO: 252977 - RNA, 19 nt, Artificial Sequence
  Description of Artificial Sequence: Synthetic oligonucleotide
  Antisense strand to SEQ ID NO: 252976
uacauuguacaaugaccaa

SEQ ID NO: 252978 - RNA, 19 nt, Artificial Sequence
  Description of Artificial Sequence: Synthetic oligonucleotide
  Sense strand starting at position 1408 SEQ ID NO: 3257
gacccuaggcagcagaaau

SEQ ID NO: 252979 - RNA, 19 nt, Artificial Sequence
  Description of Artificial Sequence: Synthetic oligonucleotide
  Antisense strand to SEQ ID NO: 252978
auuucugcugccuaggguc

SEQ ID NO: 252980 - RNA, 19 nt, Artificial Sequence
  Description of Artificial Sequence: Synthetic oligonucleotide
  Sense strand starting at position 1481 SEQ ID NO: 3257
auagaaggcucugcaggau

SEQ ID NO: 252981 - RNA, 19 nt, Artificial Sequence
  Description of Artificial Sequence: Synthetic oligonucleotide
  Antisense strand to SEQ ID NO: 252980
auccugcagagccuucuau

SEQ ID NO: 252982 - RNA, 19 nt, Artificial Sequence
  Description of Artificial Sequence: Synthetic oligonucleotide
  Sense strand starting at position 1484 SEQ ID NO: 3257
gaaggcucugcaggauaua

SEQ ID NO: 252983 - RNA, 19 nt, Artificial Sequence
  Description of Artificial Sequence: Synthetic oligonucleotide
  Antisense strand to SEQ ID NO: 252982
uauauccugcagagccuuc

SEQ ID NO: 252984 - RNA, 19 nt, Artificial Sequence
  Description of Artificial Sequence: Synthetic oligonucleotide
  Sense strand starting at position 1485 SEQ ID NO: 3257
aaggcucugcaggauauaa

SEQ ID NO: 252985 - RNA, 19 nt, Artificial Sequence
  Description of Artificial Sequence: Synthetic oligonucleotide
  Antisense strand to SEQ ID NO: 252984
uuauauccugcagagccuu

SEQ ID NO: 252986 - RNA, 19 nt, Artificial Sequence
  Description of Artificial Sequence: Synthetic oligonucleotide
  Sense strand starting at position 1790 SEQ ID NO: 3257
cugagaaagguaggucaua

SEQ ID NO: 252987 - RNA, 19 nt, Artificial Sequence
  Description of Artificial Sequence: Synthetic oligonucleotide
  Antisense strand to SEQ ID NO: 252986
uaugaccuaccuuucucag

SEQ ID NO: 252988 - RNA, 19 nt, Artificial Sequence
  Description of Artificial Sequence: Synthetic oligonucleotide
  Sense strand starting at position 1829 SEQ ID NO: 3257
acaacaauacccuguguuu

SEQ ID NO: 252989 - RNA, 19 nt, Artificial Sequence
  Description of Artificial Sequence: Synthetic oligonucleotide
  Antisense strand to SEQ ID NO: 252988
aaacacaggguauuguugu

SEQ ID NO: 252990 - RNA, 19 nt, Artificial Sequence
  Description of Artificial Sequence: Synthetic oligonucleotide
  Sense strand starting at position 2150 SEQ ID NO: 3257
ugaacuauauuugagccaa

SEQ ID NO: 252991 - RNA, 19 nt, Artificial Sequence
  Description of Artificial Sequence: Synthetic oligonucleotide
  Antisense strand to SEQ ID NO: 252990
uuggcucaaauauaguuca

SEQ ID NO: 252992 - RNA, 19 nt, Artificial Sequence
  Description of Artificial Sequence: Synthetic oligonucleotide
  Sense strand starting at position 2626 SEQ ID NO: 3257
cccagauaucccugacaga

SEQ ID NO: 252993 - RNA, 19 nt, Artificial Sequence
  Description of Artificial Sequence: Synthetic oligonucleotide
  Antisense strand to SEQ ID NO: 252992
ucugucagggauaucuggg

SEQ ID NO: 252994 - RNA, 19 nt, Artificial Sequence
  Description of Artificial Sequence: Synthetic oligonucleotide
  Sense strand starting at position 2684 SEQ ID NO: 3257
cacauauccgacugaguca

SEQ ID NO: 252995 - RNA, 19 nt, Artificial Sequence
  Description of Artificial Sequence: Synthetic oligonucleotide
  Antisense strand to SEQ ID NO: 252994
ugacucagucggauaugug

SEQ ID NO: 252996 - RNA, 19 nt, Artificial Sequence
  Description of Artificial Sequence: Synthetic oligonucleotide
  Sense strand starting at position 2723 SEQ ID NO: 3257
ccaaguuuccacuggagaa

SEQ ID NO: 252997 - RNA, 19 nt, Artificial Sequence
  Description of Artificial Sequence: Synthetic oligonucleotide
  Antisense strand to SEQ ID NO: 252996
uucuccaguggaaacuugg

SEQ ID NO: 252998 - RNA, 19 nt, Artificial Sequence
  Description of Artificial Sequence: Synthetic oligonucleotide
  Sense strand starting at position 3042 SEQ ID NO: 3257
ggaguucaggcccagacua

SEQ ID NO: 252999 - RNA, 19 nt, Artificial Sequence
  Description of Artificial Sequence: Synthetic oligonucleotide
  Antisense strand to SEQ ID NO: 252998
uagucugggccugaacucc

SEQ ID NO: 253000 - RNA, 19 nt, Artificial Sequence
  Description of Artificial Sequence: Synthetic oligonucleotide
  Sense strand starting at position 3070 SEQ ID NO: 3257
gggagaccaugucucugaa

SEQ ID NO: 253001 - RNA, 19 nt, Artificial Sequence
  Description of Artificial Sequence: Synthetic oligonucleotide
  Antisense strand to SEQ ID NO: 253000
uucagagacauggucuccc

SEQ ID NO: 253002 - RNA, 19 nt, Artificial Sequence
  Description of Artificial Sequence: Synthetic oligonucleotide
  Sense strand starting at position 3239 SEQ ID NO: 3257
acucuuagagcuggugaca

SEQ ID NO: 253003 - RNA, 19 nt, Artificial Sequence
  Description of Artificial Sequence: Synthetic oligonucleotide
  Antisense strand to SEQ ID NO: 253002
ugucaccagcucuaagagu

SEQ ID NO: 253004 - RNA, 19 nt, Artificial Sequence
  Description of Artificial Sequence: Synthetic oligonucleotide
  Sense strand starting at position 3284 SEQ ID NO: 3257
ggugacuauuuacagggaa

SEQ ID NO: 253005 - RNA, 19 nt, Artificial Sequence
  Description of Artificial Sequence: Synthetic oligonucleotide
  Antisense strand to SEQ ID NO: 253004
uucccuguaaauagucacc

SEQ ID NO: 253006 - RNA, 19 nt, Artificial Sequence
  Description of Artificial Sequence: Synthetic oligonucleotide
  Sense strand starting at position 3304 SEQ ID NO: 3257
gguuuagugcuugaaagag

SEQ ID NO: 253007 - RNA, 19 nt, Artificial Sequence
  Description of Artificial Sequence: Synthetic oligonucleotide
  Antisense strand to SEQ ID NO: 253006
cucuuucaagcacuaaacc

SEQ ID NO: 253008 - RNA, 19 nt, Artificial Sequence
  Description of Artificial Sequence: Synthetic oligonucleotide
  Sense strand starting at position 3619 SEQ ID NO: 3257
gggacaguccuaugucaug

SEQ ID NO: 253009 - RNA, 19 nt, Artificial Sequence
  Description of Artificial Sequence: Synthetic oligonucleotide
  Antisense strand to SEQ ID NO: 253008
caugacauaggacuguccc

SEQ ID NO: 253010 - RNA, 19 nt, Artificial Sequence
  Description of Artificial Sequence: Synthetic oligonucleotide
  Sense strand starting at position 3625 SEQ ID NO: 3257
guccuaugucauggacaua

SEQ ID NO: 253011 - RNA, 19 nt, Artificial Sequence
  Description of Artificial Sequence: Synthetic oligonucleotide
  Antisense strand to SEQ ID NO: 253010
uauguccaugacauaggac

SEQ ID NO: 253012 - RNA, 19 nt, Artificial Sequence
  Description of Artificial Sequence: Synthetic oligonucleotide
  Sense strand starting at position 3693 SEQ ID NO: 3257
gaagucuucugagcuacag

SEQ ID NO: 253013 - RNA, 19 nt, Artificial Sequence
  Description of Artificial Sequence: Synthetic oligonucleotide
  Antisense strand to SEQ ID NO: 253012
cuguagcucagaagacuuc

SEQ ID NO: 253014 - RNA, 19 nt, Artificial Sequence
  Description of Artificial Sequence: Synthetic oligonucleotide
  Sense strand starting at position 3744 SEQ ID NO: 3257
gcucgugaugcugcaguua

SEQ ID NO: 253015 - RNA, 19 nt, Artificial Sequence
  Description of Artificial Sequence: Synthetic oligonucleotide
  Antisense strand to SEQ ID NO: 253014
uaacugcagcaucacgagc

SEQ ID NO: 253016 - RNA, 19 nt, Artificial Sequence
  Description of Artificial Sequence: Synthetic oligonucleotide
  Sense strand starting at position 245 SEQ ID NO: 3253
caguaaugacgguaauaau

SEQ ID NO: 253017 - RNA, 19 nt, Artificial Sequence
  Description of Artificial Sequence: Synthetic oligonucleotide
  Antisense strand to SEQ ID NO: 253016
auuauuaccgucauuacug

SEQ ID NO: 253018 - RNA, 19 nt, Artificial Sequence
  Description of Artificial Sequence: Synthetic oligonucleotide
  Sense strand starting at position 255 SEQ ID NO: 3253
gguaauaaucaugguguua

SEQ ID NO: 253019 - RNA, 19 nt, Artificial Sequence
  Description of Artificial Sequence: Synthetic oligonucleotide
  Antisense strand to SEQ ID NO: 253018
uaacaccaugauuauuacc

SEQ ID NO: 253020 - RNA, 19 nt, Artificial Sequence
  Description of Artificial Sequence: Synthetic oligonucleotide
  Sense strand starting at position 303 SEQ ID NO: 3253
ccuaacacccugugaaaug

SEQ ID NO: 253021 - RNA, 19 nt, Artificial Sequence
  Description of Artificial Sequence: Synthetic oligonucleotide
  Antisense strand to SEQ ID NO: 253020
cauuucacaggguguuagg

SEQ ID NO: 253022 - RNA, 19 nt, Artificial Sequence
  Description of Artificial Sequence: Synthetic oligonucleotide
  Sense strand starting at position 360 SEQ ID NO: 3253
ccaacuggugagugacaga

SEQ ID NO: 253023 - RNA, 19 nt, Artificial Sequence
  Description of Artificial Sequence: Synthetic oligonucleotide
  Antisense strand to SEQ ID NO: 253022
ucugucacucaccaguugg

SEQ ID NO: 253024 - RNA, 19 nt, Artificial Sequence
  Description of Artificial Sequence: Synthetic oligonucleotide
  Sense strand starting at position 480 SEQ ID NO: 3253
aaugaaaugcuguauagcu

SEQ ID NO: 253025 - RNA, 19 nt, Artificial Sequence
  Description of Artificial Sequence: Synthetic oligonucleotide
  Antisense strand to SEQ ID NO: 253024
agcuauacagcauuucauu

SEQ ID NO: 253026 - RNA, 19 nt, Artificial Sequence
  Description of Artificial Sequence: Synthetic oligonucleotide
  Sense strand starting at position 966 SEQ ID NO: 3253
guauaaagauaugcacaaa

SEQ ID NO: 253027 - RNA, 19 nt, Artificial Sequence
  Description of Artificial Sequence: Synthetic oligonucleotide
  Antisense strand to SEQ ID NO: 253026
uuugugcauaucuuuauac

SEQ ID NO: 253028 - RNA, 19 nt, Artificial Sequence
  Description of Artificial Sequence: Synthetic oligonucleotide
  Sense strand starting at position 1011 SEQ ID NO: 3253
ggcuucuucguggaggaaa

SEQ ID NO: 253029 - RNA, 19 nt, Artificial Sequence
  Description of Artificial Sequence: Synthetic oligonucleotide
  Antisense strand to SEQ ID NO: 253028
uuuccuccacgaagaagcc

SEQ ID NO: 253030 - RNA, 19 nt, Artificial Sequence
  Description of Artificial Sequence: Synthetic oligonucleotide
  Sense strand starting at position 1088 SEQ ID NO: 3253
agguguuauuucuugaggu

SEQ ID NO: 253031 - RNA, 19 nt, Artificial Sequence
  Description of Artificial Sequence: Synthetic oligonucleotide
  Antisense strand to SEQ ID NO: 253030
accucaagaaauaacaccu

SEQ ID NO: 253032 - RNA, 19 nt, Artificial Sequence
  Description of Artificial Sequence: Synthetic oligonucleotide
  Sense strand starting at position 1245 SEQ ID NO: 3253
guggcuccugaagauguua

SEQ ID NO: 253033 - RNA, 19 nt, Artificial Sequence
  Description of Artificial Sequence: Synthetic oligonucleotide
  Antisense strand to SEQ ID NO: 253032
uaacaucuucaggagccac

SEQ ID NO: 253034 - RNA, 19 nt, Artificial Sequence
  Description of Artificial Sequence: Synthetic oligonucleotide
  Sense strand starting at position 1247 SEQ ID NO: 3253
ggcuccugaagauguuaca

SEQ ID NO: 253035 - RNA, 19 nt, Artificial Sequence
  Description of Artificial Sequence: Synthetic oligonucleotide
  Antisense strand to SEQ ID NO: 253034
uguaacaucuucaggagcc

SEQ ID NO: 253036 - RNA, 19 nt, Artificial Sequence
  Description of Artificial Sequence: Synthetic oligonucleotide
  Sense strand starting at position 1543 SEQ ID NO: 3253
ggaccugugaauugacuuu

SEQ ID NO: 253037 - RNA, 19 nt, Artificial Sequence
  Description of Artificial Sequence: Synthetic oligonucleotide
  Antisense strand to SEQ ID NO: 253036
aaagucaauucacaggucc

SEQ ID NO: 253038 - RNA, 19 nt, Artificial Sequence
  Description of Artificial Sequence: Synthetic oligonucleotide
  Sense strand starting at position 1656 SEQ ID NO: 3253
aggcaaauuuauuagagag

SEQ ID NO: 253039 - RNA, 19 nt, Artificial Sequence
  Description of Artificial Sequence: Synthetic oligonucleotide
  Antisense strand to SEQ ID NO: 253038
cucucuaauaaauuugccu

SEQ ID NO: 253040 - RNA, 19 nt, Artificial Sequence
  Description of Artificial Sequence: Synthetic oligonucleotide
  Sense strand starting at position 1658 SEQ ID NO: 3253
gcaaauuuauuagagagau

SEQ ID NO: 253041 - RNA, 19 nt, Artificial Sequence
  Description of Artificial Sequence: Synthetic oligonucleotide
  Antisense strand to SEQ ID NO: 253040
aucucucuaauaaauuugc

SEQ ID NO: 253042 - RNA, 19 nt, Artificial Sequence
  Description of Artificial Sequence: Synthetic oligonucleotide
  Sense strand starting at position 1691 SEQ ID NO: 3253
ugguuauauccagguuaga

SEQ ID NO: 253043 - RNA, 19 nt, Artificial Sequence
  Description of Artificial Sequence: Synthetic oligonucleotide
  Antisense strand to SEQ ID NO: 253042
ucuaaccuggauauaacca

SEQ ID NO: 253044 - RNA, 19 nt, Artificial Sequence
  Description of Artificial Sequence: Synthetic oligonucleotide
  Sense strand starting at position 1782 SEQ ID NO: 3253
cuucuauaugugcacacau

SEQ ID NO: 253045 - RNA, 19 nt, Artificial Sequence
  Description of Artificial Sequence: Synthetic oligonucleotide
  Antisense strand to SEQ ID NO: 253044
augugugcacauauagaag

SEQ ID NO: 253046 - RNA, 19 nt, Artificial Sequence
  Description of Artificial Sequence: Synthetic oligonucleotide
  Sense strand starting at position 1802 SEQ ID NO: 3253
uacuauuuaugugaugaag

SEQ ID NO: 253047 - RNA, 19 nt, Artificial Sequence
  Description of Artificial Sequence: Synthetic oligonucleotide
  Antisense strand to SEQ ID NO: 253046
cuucaucacauaaauagua

SEQ ID NO: 253048 - RNA, 19 nt, Artificial Sequence
  Description of Artificial Sequence: Synthetic oligonucleotide
  Sense strand starting at position 1826 SEQ ID NO: 3253
agacaacuggugugcucaa

SEQ ID NO: 253049 - RNA, 19 nt, Artificial Sequence
  Description of Artificial Sequence: Synthetic oligonucleotide
  Antisense strand to SEQ ID NO: 253048
uugagcacaccaguugucu

SEQ ID NO: 253050 - RNA, 19 nt, Artificial Sequence
  Description of Artificial Sequence: Synthetic oligonucleotide
  Sense strand starting at position 2314 SEQ ID NO: 3253
uuguguuuccaggaucuac

SEQ ID NO: 253051 - RNA, 19 nt, Artificial Sequence
  Description of Artificial Sequence: Synthetic oligonucleotide
  Antisense strand to SEQ ID NO: 253050
guagauccuggaaacacaa

SEQ ID NO: 253052 - RNA, 19 nt, Artificial Sequence
  Description of Artificial Sequence: Synthetic oligonucleotide
  Sense strand starting at position 2496 SEQ ID NO: 3253
cuguauuguguguuguuua

SEQ ID NO: 253053 - RNA, 19 nt, Artificial Sequence
  Description of Artificial Sequence: Synthetic oligonucleotide
  Antisense strand to SEQ ID NO: 253052
uaaacaacacacaauacag

SEQ ID NO: 253054 - RNA, 19 nt, Artificial Sequence
  Description of Artificial Sequence: Synthetic oligonucleotide
  Sense strand starting at position 2522 SEQ ID NO: 3253
guugcucuuccucacugaa

SEQ ID NO: 253055 - RNA, 19 nt, Artificial Sequence
  Description of Artificial Sequence: Synthetic oligonucleotide
  Antisense strand to SEQ ID NO: 253054
uucagugaggaagagcaac

SEQ ID NO: 253056 - RNA, 19 nt, Artificial Sequence
  Description of Artificial Sequence: Synthetic oligonucleotide
  Sense strand starting at position 2525 SEQ ID NO: 3253
gcucuuccucacugaaaug

SEQ ID NO: 253057 - RNA, 19 nt, Artificial Sequence
  Description of Artificial Sequence: Synthetic oligonucleotide
  Antisense strand to SEQ ID NO: 253056
cauuucagugaggaagagc

SEQ ID NO: 253058 - RNA, 19 nt, Artificial Sequence
  Description of Artificial Sequence: Synthetic oligonucleotide
  Sense strand starting at position 2583 SEQ ID NO: 3253
ugcuucuugaaugguugaa

SEQ ID NO: 253059 - RNA, 19 nt, Artificial Sequence
  Description of Artificial Sequence: Synthetic oligonucleotide
  Antisense strand to SEQ ID NO: 253058
uucaaccauucaagaagca

SEQ ID NO: 253060 - RNA, 19 nt, Artificial Sequence
  Description of Artificial Sequence: Synthetic oligonucleotide
  Sense strand starting at position 2585 SEQ ID NO: 3253
cuucuugaaugguugaauu

SEQ ID NO: 253061 - RNA, 19 nt, Artificial Sequence
  Description of Artificial Sequence: Synthetic oligonucleotide
  Antisense strand to SEQ ID NO: 253060
aauucaaccauucaagaag

SEQ ID NO: 253062 - RNA, 19 nt, Artificial Sequence
  Description of Artificial Sequence: Synthetic oligonucleotide
  Sense strand starting at position 2752 SEQ ID NO: 3253
gaguuugcuggugaaucca

SEQ ID NO: 253063 - RNA, 19 nt, Artificial Sequence
  Description of Artificial Sequence: Synthetic oligonucleotide
  Antisense strand to SEQ ID NO: 253062
uggauucaccagcaaacuc

SEQ ID NO: 253064 - RNA, 19 nt, Artificial Sequence
  Description of Artificial Sequence: Synthetic oligonucleotide
  Sense strand starting at position 2791 SEQ ID NO: 3253
gaaucccaccuuggugaau

SEQ ID NO: 253065 - RNA, 19 nt, Artificial Sequence
  Description of Artificial Sequence: Synthetic oligonucleotide
  Antisense strand to SEQ ID NO: 253064
auucaccaaggugggauuc

SEQ ID NO: 253066 - RNA, 19 nt, Artificial Sequence
  Description of Artificial Sequence: Synthetic oligonucleotide
  Sense strand starting at position 2837 SEQ ID NO: 3253
gcuucugaagcugagcaau

SEQ ID NO: 253067 - RNA, 19 nt, Artificial Sequence
  Description of Artificial Sequence: Synthetic oligonucleotide
  Antisense strand to SEQ ID NO: 253066
auugcucagcuucagaagc

SEQ ID NO: 253068 - RNA, 19 nt, Artificial Sequence
  Description of Artificial Sequence: Synthetic oligonucleotide
  Sense strand starting at position 2843 SEQ ID NO: 3253
gaagcugagcaaugaaugu

SEQ ID NO: 253069 - RNA, 19 nt, Artificial Sequence
  Description of Artificial Sequence: Synthetic oligonucleotide
  Antisense strand to SEQ ID NO: 253068
acauucauugcucagcuuc

SEQ ID NO: 253070 - RNA, 19 nt, Artificial Sequence
  Description of Artificial Sequence: Synthetic oligonucleotide
  Sense strand starting at position 2856 SEQ ID NO: 3253
gaauguugucagcacccua

SEQ ID NO: 253071 - RNA, 19 nt, Artificial Sequence
  Description of Artificial Sequence: Synthetic oligonucleotide
  Antisense strand to SEQ ID NO: 253070
uagggugcugacaacauuc

SEQ ID NO: 253072 - RNA, 19 nt, Artificial Sequence
  Description of Artificial Sequence: Synthetic oligonucleotide
  Sense strand starting at position 3061 SEQ ID NO: 3253
aguuauacagucugaauac

SEQ ID NO: 253073 - RNA, 19 nt, Artificial Sequence
  Description of Artificial Sequence: Synthetic oligonucleotide
  Antisense strand to SEQ ID NO: 253072
guauucagacuguauaacu

SEQ ID NO: 253074 - RNA, 19 nt, Artificial Sequence
  Description of Artificial Sequence: Synthetic oligonucleotide
  Sense strand starting at position 3068 SEQ ID NO: 3253
cagucugaauacucaguga

SEQ ID NO: 253075 - RNA, 19 nt, Artificial Sequence
  Description of Artificial Sequence: Synthetic oligonucleotide
  Antisense strand to SEQ ID NO: 253074
ucacugaguauucagacug

SEQ ID NO: 253076 - RNA, 19 nt, Artificial Sequence
  Description of Artificial Sequence: Synthetic oligonucleotide
  Sense strand starting at position 3071 SEQ ID NO: 3253
ucugaauacucagugacua

SEQ ID NO: 253077 - RNA, 19 nt, Artificial Sequence
  Description of Artificial Sequence: Synthetic oligonucleotide
  Antisense strand to SEQ ID NO: 253076
uagucacugaguauucaga

SEQ ID NO: 253078 - RNA, 19 nt, Artificial Sequence
  Description of Artificial Sequence: Synthetic oligonucleotide
  Sense strand starting at position 3072 SEQ ID NO: 3253
cugaauacucagugacuac

SEQ ID NO: 253079 - RNA, 19 nt, Artificial Sequence
  Description of Artificial Sequence: Synthetic oligonucleotide
  Antisense strand to SEQ ID NO: 253078
guagucacugaguauucag

SEQ ID NO: 253080 - RNA, 19 nt, Artificial Sequence
  Description of Artificial Sequence: Synthetic oligonucleotide
  Sense strand starting at position 3204 SEQ ID NO: 3253
ugugacugcccauacaacu

SEQ ID NO: 253081 - RNA, 19 nt, Artificial Sequence
  Description of Artificial Sequence: Synthetic oligonucleotide
  Antisense strand to SEQ ID NO: 253080
aguuguaugggcagucaca

SEQ ID NO: 253082 - RNA, 19 nt, Artificial Sequence
  Description of Artificial Sequence: Synthetic oligonucleotide
  Sense strand starting at position 3395 SEQ ID NO: 3253
cccucacuguagucuaaua

SEQ ID NO: 253083 - RNA, 19 nt, Artificial Sequence
  Description of Artificial Sequence: Synthetic oligonucleotide
  Antisense strand to SEQ ID NO: 253082
uauuagacuacagugaggg

SEQ ID NO: 253084 - RNA, 19 nt, Artificial Sequence
  Description of Artificial Sequence: Synthetic oligonucleotide
  Sense strand starting at position 3405 SEQ ID NO: 3253
agucuaauauggcccacaa

SEQ ID NO: 253085 - RNA, 19 nt, Artificial Sequence
  Description of Artificial Sequence: Synthetic oligonucleotide
  Antisense strand to SEQ ID NO: 253084
uugugggccauauuagacu

SEQ ID NO: 253086 - RNA, 19 nt, Artificial Sequence
  Description of Artificial Sequence: Synthetic oligonucleotide
  Sense strand starting at position 3487 SEQ ID NO: 3253
gggcaucacuaaguccaaa

SEQ ID NO: 253087 - RNA, 19 nt, Artificial Sequence
  Description of Artificial Sequence: Synthetic oligonucleotide
  Antisense strand to SEQ ID NO: 253086
uuuggacuuagugaugccc

SEQ ID NO: 253088 - RNA, 19 nt, Artificial Sequence
  Description of Artificial Sequence: Synthetic oligonucleotide
  Sense strand starting at position 3706 SEQ ID NO: 3253
gcucuuuagcuugacacau

SEQ ID NO: 253089 - RNA, 19 nt, Artificial Sequence
  Description of Artificial Sequence: Synthetic oligonucleotide
  Antisense strand to SEQ ID NO: 253088
augugucaagcuaaagagc

SEQ ID NO: 253090 - RNA, 19 nt, Artificial Sequence
  Description of Artificial Sequence: Synthetic oligonucleotide
  Sense strand starting at position 3717 SEQ ID NO: 3253
ugacacauguagguuucua

SEQ ID NO: 253091 - RNA, 19 nt, Artificial Sequence
  Description of Artificial Sequence: Synthetic oligonucleotide
  Antisense strand to SEQ ID NO: 253090
uagaaaccuacauguguca

SEQ ID NO: 253092 - RNA, 19 nt, Artificial Sequence
  Description of Artificial Sequence: Synthetic oligonucleotide
  Sense strand starting at position 3721 SEQ ID NO: 3253
acauguagguuucuaagau

SEQ ID NO: 253093 - RNA, 19 nt, Artificial Sequence
  Description of Artificial Sequence: Synthetic oligonucleotide
  Antisense strand to SEQ ID NO: 253092
aucuuagaaaccuacaugu

SEQ ID NO: 253094 - RNA, 19 nt, Artificial Sequence
  Description of Artificial Sequence: Synthetic oligonucleotide
  Sense strand starting at position 3811 SEQ ID NO: 3253
acagacucugcaggauuaa

SEQ ID NO: 253095 - RNA, 19 nt, Artificial Sequence
  Description of Artificial Sequence: Synthetic oligonucleotide
  Antisense strand to SEQ ID NO: 253094
uuaauccugcagagucugu

SEQ ID NO: 253096 - RNA, 19 nt, Artificial Sequence
  Description of Artificial Sequence: Synthetic oligonucleotide
  Sense strand starting at position 272 SEQ ID NO: 3255
aaucuaguuguuugaaaga

SEQ ID NO: 253097 - RNA, 19 nt, Artificial Sequence
  Description of Artificial Sequence: Synthetic oligonucleotide
  Antisense strand to SEQ ID NO: 253096
ucuuucaaacaacuagauu

SEQ ID NO: 253098 - RNA, 19 nt, Artificial Sequence
  Description of Artificial Sequence: Synthetic oligonucleotide
  Sense strand starting at position 277 SEQ ID NO: 3255
aguuguuugaaagagcauu

SEQ ID NO: 253099 - RNA, 19 nt, Artificial Sequence
  Description of Artificial Sequence: Synthetic oligonucleotide
  Antisense strand to SEQ ID NO: 253098
aaugcucuuucaaacaacu

SEQ ID NO: 253100 - RNA, 19 nt, Artificial Sequence
  Description of Artificial Sequence: Synthetic oligonucleotide
  Sense strand starting at position 283 SEQ ID NO: 3255
uugaaagagcauuguaacu

SEQ ID NO: 253101 - RNA, 19 nt, Artificial Sequence
  Description of Artificial Sequence: Synthetic oligonucleotide
  Antisense strand to SEQ ID NO: 253100
aguuacaaugcucuuucaa

SEQ ID NO: 253102 - RNA, 19 nt, Artificial Sequence
  Description of Artificial Sequence: Synthetic oligonucleotide
  Sense strand starting at position 288 SEQ ID NO: 3255
agagcauuguaacuaugua

SEQ ID NO: 253103 - RNA, 19 nt, Artificial Sequence
  Description of Artificial Sequence: Synthetic oligonucleotide
  Antisense strand to SEQ ID NO: 253102
uacauaguuacaaugcucu

SEQ ID NO: 253104 - RNA, 19 nt, Artificial Sequence
  Description of Artificial Sequence: Synthetic oligonucleotide
  Sense strand starting at position 536 SEQ ID NO: 3255
ccaauugucuaucugguua

SEQ ID NO: 253105 - RNA, 19 nt, Artificial Sequence
  Description of Artificial Sequence: Synthetic oligonucleotide
  Antisense strand to SEQ ID NO: 253104
uaaccagauagacaauugg

SEQ ID NO: 253106 - RNA, 19 nt, Artificial Sequence
  Description of Artificial Sequence: Synthetic oligonucleotide
  Sense strand starting at position 541 SEQ ID NO: 3255
ugucuaucugguuagcaau

SEQ ID NO: 253107 - RNA, 19 nt, Artificial Sequence
  Description of Artificial Sequence: Synthetic oligonucleotide
  Antisense strand to SEQ ID NO: 253106
auugcuaaccagauagaca

SEQ ID NO: 253108 - RNA, 19 nt, Artificial Sequence
  Description of Artificial Sequence: Synthetic oligonucleotide
  Sense strand starting at position 543 SEQ ID NO: 3255
ucuaucugguuagcaauau

SEQ ID NO: 253109 - RNA, 19 nt, Artificial Sequence
  Description of Artificial Sequence: Synthetic oligonucleotide
  Antisense strand to SEQ ID NO: 253108
auauugcuaaccagauaga

SEQ ID NO: 253110 - RNA, 19 nt, Artificial Sequence
  Description of Artificial Sequence: Synthetic oligonucleotide
  Sense strand starting at position 547 SEQ ID NO: 3255
ucugguuagcaauauagag

SEQ ID NO: 253111 - RNA, 19 nt, Artificial Sequence
  Description of Artificial Sequence: Synthetic oligonucleotide
  Antisense strand to SEQ ID NO: 253110
cucuauauugcuaaccaga

SEQ ID NO: 253112 - RNA, 19 nt, Artificial Sequence
  Description of Artificial Sequence: Synthetic oligonucleotide
  Sense strand starting at position 682 SEQ ID NO: 3255
cugacauaguaagcgauaa

SEQ ID NO: 253113 - RNA, 19 nt, Artificial Sequence
  Description of Artificial Sequence: Synthetic oligonucleotide
  Antisense strand to SEQ ID NO: 253112
uuaucgcuuacuaugucag

SEQ ID NO: 253114 - RNA, 19 nt, Artificial Sequence
  Description of Artificial Sequence: Synthetic oligonucleotide
  Sense strand starting at position 686 SEQ ID NO: 3255
cauaguaagcgauaaguuc

SEQ ID NO: 253115 - RNA, 19 nt, Artificial Sequence
  Description of Artificial Sequence: Synthetic oligonucleotide
  Antisense strand to SEQ ID NO: 253114
gaacuuaucgcuuacuaug

SEQ ID NO: 253116 - RNA, 19 nt, Artificial Sequence
  Description of Artificial Sequence: Synthetic oligonucleotide
  Sense strand starting at position 704 SEQ ID NO: 3255
cuaauaauguuagugucaa

SEQ ID NO: 253117 - RNA, 19 nt, Artificial Sequence
  Description of Artificial Sequence: Synthetic oligonucleotide
  Antisense strand to SEQ ID NO: 253116
uugacacuaacauuauuag

SEQ ID NO: 253118 - RNA, 19 nt, Artificial Sequence
  Description of Artificial Sequence: Synthetic oligonucleotide
  Sense strand starting at position 717 SEQ ID NO: 3255
ugucaauaauaguccuuua

SEQ ID NO: 253119 - RNA, 19 nt, Artificial Sequence
  Description of Artificial Sequence: Synthetic oligonucleotide
  Antisense strand to SEQ ID NO: 253118
uaaaggacuauuauugaca

SEQ ID NO: 253120 - RNA, 19 nt, Artificial Sequence
  Description of Artificial Sequence: Synthetic oligonucleotide
  Sense strand starting at position 812 SEQ ID NO: 3255
uauagcugucugugacaaa

SEQ ID NO: 253121 - RNA, 19 nt, Artificial Sequence
  Description of Artificial Sequence: Synthetic oligonucleotide
  Antisense strand to SEQ ID NO: 253120
uuugucacagacagcuaua

SEQ ID NO: 253122 - RNA, 19 nt, Artificial Sequence
  Description of Artificial Sequence: Synthetic oligonucleotide
  Sense strand starting at position 846 SEQ ID NO: 3255
gaaguugaagcuugucaau

SEQ ID NO: 253123 - RNA, 19 nt, Artificial Sequence
  Description of Artificial Sequence: Synthetic oligonucleotide
  Antisense strand to SEQ ID NO: 253122
auugacaagcuucaacuuc

SEQ ID NO: 253124 - RNA, 19 nt, Artificial Sequence
  Description of Artificial Sequence: Synthetic oligonucleotide
  Sense strand starting at position 848 SEQ ID NO: 3255
aguugaagcuugucaauuu

SEQ ID NO: 253125 - RNA, 19 nt, Artificial Sequence
  Description of Artificial Sequence: Synthetic oligonucleotide
  Antisense strand to SEQ ID NO: 253124
aaauugacaagcuucaacu

SEQ ID NO: 253126 - RNA, 19 nt, Artificial Sequence
  Description of Artificial Sequence: Synthetic oligonucleotide
  Sense strand starting at position 857 SEQ ID NO: 3255
uugucaauuuguccuuguu

SEQ ID NO: 253127 - RNA, 19 nt, Artificial Sequence
  Description of Artificial Sequence: Synthetic oligonucleotide
  Antisense strand to SEQ ID NO: 253126
aacaaggacaaauugacaa

SEQ ID NO: 253128 - RNA, 19 nt, Artificial Sequence
  Description of Artificial Sequence: Synthetic oligonucleotide
  Sense strand starting at position 859 SEQ ID NO: 3255
gucaauuuguccuuguuac

SEQ ID NO: 253129 - RNA, 19 nt, Artificial Sequence
  Description of Artificial Sequence: Synthetic oligonucleotide
  Antisense strand to SEQ ID NO: 253128
guaacaaggacaaauugac

SEQ ID NO: 253130 - RNA, 19 nt, Artificial Sequence
  Description of Artificial Sequence: Synthetic oligonucleotide
  Sense strand starting at position 863 SEQ ID NO: 3255
auuuguccuuguuacauuu

SEQ ID NO: 253131 - RNA, 19 nt, Artificial Sequence
  Description of Artificial Sequence: Synthetic oligonucleotide
  Antisense strand to SEQ ID NO: 253130
aaauguaacaaggacaaau

SEQ ID NO: 253132 - RNA, 19 nt, Artificial Sequence
  Description of Artificial Sequence: Synthetic oligonucleotide
  Sense strand starting at position 907 SEQ ID NO: 3255
ggaaguuaguuuguaggaa

SEQ ID NO: 253133 - RNA, 19 nt, Artificial Sequence
  Description of Artificial Sequence: Synthetic oligonucleotide
  Antisense strand to SEQ ID NO: 253132
uuccuacaaacuaacuucc

SEQ ID NO: 253134 - RNA, 19 nt, Artificial Sequence
  Description of Artificial Sequence: Synthetic oligonucleotide
  Sense strand starting at position 960 SEQ ID NO: 3255
cccgccaucuaaucagaau

SEQ ID NO: 253135 - RNA, 19 nt, Artificial Sequence
  Description of Artificial Sequence: Synthetic oligonucleotide
  Antisense strand to SEQ ID NO: 253134
auucugauuagauggcggg

SEQ ID NO: 253136 - RNA, 19 nt, Artificial Sequence
  Description of Artificial Sequence: Synthetic oligonucleotide
  Sense strand starting at position 1012 SEQ ID NO: 3255
aguacuaaacaguaaaugu

SEQ ID NO: 253137 - RNA, 19 nt, Artificial Sequence
  Description of Artificial Sequence: Synthetic oligonucleotide
  Antisense strand to SEQ ID NO: 253136
acauuuacuguuuaguacu

SEQ ID NO: 253138 - RNA, 19 nt, Artificial Sequence
  Description of Artificial Sequence: Synthetic oligonucleotide
  Sense strand starting at position 1063 SEQ ID NO: 3255
gccuucugucaucaguaaa

SEQ ID NO: 253139 - RNA, 19 nt, Artificial Sequence
  Description of Artificial Sequence: Synthetic oligonucleotide
  Antisense strand to SEQ ID NO: 253138
uuuacugaugacagaaggc

SEQ ID NO: 253140 - RNA, 19 nt, Artificial Sequence
  Description of Artificial Sequence: Synthetic oligonucleotide
  Sense strand starting at position 1730 SEQ ID NO: 3255
cugcacuuacuagauuaga

SEQ ID NO: 253141 - RNA, 19 nt, Artificial Sequence
  Description of Artificial Sequence: Synthetic oligonucleotide
  Antisense strand to SEQ ID NO: 253140
ucuaaucuaguaagugcag

SEQ ID NO: 253142 - RNA, 19 nt, Artificial Sequence
  Description of Artificial Sequence: Synthetic oligonucleotide
  Sense strand starting at position 1743 SEQ ID NO: 3255
auuagaugucuugaccuuu

SEQ ID NO: 253143 - RNA, 19 nt, Artificial Sequence
  Description of Artificial Sequence: Synthetic oligonucleotide
  Antisense strand to SEQ ID NO: 253142
aaaggucaagacaucuaau

SEQ ID NO: 253144 - RNA, 19 nt, Artificial Sequence
  Description of Artificial Sequence: Synthetic oligonucleotide
  Sense strand starting at position 1749 SEQ ID NO: 3255
ugucuugaccuuuagccaa

SEQ ID NO: 253145 - RNA, 19 nt, Artificial Sequence
  Description of Artificial Sequence: Synthetic oligonucleotide
  Antisense strand to SEQ ID NO: 253144
uuggcuaaaggucaagaca

SEQ ID NO: 253146 - RNA, 19 nt, Artificial Sequence
  Description of Artificial Sequence: Synthetic oligonucleotide
  Sense strand starting at position 1995 SEQ ID NO: 3255
cugacucagccuuagaaac

SEQ ID NO: 253147 - RNA, 19 nt, Artificial Sequence
  Description of Artificial Sequence: Synthetic oligonucleotide
  Antisense strand to SEQ ID NO: 253146
guuucuaaggcugagucag

SEQ ID NO: 253148 - RNA, 19 nt, Artificial Sequence
  Description of Artificial Sequence: Synthetic oligonucleotide
  Sense strand starting at position 2221 SEQ ID NO: 3255
ccaggaccacucugaacua

SEQ ID NO: 253149 - RNA, 19 nt, Artificial Sequence
  Description of Artificial Sequence: Synthetic oligonucleotide
  Antisense strand to SEQ ID NO: 253148
uaguucagagugguccugg

SEQ ID NO: 253150 - RNA, 19 nt, Artificial Sequence
  Description of Artificial Sequence: Synthetic oligonucleotide
  Sense strand starting at position 2262 SEQ ID NO: 3255
uaagguagucgcuaaagaa

SEQ ID NO: 253151 - RNA, 19 nt, Artificial Sequence
  Description of Artificial Sequence: Synthetic oligonucleotide
  Antisense strand to SEQ ID NO: 253150
uucuuuagcgacuaccuua

SEQ ID NO: 253152 - RNA, 19 nt, Artificial Sequence
  Description of Artificial Sequence: Synthetic oligonucleotide
  Sense strand starting at position 2340 SEQ ID NO: 3255
uaaagaaccgccugguuau

SEQ ID NO: 253153 - RNA, 19 nt, Artificial Sequence
  Description of Artificial Sequence: Synthetic oligonucleotide
  Antisense strand to SEQ ID NO: 253152
auaaccaggcgguucuuua

SEQ ID NO: 253154 - RNA, 19 nt, Artificial Sequence
  Description of Artificial Sequence: Synthetic oligonucleotide
  Sense strand starting at position 2341 SEQ ID NO: 3255
aaagaaccgccugguuaua

SEQ ID NO: 253155 - RNA, 19 nt, Artificial Sequence
  Description of Artificial Sequence: Synthetic oligonucleotide
  Antisense strand to SEQ ID NO: 253154
uauaaccaggcgguucuuu

SEQ ID NO: 253156 - RNA, 19 nt, Artificial Sequence
  Description of Artificial Sequence: Synthetic oligonucleotide
  Sense strand starting at position 2560 SEQ ID NO: 3255
uguaauuacuggcugugaa

SEQ ID NO: 253157 - RNA, 19 nt, Artificial Sequence
  Description of Artificial Sequence: Synthetic oligonucleotide
  Antisense strand to SEQ ID NO: 253156
uucacagccaguaauuaca

SEQ ID NO: 253158 - RNA, 19 nt, Artificial Sequence
  Description of Artificial Sequence: Synthetic oligonucleotide
  Sense strand starting at position 2868 SEQ ID NO: 3255
gcaagaucuuagccaguag

SEQ ID NO: 253159 - RNA, 19 nt, Artificial Sequence
  Description of Artificial Sequence: Synthetic oligonucleotide
  Antisense strand to SEQ ID NO: 253158
cuacuggcuaagaucuugc

SEQ ID NO: 253160 - RNA, 19 nt, Artificial Sequence
  Description of Artificial Sequence: Synthetic oligonucleotide
  Sense strand starting at position 2872 SEQ ID NO: 3255
gaucuuagccaguaguuug

SEQ ID NO: 253161 - RNA, 19 nt, Artificial Sequence
  Description of Artificial Sequence: Synthetic oligonucleotide
  Antisense strand to SEQ ID NO: 253160
caaacuacuggcuaagauc

SEQ ID NO: 253162 - RNA, 19 nt, Artificial Sequence
  Description of Artificial Sequence: Synthetic oligonucleotide
  Sense strand starting at position 2877 SEQ ID NO: 3255
uagccaguaguuugacuaa

SEQ ID NO: 253163 - RNA, 19 nt, Artificial Sequence
  Description of Artificial Sequence: Synthetic oligonucleotide
  Antisense strand to SEQ ID NO: 253162
uuagucaaacuacuggcua

SEQ ID NO: 253164 - RNA, 19 nt, Artificial Sequence
  Description of Artificial Sequence: Synthetic oligonucleotide
  Sense strand starting at position 2880 SEQ ID NO: 3255
ccaguaguuugacuaaaug

SEQ ID NO: 253165 - RNA, 19 nt, Artificial Sequence
  Description of Artificial Sequence: Synthetic oligonucleotide
  Antisense strand to SEQ ID NO: 253164
cauuuagucaaacuacugg

SEQ ID NO: 253166 - RNA, 19 nt, Artificial Sequence
  Description of Artificial Sequence: Synthetic oligonucleotide
  Sense strand starting at position 2945 SEQ ID NO: 3255
uuuagaaccuucucgacaa

SEQ ID NO: 253167 - RNA, 19 nt, Artificial Sequence
  Description of Artificial Sequence: Synthetic oligonucleotide
  Antisense strand to SEQ ID NO: 253166
uugucgagaagguucuaaa

SEQ ID NO: 253168 - RNA, 19 nt, Artificial Sequence
  Description of Artificial Sequence: Synthetic oligonucleotide
  Sense strand starting at position 3005 SEQ ID NO: 3255
gcuagagaguuauucccau

SEQ ID NO: 253169 - RNA, 19 nt, Artificial Sequence
  Description of Artificial Sequence: Synthetic oligonucleotide
  Antisense strand to SEQ ID NO: 253168
augggaauaacucucuagc

SEQ ID NO: 253170 - RNA, 19 nt, Artificial Sequence
  Description of Artificial Sequence: Synthetic oligonucleotide
  Sense strand starting at position 3026 SEQ ID NO: 3255
cugagagaaucugcucuau

SEQ ID NO: 253171 - RNA, 19 nt, Artificial Sequence
  Description of Artificial Sequence: Synthetic oligonucleotide
  Antisense strand to SEQ ID NO: 253170
auagagcagauucucucag

SEQ ID NO: 253172 - RNA, 19 nt, Artificial Sequence
  Description of Artificial Sequence: Synthetic oligonucleotide
  Sense strand starting at position 3306 SEQ ID NO: 3255
aucugucuccgggagggua

SEQ ID NO: 253173 - RNA, 19 nt, Artificial Sequence
  Description of Artificial Sequence: Synthetic oligonucleotide
  Antisense strand to SEQ ID NO: 253172
uacccucccggagacagau

SEQ ID NO: 253174 - RNA, 19 nt, Artificial Sequence
  Description of Artificial Sequence: Synthetic oligonucleotide
  Sense strand starting at position 3774 SEQ ID NO: 3255
agccucaagugaucgaacu

SEQ ID NO: 253175 - RNA, 19 nt, Artificial Sequence
  Description of Artificial Sequence: Synthetic oligonucleotide
  Antisense strand to SEQ ID NO: 253174
aguucgaucacuugaggcu

SEQ ID NO: 253176 - RNA, 19 nt, Artificial Sequence
  Description of Artificial Sequence: Synthetic oligonucleotide
  Sense strand starting at position 542 SEQ ID NO: 3256
ugaugaagcugaucuacuu

SEQ ID NO: 253177 - RNA, 19 nt, Artificial Sequence
  Description of Artificial Sequence: Synthetic oligonucleotide
  Antisense strand to SEQ ID NO: 253176
aaguagaucagcuucauca

SEQ ID NO: 253178 - RNA, 19 nt, Artificial Sequence
  Description of Artificial Sequence: Synthetic oligonucleotide
  Sense strand starting at position 2333 SEQ ID NO: 3256
aacuaagagcuauguuuga

SEQ ID NO: 253179 - RNA, 19 nt, Artificial Sequence
  Description of Artificial Sequence: Synthetic oligonucleotide
  Antisense strand to SEQ ID NO: 253178
ucaaacauagcucuuaguu

SEQ ID NO: 253180 - RNA, 19 nt, Artificial Sequence
  Description of Artificial Sequence: Synthetic oligonucleotide
  Sense strand starting at position 2340 SEQ ID NO: 3256
agcuauguuugacuucuau

SEQ ID NO: 253181 - RNA, 19 nt, Artificial Sequence
  Description of Artificial Sequence: Synthetic oligonucleotide
  Antisense strand to SEQ ID NO: 253180
auagaagucaaacauagcu

SEQ ID NO: 253182 - RNA, 19 nt, Artificial Sequence
  Description of Artificial Sequence: Synthetic oligonucleotide
  Sense strand starting at position 2729 SEQ ID NO: 3256
ucaccauuugcccgcgaga

SEQ ID NO: 253183 - RNA, 19 nt, Artificial Sequence
  Description of Artificial Sequence: Synthetic oligonucleotide
  Antisense strand to SEQ ID NO: 253182
ucucgcgggcaaaugguga

SEQ ID NO: 253184 - RNA, 19 nt, Artificial Sequence
  Description of Artificial Sequence: Synthetic oligonucleotide
  Sense strand starting at position 2731 SEQ ID NO: 3256
accauuugcccgcgagaaa

SEQ ID NO: 253185 - RNA, 19 nt, Artificial Sequence
  Description of Artificial Sequence: Synthetic oligonucleotide
  Antisense strand to SEQ ID NO: 253184
uuucucgcgggcaaauggu

SEQ ID NO: 253186 - RNA, 19 nt, Artificial Sequence
  Description of Artificial Sequence: Synthetic oligonucleotide
  Sense strand starting at position 2792 SEQ ID NO: 3256
cuuugaggcucacuugaga

SEQ ID NO: 253187 - RNA, 19 nt, Artificial Sequence
  Description of Artificial Sequence: Synthetic oligonucleotide
  Antisense strand to SEQ ID NO: 253186
ucucaagugagccucaaag

SEQ ID NO: 253188 - RNA, 19 nt, Artificial Sequence
  Description of Artificial Sequence: Synthetic oligonucleotide
  Sense strand starting at position 3181 SEQ ID NO: 3256
uuuggcuuacagcaaugau

SEQ ID NO: 253189 - RNA, 19 nt, Artificial Sequence
  Description of Artificial Sequence: Synthetic oligonucleotide
  Antisense strand to SEQ ID NO: 253188
aucauugcuguaagccaaa

SEQ ID NO: 253190 - RNA, 19 nt, Artificial Sequence
  Description of Artificial Sequence: Synthetic oligonucleotide
  Sense strand starting at position 3777 SEQ ID NO: 3256
gccuauggcucaugaaaca

SEQ ID NO: 253191 - RNA, 19 nt, Artificial Sequence
  Description of Artificial Sequence: Synthetic oligonucleotide
  Antisense strand to SEQ ID NO: 253190
uguuucaugagccauaggc

SEQ ID NO: 253192 - RNA, 19 nt, Artificial Sequence
  Description of Artificial Sequence: Synthetic oligonucleotide
  Sense strand starting at position 92 SEQ ID NO: 3261
cgucccaucucuuugguga

SEQ ID NO: 253193 - RNA, 19 nt, Artificial Sequence
  Description of Artificial Sequence: Synthetic oligonucleotide
  Antisense strand to SEQ ID NO: 253192
ucaccaaagagaugggacg

SEQ ID NO: 253194 - RNA, 19 nt, Artificial Sequence
  Description of Artificial Sequence: Synthetic oligonucleotide
  Sense strand starting at position 93 SEQ ID NO: 3261
gucccaucucuuuggugau

SEQ ID NO: 253195 - RNA, 19 nt, Artificial Sequence
  Description of Artificial Sequence: Synthetic oligonucleotide
  Antisense strand to SEQ ID NO: 253194
aucaccaaagagaugggac

SEQ ID NO: 253196 - RNA, 19 nt, Artificial Sequence
  Description of Artificial Sequence: Synthetic oligonucleotide
  Sense strand starting at position 109 SEQ ID NO: 3261
gauggucugaccugugcau

SEQ ID NO: 253197 - RNA, 19 nt, Artificial Sequence
  Description of Artificial Sequence: Synthetic oligonucleotide
  Antisense strand to SEQ ID NO: 253196
augcacaggucagaccauc

SEQ ID NO: 253198 - RNA, 19 nt, Artificial Sequence
  Description of Artificial Sequence: Synthetic oligonucleotide
  Sense strand starting at position 113 SEQ ID NO: 3261
gucugaccugugcaucgaa

SEQ ID NO: 253199 - RNA, 19 nt, Artificial Sequence
  Description of Artificial Sequence: Synthetic oligonucleotide
  Antisense strand to SEQ ID NO: 253198
uucgaugcacaggucagac

SEQ ID NO: 253200 - RNA, 19 nt, Artificial Sequence
  Description of Artificial Sequence: Synthetic oligonucleotide
  Sense strand starting at position 169 SEQ ID NO: 3261
cgguguuucgucccucuga

SEQ ID NO: 253201 - RNA, 19 nt, Artificial Sequence
  Description of Artificial Sequence: Synthetic oligonucleotide
  Antisense strand to SEQ ID NO: 253200
ucagagggacgaaacaccg

SEQ ID NO: 253202 - RNA, 19 nt, Artificial Sequence
  Description of Artificial Sequence: Synthetic oligonucleotide
  Sense strand starting at position 170 SEQ ID NO: 3261
gguguuucgucccucugau

SEQ ID NO: 253203 - RNA, 19 nt, Artificial Sequence
  Description of Artificial Sequence: Synthetic oligonucleotide
  Antisense strand to SEQ ID NO: 253202
aucagagggacgaaacacc

SEQ ID NO: 253204 - RNA, 19 nt, Artificial Sequence
  Description of Artificial Sequence: Synthetic oligonucleotide
  Sense strand starting at position 282 SEQ ID NO: 3261
gagccagaugccugggaga

SEQ ID NO: 253205 - RNA, 19 nt, Artificial Sequence
  Description of Artificial Sequence: Synthetic oligonucleotide
  Antisense strand to SEQ ID NO: 253204
ucucccaggcaucuggcuc

SEQ ID NO: 253206 - RNA, 19 nt, Artificial Sequence
  Description of Artificial Sequence: Synthetic oligonucleotide
  Sense strand starting at position 431 SEQ ID NO: 3261
guccuagaugcucgacuca

SEQ ID NO: 253207 - RNA, 19 nt, Artificial Sequence
  Description of Artificial Sequence: Synthetic oligonucleotide
  Antisense strand to SEQ ID NO: 253206
ugagucgagcaucuaggac

SEQ ID NO: 253208 - RNA, 19 nt, Artificial Sequence
  Description of Artificial Sequence: Synthetic oligonucleotide
  Sense strand starting at position 536 SEQ ID NO: 3261
accagugagucgugaggaa

SEQ ID NO: 253209 - RNA, 19 nt, Artificial Sequence
  Description of Artificial Sequence: Synthetic oligonucleotide
  Antisense strand to SEQ ID NO: 253208
uuccucacgacucacuggu

SEQ ID NO: 253210 - RNA, 19 nt, Artificial Sequence
  Description of Artificial Sequence: Synthetic oligonucleotide
  Sense strand starting at position 558 SEQ ID NO: 3261
gcgagucuagacugaaguu

SEQ ID NO: 253211 - RNA, 19 nt, Artificial Sequence
  Description of Artificial Sequence: Synthetic oligonucleotide
  Antisense strand to SEQ ID NO: 253210
aacuucagucuagacucgc

SEQ ID NO: 253212 - RNA, 19 nt, Artificial Sequence
  Description of Artificial Sequence: Synthetic oligonucleotide
  Sense strand starting at position 559 SEQ ID NO: 3261
cgagucuagacugaaguuu

SEQ ID NO: 253213 - RNA, 19 nt, Artificial Sequence
  Description of Artificial Sequence: Synthetic oligonucleotide
  Antisense strand to SEQ ID NO: 253212
aaacuucagucuagacucg

SEQ ID NO: 253214 - RNA, 19 nt, Artificial Sequence
  Description of Artificial Sequence: Synthetic oligonucleotide
  Sense strand starting at position 567 SEQ ID NO: 3261
gacugaaguuuguguuucu

SEQ ID NO: 253215 - RNA, 19 nt, Artificial Sequence
  Description of Artificial Sequence: Synthetic oligonucleotide
  Antisense strand to SEQ ID NO: 253214
agaaacacaaacuucaguc

SEQ ID NO: 253216 - RNA, 19 nt, Artificial Sequence
  Description of Artificial Sequence: Synthetic oligonucleotide
  Sense strand starting at position 568 SEQ ID NO: 3261
acugaaguuuguguuucua

SEQ ID NO: 253217 - RNA, 19 nt, Artificial Sequence
  Description of Artificial Sequence: Synthetic oligonucleotide
  Antisense strand to SEQ ID NO: 253216
uagaaacacaaacuucagu

SEQ ID NO: 253218 - RNA, 19 nt, Artificial Sequence
  Description of Artificial Sequence: Synthetic oligonucleotide
  Sense strand starting at position 570 SEQ ID NO: 3261
ugaaguuuguguuucuaaa

SEQ ID NO: 253219 - RNA, 19 nt, Artificial Sequence
  Description of Artificial Sequence: Synthetic oligonucleotide
  Antisense strand to SEQ ID NO: 253218
uuuagaaacacaaacuuca

SEQ ID NO: 253220 - RNA, 19 nt, Artificial Sequence
  Description of Artificial Sequence: Synthetic oligonucleotide
  Sense strand starting at position 629 SEQ ID NO: 3261
ugcaacaaucaguaucaga

SEQ ID NO: 253221 - RNA, 19 nt, Artificial Sequence
  Description of Artificial Sequence: Synthetic oligonucleotide
  Antisense strand to SEQ ID NO: 253220
ucugauacugauuguugca

SEQ ID NO: 253222 - RNA, 19 nt, Artificial Sequence
  Description of Artificial Sequence: Synthetic oligonucleotide
  Sense strand starting at position 896 SEQ ID NO: 3261
ugccgucacuguccugaaa

SEQ ID NO: 253223 - RNA, 19 nt, Artificial Sequence
  Description of Artificial Sequence: Synthetic oligonucleotide
  Antisense strand to SEQ ID NO: 253222
uuucaggacagugacggca

SEQ ID NO: 253224 - RNA, 19 nt, Artificial Sequence
  Description of Artificial Sequence: Synthetic oligonucleotide
  Sense strand starting at position 898 SEQ ID NO: 3261
ccgucacuguccugaaacu

SEQ ID NO: 253225 - RNA, 19 nt, Artificial Sequence
  Description of Artificial Sequence: Synthetic oligonucleotide
  Antisense strand to SEQ ID NO: 253224
aguuucaggacagugacgg

SEQ ID NO: 253226 - RNA, 19 nt, Artificial Sequence
  Description of Artificial Sequence: Synthetic oligonucleotide
  Sense strand starting at position 1063 SEQ ID NO: 3261
gcggucuuccagggaguga

SEQ ID NO: 253227 - RNA, 19 nt, Artificial Sequence
  Description of Artificial Sequence: Synthetic oligonucleotide
  Antisense strand to SEQ ID NO: 253226
ucacucccuggaagaccgc

SEQ ID NO: 253228 - RNA, 19 nt, Artificial Sequence
  Description of Artificial Sequence: Synthetic oligonucleotide
  Sense strand starting at position 1197 SEQ ID NO: 3261
acugguuugagccagcaca

SEQ ID NO: 253229 - RNA, 19 nt, Artificial Sequence
  Description of Artificial Sequence: Synthetic oligonucleotide
  Antisense strand to SEQ ID NO: 253228
ugugcuggcucaaaccagu

SEQ ID NO: 253230 - RNA, 19 nt, Artificial Sequence
  Description of Artificial Sequence: Synthetic oligonucleotide
  Sense strand starting at position 1236 SEQ ID NO: 3261
ggcagaguggucagucgua

SEQ ID NO: 253231 - RNA, 19 nt, Artificial Sequence
  Description of Artificial Sequence: Synthetic oligonucleotide
  Antisense strand to SEQ ID NO: 253230
uacgacugaccacucugcc

SEQ ID NO: 253232 - RNA, 19 nt, Artificial Sequence
  Description of Artificial Sequence: Synthetic oligonucleotide
  Sense strand starting at position 1241 SEQ ID NO: 3261
aguggucagucguaccuau

SEQ ID NO: 253233 - RNA, 19 nt, Artificial Sequence
  Description of Artificial Sequence: Synthetic oligonucleotide
  Antisense strand to SEQ ID NO: 253232
auagguacgacugaccacu

SEQ ID NO: 253234 - RNA, 19 nt, Artificial Sequence
  Description of Artificial Sequence: Synthetic oligonucleotide
  Sense strand starting at position 2092 SEQ ID NO: 3261
cccuuugcuugaggacauu

SEQ ID NO: 253235 - RNA, 19 nt, Artificial Sequence
  Description of Artificial Sequence: Synthetic oligonucleotide
  Antisense strand to SEQ ID NO: 253234
aauguccucaagcaaaggg

SEQ ID NO: 253236 - RNA, 19 nt, Artificial Sequence
  Description of Artificial Sequence: Synthetic oligonucleotide
  Sense strand starting at position 2095 SEQ ID NO: 3261
uuugcuugaggacauugau

SEQ ID NO: 253237 - RNA, 19 nt, Artificial Sequence
  Description of Artificial Sequence: Synthetic oligonucleotide
  Antisense strand to SEQ ID NO: 253236
aucaauguccucaagcaaa

SEQ ID NO: 253238 - RNA, 19 nt, Artificial Sequence
  Description of Artificial Sequence: Synthetic oligonucleotide
  Sense strand starting at position 2169 SEQ ID NO: 3261
acucgcucuccugaaggaa

SEQ ID NO: 253239 - RNA, 19 nt, Artificial Sequence
  Description of Artificial Sequence: Synthetic oligonucleotide
  Antisense strand to SEQ ID NO: 253238
uuccuucaggagagcgagu

SEQ ID NO: 253240 - RNA, 19 nt, Artificial Sequence
  Description of Artificial Sequence: Synthetic oligonucleotide
  Sense strand starting at position 2279 SEQ ID NO: 3261
ugcuguguccaugaacagu

SEQ ID NO: 253241 - RNA, 19 nt, Artificial Sequence
  Description of Artificial Sequence: Synthetic oligonucleotide
  Antisense strand to SEQ ID NO: 253240
acuguucauggacacagca

SEQ ID NO: 253242 - RNA, 19 nt, Artificial Sequence
  Description of Artificial Sequence: Synthetic oligonucleotide
  Sense strand starting at position 2332 SEQ ID NO: 3261
cugagacagcccuguggaa

SEQ ID NO: 253243 - RNA, 19 nt, Artificial Sequence
  Description of Artificial Sequence: Synthetic oligonucleotide
  Antisense strand to SEQ ID NO: 253242
uuccacagggcugucucag

SEQ ID NO: 253244 - RNA, 19 nt, Artificial Sequence
  Description of Artificial Sequence: Synthetic oligonucleotide
  Sense strand starting at position 2334 SEQ ID NO: 3261
gagacagcccuguggaauc

SEQ ID NO: 253245 - RNA, 19 nt, Artificial Sequence
  Description of Artificial Sequence: Synthetic oligonucleotide
  Antisense strand to SEQ ID NO: 253244
gauuccacagggcugucuc

SEQ ID NO: 253246 - RNA, 19 nt, Artificial Sequence
  Description of Artificial Sequence: Synthetic oligonucleotide
  Sense strand starting at position 2964 SEQ ID NO: 3261
ggagaaaugugcagaguga

SEQ ID NO: 253247 - RNA, 19 nt, Artificial Sequence
  Description of Artificial Sequence: Synthetic oligonucleotide
  Antisense strand to SEQ ID NO: 253246
ucacucugcacauuucucc

SEQ ID NO: 253248 - RNA, 19 nt, Artificial Sequence
  Description of Artificial Sequence: Synthetic oligonucleotide
  Sense strand starting at position 3106 SEQ ID NO: 3261
gccagcuucucuuaugcaa

SEQ ID NO: 253249 - RNA, 19 nt, Artificial Sequence
  Description of Artificial Sequence: Synthetic oligonucleotide
  Antisense strand to SEQ ID NO: 253248
uugcauaagagaagcuggc

SEQ ID NO: 253250 - RNA, 19 nt, Artificial Sequence
  Description of Artificial Sequence: Synthetic oligonucleotide
  Sense strand starting at position 3397 SEQ ID NO: 3261
ucaaucuucugaguugacu

SEQ ID NO: 253251 - RNA, 19 nt, Artificial Sequence
  Description of Artificial Sequence: Synthetic oligonucleotide
  Antisense strand to SEQ ID NO: 253250
agucaacucagaagauuga

SEQ ID NO: 253252 - RNA, 19 nt, Artificial Sequence
  Description of Artificial Sequence: Synthetic oligonucleotide
  Sense strand starting at position 3488 SEQ ID NO: 3261
ggacaugacuuguuaccca

SEQ ID NO: 253253 - RNA, 19 nt, Artificial Sequence
  Description of Artificial Sequence: Synthetic oligonucleotide
  Antisense strand to SEQ ID NO: 253252
uggguaacaagucaugucc

SEQ ID NO: 253254 - RNA, 19 nt, Artificial Sequence
  Description of Artificial Sequence: Synthetic oligonucleotide
  Sense strand starting at position 3495 SEQ ID NO: 3261
acuuguuacccaggacugu

SEQ ID NO: 253255 - RNA, 19 nt, Artificial Sequence
  Description of Artificial Sequence: Synthetic oligonucleotide
  Antisense strand to SEQ ID NO: 253254
acaguccuggguaacaagu

SEQ ID NO: 253256 - RNA, 19 nt, Artificial Sequence
  Description of Artificial Sequence: Synthetic oligonucleotide
  Sense strand starting at position 3610 SEQ ID NO: 3261
gucucugacgcuggguaaa

SEQ ID NO: 253257 - RNA, 19 nt, Artificial Sequence
  Description of Artificial Sequence: Synthetic oligonucleotide
  Antisense strand to SEQ ID NO: 253256
uuuacccagcgucagagac

SEQ ID NO: 253258 - RNA, 19 nt, Artificial Sequence
  Description of Artificial Sequence: Synthetic oligonucleotide
  Sense strand starting at position 3669 SEQ ID NO: 3261
guggaucuacucugggaga

SEQ ID NO: 253259 - RNA, 19 nt, Artificial Sequence
  Description of Artificial Sequence: Synthetic oligonucleotide
  Antisense strand to SEQ ID NO: 253258
ucucccagaguagauccac

SEQ ID NO: 253260 - RNA, 19 nt, Artificial Sequence
  Description of Artificial Sequence: Synthetic oligonucleotide
  Sense strand starting at position 3717 SEQ ID NO: 3261
ggcacaggcuucuccuaaa

SEQ ID NO: 253261 - RNA, 19 nt, Artificial Sequence
  Description of Artificial Sequence: Synthetic oligonucleotide
  Antisense strand to SEQ ID NO: 253260
uuuaggagaagccugugcc

SEQ ID NO: 253262 - RNA, 19 nt, Artificial Sequence
  Description of Artificial Sequence: Synthetic oligonucleotide
  Sense strand starting at position 293 SEQ ID NO: 3262
augaaaccugucugaaauu

SEQ ID NO: 253263 - RNA, 19 nt, Artificial Sequence
  Description of Artificial Sequence: Synthetic oligonucleotide
  Antisense strand to SEQ ID NO: 253262
aauuucagacagguuucau

SEQ ID NO: 253264 - RNA, 19 nt, Artificial Sequence
  Description of Artificial Sequence: Synthetic oligonucleotide
  Sense strand starting at position 294 SEQ ID NO: 3262
ugaaaccugucugaaauua

SEQ ID NO: 253265 - RNA, 19 nt, Artificial Sequence
  Description of Artificial Sequence: Synthetic oligonucleotide
  Antisense strand to SEQ ID NO: 253264
uaauuucagacagguuuca

SEQ ID NO: 253266 - RNA, 19 nt, Artificial Sequence
  Description of Artificial Sequence: Synthetic oligonucleotide
  Sense strand starting at position 447 SEQ ID NO: 3262
ugaauagucacaugcgcau

SEQ ID NO: 253267 - RNA, 19 nt, Artificial Sequence
  Description of Artificial Sequence: Synthetic oligonucleotide
  Antisense strand to SEQ ID NO: 253266
augcgcaugugacuauuca

SEQ ID NO: 253268 - RNA, 19 nt, Artificial Sequence
  Description of Artificial Sequence: Synthetic oligonucleotide
  Sense strand starting at position 603 SEQ ID NO: 3262
acaguuaugccacacgcau

SEQ ID NO: 253269 - RNA, 19 nt, Artificial Sequence
  Description of Artificial Sequence: Synthetic oligonucleotide
  Antisense strand to SEQ ID NO: 253268
augcguguggcauaacugu

SEQ ID NO: 253270 - RNA, 19 nt, Artificial Sequence
  Description of Artificial Sequence: Synthetic oligonucleotide
  Sense strand starting at position 872 SEQ ID NO: 3262
auggcucaguccucuaauu

SEQ ID NO: 253271 - RNA, 19 nt, Artificial Sequence
  Description of Artificial Sequence: Synthetic oligonucleotide
  Antisense strand to SEQ ID NO: 253270
aauuagaggacugagccau

SEQ ID NO: 253272 - RNA, 19 nt, Artificial Sequence
  Description of Artificial Sequence: Synthetic oligonucleotide
  Sense strand starting at position 928 SEQ ID NO: 3262
cugagagugggcuaugcuu

SEQ ID NO: 253273 - RNA, 19 nt, Artificial Sequence
  Description of Artificial Sequence: Synthetic oligonucleotide
  Antisense strand to SEQ ID NO: 253272
aagcauagcccacucucag

SEQ ID NO: 253274 - RNA, 19 nt, Artificial Sequence
  Description of Artificial Sequence: Synthetic oligonucleotide
  Sense strand starting at position 1082 SEQ ID NO: 3262
cccuaucugucaccuugau

SEQ ID NO: 253275 - RNA, 19 nt, Artificial Sequence
  Description of Artificial Sequence: Synthetic oligonucleotide
  Antisense strand to SEQ ID NO: 253274
aucaaggugacagauaggg

SEQ ID NO: 253276 - RNA, 19 nt, Artificial Sequence
  Description of Artificial Sequence: Synthetic oligonucleotide
  Sense strand starting at position 1267 SEQ ID NO: 3262
gccaacucauucucugaga

SEQ ID NO: 253277 - RNA, 19 nt, Artificial Sequence
  Description of Artificial Sequence: Synthetic oligonucleotide
  Antisense strand to SEQ ID NO: 253276
ucucagagaaugaguuggc

SEQ ID NO: 253278 - RNA, 19 nt, Artificial Sequence
  Description of Artificial Sequence: Synthetic oligonucleotide
  Sense strand starting at position 1515 SEQ ID NO: 3262
gcugaucacaggugacauc

SEQ ID NO: 253279 - RNA, 19 nt, Artificial Sequence
  Description of Artificial Sequence: Synthetic oligonucleotide
  Antisense strand to SEQ ID NO: 253278
gaugucaccugugaucagc

SEQ ID NO: 253280 - RNA, 19 nt, Artificial Sequence
  Description of Artificial Sequence: Synthetic oligonucleotide
  Sense strand starting at position 2518 SEQ ID NO: 3262
uggcaaaguuacuugugau

SEQ ID NO: 253281 - RNA, 19 nt, Artificial Sequence
  Description of Artificial Sequence: Synthetic oligonucleotide
  Antisense strand to SEQ ID NO: 253280
aucacaaguaacuuugcca

SEQ ID NO: 253282 - RNA, 19 nt, Artificial Sequence
  Description of Artificial Sequence: Synthetic oligonucleotide
  Sense strand starting at position 2519 SEQ ID NO: 3262
ggcaaaguuacuugugauu

SEQ ID NO: 253283 - RNA, 19 nt, Artificial Sequence
  Description of Artificial Sequence: Synthetic oligonucleotide
  Antisense strand to SEQ ID NO: 253282
aaucacaaguaacuuugcc

SEQ ID NO: 253284 - RNA, 19 nt, Artificial Sequence
  Description of Artificial Sequence: Synthetic oligonucleotide
  Sense strand starting at position 2556 SEQ ID NO: 3262
gcauccaaacugugaccaa

SEQ ID NO: 253285 - RNA, 19 nt, Artificial Sequence
  Description of Artificial Sequence: Synthetic oligonucleotide
  Antisense strand to SEQ ID NO: 253284
uuggucacaguuuggaugc

SEQ ID NO: 253286 - RNA, 19 nt, Artificial Sequence
  Description of Artificial Sequence: Synthetic oligonucleotide
  Sense strand starting at position 2581 SEQ ID NO: 3262
ccuggucagcaguacaaua

SEQ ID NO: 253287 - RNA, 19 nt, Artificial Sequence
  Description of Artificial Sequence: Synthetic oligonucleotide
  Antisense strand to SEQ ID NO: 253286
uauuguacugcugaccagg

SEQ ID NO: 253288 - RNA, 19 nt, Artificial Sequence
  Description of Artificial Sequence: Synthetic oligonucleotide
  Sense strand starting at position 2583 SEQ ID NO: 3262
uggucagcaguacaauaaa

SEQ ID NO: 253289 - RNA, 19 nt, Artificial Sequence
  Description of Artificial Sequence: Synthetic oligonucleotide
  Antisense strand to SEQ ID NO: 253288
uuuauuguacugcugacca

SEQ ID NO: 253290 - RNA, 19 nt, Artificial Sequence
  Description of Artificial Sequence: Synthetic oligonucleotide
  Sense strand starting at position 2617 SEQ ID NO: 3262
uggaaaucuuuagcauuga

SEQ ID NO: 253291 - RNA, 19 nt, Artificial Sequence
  Description of Artificial Sequence: Synthetic oligonucleotide
  Antisense strand to SEQ ID NO: 253290
ucaaugcuaaagauuucca

SEQ ID NO: 253292 - RNA, 19 nt, Artificial Sequence
  Description of Artificial Sequence: Synthetic oligonucleotide
  Sense strand starting at position 2659 SEQ ID NO: 3262
cuagaaaggucagaaagcu

SEQ ID NO: 253293 - RNA, 19 nt, Artificial Sequence
  Description of Artificial Sequence: Synthetic oligonucleotide
  Antisense strand to SEQ ID NO: 253292
agcuuucugaccuuucuag

SEQ ID NO: 253294 - RNA, 19 nt, Artificial Sequence
  Description of Artificial Sequence: Synthetic oligonucleotide
  Sense strand starting at position 2667 SEQ ID NO: 3262
gucagaaagcuugagcagu

SEQ ID NO: 253295 - RNA, 19 nt, Artificial Sequence
  Description of Artificial Sequence: Synthetic oligonucleotide
  Antisense strand to SEQ ID NO: 253294
acugcucaagcuuucugac

SEQ ID NO: 253296 - RNA, 19 nt, Artificial Sequence
  Description of Artificial Sequence: Synthetic oligonucleotide
  Sense strand starting at position 2669 SEQ ID NO: 3262
cagaaagcuugagcaguau

SEQ ID NO: 253297 - RNA, 19 nt, Artificial Sequence
  Description of Artificial Sequence: Synthetic oligonucleotide
  Antisense strand to SEQ ID NO: 253296
auacugcucaagcuuucug

SEQ ID NO: 253298 - RNA, 19 nt, Artificial Sequence
  Description of Artificial Sequence: Synthetic oligonucleotide
  Sense strand starting at position 2713 SEQ ID NO: 3262
gcuggcagccgucacuaaa

SEQ ID NO: 253299 - RNA, 19 nt, Artificial Sequence
  Description of Artificial Sequence: Synthetic oligonucleotide
  Antisense strand to SEQ ID NO: 253298
uuuagugacggcugccagc

SEQ ID NO: 253300 - RNA, 19 nt, Artificial Sequence
  Description of Artificial Sequence: Synthetic oligonucleotide
  Sense strand starting at position 2739 SEQ ID NO: 3262
gggcacugauccucccaaa

SEQ ID NO: 253301 - RNA, 19 nt, Artificial Sequence
  Description of Artificial Sequence: Synthetic oligonucleotide
  Antisense strand to SEQ ID NO: 253300
uuugggaggaucagugccc

SEQ ID NO: 253302 - RNA, 19 nt, Artificial Sequence
  Description of Artificial Sequence: Synthetic oligonucleotide
  Sense strand starting at position 2855 SEQ ID NO: 3262
ggagguacucauuaagcac

SEQ ID NO: 253303 - RNA, 19 nt, Artificial Sequence
  Description of Artificial Sequence: Synthetic oligonucleotide
  Antisense strand to SEQ ID NO: 253302
gugcuuaaugaguaccucc

SEQ ID NO: 253304 - RNA, 19 nt, Artificial Sequence
  Description of Artificial Sequence: Synthetic oligonucleotide
  Sense strand starting at position 2894 SEQ ID NO: 3262
aagcauuggguacaguaua

SEQ ID NO: 253305 - RNA, 19 nt, Artificial Sequence
  Description of Artificial Sequence: Synthetic oligonucleotide
  Antisense strand to SEQ ID NO: 253304
uauacuguacccaaugcuu

SEQ ID NO: 253306 - RNA, 19 nt, Artificial Sequence
  Description of Artificial Sequence: Synthetic oligonucleotide
  Sense strand starting at position 2915 SEQ ID NO: 3262
uuguaaauguaguccaauu

SEQ ID NO: 253307 - RNA, 19 nt, Artificial Sequence
  Description of Artificial Sequence: Synthetic oligonucleotide
  Antisense strand to SEQ ID NO: 253306
aauuggacuacauuuacaa

SEQ ID NO: 253308 - RNA, 19 nt, Artificial Sequence
  Description of Artificial Sequence: Synthetic oligonucleotide
  Sense strand starting at position 3036 SEQ ID NO: 3262
agggaauaccgcugacucu

SEQ ID NO: 253309 - RNA, 19 nt, Artificial Sequence
  Description of Artificial Sequence: Synthetic oligonucleotide
  Antisense strand to SEQ ID NO: 253308
agagucagcgguauucccu

SEQ ID NO: 253310 - RNA, 19 nt, Artificial Sequence
  Description of Artificial Sequence: Synthetic oligonucleotide
  Sense strand starting at position 3061 SEQ ID NO: 3262
uagguagccgaaugcuuaa

SEQ ID NO: 253311 - RNA, 19 nt, Artificial Sequence
  Description of Artificial Sequence: Synthetic oligonucleotide
  Antisense strand to SEQ ID NO: 253310
uuaagcauucggcuaccua

SEQ ID NO: 253312 - RNA, 19 nt, Artificial Sequence
  Description of Artificial Sequence: Synthetic oligonucleotide
  Sense strand starting at position 3064 SEQ ID NO: 3262
guagccgaaugcuuaagaa

SEQ ID NO: 253313 - RNA, 19 nt, Artificial Sequence
  Description of Artificial Sequence: Synthetic oligonucleotide
  Antisense strand to SEQ ID NO: 253312
uucuuaagcauucggcuac

SEQ ID NO: 253314 - RNA, 19 nt, Artificial Sequence
  Description of Artificial Sequence: Synthetic oligonucleotide
  Sense strand starting at position 3112 SEQ ID NO: 3262
gcuacaagucaaugccaua

SEQ ID NO: 253315 - RNA, 19 nt, Artificial Sequence
  Description of Artificial Sequence: Synthetic oligonucleotide
  Antisense strand to SEQ ID NO: 253314
uauggcauugacuuguagc

SEQ ID NO: 253316 - RNA, 19 nt, Artificial Sequence
  Description of Artificial Sequence: Synthetic oligonucleotide
  Sense strand starting at position 3302 SEQ ID NO: 3262
ugugcaacauaaucuguaa

SEQ ID NO: 253317 - RNA, 19 nt, Artificial Sequence
  Description of Artificial Sequence: Synthetic oligonucleotide
  Antisense strand to SEQ ID NO: 253316
uuacagauuauguugcaca

SEQ ID NO: 253318 - RNA, 19 nt, Artificial Sequence
  Description of Artificial Sequence: Synthetic oligonucleotide
  Sense strand starting at position 3305 SEQ ID NO: 3262
gcaacauaaucuguaaaug

SEQ ID NO: 253319 - RNA, 19 nt, Artificial Sequence
  Description of Artificial Sequence: Synthetic oligonucleotide
  Antisense strand to SEQ ID NO: 253318
cauuuacagauuauguugc

SEQ ID NO: 253320 - RNA, 19 nt, Artificial Sequence
  Description of Artificial Sequence: Synthetic oligonucleotide
  Sense strand starting at position 3409 SEQ ID NO: 3262
aggcuuagagucugauuga

SEQ ID NO: 253321 - RNA, 19 nt, Artificial Sequence
  Description of Artificial Sequence: Synthetic oligonucleotide
  Antisense strand to SEQ ID NO: 253320
ucaaucagacucuaagccu

SEQ ID NO: 253322 - RNA, 19 nt, Artificial Sequence
  Description of Artificial Sequence: Synthetic oligonucleotide
  Sense strand starting at position 3416 SEQ ID NO: 3262
gagucugauugagcccaaa

SEQ ID NO: 253323 - RNA, 19 nt, Artificial Sequence
  Description of Artificial Sequence: Synthetic oligonucleotide
  Antisense strand to SEQ ID NO: 253322
uuugggcucaaucagacuc

SEQ ID NO: 253324 - RNA, 19 nt, Artificial Sequence
  Description of Artificial Sequence: Synthetic oligonucleotide
  Sense strand starting at position 3577 SEQ ID NO: 3262
gugcucuggcucuagauau

SEQ ID NO: 253325 - RNA, 19 nt, Artificial Sequence
  Description of Artificial Sequence: Synthetic oligonucleotide
  Antisense strand to SEQ ID NO: 253324
auaucuagagccagagcac

SEQ ID NO: 253326 - RNA, 19 nt, Artificial Sequence
  Description of Artificial Sequence: Synthetic oligonucleotide
  Sense strand starting at position 3611 SEQ ID NO: 3262
gagugaugucagcagaaag

SEQ ID NO: 253327 - RNA, 19 nt, Artificial Sequence
  Description of Artificial Sequence: Synthetic oligonucleotide
  Antisense strand to SEQ ID NO: 253326
cuuucugcugacaucacuc

SEQ ID NO: 253328 - RNA, 19 nt, Artificial Sequence
  Description of Artificial Sequence: Synthetic oligonucleotide
  Sense strand starting at position 3622 SEQ ID NO: 3262
gcagaaagugguggaguaa

SEQ ID NO: 253329 - RNA, 19 nt, Artificial Sequence
  Description of Artificial Sequence: Synthetic oligonucleotide
  Antisense strand to SEQ ID NO: 253328
uuacuccaccacuuucugc

SEQ ID NO: 253330 - RNA, 19 nt, Artificial Sequence
  Description of Artificial Sequence: Synthetic oligonucleotide
  Sense strand starting at position 3740 SEQ ID NO: 3262
ucaguaacccuaggaacau

SEQ ID NO: 253331 - RNA, 19 nt, Artificial Sequence
  Description of Artificial Sequence: Synthetic oligonucleotide
  Antisense strand to SEQ ID NO: 253330
auguuccuaggguuacuga

SEQ ID NO: 253332 - RNA, 19 nt, Artificial Sequence
  Description of Artificial Sequence: Synthetic oligonucleotide
  Sense strand starting at position 3801 SEQ ID NO: 3262
aacacaaaccagugagguu

SEQ ID NO: 253333 - RNA, 19 nt, Artificial Sequence
  Description of Artificial Sequence: Synthetic oligonucleotide
  Antisense strand to SEQ ID NO: 253332
aaccucacugguuuguguu

SEQ ID NO: 253334 - RNA, 19 nt, Artificial Sequence
  Description of Artificial Sequence: Synthetic oligonucleotide
  Sense strand starting at position 3864 SEQ ID NO: 3262
cuccauggcuuccuugaau

SEQ ID NO: 253335 - RNA, 19 nt, Artificial Sequence
  Description of Artificial Sequence: Synthetic oligonucleotide
  Antisense strand to SEQ ID NO: 253334
auucaaggaagccauggag

SEQ ID NO: 253336 - RNA, 19 nt, Artificial Sequence
  Description of Artificial Sequence: Synthetic oligonucleotide
  Sense strand starting at position 3870 SEQ ID NO: 3262
ggcuuccuugaauaauaau

SEQ ID NO: 253337 - RNA, 19 nt, Artificial Sequence
  Description of Artificial Sequence: Synthetic oligonucleotide
  Antisense strand to SEQ ID NO: 253336
auuauuauucaaggaagcc

SEQ ID NO: 253338 - RNA, 19 nt, Artificial Sequence
  Description of Artificial Sequence: Synthetic oligonucleotide
  Sense strand starting at position 3936 SEQ ID NO: 3262
acuguaugccaauaaauga

SEQ ID NO: 253339 - RNA, 19 nt, Artificial Sequence
  Description of Artificial Sequence: Synthetic oligonucleotide
  Antisense strand to SEQ ID NO: 253338
ucauuuauuggcauacagu

SEQ ID NO: 253340 - RNA, 19 nt, Artificial Sequence
  Description of Artificial Sequence: Synthetic oligonucleotide
  Sense strand starting at position 3970 SEQ ID NO: 3262
uggagagauuccuagaagg

SEQ ID NO: 253341 - RNA, 19 nt, Artificial Sequence
  Description of Artificial Sequence: Synthetic oligonucleotide
  Antisense strand to SEQ ID NO: 253340
ccuucuaggaaucucucca

SEQ ID NO: 253342 - RNA, 19 nt, Artificial Sequence
  Description of Artificial Sequence: Synthetic oligonucleotide
  Sense strand starting at position 93 SEQ ID NO: 3259
cucuuuauguuucuguuau

SEQ ID NO: 253343 - RNA, 19 nt, Artificial Sequence
  Description of Artificial Sequence: Synthetic oligonucleotide
  Antisense strand to SEQ ID NO: 253342
auaacagaaacauaaagag

SEQ ID NO: 253344 - RNA, 19 nt, Artificial Sequence
  Description of Artificial Sequence: Synthetic oligonucleotide
  Sense strand starting at position 95 SEQ ID NO: 3259
cuuuauguuucuguuaucu

SEQ ID NO: 253345 - RNA, 19 nt, Artificial Sequence
  Description of Artificial Sequence: Synthetic oligonucleotide
  Antisense strand to SEQ ID NO: 253344
agauaacagaaacauaaag

SEQ ID NO: 253346 - RNA, 19 nt, Artificial Sequence
  Description of Artificial Sequence: Synthetic oligonucleotide
  Sense strand starting at position 120 SEQ ID NO: 3259
uuuccagguuucuccuuau

SEQ ID NO: 253347 - RNA, 19 nt, Artificial Sequence
  Description of Artificial Sequence: Synthetic oligonucleotide
  Antisense strand to SEQ ID NO: 253346
auaaggagaaaccuggaaa

SEQ ID NO: 253348 - RNA, 19 nt, Artificial Sequence
  Description of Artificial Sequence: Synthetic oligonucleotide
  Sense strand starting at position 123 SEQ ID NO: 3259
ccagguuucuccuuauucu

SEQ ID NO: 253349 - RNA, 19 nt, Artificial Sequence
  Description of Artificial Sequence: Synthetic oligonucleotide
  Antisense strand to SEQ ID NO: 253348
agaauaaggagaaaccugg

SEQ ID NO: 253350 - RNA, 19 nt, Artificial Sequence
  Description of Artificial Sequence: Synthetic oligonucleotide
  Sense strand starting at position 126 SEQ ID NO: 3259
gguuucuccuuauucucua

SEQ ID NO: 253351 - RNA, 19 nt, Artificial Sequence
  Description of Artificial Sequence: Synthetic oligonucleotide
  Antisense strand to SEQ ID NO: 253350
uagagaauaaggagaaacc

SEQ ID NO: 253352 - RNA, 19 nt, Artificial Sequence
  Description of Artificial Sequence: Synthetic oligonucleotide
  Sense strand starting at position 140 SEQ ID NO: 3259
cucuaagacgaguaguauu

SEQ ID NO: 253353 - RNA, 19 nt, Artificial Sequence
  Description of Artificial Sequence: Synthetic oligonucleotide
  Antisense strand to SEQ ID NO: 253352
aauacuacucgucuuagag

SEQ ID NO: 253354 - RNA, 19 nt, Artificial Sequence
  Description of Artificial Sequence: Synthetic oligonucleotide
  Sense strand starting at position 150 SEQ ID NO: 3259
aguaguauugccuggacga

SEQ ID NO: 253355 - RNA, 19 nt, Artificial Sequence
  Description of Artificial Sequence: Synthetic oligonucleotide
  Antisense strand to SEQ ID NO: 253354
ucguccaggcaauacuacu

SEQ ID NO: 253356 - RNA, 19 nt, Artificial Sequence
  Description of Artificial Sequence: Synthetic oligonucleotide
  Sense strand starting at position 151 SEQ ID NO: 3259
guaguauugccuggacgag

SEQ ID NO: 253357 - RNA, 19 nt, Artificial Sequence
  Description of Artificial Sequence: Synthetic oligonucleotide
  Antisense strand to SEQ ID NO: 253356
cucguccaggcaauacuac

SEQ ID NO: 253358 - RNA, 19 nt, Artificial Sequence
  Description of Artificial Sequence: Synthetic oligonucleotide
  Sense strand starting at position 200 SEQ ID NO: 3259
gacugucaucccuguguca

SEQ ID NO: 253359 - RNA, 19 nt, Artificial Sequence
  Description of Artificial Sequence: Synthetic oligonucleotide
  Antisense strand to SEQ ID NO: 253358
ugacacagggaugacaguc

SEQ ID NO: 253360 - RNA, 19 nt, Artificial Sequence
  Description of Artificial Sequence: Synthetic oligonucleotide
  Sense strand starting at position 203 SEQ ID NO: 3259
ugucaucccugugucauuu

SEQ ID NO: 253361 - RNA, 19 nt, Artificial Sequence
  Description of Artificial Sequence: Synthetic oligonucleotide
  Antisense strand to SEQ ID NO: 253360
aaaugacacagggaugaca

SEQ ID NO: 253362 - RNA, 19 nt, Artificial Sequence
  Description of Artificial Sequence: Synthetic oligonucleotide
  Sense strand starting at position 209 SEQ ID NO: 3259
cccugugucauuugagggu

SEQ ID NO: 253363 - RNA, 19 nt, Artificial Sequence
  Description of Artificial Sequence: Synthetic oligonucleotide
  Antisense strand to SEQ ID NO: 253362
acccucaaaugacacaggg

SEQ ID NO: 253364 - RNA, 19 nt, Artificial Sequence
  Description of Artificial Sequence: Synthetic oligonucleotide
  Sense strand starting at position 748 SEQ ID NO: 3259
ggagcuaacugggaagaga

SEQ ID NO: 253365 - RNA, 19 nt, Artificial Sequence
  Description of Artificial Sequence: Synthetic oligonucleotide
  Antisense strand to SEQ ID NO: 253364
ucucuucccaguuagcucc

SEQ ID NO: 253366 - RNA, 19 nt, Artificial Sequence
  Description of Artificial Sequence: Synthetic oligonucleotide
  Sense strand starting at position 871 SEQ ID NO: 3259
agccuuaauggcgaucaca

SEQ ID NO: 253367 - RNA, 19 nt, Artificial Sequence
  Description of Artificial Sequence: Synthetic oligonucleotide
  Antisense strand to SEQ ID NO: 253366
ugugaucgccauuaaggcu

SEQ ID NO: 253368 - RNA, 19 nt, Artificial Sequence
  Description of Artificial Sequence: Synthetic oligonucleotide
  Sense strand starting at position 1221 SEQ ID NO: 3259
ggugaccucaucugugaaa

SEQ ID NO: 253369 - RNA, 19 nt, Artificial Sequence
  Description of Artificial Sequence: Synthetic oligonucleotide
  Antisense strand to SEQ ID NO: 253368
uuucacagaugaggucacc

SEQ ID NO: 253370 - RNA, 19 nt, Artificial Sequence
  Description of Artificial Sequence: Synthetic oligonucleotide
  Sense strand starting at position 1508 SEQ ID NO: 3259
ggugucugaccuuggacaa

SEQ ID NO: 253371 - RNA, 19 nt, Artificial Sequence
  Description of Artificial Sequence: Synthetic oligonucleotide
  Antisense strand to SEQ ID NO: 253370
uuguccaaggucagacacc

SEQ ID NO: 253372 - RNA, 19 nt, Artificial Sequence
  Description of Artificial Sequence: Synthetic oligonucleotide
  Sense strand starting at position 2077 SEQ ID NO: 3259
gggagguugcgggaguaua

SEQ ID NO: 253373 - RNA, 19 nt, Artificial Sequence
  Description of Artificial Sequence: Synthetic oligonucleotide
  Antisense strand to SEQ ID NO: 253372
uauacucccgcaaccuccc

SEQ ID NO: 253374 - RNA, 19 nt, Artificial Sequence
  Description of Artificial Sequence: Synthetic oligonucleotide
  Sense strand starting at position 2300 SEQ ID NO: 3259
cgggucaaguccuucccaa

SEQ ID NO: 253375 - RNA, 19 nt, Artificial Sequence
  Description of Artificial Sequence: Synthetic oligonucleotide
  Antisense strand to SEQ ID NO: 253374
uugggaaggacuugacccg

SEQ ID NO: 253376 - RNA, 19 nt, Artificial Sequence
  Description of Artificial Sequence: Synthetic oligonucleotide
  Sense strand starting at position 2714 SEQ ID NO: 3259
cccuaacuuggcgaaagau

SEQ ID NO: 253377 - RNA, 19 nt, Artificial Sequence
  Description of Artificial Sequence: Synthetic oligonucleotide
  Antisense strand to SEQ ID NO: 253376
aucuuucgccaaguuaggg

SEQ ID NO: 253378 - RNA, 19 nt, Artificial Sequence
  Description of Artificial Sequence: Synthetic oligonucleotide
  Sense strand starting at position 2788 SEQ ID NO: 3259
cacgccucuguauaaugaa

SEQ ID NO: 253379 - RNA, 19 nt, Artificial Sequence
  Description of Artificial Sequence: Synthetic oligonucleotide
  Antisense strand to SEQ ID NO: 253378
uucauuauacagaggcgug

SEQ ID NO: 253380 - RNA, 19 nt, Artificial Sequence
  Description of Artificial Sequence: Synthetic oligonucleotide
  Sense strand starting at position 2862 SEQ ID NO: 3259
agggaaucucuucggagga

SEQ ID NO: 253381 - RNA, 19 nt, Artificial Sequence
  Description of Artificial Sequence: Synthetic oligonucleotide
  Antisense strand to SEQ ID NO: 253380
uccuccgaagagauucccu

SEQ ID NO: 253382 - RNA, 19 nt, Artificial Sequence
  Description of Artificial Sequence: Synthetic oligonucleotide
  Sense strand starting at position 2866 SEQ ID NO: 3259
aaucucuucggaggaaauu

SEQ ID NO: 253383 - RNA, 19 nt, Artificial Sequence
  Description of Artificial Sequence: Synthetic oligonucleotide
  Antisense strand to SEQ ID NO: 253382
aauuuccuccgaagagauu

SEQ ID NO: 253384 - RNA, 19 nt, Artificial Sequence
  Description of Artificial Sequence: Synthetic oligonucleotide
  Sense strand starting at position 2977 SEQ ID NO: 3259
agaugucacacugagguuu

SEQ ID NO: 253385 - RNA, 19 nt, Artificial Sequence
  Description of Artificial Sequence: Synthetic oligonucleotide
  Antisense strand to SEQ ID NO: 253384
aaaccucagugugacaucu

SEQ ID NO: 253386 - RNA, 19 nt, Artificial Sequence
  Description of Artificial Sequence: Synthetic oligonucleotide
  Sense strand starting at position 3006 SEQ ID NO: 3259
cggccugauguguaaaugu

SEQ ID NO: 253387 - RNA, 19 nt, Artificial Sequence
  Description of Artificial Sequence: Synthetic oligonucleotide
  Antisense strand to SEQ ID NO: 253386
acauuuacacaucaggccg

SEQ ID NO: 253388 - RNA, 19 nt, Artificial Sequence
  Description of Artificial Sequence: Synthetic oligonucleotide
  Sense strand starting at position 3035 SEQ ID NO: 3259
cggucuuggcagcagagaa

SEQ ID NO: 253389 - RNA, 19 nt, Artificial Sequence
  Description of Artificial Sequence: Synthetic oligonucleotide
  Antisense strand to SEQ ID NO: 253388
uucucugcugccaagaccg

SEQ ID NO: 253390 - RNA, 19 nt, Artificial Sequence
  Description of Artificial Sequence: Synthetic oligonucleotide
  Sense strand starting at position 3060 SEQ ID NO: 3259
ucuagaaaugacgguguga

SEQ ID NO: 253391 - RNA, 19 nt, Artificial Sequence
  Description of Artificial Sequence: Synthetic oligonucleotide
  Antisense strand to SEQ ID NO: 253390
ucacaccgucauuucuaga

SEQ ID NO: 253392 - RNA, 19 nt, Artificial Sequence
  Description of Artificial Sequence: Synthetic oligonucleotide
  Sense strand starting at position 3062 SEQ ID NO: 3259
uagaaaugacggugugaau

SEQ ID NO: 253393 - RNA, 19 nt, Artificial Sequence
  Description of Artificial Sequence: Synthetic oligonucleotide
  Antisense strand to SEQ ID NO: 253392
auucacaccgucauuucua

SEQ ID NO: 253394 - RNA, 19 nt, Artificial Sequence
  Description of Artificial Sequence: Synthetic oligonucleotide
  Sense strand starting at position 3138 SEQ ID NO: 3259
guuccaccugcagaaauaa

SEQ ID NO: 253395 - RNA, 19 nt, Artificial Sequence
  Description of Artificial Sequence: Synthetic oligonucleotide
  Antisense strand to SEQ ID NO: 253394
uuauuucugcagguggaac

SEQ ID NO: 253396 - RNA, 19 nt, Artificial Sequence
  Description of Artificial Sequence: Synthetic oligonucleotide
  Sense strand starting at position 3147 SEQ ID NO: 3259
gcagaaauaagcugggaaa

SEQ ID NO: 253397 - RNA, 19 nt, Artificial Sequence
  Description of Artificial Sequence: Synthetic oligonucleotide
  Antisense strand to SEQ ID NO: 253396
uuucccagcuuauuucugc

SEQ ID NO: 253398 - RNA, 19 nt, Artificial Sequence
  Description of Artificial Sequence: Synthetic oligonucleotide
  Sense strand starting at position 3175 SEQ ID NO: 3259
uuccuaaguggcugguauu

SEQ ID NO: 253399 - RNA, 19 nt, Artificial Sequence
  Description of Artificial Sequence: Synthetic oligonucleotide
  Antisense strand to SEQ ID NO: 253398
aauaccagccacuuaggaa

SEQ ID NO: 253400 - RNA, 19 nt, Artificial Sequence
  Description of Artificial Sequence: Synthetic oligonucleotide
  Sense strand starting at position 3193 SEQ ID NO: 3259
uguggagugccuuugcagu

SEQ ID NO: 253401 - RNA, 19 nt, Artificial Sequence
  Description of Artificial Sequence: Synthetic oligonucleotide
  Antisense strand to SEQ ID NO: 253400
acugcaaaggcacuccaca

SEQ ID NO: 253402 - RNA, 19 nt, Artificial Sequence
  Description of Artificial Sequence: Synthetic oligonucleotide
  Sense strand starting at position 3460 SEQ ID NO: 3259
uccgacugucucgaguuau

SEQ ID NO: 253403 - RNA, 19 nt, Artificial Sequence
  Description of Artificial Sequence: Synthetic oligonucleotide
  Antisense strand to SEQ ID NO: 253402
auaacucgagacagucgga

SEQ ID NO: 253404 - RNA, 19 nt, Artificial Sequence
  Description of Artificial Sequence: Synthetic oligonucleotide
  Sense strand starting at position 3470 SEQ ID NO: 3259
ucgaguuauuacuucuugu

SEQ ID NO: 253405 - RNA, 19 nt, Artificial Sequence
  Description of Artificial Sequence: Synthetic oligonucleotide
  Antisense strand to SEQ ID NO: 253404
acaagaaguaauaacucga

SEQ ID NO: 253406 - RNA, 19 nt, Artificial Sequence
  Description of Artificial Sequence: Synthetic oligonucleotide
  Sense strand starting at position 3504 SEQ ID NO: 3259
gcugauucggcuuaacugu

SEQ ID NO: 253407 - RNA, 19 nt, Artificial Sequence
  Description of Artificial Sequence: Synthetic oligonucleotide
  Antisense strand to SEQ ID NO: 253406
acaguuaagccgaaucagc

SEQ ID NO: 253408 - RNA, 19 nt, Artificial Sequence
  Description of Artificial Sequence: Synthetic oligonucleotide
  Sense strand starting at position 3518 SEQ ID NO: 3259
acuguaauuugaugguuga

SEQ ID NO: 253409 - RNA, 19 nt, Artificial Sequence
  Description of Artificial Sequence: Synthetic oligonucleotide
  Antisense strand to SEQ ID NO: 253408
ucaaccaucaaauuacagu

SEQ ID NO: 253410 - RNA, 19 nt, Artificial Sequence
  Description of Artificial Sequence: Synthetic oligonucleotide
  Sense strand starting at position 3532 SEQ ID NO: 3259
guugauuaagcuuaaguau

SEQ ID NO: 253411 - RNA, 19 nt, Artificial Sequence
  Description of Artificial Sequence: Synthetic oligonucleotide
  Antisense strand to SEQ ID NO: 253410
auacuuaagcuuaaucaac

SEQ ID NO: 253412 - RNA, 19 nt, Artificial Sequence
  Description of Artificial Sequence: Synthetic oligonucleotide
  Sense strand starting at position 3639 SEQ ID NO: 3259
ccagaaauccacugcugga

SEQ ID NO: 253413 - RNA, 19 nt, Artificial Sequence
  Description of Artificial Sequence: Synthetic oligonucleotide
  Antisense strand to SEQ ID NO: 253412
uccagcaguggauuucugg

SEQ ID NO: 253414 - RNA, 19 nt, Artificial Sequence
  Description of Artificial Sequence: Synthetic oligonucleotide
  Sense strand starting at position 3653 SEQ ID NO: 3259
cuggacgguuaauugaaua

SEQ ID NO: 253415 - RNA, 19 nt, Artificial Sequence
  Description of Artificial Sequence: Synthetic oligonucleotide
  Antisense strand to SEQ ID NO: 253414
uauucaauuaaccguccag

SEQ ID NO: 253416 - RNA, 19 nt, Artificial Sequence
  Description of Artificial Sequence: Synthetic oligonucleotide
  Sense strand starting at position 3704 SEQ ID NO: 3259
aguugaaagcauuacacca

SEQ ID NO: 253417 - RNA, 19 nt, Artificial Sequence
  Description of Artificial Sequence: Synthetic oligonucleotide
  Antisense strand to SEQ ID NO: 253416
ugguguaaugcuuucaacu

SEQ ID NO: 253418 - RNA, 19 nt, Artificial Sequence
  Description of Artificial Sequence: Synthetic oligonucleotide
  Sense strand starting at position 3774 SEQ ID NO: 3259
agccucccugcauaugaua

SEQ ID NO: 253419 - RNA, 19 nt, Artificial Sequence
  Description of Artificial Sequence: Synthetic oligonucleotide
  Antisense strand to SEQ ID NO: 253418
uaucauaugcagggaggcu

SEQ ID NO: 253420 - RNA, 19 nt, Artificial Sequence
  Description of Artificial Sequence: Synthetic oligonucleotide
  Sense strand starting at position 3975 SEQ ID NO: 3259
ggcagaguugcaggaaaga

SEQ ID NO: 253421 - RNA, 19 nt, Artificial Sequence
  Description of Artificial Sequence: Synthetic oligonucleotide
  Antisense strand to SEQ ID NO: 253420
ucuuuccugcaacucugcc

SEQ ID NO: 253422 - RNA, 19 nt, Artificial Sequence
  Description of Artificial Sequence: Synthetic oligonucleotide
  Sense strand starting at position 269 SEQ ID NO: 3260
cagagaccugccgaauauc

SEQ ID NO: 253423 - RNA, 19 nt, Artificial Sequence
  Description of Artificial Sequence: Synthetic oligonucleotide
  Antisense strand to SEQ ID NO: 253422
gauauucggcaggucucug

SEQ ID NO: 253424 - RNA, 19 nt, Artificial Sequence
  Description of Artificial Sequence: Synthetic oligonucleotide
  Sense strand starting at position 327 SEQ ID NO: 3260
caaaguuaacuugggaagu

SEQ ID NO: 253425 - RNA, 19 nt, Artificial Sequence
  Description of Artificial Sequence: Synthetic oligonucleotide
  Antisense strand to SEQ ID NO: 253424
acuucccaaguuaacuuug

SEQ ID NO: 253426 - RNA, 19 nt, Artificial Sequence
  Description of Artificial Sequence: Synthetic oligonucleotide
  Sense strand starting at position 337 SEQ ID NO: 3260
uugggaaguggcugugaga

SEQ ID NO: 253427 - RNA, 19 nt, Artificial Sequence
  Description of Artificial Sequence: Synthetic oligonucleotide
  Antisense strand to SEQ ID NO: 253426
ucucacagccacuucccaa

SEQ ID NO: 253428 - RNA, 19 nt, Artificial Sequence
  Description of Artificial Sequence: Synthetic oligonucleotide
  Sense strand starting at position 716 SEQ ID NO: 3260
ucagaacugucauuagaca

SEQ ID NO: 253429 - RNA, 19 nt, Artificial Sequence
  Description of Artificial Sequence: Synthetic oligonucleotide
  Antisense strand to SEQ ID NO: 253428
ugucuaaugacaguucuga

SEQ ID NO: 253430 - RNA, 19 nt, Artificial Sequence
  Description of Artificial Sequence: Synthetic oligonucleotide
  Sense strand starting at position 894 SEQ ID NO: 3260
ucuugaaagucugauuuac

SEQ ID NO: 253431 - RNA, 19 nt, Artificial Sequence
  Description of Artificial Sequence: Synthetic oligonucleotide
  Antisense strand to SEQ ID NO: 253430
guaaaucagacuuucaaga

SEQ ID NO: 253432 - RNA, 19 nt, Artificial Sequence
  Description of Artificial Sequence: Synthetic oligonucleotide
  Sense strand starting at position 904 SEQ ID NO: 3260
cugauuuacucaggaguag

SEQ ID NO: 253433 - RNA, 19 nt, Artificial Sequence
  Description of Artificial Sequence: Synthetic oligonucleotide
  Antisense strand to SEQ ID NO: 253432
cuacuccugaguaaaucag

SEQ ID NO: 253434 - RNA, 19 nt, Artificial Sequence
  Description of Artificial Sequence: Synthetic oligonucleotide
  Sense strand starting at position 1001 SEQ ID NO: 3260
gccuuugcucugggacaga

SEQ ID NO: 253435 - RNA, 19 nt, Artificial Sequence
  Description of Artificial Sequence: Synthetic oligonucleotide
  Antisense strand to SEQ ID NO: 253434
ucugucccagagcaaaggc

SEQ ID NO: 253436 - RNA, 19 nt, Artificial Sequence
  Description of Artificial Sequence: Synthetic oligonucleotide
  Sense strand starting at position 1111 SEQ ID NO: 3260
ucgaguauccagcaagaag

SEQ ID NO: 253437 - RNA, 19 nt, Artificial Sequence
  Description of Artificial Sequence: Synthetic oligonucleotide
  Antisense strand to SEQ ID NO: 253436
cuucuugcuggauacucga

SEQ ID NO: 253438 - RNA, 19 nt, Artificial Sequence
  Description of Artificial Sequence: Synthetic oligonucleotide
  Sense strand starting at position 1181 SEQ ID NO: 3260
cugagaguaucucuuccac

SEQ ID NO: 253439 - RNA, 19 nt, Artificial Sequence
  Description of Artificial Sequence: Synthetic oligonucleotide
  Antisense strand to SEQ ID NO: 253438
guggaagagauacucucag

SEQ ID NO: 253440 - RNA, 19 nt, Artificial Sequence
  Description of Artificial Sequence: Synthetic oligonucleotide
  Sense strand starting at position 1475 SEQ ID NO: 3260
cagcgauuggcagguggaa

SEQ ID NO: 253441 - RNA, 19 nt, Artificial Sequence
  Description of Artificial Sequence: Synthetic oligonucleotide
  Antisense strand to SEQ ID NO: 253440
uuccaccugccaaucgcug

SEQ ID NO: 253442 - RNA, 19 nt, Artificial Sequence
  Description of Artificial Sequence: Synthetic oligonucleotide
  Sense strand starting at position 1530 SEQ ID NO: 3260
uuaccucuguggcugagau

SEQ ID NO: 253443 - RNA, 19 nt, Artificial Sequence
  Description of Artificial Sequence: Synthetic oligonucleotide
  Antisense strand to SEQ ID NO: 253442
aucucagccacagagguaa

SEQ ID NO: 253444 - RNA, 19 nt, Artificial Sequence
  Description of Artificial Sequence: Synthetic oligonucleotide
  Sense strand starting at position 1590 SEQ ID NO: 3260
cagcaacuucucugaggga

SEQ ID NO: 253445 - RNA, 19 nt, Artificial Sequence
  Description of Artificial Sequence: Synthetic oligonucleotide
  Antisense strand to SEQ ID NO: 253444
ucccucagagaaguugcug

SEQ ID NO: 253446 - RNA, 19 nt, Artificial Sequence
  Description of Artificial Sequence: Synthetic oligonucleotide
  Sense strand starting at position 1974 SEQ ID NO: 3260
cacaguauccacggacaga

SEQ ID NO: 253447 - RNA, 19 nt, Artificial Sequence
  Description of Artificial Sequence: Synthetic oligonucleotide
  Antisense strand to SEQ ID NO: 253446
ucuguccguggauacugug

SEQ ID NO: 253448 - RNA, 19 nt, Artificial Sequence
  Description of Artificial Sequence: Synthetic oligonucleotide
  Sense strand starting at position 2027 SEQ ID NO: 3260
gcaacuaauuacgugaaca

SEQ ID NO: 253449 - RNA, 19 nt, Artificial Sequence
  Description of Artificial Sequence: Synthetic oligonucleotide
  Antisense strand to SEQ ID NO: 253448
uguucacguaauuaguugc

SEQ ID NO: 253450 - RNA, 19 nt, Artificial Sequence
  Description of Artificial Sequence: Synthetic oligonucleotide
  Sense strand starting at position 2099 SEQ ID NO: 3260
agaggaauaucucaggacu

SEQ ID NO: 253451 - RNA, 19 nt, Artificial Sequence
  Description of Artificial Sequence: Synthetic oligonucleotide
  Antisense strand to SEQ ID NO: 253450
aguccugagauauuccucu

SEQ ID NO: 253452 - RNA, 19 nt, Artificial Sequence
  Description of Artificial Sequence: Synthetic oligonucleotide
  Sense strand starting at position 2800 SEQ ID NO: 3260
uuauguaaacuguguacau

SEQ ID NO: 253453 - RNA, 19 nt, Artificial Sequence
  Description of Artificial Sequence: Synthetic oligonucleotide
  Antisense strand to SEQ ID NO: 253452
auguacacaguuuacauaa

SEQ ID NO: 253454 - RNA, 19 nt, Artificial Sequence
  Description of Artificial Sequence: Synthetic oligonucleotide
  Sense strand starting at position 2802 SEQ ID NO: 3260
auguaaacuguguacauga

SEQ ID NO: 253455 - RNA, 19 nt, Artificial Sequence
  Description of Artificial Sequence: Synthetic oligonucleotide
  Antisense strand to SEQ ID NO: 253454
ucauguacacaguuuacau

SEQ ID NO: 253456 - RNA, 19 nt, Artificial Sequence
  Description of Artificial Sequence: Synthetic oligonucleotide
  Sense strand starting at position 2804 SEQ ID NO: 3260
guaaacuguguacaugauu

SEQ ID NO: 253457 - RNA, 19 nt, Artificial Sequence
  Description of Artificial Sequence: Synthetic oligonucleotide
  Antisense strand to SEQ ID NO: 253456
aaucauguacacaguuuac

SEQ ID NO: 253458 - RNA, 19 nt, Artificial Sequence
  Description of Artificial Sequence: Synthetic oligonucleotide
  Sense strand starting at position 2841 SEQ ID NO: 3260
gagcacaacugguuugcau

SEQ ID NO: 253459 - RNA, 19 nt, Artificial Sequence
  Description of Artificial Sequence: Synthetic oligonucleotide
  Antisense strand to SEQ ID NO: 253458
augcaaaccaguugugcuc

SEQ ID NO: 253460 - RNA, 19 nt, Artificial Sequence
  Description of Artificial Sequence: Synthetic oligonucleotide
  Sense strand starting at position 2843 SEQ ID NO: 3260
gcacaacugguuugcauuu

SEQ ID NO: 253461 - RNA, 19 nt, Artificial Sequence
  Description of Artificial Sequence: Synthetic oligonucleotide
  Antisense strand to SEQ ID NO: 253460
aaaugcaaaccaguugugc

SEQ ID NO: 253462 - RNA, 19 nt, Artificial Sequence
  Description of Artificial Sequence: Synthetic oligonucleotide
  Sense strand starting at position 2952 SEQ ID NO: 3260
acuagaagauguguugaaa

SEQ ID NO: 253463 - RNA, 19 nt, Artificial Sequence
  Description of Artificial Sequence: Synthetic oligonucleotide
  Antisense strand to SEQ ID NO: 253462
uuucaacacaucuucuagu

SEQ ID NO: 253464 - RNA, 19 nt, Artificial Sequence
  Description of Artificial Sequence: Synthetic oligonucleotide
  Sense strand starting at position 2960 SEQ ID NO: 3260
auguguugaaaccagugau

SEQ ID NO: 253465 - RNA, 19 nt, Artificial Sequence
  Description of Artificial Sequence: Synthetic oligonucleotide
  Antisense strand to SEQ ID NO: 253464
aucacugguuucaacacau

SEQ ID NO: 253466 - RNA, 19 nt, Artificial Sequence
  Description of Artificial Sequence: Synthetic oligonucleotide
  Sense strand starting at position 2963 SEQ ID NO: 3260
uguugaaaccagugaugua

SEQ ID NO: 253467 - RNA, 19 nt, Artificial Sequence
  Description of Artificial Sequence: Synthetic oligonucleotide
  Antisense strand to SEQ ID NO: 253466
uacaucacugguuucaaca

SEQ ID NO: 253468 - RNA, 19 nt, Artificial Sequence
  Description of Artificial Sequence: Synthetic oligonucleotide
  Sense strand starting at position 2964 SEQ ID NO: 3260
guugaaaccagugauguau

SEQ ID NO: 253469 - RNA, 19 nt, Artificial Sequence
  Description of Artificial Sequence: Synthetic oligonucleotide
  Antisense strand to SEQ ID NO: 253468
auacaucacugguuucaac

SEQ ID NO: 253470 - RNA, 19 nt, Artificial Sequence
  Description of Artificial Sequence: Synthetic oligonucleotide
  Sense strand starting at position 2973 SEQ ID NO: 3260
agugauguauuacucuaua

SEQ ID NO: 253471 - RNA, 19 nt, Artificial Sequence
  Description of Artificial Sequence: Synthetic oligonucleotide
  Antisense strand to SEQ ID NO: 253470
uauagaguaauacaucacu

SEQ ID NO: 253472 - RNA, 19 nt, Artificial Sequence
  Description of Artificial Sequence: Synthetic oligonucleotide
  Sense strand starting at position 3028 SEQ ID NO: 3260
uuuccuauucuggaguaaa

SEQ ID NO: 253473 - RNA, 19 nt, Artificial Sequence
  Description of Artificial Sequence: Synthetic oligonucleotide
  Antisense strand to SEQ ID NO: 253472
uuuacuccagaauaggaaa

SEQ ID NO: 253474 - RNA, 19 nt, Artificial Sequence
  Description of Artificial Sequence: Synthetic oligonucleotide
  Sense strand starting at position 3041 SEQ ID NO: 3260
aguaaacuggagugauuau

SEQ ID NO: 253475 - RNA, 19 nt, Artificial Sequence
  Description of Artificial Sequence: Synthetic oligonucleotide
  Antisense strand to SEQ ID NO: 253474
auaaucacuccaguuuacu

SEQ ID NO: 253476 - RNA, 19 nt, Artificial Sequence
  Description of Artificial Sequence: Synthetic oligonucleotide
  Sense strand starting at position 3154 SEQ ID NO: 3260
ucccauguauuguuacauu

SEQ ID NO: 253477 - RNA, 19 nt, Artificial Sequence
  Description of Artificial Sequence: Synthetic oligonucleotide
  Antisense strand to SEQ ID NO: 253476
aauguaacaauacauggga

SEQ ID NO: 253478 - RNA, 19 nt, Artificial Sequence
  Description of Artificial Sequence: Synthetic oligonucleotide
  Sense strand starting at position 3205 SEQ ID NO: 3260
ugcuauaugccagagugua

SEQ ID NO: 253479 - RNA, 19 nt, Artificial Sequence
  Description of Artificial Sequence: Synthetic oligonucleotide
  Antisense strand to SEQ ID NO: 253478
uacacucuggcauauagca

SEQ ID NO: 253480 - RNA, 19 nt, Artificial Sequence
  Description of Artificial Sequence: Synthetic oligonucleotide
  Sense strand starting at position 3218 SEQ ID NO: 3260
aguguaaacugcucaguaa

SEQ ID NO: 253481 - RNA, 19 nt, Artificial Sequence
  Description of Artificial Sequence: Synthetic oligonucleotide
  Antisense strand to SEQ ID NO: 253480
uuacugagcaguuuacacu

SEQ ID NO: 253482 - RNA, 19 nt, Artificial Sequence
  Description of Artificial Sequence: Synthetic oligonucleotide
  Sense strand starting at position 3219 SEQ ID NO: 3260
guguaaacugcucaguaaa

SEQ ID NO: 253483 - RNA, 19 nt, Artificial Sequence
  Description of Artificial Sequence: Synthetic oligonucleotide
  Antisense strand to SEQ ID NO: 253482
uuuacugagcaguuuacac

SEQ ID NO: 253484 - RNA, 19 nt, Artificial Sequence
  Description of Artificial Sequence: Synthetic oligonucleotide
  Sense strand starting at position 3221 SEQ ID NO: 3260
guaaacugcucaguaaaua

SEQ ID NO: 253485 - RNA, 19 nt, Artificial Sequence
  Description of Artificial Sequence: Synthetic oligonucleotide
  Antisense strand to SEQ ID NO: 253484
uauuuacugagcaguuuac

SEQ ID NO: 253486 - RNA, 19 nt, Artificial Sequence
  Description of Artificial Sequence: Synthetic oligonucleotide
  Sense strand starting at position 3254 SEQ ID NO: 3260
uuguaaacauucuugguaa

SEQ ID NO: 253487 - RNA, 19 nt, Artificial Sequence
  Description of Artificial Sequence: Synthetic oligonucleotide
  Antisense strand to SEQ ID NO: 253486
uuaccaagaauguuuacaa

SEQ ID NO: 253488 - RNA, 19 nt, Artificial Sequence
  Description of Artificial Sequence: Synthetic oligonucleotide
  Sense strand starting at position 3256 SEQ ID NO: 3260
guaaacauucuugguaagu

SEQ ID NO: 253489 - RNA, 19 nt, Artificial Sequence
  Description of Artificial Sequence: Synthetic oligonucleotide
  Antisense strand to SEQ ID NO: 253488
acuuaccaagaauguuuac

SEQ ID NO: 253490 - RNA, 19 nt, Artificial Sequence
  Description of Artificial Sequence: Synthetic oligonucleotide
  Sense strand starting at position 3287 SEQ ID NO: 3260
ugaggagcugccuaaaugu

SEQ ID NO: 253491 - RNA, 19 nt, Artificial Sequence
  Description of Artificial Sequence: Synthetic oligonucleotide
  Antisense strand to SEQ ID NO: 253490
acauuuaggcagcuccuca

SEQ ID NO: 253492 - RNA, 19 nt, Artificial Sequence
  Description of Artificial Sequence: Synthetic oligonucleotide
  Sense strand starting at position 3295 SEQ ID NO: 3260
ugccuaaauguagagugua

SEQ ID NO: 253493 - RNA, 19 nt, Artificial Sequence
  Description of Artificial Sequence: Synthetic oligonucleotide
  Antisense strand to SEQ ID NO: 253492
uacacucuacauuuaggca

SEQ ID NO: 253494 - RNA, 19 nt, Artificial Sequence
  Description of Artificial Sequence: Synthetic oligonucleotide
  Sense strand starting at position 3298 SEQ ID NO: 3260
cuaaauguagaguguauau

SEQ ID NO: 253495 - RNA, 19 nt, Artificial Sequence
  Description of Artificial Sequence: Synthetic oligonucleotide
  Antisense strand to SEQ ID NO: 253494
auauacacucuacauuuag

SEQ ID NO: 253496 - RNA, 19 nt, Artificial Sequence
  Description of Artificial Sequence: Synthetic oligonucleotide
  Sense strand starting at position 3300 SEQ ID NO: 3260
aaauguagaguguauauca

SEQ ID NO: 253497 - RNA, 19 nt, Artificial Sequence
  Description of Artificial Sequence: Synthetic oligonucleotide
  Antisense strand to SEQ ID NO: 253496
ugauauacacucuacauuu

SEQ ID NO: 253498 - RNA, 19 nt, Artificial Sequence
  Description of Artificial Sequence: Synthetic oligonucleotide
  Sense strand starting at position 3307 SEQ ID NO: 3260
gaguguauaucauccuguu

SEQ ID NO: 253499 - RNA, 19 nt, Artificial Sequence
  Description of Artificial Sequence: Synthetic oligonucleotide
  Antisense strand to SEQ ID NO: 253498
aacaggaugauauacacuc

SEQ ID NO: 253500 - RNA, 19 nt, Artificial Sequence
  Description of Artificial Sequence: Synthetic oligonucleotide
  Sense strand starting at position 3572 SEQ ID NO: 3260
auaacagacucuguuugaa

SEQ ID NO: 253501 - RNA, 19 nt, Artificial Sequence
  Description of Artificial Sequence: Synthetic oligonucleotide
  Antisense strand to SEQ ID NO: 253500
uucaaacagagucuguuau

SEQ ID NO: 253502 - RNA, 19 nt, Artificial Sequence
  Description of Artificial Sequence: Synthetic oligonucleotide
  Sense strand starting at position 2300 SEQ ID NO: 3263
aacuaagagcuacguuuga

SEQ ID NO: 253503 - RNA, 19 nt, Artificial Sequence
  Description of Artificial Sequence: Synthetic oligonucleotide
  Antisense strand to SEQ ID NO: 253502
ucaaacguagcucuuaguu

SEQ ID NO: 253504 - RNA, 19 nt, Artificial Sequence
  Description of Artificial Sequence: Synthetic oligonucleotide
  Sense strand starting at position 2696 SEQ ID NO: 3263
ucaccauuugcccgcaaga

SEQ ID NO: 253505 - RNA, 19 nt, Artificial Sequence
  Description of Artificial Sequence: Synthetic oligonucleotide
  Antisense strand to SEQ ID NO: 253504
ucuugcgggcaaaugguga

SEQ ID NO: 253506 - RNA, 19 nt, Artificial Sequence
  Description of Artificial Sequence: Synthetic oligonucleotide
  Sense strand starting at position 3150 SEQ ID NO: 3263
gguuuacagcaaugaugac

SEQ ID NO: 253507 - RNA, 19 nt, Artificial Sequence
  Description of Artificial Sequence: Synthetic oligonucleotide
  Antisense strand to SEQ ID NO: 253506
gucaucauugcuguaaacc

SEQ ID NO: 253508 - RNA, 19 nt, Artificial Sequence
  Description of Artificial Sequence: Synthetic oligonucleotide
  Sense strand starting at position 3740 SEQ ID NO: 3263
aaagccuauggcugaugaa

SEQ ID NO: 253509 - RNA, 19 nt, Artificial Sequence
  Description of Artificial Sequence: Synthetic oligonucleotide
  Antisense strand to SEQ ID NO: 253508
uucaucagccauaggcuuu

SEQ ID NO: 253510 - RNA, 19 nt, Artificial Sequence
  Description of Artificial Sequence: Synthetic oligonucleotide
  Sense strand starting at position 3741 SEQ ID NO: 3263
aagccuauggcugaugaaa

SEQ ID NO: 253511 - RNA, 19 nt, Artificial Sequence
  Description of Artificial Sequence: Synthetic oligonucleotide
  Antisense strand to SEQ ID NO: 253510
uuucaucagccauaggcuu

SEQ ID NO: 253512 - RNA, 19 nt, Artificial Sequence
  Description of Artificial Sequence: Synthetic oligonucleotide
  Sense strand starting at position 3743 SEQ ID NO: 3263
gccuauggcugaugaaaca

SEQ ID NO: 253513 - RNA, 19 nt, Artificial Sequence
  Description of Artificial Sequence: Synthetic oligonucleotide
  Antisense strand to SEQ ID NO: 253512
uguuucaucagccauaggc

SEQ ID NO: 253514 - RNA, 19 nt, Artificial Sequence
  Description of Artificial Sequence: Synthetic oligonucleotide
  Sense strand starting at position 428 SEQ ID NO: 3264
gggaguaucuaucuaucua

SEQ ID NO: 253515 - RNA, 19 nt, Artificial Sequence
  Description of Artificial Sequence: Synthetic oligonucleotide
  Antisense strand to SEQ ID NO: 253514
uagauagauagauacuccc

SEQ ID NO: 253516 - RNA, 19 nt, Artificial Sequence
  Description of Artificial Sequence: Synthetic oligonucleotide
  Sense strand starting at position 715 SEQ ID NO: 3264
gugaguugugaagauaagu

SEQ ID NO: 253517 - RNA, 19 nt, Artificial Sequence
  Description of Artificial Sequence: Synthetic oligonucleotide
  Antisense strand to SEQ ID NO: 253516
acuuaucuucacaacucac

SEQ ID NO: 253518 - RNA, 19 nt, Artificial Sequence
  Description of Artificial Sequence: Synthetic oligonucleotide
  Sense strand starting at position 720 SEQ ID NO: 3264
uugugaagauaagugacau

SEQ ID NO: 253519 - RNA, 19 nt, Artificial Sequence
  Description of Artificial Sequence: Synthetic oligonucleotide
  Antisense strand to SEQ ID NO: 253518
augucacuuaucuucacaa

SEQ ID NO: 253520 - RNA, 19 nt, Artificial Sequence
  Description of Artificial Sequence: Synthetic oligonucleotide
  Sense strand starting at position 721 SEQ ID NO: 3264
ugugaagauaagugacauc

SEQ ID NO: 253521 - RNA, 19 nt, Artificial Sequence
  Description of Artificial Sequence: Synthetic oligonucleotide
  Antisense strand to SEQ ID NO: 253520
gaugucacuuaucuucaca

SEQ ID NO: 253522 - RNA, 19 nt, Artificial Sequence
  Description of Artificial Sequence: Synthetic oligonucleotide
  Sense strand starting at position 770 SEQ ID NO: 3264
agaaccgggucaguuaaau

SEQ ID NO: 253523 - RNA, 19 nt, Artificial Sequence
  Description of Artificial Sequence: Synthetic oligonucleotide
  Antisense strand to SEQ ID NO: 253522
auuuaacugacccgguucu

SEQ ID NO: 253524 - RNA, 19 nt, Artificial Sequence
  Description of Artificial Sequence: Synthetic oligonucleotide
  Sense strand starting at position 815 SEQ ID NO: 3264
ugggauacgcaguaauucu

SEQ ID NO: 253525 - RNA, 19 nt, Artificial Sequence
  Description of Artificial Sequence: Synthetic oligonucleotide
  Antisense strand to SEQ ID NO: 253524
agaauuacugcguauccca

SEQ ID NO: 253526 - RNA, 19 nt, Artificial Sequence
  Description of Artificial Sequence: Synthetic oligonucleotide
  Sense strand starting at position 835 SEQ ID NO: 3264
agcucacaacuuugaauga

SEQ ID NO: 253527 - RNA, 19 nt, Artificial Sequence
  Description of Artificial Sequence: Synthetic oligonucleotide
  Antisense strand to SEQ ID NO: 253526
ucauucaaaguugugagcu

SEQ ID NO: 253528 - RNA, 19 nt, Artificial Sequence
  Description of Artificial Sequence: Synthetic oligonucleotide
  Sense strand starting at position 952 SEQ ID NO: 3264
uagaguuaacaguauguuc

SEQ ID NO: 253529 - RNA, 19 nt, Artificial Sequence
  Description of Artificial Sequence: Synthetic oligonucleotide
  Antisense strand to SEQ ID NO: 253528
gaacauacuguuaacucua

SEQ ID NO: 253530 - RNA, 19 nt, Artificial Sequence
  Description of Artificial Sequence: Synthetic oligonucleotide
  Sense strand starting at position 967 SEQ ID NO: 3264
guucuauauguguauugag

SEQ ID NO: 253531 - RNA, 19 nt, Artificial Sequence
  Description of Artificial Sequence: Synthetic oligonucleotide
  Antisense strand to SEQ ID NO: 253530
cucaauacacauauagaac

SEQ ID NO: 253532 - RNA, 19 nt, Artificial Sequence
  Description of Artificial Sequence: Synthetic oligonucleotide
  Sense strand starting at position 1085 SEQ ID NO: 3264
uuaccaacagucuguaauu

SEQ ID NO: 253533 - RNA, 19 nt, Artificial Sequence
  Description of Artificial Sequence: Synthetic oligonucleotide
  Antisense strand to SEQ ID NO: 253532
aauuacagacuguugguaa

SEQ ID NO: 253534 - RNA, 19 nt, Artificial Sequence
  Description of Artificial Sequence: Synthetic oligonucleotide
  Sense strand starting at position 1167 SEQ ID NO: 3264
uuucuaacguaauuacuga

SEQ ID NO: 253535 - RNA, 19 nt, Artificial Sequence
  Description of Artificial Sequence: Synthetic oligonucleotide
  Antisense strand to SEQ ID NO: 253534
ucaguaauuacguuagaaa

SEQ ID NO: 253536 - RNA, 19 nt, Artificial Sequence
  Description of Artificial Sequence: Synthetic oligonucleotide
  Sense strand starting at position 1237 SEQ ID NO: 3264
guuaccaagugaucaggaa

SEQ ID NO: 253537 - RNA, 19 nt, Artificial Sequence
  Description of Artificial Sequence: Synthetic oligonucleotide
  Antisense strand to SEQ ID NO: 253536
uuccugaucacuugguaac

SEQ ID NO: 253538 - RNA, 19 nt, Artificial Sequence
  Description of Artificial Sequence: Synthetic oligonucleotide
  Sense strand starting at position 1326 SEQ ID NO: 3264
augucuuaccgacaaggca

SEQ ID NO: 253539 - RNA, 19 nt, Artificial Sequence
  Description of Artificial Sequence: Synthetic oligonucleotide
  Antisense strand to SEQ ID NO: 253538
ugccuugucgguaagacau

SEQ ID NO: 253540 - RNA, 19 nt, Artificial Sequence
  Description of Artificial Sequence: Synthetic oligonucleotide
  Sense strand starting at position 1573 SEQ ID NO: 3264
cugcgcugcaguuuggaaa

SEQ ID NO: 253541 - RNA, 19 nt, Artificial Sequence
  Description of Artificial Sequence: Synthetic oligonucleotide
  Antisense strand to SEQ ID NO: 253540
uuuccaaacugcagcgcag

SEQ ID NO: 253542 - RNA, 19 nt, Artificial Sequence
  Description of Artificial Sequence: Synthetic oligonucleotide
  Sense strand starting at position 1648 SEQ ID NO: 3264
gggauuucuucguucucug

SEQ ID NO: 253543 - RNA, 19 nt, Artificial Sequence
  Description of Artificial Sequence: Synthetic oligonucleotide
  Antisense strand to SEQ ID NO: 253542
cagagaacgaagaaauccc

SEQ ID NO: 253544 - RNA, 19 nt, Artificial Sequence
  Description of Artificial Sequence: Synthetic oligonucleotide
  Sense strand starting at position 1658 SEQ ID NO: 3264
cguucucugggauaaugca

SEQ ID NO: 253545 - RNA, 19 nt, Artificial Sequence
  Description of Artificial Sequence: Synthetic oligonucleotide
  Antisense strand to SEQ ID NO: 253544
ugcauuaucccagagaacg

SEQ ID NO: 253546 - RNA, 19 nt, Artificial Sequence
  Description of Artificial Sequence: Synthetic oligonucleotide
  Sense strand starting at position 1888 SEQ ID NO: 3264
uuacauggcagucaggauu

SEQ ID NO: 253547 - RNA, 19 nt, Artificial Sequence
  Description of Artificial Sequence: Synthetic oligonucleotide
  Antisense strand to SEQ ID NO: 253546
aauccugacugccauguaa

SEQ ID NO: 253548 - RNA, 19 nt, Artificial Sequence
  Description of Artificial Sequence: Synthetic oligonucleotide
  Sense strand starting at position 1952 SEQ ID NO: 3264
ugacacagucuuugucaga

SEQ ID NO: 253549 - RNA, 19 nt, Artificial Sequence
  Description of Artificial Sequence: Synthetic oligonucleotide
  Antisense strand to SEQ ID NO: 253548
ucugacaaagacuguguca

SEQ ID NO: 253550 - RNA, 19 nt, Artificial Sequence
  Description of Artificial Sequence: Synthetic oligonucleotide
  Sense strand starting at position 1953 SEQ ID NO: 3264
gacacagucuuugucagag

SEQ ID NO: 253551 - RNA, 19 nt, Artificial Sequence
  Description of Artificial Sequence: Synthetic oligonucleotide
  Antisense strand to SEQ ID NO: 253550
cucugacaaagacuguguc

SEQ ID NO: 253552 - RNA, 19 nt, Artificial Sequence
  Description of Artificial Sequence: Synthetic oligonucleotide
  Sense strand starting at position 2025 SEQ ID NO: 3264
cuuguaagccuccaagaga

SEQ ID NO: 253553 - RNA, 19 nt, Artificial Sequence
  Description of Artificial Sequence: Synthetic oligonucleotide
  Antisense strand to SEQ ID NO: 253552
ucucuuggaggcuuacaag

SEQ ID NO: 253554 - RNA, 19 nt, Artificial Sequence
  Description of Artificial Sequence: Synthetic oligonucleotide
  Sense strand starting at position 2187 SEQ ID NO: 3264
gcacacucugaggagcauu

SEQ ID NO: 253555 - RNA, 19 nt, Artificial Sequence
  Description of Artificial Sequence: Synthetic oligonucleotide
  Antisense strand to SEQ ID NO: 253554
aaugcuccucagagugugc

SEQ ID NO: 253556 - RNA, 19 nt, Artificial Sequence
  Description of Artificial Sequence: Synthetic oligonucleotide
  Sense strand starting at position 2299 SEQ ID NO: 3264
aacuaagagcuacguuuga

SEQ ID NO: 253557 - RNA, 19 nt, Artificial Sequence
  Description of Artificial Sequence: Synthetic oligonucleotide
  Antisense strand to SEQ ID NO: 253556
ucaaacguagcucuuaguu

SEQ ID NO: 253558 - RNA, 19 nt, Artificial Sequence
  Description of Artificial Sequence: Synthetic oligonucleotide
  Sense strand starting at position 2335 SEQ ID NO: 3264
acugguacauagucacaaa

SEQ ID NO: 253559 - RNA, 19 nt, Artificial Sequence
  Description of Artificial Sequence: Synthetic oligonucleotide
  Antisense strand to SEQ ID NO: 253558
uuugugacuauguaccagu

SEQ ID NO: 253560 - RNA, 19 nt, Artificial Sequence
  Description of Artificial Sequence: Synthetic oligonucleotide
  Sense strand starting at position 2553 SEQ ID NO: 3264
cugugauugaguuagcaau

SEQ ID NO: 253561 - RNA, 19 nt, Artificial Sequence
  Description of Artificial Sequence: Synthetic oligonucleotide
  Antisense strand to SEQ ID NO: 253560
auugcuaacucaaucacag

SEQ ID NO: 253562 - RNA, 19 nt, Artificial Sequence
  Description of Artificial Sequence: Synthetic oligonucleotide
  Sense strand starting at position 2695 SEQ ID NO: 3264
ucaccauuugcccgcaaga

SEQ ID NO: 253563 - RNA, 19 nt, Artificial Sequence
  Description of Artificial Sequence: Synthetic oligonucleotide
  Antisense strand to SEQ ID NO: 253562
ucuugcgggcaaaugguga

SEQ ID NO: 253564 - RNA, 19 nt, Artificial Sequence
  Description of Artificial Sequence: Synthetic oligonucleotide
  Sense strand starting at position 2908 SEQ ID NO: 3264
cuacuucuggccuggaaac

SEQ ID NO: 253565 - RNA, 19 nt, Artificial Sequence
  Description of Artificial Sequence: Synthetic oligonucleotide
  Antisense strand to SEQ ID NO: 253564
guuuccaggccagaaguag

SEQ ID NO: 253566 - RNA, 19 nt, Artificial Sequence
  Description of Artificial Sequence: Synthetic oligonucleotide
  Sense strand starting at position 3112 SEQ ID NO: 3264
guucuaaauugaguaagac

SEQ ID NO: 253567 - RNA, 19 nt, Artificial Sequence
  Description of Artificial Sequence: Synthetic oligonucleotide
  Antisense strand to SEQ ID NO: 253566
gucuuacucaauuuagaac

SEQ ID NO: 253568 - RNA, 19 nt, Artificial Sequence
  Description of Artificial Sequence: Synthetic oligonucleotide
  Sense strand starting at position 3122 SEQ ID NO: 3264
gaguaagacuugucucaua

SEQ ID NO: 253569 - RNA, 19 nt, Artificial Sequence
  Description of Artificial Sequence: Synthetic oligonucleotide
  Antisense strand to SEQ ID NO: 253568
uaugagacaagucuuacuc

SEQ ID NO: 253570 - RNA, 19 nt, Artificial Sequence
  Description of Artificial Sequence: Synthetic oligonucleotide
  Sense strand starting at position 3146 SEQ ID NO: 3264
uuugguuuacagcaaugau

SEQ ID NO: 253571 - RNA, 19 nt, Artificial Sequence
  Description of Artificial Sequence: Synthetic oligonucleotide
  Antisense strand to SEQ ID NO: 253570
aucauugcuguaaaccaaa

SEQ ID NO: 253572 - RNA, 19 nt, Artificial Sequence
  Description of Artificial Sequence: Synthetic oligonucleotide
  Sense strand starting at position 3149 SEQ ID NO: 3264
gguuuacagcaaugaugac

SEQ ID NO: 253573 - RNA, 19 nt, Artificial Sequence
  Description of Artificial Sequence: Synthetic oligonucleotide
  Antisense strand to SEQ ID NO: 253572
gucaucauugcuguaaacc

SEQ ID NO: 253574 - RNA, 19 nt, Artificial Sequence
  Description of Artificial Sequence: Synthetic oligonucleotide
  Sense strand starting at position 3437 SEQ ID NO: 3264
auagguguuaguuacaaau

SEQ ID NO: 253575 - RNA, 19 nt, Artificial Sequence
  Description of Artificial Sequence: Synthetic oligonucleotide
  Antisense strand to SEQ ID NO: 253574
auuuguaacuaacaccuau

SEQ ID NO: 253576 - RNA, 19 nt, Artificial Sequence
  Description of Artificial Sequence: Synthetic oligonucleotide
  Sense strand starting at position 3546 SEQ ID NO: 3264
guuguuaaucccuauguga

SEQ ID NO: 253577 - RNA, 19 nt, Artificial Sequence
  Description of Artificial Sequence: Synthetic oligonucleotide
  Antisense strand to SEQ ID NO: 253576
ucacauagggauuaacaac

SEQ ID NO: 253578 - RNA, 19 nt, Artificial Sequence
  Description of Artificial Sequence: Synthetic oligonucleotide
  Sense strand starting at position 3548 SEQ ID NO: 3264
uguuaaucccuaugugaga

SEQ ID NO: 253579 - RNA, 19 nt, Artificial Sequence
  Description of Artificial Sequence: Synthetic oligonucleotide
  Antisense strand to SEQ ID NO: 253578
ucucacauagggauuaaca

SEQ ID NO: 253580 - RNA, 19 nt, Artificial Sequence
  Description of Artificial Sequence: Synthetic oligonucleotide
  Sense strand starting at position 3549 SEQ ID NO: 3264
guuaaucccuaugugagaa

SEQ ID NO: 253581 - RNA, 19 nt, Artificial Sequence
  Description of Artificial Sequence: Synthetic oligonucleotide
  Antisense strand to SEQ ID NO: 253580
uucucacauagggauuaac

SEQ ID NO: 253582 - RNA, 19 nt, Artificial Sequence
  Description of Artificial Sequence: Synthetic oligonucleotide
  Sense strand starting at position 3576 SEQ ID NO: 3264
acauaauuacugggaagca

SEQ ID NO: 253583 - RNA, 19 nt, Artificial Sequence
  Description of Artificial Sequence: Synthetic oligonucleotide
  Antisense strand to SEQ ID NO: 253582
ugcuucccaguaauuaugu

SEQ ID NO: 253584 - RNA, 19 nt, Artificial Sequence
  Description of Artificial Sequence: Synthetic oligonucleotide
  Sense strand starting at position 3592 SEQ ID NO: 3264
gcacaaugguuagccagaa

SEQ ID NO: 253585 - RNA, 19 nt, Artificial Sequence
  Description of Artificial Sequence: Synthetic oligonucleotide
  Antisense strand to SEQ ID NO: 253584
uucuggcuaaccauugugc

SEQ ID NO: 253586 - RNA, 19 nt, Artificial Sequence
  Description of Artificial Sequence: Synthetic oligonucleotide
  Sense strand starting at position 3593 SEQ ID NO: 3264
cacaaugguuagccagaaa

SEQ ID NO: 253587 - RNA, 19 nt, Artificial Sequence
  Description of Artificial Sequence: Synthetic oligonucleotide
  Antisense strand to SEQ ID NO: 253586
uuucuggcuaaccauugug

SEQ ID NO: 253588 - RNA, 19 nt, Artificial Sequence
  Description of Artificial Sequence: Synthetic oligonucleotide
  Sense strand starting at position 3649 SEQ ID NO: 3264
gggaccaagucuuucuacu

SEQ ID NO: 253589 - RNA, 19 nt, Artificial Sequence
  Description of Artificial Sequence: Synthetic oligonucleotide
  Antisense strand to SEQ ID NO: 253588
aguagaaagacuugguccc

SEQ ID NO: 253590 - RNA, 19 nt, Artificial Sequence
  Description of Artificial Sequence: Synthetic oligonucleotide
  Sense strand starting at position 3739 SEQ ID NO: 3264
aaagccuauggcugaugaa

SEQ ID NO: 253591 - RNA, 19 nt, Artificial Sequence
  Description of Artificial Sequence: Synthetic oligonucleotide
  Antisense strand to SEQ ID NO: 253590
uucaucagccauaggcuuu

SEQ ID NO: 253592 - RNA, 19 nt, Artificial Sequence
  Description of Artificial Sequence: Synthetic oligonucleotide
  Sense strand starting at position 3740 SEQ ID NO: 3264
aagccuauggcugaugaaa

SEQ ID NO: 253593 - RNA, 19 nt, Artificial Sequence
  Description of Artificial Sequence: Synthetic oligonucleotide
  Antisense strand to SEQ ID NO: 253592
uuucaucagccauaggcuu

SEQ ID NO: 253594 - RNA, 19 nt, Artificial Sequence
  Description of Artificial Sequence: Synthetic oligonucleotide
  Sense strand starting at position 2300 SEQ ID NO: 3263
aacuaagagcuacguuuga

SEQ ID NO: 253595 - RNA, 19 nt, Artificial Sequence
  Description of Artificial Sequence: Synthetic oligonucleotide
  Antisense strand to SEQ ID NO: 253594
ucaaacguagcucuuaguu

SEQ ID NO: 253596 - RNA, 19 nt, Artificial Sequence
  Description of Artificial Sequence: Synthetic oligonucleotide
  Sense strand starting at position 2696 SEQ ID NO: 3263
ucaccauuugcccgcaaga

SEQ ID NO: 253597 - RNA, 19 nt, Artificial Sequence
  Description of Artificial Sequence: Synthetic oligonucleotide
  Antisense strand to SEQ ID NO: 253596
ucuugcgggcaaaugguga

SEQ ID NO: 253598 - RNA, 19 nt, Artificial Sequence
  Description of Artificial Sequence: Synthetic oligonucleotide
  Sense strand starting at position 3150 SEQ ID NO: 3263
gguuuacagcaaugaugac

SEQ ID NO: 253599 - RNA, 19 nt, Artificial Sequence
  Description of Artificial Sequence: Synthetic oligonucleotide
  Antisense strand to SEQ ID NO: 253598
gucaucauugcuguaaacc

SEQ ID NO: 253600 - RNA, 19 nt, Artificial Sequence
  Description of Artificial Sequence: Synthetic oligonucleotide
  Sense strand starting at position 3740 SEQ ID NO: 3263
aaagccuauggcugaugaa

SEQ ID NO: 253601 - RNA, 19 nt, Artificial Sequence
  Description of Artificial Sequence: Synthetic oligonucleotide
  Antisense strand to SEQ ID NO: 253600
uucaucagccauaggcuuu

SEQ ID NO: 253602 - RNA, 19 nt, Artificial Sequence
  Description of Artificial Sequence: Synthetic oligonucleotide
  Sense strand starting at position 3741 SEQ ID NO: 3263
aagccuauggcugaugaaa

SEQ ID NO: 253603 - RNA, 19 nt, Artificial Sequence
  Description of Artificial Sequence: Synthetic oligonucleotide
  Antisense strand to SEQ ID NO: 253602
uuucaucagccauaggcuu

SEQ ID NO: 253604 - RNA, 19 nt, Artificial Sequence
  Description of Artificial Sequence: Synthetic oligonucleotide
  Sense strand starting at position 3743 SEQ ID NO: 3263
gccuauggcugaugaaaca

SEQ ID NO: 253605 - RNA, 19 nt, Artificial Sequence
  Description of Artificial Sequence: Synthetic oligonucleotide
  Antisense strand to SEQ ID NO: 253604
uguuucaucagccauaggc

SEQ ID NO: 253606 - RNA, 19 nt, Artificial Sequence
  Description of Artificial Sequence: Synthetic oligonucleotide
  Sense strand starting at position 428 SEQ ID NO: 3264
gggaguaucuaucuaucua

SEQ ID NO: 253607 - RNA, 19 nt, Artificial Sequence
  Description of Artificial Sequence: Synthetic oligonucleotide
  Antisense strand to SEQ ID NO: 253606
uagauagauagauacuccc

SEQ ID NO: 253608 - RNA, 19 nt, Artificial Sequence
  Description of Artificial Sequence: Synthetic oligonucleotide
  Sense strand starting at position 715 SEQ ID NO: 3264
gugaguugugaagauaagu

SEQ ID NO: 253609 - RNA, 19 nt, Artificial Sequence
  Description of Artificial Sequence: Synthetic oligonucleotide
  Antisense strand to SEQ ID NO: 253608
acuuaucuucacaacucac

SEQ ID NO: 253610 - RNA, 19 nt, Artificial Sequence
  Description of Artificial Sequence: Synthetic oligonucleotide
  Sense strand starting at position 720 SEQ ID NO: 3264
uugugaagauaagugacau

SEQ ID NO: 253611 - RNA, 19 nt, Artificial Sequence
  Description of Artificial Sequence: Synthetic oligonucleotide
  Antisense strand to SEQ ID NO: 253610
augucacuuaucuucacaa

SEQ ID NO: 253612 - RNA, 19 nt, Artificial Sequence
  Description of Artificial Sequence: Synthetic oligonucleotide
  Sense strand starting at position 721 SEQ ID NO: 3264
ugugaagauaagugacauc

SEQ ID NO: 253613 - RNA, 19 nt, Artificial Sequence
  Description of Artificial Sequence: Synthetic oligonucleotide
  Antisense strand to SEQ ID NO: 253612
gaugucacuuaucuucaca

SEQ ID NO: 253614 - RNA, 19 nt, Artificial Sequence
  Description of Artificial Sequence: Synthetic oligonucleotide
  Sense strand starting at position 770 SEQ ID NO: 3264
agaaccgggucaguuaaau

SEQ ID NO: 253615 - RNA, 19 nt, Artificial Sequence
  Description of Artificial Sequence: Synthetic oligonucleotide
  Antisense strand to SEQ ID NO: 253614
auuuaacugacccgguucu

SEQ ID NO: 253616 - RNA, 19 nt, Artificial Sequence
  Description of Artificial Sequence: Synthetic oligonucleotide
  Sense strand starting at position 815 SEQ ID NO: 3264
ugggauacgcaguaauucu

SEQ ID NO: 253617 - RNA, 19 nt, Artificial Sequence
  Description of Artificial Sequence: Synthetic oligonucleotide
  Antisense strand to SEQ ID NO: 253616
agaauuacugcguauccca

SEQ ID NO: 253618 - RNA, 19 nt, Artificial Sequence
  Description of Artificial Sequence: Synthetic oligonucleotide
  Sense strand starting at position 835 SEQ ID NO: 3264
agcucacaacuuugaauga

SEQ ID NO: 253619 - RNA, 19 nt, Artificial Sequence
  Description of Artificial Sequence: Synthetic oligonucleotide
  Antisense strand to SEQ ID NO: 253618
ucauucaaaguugugagcu

SEQ ID NO: 253620 - RNA, 19 nt, Artificial Sequence
  Description of Artificial Sequence: Synthetic oligonucleotide
  Sense strand starting at position 952 SEQ ID NO: 3264
uagaguuaacaguauguuc

SEQ ID NO: 253621 - RNA, 19 nt, Artificial Sequence
  Description of Artificial Sequence: Synthetic oligonucleotide
  Antisense strand to SEQ ID NO: 253620
gaacauacuguuaacucua

SEQ ID NO: 253622 - RNA, 19 nt, Artificial Sequence
  Description of Artificial Sequence: Synthetic oligonucleotide
  Sense strand starting at position 967 SEQ ID NO: 3264
guucuauauguguauugag

SEQ ID NO: 253623 - RNA, 19 nt, Artificial Sequence
  Description of Artificial Sequence: Synthetic oligonucleotide
  Antisense strand to SEQ ID NO: 253622
cucaauacacauauagaac

SEQ ID NO: 253624 - RNA, 19 nt, Artificial Sequence
  Description of Artificial Sequence: Synthetic oligonucleotide
  Sense strand starting at position 1085 SEQ ID NO: 3264
uuaccaacagucuguaauu

SEQ ID NO: 253625 - RNA, 19 nt, Artificial Sequence
  Description of Artificial Sequence: Synthetic oligonucleotide
  Antisense strand to SEQ ID NO: 253624
aauuacagacuguugguaa

SEQ ID NO: 253626 - RNA, 19 nt, Artificial Sequence
  Description of Artificial Sequence: Synthetic oligonucleotide
  Sense strand starting at position 1167 SEQ ID NO: 3264
uuucuaacguaauuacuga

SEQ ID NO: 253627 - RNA, 19 nt, Artificial Sequence
  Description of Artificial Sequence: Synthetic oligonucleotide
  Antisense strand to SEQ ID NO: 253626
ucaguaauuacguuagaaa

SEQ ID NO: 253628 - RNA, 19 nt, Artificial Sequence
  Description of Artificial Sequence: Synthetic oligonucleotide
  Sense strand starting at position 1237 SEQ ID NO: 3264
guuaccaagugaucaggaa

SEQ ID NO: 253629 - RNA, 19 nt, Artificial Sequence
  Description of Artificial Sequence: Synthetic oligonucleotide
  Antisense strand to SEQ ID NO: 253628
uuccugaucacuugguaac

SEQ ID NO: 253630 - RNA, 19 nt, Artificial Sequence
  Description of Artificial Sequence: Synthetic oligonucleotide
  Sense strand starting at position 1326 SEQ ID NO: 3264
augucuuaccgacaaggca

SEQ ID NO: 253631 - RNA, 19 nt, Artificial Sequence
  Description of Artificial Sequence: Synthetic oligonucleotide
  Antisense strand to SEQ ID NO: 253630
ugccuugucgguaagacau

SEQ ID NO: 253632 - RNA, 19 nt, Artificial Sequence
  Description of Artificial Sequence: Synthetic oligonucleotide
  Sense strand starting at position 1573 SEQ ID NO: 3264
cugcgcugcaguuuggaaa

SEQ ID NO: 253633 - RNA, 19 nt, Artificial Sequence
  Description of Artificial Sequence: Synthetic oligonucleotide
  Antisense strand to SEQ ID NO: 253632
uuuccaaacugcagcgcag

SEQ ID NO: 253634 - RNA, 19 nt, Artificial Sequence
  Description of Artificial Sequence: Synthetic oligonucleotide
  Sense strand starting at position 1648 SEQ ID NO: 3264
gggauuucuucguucucug

SEQ ID NO: 253635 - RNA, 19 nt, Artificial Sequence
  Description of Artificial Sequence: Synthetic oligonucleotide
  Antisense strand to SEQ ID NO: 253634
cagagaacgaagaaauccc

SEQ ID NO: 253636 - RNA, 19 nt, Artificial Sequence
  Description of Artificial Sequence: Synthetic oligonucleotide
  Sense strand starting at position 1658 SEQ ID NO: 3264
cguucucugggauaaugca

SEQ ID NO: 253637 - RNA, 19 nt, Artificial Sequence
  Description of Artificial Sequence: Synthetic oligonucleotide
  Antisense strand to SEQ ID NO: 253636
ugcauuaucccagagaacg

SEQ ID NO: 253638 - RNA, 19 nt, Artificial Sequence
  Description of Artificial Sequence: Synthetic oligonucleotide
  Sense strand starting at position 1888 SEQ ID NO: 3264
uuacauggcagucaggauu

SEQ ID NO: 253639 - RNA, 19 nt, Artificial Sequence
  Description of Artificial Sequence: Synthetic oligonucleotide
  Antisense strand to SEQ ID NO: 253638
aauccugacugccauguaa

SEQ ID NO: 253640 - RNA, 19 nt, Artificial Sequence
  Description of Artificial Sequence: Synthetic oligonucleotide
  Sense strand starting at position 1952 SEQ ID NO: 3264
ugacacagucuuugucaga

SEQ ID NO: 253641 - RNA, 19 nt, Artificial Sequence
  Description of Artificial Sequence: Synthetic oligonucleotide
  Antisense strand to SEQ ID NO: 253640
ucugacaaagacuguguca

SEQ ID NO: 253642 - RNA, 19 nt, Artificial Sequence
  Description of Artificial Sequence: Synthetic oligonucleotide
  Sense strand starting at position 1953 SEQ ID NO: 3264
gacacagucuuugucagag

SEQ ID NO: 253643 - RNA, 19 nt, Artificial Sequence
  Description of Artificial Sequence: Synthetic oligonucleotide
  Antisense strand to SEQ ID NO: 253642
cucugacaaagacuguguc

SEQ ID NO: 253644 - RNA, 19 nt, Artificial Sequence
  Description of Artificial Sequence: Synthetic oligonucleotide
  Sense strand starting at position 2025 SEQ ID NO: 3264
cuuguaagccuccaagaga

SEQ ID NO: 253645 - RNA, 19 nt, Artificial Sequence
  Description of Artificial Sequence: Synthetic oligonucleotide
  Antisense strand to SEQ ID NO: 253644
ucucuuggaggcuuacaag

SEQ ID NO: 253646 - RNA, 19 nt, Artificial Sequence
  Description of Artificial Sequence: Synthetic oligonucleotide
  Sense strand starting at position 2187 SEQ ID NO: 3264
gcacacucugaggagcauu

SEQ ID NO: 253647 - RNA, 19 nt, Artificial Sequence
  Description of Artificial Sequence: Synthetic oligonucleotide
  Antisense strand to SEQ ID NO: 253646
aaugcuccucagagugugc

SEQ ID NO: 253648 - RNA, 19 nt, Artificial Sequence
  Description of Artificial Sequence: Synthetic oligonucleotide
  Sense strand starting at position 2299 SEQ ID NO: 3264
aacuaagagcuacguuuga

SEQ ID NO: 253649 - RNA, 19 nt, Artificial Sequence
  Description of Artificial Sequence: Synthetic oligonucleotide
  Antisense strand to SEQ ID NO: 253648
ucaaacguagcucuuaguu

SEQ ID NO: 253650 - RNA, 19 nt, Artificial Sequence
  Description of Artificial Sequence: Synthetic oligonucleotide
  Sense strand starting at position 2335 SEQ ID NO: 3264
acugguacauagucacaaa

SEQ ID NO: 253651 - RNA, 19 nt, Artificial Sequence
  Description of Artificial Sequence: Synthetic oligonucleotide
  Antisense strand to SEQ ID NO: 253650
uuugugacuauguaccagu

SEQ ID NO: 253652 - RNA, 19 nt, Artificial Sequence
  Description of Artificial Sequence: Synthetic oligonucleotide
  Sense strand starting at position 2553 SEQ ID NO: 3264
cugugauugaguuagcaau

SEQ ID NO: 253653 - RNA, 19 nt, Artificial Sequence
  Description of Artificial Sequence: Synthetic oligonucleotide
  Antisense strand to SEQ ID NO: 253652
auugcuaacucaaucacag

SEQ ID NO: 253654 - RNA, 19 nt, Artificial Sequence
  Description of Artificial Sequence: Synthetic oligonucleotide
  Sense strand starting at position 2695 SEQ ID NO: 3264
ucaccauuugcccgcaaga

SEQ ID NO: 253655 - RNA, 19 nt, Artificial Sequence
  Description of Artificial Sequence: Synthetic oligonucleotide
  Antisense strand to SEQ ID NO: 253654
ucuugcgggcaaaugguga

SEQ ID NO: 253656 - RNA, 19 nt, Artificial Sequence
  Description of Artificial Sequence: Synthetic oligonucleotide
  Sense strand starting at position 2908 SEQ ID NO: 3264
cuacuucuggccuggaaac

SEQ ID NO: 253657 - RNA, 19 nt, Artificial Sequence
  Description of Artificial Sequence: Synthetic oligonucleotide
  Antisense strand to SEQ ID NO: 253656
guuuccaggccagaaguag

SEQ ID NO: 253658 - RNA, 19 nt, Artificial Sequence
  Description of Artificial Sequence: Synthetic oligonucleotide
  Sense strand starting at position 3112 SEQ ID NO: 3264
guucuaaauugaguaagac

SEQ ID NO: 253659 - RNA, 19 nt, Artificial Sequence
  Description of Artificial Sequence: Synthetic oligonucleotide
  Antisense strand to SEQ ID NO: 253658
gucuuacucaauuuagaac

SEQ ID NO: 253660 - RNA, 19 nt, Artificial Sequence
  Description of Artificial Sequence: Synthetic oligonucleotide
  Sense strand starting at position 3122 SEQ ID NO: 3264
gaguaagacuugucucaua

SEQ ID NO: 253661 - RNA, 19 nt, Artificial Sequence
  Description of Artificial Sequence: Synthetic oligonucleotide
  Antisense strand to SEQ ID NO: 253660
uaugagacaagucuuacuc

SEQ ID NO: 253662 - RNA, 19 nt, Artificial Sequence
  Description of Artificial Sequence: Synthetic oligonucleotide
  Sense strand starting at position 3146 SEQ ID NO: 3264
uuugguuuacagcaaugau

SEQ ID NO: 253663 - RNA, 19 nt, Artificial Sequence
  Description of Artificial Sequence: Synthetic oligonucleotide
  Antisense strand to SEQ ID NO: 253662
aucauugcuguaaaccaaa

SEQ ID NO: 253664 - RNA, 19 nt, Artificial Sequence
  Description of Artificial Sequence: Synthetic oligonucleotide
  Sense strand starting at position 3149 SEQ ID NO: 3264
gguuuacagcaaugaugac

SEQ ID NO: 253665 - RNA, 19 nt, Artificial Sequence
  Description of Artificial Sequence: Synthetic oligonucleotide
  Antisense strand to SEQ ID NO: 253664
gucaucauugcuguaaacc

SEQ ID NO: 253666 - RNA, 19 nt, Artificial Sequence
  Description of Artificial Sequence: Synthetic oligonucleotide
  Sense strand starting at position 3437 SEQ ID NO: 3264
auagguguuaguuacaaau

SEQ ID NO: 253667 - RNA, 19 nt, Artificial Sequence
  Description of Artificial Sequence: Synthetic oligonucleotide
  Antisense strand to SEQ ID NO: 253666
auuuguaacuaacaccuau

SEQ ID NO: 253668 - RNA, 19 nt, Artificial Sequence
  Description of Artificial Sequence: Synthetic oligonucleotide
  Sense strand starting at position 3546 SEQ ID NO: 3264
guuguuaaucccuauguga

SEQ ID NO: 253669 - RNA, 19 nt, Artificial Sequence
  Description of Artificial Sequence: Synthetic oligonucleotide
  Antisense strand to SEQ ID NO: 253668
ucacauagggauuaacaac

SEQ ID NO: 253670 - RNA, 19 nt, Artificial Sequence
  Description of Artificial Sequence: Synthetic oligonucleotide
  Sense strand starting at position 3548 SEQ ID NO: 3264
uguuaaucccuaugugaga

SEQ ID NO: 253671 - RNA, 19 nt, Artificial Sequence
  Description of Artificial Sequence: Synthetic oligonucleotide
  Antisense strand to SEQ ID NO: 253670
ucucacauagggauuaaca

SEQ ID NO: 253672 - RNA, 19 nt, Artificial Sequence
  Description of Artificial Sequence: Synthetic oligonucleotide
  Sense strand starting at position 3549 SEQ ID NO: 3264
guuaaucccuaugugagaa

SEQ ID NO: 253673 - RNA, 19 nt, Artificial Sequence
  Description of Artificial Sequence: Synthetic oligonucleotide
  Antisense strand to SEQ ID NO: 253672
uucucacauagggauuaac

SEQ ID NO: 253674 - RNA, 19 nt, Artificial Sequence
  Description of Artificial Sequence: Synthetic oligonucleotide
  Sense strand starting at position 3576 SEQ ID NO: 3264
acauaauuacugggaagca

SEQ ID NO: 253675 - RNA, 19 nt, Artificial Sequence
  Description of Artificial Sequence: Synthetic oligonucleotide
  Antisense strand to SEQ ID NO: 253674
ugcuucccaguaauuaugu

SEQ ID NO: 253676 - RNA, 19 nt, Artificial Sequence
  Description of Artificial Sequence: Synthetic oligonucleotide
  Sense strand starting at position 3592 SEQ ID NO: 3264
gcacaaugguuagccagaa

SEQ ID NO: 253677 - RNA, 19 nt, Artificial Sequence
  Description of Artificial Sequence: Synthetic oligonucleotide
  Antisense strand to SEQ ID NO: 253676
uucuggcuaaccauugugc

SEQ ID NO: 253678 - RNA, 19 nt, Artificial Sequence
  Description of Artificial Sequence: Synthetic oligonucleotide
  Sense strand starting at position 3593 SEQ ID NO: 3264
cacaaugguuagccagaaa

SEQ ID NO: 253679 - RNA, 19 nt, Artificial Sequence
  Description of Artificial Sequence: Synthetic oligonucleotide
  Antisense strand to SEQ ID NO: 253678
uuucuggcuaaccauugug

SEQ ID NO: 253680 - RNA, 19 nt, Artificial Sequence
  Description of Artificial Sequence: Synthetic oligonucleotide
  Sense strand starting at position 3649 SEQ ID NO: 3264
gggaccaagucuuucuacu

SEQ ID NO: 253681 - RNA, 19 nt, Artificial Sequence
  Description of Artificial Sequence: Synthetic oligonucleotide
  Antisense strand to SEQ ID NO: 253680
aguagaaagacuugguccc

SEQ ID NO: 253682 - RNA, 19 nt, Artificial Sequence
  Description of Artificial Sequence: Synthetic oligonucleotide
  Sense strand starting at position 3739 SEQ ID NO: 3264
aaagccuauggcugaugaa

SEQ ID NO: 253683 - RNA, 19 nt, Artificial Sequence
  Description of Artificial Sequence: Synthetic oligonucleotide
  Antisense strand to SEQ ID NO: 253682
uucaucagccauaggcuuu

SEQ ID NO: 253684 - RNA, 19 nt, Artificial Sequence
  Description of Artificial Sequence: Synthetic oligonucleotide
  Sense strand starting at position 3740 SEQ ID NO: 3264
aagccuauggcugaugaaa

SEQ ID NO: 253685 - RNA, 19 nt, Artificial Sequence
  Description of Artificial Sequence: Synthetic oligonucleotide
  Antisense strand to SEQ ID NO: 253684
uuucaucagccauaggcuu

SEQ ID NO: 253686 - RNA, 19 nt, Artificial Sequence
  Description of Artificial Sequence: Synthetic oligonucleotide
  Sense strand starting at position 245 SEQ ID NO: 3266
guauauacagugugaauaa

SEQ ID NO: 253687 - RNA, 19 nt, Artificial Sequence
  Description of Artificial Sequence: Synthetic oligonucleotide
  Antisense strand to SEQ ID NO: 253686
uuauucacacuguauauac

SEQ ID NO: 253688 - RNA, 19 nt, Artificial Sequence
  Description of Artificial Sequence: Synthetic oligonucleotide
  Sense strand starting at position 326 SEQ ID NO: 3266
gcacuugggaaucaucagu

SEQ ID NO: 253689 - RNA, 19 nt, Artificial Sequence
  Description of Artificial Sequence: Synthetic oligonucleotide
  Antisense strand to SEQ ID NO: 253688
acugaugauucccaagugc

SEQ ID NO: 253690 - RNA, 19 nt, Artificial Sequence
  Description of Artificial Sequence: Synthetic oligonucleotide
  Sense strand starting at position 331 SEQ ID NO: 3266
ugggaaucaucagugaguc

SEQ ID NO: 253691 - RNA, 19 nt, Artificial Sequence
  Description of Artificial Sequence: Synthetic oligonucleotide
  Antisense strand to SEQ ID NO: 253690
gacucacugaugauuccca

SEQ ID NO: 253692 - RNA, 19 nt, Artificial Sequence
  Description of Artificial Sequence: Synthetic oligonucleotide
  Sense strand starting at position 332 SEQ ID NO: 3266
gggaaucaucagugaguca

SEQ ID NO: 253693 - RNA, 19 nt, Artificial Sequence
  Description of Artificial Sequence: Synthetic oligonucleotide
  Antisense strand to SEQ ID NO: 253692
ugacucacugaugauuccc

SEQ ID NO: 253694 - RNA, 19 nt, Artificial Sequence
  Description of Artificial Sequence: Synthetic oligonucleotide
  Sense strand starting at position 361 SEQ ID NO: 3266
ggugauaaggagggcuauu

SEQ ID NO: 253695 - RNA, 19 nt, Artificial Sequence
  Description of Artificial Sequence: Synthetic oligonucleotide
  Antisense strand to SEQ ID NO: 253694
aauagcccuccuuaucacc

SEQ ID NO: 253696 - RNA, 19 nt, Artificial Sequence
  Description of Artificial Sequence: Synthetic oligonucleotide
  Sense strand starting at position 686 SEQ ID NO: 3266
ggaggauuguaacugugua

SEQ ID NO: 253697 - RNA, 19 nt, Artificial Sequence
  Description of Artificial Sequence: Synthetic oligonucleotide
  Antisense strand to SEQ ID NO: 253696
uacacaguuacaauccucc

SEQ ID NO: 253698 - RNA, 19 nt, Artificial Sequence
  Description of Artificial Sequence: Synthetic oligonucleotide
  Sense strand starting at position 687 SEQ ID NO: 3266
gaggauuguaacuguguau

SEQ ID NO: 253699 - RNA, 19 nt, Artificial Sequence
  Description of Artificial Sequence: Synthetic oligonucleotide
  Antisense strand to SEQ ID NO: 253698
auacacaguuacaauccuc

SEQ ID NO: 253700 - RNA, 19 nt, Artificial Sequence
  Description of Artificial Sequence: Synthetic oligonucleotide
  Sense strand starting at position 691 SEQ ID NO: 3266
auuguaacuguguauguga

SEQ ID NO: 253701 - RNA, 19 nt, Artificial Sequence
  Description of Artificial Sequence: Synthetic oligonucleotide
  Antisense strand to SEQ ID NO: 253700
ucacauacacaguuacaau

SEQ ID NO: 253702 - RNA, 19 nt, Artificial Sequence
  Description of Artificial Sequence: Synthetic oligonucleotide
  Sense strand starting at position 938 SEQ ID NO: 3266
cuuauugauuuacaaagag

SEQ ID NO: 253703 - RNA, 19 nt, Artificial Sequence
  Description of Artificial Sequence: Synthetic oligonucleotide
  Antisense strand to SEQ ID NO: 253702
cucuuuguaaaucaauaag

SEQ ID NO: 253704 - RNA, 19 nt, Artificial Sequence
  Description of Artificial Sequence: Synthetic oligonucleotide
  Sense strand starting at position 1038 SEQ ID NO: 3266
uugcuuggugaauacauaa

SEQ ID NO: 253705 - RNA, 19 nt, Artificial Sequence
  Description of Artificial Sequence: Synthetic oligonucleotide
  Antisense strand to SEQ ID NO: 253704
uuauguauucaccaagcaa

SEQ ID NO: 253706 - RNA, 19 nt, Artificial Sequence
  Description of Artificial Sequence: Synthetic oligonucleotide
  Sense strand starting at position 1075 SEQ ID NO: 3266
acaugauaugaacgucuga

SEQ ID NO: 253707 - RNA, 19 nt, Artificial Sequence
  Description of Artificial Sequence: Synthetic oligonucleotide
  Antisense strand to SEQ ID NO: 253706
ucagacguucauaucaugu

SEQ ID NO: 253708 - RNA, 19 nt, Artificial Sequence
  Description of Artificial Sequence: Synthetic oligonucleotide
  Sense strand starting at position 1170 SEQ ID NO: 3266
uagagaaggcguggauuca

SEQ ID NO: 253709 - RNA, 19 nt, Artificial Sequence
  Description of Artificial Sequence: Synthetic oligonucleotide
  Antisense strand to SEQ ID NO: 253708
ugaauccacgccuucucua

SEQ ID NO: 253710 - RNA, 19 nt, Artificial Sequence
  Description of Artificial Sequence: Synthetic oligonucleotide
  Sense strand starting at position 1171 SEQ ID NO: 3266
agagaaggcguggauucau

SEQ ID NO: 253711 - RNA, 19 nt, Artificial Sequence
  Description of Artificial Sequence: Synthetic oligonucleotide
  Antisense strand to SEQ ID NO: 253710
augaauccacgccuucucu

SEQ ID NO: 253712 - RNA, 19 nt, Artificial Sequence
  Description of Artificial Sequence: Synthetic oligonucleotide
  Sense strand starting at position 1247 SEQ ID NO: 3266
gacugaguaaugcacggua

SEQ ID NO: 253713 - RNA, 19 nt, Artificial Sequence
  Description of Artificial Sequence: Synthetic oligonucleotide
  Antisense strand to SEQ ID NO: 253712
uaccgugcauuacucaguc

SEQ ID NO: 253714 - RNA, 19 nt, Artificial Sequence
  Description of Artificial Sequence: Synthetic oligonucleotide
  Sense strand starting at position 1250 SEQ ID NO: 3266
ugaguaaugcacgguauuu

SEQ ID NO: 253715 - RNA, 19 nt, Artificial Sequence
  Description of Artificial Sequence: Synthetic oligonucleotide
  Antisense strand to SEQ ID NO: 253714
aaauaccgugcauuacuca

SEQ ID NO: 253716 - RNA, 19 nt, Artificial Sequence
  Description of Artificial Sequence: Synthetic oligonucleotide
  Sense strand starting at position 1282 SEQ ID NO: 3266
agucguugggauaguguca

SEQ ID NO: 253717 - RNA, 19 nt, Artificial Sequence
  Description of Artificial Sequence: Synthetic oligonucleotide
  Antisense strand to SEQ ID NO: 253716
ugacacuaucccaacgacu

SEQ ID NO: 253718 - RNA, 19 nt, Artificial Sequence
  Description of Artificial Sequence: Synthetic oligonucleotide
  Sense strand starting at position 1539 SEQ ID NO: 3266
ucgccaagacccuauuauu

SEQ ID NO: 253719 - RNA, 19 nt, Artificial Sequence
  Description of Artificial Sequence: Synthetic oligonucleotide
  Antisense strand to SEQ ID NO: 253718
aauaauagggucuuggcga

SEQ ID NO: 253720 - RNA, 19 nt, Artificial Sequence
  Description of Artificial Sequence: Synthetic oligonucleotide
  Sense strand starting at position 1879 SEQ ID NO: 3266
guuugaagcguuuccgcuu

SEQ ID NO: 253721 - RNA, 19 nt, Artificial Sequence
  Description of Artificial Sequence: Synthetic oligonucleotide
  Antisense strand to SEQ ID NO: 253720
aagcggaaacgcuucaaac

SEQ ID NO: 253722 - RNA, 19 nt, Artificial Sequence
  Description of Artificial Sequence: Synthetic oligonucleotide
  Sense strand starting at position 2292 SEQ ID NO: 3266
gggucauuucguggagcga

SEQ ID NO: 253723 - RNA, 19 nt, Artificial Sequence
  Description of Artificial Sequence: Synthetic oligonucleotide
  Antisense strand to SEQ ID NO: 253722
ucgcuccacgaaaugaccc

SEQ ID NO: 253724 - RNA, 19 nt, Artificial Sequence
  Description of Artificial Sequence: Synthetic oligonucleotide
  Sense strand starting at position 2293 SEQ ID NO: 3266
ggucauuucguggagcgag

SEQ ID NO: 253725 - RNA, 19 nt, Artificial Sequence
  Description of Artificial Sequence: Synthetic oligonucleotide
  Antisense strand to SEQ ID NO: 253724
cucgcuccacgaaaugacc

SEQ ID NO: 253726 - RNA, 19 nt, Artificial Sequence
  Description of Artificial Sequence: Synthetic oligonucleotide
  Sense strand starting at position 2430 SEQ ID NO: 3266
ccaaauaagugaguccaaa

SEQ ID NO: 253727 - RNA, 19 nt, Artificial Sequence
  Description of Artificial Sequence: Synthetic oligonucleotide
  Antisense strand to SEQ ID NO: 253726
uuuggacucacuuauuugg

SEQ ID NO: 253728 - RNA, 19 nt, Artificial Sequence
  Description of Artificial Sequence: Synthetic oligonucleotide
  Sense strand starting at position 2454 SEQ ID NO: 3266
gguaacucgaaaggugaga

SEQ ID NO: 253729 - RNA, 19 nt, Artificial Sequence
  Description of Artificial Sequence: Synthetic oligonucleotide
  Antisense strand to SEQ ID NO: 253728
ucucaccuuucgaguuacc

SEQ ID NO: 253730 - RNA, 19 nt, Artificial Sequence
  Description of Artificial Sequence: Synthetic oligonucleotide
  Sense strand starting at position 2476 SEQ ID NO: 3266
ucaagucagcuuugaaaga

SEQ ID NO: 253731 - RNA, 19 nt, Artificial Sequence
  Description of Artificial Sequence: Synthetic oligonucleotide
  Antisense strand to SEQ ID NO: 253730
ucuuucaaagcugacuuga

SEQ ID NO: 253732 - RNA, 19 nt, Artificial Sequence
  Description of Artificial Sequence: Synthetic oligonucleotide
  Sense strand starting at position 2516 SEQ ID NO: 3266
acgguauucgcagaugaua

SEQ ID NO: 253733 - RNA, 19 nt, Artificial Sequence
  Description of Artificial Sequence: Synthetic oligonucleotide
  Antisense strand to SEQ ID NO: 253732
uaucaucugcgaauaccgu

SEQ ID NO: 253734 - RNA, 19 nt, Artificial Sequence
  Description of Artificial Sequence: Synthetic oligonucleotide
  Sense strand starting at position 2519 SEQ ID NO: 3266
guauucgcagaugauaaua

SEQ ID NO: 253735 - RNA, 19 nt, Artificial Sequence
  Description of Artificial Sequence: Synthetic oligonucleotide
  Antisense strand to SEQ ID NO: 253734
uauuaucaucugcgaauac

SEQ ID NO: 253736 - RNA, 19 nt, Artificial Sequence
  Description of Artificial Sequence: Synthetic oligonucleotide
  Sense strand starting at position 2705 SEQ ID NO: 3266
cucaaauagugguuuauau

SEQ ID NO: 253737 - RNA, 19 nt, Artificial Sequence
  Description of Artificial Sequence: Synthetic oligonucleotide
  Antisense strand to SEQ ID NO: 253736
auauaaaccacuauuugag

SEQ ID NO: 253738 - RNA, 19 nt, Artificial Sequence
  Description of Artificial Sequence: Synthetic oligonucleotide
  Sense strand starting at position 2712 SEQ ID NO: 3266
agugguuuauaucucuaac

SEQ ID NO: 253739 - RNA, 19 nt, Artificial Sequence
  Description of Artificial Sequence: Synthetic oligonucleotide
  Antisense strand to SEQ ID NO: 253738
guuagagauauaaaccacu

SEQ ID NO: 253740 - RNA, 19 nt, Artificial Sequence
  Description of Artificial Sequence: Synthetic oligonucleotide
  Sense strand starting at position 2715 SEQ ID NO: 3266
gguuuauaucucuaacgug

SEQ ID NO: 253741 - RNA, 19 nt, Artificial Sequence
  Description of Artificial Sequence: Synthetic oligonucleotide
  Antisense strand to SEQ ID NO: 253740
cacguuagagauauaaacc

SEQ ID NO: 253742 - RNA, 19 nt, Artificial Sequence
  Description of Artificial Sequence: Synthetic oligonucleotide
  Sense strand starting at position 2815 SEQ ID NO: 3266
gguccaagauagccuuauu

SEQ ID NO: 253743 - RNA, 19 nt, Artificial Sequence
  Description of Artificial Sequence: Synthetic oligonucleotide
  Antisense strand to SEQ ID NO: 253742
aauaaggcuaucuuggacc

SEQ ID NO: 253744 - RNA, 19 nt, Artificial Sequence
  Description of Artificial Sequence: Synthetic oligonucleotide
  Sense strand starting at position 2878 SEQ ID NO: 3266
aggccuaaucuuggaagca

SEQ ID NO: 253745 - RNA, 19 nt, Artificial Sequence
  Description of Artificial Sequence: Synthetic oligonucleotide
  Antisense strand to SEQ ID NO: 253744
ugcuuccaagauuaggccu

SEQ ID NO: 253746 - RNA, 19 nt, Artificial Sequence
  Description of Artificial Sequence: Synthetic oligonucleotide
  Sense strand starting at position 3071 SEQ ID NO: 3266
ugccucuuggaguaagaau

SEQ ID NO: 253747 - RNA, 19 nt, Artificial Sequence
  Description of Artificial Sequence: Synthetic oligonucleotide
  Antisense strand to SEQ ID NO: 253746
auucuuacuccaagaggca

SEQ ID NO: 253748 - RNA, 19 nt, Artificial Sequence
  Description of Artificial Sequence: Synthetic oligonucleotide
  Sense strand starting at position 3202 SEQ ID NO: 3266
ggucacucugaguaagucu

SEQ ID NO: 253749 - RNA, 19 nt, Artificial Sequence
  Description of Artificial Sequence: Synthetic oligonucleotide
  Antisense strand to SEQ ID NO: 253748
agacuuacucagagugacc

SEQ ID NO: 253750 - RNA, 19 nt, Artificial Sequence
  Description of Artificial Sequence: Synthetic oligonucleotide
  Sense strand starting at position 3258 SEQ ID NO: 3266
aguuaacugcacuaggaau

SEQ ID NO: 253751 - RNA, 19 nt, Artificial Sequence
  Description of Artificial Sequence: Synthetic oligonucleotide
  Antisense strand to SEQ ID NO: 253750
auuccuagugcaguuaacu

SEQ ID NO: 253752 - RNA, 19 nt, Artificial Sequence
  Description of Artificial Sequence: Synthetic oligonucleotide
  Sense strand starting at position 3387 SEQ ID NO: 3266
uuuccuaguuucuugauga

SEQ ID NO: 253753 - RNA, 19 nt, Artificial Sequence
  Description of Artificial Sequence: Synthetic oligonucleotide
  Antisense strand to SEQ ID NO: 253752
ucaucaagaaacuaggaaa

SEQ ID NO: 253754 - RNA, 19 nt, Artificial Sequence
  Description of Artificial Sequence: Synthetic oligonucleotide
  Sense strand starting at position 3598 SEQ ID NO: 3266
gagccaagcuucuuggaaa

SEQ ID NO: 253755 - RNA, 19 nt, Artificial Sequence
  Description of Artificial Sequence: Synthetic oligonucleotide
  Antisense strand to SEQ ID NO: 253754
uuuccaagaagcuuggcuc

SEQ ID NO: 253756 - RNA, 19 nt, Artificial Sequence
  Description of Artificial Sequence: Synthetic oligonucleotide
  Sense strand starting at position 3717 SEQ ID NO: 3266
uaaggucacgggugacauu

SEQ ID NO: 253757 - RNA, 19 nt, Artificial Sequence
  Description of Artificial Sequence: Synthetic oligonucleotide
  Antisense strand to SEQ ID NO: 253756
aaugucacccgugaccuua

SEQ ID NO: 253758 - RNA, 19 nt, Artificial Sequence
  Description of Artificial Sequence: Synthetic oligonucleotide
  Sense strand starting at position 3788 SEQ ID NO: 3266
cuaccucaaccuggagauu

SEQ ID NO: 253759 - RNA, 19 nt, Artificial Sequence
  Description of Artificial Sequence: Synthetic oligonucleotide
  Antisense strand to SEQ ID NO: 253758
aaucuccagguugagguag

SEQ ID NO: 253760 - RNA, 19 nt, Artificial Sequence
  Description of Artificial Sequence: Synthetic oligonucleotide
  Sense strand starting at position 3799 SEQ ID NO: 3266
uggagauuccuguggacaa

SEQ ID NO: 253761 - RNA, 19 nt, Artificial Sequence
  Description of Artificial Sequence: Synthetic oligonucleotide
  Antisense strand to SEQ ID NO: 253760
uuguccacaggaaucucca

SEQ ID NO: 253762 - RNA, 19 nt, Artificial Sequence
  Description of Artificial Sequence: Synthetic oligonucleotide
  Sense strand starting at position 3809 SEQ ID NO: 3266
uguggacaacuuugacauu

SEQ ID NO: 253763 - RNA, 19 nt, Artificial Sequence
  Description of Artificial Sequence: Synthetic oligonucleotide
  Antisense strand to SEQ ID NO: 253762
aaugucaaaguuguccaca

SEQ ID NO: 253764 - RNA, 19 nt, Artificial Sequence
  Description of Artificial Sequence: Synthetic oligonucleotide
  Sense strand starting at position 3930 SEQ ID NO: 3266
guuggaguuccucagaucu

SEQ ID NO: 253765 - RNA, 19 nt, Artificial Sequence
  Description of Artificial Sequence: Synthetic oligonucleotide
  Antisense strand to SEQ ID NO: 253764
agaucugaggaacuccaac

SEQ ID NO: 253766 - RNA, 19 nt, Artificial Sequence
  Description of Artificial Sequence: Synthetic oligonucleotide
  Sense strand starting at position 50 SEQ ID NO: 3265
auguguuaauaugcauaag

SEQ ID NO: 253767 - RNA, 19 nt, Artificial Sequence
  Description of Artificial Sequence: Synthetic oligonucleotide
  Antisense strand to SEQ ID NO: 253766
cuuaugcauauuaacacau

SEQ ID NO: 253768 - RNA, 19 nt, Artificial Sequence
  Description of Artificial Sequence: Synthetic oligonucleotide
  Sense strand starting at position 53 SEQ ID NO: 3265
uguuaauaugcauaagcca

SEQ ID NO: 253769 - RNA, 19 nt, Artificial Sequence
  Description of Artificial Sequence: Synthetic oligonucleotide
  Antisense strand to SEQ ID NO: 253768
uggcuuaugcauauuaaca

SEQ ID NO: 253770 - RNA, 19 nt, Artificial Sequence
  Description of Artificial Sequence: Synthetic oligonucleotide
  Sense strand starting at position 364 SEQ ID NO: 3265
guauauacagugugaauaa

SEQ ID NO: 253771 - RNA, 19 nt, Artificial Sequence
  Description of Artificial Sequence: Synthetic oligonucleotide
  Antisense strand to SEQ ID NO: 253770
uuauucacacuguauauac

SEQ ID NO: 253772 - RNA, 19 nt, Artificial Sequence
  Description of Artificial Sequence: Synthetic oligonucleotide
  Sense strand starting at position 445 SEQ ID NO: 3265
gcacuugggaaucaucagu

SEQ ID NO: 253773 - RNA, 19 nt, Artificial Sequence
  Description of Artificial Sequence: Synthetic oligonucleotide
  Antisense strand to SEQ ID NO: 253772
acugaugauucccaagugc

SEQ ID NO: 253774 - RNA, 19 nt, Artificial Sequence
  Description of Artificial Sequence: Synthetic oligonucleotide
  Sense strand starting at position 450 SEQ ID NO: 3265
ugggaaucaucagugaguc

SEQ ID NO: 253775 - RNA, 19 nt, Artificial Sequence
  Description of Artificial Sequence: Synthetic oligonucleotide
  Antisense strand to SEQ ID NO: 253774
gacucacugaugauuccca

SEQ ID NO: 253776 - RNA, 19 nt, Artificial Sequence
  Description of Artificial Sequence: Synthetic oligonucleotide
  Sense strand starting at position 451 SEQ ID NO: 3265
gggaaucaucagugaguca

SEQ ID NO: 253777 - RNA, 19 nt, Artificial Sequence
  Description of Artificial Sequence: Synthetic oligonucleotide
  Antisense strand to SEQ ID NO: 253776
ugacucacugaugauuccc

SEQ ID NO: 253778 - RNA, 19 nt, Artificial Sequence
  Description of Artificial Sequence: Synthetic oligonucleotide
  Sense strand starting at position 480 SEQ ID NO: 3265
ggugauaaggagggcuauu

SEQ ID NO: 253779 - RNA, 19 nt, Artificial Sequence
  Description of Artificial Sequence: Synthetic oligonucleotide
  Antisense strand to SEQ ID NO: 253778
aauagcccuccuuaucacc

SEQ ID NO: 253780 - RNA, 19 nt, Artificial Sequence
  Description of Artificial Sequence: Synthetic oligonucleotide
  Sense strand starting at position 805 SEQ ID NO: 3265
ggaggauuguaacugugua

SEQ ID NO: 253781 - RNA, 19 nt, Artificial Sequence
  Description of Artificial Sequence: Synthetic oligonucleotide
  Antisense strand to SEQ ID NO: 253780
uacacaguuacaauccucc

SEQ ID NO: 253782 - RNA, 19 nt, Artificial Sequence
  Description of Artificial Sequence: Synthetic oligonucleotide
  Sense strand starting at position 806 SEQ ID NO: 3265
gaggauuguaacuguguau

SEQ ID NO: 253783 - RNA, 19 nt, Artificial Sequence
  Description of Artificial Sequence: Synthetic oligonucleotide
  Antisense strand to SEQ ID NO: 253782
auacacaguuacaauccuc

SEQ ID NO: 253784 - RNA, 19 nt, Artificial Sequence
  Description of Artificial Sequence: Synthetic oligonucleotide
  Sense strand starting at position 810 SEQ ID NO: 3265
auuguaacuguguauguga

SEQ ID NO: 253785 - RNA, 19 nt, Artificial Sequence
  Description of Artificial Sequence: Synthetic oligonucleotide
  Antisense strand to SEQ ID NO: 253784
ucacauacacaguuacaau

SEQ ID NO: 253786 - RNA, 19 nt, Artificial Sequence
  Description of Artificial Sequence: Synthetic oligonucleotide
  Sense strand starting at position 1057 SEQ ID NO: 3265
cuuauugauuuacaaagag

SEQ ID NO: 253787 - RNA, 19 nt, Artificial Sequence
  Description of Artificial Sequence: Synthetic oligonucleotide
  Antisense strand to SEQ ID NO: 253786
cucuuuguaaaucaauaag

SEQ ID NO: 253788 - RNA, 19 nt, Artificial Sequence
  Description of Artificial Sequence: Synthetic oligonucleotide
  Sense strand starting at position 1157 SEQ ID NO: 3265
uugcuuggugaauacauaa

SEQ ID NO: 253789 - RNA, 19 nt, Artificial Sequence
  Description of Artificial Sequence: Synthetic oligonucleotide
  Antisense strand to SEQ ID NO: 253788
uuauguauucaccaagcaa

SEQ ID NO: 253790 - RNA, 19 nt, Artificial Sequence
  Description of Artificial Sequence: Synthetic oligonucleotide
  Sense strand starting at position 1194 SEQ ID NO: 3265
acaugauaugaacgucuga

SEQ ID NO: 253791 - RNA, 19 nt, Artificial Sequence
  Description of Artificial Sequence: Synthetic oligonucleotide
  Antisense strand to SEQ ID NO: 253790
ucagacguucauaucaugu

SEQ ID NO: 253792 - RNA, 19 nt, Artificial Sequence
  Description of Artificial Sequence: Synthetic oligonucleotide
  Sense strand starting at position 1289 SEQ ID NO: 3265
uagagaaggcguggauuca

SEQ ID NO: 253793 - RNA, 19 nt, Artificial Sequence
  Description of Artificial Sequence: Synthetic oligonucleotide
  Antisense strand to SEQ ID NO: 253792
ugaauccacgccuucucua

SEQ ID NO: 253794 - RNA, 19 nt, Artificial Sequence
  Description of Artificial Sequence: Synthetic oligonucleotide
  Sense strand starting at position 1290 SEQ ID NO: 3265
agagaaggcguggauucau

SEQ ID NO: 253795 - RNA, 19 nt, Artificial Sequence
  Description of Artificial Sequence: Synthetic oligonucleotide
  Antisense strand to SEQ ID NO: 253794
augaauccacgccuucucu

SEQ ID NO: 253796 - RNA, 19 nt, Artificial Sequence
  Description of Artificial Sequence: Synthetic oligonucleotide
  Sense strand starting at position 1366 SEQ ID NO: 3265
gacugaguaaugcacggua

SEQ ID NO: 253797 - RNA, 19 nt, Artificial Sequence
  Description of Artificial Sequence: Synthetic oligonucleotide
  Antisense strand to SEQ ID NO: 253796
uaccgugcauuacucaguc

SEQ ID NO: 253798 - RNA, 19 nt, Artificial Sequence
  Description of Artificial Sequence: Synthetic oligonucleotide
  Sense strand starting at position 1369 SEQ ID NO: 3265
ugaguaaugcacgguauuu

SEQ ID NO: 253799 - RNA, 19 nt, Artificial Sequence
  Description of Artificial Sequence: Synthetic oligonucleotide
  Antisense strand to SEQ ID NO: 253798
aaauaccgugcauuacuca

SEQ ID NO: 253800 - RNA, 19 nt, Artificial Sequence
  Description of Artificial Sequence: Synthetic oligonucleotide
  Sense strand starting at position 1401 SEQ ID NO: 3265
agucguugggauaguguca

SEQ ID NO: 253801 - RNA, 19 nt, Artificial Sequence
  Description of Artificial Sequence: Synthetic oligonucleotide
  Antisense strand to SEQ ID NO: 253800
ugacacuaucccaacgacu

SEQ ID NO: 253802 - RNA, 19 nt, Artificial Sequence
  Description of Artificial Sequence: Synthetic oligonucleotide
  Sense strand starting at position 1658 SEQ ID NO: 3265
ucgccaagacccuauuauu

SEQ ID NO: 253803 - RNA, 19 nt, Artificial Sequence
  Description of Artificial Sequence: Synthetic oligonucleotide
  Antisense strand to SEQ ID NO: 253802
aauaauagggucuuggcga

SEQ ID NO: 253804 - RNA, 19 nt, Artificial Sequence
  Description of Artificial Sequence: Synthetic oligonucleotide
  Sense strand starting at position 1998 SEQ ID NO: 3265
guuugaagcguuuccgcuu

SEQ ID NO: 253805 - RNA, 19 nt, Artificial Sequence
  Description of Artificial Sequence: Synthetic oligonucleotide
  Antisense strand to SEQ ID NO: 253804
aagcggaaacgcuucaaac

SEQ ID NO: 253806 - RNA, 19 nt, Artificial Sequence
  Description of Artificial Sequence: Synthetic oligonucleotide
  Sense strand starting at position 2411 SEQ ID NO: 3265
gggucauuucguggagcga

SEQ ID NO: 253807 - RNA, 19 nt, Artificial Sequence
  Description of Artificial Sequence: Synthetic oligonucleotide
  Antisense strand to SEQ ID NO: 253806
ucgcuccacgaaaugaccc

SEQ ID NO: 253808 - RNA, 19 nt, Artificial Sequence
  Description of Artificial Sequence: Synthetic oligonucleotide
  Sense strand starting at position 2412 SEQ ID NO: 3265
ggucauuucguggagcgag

SEQ ID NO: 253809 - RNA, 19 nt, Artificial Sequence
  Description of Artificial Sequence: Synthetic oligonucleotide
  Antisense strand to SEQ ID NO: 253808
cucgcuccacgaaaugacc

SEQ ID NO: 253810 - RNA, 19 nt, Artificial Sequence
  Description of Artificial Sequence: Synthetic oligonucleotide
  Sense strand starting at position 2549 SEQ ID NO: 3265
ccaaauaagugaguccaaa

SEQ ID NO: 253811 - RNA, 19 nt, Artificial Sequence
  Description of Artificial Sequence: Synthetic oligonucleotide
  Antisense strand to SEQ ID NO: 253810
uuuggacucacuuauuugg

SEQ ID NO: 253812 - RNA, 19 nt, Artificial Sequence
  Description of Artificial Sequence: Synthetic oligonucleotide
  Sense strand starting at position 2573 SEQ ID NO: 3265
gguaacucgaaaggugaga

SEQ ID NO: 253813 - RNA, 19 nt, Artificial Sequence
  Description of Artificial Sequence: Synthetic oligonucleotide
  Antisense strand to SEQ ID NO: 253812
ucucaccuuucgaguuacc

SEQ ID NO: 253814 - RNA, 19 nt, Artificial Sequence
  Description of Artificial Sequence: Synthetic oligonucleotide
  Sense strand starting at position 2595 SEQ ID NO: 3265
ucaagucagcuuugaaaga

SEQ ID NO: 253815 - RNA, 19 nt, Artificial Sequence
  Description of Artificial Sequence: Synthetic oligonucleotide
  Antisense strand to SEQ ID NO: 253814
ucuuucaaagcugacuuga

SEQ ID NO: 253816 - RNA, 19 nt, Artificial Sequence
  Description of Artificial Sequence: Synthetic oligonucleotide
  Sense strand starting at position 2635 SEQ ID NO: 3265
acgguauucgcagaugaua

SEQ ID NO: 253817 - RNA, 19 nt, Artificial Sequence
  Description of Artificial Sequence: Synthetic oligonucleotide
  Antisense strand to SEQ ID NO: 253816
uaucaucugcgaauaccgu

SEQ ID NO: 253818 - RNA, 19 nt, Artificial Sequence
  Description of Artificial Sequence: Synthetic oligonucleotide
  Sense strand starting at position 2638 SEQ ID NO: 3265
guauucgcagaugauaaua

SEQ ID NO: 253819 - RNA, 19 nt, Artificial Sequence
  Description of Artificial Sequence: Synthetic oligonucleotide
  Antisense strand to SEQ ID NO: 253818
uauuaucaucugcgaauac

SEQ ID NO: 253820 - RNA, 19 nt, Artificial Sequence
  Description of Artificial Sequence: Synthetic oligonucleotide
  Sense strand starting at position 2824 SEQ ID NO: 3265
cucaaauagugguuuauau

SEQ ID NO: 253821 - RNA, 19 nt, Artificial Sequence
  Description of Artificial Sequence: Synthetic oligonucleotide
  Antisense strand to SEQ ID NO: 253820
auauaaaccacuauuugag

SEQ ID NO: 253822 - RNA, 19 nt, Artificial Sequence
  Description of Artificial Sequence: Synthetic oligonucleotide
  Sense strand starting at position 2831 SEQ ID NO: 3265
agugguuuauaucucuaac

SEQ ID NO: 253823 - RNA, 19 nt, Artificial Sequence
  Description of Artificial Sequence: Synthetic oligonucleotide
  Antisense strand to SEQ ID NO: 253822
guuagagauauaaaccacu

SEQ ID NO: 253824 - RNA, 19 nt, Artificial Sequence
  Description of Artificial Sequence: Synthetic oligonucleotide
  Sense strand starting at position 2834 SEQ ID NO: 3265
gguuuauaucucuaacgug

SEQ ID NO: 253825 - RNA, 19 nt, Artificial Sequence
  Description of Artificial Sequence: Synthetic oligonucleotide
  Antisense strand to SEQ ID NO: 253824
cacguuagagauauaaacc

SEQ ID NO: 253826 - RNA, 19 nt, Artificial Sequence
  Description of Artificial Sequence: Synthetic oligonucleotide
  Sense strand starting at position 2934 SEQ ID NO: 3265
gguccaagauagccuuauu

SEQ ID NO: 253827 - RNA, 19 nt, Artificial Sequence
  Description of Artificial Sequence: Synthetic oligonucleotide
  Antisense strand to SEQ ID NO: 253826
aauaaggcuaucuuggacc

SEQ ID NO: 253828 - RNA, 19 nt, Artificial Sequence
  Description of Artificial Sequence: Synthetic oligonucleotide
  Sense strand starting at position 2997 SEQ ID NO: 3265
aggccuaaucuuggaagca

SEQ ID NO: 253829 - RNA, 19 nt, Artificial Sequence
  Description of Artificial Sequence: Synthetic oligonucleotide
  Antisense strand to SEQ ID NO: 253828
ugcuuccaagauuaggccu

SEQ ID NO: 253830 - RNA, 19 nt, Artificial Sequence
  Description of Artificial Sequence: Synthetic oligonucleotide
  Sense strand starting at position 3190 SEQ ID NO: 3265
ugccucuuggaguaagaau

SEQ ID NO: 253831 - RNA, 19 nt, Artificial Sequence
  Description of Artificial Sequence: Synthetic oligonucleotide
  Antisense strand to SEQ ID NO: 253830
auucuuacuccaagaggca

SEQ ID NO: 253832 - RNA, 19 nt, Artificial Sequence
  Description of Artificial Sequence: Synthetic oligonucleotide
  Sense strand starting at position 3321 SEQ ID NO: 3265
ggucacucugaguaagucu

SEQ ID NO: 253833 - RNA, 19 nt, Artificial Sequence
  Description of Artificial Sequence: Synthetic oligonucleotide
  Antisense strand to SEQ ID NO: 253832
agacuuacucagagugacc

SEQ ID NO: 253834 - RNA, 19 nt, Artificial Sequence
  Description of Artificial Sequence: Synthetic oligonucleotide
  Sense strand starting at position 3377 SEQ ID NO: 3265
aguuaacugcacuaggaau

SEQ ID NO: 253835 - RNA, 19 nt, Artificial Sequence
  Description of Artificial Sequence: Synthetic oligonucleotide
  Antisense strand to SEQ ID NO: 253834
auuccuagugcaguuaacu

SEQ ID NO: 253836 - RNA, 19 nt, Artificial Sequence
  Description of Artificial Sequence: Synthetic oligonucleotide
  Sense strand starting at position 3506 SEQ ID NO: 3265
uuuccuaguuucuugauga

SEQ ID NO: 253837 - RNA, 19 nt, Artificial Sequence
  Description of Artificial Sequence: Synthetic oligonucleotide
  Antisense strand to SEQ ID NO: 253836
ucaucaagaaacuaggaaa

SEQ ID NO: 253838 - RNA, 19 nt, Artificial Sequence
  Description of Artificial Sequence: Synthetic oligonucleotide
  Sense strand starting at position 3717 SEQ ID NO: 3265
gagccaagcuucuuggaaa

SEQ ID NO: 253839 - RNA, 19 nt, Artificial Sequence
  Description of Artificial Sequence: Synthetic oligonucleotide
  Antisense strand to SEQ ID NO: 253838
uuuccaagaagcuuggcuc

SEQ ID NO: 253840 - RNA, 19 nt, Artificial Sequence
  Description of Artificial Sequence: Synthetic oligonucleotide
  Sense strand starting at position 3907 SEQ ID NO: 3265
cuaccucaaccuggagauu

SEQ ID NO: 253841 - RNA, 19 nt, Artificial Sequence
  Description of Artificial Sequence: Synthetic oligonucleotide
  Antisense strand to SEQ ID NO: 253840
aaucuccagguugagguag

SEQ ID NO: 253842 - RNA, 19 nt, Artificial Sequence
  Description of Artificial Sequence: Synthetic oligonucleotide
  Sense strand starting at position 3918 SEQ ID NO: 3265
uggagauuccuguggacaa

SEQ ID NO: 253843 - RNA, 19 nt, Artificial Sequence
  Description of Artificial Sequence: Synthetic oligonucleotide
  Antisense strand to SEQ ID NO: 253842
uuguccacaggaaucucca

SEQ ID NO: 253844 - RNA, 19 nt, Artificial Sequence
  Description of Artificial Sequence: Synthetic oligonucleotide
  Sense strand starting at position 3928 SEQ ID NO: 3265
uguggacaacuuugacauu

SEQ ID NO: 253845 - RNA, 19 nt, Artificial Sequence
  Description of Artificial Sequence: Synthetic oligonucleotide
  Antisense strand to SEQ ID NO: 253844
aaugucaaaguuguccaca

SEQ ID NO: 253846 - RNA, 19 nt, Artificial Sequence
  Description of Artificial Sequence: Synthetic oligonucleotide
  Sense strand starting at position 161 SEQ ID NO: 3267
gccuuuaucagguaaggac

SEQ ID NO: 253847 - RNA, 19 nt, Artificial Sequence
  Description of Artificial Sequence: Synthetic oligonucleotide
  Antisense strand to SEQ ID NO: 253846
guccuuaccugauaaaggc

SEQ ID NO: 253848 - RNA, 19 nt, Artificial Sequence
  Description of Artificial Sequence: Synthetic oligonucleotide
  Sense strand starting at position 200 SEQ ID NO: 3267
ucacuuuaugcauguuaca

SEQ ID NO: 253849 - RNA, 19 nt, Artificial Sequence
  Description of Artificial Sequence: Synthetic oligonucleotide
  Antisense strand to SEQ ID NO: 253848
uguaacaugcauaaaguga

SEQ ID NO: 253850 - RNA, 19 nt, Artificial Sequence
  Description of Artificial Sequence: Synthetic oligonucleotide
  Sense strand starting at position 380 SEQ ID NO: 3267
gcaucuugaggucagcaau

SEQ ID NO: 253851 - RNA, 19 nt, Artificial Sequence
  Description of Artificial Sequence: Synthetic oligonucleotide
  Antisense strand to SEQ ID NO: 253850
auugcugaccucaagaugc

SEQ ID NO: 253852 - RNA, 19 nt, Artificial Sequence
  Description of Artificial Sequence: Synthetic oligonucleotide
  Sense strand starting at position 1062 SEQ ID NO: 3267
ccauaagcauuagcaaaga

SEQ ID NO: 253853 - RNA, 19 nt, Artificial Sequence
  Description of Artificial Sequence: Synthetic oligonucleotide
  Antisense strand to SEQ ID NO: 253852
ucuuugcuaaugcuuaugg

SEQ ID NO: 253854 - RNA, 19 nt, Artificial Sequence
  Description of Artificial Sequence: Synthetic oligonucleotide
  Sense strand starting at position 1098 SEQ ID NO: 3267
ccaggcauguaagugaaua

SEQ ID NO: 253855 - RNA, 19 nt, Artificial Sequence
  Description of Artificial Sequence: Synthetic oligonucleotide
  Antisense strand to SEQ ID NO: 253854
uauucacuuacaugccugg

SEQ ID NO: 253856 - RNA, 19 nt, Artificial Sequence
  Description of Artificial Sequence: Synthetic oligonucleotide
  Sense strand starting at position 1125 SEQ ID NO: 3267
cccuuaguaguagaguaua

SEQ ID NO: 253857 - RNA, 19 nt, Artificial Sequence
  Description of Artificial Sequence: Synthetic oligonucleotide
  Antisense strand to SEQ ID NO: 253856
uauacucuacuacuaaggg

SEQ ID NO: 253858 - RNA, 19 nt, Artificial Sequence
  Description of Artificial Sequence: Synthetic oligonucleotide
  Sense strand starting at position 1133 SEQ ID NO: 3267
aguagaguauacucuugca

SEQ ID NO: 253859 - RNA, 19 nt, Artificial Sequence
  Description of Artificial Sequence: Synthetic oligonucleotide
  Antisense strand to SEQ ID NO: 253858
ugcaagaguauacucuacu

SEQ ID NO: 253860 - RNA, 19 nt, Artificial Sequence
  Description of Artificial Sequence: Synthetic oligonucleotide
  Sense strand starting at position 1198 SEQ ID NO: 3267
acuuguguuaguuaagcca

SEQ ID NO: 253861 - RNA, 19 nt, Artificial Sequence
  Description of Artificial Sequence: Synthetic oligonucleotide
  Antisense strand to SEQ ID NO: 253860
uggcuuaacuaacacaagu

SEQ ID NO: 253862 - RNA, 19 nt, Artificial Sequence
  Description of Artificial Sequence: Synthetic oligonucleotide
  Sense strand starting at position 1240 SEQ ID NO: 3267
uguggcuaacugcauuaau

SEQ ID NO: 253863 - RNA, 19 nt, Artificial Sequence
  Description of Artificial Sequence: Synthetic oligonucleotide
  Antisense strand to SEQ ID NO: 253862
auuaaugcaguuagccaca

SEQ ID NO: 253864 - RNA, 19 nt, Artificial Sequence
  Description of Artificial Sequence: Synthetic oligonucleotide
  Sense strand starting at position 1266 SEQ ID NO: 3267
cugauaagcugugcuuaga

SEQ ID NO: 253865 - RNA, 19 nt, Artificial Sequence
  Description of Artificial Sequence: Synthetic oligonucleotide
  Antisense strand to SEQ ID NO: 253864
ucuaagcacagcuuaucag

SEQ ID NO: 253866 - RNA, 19 nt, Artificial Sequence
  Description of Artificial Sequence: Synthetic oligonucleotide
  Sense strand starting at position 1269 SEQ ID NO: 3267
auaagcugugcuuagaguu

SEQ ID NO: 253867 - RNA, 19 nt, Artificial Sequence
  Description of Artificial Sequence: Synthetic oligonucleotide
  Antisense strand to SEQ ID NO: 253866
aacucuaagcacagcuuau

SEQ ID NO: 253868 - RNA, 19 nt, Artificial Sequence
  Description of Artificial Sequence: Synthetic oligonucleotide
  Sense strand starting at position 1343 SEQ ID NO: 3267
gguucuacccagcaacaua

SEQ ID NO: 253869 - RNA, 19 nt, Artificial Sequence
  Description of Artificial Sequence: Synthetic oligonucleotide
  Antisense strand to SEQ ID NO: 253868
uauguugcuggguagaacc

SEQ ID NO: 253870 - RNA, 19 nt, Artificial Sequence
  Description of Artificial Sequence: Synthetic oligonucleotide
  Sense strand starting at position 1796 SEQ ID NO: 3267
gcgagugcucccguuucaa

SEQ ID NO: 253871 - RNA, 19 nt, Artificial Sequence
  Description of Artificial Sequence: Synthetic oligonucleotide
  Antisense strand to SEQ ID NO: 253870
uugaaacgggagcacucgc

SEQ ID NO: 253872 - RNA, 19 nt, Artificial Sequence
  Description of Artificial Sequence: Synthetic oligonucleotide
  Sense strand starting at position 1881 SEQ ID NO: 3267
gaguaacauccuggaccca

SEQ ID NO: 253873 - RNA, 19 nt, Artificial Sequence
  Description of Artificial Sequence: Synthetic oligonucleotide
  Antisense strand to SEQ ID NO: 253872
uggguccaggauguuacuc

SEQ ID NO: 253874 - RNA, 19 nt, Artificial Sequence
  Description of Artificial Sequence: Synthetic oligonucleotide
  Sense strand starting at position 2041 SEQ ID NO: 3267
guccuauuggcuuucguca

SEQ ID NO: 253875 - RNA, 19 nt, Artificial Sequence
  Description of Artificial Sequence: Synthetic oligonucleotide
  Antisense strand to SEQ ID NO: 253874
ugacgaaagccaauaggac

SEQ ID NO: 253876 - RNA, 19 nt, Artificial Sequence
  Description of Artificial Sequence: Synthetic oligonucleotide
  Sense strand starting at position 2168 SEQ ID NO: 3267
uugcauuugcccugaguuc

SEQ ID NO: 253877 - RNA, 19 nt, Artificial Sequence
  Description of Artificial Sequence: Synthetic oligonucleotide
  Antisense strand to SEQ ID NO: 253876
gaacucagggcaaaugcaa

SEQ ID NO: 253878 - RNA, 19 nt, Artificial Sequence
  Description of Artificial Sequence: Synthetic oligonucleotide
  Sense strand starting at position 2228 SEQ ID NO: 3267
uucugcguacgagaguaaa

SEQ ID NO: 253879 - RNA, 19 nt, Artificial Sequence
  Description of Artificial Sequence: Synthetic oligonucleotide
  Antisense strand to SEQ ID NO: 253878
uuuacucucguacgcagaa

SEQ ID NO: 253880 - RNA, 19 nt, Artificial Sequence
  Description of Artificial Sequence: Synthetic oligonucleotide
  Sense strand starting at position 2231 SEQ ID NO: 3267
ugcguacgagaguaaauuu

SEQ ID NO: 253881 - RNA, 19 nt, Artificial Sequence
  Description of Artificial Sequence: Synthetic oligonucleotide
  Antisense strand to SEQ ID NO: 253880
aaauuuacucucguacgca

SEQ ID NO: 253882 - RNA, 19 nt, Artificial Sequence
  Description of Artificial Sequence: Synthetic oligonucleotide
  Sense strand starting at position 2313 SEQ ID NO: 3267
acugcagcucucugaauca

SEQ ID NO: 253883 - RNA, 19 nt, Artificial Sequence
  Description of Artificial Sequence: Synthetic oligonucleotide
  Antisense strand to SEQ ID NO: 253882
ugauucagagagcugcagu

SEQ ID NO: 253884 - RNA, 19 nt, Artificial Sequence
  Description of Artificial Sequence: Synthetic oligonucleotide
  Sense strand starting at position 2324 SEQ ID NO: 3267
cugaaucaauuuggaagau

SEQ ID NO: 253885 - RNA, 19 nt, Artificial Sequence
  Description of Artificial Sequence: Synthetic oligonucleotide
  Antisense strand to SEQ ID NO: 253884
aucuuccaaauugauucag

SEQ ID NO: 253886 - RNA, 19 nt, Artificial Sequence
  Description of Artificial Sequence: Synthetic oligonucleotide
  Sense strand starting at position 2431 SEQ ID NO: 3267
uugaccugaugauauuuau

SEQ ID NO: 253887 - RNA, 19 nt, Artificial Sequence
  Description of Artificial Sequence: Synthetic oligonucleotide
  Antisense strand to SEQ ID NO: 253886
auaaauaucaucaggucaa

SEQ ID NO: 253888 - RNA, 19 nt, Artificial Sequence
  Description of Artificial Sequence: Synthetic oligonucleotide
  Sense strand starting at position 2512 SEQ ID NO: 3267
gugauagucugggccauca

SEQ ID NO: 253889 - RNA, 19 nt, Artificial Sequence
  Description of Artificial Sequence: Synthetic oligonucleotide
  Antisense strand to SEQ ID NO: 253888
ugauggcccagacuaucac

SEQ ID NO: 253890 - RNA, 19 nt, Artificial Sequence
  Description of Artificial Sequence: Synthetic oligonucleotide
  Sense strand starting at position 3083 SEQ ID NO: 3267
gucuuuauccggcaccaca

SEQ ID NO: 253891 - RNA, 19 nt, Artificial Sequence
  Description of Artificial Sequence: Synthetic oligonucleotide
  Antisense strand to SEQ ID NO: 253890
uguggugccggauaaagac

SEQ ID NO: 253892 - RNA, 19 nt, Artificial Sequence
  Description of Artificial Sequence: Synthetic oligonucleotide
  Sense strand starting at position 3148 SEQ ID NO: 3267
cuaucuaaccaugguaagu

SEQ ID NO: 253893 - RNA, 19 nt, Artificial Sequence
  Description of Artificial Sequence: Synthetic oligonucleotide
  Antisense strand to SEQ ID NO: 253892
acuuaccaugguuagauag

SEQ ID NO: 253894 - RNA, 19 nt, Artificial Sequence
  Description of Artificial Sequence: Synthetic oligonucleotide
  Sense strand starting at position 3163 SEQ ID NO: 3267
aagugucaggguuaaauga

SEQ ID NO: 253895 - RNA, 19 nt, Artificial Sequence
  Description of Artificial Sequence: Synthetic oligonucleotide
  Antisense strand to SEQ ID NO: 253894
ucauuuaacccugacacuu

SEQ ID NO: 253896 - RNA, 19 nt, Artificial Sequence
  Description of Artificial Sequence: Synthetic oligonucleotide
  Sense strand starting at position 3165 SEQ ID NO: 3267
gugucaggguuaaaugagu

SEQ ID NO: 253897 - RNA, 19 nt, Artificial Sequence
  Description of Artificial Sequence: Synthetic oligonucleotide
  Antisense strand to SEQ ID NO: 253896
acucauuuaacccugacac

SEQ ID NO: 253898 - RNA, 19 nt, Artificial Sequence
  Description of Artificial Sequence: Synthetic oligonucleotide
  Sense strand starting at position 3170 SEQ ID NO: 3267
aggguuaaaugagucaaua

SEQ ID NO: 253899 - RNA, 19 nt, Artificial Sequence
  Description of Artificial Sequence: Synthetic oligonucleotide
  Antisense strand to SEQ ID NO: 253898
uauugacucauuuaacccu

SEQ ID NO: 253900 - RNA, 19 nt, Artificial Sequence
  Description of Artificial Sequence: Synthetic oligonucleotide
  Sense strand starting at position 3208 SEQ ID NO: 3267
agugccuugcguguaguaa

SEQ ID NO: 253901 - RNA, 19 nt, Artificial Sequence
  Description of Artificial Sequence: Synthetic oligonucleotide
  Antisense strand to SEQ ID NO: 253900
uuacuacacgcaaggcacu

SEQ ID NO: 253902 - RNA, 19 nt, Artificial Sequence
  Description of Artificial Sequence: Synthetic oligonucleotide
  Sense strand starting at position 3465 SEQ ID NO: 3267
ucacuaaguugcccagauu

SEQ ID NO: 253903 - RNA, 19 nt, Artificial Sequence
  Description of Artificial Sequence: Synthetic oligonucleotide
  Antisense strand to SEQ ID NO: 253902
aaucugggcaacuuaguga

SEQ ID NO: 253904 - RNA, 19 nt, Artificial Sequence
  Description of Artificial Sequence: Synthetic oligonucleotide
  Sense strand starting at position 3474 SEQ ID NO: 3267
ugcccagauuugucucaua

SEQ ID NO: 253905 - RNA, 19 nt, Artificial Sequence
  Description of Artificial Sequence: Synthetic oligonucleotide
  Antisense strand to SEQ ID NO: 253904
uaugagacaaaucugggca

SEQ ID NO: 253906 - RNA, 19 nt, Artificial Sequence
  Description of Artificial Sequence: Synthetic oligonucleotide
  Sense strand starting at position 3477 SEQ ID NO: 3267
ccagauuugucucauacuu

SEQ ID NO: 253907 - RNA, 19 nt, Artificial Sequence
  Description of Artificial Sequence: Synthetic oligonucleotide
  Antisense strand to SEQ ID NO: 253906
aaguaugagacaaaucugg

SEQ ID NO: 253908 - RNA, 19 nt, Artificial Sequence
  Description of Artificial Sequence: Synthetic oligonucleotide
  Sense strand starting at position 3479 SEQ ID NO: 3267
agauuugucucauacuucu

SEQ ID NO: 253909 - RNA, 19 nt, Artificial Sequence
  Description of Artificial Sequence: Synthetic oligonucleotide
  Antisense strand to SEQ ID NO: 253908
agaaguaugagacaaaucu

SEQ ID NO: 253910 - RNA, 19 nt, Artificial Sequence
  Description of Artificial Sequence: Synthetic oligonucleotide
  Sense strand starting at position 3482 SEQ ID NO: 3267
uuugucucauacuucuaga

SEQ ID NO: 253911 - RNA, 19 nt, Artificial Sequence
  Description of Artificial Sequence: Synthetic oligonucleotide
  Antisense strand to SEQ ID NO: 253910
ucuagaaguaugagacaaa

SEQ ID NO: 253912 - RNA, 19 nt, Artificial Sequence
  Description of Artificial Sequence: Synthetic oligonucleotide
  Sense strand starting at position 3861 SEQ ID NO: 3267
auugacagaucuguguuua

SEQ ID NO: 253913 - RNA, 19 nt, Artificial Sequence
  Description of Artificial Sequence: Synthetic oligonucleotide
  Antisense strand to SEQ ID NO: 253912
uaaacacagaucugucaau

SEQ ID NO: 253914 - RNA, 19 nt, Artificial Sequence
  Description of Artificial Sequence: Synthetic oligonucleotide
  Sense strand starting at position 3862 SEQ ID NO: 3267
uugacagaucuguguuuau

SEQ ID NO: 253915 - RNA, 19 nt, Artificial Sequence
  Description of Artificial Sequence: Synthetic oligonucleotide
  Antisense strand to SEQ ID NO: 253914
auaaacacagaucugucaa

SEQ ID NO: 253916 - RNA, 19 nt, Artificial Sequence
  Description of Artificial Sequence: Synthetic oligonucleotide
  Sense strand starting at position 3865 SEQ ID NO: 3267
acagaucuguguuuauguc

SEQ ID NO: 253917 - RNA, 19 nt, Artificial Sequence
  Description of Artificial Sequence: Synthetic oligonucleotide
  Antisense strand to SEQ ID NO: 253916
gacauaaacacagaucugu

SEQ ID NO: 253918 - RNA, 19 nt, Artificial Sequence
  Description of Artificial Sequence: Synthetic oligonucleotide
  Sense strand starting at position 3875 SEQ ID NO: 3267
guuuaugucuucccaauag

SEQ ID NO: 253919 - RNA, 19 nt, Artificial Sequence
  Description of Artificial Sequence: Synthetic oligonucleotide
  Antisense strand to SEQ ID NO: 253918
cuauugggaagacauaaac

SEQ ID NO: 253920 - RNA, 19 nt, Artificial Sequence
  Description of Artificial Sequence: Synthetic oligonucleotide
  Sense strand starting at position 3917 SEQ ID NO: 3267
uugcuuuccugagcaugaa

SEQ ID NO: 253921 - RNA, 19 nt, Artificial Sequence
  Description of Artificial Sequence: Synthetic oligonucleotide
  Antisense strand to SEQ ID NO: 253920
uucaugcucaggaaagcaa

SEQ ID NO: 253922 - RNA, 19 nt, Artificial Sequence
  Description of Artificial Sequence: Synthetic oligonucleotide
  Sense strand starting at position 3920 SEQ ID NO: 3267
cuuuccugagcaugaauau

SEQ ID NO: 253923 - RNA, 19 nt, Artificial Sequence
  Description of Artificial Sequence: Synthetic oligonucleotide
  Antisense strand to SEQ ID NO: 253922
auauucaugcucaggaaag

SEQ ID NO: 253924 - RNA, 19 nt, Artificial Sequence
  Description of Artificial Sequence: Synthetic oligonucleotide
  Sense strand starting at position 3921 SEQ ID NO: 3267
uuuccugagcaugaauaua

SEQ ID NO: 253925 - RNA, 19 nt, Artificial Sequence
  Description of Artificial Sequence: Synthetic oligonucleotide
  Antisense strand to SEQ ID NO: 253924
uauauucaugcucaggaaa

SEQ ID NO: 253926 - RNA, 19 nt, Artificial Sequence
  Description of Artificial Sequence: Synthetic oligonucleotide
  Sense strand starting at position 99 SEQ ID NO: 3268
gucagaaauagaugagcca

SEQ ID NO: 253927 - RNA, 19 nt, Artificial Sequence
  Description of Artificial Sequence: Synthetic oligonucleotide
  Antisense strand to SEQ ID NO: 253926
uggcucaucuauuucugac

SEQ ID NO: 253928 - RNA, 19 nt, Artificial Sequence
  Description of Artificial Sequence: Synthetic oligonucleotide
  Sense strand starting at position 316 SEQ ID NO: 3268
agagaaagcuuucuguaaa

SEQ ID NO: 253929 - RNA, 19 nt, Artificial Sequence
  Description of Artificial Sequence: Synthetic oligonucleotide
  Antisense strand to SEQ ID NO: 253928
uuuacagaaagcuuucucu

SEQ ID NO: 253930 - RNA, 19 nt, Artificial Sequence
  Description of Artificial Sequence: Synthetic oligonucleotide
  Sense strand starting at position 340 SEQ ID NO: 3268
uggauucuccaaugucaga

SEQ ID NO: 253931 - RNA, 19 nt, Artificial Sequence
  Description of Artificial Sequence: Synthetic oligonucleotide
  Antisense strand to SEQ ID NO: 253930
ucugacauuggagaaucca

SEQ ID NO: 253932 - RNA, 19 nt, Artificial Sequence
  Description of Artificial Sequence: Synthetic oligonucleotide
  Sense strand starting at position 383 SEQ ID NO: 3268
guaauuguuccuugcauuu

SEQ ID NO: 253933 - RNA, 19 nt, Artificial Sequence
  Description of Artificial Sequence: Synthetic oligonucleotide
  Antisense strand to SEQ ID NO: 253932
aaaugcaaggaacaauuac

SEQ ID NO: 253934 - RNA, 19 nt, Artificial Sequence
  Description of Artificial Sequence: Synthetic oligonucleotide
  Sense strand starting at position 399 SEQ ID NO: 3268
uuuaaugaguacucaggaa

SEQ ID NO: 253935 - RNA, 19 nt, Artificial Sequence
  Description of Artificial Sequence: Synthetic oligonucleotide
  Antisense strand to SEQ ID NO: 253934
uuccugaguacucauuaaa

SEQ ID NO: 253936 - RNA, 19 nt, Artificial Sequence
  Description of Artificial Sequence: Synthetic oligonucleotide
  Sense strand starting at position 407 SEQ ID NO: 3268
guacucaggaaaugucuga

SEQ ID NO: 253937 - RNA, 19 nt, Artificial Sequence
  Description of Artificial Sequence: Synthetic oligonucleotide
  Antisense strand to SEQ ID NO: 253936
ucagacauuuccugaguac

SEQ ID NO: 253938 - RNA, 19 nt, Artificial Sequence
  Description of Artificial Sequence: Synthetic oligonucleotide
  Sense strand starting at position 411 SEQ ID NO: 3268
ucaggaaaugucugaugug

SEQ ID NO: 253939 - RNA, 19 nt, Artificial Sequence
  Description of Artificial Sequence: Synthetic oligonucleotide
  Antisense strand to SEQ ID NO: 253938
cacaucagacauuuccuga

SEQ ID NO: 253940 - RNA, 19 nt, Artificial Sequence
  Description of Artificial Sequence: Synthetic oligonucleotide
  Sense strand starting at position 497 SEQ ID NO: 3268
aucugugacccuugauuau

SEQ ID NO: 253941 - RNA, 19 nt, Artificial Sequence
  Description of Artificial Sequence: Synthetic oligonucleotide
  Antisense strand to SEQ ID NO: 253940
auaaucaagggucacagau

SEQ ID NO: 253942 - RNA, 19 nt, Artificial Sequence
  Description of Artificial Sequence: Synthetic oligonucleotide
  Sense strand starting at position 501 SEQ ID NO: 3268
gugacccuugauuauucua

SEQ ID NO: 253943 - RNA, 19 nt, Artificial Sequence
  Description of Artificial Sequence: Synthetic oligonucleotide
  Antisense strand to SEQ ID NO: 253942
uagaauaaucaagggucac

SEQ ID NO: 253944 - RNA, 19 nt, Artificial Sequence
  Description of Artificial Sequence: Synthetic oligonucleotide
  Sense strand starting at position 559 SEQ ID NO: 3268
agcuaacauuucuuagugu

SEQ ID NO: 253945 - RNA, 19 nt, Artificial Sequence
  Description of Artificial Sequence: Synthetic oligonucleotide
  Antisense strand to SEQ ID NO: 253944
acacuaagaaauguuagcu

SEQ ID NO: 253946 - RNA, 19 nt, Artificial Sequence
  Description of Artificial Sequence: Synthetic oligonucleotide
  Sense strand starting at position 566 SEQ ID NO: 3268
auuucuuagugucuucuau

SEQ ID NO: 253947 - RNA, 19 nt, Artificial Sequence
  Description of Artificial Sequence: Synthetic oligonucleotide
  Antisense strand to SEQ ID NO: 253946
auagaagacacuaagaaau

SEQ ID NO: 253948 - RNA, 19 nt, Artificial Sequence
  Description of Artificial Sequence: Synthetic oligonucleotide
  Sense strand starting at position 632 SEQ ID NO: 3268
agcacuuugagguagguaa

SEQ ID NO: 253949 - RNA, 19 nt, Artificial Sequence
  Description of Artificial Sequence: Synthetic oligonucleotide
  Antisense strand to SEQ ID NO: 253948
uuaccuaccucaaagugcu

SEQ ID NO: 253950 - RNA, 19 nt, Artificial Sequence
  Description of Artificial Sequence: Synthetic oligonucleotide
  Sense strand starting at position 634 SEQ ID NO: 3268
cacuuugagguagguaaua

SEQ ID NO: 253951 - RNA, 19 nt, Artificial Sequence
  Description of Artificial Sequence: Synthetic oligonucleotide
  Antisense strand to SEQ ID NO: 253950
uauuaccuaccucaaagug

SEQ ID NO: 253952 - RNA, 19 nt, Artificial Sequence
  Description of Artificial Sequence: Synthetic oligonucleotide
  Sense strand starting at position 658 SEQ ID NO: 3268
gucuuuguucuacaaauga

SEQ ID NO: 253953 - RNA, 19 nt, Artificial Sequence
  Description of Artificial Sequence: Synthetic oligonucleotide
  Antisense strand to SEQ ID NO: 253952
ucauuuguagaacaaagac

SEQ ID NO: 253954 - RNA, 19 nt, Artificial Sequence
  Description of Artificial Sequence: Synthetic oligonucleotide
  Sense strand starting at position 717 SEQ ID NO: 3268
augugucauagcuaguaag

SEQ ID NO: 253955 - RNA, 19 nt, Artificial Sequence
  Description of Artificial Sequence: Synthetic oligonucleotide
  Antisense strand to SEQ ID NO: 253954
cuuacuagcuaugacacau

SEQ ID NO: 253956 - RNA, 19 nt, Artificial Sequence
  Description of Artificial Sequence: Synthetic oligonucleotide
  Sense strand starting at position 773 SEQ ID NO: 3268
ugacacacguacucucaaa

SEQ ID NO: 253957 - RNA, 19 nt, Artificial Sequence
  Description of Artificial Sequence: Synthetic oligonucleotide
  Antisense strand to SEQ ID NO: 253956
uuugagaguacguguguca

SEQ ID NO: 253958 - RNA, 19 nt, Artificial Sequence
  Description of Artificial Sequence: Synthetic oligonucleotide
  Sense strand starting at position 821 SEQ ID NO: 3268
ugguaauaaaugggagcuu

SEQ ID NO: 253959 - RNA, 19 nt, Artificial Sequence
  Description of Artificial Sequence: Synthetic oligonucleotide
  Antisense strand to SEQ ID NO: 253958
aagcucccauuuauuacca

SEQ ID NO: 253960 - RNA, 19 nt, Artificial Sequence
  Description of Artificial Sequence: Synthetic oligonucleotide
  Sense strand starting at position 966 SEQ ID NO: 3268
auguacaugcguguucauu

SEQ ID NO: 253961 - RNA, 19 nt, Artificial Sequence
  Description of Artificial Sequence: Synthetic oligonucleotide
  Antisense strand to SEQ ID NO: 253960
aaugaacacgcauguacau

SEQ ID NO: 253962 - RNA, 19 nt, Artificial Sequence
  Description of Artificial Sequence: Synthetic oligonucleotide
  Sense strand starting at position 1452 SEQ ID NO: 3268
ugauacauacgcgauauaa

SEQ ID NO: 253963 - RNA, 19 nt, Artificial Sequence
  Description of Artificial Sequence: Synthetic oligonucleotide
  Antisense strand to SEQ ID NO: 253962
uuauaucgcguauguauca

SEQ ID NO: 253964 - RNA, 19 nt, Artificial Sequence
  Description of Artificial Sequence: Synthetic oligonucleotide
  Sense strand starting at position 1461 SEQ ID NO: 3268
cgcgauauaaccugaggaa

SEQ ID NO: 253965 - RNA, 19 nt, Artificial Sequence
  Description of Artificial Sequence: Synthetic oligonucleotide
  Antisense strand to SEQ ID NO: 253964
uuccucagguuauaucgcg

SEQ ID NO: 253966 - RNA, 19 nt, Artificial Sequence
  Description of Artificial Sequence: Synthetic oligonucleotide
  Sense strand starting at position 1579 SEQ ID NO: 3268
uuaccuuggcgagaaucaa

SEQ ID NO: 253967 - RNA, 19 nt, Artificial Sequence
  Description of Artificial Sequence: Synthetic oligonucleotide
  Antisense strand to SEQ ID NO: 253966
uugauucucgccaagguaa

SEQ ID NO: 253968 - RNA, 19 nt, Artificial Sequence
  Description of Artificial Sequence: Synthetic oligonucleotide
  Sense strand starting at position 2046 SEQ ID NO: 3268
ccgagcucucgcguuaacu

SEQ ID NO: 253969 - RNA, 19 nt, Artificial Sequence
  Description of Artificial Sequence: Synthetic oligonucleotide
  Antisense strand to SEQ ID NO: 253968
aguuaacgcgagagcucgg

SEQ ID NO: 253970 - RNA, 19 nt, Artificial Sequence
  Description of Artificial Sequence: Synthetic oligonucleotide
  Sense strand starting at position 2047 SEQ ID NO: 3268
cgagcucucgcguuaacua

SEQ ID NO: 253971 - RNA, 19 nt, Artificial Sequence
  Description of Artificial Sequence: Synthetic oligonucleotide
  Antisense strand to SEQ ID NO: 253970
uaguuaacgcgagagcucg

SEQ ID NO: 253972 - RNA, 19 nt, Artificial Sequence
  Description of Artificial Sequence: Synthetic oligonucleotide
  Sense strand starting at position 2827 SEQ ID NO: 3268
gggaaagaccucugccauu

SEQ ID NO: 253973 - RNA, 19 nt, Artificial Sequence
  Description of Artificial Sequence: Synthetic oligonucleotide
  Antisense strand to SEQ ID NO: 253972
aauggcagaggucuuuccc

SEQ ID NO: 253974 - RNA, 19 nt, Artificial Sequence
  Description of Artificial Sequence: Synthetic oligonucleotide
  Sense strand starting at position 2899 SEQ ID NO: 3268
uccaguuaaugcuuaaaug

SEQ ID NO: 253975 - RNA, 19 nt, Artificial Sequence
  Description of Artificial Sequence: Synthetic oligonucleotide
  Antisense strand to SEQ ID NO: 253974
cauuuaagcauuaacugga

SEQ ID NO: 253976 - RNA, 19 nt, Artificial Sequence
  Description of Artificial Sequence: Synthetic oligonucleotide
  Sense strand starting at position 3129 SEQ ID NO: 3268
guccacuauuucuugugua

SEQ ID NO: 253977 - RNA, 19 nt, Artificial Sequence
  Description of Artificial Sequence: Synthetic oligonucleotide
  Antisense strand to SEQ ID NO: 253976
uacacaagaaauaguggac

SEQ ID NO: 253978 - RNA, 19 nt, Artificial Sequence
  Description of Artificial Sequence: Synthetic oligonucleotide
  Sense strand starting at position 3142 SEQ ID NO: 3268
uguguaaggcuuuagaacu

SEQ ID NO: 253979 - RNA, 19 nt, Artificial Sequence
  Description of Artificial Sequence: Synthetic oligonucleotide
  Antisense strand to SEQ ID NO: 253978
aguucuaaagccuuacaca

SEQ ID NO: 253980 - RNA, 19 nt, Artificial Sequence
  Description of Artificial Sequence: Synthetic oligonucleotide
  Sense strand starting at position 3255 SEQ ID NO: 3268
aagagaugauuaucuguuc

SEQ ID NO: 253981 - RNA, 19 nt, Artificial Sequence
  Description of Artificial Sequence: Synthetic oligonucleotide
  Antisense strand to SEQ ID NO: 253980
gaacagauaaucaucucuu

SEQ ID NO: 253982 - RNA, 19 nt, Artificial Sequence
  Description of Artificial Sequence: Synthetic oligonucleotide
  Sense strand starting at position 3308 SEQ ID NO: 3268
gccaaaucuuauuuguuug

SEQ ID NO: 253983 - RNA, 19 nt, Artificial Sequence
  Description of Artificial Sequence: Synthetic oligonucleotide
  Antisense strand to SEQ ID NO: 253982
caaacaaauaagauuuggc

SEQ ID NO: 253984 - RNA, 19 nt, Artificial Sequence
  Description of Artificial Sequence: Synthetic oligonucleotide
  Sense strand starting at position 3313 SEQ ID NO: 3268
aucuuauuuguuuguccaa

SEQ ID NO: 253985 - RNA, 19 nt, Artificial Sequence
  Description of Artificial Sequence: Synthetic oligonucleotide
  Antisense strand to SEQ ID NO: 253984
uuggacaaacaaauaagau

SEQ ID NO: 253986 - RNA, 19 nt, Artificial Sequence
  Description of Artificial Sequence: Synthetic oligonucleotide
  Sense strand starting at position 3315 SEQ ID NO: 3268
cuuauuuguuuguccaacu

SEQ ID NO: 253987 - RNA, 19 nt, Artificial Sequence
  Description of Artificial Sequence: Synthetic oligonucleotide
  Antisense strand to SEQ ID NO: 253986
aguuggacaaacaaauaag

SEQ ID NO: 253988 - RNA, 19 nt, Artificial Sequence
  Description of Artificial Sequence: Synthetic oligonucleotide
  Sense strand starting at position 3333 SEQ ID NO: 3268
uguaauccucuccagguuu

SEQ ID NO: 253989 - RNA, 19 nt, Artificial Sequence
  Description of Artificial Sequence: Synthetic oligonucleotide
  Antisense strand to SEQ ID NO: 253988
aaaccuggagaggauuaca

SEQ ID NO: 253990 - RNA, 19 nt, Artificial Sequence
  Description of Artificial Sequence: Synthetic oligonucleotide
  Sense strand starting at position 3536 SEQ ID NO: 3268
uuugaaucgcuugaaauga

SEQ ID NO: 253991 - RNA, 19 nt, Artificial Sequence
  Description of Artificial Sequence: Synthetic oligonucleotide
  Antisense strand to SEQ ID NO: 253990
ucauuucaagcgauucaaa

SEQ ID NO: 253992 - RNA, 19 nt, Artificial Sequence
  Description of Artificial Sequence: Synthetic oligonucleotide
  Sense strand starting at position 3562 SEQ ID NO: 3268
agaaauauaugggugcuuu

SEQ ID NO: 253993 - RNA, 19 nt, Artificial Sequence
  Description of Artificial Sequence: Synthetic oligonucleotide
  Antisense strand to SEQ ID NO: 253992
aaagcacccauauauuucu

SEQ ID NO: 253994 - RNA, 19 nt, Artificial Sequence
  Description of Artificial Sequence: Synthetic oligonucleotide
  Sense strand starting at position 3563 SEQ ID NO: 3268
gaaauauaugggugcuuua

SEQ ID NO: 253995 - RNA, 19 nt, Artificial Sequence
  Description of Artificial Sequence: Synthetic oligonucleotide
  Antisense strand to SEQ ID NO: 253994
uaaagcacccauauauuuc

SEQ ID NO: 253996 - RNA, 19 nt, Artificial Sequence
  Description of Artificial Sequence: Synthetic oligonucleotide
  Sense strand starting at position 3758 SEQ ID NO: 3268
gugaacacauaguuuaauu

SEQ ID NO: 253997 - RNA, 19 nt, Artificial Sequence
  Description of Artificial Sequence: Synthetic oligonucleotide
  Antisense strand to SEQ ID NO: 253996
aauuaaacuauguguucac

SEQ ID NO: 253998 - RNA, 19 nt, Artificial Sequence
  Description of Artificial Sequence: Synthetic oligonucleotide
  Sense strand starting at position 3810 SEQ ID NO: 3268
uugcaaacaucuuugugaa

SEQ ID NO: 253999 - RNA, 19 nt, Artificial Sequence
  Description of Artificial Sequence: Synthetic oligonucleotide
  Antisense strand to SEQ ID NO: 253998
uucacaaagauguuugcaa

SEQ ID NO: 254000 - RNA, 19 nt, Artificial Sequence
  Description of Artificial Sequence: Synthetic oligonucleotide
  Sense strand starting at position 3811 SEQ ID NO: 3268
ugcaaacaucuuugugaaa

SEQ ID NO: 254001 - RNA, 19 nt, Artificial Sequence
  Description of Artificial Sequence: Synthetic oligonucleotide
  Antisense strand to SEQ ID NO: 254000
uuucacaaagauguuugca

SEQ ID NO: 254002 - RNA, 19 nt, Artificial Sequence
  Description of Artificial Sequence: Synthetic oligonucleotide
  Sense strand starting at position 3812 SEQ ID NO: 3268
gcaaacaucuuugugaaau

SEQ ID NO: 254003 - RNA, 19 nt, Artificial Sequence
  Description of Artificial Sequence: Synthetic oligonucleotide
  Antisense strand to SEQ ID NO: 254002
auuucacaaagauguuugc

SEQ ID NO: 254004 - RNA, 19 nt, Artificial Sequence
  Description of Artificial Sequence: Synthetic oligonucleotide
  Sense strand starting at position 3882 SEQ ID NO: 3268
acuuaaugugcagggagau

SEQ ID NO: 254005 - RNA, 19 nt, Artificial Sequence
  Description of Artificial Sequence: Synthetic oligonucleotide
  Antisense strand to SEQ ID NO: 254004
aucucccugcacauuaagu

SEQ ID NO: 254006 - RNA, 19 nt, Artificial Sequence
  Description of Artificial Sequence: Synthetic oligonucleotide
  Sense strand starting at position 12 SEQ ID NO: 3269
ugauaucugcugcaaaucu

SEQ ID NO: 254007 - RNA, 19 nt, Artificial Sequence
  Description of Artificial Sequence: Synthetic oligonucleotide
  Antisense strand to SEQ ID NO: 254006
agauuugcagcagauauca

SEQ ID NO: 254008 - RNA, 19 nt, Artificial Sequence
  Description of Artificial Sequence: Synthetic oligonucleotide
  Sense strand starting at position 245 SEQ ID NO: 3269
uugaaugagcaccagcaau

SEQ ID NO: 254009 - RNA, 19 nt, Artificial Sequence
  Description of Artificial Sequence: Synthetic oligonucleotide
  Antisense strand to SEQ ID NO: 254008
auugcuggugcucauucaa

SEQ ID NO: 254010 - RNA, 19 nt, Artificial Sequence
  Description of Artificial Sequence: Synthetic oligonucleotide
  Sense strand starting at position 287 SEQ ID NO: 3269
uguguagcccaguuuguuu

SEQ ID NO: 254011 - RNA, 19 nt, Artificial Sequence
  Description of Artificial Sequence: Synthetic oligonucleotide
  Antisense strand to SEQ ID NO: 254010
aaacaaacugggcuacaca

SEQ ID NO: 254012 - RNA, 19 nt, Artificial Sequence
  Description of Artificial Sequence: Synthetic oligonucleotide
  Sense strand starting at position 432 SEQ ID NO: 3269
gcgauacuuguguuauguu

SEQ ID NO: 254013 - RNA, 19 nt, Artificial Sequence
  Description of Artificial Sequence: Synthetic oligonucleotide
  Antisense strand to SEQ ID NO: 254012
aacauaacacaaguaucgc

SEQ ID NO: 254014 - RNA, 19 nt, Artificial Sequence
  Description of Artificial Sequence: Synthetic oligonucleotide
  Sense strand starting at position 544 SEQ ID NO: 3269
ugauuaaggcuauaucuau

SEQ ID NO: 254015 - RNA, 19 nt, Artificial Sequence
  Description of Artificial Sequence: Synthetic oligonucleotide
  Antisense strand to SEQ ID NO: 254014
auagauauagccuuaauca

SEQ ID NO: 254016 - RNA, 19 nt, Artificial Sequence
  Description of Artificial Sequence: Synthetic oligonucleotide
  Sense strand starting at position 550 SEQ ID NO: 3269
aggcuauaucuauaauguu

SEQ ID NO: 254017 - RNA, 19 nt, Artificial Sequence
  Description of Artificial Sequence: Synthetic oligonucleotide
  Antisense strand to SEQ ID NO: 254016
aacauuauagauauagccu

SEQ ID NO: 254018 - RNA, 19 nt, Artificial Sequence
  Description of Artificial Sequence: Synthetic oligonucleotide
  Sense strand starting at position 862 SEQ ID NO: 3269
aaaguagauugugcauaau

SEQ ID NO: 254019 - RNA, 19 nt, Artificial Sequence
  Description of Artificial Sequence: Synthetic oligonucleotide
  Antisense strand to SEQ ID NO: 254018
auuaugcacaaucuacuuu

SEQ ID NO: 254020 - RNA, 19 nt, Artificial Sequence
  Description of Artificial Sequence: Synthetic oligonucleotide
  Sense strand starting at position 865 SEQ ID NO: 3269
guagauugugcauaaugac

SEQ ID NO: 254021 - RNA, 19 nt, Artificial Sequence
  Description of Artificial Sequence: Synthetic oligonucleotide
  Antisense strand to SEQ ID NO: 254020
gucauuaugcacaaucuac

SEQ ID NO: 254022 - RNA, 19 nt, Artificial Sequence
  Description of Artificial Sequence: Synthetic oligonucleotide
  Sense strand starting at position 896 SEQ ID NO: 3269
cuguaagcauuauuagaug

SEQ ID NO: 254023 - RNA, 19 nt, Artificial Sequence
  Description of Artificial Sequence: Synthetic oligonucleotide
  Antisense strand to SEQ ID NO: 254022
caucuaauaaugcuuacag

SEQ ID NO: 254024 - RNA, 19 nt, Artificial Sequence
  Description of Artificial Sequence: Synthetic oligonucleotide
  Sense strand starting at position 1097 SEQ ID NO: 3269
augauuaagugccuaugaa

SEQ ID NO: 254025 - RNA, 19 nt, Artificial Sequence
  Description of Artificial Sequence: Synthetic oligonucleotide
  Antisense strand to SEQ ID NO: 254024
uucauaggcacuuaaucau

SEQ ID NO: 254026 - RNA, 19 nt, Artificial Sequence
  Description of Artificial Sequence: Synthetic oligonucleotide
  Sense strand starting at position 1098 SEQ ID NO: 3269
ugauuaagugccuaugaau

SEQ ID NO: 254027 - RNA, 19 nt, Artificial Sequence
  Description of Artificial Sequence: Synthetic oligonucleotide
  Antisense strand to SEQ ID NO: 254026
auucauaggcacuuaauca

SEQ ID NO: 254028 - RNA, 19 nt, Artificial Sequence
  Description of Artificial Sequence: Synthetic oligonucleotide
  Sense strand starting at position 1388 SEQ ID NO: 3269
gugugucagggugagagaa

SEQ ID NO: 254029 - RNA, 19 nt, Artificial Sequence
  Description of Artificial Sequence: Synthetic oligonucleotide
  Antisense strand to SEQ ID NO: 254028
uucucucacccugacacac

SEQ ID NO: 254030 - RNA, 19 nt, Artificial Sequence
  Description of Artificial Sequence: Synthetic oligonucleotide
  Sense strand starting at position 1593 SEQ ID NO: 3269
agagaaagacgaugcuaau

SEQ ID NO: 254031 - RNA, 19 nt, Artificial Sequence
  Description of Artificial Sequence: Synthetic oligonucleotide
  Antisense strand to SEQ ID NO: 254030
auuagcaucgucuuucucu

SEQ ID NO: 254032 - RNA, 19 nt, Artificial Sequence
  Description of Artificial Sequence: Synthetic oligonucleotide
  Sense strand starting at position 1760 SEQ ID NO: 3269
cuuggcuuucuguaaacca

SEQ ID NO: 254033 - RNA, 19 nt, Artificial Sequence
  Description of Artificial Sequence: Synthetic oligonucleotide
  Antisense strand to SEQ ID NO: 254032
ugguuuacagaaagccaag

SEQ ID NO: 254034 - RNA, 19 nt, Artificial Sequence
  Description of Artificial Sequence: Synthetic oligonucleotide
  Sense strand starting at position 1862 SEQ ID NO: 3269
gguacucaaguauaaccua

SEQ ID NO: 254035 - RNA, 19 nt, Artificial Sequence
  Description of Artificial Sequence: Synthetic oligonucleotide
  Antisense strand to SEQ ID NO: 254034
uagguuauacuugaguacc

SEQ ID NO: 254036 - RNA, 19 nt, Artificial Sequence
  Description of Artificial Sequence: Synthetic oligonucleotide
  Sense strand starting at position 1970 SEQ ID NO: 3269
agcucucaugcucagaacu

SEQ ID NO: 254037 - RNA, 19 nt, Artificial Sequence
  Description of Artificial Sequence: Synthetic oligonucleotide
  Antisense strand to SEQ ID NO: 254036
aguucugagcaugagagcu

SEQ ID NO: 254038 - RNA, 19 nt, Artificial Sequence
  Description of Artificial Sequence: Synthetic oligonucleotide
  Sense strand starting at position 2134 SEQ ID NO: 3269
uagguagcccacugaaauu

SEQ ID NO: 254039 - RNA, 19 nt, Artificial Sequence
  Description of Artificial Sequence: Synthetic oligonucleotide
  Antisense strand to SEQ ID NO: 254038
aauuucagugggcuaccua

SEQ ID NO: 254040 - RNA, 19 nt, Artificial Sequence
  Description of Artificial Sequence: Synthetic oligonucleotide
  Sense strand starting at position 2313 SEQ ID NO: 3269
cugugaaaucaacauuguc

SEQ ID NO: 254041 - RNA, 19 nt, Artificial Sequence
  Description of Artificial Sequence: Synthetic oligonucleotide
  Antisense strand to SEQ ID NO: 254040
gacaauguugauuucacag

SEQ ID NO: 254042 - RNA, 19 nt, Artificial Sequence
  Description of Artificial Sequence: Synthetic oligonucleotide
  Sense strand starting at position 2565 SEQ ID NO: 3269
ucuaguuuccauuagugga

SEQ ID NO: 254043 - RNA, 19 nt, Artificial Sequence
  Description of Artificial Sequence: Synthetic oligonucleotide
  Antisense strand to SEQ ID NO: 254042
uccacuaauggaaacuaga

SEQ ID NO: 254044 - RNA, 19 nt, Artificial Sequence
  Description of Artificial Sequence: Synthetic oligonucleotide
  Sense strand starting at position 2667 SEQ ID NO: 3269
ggccauugauuuccaguuu

SEQ ID NO: 254045 - RNA, 19 nt, Artificial Sequence
  Description of Artificial Sequence: Synthetic oligonucleotide
  Antisense strand to SEQ ID NO: 254044
aaacuggaaaucaauggcc

SEQ ID NO: 254046 - RNA, 19 nt, Artificial Sequence
  Description of Artificial Sequence: Synthetic oligonucleotide
  Sense strand starting at position 2770 SEQ ID NO: 3269
ugacucuuuggugaucuca

SEQ ID NO: 254047 - RNA, 19 nt, Artificial Sequence
  Description of Artificial Sequence: Synthetic oligonucleotide
  Antisense strand to SEQ ID NO: 254046
ugagaucaccaaagaguca

SEQ ID NO: 254048 - RNA, 19 nt, Artificial Sequence
  Description of Artificial Sequence: Synthetic oligonucleotide
  Sense strand starting at position 2897 SEQ ID NO: 3269
ugaaacuugguuuguccaa

SEQ ID NO: 254049 - RNA, 19 nt, Artificial Sequence
  Description of Artificial Sequence: Synthetic oligonucleotide
  Antisense strand to SEQ ID NO: 254048
uuggacaaaccaaguuuca

SEQ ID NO: 254050 - RNA, 19 nt, Artificial Sequence
  Description of Artificial Sequence: Synthetic oligonucleotide
  Sense strand starting at position 2898 SEQ ID NO: 3269
gaaacuugguuuguccaaa

SEQ ID NO: 254051 - RNA, 19 nt, Artificial Sequence
  Description of Artificial Sequence: Synthetic oligonucleotide
  Antisense strand to SEQ ID NO: 254050
uuuggacaaaccaaguuuc

SEQ ID NO: 254052 - RNA, 19 nt, Artificial Sequence
  Description of Artificial Sequence: Synthetic oligonucleotide
  Sense strand starting at position 3014 SEQ ID NO: 3269
cuugguauccuugaaaucu

SEQ ID NO: 254053 - RNA, 19 nt, Artificial Sequence
  Description of Artificial Sequence: Synthetic oligonucleotide
  Antisense strand to SEQ ID NO: 254052
agauuucaaggauaccaag

SEQ ID NO: 254054 - RNA, 19 nt, Artificial Sequence
  Description of Artificial Sequence: Synthetic oligonucleotide
  Sense strand starting at position 3153 SEQ ID NO: 3269
ucuccugacugguuuccaa

SEQ ID NO: 254055 - RNA, 19 nt, Artificial Sequence
  Description of Artificial Sequence: Synthetic oligonucleotide
  Antisense strand to SEQ ID NO: 254054
uuggaaaccagucaggaga

SEQ ID NO: 254056 - RNA, 19 nt, Artificial Sequence
  Description of Artificial Sequence: Synthetic oligonucleotide
  Sense strand starting at position 3195 SEQ ID NO: 3269
cauagucuguucucagaga

SEQ ID NO: 254057 - RNA, 19 nt, Artificial Sequence
  Description of Artificial Sequence: Synthetic oligonucleotide
  Antisense strand to SEQ ID NO: 254056
ucucugagaacagacuaug

SEQ ID NO: 254058 - RNA, 19 nt, Artificial Sequence
  Description of Artificial Sequence: Synthetic oligonucleotide
  Sense strand starting at position 3487 SEQ ID NO: 3269
agggccucuaccuggaaua

SEQ ID NO: 254059 - RNA, 19 nt, Artificial Sequence
  Description of Artificial Sequence: Synthetic oligonucleotide
  Antisense strand to SEQ ID NO: 254058
uauuccagguagaggcccu

SEQ ID NO: 254060 - RNA, 19 nt, Artificial Sequence
  Description of Artificial Sequence: Synthetic oligonucleotide
  Sense strand starting at position 3489 SEQ ID NO: 3269
ggccucuaccuggaauacu

SEQ ID NO: 254061 - RNA, 19 nt, Artificial Sequence
  Description of Artificial Sequence: Synthetic oligonucleotide
  Antisense strand to SEQ ID NO: 254060
aguauuccagguagaggcc

SEQ ID NO: 254062 - RNA, 19 nt, Artificial Sequence
  Description of Artificial Sequence: Synthetic oligonucleotide
  Sense strand starting at position 3498 SEQ ID NO: 3269
cuggaauacuuguuccuag

SEQ ID NO: 254063 - RNA, 19 nt, Artificial Sequence
  Description of Artificial Sequence: Synthetic oligonucleotide
  Antisense strand to SEQ ID NO: 254062
cuaggaacaaguauuccag

SEQ ID NO: 254064 - RNA, 19 nt, Artificial Sequence
  Description of Artificial Sequence: Synthetic oligonucleotide
  Sense strand starting at position 3499 SEQ ID NO: 3269
uggaauacuuguuccuaga

SEQ ID NO: 254065 - RNA, 19 nt, Artificial Sequence
  Description of Artificial Sequence: Synthetic oligonucleotide
  Antisense strand to SEQ ID NO: 254064
ucuaggaacaaguauucca

SEQ ID NO: 254066 - RNA, 19 nt, Artificial Sequence
  Description of Artificial Sequence: Synthetic oligonucleotide
  Sense strand starting at position 3501 SEQ ID NO: 3269
gaauacuuguuccuagaug

SEQ ID NO: 254067 - RNA, 19 nt, Artificial Sequence
  Description of Artificial Sequence: Synthetic oligonucleotide
  Antisense strand to SEQ ID NO: 254066
caucuaggaacaaguauuc

SEQ ID NO: 254068 - RNA, 19 nt, Artificial Sequence
  Description of Artificial Sequence: Synthetic oligonucleotide
  Sense strand starting at position 3515 SEQ ID NO: 3269
agaugucuacaugggaacu

SEQ ID NO: 254069 - RNA, 19 nt, Artificial Sequence
  Description of Artificial Sequence: Synthetic oligonucleotide
  Antisense strand to SEQ ID NO: 254068
aguucccauguagacaucu

SEQ ID NO: 254070 - RNA, 19 nt, Artificial Sequence
  Description of Artificial Sequence: Synthetic oligonucleotide
  Sense strand starting at position 3525 SEQ ID NO: 3269
augggaacucauuagccuu

SEQ ID NO: 254071 - RNA, 19 nt, Artificial Sequence
  Description of Artificial Sequence: Synthetic oligonucleotide
  Antisense strand to SEQ ID NO: 254070
aaggcuaaugaguucccau

SEQ ID NO: 254072 - RNA, 19 nt, Artificial Sequence
  Description of Artificial Sequence: Synthetic oligonucleotide
  Sense strand starting at position 3528 SEQ ID NO: 3269
ggaacucauuagccuugau

SEQ ID NO: 254073 - RNA, 19 nt, Artificial Sequence
  Description of Artificial Sequence: Synthetic oligonucleotide
  Antisense strand to SEQ ID NO: 254072
aucaaggcuaaugaguucc

SEQ ID NO: 254074 - RNA, 19 nt, Artificial Sequence
  Description of Artificial Sequence: Synthetic oligonucleotide
  Sense strand starting at position 3583 SEQ ID NO: 3269
uuuguaauacuguagucua

SEQ ID NO: 254075 - RNA, 19 nt, Artificial Sequence
  Description of Artificial Sequence: Synthetic oligonucleotide
  Antisense strand to SEQ ID NO: 254074
uagacuacaguauuacaaa

SEQ ID NO: 254076 - RNA, 19 nt, Artificial Sequence
  Description of Artificial Sequence: Synthetic oligonucleotide
  Sense strand starting at position 3726 SEQ ID NO: 3269
ugugauauacugcaaguau

SEQ ID NO: 254077 - RNA, 19 nt, Artificial Sequence
  Description of Artificial Sequence: Synthetic oligonucleotide
  Antisense strand to SEQ ID NO: 254076
auacuugcaguauaucaca

SEQ ID NO: 254078 - RNA, 19 nt, Artificial Sequence
  Description of Artificial Sequence: Synthetic oligonucleotide
  Sense strand starting at position 3779 SEQ ID NO: 3269
uacauauguguugaguauc

SEQ ID NO: 254079 - RNA, 19 nt, Artificial Sequence
  Description of Artificial Sequence: Synthetic oligonucleotide
  Antisense strand to SEQ ID NO: 254078
gauacucaacacauaugua

SEQ ID NO: 254080 - RNA, 19 nt, Artificial Sequence
  Description of Artificial Sequence: Synthetic oligonucleotide
  Sense strand starting at position 3782 SEQ ID NO: 3269
auauguguugaguaucaag

SEQ ID NO: 254081 - RNA, 19 nt, Artificial Sequence
  Description of Artificial Sequence: Synthetic oligonucleotide
  Antisense strand to SEQ ID NO: 254080
cuugauacucaacacauau

SEQ ID NO: 254082 - RNA, 19 nt, Artificial Sequence
  Description of Artificial Sequence: Synthetic oligonucleotide
  Sense strand starting at position 3832 SEQ ID NO: 3269
uuguauuccaugcaaggga

SEQ ID NO: 254083 - RNA, 19 nt, Artificial Sequence
  Description of Artificial Sequence: Synthetic oligonucleotide
  Antisense strand to SEQ ID NO: 254082
ucccuugcauggaauacaa

SEQ ID NO: 254084 - RNA, 19 nt, Artificial Sequence
  Description of Artificial Sequence: Synthetic oligonucleotide
  Sense strand starting at position 3962 SEQ ID NO: 3269
uacuaauaggguuauguca

SEQ ID NO: 254085 - RNA, 19 nt, Artificial Sequence
  Description of Artificial Sequence: Synthetic oligonucleotide
  Antisense strand to SEQ ID NO: 254084
ugacauaacccuauuagua

SEQ ID NO: 254086 - RNA, 19 nt, Artificial Sequence
  Description of Artificial Sequence: Synthetic oligonucleotide
  Sense strand starting at position 421 SEQ ID NO: 3270
gccagauuucugggcucag

SEQ ID NO: 254087 - RNA, 19 nt, Artificial Sequence
  Description of Artificial Sequence: Synthetic oligonucleotide
  Antisense strand to SEQ ID NO: 254086
cugagcccagaaaucuggc

SEQ ID NO: 254088 - RNA, 19 nt, Artificial Sequence
  Description of Artificial Sequence: Synthetic oligonucleotide
  Sense strand starting at position 622 SEQ ID NO: 3270
gaaucuucgucgggacuag

SEQ ID NO: 254089 - RNA, 19 nt, Artificial Sequence
  Description of Artificial Sequence: Synthetic oligonucleotide
  Antisense strand to SEQ ID NO: 254088
cuagucccgacgaagauuc

SEQ ID NO: 254090 - RNA, 19 nt, Artificial Sequence
  Description of Artificial Sequence: Synthetic oligonucleotide
  Sense strand starting at position 705 SEQ ID NO: 3270
gcuaauacccggcacuaaa

SEQ ID NO: 254091 - RNA, 19 nt, Artificial Sequence
  Description of Artificial Sequence: Synthetic oligonucleotide
  Antisense strand to SEQ ID NO: 254090
uuuagugccggguauuagc

SEQ ID NO: 254092 - RNA, 19 nt, Artificial Sequence
  Description of Artificial Sequence: Synthetic oligonucleotide
  Sense strand starting at position 744 SEQ ID NO: 3270
cagugugacguugagcaaa

SEQ ID NO: 254093 - RNA, 19 nt, Artificial Sequence
  Description of Artificial Sequence: Synthetic oligonucleotide
  Antisense strand to SEQ ID NO: 254092
uuugcucaacgucacacug

SEQ ID NO: 254094 - RNA, 19 nt, Artificial Sequence
  Description of Artificial Sequence: Synthetic oligonucleotide
  Sense strand starting at position 763 SEQ ID NO: 3270
ucauuagccucucugguuu

SEQ ID NO: 254095 - RNA, 19 nt, Artificial Sequence
  Description of Artificial Sequence: Synthetic oligonucleotide
  Antisense strand to SEQ ID NO: 254094
aaaccagagaggcuaauga

SEQ ID NO: 254096 - RNA, 19 nt, Artificial Sequence
  Description of Artificial Sequence: Synthetic oligonucleotide
  Sense strand starting at position 791 SEQ ID NO: 3270
ggcuguuaaagggacuuau

SEQ ID NO: 254097 - RNA, 19 nt, Artificial Sequence
  Description of Artificial Sequence: Synthetic oligonucleotide
  Antisense strand to SEQ ID NO: 254096
auaagucccuuuaacagcc

SEQ ID NO: 254098 - RNA, 19 nt, Artificial Sequence
  Description of Artificial Sequence: Synthetic oligonucleotide
  Sense strand starting at position 801 SEQ ID NO: 3270
gggacuuaucccugccucu

SEQ ID NO: 254099 - RNA, 19 nt, Artificial Sequence
  Description of Artificial Sequence: Synthetic oligonucleotide
  Antisense strand to SEQ ID NO: 254098
agaggcagggauaaguccc

SEQ ID NO: 254100 - RNA, 19 nt, Artificial Sequence
  Description of Artificial Sequence: Synthetic oligonucleotide
  Sense strand starting at position 851 SEQ ID NO: 3270
agagauaaggcgggcgaaa

SEQ ID NO: 254101 - RNA, 19 nt, Artificial Sequence
  Description of Artificial Sequence: Synthetic oligonucleotide
  Antisense strand to SEQ ID NO: 254100
uuucgcccgccuuaucucu

SEQ ID NO: 254102 - RNA, 19 nt, Artificial Sequence
  Description of Artificial Sequence: Synthetic oligonucleotide
  Sense strand starting at position 1688 SEQ ID NO: 3270
cugaacugcugcccugaua

SEQ ID NO: 254103 - RNA, 19 nt, Artificial Sequence
  Description of Artificial Sequence: Synthetic oligonucleotide
  Antisense strand to SEQ ID NO: 254102
uaucagggcagcaguucag

SEQ ID NO: 254104 - RNA, 19 nt, Artificial Sequence
  Description of Artificial Sequence: Synthetic oligonucleotide
  Sense strand starting at position 2005 SEQ ID NO: 3270
gggagugggcgacaaauau

SEQ ID NO: 254105 - RNA, 19 nt, Artificial Sequence
  Description of Artificial Sequence: Synthetic oligonucleotide
  Antisense strand to SEQ ID NO: 254104
auauuugucgcccacuccc

SEQ ID NO: 254106 - RNA, 19 nt, Artificial Sequence
  Description of Artificial Sequence: Synthetic oligonucleotide
  Sense strand starting at position 2067 SEQ ID NO: 3270
ccucccuggucagaacauu

SEQ ID NO: 254107 - RNA, 19 nt, Artificial Sequence
  Description of Artificial Sequence: Synthetic oligonucleotide
  Antisense strand to SEQ ID NO: 254106
aauguucugaccagggagg

SEQ ID NO: 254108 - RNA, 19 nt, Artificial Sequence
  Description of Artificial Sequence: Synthetic oligonucleotide
  Sense strand starting at position 2115 SEQ ID NO: 3270
ggcuucucugaggaucaga

SEQ ID NO: 254109 - RNA, 19 nt, Artificial Sequence
  Description of Artificial Sequence: Synthetic oligonucleotide
  Antisense strand to SEQ ID NO: 254108
ucugauccucagagaagcc

SEQ ID NO: 254110 - RNA, 19 nt, Artificial Sequence
  Description of Artificial Sequence: Synthetic oligonucleotide
  Sense strand starting at position 2331 SEQ ID NO: 3270
caggcaggcucuuuauuua

SEQ ID NO: 254111 - RNA, 19 nt, Artificial Sequence
  Description of Artificial Sequence: Synthetic oligonucleotide
  Antisense strand to SEQ ID NO: 254110
uaaauaaagagccugccug

SEQ ID NO: 254112 - RNA, 19 nt, Artificial Sequence
  Description of Artificial Sequence: Synthetic oligonucleotide
  Sense strand starting at position 2341 SEQ ID NO: 3270
cuuuauuuagccuguggau

SEQ ID NO: 254113 - RNA, 19 nt, Artificial Sequence
  Description of Artificial Sequence: Synthetic oligonucleotide
  Antisense strand to SEQ ID NO: 254112
auccacaggcuaaauaaag

SEQ ID NO: 254114 - RNA, 19 nt, Artificial Sequence
  Description of Artificial Sequence: Synthetic oligonucleotide
  Sense strand starting at position 2580 SEQ ID NO: 3270
ggcucuggauagucagaca

SEQ ID NO: 254115 - RNA, 19 nt, Artificial Sequence
  Description of Artificial Sequence: Synthetic oligonucleotide
  Antisense strand to SEQ ID NO: 254114
ugucugacuauccagagcc

SEQ ID NO: 254116 - RNA, 19 nt, Artificial Sequence
  Description of Artificial Sequence: Synthetic oligonucleotide
  Sense strand starting at position 2583 SEQ ID NO: 3270
ucuggauagucagacaaca

SEQ ID NO: 254117 - RNA, 19 nt, Artificial Sequence
  Description of Artificial Sequence: Synthetic oligonucleotide
  Antisense strand to SEQ ID NO: 254116
uguugucugacuauccaga

SEQ ID NO: 254118 - RNA, 19 nt, Artificial Sequence
  Description of Artificial Sequence: Synthetic oligonucleotide
  Sense strand starting at position 2710 SEQ ID NO: 3270
cguggcugucaagaccaau

SEQ ID NO: 254119 - RNA, 19 nt, Artificial Sequence
  Description of Artificial Sequence: Synthetic oligonucleotide
  Antisense strand to SEQ ID NO: 254118
auuggucuugacagccacg

SEQ ID NO: 254120 - RNA, 19 nt, Artificial Sequence
  Description of Artificial Sequence: Synthetic oligonucleotide
  Sense strand starting at position 2803 SEQ ID NO: 3270
gcgguaaacugagauaaac

SEQ ID NO: 254121 - RNA, 19 nt, Artificial Sequence
  Description of Artificial Sequence: Synthetic oligonucleotide
  Antisense strand to SEQ ID NO: 254120
guuuaucucaguuuaccgc

SEQ ID NO: 254122 - RNA, 19 nt, Artificial Sequence
  Description of Artificial Sequence: Synthetic oligonucleotide
  Sense strand starting at position 2921 SEQ ID NO: 3270
cugcacuguccuuggagau

SEQ ID NO: 254123 - RNA, 19 nt, Artificial Sequence
  Description of Artificial Sequence: Synthetic oligonucleotide
  Antisense strand to SEQ ID NO: 254122
aucuccaaggacagugcag

SEQ ID NO: 254124 - RNA, 19 nt, Artificial Sequence
  Description of Artificial Sequence: Synthetic oligonucleotide
  Sense strand starting at position 2922 SEQ ID NO: 3270
ugcacuguccuuggagauu

SEQ ID NO: 254125 - RNA, 19 nt, Artificial Sequence
  Description of Artificial Sequence: Synthetic oligonucleotide
  Antisense strand to SEQ ID NO: 254124
aaucuccaaggacagugca

SEQ ID NO: 254126 - RNA, 19 nt, Artificial Sequence
  Description of Artificial Sequence: Synthetic oligonucleotide
  Sense strand starting at position 2988 SEQ ID NO: 3270
gggcauaaauuggugcaua

SEQ ID NO: 254127 - RNA, 19 nt, Artificial Sequence
  Description of Artificial Sequence: Synthetic oligonucleotide
  Antisense strand to SEQ ID NO: 254126
uaugcaccaauuuaugccc

SEQ ID NO: 254128 - RNA, 19 nt, Artificial Sequence
  Description of Artificial Sequence: Synthetic oligonucleotide
  Sense strand starting at position 3093 SEQ ID NO: 3270
gcagaagcauugcuuccau

SEQ ID NO: 254129 - RNA, 19 nt, Artificial Sequence
  Description of Artificial Sequence: Synthetic oligonucleotide
  Antisense strand to SEQ ID NO: 254128
auggaagcaaugcuucugc

SEQ ID NO: 254130 - RNA, 19 nt, Artificial Sequence
  Description of Artificial Sequence: Synthetic oligonucleotide
  Sense strand starting at position 3362 SEQ ID NO: 3270
uggagauucuuacaggcaa

SEQ ID NO: 254131 - RNA, 19 nt, Artificial Sequence
  Description of Artificial Sequence: Synthetic oligonucleotide
  Antisense strand to SEQ ID NO: 254130
uugccuguaagaaucucca

SEQ ID NO: 254132 - RNA, 19 nt, Artificial Sequence
  Description of Artificial Sequence: Synthetic oligonucleotide
  Sense strand starting at position 3595 SEQ ID NO: 3270
ucugucuacccuggucaga

SEQ ID NO: 254133 - RNA, 19 nt, Artificial Sequence
  Description of Artificial Sequence: Synthetic oligonucleotide
  Antisense strand to SEQ ID NO: 254132
ucugaccaggguagacaga

SEQ ID NO: 254134 - RNA, 19 nt, Artificial Sequence
  Description of Artificial Sequence: Synthetic oligonucleotide
  Sense strand starting at position 3779 SEQ ID NO: 3270
gcacggguguggcuagaau

SEQ ID NO: 254135 - RNA, 19 nt, Artificial Sequence
  Description of Artificial Sequence: Synthetic oligonucleotide
  Antisense strand to SEQ ID NO: 254134
auucuagccacacccgugc

SEQ ID NO: 254136 - RNA, 19 nt, Artificial Sequence
  Description of Artificial Sequence: Synthetic oligonucleotide
  Sense strand starting at position 3782 SEQ ID NO: 3270
cggguguggcuagaauuga

SEQ ID NO: 254137 - RNA, 19 nt, Artificial Sequence
  Description of Artificial Sequence: Synthetic oligonucleotide
  Antisense strand to SEQ ID NO: 254136
ucaauucuagccacacccg

SEQ ID NO: 254138 - RNA, 19 nt, Artificial Sequence
  Description of Artificial Sequence: Synthetic oligonucleotide
  Sense strand starting at position 3783 SEQ ID NO: 3270
ggguguggcuagaauugag

SEQ ID NO: 254139 - RNA, 19 nt, Artificial Sequence
  Description of Artificial Sequence: Synthetic oligonucleotide
  Antisense strand to SEQ ID NO: 254138
cucaauucuagccacaccc

SEQ ID NO: 254140 - RNA, 19 nt, Artificial Sequence
  Description of Artificial Sequence: Synthetic oligonucleotide
  Sense strand starting at position 3791 SEQ ID NO: 3270
cuagaauugaggugcuuua

SEQ ID NO: 254141 - RNA, 19 nt, Artificial Sequence
  Description of Artificial Sequence: Synthetic oligonucleotide
  Antisense strand to SEQ ID NO: 254140
uaaagcaccucaauucuag

SEQ ID NO: 254142 - RNA, 19 nt, Artificial Sequence
  Description of Artificial Sequence: Synthetic oligonucleotide
  Sense strand starting at position 3864 SEQ ID NO: 3270
gucccucagcccuaggaaa

SEQ ID NO: 254143 - RNA, 19 nt, Artificial Sequence
  Description of Artificial Sequence: Synthetic oligonucleotide
  Antisense strand to SEQ ID NO: 254142
uuuccuagggcugagggac

SEQ ID NO: 254144 - RNA, 19 nt, Artificial Sequence
  Description of Artificial Sequence: Synthetic oligonucleotide
  Sense strand starting at position 3921 SEQ ID NO: 3270
cucuccaugugcucugaua

SEQ ID NO: 254145 - RNA, 19 nt, Artificial Sequence
  Description of Artificial Sequence: Synthetic oligonucleotide
  Antisense strand to SEQ ID NO: 254144
uaucagagcacauggagag

SEQ ID NO: 254146 - RNA, 19 nt, Artificial Sequence
  Description of Artificial Sequence: Synthetic oligonucleotide
  Sense strand starting at position 3923 SEQ ID NO: 3270
cuccaugugcucugauaug

SEQ ID NO: 254147 - RNA, 19 nt, Artificial Sequence
  Description of Artificial Sequence: Synthetic oligonucleotide
  Antisense strand to SEQ ID NO: 254146
cauaucagagcacauggag

SEQ ID NO: 254148 - RNA, 19 nt, Artificial Sequence
  Description of Artificial Sequence: Synthetic oligonucleotide
  Sense strand starting at position 3933 SEQ ID NO: 3270
ucugauaugugcugugaca

SEQ ID NO: 254149 - RNA, 19 nt, Artificial Sequence
  Description of Artificial Sequence: Synthetic oligonucleotide
  Antisense strand to SEQ ID NO: 254148
ugucacagcacauaucaga

SEQ ID NO: 254150 - RNA, 19 nt, Artificial Sequence
  Description of Artificial Sequence: Synthetic oligonucleotide
  Sense strand starting at position 3967 SEQ ID NO: 3270
gugagccuguccuaguguu

SEQ ID NO: 254151 - RNA, 19 nt, Artificial Sequence
  Description of Artificial Sequence: Synthetic oligonucleotide
  Antisense strand to SEQ ID NO: 254150
aacacuaggacaggcucac

SEQ ID NO: 254152 - RNA, 19 nt, Artificial Sequence
  Description of Artificial Sequence: Synthetic oligonucleotide
  Sense strand starting at position 204 SEQ ID NO: 3271
ggaaauauuucuuaucagu

SEQ ID NO: 254153 - RNA, 19 nt, Artificial Sequence
  Description of Artificial Sequence: Synthetic oligonucleotide
  Antisense strand to SEQ ID NO: 254152
acugauaagaaauauuucc

SEQ ID NO: 254154 - RNA, 19 nt, Artificial Sequence
  Description of Artificial Sequence: Synthetic oligonucleotide
  Sense strand starting at position 227 SEQ ID NO: 3271
gcuugugcucugcucagua

SEQ ID NO: 254155 - RNA, 19 nt, Artificial Sequence
  Description of Artificial Sequence: Synthetic oligonucleotide
  Antisense strand to SEQ ID NO: 254154
uacugagcagagcacaagc

SEQ ID NO: 254156 - RNA, 19 nt, Artificial Sequence
  Description of Artificial Sequence: Synthetic oligonucleotide
  Sense strand starting at position 232 SEQ ID NO: 3271
ugcucugcucaguaaagaa

SEQ ID NO: 254157 - RNA, 19 nt, Artificial Sequence
  Description of Artificial Sequence: Synthetic oligonucleotide
  Antisense strand to SEQ ID NO: 254156
uucuuuacugagcagagca

SEQ ID NO: 254158 - RNA, 19 nt, Artificial Sequence
  Description of Artificial Sequence: Synthetic oligonucleotide
  Sense strand starting at position 312 SEQ ID NO: 3271
gggaaaucuuagccaagcu

SEQ ID NO: 254159 - RNA, 19 nt, Artificial Sequence
  Description of Artificial Sequence: Synthetic oligonucleotide
  Antisense strand to SEQ ID NO: 254158
agcuuggcuaagauuuccc

SEQ ID NO: 254160 - RNA, 19 nt, Artificial Sequence
  Description of Artificial Sequence: Synthetic oligonucleotide
  Sense strand starting at position 401 SEQ ID NO: 3271
cggucaggccaagacauau

SEQ ID NO: 254161 - RNA, 19 nt, Artificial Sequence
  Description of Artificial Sequence: Synthetic oligonucleotide
  Antisense strand to SEQ ID NO: 254160
auaugucuuggccugaccg

SEQ ID NO: 254162 - RNA, 19 nt, Artificial Sequence
  Description of Artificial Sequence: Synthetic oligonucleotide
  Sense strand starting at position 487 SEQ ID NO: 3271
agaagaauguagccuaaca

SEQ ID NO: 254163 - RNA, 19 nt, Artificial Sequence
  Description of Artificial Sequence: Synthetic oligonucleotide
  Antisense strand to SEQ ID NO: 254162
uguuaggcuacauucuucu

SEQ ID NO: 254164 - RNA, 19 nt, Artificial Sequence
  Description of Artificial Sequence: Synthetic oligonucleotide
  Sense strand starting at position 1016 SEQ ID NO: 3271
gauaaacgaugcucuugaa

SEQ ID NO: 254165 - RNA, 19 nt, Artificial Sequence
  Description of Artificial Sequence: Synthetic oligonucleotide
  Antisense strand to SEQ ID NO: 254164
uucaagagcaucguuuauc

SEQ ID NO: 254166 - RNA, 19 nt, Artificial Sequence
  Description of Artificial Sequence: Synthetic oligonucleotide
  Sense strand starting at position 1283 SEQ ID NO: 3271
uggauaaucugucucuucu

SEQ ID NO: 254167 - RNA, 19 nt, Artificial Sequence
  Description of Artificial Sequence: Synthetic oligonucleotide
  Antisense strand to SEQ ID NO: 254166
agaagagacagauuaucca

SEQ ID NO: 254168 - RNA, 19 nt, Artificial Sequence
  Description of Artificial Sequence: Synthetic oligonucleotide
  Sense strand starting at position 1345 SEQ ID NO: 3271
cagaaagugucuuugaaca

SEQ ID NO: 254169 - RNA, 19 nt, Artificial Sequence
  Description of Artificial Sequence: Synthetic oligonucleotide
  Antisense strand to SEQ ID NO: 254168
uguucaaagacacuuucug

SEQ ID NO: 254170 - RNA, 19 nt, Artificial Sequence
  Description of Artificial Sequence: Synthetic oligonucleotide
  Sense strand starting at position 1350 SEQ ID NO: 3271
agugucuuugaacaugcau

SEQ ID NO: 254171 - RNA, 19 nt, Artificial Sequence
  Description of Artificial Sequence: Synthetic oligonucleotide
  Antisense strand to SEQ ID NO: 254170
augcauguucaaagacacu

SEQ ID NO: 254172 - RNA, 19 nt, Artificial Sequence
  Description of Artificial Sequence: Synthetic oligonucleotide
  Sense strand starting at position 1377 SEQ ID NO: 3271
auugaagaagcauguuaga

SEQ ID NO: 254173 - RNA, 19 nt, Artificial Sequence
  Description of Artificial Sequence: Synthetic oligonucleotide
  Antisense strand to SEQ ID NO: 254172
ucuaacaugcuucuucaau

SEQ ID NO: 254174 - RNA, 19 nt, Artificial Sequence
  Description of Artificial Sequence: Synthetic oligonucleotide
  Sense strand starting at position 1432 SEQ ID NO: 3271
ucauaucauguaugcauua

SEQ ID NO: 254175 - RNA, 19 nt, Artificial Sequence
  Description of Artificial Sequence: Synthetic oligonucleotide
  Antisense strand to SEQ ID NO: 254174
uaaugcauacaugauauga

SEQ ID NO: 254176 - RNA, 19 nt, Artificial Sequence
  Description of Artificial Sequence: Synthetic oligonucleotide
  Sense strand starting at position 1437 SEQ ID NO: 3271
ucauguaugcauuaucucu

SEQ ID NO: 254177 - RNA, 19 nt, Artificial Sequence
  Description of Artificial Sequence: Synthetic oligonucleotide
  Antisense strand to SEQ ID NO: 254176
agagauaaugcauacauga

SEQ ID NO: 254178 - RNA, 19 nt, Artificial Sequence
  Description of Artificial Sequence: Synthetic oligonucleotide
  Sense strand starting at position 1529 SEQ ID NO: 3271
ggacaagucuaagcuaagu

SEQ ID NO: 254179 - RNA, 19 nt, Artificial Sequence
  Description of Artificial Sequence: Synthetic oligonucleotide
  Antisense strand to SEQ ID NO: 254178
acuuagcuuagacuugucc

SEQ ID NO: 254180 - RNA, 19 nt, Artificial Sequence
  Description of Artificial Sequence: Synthetic oligonucleotide
  Sense strand starting at position 1558 SEQ ID NO: 3271
caggacucuguccaaggua

SEQ ID NO: 254181 - RNA, 19 nt, Artificial Sequence
  Description of Artificial Sequence: Synthetic oligonucleotide
  Antisense strand to SEQ ID NO: 254180
uaccuuggacagaguccug

SEQ ID NO: 254182 - RNA, 19 nt, Artificial Sequence
  Description of Artificial Sequence: Synthetic oligonucleotide
  Sense strand starting at position 1693 SEQ ID NO: 3271
cucugaguuccuugaaccu

SEQ ID NO: 254183 - RNA, 19 nt, Artificial Sequence
  Description of Artificial Sequence: Synthetic oligonucleotide
  Antisense strand to SEQ ID NO: 254182
agguucaaggaacucagag

SEQ ID NO: 254184 - RNA, 19 nt, Artificial Sequence
  Description of Artificial Sequence: Synthetic oligonucleotide
  Sense strand starting at position 2066 SEQ ID NO: 3271
gucaaagcuccuggaaacu

SEQ ID NO: 254185 - RNA, 19 nt, Artificial Sequence
  Description of Artificial Sequence: Synthetic oligonucleotide
  Antisense strand to SEQ ID NO: 254184
aguuuccaggagcuuugac

SEQ ID NO: 254186 - RNA, 19 nt, Artificial Sequence
  Description of Artificial Sequence: Synthetic oligonucleotide
  Sense strand starting at position 2358 SEQ ID NO: 3271
ggccucguccgagaauaaa

SEQ ID NO: 254187 - RNA, 19 nt, Artificial Sequence
  Description of Artificial Sequence: Synthetic oligonucleotide
  Antisense strand to SEQ ID NO: 254186
uuuauucucggacgaggcc

SEQ ID NO: 254188 - RNA, 19 nt, Artificial Sequence
  Description of Artificial Sequence: Synthetic oligonucleotide
  Sense strand starting at position 2475 SEQ ID NO: 3271
cgagauauuccagguguga

SEQ ID NO: 254189 - RNA, 19 nt, Artificial Sequence
  Description of Artificial Sequence: Synthetic oligonucleotide
  Antisense strand to SEQ ID NO: 254188
ucacaccuggaauaucucg

SEQ ID NO: 254190 - RNA, 19 nt, Artificial Sequence
  Description of Artificial Sequence: Synthetic oligonucleotide
  Sense strand starting at position 2477 SEQ ID NO: 3271
agauauuccaggugugaau

SEQ ID NO: 254191 - RNA, 19 nt, Artificial Sequence
  Description of Artificial Sequence: Synthetic oligonucleotide
  Antisense strand to SEQ ID NO: 254190
auucacaccuggaauaucu

SEQ ID NO: 254192 - RNA, 19 nt, Artificial Sequence
  Description of Artificial Sequence: Synthetic oligonucleotide
  Sense strand starting at position 2488 SEQ ID NO: 3271
gugugaauuucuccugccu

SEQ ID NO: 254193 - RNA, 19 nt, Artificial Sequence
  Description of Artificial Sequence: Synthetic oligonucleotide
  Antisense strand to SEQ ID NO: 254192
aggcaggagaaauucacac

SEQ ID NO: 254194 - RNA, 19 nt, Artificial Sequence
  Description of Artificial Sequence: Synthetic oligonucleotide
  Sense strand starting at position 2716 SEQ ID NO: 3271
ggucccagcuuuccaagaa

SEQ ID NO: 254195 - RNA, 19 nt, Artificial Sequence
  Description of Artificial Sequence: Synthetic oligonucleotide
  Antisense strand to SEQ ID NO: 254194
uucuuggaaagcugggacc

SEQ ID NO: 254196 - RNA, 19 nt, Artificial Sequence
  Description of Artificial Sequence: Synthetic oligonucleotide
  Sense strand starting at position 2747 SEQ ID NO: 3271
ugggauucccuuugauucu

SEQ ID NO: 254197 - RNA, 19 nt, Artificial Sequence
  Description of Artificial Sequence: Synthetic oligonucleotide
  Antisense strand to SEQ ID NO: 254196
agaaucaaagggaauccca

SEQ ID NO: 254198 - RNA, 19 nt, Artificial Sequence
  Description of Artificial Sequence: Synthetic oligonucleotide
  Sense strand starting at position 2796 SEQ ID NO: 3271
agauuagagcccugucacu

SEQ ID NO: 254199 - RNA, 19 nt, Artificial Sequence
  Description of Artificial Sequence: Synthetic oligonucleotide
  Antisense strand to SEQ ID NO: 254198
agugacagggcucuaaucu

SEQ ID NO: 254200 - RNA, 19 nt, Artificial Sequence
  Description of Artificial Sequence: Synthetic oligonucleotide
  Sense strand starting at position 2832 SEQ ID NO: 3271
agcauaagugcccaucuua

SEQ ID NO: 254201 - RNA, 19 nt, Artificial Sequence
  Description of Artificial Sequence: Synthetic oligonucleotide
  Antisense strand to SEQ ID NO: 254200
uaagaugggcacuuaugcu

SEQ ID NO: 254202 - RNA, 19 nt, Artificial Sequence
  Description of Artificial Sequence: Synthetic oligonucleotide
  Sense strand starting at position 2957 SEQ ID NO: 3271
uguagucuccacuaacuga

SEQ ID NO: 254203 - RNA, 19 nt, Artificial Sequence
  Description of Artificial Sequence: Synthetic oligonucleotide
  Antisense strand to SEQ ID NO: 254202
ucaguuaguggagacuaca

SEQ ID NO: 254204 - RNA, 19 nt, Artificial Sequence
  Description of Artificial Sequence: Synthetic oligonucleotide
  Sense strand starting at position 3033 SEQ ID NO: 3271
uguaguaagauuugccgaa

SEQ ID NO: 254205 - RNA, 19 nt, Artificial Sequence
  Description of Artificial Sequence: Synthetic oligonucleotide
  Antisense strand to SEQ ID NO: 254204
uucggcaaaucuuacuaca

SEQ ID NO: 254206 - RNA, 19 nt, Artificial Sequence
  Description of Artificial Sequence: Synthetic oligonucleotide
  Sense strand starting at position 3139 SEQ ID NO: 3271
cucagaaaugauggagugu

SEQ ID NO: 254207 - RNA, 19 nt, Artificial Sequence
  Description of Artificial Sequence: Synthetic oligonucleotide
  Antisense strand to SEQ ID NO: 254206
acacuccaucauuucugag

SEQ ID NO: 254208 - RNA, 19 nt, Artificial Sequence
  Description of Artificial Sequence: Synthetic oligonucleotide
  Sense strand starting at position 3172 SEQ ID NO: 3271
augugugagcuguaucuaa

SEQ ID NO: 254209 - RNA, 19 nt, Artificial Sequence
  Description of Artificial Sequence: Synthetic oligonucleotide
  Antisense strand to SEQ ID NO: 254208
uuagauacagcucacacau

SEQ ID NO: 254210 - RNA, 19 nt, Artificial Sequence
  Description of Artificial Sequence: Synthetic oligonucleotide
  Sense strand starting at position 3234 SEQ ID NO: 3271
gggugaagucuuggacuug

SEQ ID NO: 254211 - RNA, 19 nt, Artificial Sequence
  Description of Artificial Sequence: Synthetic oligonucleotide
  Antisense strand to SEQ ID NO: 254210
caaguccaagacuucaccc

SEQ ID NO: 254212 - RNA, 19 nt, Artificial Sequence
  Description of Artificial Sequence: Synthetic oligonucleotide
  Sense strand starting at position 3245 SEQ ID NO: 3271
uggacuugcuuccugaacu

SEQ ID NO: 254213 - RNA, 19 nt, Artificial Sequence
  Description of Artificial Sequence: Synthetic oligonucleotide
  Antisense strand to SEQ ID NO: 254212
aguucaggaagcaagucca

SEQ ID NO: 254214 - RNA, 19 nt, Artificial Sequence
  Description of Artificial Sequence: Synthetic oligonucleotide
  Sense strand starting at position 3270 SEQ ID NO: 3271
agcucaugccuuuggagaa

SEQ ID NO: 254215 - RNA, 19 nt, Artificial Sequence
  Description of Artificial Sequence: Synthetic oligonucleotide
  Antisense strand to SEQ ID NO: 254214
uucuccaaaggcaugagcu

SEQ ID NO: 254216 - RNA, 19 nt, Artificial Sequence
  Description of Artificial Sequence: Synthetic oligonucleotide
  Sense strand starting at position 3416 SEQ ID NO: 3271
ucgucagaucgagaaagca

SEQ ID NO: 254217 - RNA, 19 nt, Artificial Sequence
  Description of Artificial Sequence: Synthetic oligonucleotide
  Antisense strand to SEQ ID NO: 254216
ugcuuucucgaucugacga

SEQ ID NO: 254218 - RNA, 19 nt, Artificial Sequence
  Description of Artificial Sequence: Synthetic oligonucleotide
  Sense strand starting at position 3445 SEQ ID NO: 3271
acucgugaaugucuggaaa

SEQ ID NO: 254219 - RNA, 19 nt, Artificial Sequence
  Description of Artificial Sequence: Synthetic oligonucleotide
  Antisense strand to SEQ ID NO: 254218
uuuccagacauucacgagu

SEQ ID NO: 254220 - RNA, 19 nt, Artificial Sequence
  Description of Artificial Sequence: Synthetic oligonucleotide
  Sense strand starting at position 3463 SEQ ID NO: 3271
aaacgaguuguacagguau

SEQ ID NO: 254221 - RNA, 19 nt, Artificial Sequence
  Description of Artificial Sequence: Synthetic oligonucleotide
  Antisense strand to SEQ ID NO: 254220
auaccuguacaacucguuu

SEQ ID NO: 254222 - RNA, 19 nt, Artificial Sequence
  Description of Artificial Sequence: Synthetic oligonucleotide
  Sense strand starting at position 3654 SEQ ID NO: 3271
cgugucaauaguuacauua

SEQ ID NO: 254223 - RNA, 19 nt, Artificial Sequence
  Description of Artificial Sequence: Synthetic oligonucleotide
  Antisense strand to SEQ ID NO: 254222
uaauguaacuauugacacg

SEQ ID NO: 254224 - RNA, 19 nt, Artificial Sequence
  Description of Artificial Sequence: Synthetic oligonucleotide
  Sense strand starting at position 3699 SEQ ID NO: 3271
ugcagugcuuacuuuauuu

SEQ ID NO: 254225 - RNA, 19 nt, Artificial Sequence
  Description of Artificial Sequence: Synthetic oligonucleotide
  Antisense strand to SEQ ID NO: 254224
aaauaaaguaagcacugca

SEQ ID NO: 254226 - RNA, 19 nt, Artificial Sequence
  Description of Artificial Sequence: Synthetic oligonucleotide
  Sense strand starting at position 3747 SEQ ID NO: 3271
acaugcuguguauacagaa

SEQ ID NO: 254227 - RNA, 19 nt, Artificial Sequence
  Description of Artificial Sequence: Synthetic oligonucleotide
  Antisense strand to SEQ ID NO: 254226
uucuguauacacagcaugu

SEQ ID NO: 254228 - RNA, 19 nt, Artificial Sequence
  Description of Artificial Sequence: Synthetic oligonucleotide
  Sense strand starting at position 3809 SEQ ID NO: 3271
uugagucuggagugaugga

SEQ ID NO: 254229 - RNA, 19 nt, Artificial Sequence
  Description of Artificial Sequence: Synthetic oligonucleotide
  Antisense strand to SEQ ID NO: 254228
uccaucacuccagacucaa

SEQ ID NO: 254230 - RNA, 19 nt, Artificial Sequence
  Description of Artificial Sequence: Synthetic oligonucleotide
  Sense strand starting at position 3935 SEQ ID NO: 3271
guugaauggugaguuuaca

SEQ ID NO: 254231 - RNA, 19 nt, Artificial Sequence
  Description of Artificial Sequence: Synthetic oligonucleotide
  Antisense strand to SEQ ID NO: 254230
uguaaacucaccauucaac

SEQ ID NO: 254232 - RNA, 19 nt, Artificial Sequence
  Description of Artificial Sequence: Synthetic oligonucleotide
  Sense strand starting at position 3543 SEQ ID NO: 3272
ggagcaagcucccauuucu

SEQ ID NO: 254233 - RNA, 19 nt, Artificial Sequence
  Description of Artificial Sequence: Synthetic oligonucleotide
  Antisense strand to SEQ ID NO: 254232
agaaaugggagcuugcucc

SEQ ID NO: 254234 - RNA, 19 nt, Artificial Sequence
  Description of Artificial Sequence: Synthetic oligonucleotide
  Sense strand starting at position 3713 SEQ ID NO: 3272
cugguauacugguguaugu

SEQ ID NO: 254235 - RNA, 19 nt, Artificial Sequence
  Description of Artificial Sequence: Synthetic oligonucleotide
  Antisense strand to SEQ ID NO: 254234
acauacaccaguauaccag

SEQ ID NO: 254236 - RNA, 19 nt, Artificial Sequence
  Description of Artificial Sequence: Synthetic oligonucleotide
  Sense strand starting at position 3715 SEQ ID NO: 3272
gguauacugguguauguca

SEQ ID NO: 254237 - RNA, 19 nt, Artificial Sequence
  Description of Artificial Sequence: Synthetic oligonucleotide
  Antisense strand to SEQ ID NO: 254236
ugacauacaccaguauacc

SEQ ID NO: 254238 - RNA, 19 nt, Artificial Sequence
  Description of Artificial Sequence: Synthetic oligonucleotide
  Sense strand starting at position 3722 SEQ ID NO: 3272
ugguguaugucacauacac

SEQ ID NO: 254239 - RNA, 19 nt, Artificial Sequence
  Description of Artificial Sequence: Synthetic oligonucleotide
  Antisense strand to SEQ ID NO: 254238
guguaugugacauacacca

SEQ ID NO: 254240 - RNA, 19 nt, Artificial Sequence
  Description of Artificial Sequence: Synthetic oligonucleotide
  Sense strand starting at position 3941 SEQ ID NO: 3272
cgaggcugcucugucuaaa

SEQ ID NO: 254241 - RNA, 19 nt, Artificial Sequence
  Description of Artificial Sequence: Synthetic oligonucleotide
  Antisense strand to SEQ ID NO: 254240
uuuagacagagcagccucg

SEQ ID NO: 254242 - RNA, 19 nt, Artificial Sequence
  Description of Artificial Sequence: Synthetic oligonucleotide
  Sense strand starting at position 33 SEQ ID NO: 3273
aguuauauuguagaaguga

SEQ ID NO: 254243 - RNA, 19 nt, Artificial Sequence
  Description of Artificial Sequence: Synthetic oligonucleotide
  Antisense strand to SEQ ID NO: 254242
ucacuucuacaauauaacu

SEQ ID NO: 254244 - RNA, 19 nt, Artificial Sequence
  Description of Artificial Sequence: Synthetic oligonucleotide
  Sense strand starting at position 46 SEQ ID NO: 3273
aagugacaauugucagcau

SEQ ID NO: 254245 - RNA, 19 nt, Artificial Sequence
  Description of Artificial Sequence: Synthetic oligonucleotide
  Antisense strand to SEQ ID NO: 254244
augcugacaauugucacuu

SEQ ID NO: 254246 - RNA, 19 nt, Artificial Sequence
  Description of Artificial Sequence: Synthetic oligonucleotide
  Sense strand starting at position 49 SEQ ID NO: 3273
ugacaauugucagcauauu

SEQ ID NO: 254247 - RNA, 19 nt, Artificial Sequence
  Description of Artificial Sequence: Synthetic oligonucleotide
  Antisense strand to SEQ ID NO: 254246
aauaugcugacaauuguca

SEQ ID NO: 254248 - RNA, 19 nt, Artificial Sequence
  Description of Artificial Sequence: Synthetic oligonucleotide
  Sense strand starting at position 50 SEQ ID NO: 3273
gacaauugucagcauauug

SEQ ID NO: 254249 - RNA, 19 nt, Artificial Sequence
  Description of Artificial Sequence: Synthetic oligonucleotide
  Antisense strand to SEQ ID NO: 254248
caauaugcugacaauuguc

SEQ ID NO: 254250 - RNA, 19 nt, Artificial Sequence
  Description of Artificial Sequence: Synthetic oligonucleotide
  Sense strand starting at position 66 SEQ ID NO: 3273
uugccaguaguggaagaau

SEQ ID NO: 254251 - RNA, 19 nt, Artificial Sequence
  Description of Artificial Sequence: Synthetic oligonucleotide
  Antisense strand to SEQ ID NO: 254250
auucuuccacuacuggcaa

SEQ ID NO: 254252 - RNA, 19 nt, Artificial Sequence
  Description of Artificial Sequence: Synthetic oligonucleotide
  Sense strand starting at position 74 SEQ ID NO: 3273
aguggaagaaugugguauu

SEQ ID NO: 254253 - RNA, 19 nt, Artificial Sequence
  Description of Artificial Sequence: Synthetic oligonucleotide
  Antisense strand to SEQ ID NO: 254252
aauaccacauucuuccacu

SEQ ID NO: 254254 - RNA, 19 nt, Artificial Sequence
  Description of Artificial Sequence: Synthetic oligonucleotide
  Sense strand starting at position 96 SEQ ID NO: 3273
auguguuugcuaguugguu

SEQ ID NO: 254255 - RNA, 19 nt, Artificial Sequence
  Description of Artificial Sequence: Synthetic oligonucleotide
  Antisense strand to SEQ ID NO: 254254
aaccaacuagcaaacacau

SEQ ID NO: 254256 - RNA, 19 nt, Artificial Sequence
  Description of Artificial Sequence: Synthetic oligonucleotide
  Sense strand starting at position 179 SEQ ID NO: 3273
agugccauagucuaaacaa

SEQ ID NO: 254257 - RNA, 19 nt, Artificial Sequence
  Description of Artificial Sequence: Synthetic oligonucleotide
  Antisense strand to SEQ ID NO: 254256
uuguuuagacuauggcacu

SEQ ID NO: 254258 - RNA, 19 nt, Artificial Sequence
  Description of Artificial Sequence: Synthetic oligonucleotide
  Sense strand starting at position 280 SEQ ID NO: 3273
cugagaauguacuugcaca

SEQ ID NO: 254259 - RNA, 19 nt, Artificial Sequence
  Description of Artificial Sequence: Synthetic oligonucleotide
  Antisense strand to SEQ ID NO: 254258
ugugcaaguacauucucag

SEQ ID NO: 254260 - RNA, 19 nt, Artificial Sequence
  Description of Artificial Sequence: Synthetic oligonucleotide
  Sense strand starting at position 281 SEQ ID NO: 3273
ugagaauguacuugcacag

SEQ ID NO: 254261 - RNA, 19 nt, Artificial Sequence
  Description of Artificial Sequence: Synthetic oligonucleotide
  Antisense strand to SEQ ID NO: 254260
cugugcaaguacauucuca

SEQ ID NO: 254262 - RNA, 19 nt, Artificial Sequence
  Description of Artificial Sequence: Synthetic oligonucleotide
  Sense strand starting at position 699 SEQ ID NO: 3273
uuaaauauguggccauaca

SEQ ID NO: 254263 - RNA, 19 nt, Artificial Sequence
  Description of Artificial Sequence: Synthetic oligonucleotide
  Antisense strand to SEQ ID NO: 254262
uguauggccacauauuuaa

SEQ ID NO: 254264 - RNA, 19 nt, Artificial Sequence
  Description of Artificial Sequence: Synthetic oligonucleotide
  Sense strand starting at position 755 SEQ ID NO: 3273
agaaauauguaagcuacau

SEQ ID NO: 254265 - RNA, 19 nt, Artificial Sequence
  Description of Artificial Sequence: Synthetic oligonucleotide
  Antisense strand to SEQ ID NO: 254264
auguagcuuacauauuucu

SEQ ID NO: 254266 - RNA, 19 nt, Artificial Sequence
  Description of Artificial Sequence: Synthetic oligonucleotide
  Sense strand starting at position 1025 SEQ ID NO: 3273
acagcacaggucuauuauu

SEQ ID NO: 254267 - RNA, 19 nt, Artificial Sequence
  Description of Artificial Sequence: Synthetic oligonucleotide
  Antisense strand to SEQ ID NO: 254266
aauaauagaccugugcugu

SEQ ID NO: 254268 - RNA, 19 nt, Artificial Sequence
  Description of Artificial Sequence: Synthetic oligonucleotide
  Sense strand starting at position 1089 SEQ ID NO: 3273
gagugugucauugaaauag

SEQ ID NO: 254269 - RNA, 19 nt, Artificial Sequence
  Description of Artificial Sequence: Synthetic oligonucleotide
  Antisense strand to SEQ ID NO: 254268
cuauuucaaugacacacuc

SEQ ID NO: 254270 - RNA, 19 nt, Artificial Sequence
  Description of Artificial Sequence: Synthetic oligonucleotide
  Sense strand starting at position 1093 SEQ ID NO: 3273
gugucauugaaauaguguc

SEQ ID NO: 254271 - RNA, 19 nt, Artificial Sequence
  Description of Artificial Sequence: Synthetic oligonucleotide
  Antisense strand to SEQ ID NO: 254270
gacacuauuucaaugacac

SEQ ID NO: 254272 - RNA, 19 nt, Artificial Sequence
  Description of Artificial Sequence: Synthetic oligonucleotide
  Sense strand starting at position 1099 SEQ ID NO: 3273
uugaaauaguguccaaaug

SEQ ID NO: 254273 - RNA, 19 nt, Artificial Sequence
  Description of Artificial Sequence: Synthetic oligonucleotide
  Antisense strand to SEQ ID NO: 254272
cauuuggacacuauuucaa

SEQ ID NO: 254274 - RNA, 19 nt, Artificial Sequence
  Description of Artificial Sequence: Synthetic oligonucleotide
  Sense strand starting at position 1214 SEQ ID NO: 3273
cuugcugaggguuauuaga

SEQ ID NO: 254275 - RNA, 19 nt, Artificial Sequence
  Description of Artificial Sequence: Synthetic oligonucleotide
  Antisense strand to SEQ ID NO: 254274
ucuaauaacccucagcaag

SEQ ID NO: 254276 - RNA, 19 nt, Artificial Sequence
  Description of Artificial Sequence: Synthetic oligonucleotide
  Sense strand starting at position 1216 SEQ ID NO: 3273
ugcugaggguuauuagaca

SEQ ID NO: 254277 - RNA, 19 nt, Artificial Sequence
  Description of Artificial Sequence: Synthetic oligonucleotide
  Antisense strand to SEQ ID NO: 254276
ugucuaauaacccucagca

SEQ ID NO: 254278 - RNA, 19 nt, Artificial Sequence
  Description of Artificial Sequence: Synthetic oligonucleotide
  Sense strand starting at position 1247 SEQ ID NO: 3273
uaagcugugcgauugguuu

SEQ ID NO: 254279 - RNA, 19 nt, Artificial Sequence
  Description of Artificial Sequence: Synthetic oligonucleotide
  Antisense strand to SEQ ID NO: 254278
aaaccaaucgcacagcuua

SEQ ID NO: 254280 - RNA, 19 nt, Artificial Sequence
  Description of Artificial Sequence: Synthetic oligonucleotide
  Sense strand starting at position 1331 SEQ ID NO: 3273
ggcauauugccagcugcuu

SEQ ID NO: 254281 - RNA, 19 nt, Artificial Sequence
  Description of Artificial Sequence: Synthetic oligonucleotide
  Antisense strand to SEQ ID NO: 254280
aagcagcuggcaauaugcc

SEQ ID NO: 254282 - RNA, 19 nt, Artificial Sequence
  Description of Artificial Sequence: Synthetic oligonucleotide
  Sense strand starting at position 1332 SEQ ID NO: 3273
gcauauugccagcugcuua

SEQ ID NO: 254283 - RNA, 19 nt, Artificial Sequence
  Description of Artificial Sequence: Synthetic oligonucleotide
  Antisense strand to SEQ ID NO: 254282
uaagcagcuggcaauaugc

SEQ ID NO: 254284 - RNA, 19 nt, Artificial Sequence
  Description of Artificial Sequence: Synthetic oligonucleotide
  Sense strand starting at position 1390 SEQ ID NO: 3273
gucucagaguuaucgagaa

SEQ ID NO: 254285 - RNA, 19 nt, Artificial Sequence
  Description of Artificial Sequence: Synthetic oligonucleotide
  Antisense strand to SEQ ID NO: 254284
uucucgauaacucugagac

SEQ ID NO: 254286 - RNA, 19 nt, Artificial Sequence
  Description of Artificial Sequence: Synthetic oligonucleotide
  Sense strand starting at position 1392 SEQ ID NO: 3273
cucagaguuaucgagaagu

SEQ ID NO: 254287 - RNA, 19 nt, Artificial Sequence
  Description of Artificial Sequence: Synthetic oligonucleotide
  Antisense strand to SEQ ID NO: 254286
acuucucgauaacucugag

SEQ ID NO: 254288 - RNA, 19 nt, Artificial Sequence
  Description of Artificial Sequence: Synthetic oligonucleotide
  Sense strand starting at position 1394 SEQ ID NO: 3273
cagaguuaucgagaagucu

SEQ ID NO: 254289 - RNA, 19 nt, Artificial Sequence
  Description of Artificial Sequence: Synthetic oligonucleotide
  Antisense strand to SEQ ID NO: 254288
agacuucucgauaacucug

SEQ ID NO: 254290 - RNA, 19 nt, Artificial Sequence
  Description of Artificial Sequence: Synthetic oligonucleotide
  Sense strand starting at position 1400 SEQ ID NO: 3273
uaucgagaagucuguuaag

SEQ ID NO: 254291 - RNA, 19 nt, Artificial Sequence
  Description of Artificial Sequence: Synthetic oligonucleotide
  Antisense strand to SEQ ID NO: 254290
cuuaacagacuucucgaua

SEQ ID NO: 254292 - RNA, 19 nt, Artificial Sequence
  Description of Artificial Sequence: Synthetic oligonucleotide
  Sense strand starting at position 1469 SEQ ID NO: 3273
auucgaggucuccaaauau

SEQ ID NO: 254293 - RNA, 19 nt, Artificial Sequence
  Description of Artificial Sequence: Synthetic oligonucleotide
  Antisense strand to SEQ ID NO: 254292
auauuuggagaccucgaau

SEQ ID NO: 254294 - RNA, 19 nt, Artificial Sequence
  Description of Artificial Sequence: Synthetic oligonucleotide
  Sense strand starting at position 1490 SEQ ID NO: 3273
caguguggcccagauagaa

SEQ ID NO: 254295 - RNA, 19 nt, Artificial Sequence
  Description of Artificial Sequence: Synthetic oligonucleotide
  Antisense strand to SEQ ID NO: 254294
uucuaucugggccacacug

SEQ ID NO: 254296 - RNA, 19 nt, Artificial Sequence
  Description of Artificial Sequence: Synthetic oligonucleotide
  Sense strand starting at position 1583 SEQ ID NO: 3273
ggaagaaccaguuguaguu

SEQ ID NO: 254297 - RNA, 19 nt, Artificial Sequence
  Description of Artificial Sequence: Synthetic oligonucleotide
  Antisense strand to SEQ ID NO: 254296
aacuacaacugguucuucc

SEQ ID NO: 254298 - RNA, 19 nt, Artificial Sequence
  Description of Artificial Sequence: Synthetic oligonucleotide
  Sense strand starting at position 1694 SEQ ID NO: 3273
uaucguagagcucugcuuu

SEQ ID NO: 254299 - RNA, 19 nt, Artificial Sequence
  Description of Artificial Sequence: Synthetic oligonucleotide
  Antisense strand to SEQ ID NO: 254298
aaagcagagcucuacgaua

SEQ ID NO: 254300 - RNA, 19 nt, Artificial Sequence
  Description of Artificial Sequence: Synthetic oligonucleotide
  Sense strand starting at position 1803 SEQ ID NO: 3273
uuuacugagcuccaagagu

SEQ ID NO: 254301 - RNA, 19 nt, Artificial Sequence
  Description of Artificial Sequence: Synthetic oligonucleotide
  Antisense strand to SEQ ID NO: 254300
acucuuggagcucaguaaa

SEQ ID NO: 254302 - RNA, 19 nt, Artificial Sequence
  Description of Artificial Sequence: Synthetic oligonucleotide
  Sense strand starting at position 1875 SEQ ID NO: 3273
gugcucguggucuugaguu

SEQ ID NO: 254303 - RNA, 19 nt, Artificial Sequence
  Description of Artificial Sequence: Synthetic oligonucleotide
  Antisense strand to SEQ ID NO: 254302
aacucaagaccacgagcac

SEQ ID NO: 254304 - RNA, 19 nt, Artificial Sequence
  Description of Artificial Sequence: Synthetic oligonucleotide
  Sense strand starting at position 1900 SEQ ID NO: 3273
cugugucgaaugugaauuu

SEQ ID NO: 254305 - RNA, 19 nt, Artificial Sequence
  Description of Artificial Sequence: Synthetic oligonucleotide
  Antisense strand to SEQ ID NO: 254304
aaauucacauucgacacag

SEQ ID NO: 254306 - RNA, 19 nt, Artificial Sequence
  Description of Artificial Sequence: Synthetic oligonucleotide
  Sense strand starting at position 1919 SEQ ID NO: 3273
ggccaaacauaguuaucaa

SEQ ID NO: 254307 - RNA, 19 nt, Artificial Sequence
  Description of Artificial Sequence: Synthetic oligonucleotide
  Antisense strand to SEQ ID NO: 254306
uugauaacuauguuuggcc

SEQ ID NO: 254308 - RNA, 19 nt, Artificial Sequence
  Description of Artificial Sequence: Synthetic oligonucleotide
  Sense strand starting at position 2205 SEQ ID NO: 3273
agagguauaccaggaguuc

SEQ ID NO: 254309 - RNA, 19 nt, Artificial Sequence
  Description of Artificial Sequence: Synthetic oligonucleotide
  Antisense strand to SEQ ID NO: 254308
gaacuccugguauaccucu

SEQ ID NO: 254310 - RNA, 19 nt, Artificial Sequence
  Description of Artificial Sequence: Synthetic oligonucleotide
  Sense strand starting at position 2206 SEQ ID NO: 3273
gagguauaccaggaguucu

SEQ ID NO: 254311 - RNA, 19 nt, Artificial Sequence
  Description of Artificial Sequence: Synthetic oligonucleotide
  Antisense strand to SEQ ID NO: 254310
agaacuccugguauaccuc

SEQ ID NO: 254312 - RNA, 19 nt, Artificial Sequence
  Description of Artificial Sequence: Synthetic oligonucleotide
  Sense strand starting at position 2340 SEQ ID NO: 3273
accucacgauuuguguauu

SEQ ID NO: 254313 - RNA, 19 nt, Artificial Sequence
  Description of Artificial Sequence: Synthetic oligonucleotide
  Antisense strand to SEQ ID NO: 254312
aauacacaaaucgugaggu

SEQ ID NO: 254314 - RNA, 19 nt, Artificial Sequence
  Description of Artificial Sequence: Synthetic oligonucleotide
  Sense strand starting at position 2493 SEQ ID NO: 3273
cuccaucagucuguaagaa

SEQ ID NO: 254315 - RNA, 19 nt, Artificial Sequence
  Description of Artificial Sequence: Synthetic oligonucleotide
  Antisense strand to SEQ ID NO: 254314
uucuuacagacugauggag

SEQ ID NO: 254316 - RNA, 19 nt, Artificial Sequence
  Description of Artificial Sequence: Synthetic oligonucleotide
  Sense strand starting at position 2494 SEQ ID NO: 3273
uccaucagucuguaagaau

SEQ ID NO: 254317 - RNA, 19 nt, Artificial Sequence
  Description of Artificial Sequence: Synthetic oligonucleotide
  Antisense strand to SEQ ID NO: 254316
auucuuacagacugaugga

SEQ ID NO: 254318 - RNA, 19 nt, Artificial Sequence
  Description of Artificial Sequence: Synthetic oligonucleotide
  Sense strand starting at position 2575 SEQ ID NO: 3273
ccuugaugucauuaugacu

SEQ ID NO: 254319 - RNA, 19 nt, Artificial Sequence
  Description of Artificial Sequence: Synthetic oligonucleotide
  Antisense strand to SEQ ID NO: 254318
agucauaaugacaucaagg

SEQ ID NO: 254320 - RNA, 19 nt, Artificial Sequence
  Description of Artificial Sequence: Synthetic oligonucleotide
  Sense strand starting at position 2723 SEQ ID NO: 3273
acucuugagguauauaugu

SEQ ID NO: 254321 - RNA, 19 nt, Artificial Sequence
  Description of Artificial Sequence: Synthetic oligonucleotide
  Antisense strand to SEQ ID NO: 254320
acauauauaccucaagagu

SEQ ID NO: 254322 - RNA, 19 nt, Artificial Sequence
  Description of Artificial Sequence: Synthetic oligonucleotide
  Sense strand starting at position 67 SEQ ID NO: 3274
ggccuuaggccucagauaa

SEQ ID NO: 254323 - RNA, 19 nt, Artificial Sequence
  Description of Artificial Sequence: Synthetic oligonucleotide
  Antisense strand to SEQ ID NO: 254322
uuaucugaggccuaaggcc

SEQ ID NO: 254324 - RNA, 19 nt, Artificial Sequence
  Description of Artificial Sequence: Synthetic oligonucleotide
  Sense strand starting at position 149 SEQ ID NO: 3274
aguuaaauacgccaugaca

SEQ ID NO: 254325 - RNA, 19 nt, Artificial Sequence
  Description of Artificial Sequence: Synthetic oligonucleotide
  Antisense strand to SEQ ID NO: 254324
ugucauggcguauuuaacu

SEQ ID NO: 254326 - RNA, 19 nt, Artificial Sequence
  Description of Artificial Sequence: Synthetic oligonucleotide
  Sense strand starting at position 151 SEQ ID NO: 3274
uuaaauacgccaugacauc

SEQ ID NO: 254327 - RNA, 19 nt, Artificial Sequence
  Description of Artificial Sequence: Synthetic oligonucleotide
  Antisense strand to SEQ ID NO: 254326
gaugucauggcguauuuaa

SEQ ID NO: 254328 - RNA, 19 nt, Artificial Sequence
  Description of Artificial Sequence: Synthetic oligonucleotide
  Sense strand starting at position 171 SEQ ID NO: 3274
aaugauggccucugagaca

SEQ ID NO: 254329 - RNA, 19 nt, Artificial Sequence
  Description of Artificial Sequence: Synthetic oligonucleotide
  Antisense strand to SEQ ID NO: 254328
ugucucagaggccaucauu

SEQ ID NO: 254330 - RNA, 19 nt, Artificial Sequence
  Description of Artificial Sequence: Synthetic oligonucleotide
  Sense strand starting at position 250 SEQ ID NO: 3274
cuggcuauauuagcugaaa

SEQ ID NO: 254331 - RNA, 19 nt, Artificial Sequence
  Description of Artificial Sequence: Synthetic oligonucleotide
  Antisense strand to SEQ ID NO: 254330
uuucagcuaauauagccag

SEQ ID NO: 254332 - RNA, 19 nt, Artificial Sequence
  Description of Artificial Sequence: Synthetic oligonucleotide
  Sense strand starting at position 251 SEQ ID NO: 3274
uggcuauauuagcugaaac

SEQ ID NO: 254333 - RNA, 19 nt, Artificial Sequence
  Description of Artificial Sequence: Synthetic oligonucleotide
  Antisense strand to SEQ ID NO: 254332
guuucagcuaauauagcca

SEQ ID NO: 254334 - RNA, 19 nt, Artificial Sequence
  Description of Artificial Sequence: Synthetic oligonucleotide
  Sense strand starting at position 311 SEQ ID NO: 3274
gccuguagugugucagcua

SEQ ID NO: 254335 - RNA, 19 nt, Artificial Sequence
  Description of Artificial Sequence: Synthetic oligonucleotide
  Antisense strand to SEQ ID NO: 254334
uagcugacacacuacaggc

SEQ ID NO: 254336 - RNA, 19 nt, Artificial Sequence
  Description of Artificial Sequence: Synthetic oligonucleotide
  Sense strand starting at position 320 SEQ ID NO: 3274
gugucagcuaugugcauuu

SEQ ID NO: 254337 - RNA, 19 nt, Artificial Sequence
  Description of Artificial Sequence: Synthetic oligonucleotide
  Antisense strand to SEQ ID NO: 254336
aaaugcacauagcugacac

SEQ ID NO: 254338 - RNA, 19 nt, Artificial Sequence
  Description of Artificial Sequence: Synthetic oligonucleotide
  Sense strand starting at position 443 SEQ ID NO: 3274
gcgggaaacuuaccagcau

SEQ ID NO: 254339 - RNA, 19 nt, Artificial Sequence
  Description of Artificial Sequence: Synthetic oligonucleotide
  Antisense strand to SEQ ID NO: 254338
augcugguaaguuucccgc

SEQ ID NO: 254340 - RNA, 19 nt, Artificial Sequence
  Description of Artificial Sequence: Synthetic oligonucleotide
  Sense strand starting at position 1960 SEQ ID NO: 3274
cuagcuucgacuuaggaaa

SEQ ID NO: 254341 - RNA, 19 nt, Artificial Sequence
  Description of Artificial Sequence: Synthetic oligonucleotide
  Antisense strand to SEQ ID NO: 254340
uuuccuaagucgaagcuag

SEQ ID NO: 254342 - RNA, 19 nt, Artificial Sequence
  Description of Artificial Sequence: Synthetic oligonucleotide
  Sense strand starting at position 1971 SEQ ID NO: 3274
uuaggaaauuguccuaaau

SEQ ID NO: 254343 - RNA, 19 nt, Artificial Sequence
  Description of Artificial Sequence: Synthetic oligonucleotide
  Antisense strand to SEQ ID NO: 254342
auuuaggacaauuuccuaa

SEQ ID NO: 254344 - RNA, 19 nt, Artificial Sequence
  Description of Artificial Sequence: Synthetic oligonucleotide
  Sense strand starting at position 2054 SEQ ID NO: 3274
ggcugaggccuuugagaac

SEQ ID NO: 254345 - RNA, 19 nt, Artificial Sequence
  Description of Artificial Sequence: Synthetic oligonucleotide
  Antisense strand to SEQ ID NO: 254344
guucucaaaggccucagcc

SEQ ID NO: 254346 - RNA, 19 nt, Artificial Sequence
  Description of Artificial Sequence: Synthetic oligonucleotide
  Sense strand starting at position 2127 SEQ ID NO: 3274
ggauucgagaaguggacaa

SEQ ID NO: 254347 - RNA, 19 nt, Artificial Sequence
  Description of Artificial Sequence: Synthetic oligonucleotide
  Antisense strand to SEQ ID NO: 254346
uuguccacuucucgaaucc

SEQ ID NO: 254348 - RNA, 19 nt, Artificial Sequence
  Description of Artificial Sequence: Synthetic oligonucleotide
  Sense strand starting at position 2131 SEQ ID NO: 3274
ucgagaaguggacaauugu

SEQ ID NO: 254349 - RNA, 19 nt, Artificial Sequence
  Description of Artificial Sequence: Synthetic oligonucleotide
  Antisense strand to SEQ ID NO: 254348
acaauuguccacuucucga

SEQ ID NO: 254350 - RNA, 19 nt, Artificial Sequence
  Description of Artificial Sequence: Synthetic oligonucleotide
  Sense strand starting at position 2238 SEQ ID NO: 3274
uauggaguacugcagacau

SEQ ID NO: 254351 - RNA, 19 nt, Artificial Sequence
  Description of Artificial Sequence: Synthetic oligonucleotide
  Antisense strand to SEQ ID NO: 254350
augucugcaguacuccaua

SEQ ID NO: 254352 - RNA, 19 nt, Artificial Sequence
  Description of Artificial Sequence: Synthetic oligonucleotide
  Sense strand starting at position 2292 SEQ ID NO: 3274
guguacaagcaagguuuaa

SEQ ID NO: 254353 - RNA, 19 nt, Artificial Sequence
  Description of Artificial Sequence: Synthetic oligonucleotide
  Antisense strand to SEQ ID NO: 254352
uuaaaccuugcuuguacac

SEQ ID NO: 254354 - RNA, 19 nt, Artificial Sequence
  Description of Artificial Sequence: Synthetic oligonucleotide
  Sense strand starting at position 2351 SEQ ID NO: 3274
uccuauauagccuauguau

SEQ ID NO: 254355 - RNA, 19 nt, Artificial Sequence
  Description of Artificial Sequence: Synthetic oligonucleotide
  Antisense strand to SEQ ID NO: 254354
auacauaggcuauauagga

SEQ ID NO: 254356 - RNA, 19 nt, Artificial Sequence
  Description of Artificial Sequence: Synthetic oligonucleotide
  Sense strand starting at position 2360 SEQ ID NO: 3274
gccuauguauuucuccuau

SEQ ID NO: 254357 - RNA, 19 nt, Artificial Sequence
  Description of Artificial Sequence: Synthetic oligonucleotide
  Antisense strand to SEQ ID NO: 254356
auaggagaaauacauaggc

SEQ ID NO: 254358 - RNA, 19 nt, Artificial Sequence
  Description of Artificial Sequence: Synthetic oligonucleotide
  Sense strand starting at position 2362 SEQ ID NO: 3274
cuauguauuucuccuaugu

SEQ ID NO: 254359 - RNA, 19 nt, Artificial Sequence
  Description of Artificial Sequence: Synthetic oligonucleotide
  Antisense strand to SEQ ID NO: 254358
acauaggagaaauacauag

SEQ ID NO: 254360 - RNA, 19 nt, Artificial Sequence
  Description of Artificial Sequence: Synthetic oligonucleotide
  Sense strand starting at position 2421 SEQ ID NO: 3274
uccuguguauuugaauaca

SEQ ID NO: 254361 - RNA, 19 nt, Artificial Sequence
  Description of Artificial Sequence: Synthetic oligonucleotide
  Antisense strand to SEQ ID NO: 254360
uguauucaaauacacagga

SEQ ID NO: 254362 - RNA, 19 nt, Artificial Sequence
  Description of Artificial Sequence: Synthetic oligonucleotide
  Sense strand starting at position 2590 SEQ ID NO: 3274
agaaaugccucauuaagug

SEQ ID NO: 254363 - RNA, 19 nt, Artificial Sequence
  Description of Artificial Sequence: Synthetic oligonucleotide
  Antisense strand to SEQ ID NO: 254362
cacuuaaugaggcauuucu

SEQ ID NO: 254364 - RNA, 19 nt, Artificial Sequence
  Description of Artificial Sequence: Synthetic oligonucleotide
  Sense strand starting at position 2595 SEQ ID NO: 3274
ugccucauuaagugagaga

SEQ ID NO: 254365 - RNA, 19 nt, Artificial Sequence
  Description of Artificial Sequence: Synthetic oligonucleotide
  Antisense strand to SEQ ID NO: 254364
ucucucacuuaaugaggca

SEQ ID NO: 254366 - RNA, 19 nt, Artificial Sequence
  Description of Artificial Sequence: Synthetic oligonucleotide
  Sense strand starting at position 2856 SEQ ID NO: 3274
acuuauauuugagggucau

SEQ ID NO: 254367 - RNA, 19 nt, Artificial Sequence
  Description of Artificial Sequence: Synthetic oligonucleotide
  Antisense strand to SEQ ID NO: 254366
augacccucaaauauaagu

SEQ ID NO: 254368 - RNA, 19 nt, Artificial Sequence
  Description of Artificial Sequence: Synthetic oligonucleotide
  Sense strand starting at position 2940 SEQ ID NO: 3274
uacaguaaagauugugaaa

SEQ ID NO: 254369 - RNA, 19 nt, Artificial Sequence
  Description of Artificial Sequence: Synthetic oligonucleotide
  Antisense strand to SEQ ID NO: 254368
uuucacaaucuuuacugua

SEQ ID NO: 254370 - RNA, 19 nt, Artificial Sequence
  Description of Artificial Sequence: Synthetic oligonucleotide
  Sense strand starting at position 3020 SEQ ID NO: 3274
agaagcuugccggagguau

SEQ ID NO: 254371 - RNA, 19 nt, Artificial Sequence
  Description of Artificial Sequence: Synthetic oligonucleotide
  Antisense strand to SEQ ID NO: 254370
auaccuccggcaagcuucu

SEQ ID NO: 254372 - RNA, 19 nt, Artificial Sequence
  Description of Artificial Sequence: Synthetic oligonucleotide
  Sense strand starting at position 3050 SEQ ID NO: 3274
gccagaaguguuuaaagca

SEQ ID NO: 254373 - RNA, 19 nt, Artificial Sequence
  Description of Artificial Sequence: Synthetic oligonucleotide
  Antisense strand to SEQ ID NO: 254372
ugcuuuaaacacuucuggc

SEQ ID NO: 254374 - RNA, 19 nt, Artificial Sequence
  Description of Artificial Sequence: Synthetic oligonucleotide
  Sense strand starting at position 3172 SEQ ID NO: 3274
guucuaaugcuauauguga

SEQ ID NO: 254375 - RNA, 19 nt, Artificial Sequence
  Description of Artificial Sequence: Synthetic oligonucleotide
  Antisense strand to SEQ ID NO: 254374
ucacauauagcauuagaac

SEQ ID NO: 254376 - RNA, 19 nt, Artificial Sequence
  Description of Artificial Sequence: Synthetic oligonucleotide
  Sense strand starting at position 3186 SEQ ID NO: 3274
ugugaaaugguauaauguc

SEQ ID NO: 254377 - RNA, 19 nt, Artificial Sequence
  Description of Artificial Sequence: Synthetic oligonucleotide
  Antisense strand to SEQ ID NO: 254376
gacauuauaccauuucaca

SEQ ID NO: 254378 - RNA, 19 nt, Artificial Sequence
  Description of Artificial Sequence: Synthetic oligonucleotide
  Sense strand starting at position 3194 SEQ ID NO: 3274
gguauaaugucacuuuaag

SEQ ID NO: 254379 - RNA, 19 nt, Artificial Sequence
  Description of Artificial Sequence: Synthetic oligonucleotide
  Antisense strand to SEQ ID NO: 254378
cuuaaagugacauuauacc

SEQ ID NO: 254380 - RNA, 19 nt, Artificial Sequence
  Description of Artificial Sequence: Synthetic oligonucleotide
  Sense strand starting at position 3221 SEQ ID NO: 3274
uaaugaguuaaggaugugu

SEQ ID NO: 254381 - RNA, 19 nt, Artificial Sequence
  Description of Artificial Sequence: Synthetic oligonucleotide
  Antisense strand to SEQ ID NO: 254380
acacauccuuaacucauua

SEQ ID NO: 254382 - RNA, 19 nt, Artificial Sequence
  Description of Artificial Sequence: Synthetic oligonucleotide
  Sense strand starting at position 3225 SEQ ID NO: 3274
gaguuaaggauguguccuc

SEQ ID NO: 254383 - RNA, 19 nt, Artificial Sequence
  Description of Artificial Sequence: Synthetic oligonucleotide
  Antisense strand to SEQ ID NO: 254382
gaggacacauccuuaacuc

SEQ ID NO: 254384 - RNA, 19 nt, Artificial Sequence
  Description of Artificial Sequence: Synthetic oligonucleotide
  Sense strand starting at position 3232 SEQ ID NO: 3274
ggauguguccucuaacccu

SEQ ID NO: 254385 - RNA, 19 nt, Artificial Sequence
  Description of Artificial Sequence: Synthetic oligonucleotide
  Antisense strand to SEQ ID NO: 254384
aggguuagaggacacaucc

SEQ ID NO: 254386 - RNA, 19 nt, Artificial Sequence
  Description of Artificial Sequence: Synthetic oligonucleotide
  Sense strand starting at position 3235 SEQ ID NO: 3274
uguguccucuaacccuaaa

SEQ ID NO: 254387 - RNA, 19 nt, Artificial Sequence
  Description of Artificial Sequence: Synthetic oligonucleotide
  Antisense strand to SEQ ID NO: 254386
uuuaggguuagaggacaca

SEQ ID NO: 254388 - RNA, 19 nt, Artificial Sequence
  Description of Artificial Sequence: Synthetic oligonucleotide
  Sense strand starting at position 3418 SEQ ID NO: 3274
ccaauuauaucgguuaaug

SEQ ID NO: 254389 - RNA, 19 nt, Artificial Sequence
  Description of Artificial Sequence: Synthetic oligonucleotide
  Antisense strand to SEQ ID NO: 254388
cauuaaccgauauaauugg

SEQ ID NO: 254390 - RNA, 19 nt, Artificial Sequence
  Description of Artificial Sequence: Synthetic oligonucleotide
  Sense strand starting at position 3613 SEQ ID NO: 3274
cuauauugauagcugacaa

SEQ ID NO: 254391 - RNA, 19 nt, Artificial Sequence
  Description of Artificial Sequence: Synthetic oligonucleotide
  Antisense strand to SEQ ID NO: 254390
uugucagcuaucaauauag

SEQ ID NO: 254392 - RNA, 19 nt, Artificial Sequence
  Description of Artificial Sequence: Synthetic oligonucleotide
  Sense strand starting at position 3624 SEQ ID NO: 3274
gcugacaaagucuauuaca

SEQ ID NO: 254393 - RNA, 19 nt, Artificial Sequence
  Description of Artificial Sequence: Synthetic oligonucleotide
  Antisense strand to SEQ ID NO: 254392
uguaauagacuuugucagc

SEQ ID NO: 254394 - RNA, 19 nt, Artificial Sequence
  Description of Artificial Sequence: Synthetic oligonucleotide
  Sense strand starting at position 3650 SEQ ID NO: 3274
gaacauugcuaggagaaag

SEQ ID NO: 254395 - RNA, 19 nt, Artificial Sequence
  Description of Artificial Sequence: Synthetic oligonucleotide
  Antisense strand to SEQ ID NO: 254394
cuuucuccuagcaauguuc

SEQ ID NO: 254396 - RNA, 19 nt, Artificial Sequence
  Description of Artificial Sequence: Synthetic oligonucleotide
  Sense strand starting at position 3691 SEQ ID NO: 3274
agguguuaguuggucaaga

SEQ ID NO: 254397 - RNA, 19 nt, Artificial Sequence
  Description of Artificial Sequence: Synthetic oligonucleotide
  Antisense strand to SEQ ID NO: 254396
ucuugaccaacuaacaccu

SEQ ID NO: 254398 - RNA, 19 nt, Artificial Sequence
  Description of Artificial Sequence: Synthetic oligonucleotide
  Sense strand starting at position 3692 SEQ ID NO: 3274
gguguuaguuggucaagag

SEQ ID NO: 254399 - RNA, 19 nt, Artificial Sequence
  Description of Artificial Sequence: Synthetic oligonucleotide
  Antisense strand to SEQ ID NO: 254398
cucuugaccaacuaacacc

SEQ ID NO: 254400 - RNA, 19 nt, Artificial Sequence
  Description of Artificial Sequence: Synthetic oligonucleotide
  Sense strand starting at position 3731 SEQ ID NO: 3274
guguguucccaauaacaga

SEQ ID NO: 254401 - RNA, 19 nt, Artificial Sequence
  Description of Artificial Sequence: Synthetic oligonucleotide
  Antisense strand to SEQ ID NO: 254400
ucuguuauugggaacacac

SEQ ID NO: 254402 - RNA, 19 nt, Artificial Sequence
  Description of Artificial Sequence: Synthetic oligonucleotide
  Sense strand starting at position 216 SEQ ID NO: 3276
ggagaauggcugugaacau

SEQ ID NO: 254403 - RNA, 19 nt, Artificial Sequence
  Description of Artificial Sequence: Synthetic oligonucleotide
  Antisense strand to SEQ ID NO: 254402
auguucacagccauucucc

SEQ ID NO: 254404 - RNA, 19 nt, Artificial Sequence
  Description of Artificial Sequence: Synthetic oligonucleotide
  Sense strand starting at position 311 SEQ ID NO: 3276
aggugaaauguugguuaca

SEQ ID NO: 254405 - RNA, 19 nt, Artificial Sequence
  Description of Artificial Sequence: Synthetic oligonucleotide
  Antisense strand to SEQ ID NO: 254404
uguaaccaacauuucaccu

SEQ ID NO: 254406 - RNA, 19 nt, Artificial Sequence
  Description of Artificial Sequence: Synthetic oligonucleotide
  Sense strand starting at position 312 SEQ ID NO: 3276
ggugaaauguugguuacau

SEQ ID NO: 254407 - RNA, 19 nt, Artificial Sequence
  Description of Artificial Sequence: Synthetic oligonucleotide
  Antisense strand to SEQ ID NO: 254406
auguaaccaacauuucacc

SEQ ID NO: 254408 - RNA, 19 nt, Artificial Sequence
  Description of Artificial Sequence: Synthetic oligonucleotide
  Sense strand starting at position 313 SEQ ID NO: 3276
gugaaauguugguuacauc

SEQ ID NO: 254409 - RNA, 19 nt, Artificial Sequence
  Description of Artificial Sequence: Synthetic oligonucleotide
  Antisense strand to SEQ ID NO: 254408
gauguaaccaacauuucac

SEQ ID NO: 254410 - RNA, 19 nt, Artificial Sequence
  Description of Artificial Sequence: Synthetic oligonucleotide
  Sense strand starting at position 314 SEQ ID NO: 3276
ugaaauguugguuacauca

SEQ ID NO: 254411 - RNA, 19 nt, Artificial Sequence
  Description of Artificial Sequence: Synthetic oligonucleotide
  Antisense strand to SEQ ID NO: 254410
ugauguaaccaacauuuca

SEQ ID NO: 254412 - RNA, 19 nt, Artificial Sequence
  Description of Artificial Sequence: Synthetic oligonucleotide
  Sense strand starting at position 321 SEQ ID NO: 3276
uugguuacaucauugaagu

SEQ ID NO: 254413 - RNA, 19 nt, Artificial Sequence
  Description of Artificial Sequence: Synthetic oligonucleotide
  Antisense strand to SEQ ID NO: 254412
acuucaaugauguaaccaa

SEQ ID NO: 254414 - RNA, 19 nt, Artificial Sequence
  Description of Artificial Sequence: Synthetic oligonucleotide
  Sense strand starting at position 322 SEQ ID NO: 3276
ugguuacaucauugaagug

SEQ ID NO: 254415 - RNA, 19 nt, Artificial Sequence
  Description of Artificial Sequence: Synthetic oligonucleotide
  Antisense strand to SEQ ID NO: 254414
cacuucaaugauguaacca

SEQ ID NO: 254416 - RNA, 19 nt, Artificial Sequence
  Description of Artificial Sequence: Synthetic oligonucleotide
  Sense strand starting at position 323 SEQ ID NO: 3276
gguuacaucauugaagugu

SEQ ID NO: 254417 - RNA, 19 nt, Artificial Sequence
  Description of Artificial Sequence: Synthetic oligonucleotide
  Antisense strand to SEQ ID NO: 254416
acacuucaaugauguaacc

SEQ ID NO: 254418 - RNA, 19 nt, Artificial Sequence
  Description of Artificial Sequence: Synthetic oligonucleotide
  Sense strand starting at position 386 SEQ ID NO: 3276
ugauuagaagcuugaugaa

SEQ ID NO: 254419 - RNA, 19 nt, Artificial Sequence
  Description of Artificial Sequence: Synthetic oligonucleotide
  Antisense strand to SEQ ID NO: 254418
uucaucaagcuucuaauca

SEQ ID NO: 254420 - RNA, 19 nt, Artificial Sequence
  Description of Artificial Sequence: Synthetic oligonucleotide
  Sense strand starting at position 504 SEQ ID NO: 3276
augucuguucagcagagga

SEQ ID NO: 254421 - RNA, 19 nt, Artificial Sequence
  Description of Artificial Sequence: Synthetic oligonucleotide
  Antisense strand to SEQ ID NO: 254420
uccucugcugaacagacau

SEQ ID NO: 254422 - RNA, 19 nt, Artificial Sequence
  Description of Artificial Sequence: Synthetic oligonucleotide
  Sense strand starting at position 630 SEQ ID NO: 3276
auagguaaacgucaccuau

SEQ ID NO: 254423 - RNA, 19 nt, Artificial Sequence
  Description of Artificial Sequence: Synthetic oligonucleotide
  Antisense strand to SEQ ID NO: 254422
auaggugacguuuaccuau

SEQ ID NO: 254424 - RNA, 19 nt, Artificial Sequence
  Description of Artificial Sequence: Synthetic oligonucleotide
  Sense strand starting at position 632 SEQ ID NO: 3276
agguaaacgucaccuauac

SEQ ID NO: 254425 - RNA, 19 nt, Artificial Sequence
  Description of Artificial Sequence: Synthetic oligonucleotide
  Antisense strand to SEQ ID NO: 254424
guauaggugacguuuaccu

SEQ ID NO: 254426 - RNA, 19 nt, Artificial Sequence
  Description of Artificial Sequence: Synthetic oligonucleotide
  Sense strand starting at position 643 SEQ ID NO: 3276
accuauaccuggguuggaa

SEQ ID NO: 254427 - RNA, 19 nt, Artificial Sequence
  Description of Artificial Sequence: Synthetic oligonucleotide
  Antisense strand to SEQ ID NO: 254426
uuccaacccagguauaggu

SEQ ID NO: 254428 - RNA, 19 nt, Artificial Sequence
  Description of Artificial Sequence: Synthetic oligonucleotide
  Sense strand starting at position 752 SEQ ID NO: 3276
guaggaagacaguguaauc

SEQ ID NO: 254429 - RNA, 19 nt, Artificial Sequence
  Description of Artificial Sequence: Synthetic oligonucleotide
  Antisense strand to SEQ ID NO: 254428
gauuacacugucuuccuac

SEQ ID NO: 254430 - RNA, 19 nt, Artificial Sequence
  Description of Artificial Sequence: Synthetic oligonucleotide
  Sense strand starting at position 762 SEQ ID NO: 3276
aguguaauccgagcacgcu

SEQ ID NO: 254431 - RNA, 19 nt, Artificial Sequence
  Description of Artificial Sequence: Synthetic oligonucleotide
  Antisense strand to SEQ ID NO: 254430
agcgugcucggauuacacu

SEQ ID NO: 254432 - RNA, 19 nt, Artificial Sequence
  Description of Artificial Sequence: Synthetic oligonucleotide
  Sense strand starting at position 834 SEQ ID NO: 3276
aguagugugcccgcggaaa

SEQ ID NO: 254433 - RNA, 19 nt, Artificial Sequence
  Description of Artificial Sequence: Synthetic oligonucleotide
  Antisense strand to SEQ ID NO: 254432
uuuccgcgggcacacuacu

SEQ ID NO: 254434 - RNA, 19 nt, Artificial Sequence
  Description of Artificial Sequence: Synthetic oligonucleotide
  Sense strand starting at position 846 SEQ ID NO: 3276
gcggaaaccuauccggaca

SEQ ID NO: 254435 - RNA, 19 nt, Artificial Sequence
  Description of Artificial Sequence: Synthetic oligonucleotide
  Antisense strand to SEQ ID NO: 254434
uguccggauagguuuccgc

SEQ ID NO: 254436 - RNA, 19 nt, Artificial Sequence
  Description of Artificial Sequence: Synthetic oligonucleotide
  Sense strand starting at position 847 SEQ ID NO: 3276
cggaaaccuauccggacau

SEQ ID NO: 254437 - RNA, 19 nt, Artificial Sequence
  Description of Artificial Sequence: Synthetic oligonucleotide
  Antisense strand to SEQ ID NO: 254436
auguccggauagguuuccg

SEQ ID NO: 254438 - RNA, 19 nt, Artificial Sequence
  Description of Artificial Sequence: Synthetic oligonucleotide
  Sense strand starting at position 943 SEQ ID NO: 3276
gugagaggguguaaagauu

SEQ ID NO: 254439 - RNA, 19 nt, Artificial Sequence
  Description of Artificial Sequence: Synthetic oligonucleotide
  Antisense strand to SEQ ID NO: 254438
aaucuuuacacccucucac

SEQ ID NO: 254440 - RNA, 19 nt, Artificial Sequence
  Description of Artificial Sequence: Synthetic oligonucleotide
  Sense strand starting at position 1345 SEQ ID NO: 3276
cuuacugaacucggaaauc

SEQ ID NO: 254441 - RNA, 19 nt, Artificial Sequence
  Description of Artificial Sequence: Synthetic oligonucleotide
  Antisense strand to SEQ ID NO: 254440
gauuuccgaguucaguaag

SEQ ID NO: 254442 - RNA, 19 nt, Artificial Sequence
  Description of Artificial Sequence: Synthetic oligonucleotide
  Sense strand starting at position 1632 SEQ ID NO: 3276
gaugucucccaaggcuauu

SEQ ID NO: 254443 - RNA, 19 nt, Artificial Sequence
  Description of Artificial Sequence: Synthetic oligonucleotide
  Antisense strand to SEQ ID NO: 254442
aauagccuugggagacauc

SEQ ID NO: 254444 - RNA, 19 nt, Artificial Sequence
  Description of Artificial Sequence: Synthetic oligonucleotide
  Sense strand starting at position 1997 SEQ ID NO: 3276
cuuggugugccugcuguaa

SEQ ID NO: 254445 - RNA, 19 nt, Artificial Sequence
  Description of Artificial Sequence: Synthetic oligonucleotide
  Antisense strand to SEQ ID NO: 254444
uuacagcaggcacaccaag

SEQ ID NO: 254446 - RNA, 19 nt, Artificial Sequence
  Description of Artificial Sequence: Synthetic oligonucleotide
  Sense strand starting at position 2118 SEQ ID NO: 3276
ugugcucccagagaggauu

SEQ ID NO: 254447 - RNA, 19 nt, Artificial Sequence
  Description of Artificial Sequence: Synthetic oligonucleotide
  Antisense strand to SEQ ID NO: 254446
aauccucucugggagcaca

SEQ ID NO: 254448 - RNA, 19 nt, Artificial Sequence
  Description of Artificial Sequence: Synthetic oligonucleotide
  Sense strand starting at position 2245 SEQ ID NO: 3276
gcaggaacauuugaggaga

SEQ ID NO: 254449 - RNA, 19 nt, Artificial Sequence
  Description of Artificial Sequence: Synthetic oligonucleotide
  Antisense strand to SEQ ID NO: 254448
ucuccucaaauguuccugc

SEQ ID NO: 254450 - RNA, 19 nt, Artificial Sequence
  Description of Artificial Sequence: Synthetic oligonucleotide
  Sense strand starting at position 2332 SEQ ID NO: 3276
cuugaaugugaaugcuaaa

SEQ ID NO: 254451 - RNA, 19 nt, Artificial Sequence
  Description of Artificial Sequence: Synthetic oligonucleotide
  Antisense strand to SEQ ID NO: 254450
uuuagcauucacauucaag

SEQ ID NO: 254452 - RNA, 19 nt, Artificial Sequence
  Description of Artificial Sequence: Synthetic oligonucleotide
  Sense strand starting at position 2376 SEQ ID NO: 3276
ggagcucuaucauuugcuu

SEQ ID NO: 254453 - RNA, 19 nt, Artificial Sequence
  Description of Artificial Sequence: Synthetic oligonucleotide
  Antisense strand to SEQ ID NO: 254452
aagcaaaugauagagcucc

SEQ ID NO: 254454 - RNA, 19 nt, Artificial Sequence
  Description of Artificial Sequence: Synthetic oligonucleotide
  Sense strand starting at position 2498 SEQ ID NO: 3276
uguguaugucuaggaaaug

SEQ ID NO: 254455 - RNA, 19 nt, Artificial Sequence
  Description of Artificial Sequence: Synthetic oligonucleotide
  Antisense strand to SEQ ID NO: 254454
cauuuccuagacauacaca

SEQ ID NO: 254456 - RNA, 19 nt, Artificial Sequence
  Description of Artificial Sequence: Synthetic oligonucleotide
  Sense strand starting at position 2515 SEQ ID NO: 3276
ugcagaccucaaugacauu

SEQ ID NO: 254457 - RNA, 19 nt, Artificial Sequence
  Description of Artificial Sequence: Synthetic oligonucleotide
  Antisense strand to SEQ ID NO: 254456
aaugucauugaggucugca

SEQ ID NO: 254458 - RNA, 19 nt, Artificial Sequence
  Description of Artificial Sequence: Synthetic oligonucleotide
  Sense strand starting at position 2776 SEQ ID NO: 3276
cccacuuggccaugaugau

SEQ ID NO: 254459 - RNA, 19 nt, Artificial Sequence
  Description of Artificial Sequence: Synthetic oligonucleotide
  Antisense strand to SEQ ID NO: 254458
aucaucauggccaaguggg

SEQ ID NO: 254460 - RNA, 19 nt, Artificial Sequence
  Description of Artificial Sequence: Synthetic oligonucleotide
  Sense strand starting at position 2798 SEQ ID NO: 3276
aucuuucugguaugauaag

SEQ ID NO: 254461 - RNA, 19 nt, Artificial Sequence
  Description of Artificial Sequence: Synthetic oligonucleotide
  Antisense strand to SEQ ID NO: 254460
cuuaucauaccagaaagau

SEQ ID NO: 254462 - RNA, 19 nt, Artificial Sequence
  Description of Artificial Sequence: Synthetic oligonucleotide
  Sense strand starting at position 3027 SEQ ID NO: 3276
gcacauaugugaucauucu

SEQ ID NO: 254463 - RNA, 19 nt, Artificial Sequence
  Description of Artificial Sequence: Synthetic oligonucleotide
  Antisense strand to SEQ ID NO: 254462
agaaugaucacauaugugc

SEQ ID NO: 254464 - RNA, 19 nt, Artificial Sequence
  Description of Artificial Sequence: Synthetic oligonucleotide
  Sense strand starting at position 3033 SEQ ID NO: 3276
augugaucauucuuagaac

SEQ ID NO: 254465 - RNA, 19 nt, Artificial Sequence
  Description of Artificial Sequence: Synthetic oligonucleotide
  Antisense strand to SEQ ID NO: 254464
guucuaagaaugaucacau

SEQ ID NO: 254466 - RNA, 19 nt, Artificial Sequence
  Description of Artificial Sequence: Synthetic oligonucleotide
  Sense strand starting at position 3101 SEQ ID NO: 3276
cugagcaacuugcuuaaga

SEQ ID NO: 254467 - RNA, 19 nt, Artificial Sequence
  Description of Artificial Sequence: Synthetic oligonucleotide
  Antisense strand to SEQ ID NO: 254466
ucuuaagcaaguugcucag

SEQ ID NO: 254468 - RNA, 19 nt, Artificial Sequence
  Description of Artificial Sequence: Synthetic oligonucleotide
  Sense strand starting at position 3140 SEQ ID NO: 3276
ggcuuaggaguuugaucua

SEQ ID NO: 254469 - RNA, 19 nt, Artificial Sequence
  Description of Artificial Sequence: Synthetic oligonucleotide
  Antisense strand to SEQ ID NO: 254468
uagaucaaacuccuaagcc

SEQ ID NO: 254470 - RNA, 19 nt, Artificial Sequence
  Description of Artificial Sequence: Synthetic oligonucleotide
  Sense strand starting at position 3143 SEQ ID NO: 3276
uuaggaguuugaucuaucu

SEQ ID NO: 254471 - RNA, 19 nt, Artificial Sequence
  Description of Artificial Sequence: Synthetic oligonucleotide
  Antisense strand to SEQ ID NO: 254470
agauagaucaaacuccuaa

SEQ ID NO: 254472 - RNA, 19 nt, Artificial Sequence
  Description of Artificial Sequence: Synthetic oligonucleotide
  Sense strand starting at position 3145 SEQ ID NO: 3276
aggaguuugaucuaucugu

SEQ ID NO: 254473 - RNA, 19 nt, Artificial Sequence
  Description of Artificial Sequence: Synthetic oligonucleotide
  Antisense strand to SEQ ID NO: 254472
acagauagaucaaacuccu

SEQ ID NO: 254474 - RNA, 19 nt, Artificial Sequence
  Description of Artificial Sequence: Synthetic oligonucleotide
  Sense strand starting at position 3149 SEQ ID NO: 3276
guuugaucuaucugugagg

SEQ ID NO: 254475 - RNA, 19 nt, Artificial Sequence
  Description of Artificial Sequence: Synthetic oligonucleotide
  Antisense strand to SEQ ID NO: 254474
ccucacagauagaucaaac

SEQ ID NO: 254476 - RNA, 19 nt, Artificial Sequence
  Description of Artificial Sequence: Synthetic oligonucleotide
  Sense strand starting at position 3222 SEQ ID NO: 3276
cugucugugcugccauaua

SEQ ID NO: 254477 - RNA, 19 nt, Artificial Sequence
  Description of Artificial Sequence: Synthetic oligonucleotide
  Antisense strand to SEQ ID NO: 254476
uauauggcagcacagacag

SEQ ID NO: 254478 - RNA, 19 nt, Artificial Sequence
  Description of Artificial Sequence: Synthetic oligonucleotide
  Sense strand starting at position 3721 SEQ ID NO: 3276
cuguguaaccaucaaaguc

SEQ ID NO: 254479 - RNA, 19 nt, Artificial Sequence
  Description of Artificial Sequence: Synthetic oligonucleotide
  Antisense strand to SEQ ID NO: 254478
gacuuugaugguuacacag

SEQ ID NO: 254480 - RNA, 19 nt, Artificial Sequence
  Description of Artificial Sequence: Synthetic oligonucleotide
  Sense strand starting at position 3914 SEQ ID NO: 3276
cuugaaacuuggcuucuga

SEQ ID NO: 254481 - RNA, 19 nt, Artificial Sequence
  Description of Artificial Sequence: Synthetic oligonucleotide
  Antisense strand to SEQ ID NO: 254480
ucagaagccaaguuucaag

SEQ ID NO: 254482 - RNA, 19 nt, Artificial Sequence
  Description of Artificial Sequence: Synthetic oligonucleotide
  Sense strand starting at position 17 SEQ ID NO: 3275
ccaugagacuaacuguacu

SEQ ID NO: 254483 - RNA, 19 nt, Artificial Sequence
  Description of Artificial Sequence: Synthetic oligonucleotide
  Antisense strand to SEQ ID NO: 254482
aguacaguuagucucaugg

SEQ ID NO: 254484 - RNA, 19 nt, Artificial Sequence
  Description of Artificial Sequence: Synthetic oligonucleotide
  Sense strand starting at position 72 SEQ ID NO: 3275
uguggauggcuuuguagga

SEQ ID NO: 254485 - RNA, 19 nt, Artificial Sequence
  Description of Artificial Sequence: Synthetic oligonucleotide
  Antisense strand to SEQ ID NO: 254484
uccuacaaagccauccaca

SEQ ID NO: 254486 - RNA, 19 nt, Artificial Sequence
  Description of Artificial Sequence: Synthetic oligonucleotide
  Sense strand starting at position 73 SEQ ID NO: 3275
guggauggcuuuguaggau

SEQ ID NO: 254487 - RNA, 19 nt, Artificial Sequence
  Description of Artificial Sequence: Synthetic oligonucleotide
  Antisense strand to SEQ ID NO: 254486
auccuacaaagccauccac

SEQ ID NO: 254488 - RNA, 19 nt, Artificial Sequence
  Description of Artificial Sequence: Synthetic oligonucleotide
  Sense strand starting at position 76 SEQ ID NO: 3275
gauggcuuuguaggaucau

SEQ ID NO: 254489 - RNA, 19 nt, Artificial Sequence
  Description of Artificial Sequence: Synthetic oligonucleotide
  Antisense strand to SEQ ID NO: 254488
augauccuacaaagccauc

SEQ ID NO: 254490 - RNA, 19 nt, Artificial Sequence
  Description of Artificial Sequence: Synthetic oligonucleotide
  Sense strand starting at position 186 SEQ ID NO: 3275
cacacagcucugggaagua

SEQ ID NO: 254491 - RNA, 19 nt, Artificial Sequence
  Description of Artificial Sequence: Synthetic oligonucleotide
  Antisense strand to SEQ ID NO: 254490
uacuucccagagcugugug

SEQ ID NO: 254492 - RNA, 19 nt, Artificial Sequence
  Description of Artificial Sequence: Synthetic oligonucleotide
  Sense strand starting at position 323 SEQ ID NO: 3275
ggaaauaucuaggauaugc

SEQ ID NO: 254493 - RNA, 19 nt, Artificial Sequence
  Description of Artificial Sequence: Synthetic oligonucleotide
  Antisense strand to SEQ ID NO: 254492
gcauauccuagauauuucc

SEQ ID NO: 254494 - RNA, 19 nt, Artificial Sequence
  Description of Artificial Sequence: Synthetic oligonucleotide
  Sense strand starting at position 331 SEQ ID NO: 3275
cuaggauaugccuggauca

SEQ ID NO: 254495 - RNA, 19 nt, Artificial Sequence
  Description of Artificial Sequence: Synthetic oligonucleotide
  Antisense strand to SEQ ID NO: 254494
ugauccaggcauauccuag

SEQ ID NO: 254496 - RNA, 19 nt, Artificial Sequence
  Description of Artificial Sequence: Synthetic oligonucleotide
  Sense strand starting at position 332 SEQ ID NO: 3275
uaggauaugccuggaucau

SEQ ID NO: 254497 - RNA, 19 nt, Artificial Sequence
  Description of Artificial Sequence: Synthetic oligonucleotide
  Antisense strand to SEQ ID NO: 254496
augauccaggcauauccua

SEQ ID NO: 254498 - RNA, 19 nt, Artificial Sequence
  Description of Artificial Sequence: Synthetic oligonucleotide
  Sense strand starting at position 445 SEQ ID NO: 3275
gcgugaagucaucaucgca

SEQ ID NO: 254499 - RNA, 19 nt, Artificial Sequence
  Description of Artificial Sequence: Synthetic oligonucleotide
  Antisense strand to SEQ ID NO: 254498
ugcgaugaugacuucacgc

SEQ ID NO: 254500 - RNA, 19 nt, Artificial Sequence
  Description of Artificial Sequence: Synthetic oligonucleotide
  Sense strand starting at position 448 SEQ ID NO: 3275
ugaagucaucaucgcagau

SEQ ID NO: 254501 - RNA, 19 nt, Artificial Sequence
  Description of Artificial Sequence: Synthetic oligonucleotide
  Antisense strand to SEQ ID NO: 254500
aucugcgaugaugacuuca

SEQ ID NO: 254502 - RNA, 19 nt, Artificial Sequence
  Description of Artificial Sequence: Synthetic oligonucleotide
  Sense strand starting at position 696 SEQ ID NO: 3275
agacaaagugugcgugaga

SEQ ID NO: 254503 - RNA, 19 nt, Artificial Sequence
  Description of Artificial Sequence: Synthetic oligonucleotide
  Antisense strand to SEQ ID NO: 254502
ucucacgcacacuuugucu

SEQ ID NO: 254504 - RNA, 19 nt, Artificial Sequence
  Description of Artificial Sequence: Synthetic oligonucleotide
  Sense strand starting at position 699 SEQ ID NO: 3275
caaagugugcgugagagaa

SEQ ID NO: 254505 - RNA, 19 nt, Artificial Sequence
  Description of Artificial Sequence: Synthetic oligonucleotide
  Antisense strand to SEQ ID NO: 254504
uucucucacgcacacuuug

SEQ ID NO: 254506 - RNA, 19 nt, Artificial Sequence
  Description of Artificial Sequence: Synthetic oligonucleotide
  Sense strand starting at position 911 SEQ ID NO: 3275
agagacaacuaugagagau

SEQ ID NO: 254507 - RNA, 19 nt, Artificial Sequence
  Description of Artificial Sequence: Synthetic oligonucleotide
  Antisense strand to SEQ ID NO: 254506
aucucucauaguugucucu

SEQ ID NO: 254508 - RNA, 19 nt, Artificial Sequence
  Description of Artificial Sequence: Synthetic oligonucleotide
  Sense strand starting at position 933 SEQ ID NO: 3275
gagucagagaagggucaau

SEQ ID NO: 254509 - RNA, 19 nt, Artificial Sequence
  Description of Artificial Sequence: Synthetic oligonucleotide
  Antisense strand to SEQ ID NO: 254508
auugacccuucucugacuc

SEQ ID NO: 254510 - RNA, 19 nt, Artificial Sequence
  Description of Artificial Sequence: Synthetic oligonucleotide
  Sense strand starting at position 1083 SEQ ID NO: 3275
gauagaaagugauaggcaa

SEQ ID NO: 254511 - RNA, 19 nt, Artificial Sequence
  Description of Artificial Sequence: Synthetic oligonucleotide
  Antisense strand to SEQ ID NO: 254510
uugccuaucacuuucuauc

SEQ ID NO: 254512 - RNA, 19 nt, Artificial Sequence
  Description of Artificial Sequence: Synthetic oligonucleotide
  Sense strand starting at position 1221 SEQ ID NO: 3275
gacagacagcuguacugau

SEQ ID NO: 254513 - RNA, 19 nt, Artificial Sequence
  Description of Artificial Sequence: Synthetic oligonucleotide
  Antisense strand to SEQ ID NO: 254512
aucaguacagcugucuguc

SEQ ID NO: 254514 - RNA, 19 nt, Artificial Sequence
  Description of Artificial Sequence: Synthetic oligonucleotide
  Sense strand starting at position 1231 SEQ ID NO: 3275
uguacugauugugcagaga

SEQ ID NO: 254515 - RNA, 19 nt, Artificial Sequence
  Description of Artificial Sequence: Synthetic oligonucleotide
  Antisense strand to SEQ ID NO: 254514
ucucugcacaaucaguaca

SEQ ID NO: 254516 - RNA, 19 nt, Artificial Sequence
  Description of Artificial Sequence: Synthetic oligonucleotide
  Sense strand starting at position 1756 SEQ ID NO: 3275
ccguguacucugucucacu

SEQ ID NO: 254517 - RNA, 19 nt, Artificial Sequence
  Description of Artificial Sequence: Synthetic oligonucleotide
  Antisense strand to SEQ ID NO: 254516
agugagacagaguacacgg

SEQ ID NO: 254518 - RNA, 19 nt, Artificial Sequence
  Description of Artificial Sequence: Synthetic oligonucleotide
  Sense strand starting at position 1757 SEQ ID NO: 3275
cguguacucugucucacuu

SEQ ID NO: 254519 - RNA, 19 nt, Artificial Sequence
  Description of Artificial Sequence: Synthetic oligonucleotide
  Antisense strand to SEQ ID NO: 254518
aagugagacagaguacacg

SEQ ID NO: 254520 - RNA, 19 nt, Artificial Sequence
  Description of Artificial Sequence: Synthetic oligonucleotide
  Sense strand starting at position 1958 SEQ ID NO: 3275
ggagaucaguccuaggacu

SEQ ID NO: 254521 - RNA, 19 nt, Artificial Sequence
  Description of Artificial Sequence: Synthetic oligonucleotide
  Antisense strand to SEQ ID NO: 254520
aguccuaggacugaucucc

SEQ ID NO: 254522 - RNA, 19 nt, Artificial Sequence
  Description of Artificial Sequence: Synthetic oligonucleotide
  Sense strand starting at position 1960 SEQ ID NO: 3275
agaucaguccuaggacuuc

SEQ ID NO: 254523 - RNA, 19 nt, Artificial Sequence
  Description of Artificial Sequence: Synthetic oligonucleotide
  Antisense strand to SEQ ID NO: 254522
gaaguccuaggacugaucu

SEQ ID NO: 254524 - RNA, 19 nt, Artificial Sequence
  Description of Artificial Sequence: Synthetic oligonucleotide
  Sense strand starting at position 2835 SEQ ID NO: 3275
gcgcuuugggaccaaggua

SEQ ID NO: 254525 - RNA, 19 nt, Artificial Sequence
  Description of Artificial Sequence: Synthetic oligonucleotide
  Antisense strand to SEQ ID NO: 254524
uaccuuggucccaaagcgc

SEQ ID NO: 254526 - RNA, 19 nt, Artificial Sequence
  Description of Artificial Sequence: Synthetic oligonucleotide
  Sense strand starting at position 2850 SEQ ID NO: 3275
gguagucuggcgcauggau

SEQ ID NO: 254527 - RNA, 19 nt, Artificial Sequence
  Description of Artificial Sequence: Synthetic oligonucleotide
  Antisense strand to SEQ ID NO: 254526
auccaugcgccagacuacc

SEQ ID NO: 254528 - RNA, 19 nt, Artificial Sequence
  Description of Artificial Sequence: Synthetic oligonucleotide
  Sense strand starting at position 2872 SEQ ID NO: 3275
gaaccuuauccgggcuagu

SEQ ID NO: 254529 - RNA, 19 nt, Artificial Sequence
  Description of Artificial Sequence: Synthetic oligonucleotide
  Antisense strand to SEQ ID NO: 254528
acuagcccggauaagguuc

SEQ ID NO: 254530 - RNA, 19 nt, Artificial Sequence
  Description of Artificial Sequence: Synthetic oligonucleotide
  Sense strand starting at position 2885 SEQ ID NO: 3275
gcuaguagugggugagaga

SEQ ID NO: 254531 - RNA, 19 nt, Artificial Sequence
  Description of Artificial Sequence: Synthetic oligonucleotide
  Antisense strand to SEQ ID NO: 254530
ucucucacccacuacuagc

SEQ ID NO: 254532 - RNA, 19 nt, Artificial Sequence
  Description of Artificial Sequence: Synthetic oligonucleotide
  Sense strand starting at position 2965 SEQ ID NO: 3275
gugacuuucccgugaaguu

SEQ ID NO: 254533 - RNA, 19 nt, Artificial Sequence
  Description of Artificial Sequence: Synthetic oligonucleotide
  Antisense strand to SEQ ID NO: 254532
aacuucacgggaaagucac

SEQ ID NO: 254534 - RNA, 19 nt, Artificial Sequence
  Description of Artificial Sequence: Synthetic oligonucleotide
  Sense strand starting at position 2966 SEQ ID NO: 3275
ugacuuucccgugaaguug

SEQ ID NO: 254535 - RNA, 19 nt, Artificial Sequence
  Description of Artificial Sequence: Synthetic oligonucleotide
  Antisense strand to SEQ ID NO: 254534
caacuucacgggaaaguca

SEQ ID NO: 254536 - RNA, 19 nt, Artificial Sequence
  Description of Artificial Sequence: Synthetic oligonucleotide
  Sense strand starting at position 2975 SEQ ID NO: 3275
cgugaaguugcuuugcaca

SEQ ID NO: 254537 - RNA, 19 nt, Artificial Sequence
  Description of Artificial Sequence: Synthetic oligonucleotide
  Antisense strand to SEQ ID NO: 254536
ugugcaaagcaacuucacg

SEQ ID NO: 254538 - RNA, 19 nt, Artificial Sequence
  Description of Artificial Sequence: Synthetic oligonucleotide
  Sense strand starting at position 3043 SEQ ID NO: 3275
guggcaucguccuugggaa

SEQ ID NO: 254539 - RNA, 19 nt, Artificial Sequence
  Description of Artificial Sequence: Synthetic oligonucleotide
  Antisense strand to SEQ ID NO: 254538
uucccaaggacgaugccac

SEQ ID NO: 254540 - RNA, 19 nt, Artificial Sequence
  Description of Artificial Sequence: Synthetic oligonucleotide
  Sense strand starting at position 3044 SEQ ID NO: 3275
uggcaucguccuugggaaa

SEQ ID NO: 254541 - RNA, 19 nt, Artificial Sequence
  Description of Artificial Sequence: Synthetic oligonucleotide
  Antisense strand to SEQ ID NO: 254540
uuucccaaggacgaugcca

SEQ ID NO: 254542 - RNA, 19 nt, Artificial Sequence
  Description of Artificial Sequence: Synthetic oligonucleotide
  Sense strand starting at position 3047 SEQ ID NO: 3275
caucguccuugggaaacuu

SEQ ID NO: 254543 - RNA, 19 nt, Artificial Sequence
  Description of Artificial Sequence: Synthetic oligonucleotide
  Antisense strand to SEQ ID NO: 254542
aaguuucccaaggacgaug

SEQ ID NO: 254544 - RNA, 19 nt, Artificial Sequence
  Description of Artificial Sequence: Synthetic oligonucleotide
  Sense strand starting at position 3574 SEQ ID NO: 3275
gaggaaauuacggguuucu

SEQ ID NO: 254545 - RNA, 19 nt, Artificial Sequence
  Description of Artificial Sequence: Synthetic oligonucleotide
  Antisense strand to SEQ ID NO: 254544
agaaacccguaauuuccuc

SEQ ID NO: 254546 - RNA, 19 nt, Artificial Sequence
  Description of Artificial Sequence: Synthetic oligonucleotide
  Sense strand starting at position 3591 SEQ ID NO: 3275
cucgaugcucucuacuaca

SEQ ID NO: 254547 - RNA, 19 nt, Artificial Sequence
  Description of Artificial Sequence: Synthetic oligonucleotide
  Antisense strand to SEQ ID NO: 254546
uguaguagagagcaucgag

SEQ ID NO: 254548 - RNA, 19 nt, Artificial Sequence
  Description of Artificial Sequence: Synthetic oligonucleotide
  Sense strand starting at position 3807 SEQ ID NO: 3275
guaggaaggcccugagauc

SEQ ID NO: 254549 - RNA, 19 nt, Artificial Sequence
  Description of Artificial Sequence: Synthetic oligonucleotide
  Antisense strand to SEQ ID NO: 254548
gaucucagggccuuccuac

SEQ ID NO: 254550 - RNA, 19 nt, Artificial Sequence
  Description of Artificial Sequence: Synthetic oligonucleotide
  Sense strand starting at position 3832 SEQ ID NO: 3275
ccgagugagugcuuggaca

SEQ ID NO: 254551 - RNA, 19 nt, Artificial Sequence
  Description of Artificial Sequence: Synthetic oligonucleotide
  Antisense strand to SEQ ID NO: 254550
uguccaagcacucacucgg

SEQ ID NO: 254552 - RNA, 19 nt, Artificial Sequence
  Description of Artificial Sequence: Synthetic oligonucleotide
  Sense strand starting at position 3834 SEQ ID NO: 3275
gagugagugcuuggacacu

SEQ ID NO: 254553 - RNA, 19 nt, Artificial Sequence
  Description of Artificial Sequence: Synthetic oligonucleotide
  Antisense strand to SEQ ID NO: 254552
aguguccaagcacucacuc

SEQ ID NO: 254554 - RNA, 19 nt, Artificial Sequence
  Description of Artificial Sequence: Synthetic oligonucleotide
  Sense strand starting at position 3846 SEQ ID NO: 3275
ggacacuaugcucaugagu

SEQ ID NO: 254555 - RNA, 19 nt, Artificial Sequence
  Description of Artificial Sequence: Synthetic oligonucleotide
  Antisense strand to SEQ ID NO: 254554
acucaugagcauagugucc

SEQ ID NO: 254556 - RNA, 19 nt, Artificial Sequence
  Description of Artificial Sequence: Synthetic oligonucleotide
  Sense strand starting at position 3855 SEQ ID NO: 3275
gcucaugaguccucugggu

SEQ ID NO: 254557 - RNA, 19 nt, Artificial Sequence
  Description of Artificial Sequence: Synthetic oligonucleotide
  Antisense strand to SEQ ID NO: 254556
acccagaggacucaugagc

SEQ ID NO: 254558 - RNA, 19 nt, Artificial Sequence
  Description of Artificial Sequence: Synthetic oligonucleotide
  Sense strand starting at position 3901 SEQ ID NO: 3275
gcagcugucuaaucgugua

SEQ ID NO: 254559 - RNA, 19 nt, Artificial Sequence
  Description of Artificial Sequence: Synthetic oligonucleotide
  Antisense strand to SEQ ID NO: 254558
uacacgauuagacagcugc

SEQ ID NO: 254560 - RNA, 19 nt, Artificial Sequence
  Description of Artificial Sequence: Synthetic oligonucleotide
  Sense strand starting at position 3906 SEQ ID NO: 3275
ugucuaaucguguaugccu

SEQ ID NO: 254561 - RNA, 19 nt, Artificial Sequence
  Description of Artificial Sequence: Synthetic oligonucleotide
  Antisense strand to SEQ ID NO: 254560
aggcauacacgauuagaca

SEQ ID NO: 254562 - RNA, 19 nt, Artificial Sequence
  Description of Artificial Sequence: Synthetic oligonucleotide
  Sense strand starting at position 51 SEQ ID NO: 3278
ggagccuucggugaaggaa

SEQ ID NO: 254563 - RNA, 19 nt, Artificial Sequence
  Description of Artificial Sequence: Synthetic oligonucleotide
  Antisense strand to SEQ ID NO: 254562
uuccuucaccgaaggcucc

SEQ ID NO: 254564 - RNA, 19 nt, Artificial Sequence
  Description of Artificial Sequence: Synthetic oligonucleotide
  Sense strand starting at position 374 SEQ ID NO: 3278
ucagcugucaaaugggaau

SEQ ID NO: 254565 - RNA, 19 nt, Artificial Sequence
  Description of Artificial Sequence: Synthetic oligonucleotide
  Antisense strand to SEQ ID NO: 254564
auucccauuugacagcuga

SEQ ID NO: 254566 - RNA, 19 nt, Artificial Sequence
  Description of Artificial Sequence: Synthetic oligonucleotide
  Sense strand starting at position 380 SEQ ID NO: 3278
gucaaaugggaauagcgau

SEQ ID NO: 254567 - RNA, 19 nt, Artificial Sequence
  Description of Artificial Sequence: Synthetic oligonucleotide
  Antisense strand to SEQ ID NO: 254566
aucgcuauucccauuugac

SEQ ID NO: 254568 - RNA, 19 nt, Artificial Sequence
  Description of Artificial Sequence: Synthetic oligonucleotide
  Sense strand starting at position 518 SEQ ID NO: 3278
accuguccacugggaagau

SEQ ID NO: 254569 - RNA, 19 nt, Artificial Sequence
  Description of Artificial Sequence: Synthetic oligonucleotide
  Antisense strand to SEQ ID NO: 254568
aucuucccaguggacaggu

SEQ ID NO: 254570 - RNA, 19 nt, Artificial Sequence
  Description of Artificial Sequence: Synthetic oligonucleotide
  Sense strand starting at position 634 SEQ ID NO: 3278
uggucuacuuaaucugagu

SEQ ID NO: 254571 - RNA, 19 nt, Artificial Sequence
  Description of Artificial Sequence: Synthetic oligonucleotide
  Antisense strand to SEQ ID NO: 254570
acucagauuaaguagacca

SEQ ID NO: 254572 - RNA, 19 nt, Artificial Sequence
  Description of Artificial Sequence: Synthetic oligonucleotide
  Sense strand starting at position 640 SEQ ID NO: 3278
acuuaaucugagugugggu

SEQ ID NO: 254573 - RNA, 19 nt, Artificial Sequence
  Description of Artificial Sequence: Synthetic oligonucleotide
  Antisense strand to SEQ ID NO: 254572
acccacacucagauuaagu

SEQ ID NO: 254574 - RNA, 19 nt, Artificial Sequence
  Description of Artificial Sequence: Synthetic oligonucleotide
  Sense strand starting at position 834 SEQ ID NO: 3278
cuccuuucucccuagagag

SEQ ID NO: 254575 - RNA, 19 nt, Artificial Sequence
  Description of Artificial Sequence: Synthetic oligonucleotide
  Antisense strand to SEQ ID NO: 254574
cucucuagggagaaaggag

SEQ ID NO: 254576 - RNA, 19 nt, Artificial Sequence
  Description of Artificial Sequence: Synthetic oligonucleotide
  Sense strand starting at position 892 SEQ ID NO: 3278
accucuugucccugaagga

SEQ ID NO: 254577 - RNA, 19 nt, Artificial Sequence
  Description of Artificial Sequence: Synthetic oligonucleotide
  Antisense strand to SEQ ID NO: 254576
uccuucagggacaagaggu

SEQ ID NO: 254578 - RNA, 19 nt, Artificial Sequence
  Description of Artificial Sequence: Synthetic oligonucleotide
  Sense strand starting at position 893 SEQ ID NO: 3278
ccucuugucccugaaggaa

SEQ ID NO: 254579 - RNA, 19 nt, Artificial Sequence
  Description of Artificial Sequence: Synthetic oligonucleotide
  Antisense strand to SEQ ID NO: 254578
uuccuucagggacaagagg

SEQ ID NO: 254580 - RNA, 19 nt, Artificial Sequence
  Description of Artificial Sequence: Synthetic oligonucleotide
  Sense strand starting at position 1122 SEQ ID NO: 3278
ggagcagugguuugacaca

SEQ ID NO: 254581 - RNA, 19 nt, Artificial Sequence
  Description of Artificial Sequence: Synthetic oligonucleotide
  Antisense strand to SEQ ID NO: 254580
ugugucaaaccacugcucc

SEQ ID NO: 254582 - RNA, 19 nt, Artificial Sequence
  Description of Artificial Sequence: Synthetic oligonucleotide
  Sense strand starting at position 1396 SEQ ID NO: 3278
cacagcauguuauuggaga

SEQ ID NO: 254583 - RNA, 19 nt, Artificial Sequence
  Description of Artificial Sequence: Synthetic oligonucleotide
  Antisense strand to SEQ ID NO: 254582
ucuccaauaacaugcugug

SEQ ID NO: 254584 - RNA, 19 nt, Artificial Sequence
  Description of Artificial Sequence: Synthetic oligonucleotide
  Sense strand starting at position 1401 SEQ ID NO: 3278
cauguuauuggagacagca

SEQ ID NO: 254585 - RNA, 19 nt, Artificial Sequence
  Description of Artificial Sequence: Synthetic oligonucleotide
  Antisense strand to SEQ ID NO: 254584
ugcugucuccaauaacaug

SEQ ID NO: 254586 - RNA, 19 nt, Artificial Sequence
  Description of Artificial Sequence: Synthetic oligonucleotide
  Sense strand starting at position 1409 SEQ ID NO: 3278
uggagacagcacugguuaa

SEQ ID NO: 254587 - RNA, 19 nt, Artificial Sequence
  Description of Artificial Sequence: Synthetic oligonucleotide
  Antisense strand to SEQ ID NO: 254586
uuaaccagugcugucucca

SEQ ID NO: 254588 - RNA, 19 nt, Artificial Sequence
  Description of Artificial Sequence: Synthetic oligonucleotide
  Sense strand starting at position 1410 SEQ ID NO: 3278
ggagacagcacugguuaaa

SEQ ID NO: 254589 - RNA, 19 nt, Artificial Sequence
  Description of Artificial Sequence: Synthetic oligonucleotide
  Antisense strand to SEQ ID NO: 254588
uuuaaccagugcugucucc

SEQ ID NO: 254590 - RNA, 19 nt, Artificial Sequence
  Description of Artificial Sequence: Synthetic oligonucleotide
  Sense strand starting at position 1420 SEQ ID NO: 3278
cugguuaaaugaccacauu

SEQ ID NO: 254591 - RNA, 19 nt, Artificial Sequence
  Description of Artificial Sequence: Synthetic oligonucleotide
  Antisense strand to SEQ ID NO: 254590
aauguggucauuuaaccag

SEQ ID NO: 254592 - RNA, 19 nt, Artificial Sequence
  Description of Artificial Sequence: Synthetic oligonucleotide
  Sense strand starting at position 1843 SEQ ID NO: 3278
ggcccuuacccaugaccaa

SEQ ID NO: 254593 - RNA, 19 nt, Artificial Sequence
  Description of Artificial Sequence: Synthetic oligonucleotide
  Antisense strand to SEQ ID NO: 254592
uuggucauggguaagggcc

SEQ ID NO: 254594 - RNA, 19 nt, Artificial Sequence
  Description of Artificial Sequence: Synthetic oligonucleotide
  Sense strand starting at position 2199 SEQ ID NO: 3278
uucugucaccuuugugaag

SEQ ID NO: 254595 - RNA, 19 nt, Artificial Sequence
  Description of Artificial Sequence: Synthetic oligonucleotide
  Antisense strand to SEQ ID NO: 254594
cuucacaaaggugacagaa

SEQ ID NO: 254596 - RNA, 19 nt, Artificial Sequence
  Description of Artificial Sequence: Synthetic oligonucleotide
  Sense strand starting at position 2309 SEQ ID NO: 3278
gggcucggagauugaauaa

SEQ ID NO: 254597 - RNA, 19 nt, Artificial Sequence
  Description of Artificial Sequence: Synthetic oligonucleotide
  Antisense strand to SEQ ID NO: 254596
uuauucaaucuccgagccc

SEQ ID NO: 254598 - RNA, 19 nt, Artificial Sequence
  Description of Artificial Sequence: Synthetic oligonucleotide
  Sense strand starting at position 2369 SEQ ID NO: 3278
cucuacuuguuuccagauu

SEQ ID NO: 254599 - RNA, 19 nt, Artificial Sequence
  Description of Artificial Sequence: Synthetic oligonucleotide
  Antisense strand to SEQ ID NO: 254598
aaucuggaaacaaguagag

SEQ ID NO: 254600 - RNA, 19 nt, Artificial Sequence
  Description of Artificial Sequence: Synthetic oligonucleotide
  Sense strand starting at position 2391 SEQ ID NO: 3278
ccucuuugucuugggauau

SEQ ID NO: 254601 - RNA, 19 nt, Artificial Sequence
  Description of Artificial Sequence: Synthetic oligonucleotide
  Antisense strand to SEQ ID NO: 254600
auaucccaagacaaagagg

SEQ ID NO: 254602 - RNA, 19 nt, Artificial Sequence
  Description of Artificial Sequence: Synthetic oligonucleotide
  Sense strand starting at position 2401 SEQ ID NO: 3278
uugggauauucugucucca

SEQ ID NO: 254603 - RNA, 19 nt, Artificial Sequence
  Description of Artificial Sequence: Synthetic oligonucleotide
  Antisense strand to SEQ ID NO: 254602
uggagacagaauaucccaa

SEQ ID NO: 254604 - RNA, 19 nt, Artificial Sequence
  Description of Artificial Sequence: Synthetic oligonucleotide
  Sense strand starting at position 2403 SEQ ID NO: 3278
gggauauucugucuccaga

SEQ ID NO: 254605 - RNA, 19 nt, Artificial Sequence
  Description of Artificial Sequence: Synthetic oligonucleotide
  Antisense strand to SEQ ID NO: 254604
ucuggagacagaauauccc

SEQ ID NO: 254606 - RNA, 19 nt, Artificial Sequence
  Description of Artificial Sequence: Synthetic oligonucleotide
  Sense strand starting at position 2470 SEQ ID NO: 3278
uggaaauggugcuuucuag

SEQ ID NO: 254607 - RNA, 19 nt, Artificial Sequence
  Description of Artificial Sequence: Synthetic oligonucleotide
  Antisense strand to SEQ ID NO: 254606
cuagaaagcaccauuucca

SEQ ID NO: 254608 - RNA, 19 nt, Artificial Sequence
  Description of Artificial Sequence: Synthetic oligonucleotide
  Sense strand starting at position 2476 SEQ ID NO: 3278
uggugcuuucuagacagua

SEQ ID NO: 254609 - RNA, 19 nt, Artificial Sequence
  Description of Artificial Sequence: Synthetic oligonucleotide
  Antisense strand to SEQ ID NO: 254608
uacugucuagaaagcacca

SEQ ID NO: 254610 - RNA, 19 nt, Artificial Sequence
  Description of Artificial Sequence: Synthetic oligonucleotide
  Sense strand starting at position 2519 SEQ ID NO: 3278
cugucucgcgugaaagguu

SEQ ID NO: 254611 - RNA, 19 nt, Artificial Sequence
  Description of Artificial Sequence: Synthetic oligonucleotide
  Antisense strand to SEQ ID NO: 254610
aaccuuucacgcgagacag

SEQ ID NO: 254612 - RNA, 19 nt, Artificial Sequence
  Description of Artificial Sequence: Synthetic oligonucleotide
  Sense strand starting at position 2714 SEQ ID NO: 3278
gacagcucuccaggugaau

SEQ ID NO: 254613 - RNA, 19 nt, Artificial Sequence
  Description of Artificial Sequence: Synthetic oligonucleotide
  Antisense strand to SEQ ID NO: 254612
auucaccuggagagcuguc

SEQ ID NO: 254614 - RNA, 19 nt, Artificial Sequence
  Description of Artificial Sequence: Synthetic oligonucleotide
  Sense strand starting at position 2748 SEQ ID NO: 3278
ggaccugugcuagacauug

SEQ ID NO: 254615 - RNA, 19 nt, Artificial Sequence
  Description of Artificial Sequence: Synthetic oligonucleotide
  Antisense strand to SEQ ID NO: 254614
caaugucuagcacaggucc

SEQ ID NO: 254616 - RNA, 19 nt, Artificial Sequence
  Description of Artificial Sequence: Synthetic oligonucleotide
  Sense strand starting at position 2943 SEQ ID NO: 3278
aggugauaaacguguauug

SEQ ID NO: 254617 - RNA, 19 nt, Artificial Sequence
  Description of Artificial Sequence: Synthetic oligonucleotide
  Antisense strand to SEQ ID NO: 254616
caauacacguuuaucaccu

SEQ ID NO: 254618 - RNA, 19 nt, Artificial Sequence
  Description of Artificial Sequence: Synthetic oligonucleotide
  Sense strand starting at position 3178 SEQ ID NO: 3278
gccagagcucaucgagaac

SEQ ID NO: 254619 - RNA, 19 nt, Artificial Sequence
  Description of Artificial Sequence: Synthetic oligonucleotide
  Antisense strand to SEQ ID NO: 254618
guucucgaugagcucuggc

SEQ ID NO: 254620 - RNA, 19 nt, Artificial Sequence
  Description of Artificial Sequence: Synthetic oligonucleotide
  Sense strand starting at position 3287 SEQ ID NO: 3278
cugcuucucugagucagaa

SEQ ID NO: 254621 - RNA, 19 nt, Artificial Sequence
  Description of Artificial Sequence: Synthetic oligonucleotide
  Antisense strand to SEQ ID NO: 254620
uucugacucagagaagcag

SEQ ID NO: 254622 - RNA, 19 nt, Artificial Sequence
  Description of Artificial Sequence: Synthetic oligonucleotide
  Sense strand starting at position 3316 SEQ ID NO: 3278
ugacucaauccuggaguga

SEQ ID NO: 254623 - RNA, 19 nt, Artificial Sequence
  Description of Artificial Sequence: Synthetic oligonucleotide
  Antisense strand to SEQ ID NO: 254622
ucacuccaggauugaguca

SEQ ID NO: 254624 - RNA, 19 nt, Artificial Sequence
  Description of Artificial Sequence: Synthetic oligonucleotide
  Sense strand starting at position 3411 SEQ ID NO: 3278
agggauuaguaacugucaa

SEQ ID NO: 254625 - RNA, 19 nt, Artificial Sequence
  Description of Artificial Sequence: Synthetic oligonucleotide
  Antisense strand to SEQ ID NO: 254624
uugacaguuacuaaucccu

SEQ ID NO: 254626 - RNA, 19 nt, Artificial Sequence
  Description of Artificial Sequence: Synthetic oligonucleotide
  Sense strand starting at position 3412 SEQ ID NO: 3278
gggauuaguaacugucaaa

SEQ ID NO: 254627 - RNA, 19 nt, Artificial Sequence
  Description of Artificial Sequence: Synthetic oligonucleotide
  Antisense strand to SEQ ID NO: 254626
uuugacaguuacuaauccc

SEQ ID NO: 254628 - RNA, 19 nt, Artificial Sequence
  Description of Artificial Sequence: Synthetic oligonucleotide
  Sense strand starting at position 3457 SEQ ID NO: 3278
accauagacugguuagcaa

SEQ ID NO: 254629 - RNA, 19 nt, Artificial Sequence
  Description of Artificial Sequence: Synthetic oligonucleotide
  Antisense strand to SEQ ID NO: 254628
uugcuaaccagucuauggu

SEQ ID NO: 254630 - RNA, 19 nt, Artificial Sequence
  Description of Artificial Sequence: Synthetic oligonucleotide
  Sense strand starting at position 3630 SEQ ID NO: 3278
ggugucuccucuuuaagaa

SEQ ID NO: 254631 - RNA, 19 nt, Artificial Sequence
  Description of Artificial Sequence: Synthetic oligonucleotide
  Antisense strand to SEQ ID NO: 254630
uucuuaaagaggagacacc

SEQ ID NO: 254632 - RNA, 19 nt, Artificial Sequence
  Description of Artificial Sequence: Synthetic oligonucleotide
  Sense strand starting at position 3631 SEQ ID NO: 3278
gugucuccucuuuaagaac

SEQ ID NO: 254633 - RNA, 19 nt, Artificial Sequence
  Description of Artificial Sequence: Synthetic oligonucleotide
  Antisense strand to SEQ ID NO: 254632
guucuuaaagaggagacac

SEQ ID NO: 254634 - RNA, 19 nt, Artificial Sequence
  Description of Artificial Sequence: Synthetic oligonucleotide
  Sense strand starting at position 3729 SEQ ID NO: 3278
cugggaguuugggcuuuaa

SEQ ID NO: 254635 - RNA, 19 nt, Artificial Sequence
  Description of Artificial Sequence: Synthetic oligonucleotide
  Antisense strand to SEQ ID NO: 254634
uuaaagcccaaacucccag

SEQ ID NO: 254636 - RNA, 19 nt, Artificial Sequence
  Description of Artificial Sequence: Synthetic oligonucleotide
  Sense strand starting at position 3733 SEQ ID NO: 3278
gaguuugggcuuuaacaua

SEQ ID NO: 254637 - RNA, 19 nt, Artificial Sequence
  Description of Artificial Sequence: Synthetic oligonucleotide
  Antisense strand to SEQ ID NO: 254636
uauguuaaagcccaaacuc

SEQ ID NO: 254638 - RNA, 19 nt, Artificial Sequence
  Description of Artificial Sequence: Synthetic oligonucleotide
  Sense strand starting at position 3892 SEQ ID NO: 3278
gccagaaagccuuguaaua

SEQ ID NO: 254639 - RNA, 19 nt, Artificial Sequence
  Description of Artificial Sequence: Synthetic oligonucleotide
  Antisense strand to SEQ ID NO: 254638
uauuacaaggcuuucuggc

SEQ ID NO: 254640 - RNA, 19 nt, Artificial Sequence
  Description of Artificial Sequence: Synthetic oligonucleotide
  Sense strand starting at position 3902 SEQ ID NO: 3278
cuuguaauacuugacgcua

SEQ ID NO: 254641 - RNA, 19 nt, Artificial Sequence
  Description of Artificial Sequence: Synthetic oligonucleotide
  Antisense strand to SEQ ID NO: 254640
uagcgucaaguauuacaag

SEQ ID NO: 254642 - RNA, 19 nt, Artificial Sequence
  Description of Artificial Sequence: Synthetic oligonucleotide
  Sense strand starting at position 191 SEQ ID NO: 3277
cuucuaugaugguccagau

SEQ ID NO: 254643 - RNA, 19 nt, Artificial Sequence
  Description of Artificial Sequence: Synthetic oligonucleotide
  Antisense strand to SEQ ID NO: 254642
aucuggaccaucauagaag

SEQ ID NO: 254644 - RNA, 19 nt, Artificial Sequence
  Description of Artificial Sequence: Synthetic oligonucleotide
  Sense strand starting at position 195 SEQ ID NO: 3277
uaugaugguccagaugcuu

SEQ ID NO: 254645 - RNA, 19 nt, Artificial Sequence
  Description of Artificial Sequence: Synthetic oligonucleotide
  Antisense strand to SEQ ID NO: 254644
aagcaucuggaccaucaua

SEQ ID NO: 254646 - RNA, 19 nt, Artificial Sequence
  Description of Artificial Sequence: Synthetic oligonucleotide
  Sense strand starting at position 203 SEQ ID NO: 3277
uccagaugcuuggugauca

SEQ ID NO: 254647 - RNA, 19 nt, Artificial Sequence
  Description of Artificial Sequence: Synthetic oligonucleotide
  Antisense strand to SEQ ID NO: 254646
ugaucaccaagcaucugga

SEQ ID NO: 254648 - RNA, 19 nt, Artificial Sequence
  Description of Artificial Sequence: Synthetic oligonucleotide
  Sense strand starting at position 213 SEQ ID NO: 3277
uggugaucaggucaagcua

SEQ ID NO: 254649 - RNA, 19 nt, Artificial Sequence
  Description of Artificial Sequence: Synthetic oligonucleotide
  Antisense strand to SEQ ID NO: 254648
uagcuugaccugaucacca

SEQ ID NO: 254650 - RNA, 19 nt, Artificial Sequence
  Description of Artificial Sequence: Synthetic oligonucleotide
  Sense strand starting at position 237 SEQ ID NO: 3277
gugaauugauugccaugga

SEQ ID NO: 254651 - RNA, 19 nt, Artificial Sequence
  Description of Artificial Sequence: Synthetic oligonucleotide
  Antisense strand to SEQ ID NO: 254650
uccauggcaaucaauucac

SEQ ID NO: 254652 - RNA, 19 nt, Artificial Sequence
  Description of Artificial Sequence: Synthetic oligonucleotide
  Sense strand starting at position 240 SEQ ID NO: 3277
aauugauugccauggagaa

SEQ ID NO: 254653 - RNA, 19 nt, Artificial Sequence
  Description of Artificial Sequence: Synthetic oligonucleotide
  Antisense strand to SEQ ID NO: 254652
uucuccauggcaaucaauu

SEQ ID NO: 254654 - RNA, 19 nt, Artificial Sequence
  Description of Artificial Sequence: Synthetic oligonucleotide
  Sense strand starting at position 241 SEQ ID NO: 3277
auugauugccauggagaac

SEQ ID NO: 254655 - RNA, 19 nt, Artificial Sequence
  Description of Artificial Sequence: Synthetic oligonucleotide
  Antisense strand to SEQ ID NO: 254654
guucuccauggcaaucaau

SEQ ID NO: 254656 - RNA, 19 nt, Artificial Sequence
  Description of Artificial Sequence: Synthetic oligonucleotide
  Sense strand starting at position 279 SEQ ID NO: 3277
uuccaucaucuugagucua

SEQ ID NO: 254657 - RNA, 19 nt, Artificial Sequence
  Description of Artificial Sequence: Synthetic oligonucleotide
  Antisense strand to SEQ ID NO: 254656
uagacucaagaugauggaa

SEQ ID NO: 254658 - RNA, 19 nt, Artificial Sequence
  Description of Artificial Sequence: Synthetic oligonucleotide
  Sense strand starting at position 281 SEQ ID NO: 3277
ccaucaucuugagucuaug

SEQ ID NO: 254659 - RNA, 19 nt, Artificial Sequence
  Description of Artificial Sequence: Synthetic oligonucleotide
  Antisense strand to SEQ ID NO: 254658
cauagacucaagaugaugg

SEQ ID NO: 254660 - RNA, 19 nt, Artificial Sequence
  Description of Artificial Sequence: Synthetic oligonucleotide
  Sense strand starting at position 520 SEQ ID NO: 3277
aagugauuccgggauugug

SEQ ID NO: 254661 - RNA, 19 nt, Artificial Sequence
  Description of Artificial Sequence: Synthetic oligonucleotide
  Antisense strand to SEQ ID NO: 254660
cacaaucccggaaucacuu

SEQ ID NO: 254662 - RNA, 19 nt, Artificial Sequence
  Description of Artificial Sequence: Synthetic oligonucleotide
  Sense strand starting at position 725 SEQ ID NO: 3277
gauuaaugguucccagggu

SEQ ID NO: 254663 - RNA, 19 nt, Artificial Sequence
  Description of Artificial Sequence: Synthetic oligonucleotide
  Antisense strand to SEQ ID NO: 254662
acccugggaaccauuaauc

SEQ ID NO: 254664 - RNA, 19 nt, Artificial Sequence
  Description of Artificial Sequence: Synthetic oligonucleotide
  Sense strand starting at position 729 SEQ ID NO: 3277
aaugguucccaggguuaca

SEQ ID NO: 254665 - RNA, 19 nt, Artificial Sequence
  Description of Artificial Sequence: Synthetic oligonucleotide
  Antisense strand to SEQ ID NO: 254664
uguaacccugggaaccauu

SEQ ID NO: 254666 - RNA, 19 nt, Artificial Sequence
  Description of Artificial Sequence: Synthetic oligonucleotide
  Sense strand starting at position 763 SEQ ID NO: 3277
cccucuuucccauggaaag

SEQ ID NO: 254667 - RNA, 19 nt, Artificial Sequence
  Description of Artificial Sequence: Synthetic oligonucleotide
  Antisense strand to SEQ ID NO: 254666
cuuuccaugggaaagaggg

SEQ ID NO: 254668 - RNA, 19 nt, Artificial Sequence
  Description of Artificial Sequence: Synthetic oligonucleotide
  Sense strand starting at position 863 SEQ ID NO: 3277
ugaguccugguuuaggaau

SEQ ID NO: 254669 - RNA, 19 nt, Artificial Sequence
  Description of Artificial Sequence: Synthetic oligonucleotide
  Antisense strand to SEQ ID NO: 254668
auuccuaaaccaggacuca

SEQ ID NO: 254670 - RNA, 19 nt, Artificial Sequence
  Description of Artificial Sequence: Synthetic oligonucleotide
  Sense strand starting at position 870 SEQ ID NO: 3277
ugguuuaggaauugaaguu

SEQ ID NO: 254671 - RNA, 19 nt, Artificial Sequence
  Description of Artificial Sequence: Synthetic oligonucleotide
  Antisense strand to SEQ ID NO: 254670
aacuucaauuccuaaacca

SEQ ID NO: 254672 - RNA, 19 nt, Artificial Sequence
  Description of Artificial Sequence: Synthetic oligonucleotide
  Sense strand starting at position 919 SEQ ID NO: 3277
ggaauuaggcucugaggau

SEQ ID NO: 254673 - RNA, 19 nt, Artificial Sequence
  Description of Artificial Sequence: Synthetic oligonucleotide
  Antisense strand to SEQ ID NO: 254672
auccucagagccuaauucc

SEQ ID NO: 254674 - RNA, 19 nt, Artificial Sequence
  Description of Artificial Sequence: Synthetic oligonucleotide
  Sense strand starting at position 1014 SEQ ID NO: 3277
auggcaauuccuuagcauu

SEQ ID NO: 254675 - RNA, 19 nt, Artificial Sequence
  Description of Artificial Sequence: Synthetic oligonucleotide
  Antisense strand to SEQ ID NO: 254674
aaugcuaaggaauugccau

SEQ ID NO: 254676 - RNA, 19 nt, Artificial Sequence
  Description of Artificial Sequence: Synthetic oligonucleotide
  Sense strand starting at position 1024 SEQ ID NO: 3277
cuuagcauuccacauguuu

SEQ ID NO: 254677 - RNA, 19 nt, Artificial Sequence
  Description of Artificial Sequence: Synthetic oligonucleotide
  Antisense strand to SEQ ID NO: 254676
aaacauguggaaugcuaag

SEQ ID NO: 254678 - RNA, 19 nt, Artificial Sequence
  Description of Artificial Sequence: Synthetic oligonucleotide
  Sense strand starting at position 1419 SEQ ID NO: 3277
ugugaaccauaguuuauca

SEQ ID NO: 254679 - RNA, 19 nt, Artificial Sequence
  Description of Artificial Sequence: Synthetic oligonucleotide
  Antisense strand to SEQ ID NO: 254678
ugauaaacuaugguucaca

SEQ ID NO: 254680 - RNA, 19 nt, Artificial Sequence
  Description of Artificial Sequence: Synthetic oligonucleotide
  Sense strand starting at position 1641 SEQ ID NO: 3277
cgggaagcucuggaagcau

SEQ ID NO: 254681 - RNA, 19 nt, Artificial Sequence
  Description of Artificial Sequence: Synthetic oligonucleotide
  Antisense strand to SEQ ID NO: 254680
augcuuccagagcuucccg

SEQ ID NO: 254682 - RNA, 19 nt, Artificial Sequence
  Description of Artificial Sequence: Synthetic oligonucleotide
  Sense strand starting at position 2111 SEQ ID NO: 3277
agaggagugagccagguuu

SEQ ID NO: 254683 - RNA, 19 nt, Artificial Sequence
  Description of Artificial Sequence: Synthetic oligonucleotide
  Antisense strand to SEQ ID NO: 254682
aaaccuggcucacuccucu

SEQ ID NO: 254684 - RNA, 19 nt, Artificial Sequence
  Description of Artificial Sequence: Synthetic oligonucleotide
  Sense strand starting at position 2113 SEQ ID NO: 3277
aggagugagccagguuuca

SEQ ID NO: 254685 - RNA, 19 nt, Artificial Sequence
  Description of Artificial Sequence: Synthetic oligonucleotide
  Antisense strand to SEQ ID NO: 254684
ugaaaccuggcucacuccu

SEQ ID NO: 254686 - RNA, 19 nt, Artificial Sequence
  Description of Artificial Sequence: Synthetic oligonucleotide
  Sense strand starting at position 2194 SEQ ID NO: 3277
gauagaaggcuuggauuac

SEQ ID NO: 254687 - RNA, 19 nt, Artificial Sequence
  Description of Artificial Sequence: Synthetic oligonucleotide
  Antisense strand to SEQ ID NO: 254686
guaauccaagccuucuauc

SEQ ID NO: 254688 - RNA, 19 nt, Artificial Sequence
  Description of Artificial Sequence: Synthetic oligonucleotide
  Sense strand starting at position 2417 SEQ ID NO: 3277
gcaucaagaugccuaaauc

SEQ ID NO: 254689 - RNA, 19 nt, Artificial Sequence
  Description of Artificial Sequence: Synthetic oligonucleotide
  Antisense strand to SEQ ID NO: 254688
gauuuaggcaucuugaugc

SEQ ID NO: 254690 - RNA, 19 nt, Artificial Sequence
  Description of Artificial Sequence: Synthetic oligonucleotide
  Sense strand starting at position 2572 SEQ ID NO: 3277
ccacuuaagcaucagaagu

SEQ ID NO: 254691 - RNA, 19 nt, Artificial Sequence
  Description of Artificial Sequence: Synthetic oligonucleotide
  Antisense strand to SEQ ID NO: 254690
acuucugaugcuuaagugg

SEQ ID NO: 254692 - RNA, 19 nt, Artificial Sequence
  Description of Artificial Sequence: Synthetic oligonucleotide
  Sense strand starting at position 2974 SEQ ID NO: 3277
uuacauagaugcuuaggau

SEQ ID NO: 254693 - RNA, 19 nt, Artificial Sequence
  Description of Artificial Sequence: Synthetic oligonucleotide
  Antisense strand to SEQ ID NO: 254692
auccuaagcaucuauguaa

SEQ ID NO: 254694 - RNA, 19 nt, Artificial Sequence
  Description of Artificial Sequence: Synthetic oligonucleotide
  Sense strand starting at position 3109 SEQ ID NO: 3277
ucaucucacucuuugggaa

SEQ ID NO: 254695 - RNA, 19 nt, Artificial Sequence
  Description of Artificial Sequence: Synthetic oligonucleotide
  Antisense strand to SEQ ID NO: 254694
uucccaaagagugagauga

SEQ ID NO: 254696 - RNA, 19 nt, Artificial Sequence
  Description of Artificial Sequence: Synthetic oligonucleotide
  Sense strand starting at position 3313 SEQ ID NO: 3277
ugcagaguccuacaaagua

SEQ ID NO: 254697 - RNA, 19 nt, Artificial Sequence
  Description of Artificial Sequence: Synthetic oligonucleotide
  Antisense strand to SEQ ID NO: 254696
uacuuuguaggacucugca

SEQ ID NO: 254698 - RNA, 19 nt, Artificial Sequence
  Description of Artificial Sequence: Synthetic oligonucleotide
  Sense strand starting at position 3365 SEQ ID NO: 3277
uaguaacagcgugggauuu

SEQ ID NO: 254699 - RNA, 19 nt, Artificial Sequence
  Description of Artificial Sequence: Synthetic oligonucleotide
  Antisense strand to SEQ ID NO: 254698
aaaucccacgcuguuacua

SEQ ID NO: 254700 - RNA, 19 nt, Artificial Sequence
  Description of Artificial Sequence: Synthetic oligonucleotide
  Sense strand starting at position 3450 SEQ ID NO: 3277
ucaguuguccuauaugaga

SEQ ID NO: 254701 - RNA, 19 nt, Artificial Sequence
  Description of Artificial Sequence: Synthetic oligonucleotide
  Antisense strand to SEQ ID NO: 254700
ucucauauaggacaacuga

SEQ ID NO: 254702 - RNA, 19 nt, Artificial Sequence
  Description of Artificial Sequence: Synthetic oligonucleotide
  Sense strand starting at position 3458 SEQ ID NO: 3277
ccuauaugagagugugauu

SEQ ID NO: 254703 - RNA, 19 nt, Artificial Sequence
  Description of Artificial Sequence: Synthetic oligonucleotide
  Antisense strand to SEQ ID NO: 254702
aaucacacucucauauagg

SEQ ID NO: 254704 - RNA, 19 nt, Artificial Sequence
  Description of Artificial Sequence: Synthetic oligonucleotide
  Sense strand starting at position 3671 SEQ ID NO: 3277
acaagauucuggcuuaugu

SEQ ID NO: 254705 - RNA, 19 nt, Artificial Sequence
  Description of Artificial Sequence: Synthetic oligonucleotide
  Antisense strand to SEQ ID NO: 254704
acauaagccagaaucuugu

SEQ ID NO: 254706 - RNA, 19 nt, Artificial Sequence
  Description of Artificial Sequence: Synthetic oligonucleotide
  Sense strand starting at position 3673 SEQ ID NO: 3277
aagauucuggcuuauguaa

SEQ ID NO: 254707 - RNA, 19 nt, Artificial Sequence
  Description of Artificial Sequence: Synthetic oligonucleotide
  Antisense strand to SEQ ID NO: 254706
uuacauaagccagaaucuu

SEQ ID NO: 254708 - RNA, 19 nt, Artificial Sequence
  Description of Artificial Sequence: Synthetic oligonucleotide
  Sense strand starting at position 3703 SEQ ID NO: 3277
gccuuaguagaguaagauc

SEQ ID NO: 254709 - RNA, 19 nt, Artificial Sequence
  Description of Artificial Sequence: Synthetic oligonucleotide
  Antisense strand to SEQ ID NO: 254708
gaucuuacucuacuaaggc

SEQ ID NO: 254710 - RNA, 19 nt, Artificial Sequence
  Description of Artificial Sequence: Synthetic oligonucleotide
  Sense strand starting at position 3750 SEQ ID NO: 3277
gaucuugggcugcacaaau

SEQ ID NO: 254711 - RNA, 19 nt, Artificial Sequence
  Description of Artificial Sequence: Synthetic oligonucleotide
  Antisense strand to SEQ ID NO: 254710
auuugugcagcccaagauc

SEQ ID NO: 254712 - RNA, 19 nt, Artificial Sequence
  Description of Artificial Sequence: Synthetic oligonucleotide
  Sense strand starting at position 3873 SEQ ID NO: 3277
agccgugacaaugauggau

SEQ ID NO: 254713 - RNA, 19 nt, Artificial Sequence
  Description of Artificial Sequence: Synthetic oligonucleotide
  Antisense strand to SEQ ID NO: 254712
auccaucauugucacggcu

SEQ ID NO: 254714 - RNA, 19 nt, Artificial Sequence
  Description of Artificial Sequence: Synthetic oligonucleotide
  Sense strand starting at position 3882 SEQ ID NO: 3277
aaugauggaucuccuguuu

SEQ ID NO: 254715 - RNA, 19 nt, Artificial Sequence
  Description of Artificial Sequence: Synthetic oligonucleotide
  Antisense strand to SEQ ID NO: 254714
aaacaggagauccaucauu

SEQ ID NO: 254716 - RNA, 19 nt, Artificial Sequence
  Description of Artificial Sequence: Synthetic oligonucleotide
  Sense strand starting at position 3888 SEQ ID NO: 3277
ggaucuccuguuuggaaga

SEQ ID NO: 254717 - RNA, 19 nt, Artificial Sequence
  Description of Artificial Sequence: Synthetic oligonucleotide
  Antisense strand to SEQ ID NO: 254716
ucuuccaaacaggagaucc

SEQ ID NO: 254718 - RNA, 19 nt, Artificial Sequence
  Description of Artificial Sequence: Synthetic oligonucleotide
  Sense strand starting at position 3929 SEQ ID NO: 3277
ugaccaaaccauggucuaa

SEQ ID NO: 254719 - RNA, 19 nt, Artificial Sequence
  Description of Artificial Sequence: Synthetic oligonucleotide
  Antisense strand to SEQ ID NO: 254718
uuagaccaugguuugguca

SEQ ID NO: 254720 - RNA, 19 nt, Artificial Sequence
  Description of Artificial Sequence: Synthetic oligonucleotide
  Sense strand starting at position 3931 SEQ ID NO: 3277
accaaaccauggucuaagu

SEQ ID NO: 254721 - RNA, 19 nt, Artificial Sequence
  Description of Artificial Sequence: Synthetic oligonucleotide
  Antisense strand to SEQ ID NO: 254720
acuuagaccaugguuuggu

SEQ ID NO: 254722 - RNA, 19 nt, Artificial Sequence
  Description of Artificial Sequence: Synthetic oligonucleotide
  Sense strand starting at position 108 SEQ ID NO: 3279
gcaacaauccugugaaugg

SEQ ID NO: 254723 - RNA, 19 nt, Artificial Sequence
  Description of Artificial Sequence: Synthetic oligonucleotide
  Antisense strand to SEQ ID NO: 254722
ccauucacaggauuguugc

SEQ ID NO: 254724 - RNA, 19 nt, Artificial Sequence
  Description of Artificial Sequence: Synthetic oligonucleotide
  Sense strand starting at position 112 SEQ ID NO: 3279
caauccugugaauggguau

SEQ ID NO: 254725 - RNA, 19 nt, Artificial Sequence
  Description of Artificial Sequence: Synthetic oligonucleotide
  Antisense strand to SEQ ID NO: 254724
auacccauucacaggauug

SEQ ID NO: 254726 - RNA, 19 nt, Artificial Sequence
  Description of Artificial Sequence: Synthetic oligonucleotide
  Sense strand starting at position 115 SEQ ID NO: 3279
uccugugaauggguaugau

SEQ ID NO: 254727 - RNA, 19 nt, Artificial Sequence
  Description of Artificial Sequence: Synthetic oligonucleotide
  Antisense strand to SEQ ID NO: 254726
aucauacccauucacagga

SEQ ID NO: 254728 - RNA, 19 nt, Artificial Sequence
  Description of Artificial Sequence: Synthetic oligonucleotide
  Sense strand starting at position 118 SEQ ID NO: 3279
ugugaauggguaugauuau

SEQ ID NO: 254729 - RNA, 19 nt, Artificial Sequence
  Description of Artificial Sequence: Synthetic oligonucleotide
  Antisense strand to SEQ ID NO: 254728
auaaucauacccauucaca

SEQ ID NO: 254730 - RNA, 19 nt, Artificial Sequence
  Description of Artificial Sequence: Synthetic oligonucleotide
  Sense strand starting at position 178 SEQ ID NO: 3279
gaagucuucugcccaaguu

SEQ ID NO: 254731 - RNA, 19 nt, Artificial Sequence
  Description of Artificial Sequence: Synthetic oligonucleotide
  Antisense strand to SEQ ID NO: 254730
aacuugggcagaagacuuc

SEQ ID NO: 254732 - RNA, 19 nt, Artificial Sequence
  Description of Artificial Sequence: Synthetic oligonucleotide
  Sense strand starting at position 199 SEQ ID NO: 3279
acaucugugaguggucaga

SEQ ID NO: 254733 - RNA, 19 nt, Artificial Sequence
  Description of Artificial Sequence: Synthetic oligonucleotide
  Antisense strand to SEQ ID NO: 254732
ucugaccacucacagaugu

SEQ ID NO: 254734 - RNA, 19 nt, Artificial Sequence
  Description of Artificial Sequence: Synthetic oligonucleotide
  Sense strand starting at position 201 SEQ ID NO: 3279
aucugugaguggucagaac

SEQ ID NO: 254735 - RNA, 19 nt, Artificial Sequence
  Description of Artificial Sequence: Synthetic oligonucleotide
  Antisense strand to SEQ ID NO: 254734
guucugaccacucacagau

SEQ ID NO: 254736 - RNA, 19 nt, Artificial Sequence
  Description of Artificial Sequence: Synthetic oligonucleotide
  Sense strand starting at position 279 SEQ ID NO: 3279
ucaggaccuucuucugaaa

SEQ ID NO: 254737 - RNA, 19 nt, Artificial Sequence
  Description of Artificial Sequence: Synthetic oligonucleotide
  Antisense strand to SEQ ID NO: 254736
uuucagaagaagguccuga

SEQ ID NO: 254738 - RNA, 19 nt, Artificial Sequence
  Description of Artificial Sequence: Synthetic oligonucleotide
  Sense strand starting at position 659 SEQ ID NO: 3279
acccgaguccagggcuaua

SEQ ID NO: 254739 - RNA, 19 nt, Artificial Sequence
  Description of Artificial Sequence: Synthetic oligonucleotide
  Antisense strand to SEQ ID NO: 254738
uauagcccuggacucgggu

SEQ ID NO: 254740 - RNA, 19 nt, Artificial Sequence
  Description of Artificial Sequence: Synthetic oligonucleotide
  Sense strand starting at position 838 SEQ ID NO: 3279
acaagaaucugggagcaag

SEQ ID NO: 254741 - RNA, 19 nt, Artificial Sequence
  Description of Artificial Sequence: Synthetic oligonucleotide
  Antisense strand to SEQ ID NO: 254740
cuugcucccagauucuugu

SEQ ID NO: 254742 - RNA, 19 nt, Artificial Sequence
  Description of Artificial Sequence: Synthetic oligonucleotide
  Sense strand starting at position 859 SEQ ID NO: 3279
aaguguucauguguggaug

SEQ ID NO: 254743 - RNA, 19 nt, Artificial Sequence
  Description of Artificial Sequence: Synthetic oligonucleotide
  Antisense strand to SEQ ID NO: 254742
cauccacacaugaacacuu

SEQ ID NO: 254744 - RNA, 19 nt, Artificial Sequence
  Description of Artificial Sequence: Synthetic oligonucleotide
  Sense strand starting at position 870 SEQ ID NO: 3279
uguggaugugcuuauuucu

SEQ ID NO: 254745 - RNA, 19 nt, Artificial Sequence
  Description of Artificial Sequence: Synthetic oligonucleotide
  Antisense strand to SEQ ID NO: 254744
agaaauaagcacauccaca

SEQ ID NO: 254746 - RNA, 19 nt, Artificial Sequence
  Description of Artificial Sequence: Synthetic oligonucleotide
  Sense strand starting at position 1045 SEQ ID NO: 3279
acuucuauccugugggaaa

SEQ ID NO: 254747 - RNA, 19 nt, Artificial Sequence
  Description of Artificial Sequence: Synthetic oligonucleotide
  Antisense strand to SEQ ID NO: 254746
uuucccacaggauagaagu

SEQ ID NO: 254748 - RNA, 19 nt, Artificial Sequence
  Description of Artificial Sequence: Synthetic oligonucleotide
  Sense strand starting at position 1047 SEQ ID NO: 3279
uucuauccugugggaaacu

SEQ ID NO: 254749 - RNA, 19 nt, Artificial Sequence
  Description of Artificial Sequence: Synthetic oligonucleotide
  Antisense strand to SEQ ID NO: 254748
aguuucccacaggauagaa

SEQ ID NO: 254750 - RNA, 19 nt, Artificial Sequence
  Description of Artificial Sequence: Synthetic oligonucleotide
  Sense strand starting at position 1058 SEQ ID NO: 3279
gggaaacugccggguucua

SEQ ID NO: 254751 - RNA, 19 nt, Artificial Sequence
  Description of Artificial Sequence: Synthetic oligonucleotide
  Antisense strand to SEQ ID NO: 254750
uagaacccggcaguuuccc

SEQ ID NO: 254752 - RNA, 19 nt, Artificial Sequence
  Description of Artificial Sequence: Synthetic oligonucleotide
  Sense strand starting at position 1246 SEQ ID NO: 3279
ccuggccuugcccauaaua

SEQ ID NO: 254753 - RNA, 19 nt, Artificial Sequence
  Description of Artificial Sequence: Synthetic oligonucleotide
  Antisense strand to SEQ ID NO: 254752
uauuaugggcaaggccagg

SEQ ID NO: 254754 - RNA, 19 nt, Artificial Sequence
  Description of Artificial Sequence: Synthetic oligonucleotide
  Sense strand starting at position 1248 SEQ ID NO: 3279
uggccuugcccauaauaaa

SEQ ID NO: 254755 - RNA, 19 nt, Artificial Sequence
  Description of Artificial Sequence: Synthetic oligonucleotide
  Antisense strand to SEQ ID NO: 254754
uuuauuaugggcaaggcca

SEQ ID NO: 254756 - RNA, 19 nt, Artificial Sequence
  Description of Artificial Sequence: Synthetic oligonucleotide
  Sense strand starting at position 1309 SEQ ID NO: 3279
ccuccuaggcugcaagaaa

SEQ ID NO: 254757 - RNA, 19 nt, Artificial Sequence
  Description of Artificial Sequence: Synthetic oligonucleotide
  Antisense strand to SEQ ID NO: 254756
uuucuugcagccuaggagg

SEQ ID NO: 254758 - RNA, 19 nt, Artificial Sequence
  Description of Artificial Sequence: Synthetic oligonucleotide
  Sense strand starting at position 1349 SEQ ID NO: 3279
agagcuguaauaugagaac

SEQ ID NO: 254759 - RNA, 19 nt, Artificial Sequence
  Description of Artificial Sequence: Synthetic oligonucleotide
  Antisense strand to SEQ ID NO: 254758
guucucauauuacagcucu

SEQ ID NO: 254760 - RNA, 19 nt, Artificial Sequence
  Description of Artificial Sequence: Synthetic oligonucleotide
  Sense strand starting at position 1530 SEQ ID NO: 3279
ggaugaucgcgcagagcca

SEQ ID NO: 254761 - RNA, 19 nt, Artificial Sequence
  Description of Artificial Sequence: Synthetic oligonucleotide
  Antisense strand to SEQ ID NO: 254760
uggcucugcgcgaucaucc

SEQ ID NO: 254762 - RNA, 19 nt, Artificial Sequence
  Description of Artificial Sequence: Synthetic oligonucleotide
  Sense strand starting at position 2225 SEQ ID NO: 3279
ugacuugaccuaugccgau

SEQ ID NO: 254763 - RNA, 19 nt, Artificial Sequence
  Description of Artificial Sequence: Synthetic oligonucleotide
  Antisense strand to SEQ ID NO: 254762
aucggcauaggucaaguca

SEQ ID NO: 254764 - RNA, 19 nt, Artificial Sequence
  Description of Artificial Sequence: Synthetic oligonucleotide
  Sense strand starting at position 2633 SEQ ID NO: 3279
acgucugguggugaaauga

SEQ ID NO: 254765 - RNA, 19 nt, Artificial Sequence
  Description of Artificial Sequence: Synthetic oligonucleotide
  Antisense strand to SEQ ID NO: 254764
ucauuucaccaccagacgu

SEQ ID NO: 254766 - RNA, 19 nt, Artificial Sequence
  Description of Artificial Sequence: Synthetic oligonucleotide
  Sense strand starting at position 2661 SEQ ID NO: 3279
augggagggugucauauuu

SEQ ID NO: 254767 - RNA, 19 nt, Artificial Sequence
  Description of Artificial Sequence: Synthetic oligonucleotide
  Antisense strand to SEQ ID NO: 254766
aaauaugacacccucccau

SEQ ID NO: 254768 - RNA, 19 nt, Artificial Sequence
  Description of Artificial Sequence: Synthetic oligonucleotide
  Sense strand starting at position 2668 SEQ ID NO: 3279
ggugucauauuugaacuga

SEQ ID NO: 254769 - RNA, 19 nt, Artificial Sequence
  Description of Artificial Sequence: Synthetic oligonucleotide
  Antisense strand to SEQ ID NO: 254768
ucaguucaaauaugacacc

SEQ ID NO: 254770 - RNA, 19 nt, Artificial Sequence
  Description of Artificial Sequence: Synthetic oligonucleotide
  Sense strand starting at position 2737 SEQ ID NO: 3279
gggcuuucuggagagcaga

SEQ ID NO: 254771 - RNA, 19 nt, Artificial Sequence
  Description of Artificial Sequence: Synthetic oligonucleotide
  Antisense strand to SEQ ID NO: 254770
ucugcucuccagaaagccc

SEQ ID NO: 254772 - RNA, 19 nt, Artificial Sequence
  Description of Artificial Sequence: Synthetic oligonucleotide
  Sense strand starting at position 2751 SEQ ID NO: 3279
gcagaaauggcaggugcaa

SEQ ID NO: 254773 - RNA, 19 nt, Artificial Sequence
  Description of Artificial Sequence: Synthetic oligonucleotide
  Antisense strand to SEQ ID NO: 254772
uugcaccugccauuucugc

SEQ ID NO: 254774 - RNA, 19 nt, Artificial Sequence
  Description of Artificial Sequence: Synthetic oligonucleotide
  Sense strand starting at position 2837 SEQ ID NO: 3279
aggcaaggaguuuagguau

SEQ ID NO: 254775 - RNA, 19 nt, Artificial Sequence
  Description of Artificial Sequence: Synthetic oligonucleotide
  Antisense strand to SEQ ID NO: 254774
auaccuaaacuccuugccu

SEQ ID NO: 254776 - RNA, 19 nt, Artificial Sequence
  Description of Artificial Sequence: Synthetic oligonucleotide
  Sense strand starting at position 2840 SEQ ID NO: 3279
caaggaguuuagguauuau

SEQ ID NO: 254777 - RNA, 19 nt, Artificial Sequence
  Description of Artificial Sequence: Synthetic oligonucleotide
  Antisense strand to SEQ ID NO: 254776
auaauaccuaaacuccuug

SEQ ID NO: 254778 - RNA, 19 nt, Artificial Sequence
  Description of Artificial Sequence: Synthetic oligonucleotide
  Sense strand starting at position 3189 SEQ ID NO: 3279
ugggaauuauaugaucuaa

SEQ ID NO: 254779 - RNA, 19 nt, Artificial Sequence
  Description of Artificial Sequence: Synthetic oligonucleotide
  Antisense strand to SEQ ID NO: 254778
uuagaucauauaauuccca

SEQ ID NO: 254780 - RNA, 19 nt, Artificial Sequence
  Description of Artificial Sequence: Synthetic oligonucleotide
  Sense strand starting at position 3301 SEQ ID NO: 3279
acaugaugguggcucagau

SEQ ID NO: 254781 - RNA, 19 nt, Artificial Sequence
  Description of Artificial Sequence: Synthetic oligonucleotide
  Antisense strand to SEQ ID NO: 254780
aucugagccaccaucaugu

SEQ ID NO: 254782 - RNA, 19 nt, Artificial Sequence
  Description of Artificial Sequence: Synthetic oligonucleotide
  Sense strand starting at position 3354 SEQ ID NO: 3279
cagagagauuuggaggcaa

SEQ ID NO: 254783 - RNA, 19 nt, Artificial Sequence
  Description of Artificial Sequence: Synthetic oligonucleotide
  Antisense strand to SEQ ID NO: 254782
uugccuccaaaucucucug

SEQ ID NO: 254784 - RNA, 19 nt, Artificial Sequence
  Description of Artificial Sequence: Synthetic oligonucleotide
  Sense strand starting at position 3432 SEQ ID NO: 3279
caagucucaguguggagau

SEQ ID NO: 254785 - RNA, 19 nt, Artificial Sequence
  Description of Artificial Sequence: Synthetic oligonucleotide
  Antisense strand to SEQ ID NO: 254784
aucuccacacugagacuug

SEQ ID NO: 254786 - RNA, 19 nt, Artificial Sequence
  Description of Artificial Sequence: Synthetic oligonucleotide
  Sense strand starting at position 3521 SEQ ID NO: 3279
agcuuagugaauuggauaa

SEQ ID NO: 254787 - RNA, 19 nt, Artificial Sequence
  Description of Artificial Sequence: Synthetic oligonucleotide
  Antisense strand to SEQ ID NO: 254786
uuauccaauucacuaagcu

SEQ ID NO: 254788 - RNA, 19 nt, Artificial Sequence
  Description of Artificial Sequence: Synthetic oligonucleotide
  Sense strand starting at position 3533 SEQ ID NO: 3279
uggauaagccagcaagcuu

SEQ ID NO: 254789 - RNA, 19 nt, Artificial Sequence
  Description of Artificial Sequence: Synthetic oligonucleotide
  Antisense strand to SEQ ID NO: 254788
aagcuugcuggcuuaucca

SEQ ID NO: 254790 - RNA, 19 nt, Artificial Sequence
  Description of Artificial Sequence: Synthetic oligonucleotide
  Sense strand starting at position 3544 SEQ ID NO: 3279
gcaagcuugagauagaugu

SEQ ID NO: 254791 - RNA, 19 nt, Artificial Sequence
  Description of Artificial Sequence: Synthetic oligonucleotide
  Antisense strand to SEQ ID NO: 254790
acaucuaucucaagcuugc

SEQ ID NO: 254792 - RNA, 19 nt, Artificial Sequence
  Description of Artificial Sequence: Synthetic oligonucleotide
  Sense strand starting at position 3871 SEQ ID NO: 3279
gaagaagucuacucuaugu

SEQ ID NO: 254793 - RNA, 19 nt, Artificial Sequence
  Description of Artificial Sequence: Synthetic oligonucleotide
  Antisense strand to SEQ ID NO: 254792
acauagaguagacuucuuc

SEQ ID NO: 254794 - RNA, 19 nt, Artificial Sequence
  Description of Artificial Sequence: Synthetic oligonucleotide
  Sense strand starting at position 3875 SEQ ID NO: 3279
aagucuacucuauguggaa

SEQ ID NO: 254795 - RNA, 19 nt, Artificial Sequence
  Description of Artificial Sequence: Synthetic oligonucleotide
  Antisense strand to SEQ ID NO: 254794
uuccacauagaguagacuu

SEQ ID NO: 254796 - RNA, 19 nt, Artificial Sequence
  Description of Artificial Sequence: Synthetic oligonucleotide
  Sense strand starting at position 3876 SEQ ID NO: 3279
agucuacucuauguggaaa

SEQ ID NO: 254797 - RNA, 19 nt, Artificial Sequence
  Description of Artificial Sequence: Synthetic oligonucleotide
  Antisense strand to SEQ ID NO: 254796
uuuccacauagaguagacu

SEQ ID NO: 254798 - RNA, 19 nt, Artificial Sequence
  Description of Artificial Sequence: Synthetic oligonucleotide
  Sense strand starting at position 3877 SEQ ID NO: 3279
gucuacucuauguggaaag

SEQ ID NO: 254799 - RNA, 19 nt, Artificial Sequence
  Description of Artificial Sequence: Synthetic oligonucleotide
  Antisense strand to SEQ ID NO: 254798
cuuuccacauagaguagac

SEQ ID NO: 254800 - RNA, 19 nt, Artificial Sequence
  Description of Artificial Sequence: Synthetic oligonucleotide
  Sense strand starting at position 3889 SEQ ID NO: 3279
uggaaaggcuuuccaggaa

SEQ ID NO: 254801 - RNA, 19 nt, Artificial Sequence
  Description of Artificial Sequence: Synthetic oligonucleotide
  Antisense strand to SEQ ID NO: 254800
uuccuggaaagccuuucca

SEQ ID NO: 254802 - RNA, 19 nt, Artificial Sequence
  Description of Artificial Sequence: Synthetic oligonucleotide
  Sense strand starting at position 513 SEQ ID NO: 3280
ggaaguuaaccugggagcu

SEQ ID NO: 254803 - RNA, 19 nt, Artificial Sequence
  Description of Artificial Sequence: Synthetic oligonucleotide
  Antisense strand to SEQ ID NO: 254802
agcucccagguuaacuucc

SEQ ID NO: 254804 - RNA, 19 nt, Artificial Sequence
  Description of Artificial Sequence: Synthetic oligonucleotide
  Sense strand starting at position 514 SEQ ID NO: 3280
gaaguuaaccugggagcua

SEQ ID NO: 254805 - RNA, 19 nt, Artificial Sequence
  Description of Artificial Sequence: Synthetic oligonucleotide
  Antisense strand to SEQ ID NO: 254804
uagcucccagguuaacuuc

SEQ ID NO: 254806 - RNA, 19 nt, Artificial Sequence
  Description of Artificial Sequence: Synthetic oligonucleotide
  Sense strand starting at position 651 SEQ ID NO: 3280
cuuagaauucgcggacaga

SEQ ID NO: 254807 - RNA, 19 nt, Artificial Sequence
  Description of Artificial Sequence: Synthetic oligonucleotide
  Antisense strand to SEQ ID NO: 254806
ucuguccgcgaauucuaag

SEQ ID NO: 254808 - RNA, 19 nt, Artificial Sequence
  Description of Artificial Sequence: Synthetic oligonucleotide
  Sense strand starting at position 652 SEQ ID NO: 3280
uuagaauucgcggacagaa

SEQ ID NO: 254809 - RNA, 19 nt, Artificial Sequence
  Description of Artificial Sequence: Synthetic oligonucleotide
  Antisense strand to SEQ ID NO: 254808
uucuguccgcgaauucuaa

SEQ ID NO: 254810 - RNA, 19 nt, Artificial Sequence
  Description of Artificial Sequence: Synthetic oligonucleotide
  Sense strand starting at position 847 SEQ ID NO: 3280
gcugcaaggacuuaaguuu

SEQ ID NO: 254811 - RNA, 19 nt, Artificial Sequence
  Description of Artificial Sequence: Synthetic oligonucleotide
  Antisense strand to SEQ ID NO: 254810
aaacuuaaguccuugcagc

SEQ ID NO: 254812 - RNA, 19 nt, Artificial Sequence
  Description of Artificial Sequence: Synthetic oligonucleotide
  Sense strand starting at position 972 SEQ ID NO: 3280
ccuggcaaucggcaauaau

SEQ ID NO: 254813 - RNA, 19 nt, Artificial Sequence
  Description of Artificial Sequence: Synthetic oligonucleotide
  Antisense strand to SEQ ID NO: 254812
auuauugccgauugccagg

SEQ ID NO: 254814 - RNA, 19 nt, Artificial Sequence
  Description of Artificial Sequence: Synthetic oligonucleotide
  Sense strand starting at position 1026 SEQ ID NO: 3280
cauuguggucgcccgguaa

SEQ ID NO: 254815 - RNA, 19 nt, Artificial Sequence
  Description of Artificial Sequence: Synthetic oligonucleotide
  Antisense strand to SEQ ID NO: 254814
uuaccgggcgaccacaaug

SEQ ID NO: 254816 - RNA, 19 nt, Artificial Sequence
  Description of Artificial Sequence: Synthetic oligonucleotide
  Sense strand starting at position 1129 SEQ ID NO: 3280
agcggcgucauuuacaaau

SEQ ID NO: 254817 - RNA, 19 nt, Artificial Sequence
  Description of Artificial Sequence: Synthetic oligonucleotide
  Antisense strand to SEQ ID NO: 254816
auuuguaaaugacgccgcu

SEQ ID NO: 254818 - RNA, 19 nt, Artificial Sequence
  Description of Artificial Sequence: Synthetic oligonucleotide
  Sense strand starting at position 1314 SEQ ID NO: 3280
cugaucuuacaucacgcaa

SEQ ID NO: 254819 - RNA, 19 nt, Artificial Sequence
  Description of Artificial Sequence: Synthetic oligonucleotide
  Antisense strand to SEQ ID NO: 254818
uugcgugauguaagaucag

SEQ ID NO: 254820 - RNA, 19 nt, Artificial Sequence
  Description of Artificial Sequence: Synthetic oligonucleotide
  Sense strand starting at position 1368 SEQ ID NO: 3280
acugauuaaucaccgaauc

SEQ ID NO: 254821 - RNA, 19 nt, Artificial Sequence
  Description of Artificial Sequence: Synthetic oligonucleotide
  Antisense strand to SEQ ID NO: 254820
gauucggugauuaaucagu

SEQ ID NO: 254822 - RNA, 19 nt, Artificial Sequence
  Description of Artificial Sequence: Synthetic oligonucleotide
  Sense strand starting at position 1696 SEQ ID NO: 3280
gaagcuuccuucccgggaa

SEQ ID NO: 254823 - RNA, 19 nt, Artificial Sequence
  Description of Artificial Sequence: Synthetic oligonucleotide
  Antisense strand to SEQ ID NO: 254822
uucccgggaaggaagcuuc

SEQ ID NO: 254824 - RNA, 19 nt, Artificial Sequence
  Description of Artificial Sequence: Synthetic oligonucleotide
  Sense strand starting at position 1846 SEQ ID NO: 3280
uuuagugacucagcagaaa

SEQ ID NO: 254825 - RNA, 19 nt, Artificial Sequence
  Description of Artificial Sequence: Synthetic oligonucleotide
  Antisense strand to SEQ ID NO: 254824
uuucugcugagucacuaaa

SEQ ID NO: 254826 - RNA, 19 nt, Artificial Sequence
  Description of Artificial Sequence: Synthetic oligonucleotide
  Sense strand starting at position 1887 SEQ ID NO: 3280
agucauuaaccguugcgua

SEQ ID NO: 254827 - RNA, 19 nt, Artificial Sequence
  Description of Artificial Sequence: Synthetic oligonucleotide
  Antisense strand to SEQ ID NO: 254826
uacgcaacgguuaaugacu

SEQ ID NO: 254828 - RNA, 19 nt, Artificial Sequence
  Description of Artificial Sequence: Synthetic oligonucleotide
  Sense strand starting at position 2219 SEQ ID NO: 3280
uuaguuugccauuacaaag

SEQ ID NO: 254829 - RNA, 19 nt, Artificial Sequence
  Description of Artificial Sequence: Synthetic oligonucleotide
  Antisense strand to SEQ ID NO: 254828
cuuuguaauggcaaacuaa

SEQ ID NO: 254830 - RNA, 19 nt, Artificial Sequence
  Description of Artificial Sequence: Synthetic oligonucleotide
  Sense strand starting at position 2475 SEQ ID NO: 3280
agugaaugccagcauuacu

SEQ ID NO: 254831 - RNA, 19 nt, Artificial Sequence
  Description of Artificial Sequence: Synthetic oligonucleotide
  Antisense strand to SEQ ID NO: 254830
aguaaugcuggcauucacu

SEQ ID NO: 254832 - RNA, 19 nt, Artificial Sequence
  Description of Artificial Sequence: Synthetic oligonucleotide
  Sense strand starting at position 2496 SEQ ID NO: 3280
cuaccuauuuaugagagua

SEQ ID NO: 254833 - RNA, 19 nt, Artificial Sequence
  Description of Artificial Sequence: Synthetic oligonucleotide
  Antisense strand to SEQ ID NO: 254832
uacucucauaaauagguag

SEQ ID NO: 254834 - RNA, 19 nt, Artificial Sequence
  Description of Artificial Sequence: Synthetic oligonucleotide
  Sense strand starting at position 2498 SEQ ID NO: 3280
accuauuuaugagaguaaa

SEQ ID NO: 254835 - RNA, 19 nt, Artificial Sequence
  Description of Artificial Sequence: Synthetic oligonucleotide
  Antisense strand to SEQ ID NO: 254834
uuuacucucauaaauaggu

SEQ ID NO: 254836 - RNA, 19 nt, Artificial Sequence
  Description of Artificial Sequence: Synthetic oligonucleotide
  Sense strand starting at position 2533 SEQ ID NO: 3280
uuuagaugcuccuuugaag

SEQ ID NO: 254837 - RNA, 19 nt, Artificial Sequence
  Description of Artificial Sequence: Synthetic oligonucleotide
  Antisense strand to SEQ ID NO: 254836
cuucaaaggagcaucuaaa

SEQ ID NO: 254838 - RNA, 19 nt, Artificial Sequence
  Description of Artificial Sequence: Synthetic oligonucleotide
  Sense strand starting at position 2583 SEQ ID NO: 3280
agagaugacuuugcagaac

SEQ ID NO: 254839 - RNA, 19 nt, Artificial Sequence
  Description of Artificial Sequence: Synthetic oligonucleotide
  Antisense strand to SEQ ID NO: 254838
guucugcaaagucaucucu

SEQ ID NO: 254840 - RNA, 19 nt, Artificial Sequence
  Description of Artificial Sequence: Synthetic oligonucleotide
  Sense strand starting at position 2592 SEQ ID NO: 3280
uuugcagaacauugucaau

SEQ ID NO: 254841 - RNA, 19 nt, Artificial Sequence
  Description of Artificial Sequence: Synthetic oligonucleotide
  Antisense strand to SEQ ID NO: 254840
auugacaauguucugcaaa

SEQ ID NO: 254842 - RNA, 19 nt, Artificial Sequence
  Description of Artificial Sequence: Synthetic oligonucleotide
  Sense strand starting at position 2594 SEQ ID NO: 3280
ugcagaacauugucaauaa

SEQ ID NO: 254843 - RNA, 19 nt, Artificial Sequence
  Description of Artificial Sequence: Synthetic oligonucleotide
  Antisense strand to SEQ ID NO: 254842
uuauugacaauguucugca

SEQ ID NO: 254844 - RNA, 19 nt, Artificial Sequence
  Description of Artificial Sequence: Synthetic oligonucleotide
  Sense strand starting at position 2604 SEQ ID NO: 3280
ugucaauaaucuguggauu

SEQ ID NO: 254845 - RNA, 19 nt, Artificial Sequence
  Description of Artificial Sequence: Synthetic oligonucleotide
  Antisense strand to SEQ ID NO: 254844
aauccacagauuauugaca

SEQ ID NO: 254846 - RNA, 19 nt, Artificial Sequence
  Description of Artificial Sequence: Synthetic oligonucleotide
  Sense strand starting at position 2633 SEQ ID NO: 3280
auucuuacucugugauuau

SEQ ID NO: 254847 - RNA, 19 nt, Artificial Sequence
  Description of Artificial Sequence: Synthetic oligonucleotide
  Antisense strand to SEQ ID NO: 254846
auaaucacagaguaagaau

SEQ ID NO: 254848 - RNA, 19 nt, Artificial Sequence
  Description of Artificial Sequence: Synthetic oligonucleotide
  Sense strand starting at position 2948 SEQ ID NO: 3280
aguagagaaguguaugcuu

SEQ ID NO: 254849 - RNA, 19 nt, Artificial Sequence
  Description of Artificial Sequence: Synthetic oligonucleotide
  Antisense strand to SEQ ID NO: 254848
aagcauacacuucucuacu

SEQ ID NO: 254850 - RNA, 19 nt, Artificial Sequence
  Description of Artificial Sequence: Synthetic oligonucleotide
  Sense strand starting at position 2972 SEQ ID NO: 3280
cuucuaaaguuguuacaug

SEQ ID NO: 254851 - RNA, 19 nt, Artificial Sequence
  Description of Artificial Sequence: Synthetic oligonucleotide
  Antisense strand to SEQ ID NO: 254850
cauguaacaacuuuagaag

SEQ ID NO: 254852 - RNA, 19 nt, Artificial Sequence
  Description of Artificial Sequence: Synthetic oligonucleotide
  Sense strand starting at position 3092 SEQ ID NO: 3280
cuuugaaaugaguggcaga

SEQ ID NO: 254853 - RNA, 19 nt, Artificial Sequence
  Description of Artificial Sequence: Synthetic oligonucleotide
  Antisense strand to SEQ ID NO: 254852
ucugccacucauuucaaag

SEQ ID NO: 254854 - RNA, 19 nt, Artificial Sequence
  Description of Artificial Sequence: Synthetic oligonucleotide
  Sense strand starting at position 3097 SEQ ID NO: 3280
aaaugaguggcagaguuua

SEQ ID NO: 254855 - RNA, 19 nt, Artificial Sequence
  Description of Artificial Sequence: Synthetic oligonucleotide
  Antisense strand to SEQ ID NO: 254854
uaaacucugccacucauuu

SEQ ID NO: 254856 - RNA, 19 nt, Artificial Sequence
  Description of Artificial Sequence: Synthetic oligonucleotide
  Sense strand starting at position 3109 SEQ ID NO: 3280
gaguuuaaagaauaugugu

SEQ ID NO: 254857 - RNA, 19 nt, Artificial Sequence
  Description of Artificial Sequence: Synthetic oligonucleotide
  Antisense strand to SEQ ID NO: 254856
acacauauucuuuaaacuc

SEQ ID NO: 254858 - RNA, 19 nt, Artificial Sequence
  Description of Artificial Sequence: Synthetic oligonucleotide
  Sense strand starting at position 3204 SEQ ID NO: 3280
auaaauguuucuuucucga

SEQ ID NO: 254859 - RNA, 19 nt, Artificial Sequence
  Description of Artificial Sequence: Synthetic oligonucleotide
  Antisense strand to SEQ ID NO: 254858
ucgagaaagaaacauuuau

SEQ ID NO: 254860 - RNA, 19 nt, Artificial Sequence
  Description of Artificial Sequence: Synthetic oligonucleotide
  Sense strand starting at position 3235 SEQ ID NO: 3280
cucuguauuguaugacaaa

SEQ ID NO: 254861 - RNA, 19 nt, Artificial Sequence
  Description of Artificial Sequence: Synthetic oligonucleotide
  Antisense strand to SEQ ID NO: 254860
uuugucauacaauacagag

SEQ ID NO: 254862 - RNA, 19 nt, Artificial Sequence
  Description of Artificial Sequence: Synthetic oligonucleotide
  Sense strand starting at position 3309 SEQ ID NO: 3280
acuagaaggucagcuauua

SEQ ID NO: 254863 - RNA, 19 nt, Artificial Sequence
  Description of Artificial Sequence: Synthetic oligonucleotide
  Antisense strand to SEQ ID NO: 254862
uaauagcugaccuucuagu

SEQ ID NO: 254864 - RNA, 19 nt, Artificial Sequence
  Description of Artificial Sequence: Synthetic oligonucleotide
  Sense strand starting at position 3319 SEQ ID NO: 3280
cagcuauuaggagaucugu

SEQ ID NO: 254865 - RNA, 19 nt, Artificial Sequence
  Description of Artificial Sequence: Synthetic oligonucleotide
  Antisense strand to SEQ ID NO: 254864
acagaucuccuaauagcug

SEQ ID NO: 254866 - RNA, 19 nt, Artificial Sequence
  Description of Artificial Sequence: Synthetic oligonucleotide
  Sense strand starting at position 3328 SEQ ID NO: 3280
ggagaucuguauccacuua

SEQ ID NO: 254867 - RNA, 19 nt, Artificial Sequence
  Description of Artificial Sequence: Synthetic oligonucleotide
  Antisense strand to SEQ ID NO: 254866
uaaguggauacagaucucc

SEQ ID NO: 254868 - RNA, 19 nt, Artificial Sequence
  Description of Artificial Sequence: Synthetic oligonucleotide
  Sense strand starting at position 3342 SEQ ID NO: 3280
acuuaacucuuggcaagaa

SEQ ID NO: 254869 - RNA, 19 nt, Artificial Sequence
  Description of Artificial Sequence: Synthetic oligonucleotide
  Antisense strand to SEQ ID NO: 254868
uucuugccaagaguuaagu

SEQ ID NO: 254870 - RNA, 19 nt, Artificial Sequence
  Description of Artificial Sequence: Synthetic oligonucleotide
  Sense strand starting at position 3735 SEQ ID NO: 3280
uagaucaucugguugacuu

SEQ ID NO: 254871 - RNA, 19 nt, Artificial Sequence
  Description of Artificial Sequence: Synthetic oligonucleotide
  Antisense strand to SEQ ID NO: 254870
aagucaaccagaugaucua

SEQ ID NO: 254872 - RNA, 19 nt, Artificial Sequence
  Description of Artificial Sequence: Synthetic oligonucleotide
  Sense strand starting at position 3736 SEQ ID NO: 3280
agaucaucugguugacuuu

SEQ ID NO: 254873 - RNA, 19 nt, Artificial Sequence
  Description of Artificial Sequence: Synthetic oligonucleotide
  Antisense strand to SEQ ID NO: 254872
aaagucaaccagaugaucu

SEQ ID NO: 254874 - RNA, 19 nt, Artificial Sequence
  Description of Artificial Sequence: Synthetic oligonucleotide
  Sense strand starting at position 3795 SEQ ID NO: 3280
ugcacauugugaccagaau

SEQ ID NO: 254875 - RNA, 19 nt, Artificial Sequence
  Description of Artificial Sequence: Synthetic oligonucleotide
  Antisense strand to SEQ ID NO: 254874
auucuggucacaaugugca

SEQ ID NO: 254876 - RNA, 19 nt, Artificial Sequence
  Description of Artificial Sequence: Synthetic oligonucleotide
  Sense strand starting at position 3912 SEQ ID NO: 3280
uauggaagauuaguuacua

SEQ ID NO: 254877 - RNA, 19 nt, Artificial Sequence
  Description of Artificial Sequence: Synthetic oligonucleotide
  Antisense strand to SEQ ID NO: 254876
uaguaacuaaucuuccaua

SEQ ID NO: 254878 - RNA, 19 nt, Artificial Sequence
  Description of Artificial Sequence: Synthetic oligonucleotide
  Sense strand starting at position 3916 SEQ ID NO: 3280
gaagauuaguuacuaaagu

SEQ ID NO: 254879 - RNA, 19 nt, Artificial Sequence
  Description of Artificial Sequence: Synthetic oligonucleotide
  Antisense strand to SEQ ID NO: 254878
acuuuaguaacuaaucuuc

SEQ ID NO: 254880 - RNA, 19 nt, Artificial Sequence
  Description of Artificial Sequence: Synthetic oligonucleotide
  Sense strand starting at position 3958 SEQ ID NO: 3280
guaacaugauaagccuaau

SEQ ID NO: 254881 - RNA, 19 nt, Artificial Sequence
  Description of Artificial Sequence: Synthetic oligonucleotide
  Antisense strand to SEQ ID NO: 254880
auuaggcuuaucauguuac

SEQ ID NO: 254882 - RNA, 19 nt, Artificial Sequence
  Description of Artificial Sequence: Synthetic oligonucleotide
  Sense strand starting at position 9 SEQ ID NO: 3281
uagcuauauuuaggacaug

SEQ ID NO: 254883 - RNA, 19 nt, Artificial Sequence
  Description of Artificial Sequence: Synthetic oligonucleotide
  Antisense strand to SEQ ID NO: 254882
cauguccuaaauauagcua

SEQ ID NO: 254884 - RNA, 19 nt, Artificial Sequence
  Description of Artificial Sequence: Synthetic oligonucleotide
  Sense strand starting at position 10 SEQ ID NO: 3281
agcuauauuuaggacauga

SEQ ID NO: 254885 - RNA, 19 nt, Artificial Sequence
  Description of Artificial Sequence: Synthetic oligonucleotide
  Antisense strand to SEQ ID NO: 254884
ucauguccuaaauauagcu

SEQ ID NO: 254886 - RNA, 19 nt, Artificial Sequence
  Description of Artificial Sequence: Synthetic oligonucleotide
  Sense strand starting at position 46 SEQ ID NO: 3281
ugugcaaacucugcacaau

SEQ ID NO: 254887 - RNA, 19 nt, Artificial Sequence
  Description of Artificial Sequence: Synthetic oligonucleotide
  Antisense strand to SEQ ID NO: 254886
auugugcagaguuugcaca

SEQ ID NO: 254888 - RNA, 19 nt, Artificial Sequence
  Description of Artificial Sequence: Synthetic oligonucleotide
  Sense strand starting at position 47 SEQ ID NO: 3281
gugcaaacucugcacaaua

SEQ ID NO: 254889 - RNA, 19 nt, Artificial Sequence
  Description of Artificial Sequence: Synthetic oligonucleotide
  Antisense strand to SEQ ID NO: 254888
uauugugcagaguuugcac

SEQ ID NO: 254890 - RNA, 19 nt, Artificial Sequence
  Description of Artificial Sequence: Synthetic oligonucleotide
  Sense strand starting at position 85 SEQ ID NO: 3281
cguuaccaacacugagaaa

SEQ ID NO: 254891 - RNA, 19 nt, Artificial Sequence
  Description of Artificial Sequence: Synthetic oligonucleotide
  Antisense strand to SEQ ID NO: 254890
uuucucaguguugguaacg

SEQ ID NO: 254892 - RNA, 19 nt, Artificial Sequence
  Description of Artificial Sequence: Synthetic oligonucleotide
  Sense strand starting at position 104 SEQ ID NO: 3281
ggguguucaaaggaagguu

SEQ ID NO: 254893 - RNA, 19 nt, Artificial Sequence
  Description of Artificial Sequence: Synthetic oligonucleotide
  Antisense strand to SEQ ID NO: 254892
aaccuuccuuugaacaccc

SEQ ID NO: 254894 - RNA, 19 nt, Artificial Sequence
  Description of Artificial Sequence: Synthetic oligonucleotide
  Sense strand starting at position 113 SEQ ID NO: 3281
aaggaagguuauuaaugau

SEQ ID NO: 254895 - RNA, 19 nt, Artificial Sequence
  Description of Artificial Sequence: Synthetic oligonucleotide
  Antisense strand to SEQ ID NO: 254894
aucauuaauaaccuuccuu

SEQ ID NO: 254896 - RNA, 19 nt, Artificial Sequence
  Description of Artificial Sequence: Synthetic oligonucleotide
  Sense strand starting at position 143 SEQ ID NO: 3281
ucuccugccuuucugaaga

SEQ ID NO: 254897 - RNA, 19 nt, Artificial Sequence
  Description of Artificial Sequence: Synthetic oligonucleotide
  Antisense strand to SEQ ID NO: 254896
ucuucagaaaggcaggaga

SEQ ID NO: 254898 - RNA, 19 nt, Artificial Sequence
  Description of Artificial Sequence: Synthetic oligonucleotide
  Sense strand starting at position 183 SEQ ID NO: 3281
uuguuaggguuuccaaacu

SEQ ID NO: 254899 - RNA, 19 nt, Artificial Sequence
  Description of Artificial Sequence: Synthetic oligonucleotide
  Antisense strand to SEQ ID NO: 254898
aguuuggaaacccuaacaa

SEQ ID NO: 254900 - RNA, 19 nt, Artificial Sequence
  Description of Artificial Sequence: Synthetic oligonucleotide
  Sense strand starting at position 199 SEQ ID NO: 3281
acuucuucccaggaagucu

SEQ ID NO: 254901 - RNA, 19 nt, Artificial Sequence
  Description of Artificial Sequence: Synthetic oligonucleotide
  Antisense strand to SEQ ID NO: 254900
agacuuccugggaagaagu

SEQ ID NO: 254902 - RNA, 19 nt, Artificial Sequence
  Description of Artificial Sequence: Synthetic oligonucleotide
  Sense strand starting at position 234 SEQ ID NO: 3281
ggaguugcuguauaauuac

SEQ ID NO: 254903 - RNA, 19 nt, Artificial Sequence
  Description of Artificial Sequence: Synthetic oligonucleotide
  Antisense strand to SEQ ID NO: 254902
guaauuauacagcaacucc

SEQ ID NO: 254904 - RNA, 19 nt, Artificial Sequence
  Description of Artificial Sequence: Synthetic oligonucleotide
  Sense strand starting at position 237 SEQ ID NO: 3281
guugcuguauaauuacuua

SEQ ID NO: 254905 - RNA, 19 nt, Artificial Sequence
  Description of Artificial Sequence: Synthetic oligonucleotide
  Antisense strand to SEQ ID NO: 254904
uaaguaauuauacagcaac

SEQ ID NO: 254906 - RNA, 19 nt, Artificial Sequence
  Description of Artificial Sequence: Synthetic oligonucleotide
  Sense strand starting at position 270 SEQ ID NO: 3281
aggagcuuacgcuaagaau

SEQ ID NO: 254907 - RNA, 19 nt, Artificial Sequence
  Description of Artificial Sequence: Synthetic oligonucleotide
  Antisense strand to SEQ ID NO: 254906
auucuuagcguaagcuccu

SEQ ID NO: 254908 - RNA, 19 nt, Artificial Sequence
  Description of Artificial Sequence: Synthetic oligonucleotide
  Sense strand starting at position 396 SEQ ID NO: 3281
cccaauaugugauccagga

SEQ ID NO: 254909 - RNA, 19 nt, Artificial Sequence
  Description of Artificial Sequence: Synthetic oligonucleotide
  Antisense strand to SEQ ID NO: 254908
uccuggaucacauauuggg

SEQ ID NO: 254910 - RNA, 19 nt, Artificial Sequence
  Description of Artificial Sequence: Synthetic oligonucleotide
  Sense strand starting at position 427 SEQ ID NO: 3281
ugcuuuggcuaauccuaca

SEQ ID NO: 254911 - RNA, 19 nt, Artificial Sequence
  Description of Artificial Sequence: Synthetic oligonucleotide
  Antisense strand to SEQ ID NO: 254910
uguaggauuagccaaagca

SEQ ID NO: 254912 - RNA, 19 nt, Artificial Sequence
  Description of Artificial Sequence: Synthetic oligonucleotide
  Sense strand starting at position 472 SEQ ID NO: 3281
gggcaauuaaguuguccga

SEQ ID NO: 254913 - RNA, 19 nt, Artificial Sequence
  Description of Artificial Sequence: Synthetic oligonucleotide
  Antisense strand to SEQ ID NO: 254912
ucggacaacuuaauugccc

SEQ ID NO: 254914 - RNA, 19 nt, Artificial Sequence
  Description of Artificial Sequence: Synthetic oligonucleotide
  Sense strand starting at position 938 SEQ ID NO: 3281
ucuucucuguuucuguuaa

SEQ ID NO: 254915 - RNA, 19 nt, Artificial Sequence
  Description of Artificial Sequence: Synthetic oligonucleotide
  Antisense strand to SEQ ID NO: 254914
uuaacagaaacagagaaga

SEQ ID NO: 254916 - RNA, 19 nt, Artificial Sequence
  Description of Artificial Sequence: Synthetic oligonucleotide
  Sense strand starting at position 969 SEQ ID NO: 3281
cggacaacuugagagaagu

SEQ ID NO: 254917 - RNA, 19 nt, Artificial Sequence
  Description of Artificial Sequence: Synthetic oligonucleotide
  Antisense strand to SEQ ID NO: 254916
acuucucucaaguuguccg

SEQ ID NO: 254918 - RNA, 19 nt, Artificial Sequence
  Description of Artificial Sequence: Synthetic oligonucleotide
  Sense strand starting at position 1005 SEQ ID NO: 3281
agaaacuuucugcauucga

SEQ ID NO: 254919 - RNA, 19 nt, Artificial Sequence
  Description of Artificial Sequence: Synthetic oligonucleotide
  Antisense strand to SEQ ID NO: 254918
ucgaaugcagaaaguuucu

SEQ ID NO: 254920 - RNA, 19 nt, Artificial Sequence
  Description of Artificial Sequence: Synthetic oligonucleotide
  Sense strand starting at position 1157 SEQ ID NO: 3281
cuuaucuuggcucguaaau

SEQ ID NO: 254921 - RNA, 19 nt, Artificial Sequence
  Description of Artificial Sequence: Synthetic oligonucleotide
  Antisense strand to SEQ ID NO: 254920
auuuacgagccaagauaag

SEQ ID NO: 254922 - RNA, 19 nt, Artificial Sequence
  Description of Artificial Sequence: Synthetic oligonucleotide
  Sense strand starting at position 1166 SEQ ID NO: 3281
gcucguaaaugaucuguau

SEQ ID NO: 254923 - RNA, 19 nt, Artificial Sequence
  Description of Artificial Sequence: Synthetic oligonucleotide
  Antisense strand to SEQ ID NO: 254922
auacagaucauuuacgagc

SEQ ID NO: 254924 - RNA, 19 nt, Artificial Sequence
  Description of Artificial Sequence: Synthetic oligonucleotide
  Sense strand starting at position 1169 SEQ ID NO: 3281
cguaaaugaucuguauggu

SEQ ID NO: 254925 - RNA, 19 nt, Artificial Sequence
  Description of Artificial Sequence: Synthetic oligonucleotide
  Antisense strand to SEQ ID NO: 254924
accauacagaucauuuacg

SEQ ID NO: 254926 - RNA, 19 nt, Artificial Sequence
  Description of Artificial Sequence: Synthetic oligonucleotide
  Sense strand starting at position 1170 SEQ ID NO: 3281
guaaaugaucuguauggug

SEQ ID NO: 254927 - RNA, 19 nt, Artificial Sequence
  Description of Artificial Sequence: Synthetic oligonucleotide
  Antisense strand to SEQ ID NO: 254926
caccauacagaucauuuac

SEQ ID NO: 254928 - RNA, 19 nt, Artificial Sequence
  Description of Artificial Sequence: Synthetic oligonucleotide
  Sense strand starting at position 1172 SEQ ID NO: 3281
aaaugaucuguauggugag

SEQ ID NO: 254929 - RNA, 19 nt, Artificial Sequence
  Description of Artificial Sequence: Synthetic oligonucleotide
  Antisense strand to SEQ ID NO: 254928
cucaccauacagaucauuu

SEQ ID NO: 254930 - RNA, 19 nt, Artificial Sequence
  Description of Artificial Sequence: Synthetic oligonucleotide
  Sense strand starting at position 1385 SEQ ID NO: 3281
ccucguucucccgcaaagu

SEQ ID NO: 254931 - RNA, 19 nt, Artificial Sequence
  Description of Artificial Sequence: Synthetic oligonucleotide
  Antisense strand to SEQ ID NO: 254930
acuuugcgggagaacgagg

SEQ ID NO: 254932 - RNA, 19 nt, Artificial Sequence
  Description of Artificial Sequence: Synthetic oligonucleotide
  Sense strand starting at position 1400 SEQ ID NO: 3281
aagugcuuuccaggagcau

SEQ ID NO: 254933 - RNA, 19 nt, Artificial Sequence
  Description of Artificial Sequence: Synthetic oligonucleotide
  Antisense strand to SEQ ID NO: 254932
augcuccuggaaagcacuu

SEQ ID NO: 254934 - RNA, 19 nt, Artificial Sequence
  Description of Artificial Sequence: Synthetic oligonucleotide
  Sense strand starting at position 1401 SEQ ID NO: 3281
agugcuuuccaggagcauc

SEQ ID NO: 254935 - RNA, 19 nt, Artificial Sequence
  Description of Artificial Sequence: Synthetic oligonucleotide
  Antisense strand to SEQ ID NO: 254934
gaugcuccuggaaagcacu

SEQ ID NO: 254936 - RNA, 19 nt, Artificial Sequence
  Description of Artificial Sequence: Synthetic oligonucleotide
  Sense strand starting at position 2166 SEQ ID NO: 3281
ggcgcaugcacuccuaagu

SEQ ID NO: 254937 - RNA, 19 nt, Artificial Sequence
  Description of Artificial Sequence: Synthetic oligonucleotide
  Antisense strand to SEQ ID NO: 254936
acuuaggagugcaugcgcc

SEQ ID NO: 254938 - RNA, 19 nt, Artificial Sequence
  Description of Artificial Sequence: Synthetic oligonucleotide
  Sense strand starting at position 2277 SEQ ID NO: 3281
ccuuuacgcgugcauacaa

SEQ ID NO: 254939 - RNA, 19 nt, Artificial Sequence
  Description of Artificial Sequence: Synthetic oligonucleotide
  Antisense strand to SEQ ID NO: 254938
uuguaugcacgcguaaagg

SEQ ID NO: 254940 - RNA, 19 nt, Artificial Sequence
  Description of Artificial Sequence: Synthetic oligonucleotide
  Sense strand starting at position 2602 SEQ ID NO: 3281
gauggagaucugugaccuu

SEQ ID NO: 254941 - RNA, 19 nt, Artificial Sequence
  Description of Artificial Sequence: Synthetic oligonucleotide
  Antisense strand to SEQ ID NO: 254940
aaggucacagaucuccauc

SEQ ID NO: 254942 - RNA, 19 nt, Artificial Sequence
  Description of Artificial Sequence: Synthetic oligonucleotide
  Sense strand starting at position 2789 SEQ ID NO: 3281
ggugucauggccagaucgu

SEQ ID NO: 254943 - RNA, 19 nt, Artificial Sequence
  Description of Artificial Sequence: Synthetic oligonucleotide
  Antisense strand to SEQ ID NO: 254942
acgaucuggccaugacacc

SEQ ID NO: 254944 - RNA, 19 nt, Artificial Sequence
  Description of Artificial Sequence: Synthetic oligonucleotide
  Sense strand starting at position 2853 SEQ ID NO: 3281
gaacgucuucuccaugguu

SEQ ID NO: 254945 - RNA, 19 nt, Artificial Sequence
  Description of Artificial Sequence: Synthetic oligonucleotide
  Antisense strand to SEQ ID NO: 254944
aaccauggagaagacguuc

SEQ ID NO: 254946 - RNA, 19 nt, Artificial Sequence
  Description of Artificial Sequence: Synthetic oligonucleotide
  Sense strand starting at position 3073 SEQ ID NO: 3281
aaguuauuucccgguggug

SEQ ID NO: 254947 - RNA, 19 nt, Artificial Sequence
  Description of Artificial Sequence: Synthetic oligonucleotide
  Antisense strand to SEQ ID NO: 254946
caccaccgggaaauaacuu

SEQ ID NO: 254948 - RNA, 19 nt, Artificial Sequence
  Description of Artificial Sequence: Synthetic oligonucleotide
  Sense strand starting at position 3089 SEQ ID NO: 3281
gugggaacccugugugaga

SEQ ID NO: 254949 - RNA, 19 nt, Artificial Sequence
  Description of Artificial Sequence: Synthetic oligonucleotide
  Antisense strand to SEQ ID NO: 254948
ucucacacaggguucccac

SEQ ID NO: 254950 - RNA, 19 nt, Artificial Sequence
  Description of Artificial Sequence: Synthetic oligonucleotide
  Sense strand starting at position 3090 SEQ ID NO: 3281
ugggaacccugugugagaa

SEQ ID NO: 254951 - RNA, 19 nt, Artificial Sequence
  Description of Artificial Sequence: Synthetic oligonucleotide
  Antisense strand to SEQ ID NO: 254950
uucucacacaggguuccca

SEQ ID NO: 254952 - RNA, 19 nt, Artificial Sequence
  Description of Artificial Sequence: Synthetic oligonucleotide
  Sense strand starting at position 3187 SEQ ID NO: 3281
uccggauccugguccaaga

SEQ ID NO: 254953 - RNA, 19 nt, Artificial Sequence
  Description of Artificial Sequence: Synthetic oligonucleotide
  Antisense strand to SEQ ID NO: 254952
ucuuggaccaggauccgga

SEQ ID NO: 254954 - RNA, 19 nt, Artificial Sequence
  Description of Artificial Sequence: Synthetic oligonucleotide
  Sense strand starting at position 3581 SEQ ID NO: 3281
gggaaauccagaggucugu

SEQ ID NO: 254955 - RNA, 19 nt, Artificial Sequence
  Description of Artificial Sequence: Synthetic oligonucleotide
  Antisense strand to SEQ ID NO: 254954
acagaccucuggauuuccc

SEQ ID NO: 254956 - RNA, 19 nt, Artificial Sequence
  Description of Artificial Sequence: Synthetic oligonucleotide
  Sense strand starting at position 3611 SEQ ID NO: 3281
agucacugguucucuauuu

SEQ ID NO: 254957 - RNA, 19 nt, Artificial Sequence
  Description of Artificial Sequence: Synthetic oligonucleotide
  Antisense strand to SEQ ID NO: 254956
aaauagagaaccagugacu

SEQ ID NO: 254958 - RNA, 19 nt, Artificial Sequence
  Description of Artificial Sequence: Synthetic oligonucleotide
  Sense strand starting at position 3770 SEQ ID NO: 3281
agucuucgcgggugauuua

SEQ ID NO: 254959 - RNA, 19 nt, Artificial Sequence
  Description of Artificial Sequence: Synthetic oligonucleotide
  Antisense strand to SEQ ID NO: 254958
uaaaucacccgcgaagacu

SEQ ID NO: 254960 - RNA, 19 nt, Artificial Sequence
  Description of Artificial Sequence: Synthetic oligonucleotide
  Sense strand starting at position 3771 SEQ ID NO: 3281
gucuucgcgggugauuuau

SEQ ID NO: 254961 - RNA, 19 nt, Artificial Sequence
  Description of Artificial Sequence: Synthetic oligonucleotide
  Antisense strand to SEQ ID NO: 254960
auaaaucacccgcgaagac

SEQ ID NO: 254962 - RNA, 19 nt, Artificial Sequence
  Description of Artificial Sequence: Synthetic oligonucleotide
  Sense strand starting at position 123 SEQ ID NO: 3282
auaagaguaaugggcacaa

SEQ ID NO: 254963 - RNA, 19 nt, Artificial Sequence
  Description of Artificial Sequence: Synthetic oligonucleotide
  Antisense strand to SEQ ID NO: 254962
uugugcccauuacucuuau

SEQ ID NO: 254964 - RNA, 19 nt, Artificial Sequence
  Description of Artificial Sequence: Synthetic oligonucleotide
  Sense strand starting at position 127 SEQ ID NO: 3282
gaguaaugggcacaacuuu

SEQ ID NO: 254965 - RNA, 19 nt, Artificial Sequence
  Description of Artificial Sequence: Synthetic oligonucleotide
  Antisense strand to SEQ ID NO: 254964
aaaguugugcccauuacuc

SEQ ID NO: 254966 - RNA, 19 nt, Artificial Sequence
  Description of Artificial Sequence: Synthetic oligonucleotide
  Sense strand starting at position 186 SEQ ID NO: 3282
ugugcucagaggcaugauu

SEQ ID NO: 254967 - RNA, 19 nt, Artificial Sequence
  Description of Artificial Sequence: Synthetic oligonucleotide
  Antisense strand to SEQ ID NO: 254966
aaucaugccucugagcaca

SEQ ID NO: 254968 - RNA, 19 nt, Artificial Sequence
  Description of Artificial Sequence: Synthetic oligonucleotide
  Sense strand starting at position 369 SEQ ID NO: 3282
cgcauaaccguagauauua

SEQ ID NO: 254969 - RNA, 19 nt, Artificial Sequence
  Description of Artificial Sequence: Synthetic oligonucleotide
  Antisense strand to SEQ ID NO: 254968
uaauaucuacgguuaugcg

SEQ ID NO: 254970 - RNA, 19 nt, Artificial Sequence
  Description of Artificial Sequence: Synthetic oligonucleotide
  Sense strand starting at position 385 SEQ ID NO: 3282
uuaugacuccuguaguaac

SEQ ID NO: 254971 - RNA, 19 nt, Artificial Sequence
  Description of Artificial Sequence: Synthetic oligonucleotide
  Antisense strand to SEQ ID NO: 254970
guuacuacaggagucauaa

SEQ ID NO: 254972 - RNA, 19 nt, Artificial Sequence
  Description of Artificial Sequence: Synthetic oligonucleotide
  Sense strand starting at position 421 SEQ ID NO: 3282
ggcaucaggcccuauacua

SEQ ID NO: 254973 - RNA, 19 nt, Artificial Sequence
  Description of Artificial Sequence: Synthetic oligonucleotide
  Antisense strand to SEQ ID NO: 254972
uaguauagggccugaugcc

SEQ ID NO: 254974 - RNA, 19 nt, Artificial Sequence
  Description of Artificial Sequence: Synthetic oligonucleotide
  Sense strand starting at position 535 SEQ ID NO: 3282
ucucuaauggcauaaugca

SEQ ID NO: 254975 - RNA, 19 nt, Artificial Sequence
  Description of Artificial Sequence: Synthetic oligonucleotide
  Antisense strand to SEQ ID NO: 254974
ugcauuaugccauuagaga

SEQ ID NO: 254976 - RNA, 19 nt, Artificial Sequence
  Description of Artificial Sequence: Synthetic oligonucleotide
  Sense strand starting at position 542 SEQ ID NO: 3282
uggcauaaugcagauaauu

SEQ ID NO: 254977 - RNA, 19 nt, Artificial Sequence
  Description of Artificial Sequence: Synthetic oligonucleotide
  Antisense strand to SEQ ID NO: 254976
aauuaucugcauuaugcca

SEQ ID NO: 254978 - RNA, 19 nt, Artificial Sequence
  Description of Artificial Sequence: Synthetic oligonucleotide
  Sense strand starting at position 550 SEQ ID NO: 3282
ugcagauaauuugaggaua

SEQ ID NO: 254979 - RNA, 19 nt, Artificial Sequence
  Description of Artificial Sequence: Synthetic oligonucleotide
  Antisense strand to SEQ ID NO: 254978
uauccucaaauuaucugca

SEQ ID NO: 254980 - RNA, 19 nt, Artificial Sequence
  Description of Artificial Sequence: Synthetic oligonucleotide
  Sense strand starting at position 572 SEQ ID NO: 3282
ugcagauaaaucuggagua

SEQ ID NO: 254981 - RNA, 19 nt, Artificial Sequence
  Description of Artificial Sequence: Synthetic oligonucleotide
  Antisense strand to SEQ ID NO: 254980
uacuccagauuuaucugca

SEQ ID NO: 254982 - RNA, 19 nt, Artificial Sequence
  Description of Artificial Sequence: Synthetic oligonucleotide
  Sense strand starting at position 638 SEQ ID NO: 3282
uuacgcgagcucucaaagu

SEQ ID NO: 254983 - RNA, 19 nt, Artificial Sequence
  Description of Artificial Sequence: Synthetic oligonucleotide
  Antisense strand to SEQ ID NO: 254982
acuuugagagcucgcguaa

SEQ ID NO: 254984 - RNA, 19 nt, Artificial Sequence
  Description of Artificial Sequence: Synthetic oligonucleotide
  Sense strand starting at position 729 SEQ ID NO: 3282
cuucucugguggucagaau

SEQ ID NO: 254985 - RNA, 19 nt, Artificial Sequence
  Description of Artificial Sequence: Synthetic oligonucleotide
  Antisense strand to SEQ ID NO: 254984
auucugaccaccagagaag

SEQ ID NO: 254986 - RNA, 19 nt, Artificial Sequence
  Description of Artificial Sequence: Synthetic oligonucleotide
  Sense strand starting at position 730 SEQ ID NO: 3282
uucucugguggucagaaua

SEQ ID NO: 254987 - RNA, 19 nt, Artificial Sequence
  Description of Artificial Sequence: Synthetic oligonucleotide
  Antisense strand to SEQ ID NO: 254986
uauucugaccaccagagaa

SEQ ID NO: 254988 - RNA, 19 nt, Artificial Sequence
  Description of Artificial Sequence: Synthetic oligonucleotide
  Sense strand starting at position 844 SEQ ID NO: 3282
gagagcauuuauucgccua

SEQ ID NO: 254989 - RNA, 19 nt, Artificial Sequence
  Description of Artificial Sequence: Synthetic oligonucleotide
  Antisense strand to SEQ ID NO: 254988
uaggcgaauaaaugcucuc

SEQ ID NO: 254990 - RNA, 19 nt, Artificial Sequence
  Description of Artificial Sequence: Synthetic oligonucleotide
  Sense strand starting at position 846 SEQ ID NO: 3282
gagcauuuauucgccuauc

SEQ ID NO: 254991 - RNA, 19 nt, Artificial Sequence
  Description of Artificial Sequence: Synthetic oligonucleotide
  Antisense strand to SEQ ID NO: 254990
gauaggcgaauaaaugcuc

SEQ ID NO: 254992 - RNA, 19 nt, Artificial Sequence
  Description of Artificial Sequence: Synthetic oligonucleotide
  Sense strand starting at position 847 SEQ ID NO: 3282
agcauuuauucgccuaucu

SEQ ID NO: 254993 - RNA, 19 nt, Artificial Sequence
  Description of Artificial Sequence: Synthetic oligonucleotide
  Antisense strand to SEQ ID NO: 254992
agauaggcgaauaaaugcu

SEQ ID NO: 254994 - RNA, 19 nt, Artificial Sequence
  Description of Artificial Sequence: Synthetic oligonucleotide
  Sense strand starting at position 1272 SEQ ID NO: 3282
agcccaaagugaucauaau

SEQ ID NO: 254995 - RNA, 19 nt, Artificial Sequence
  Description of Artificial Sequence: Synthetic oligonucleotide
  Antisense strand to SEQ ID NO: 254994
auuaugaucacuuugggcu

SEQ ID NO: 254996 - RNA, 19 nt, Artificial Sequence
  Description of Artificial Sequence: Synthetic oligonucleotide
  Sense strand starting at position 1273 SEQ ID NO: 3282
gcccaaagugaucauaauc

SEQ ID NO: 254997 - RNA, 19 nt, Artificial Sequence
  Description of Artificial Sequence: Synthetic oligonucleotide
  Antisense strand to SEQ ID NO: 254996
gauuaugaucacuuugggc

SEQ ID NO: 254998 - RNA, 19 nt, Artificial Sequence
  Description of Artificial Sequence: Synthetic oligonucleotide
  Sense strand starting at position 1394 SEQ ID NO: 3282
ggugguuacugaucaccaa

SEQ ID NO: 254999 - RNA, 19 nt, Artificial Sequence
  Description of Artificial Sequence: Synthetic oligonucleotide
  Antisense strand to SEQ ID NO: 254998
uuggugaucaguaaccacc

SEQ ID NO: 255000 - RNA, 19 nt, Artificial Sequence
  Description of Artificial Sequence: Synthetic oligonucleotide
  Sense strand starting at position 1760 SEQ ID NO: 3282
gcagcuugccuggagaaag

SEQ ID NO: 255001 - RNA, 19 nt, Artificial Sequence
  Description of Artificial Sequence: Synthetic oligonucleotide
  Antisense strand to SEQ ID NO: 255000
cuuucuccaggcaagcugc

SEQ ID NO: 255002 - RNA, 19 nt, Artificial Sequence
  Description of Artificial Sequence: Synthetic oligonucleotide
  Sense strand starting at position 2096 SEQ ID NO: 3282
gcacuucuccgaggacaga

SEQ ID NO: 255003 - RNA, 19 nt, Artificial Sequence
  Description of Artificial Sequence: Synthetic oligonucleotide
  Antisense strand to SEQ ID NO: 255002
ucuguccucggagaagugc

SEQ ID NO: 255004 - RNA, 19 nt, Artificial Sequence
  Description of Artificial Sequence: Synthetic oligonucleotide
  Sense strand starting at position 2309 SEQ ID NO: 3282
cgagaacucucgaggagag

SEQ ID NO: 255005 - RNA, 19 nt, Artificial Sequence
  Description of Artificial Sequence: Synthetic oligonucleotide
  Antisense strand to SEQ ID NO: 255004
cucuccucgagaguucucg

SEQ ID NO: 255006 - RNA, 19 nt, Artificial Sequence
  Description of Artificial Sequence: Synthetic oligonucleotide
  Sense strand starting at position 3207 SEQ ID NO: 3282
gcggguauuuccucuggaa

SEQ ID NO: 255007 - RNA, 19 nt, Artificial Sequence
  Description of Artificial Sequence: Synthetic oligonucleotide
  Antisense strand to SEQ ID NO: 255006
uuccagaggaaauacccgc

SEQ ID NO: 255008 - RNA, 19 nt, Artificial Sequence
  Description of Artificial Sequence: Synthetic oligonucleotide
  Sense strand starting at position 3265 SEQ ID NO: 3282
cuggacuccuuaucaguua

SEQ ID NO: 255009 - RNA, 19 nt, Artificial Sequence
  Description of Artificial Sequence: Synthetic oligonucleotide
  Antisense strand to SEQ ID NO: 255008
uaacugauaaggaguccag

SEQ ID NO: 255010 - RNA, 19 nt, Artificial Sequence
  Description of Artificial Sequence: Synthetic oligonucleotide
  Sense strand starting at position 3287 SEQ ID NO: 3282
ccacgaacuccuuaucagu

SEQ ID NO: 255011 - RNA, 19 nt, Artificial Sequence
  Description of Artificial Sequence: Synthetic oligonucleotide
  Antisense strand to SEQ ID NO: 255010
acugauaaggaguucgugg

SEQ ID NO: 255012 - RNA, 19 nt, Artificial Sequence
  Description of Artificial Sequence: Synthetic oligonucleotide
  Sense strand starting at position 3305 SEQ ID NO: 3282
uagggacugugaucucuua

SEQ ID NO: 255013 - RNA, 19 nt, Artificial Sequence
  Description of Artificial Sequence: Synthetic oligonucleotide
  Antisense strand to SEQ ID NO: 255012
uaagagaucacagucccua

SEQ ID NO: 255014 - RNA, 19 nt, Artificial Sequence
  Description of Artificial Sequence: Synthetic oligonucleotide
  Sense strand starting at position 3363 SEQ ID NO: 3282
ggucucauuaaauaugugu

SEQ ID NO: 255015 - RNA, 19 nt, Artificial Sequence
  Description of Artificial Sequence: Synthetic oligonucleotide
  Antisense strand to SEQ ID NO: 255014
acacauauuuaaugagacc

SEQ ID NO: 255016 - RNA, 19 nt, Artificial Sequence
  Description of Artificial Sequence: Synthetic oligonucleotide
  Sense strand starting at position 3411 SEQ ID NO: 3282
gcucaccucuccuuugaga

SEQ ID NO: 255017 - RNA, 19 nt, Artificial Sequence
  Description of Artificial Sequence: Synthetic oligonucleotide
  Antisense strand to SEQ ID NO: 255016
ucucaaaggagaggugagc

SEQ ID NO: 255018 - RNA, 19 nt, Artificial Sequence
  Description of Artificial Sequence: Synthetic oligonucleotide
  Sense strand starting at position 3413 SEQ ID NO: 3282
ucaccucuccuuugagaga

SEQ ID NO: 255019 - RNA, 19 nt, Artificial Sequence
  Description of Artificial Sequence: Synthetic oligonucleotide
  Antisense strand to SEQ ID NO: 255018
ucucucaaaggagagguga

SEQ ID NO: 255020 - RNA, 19 nt, Artificial Sequence
  Description of Artificial Sequence: Synthetic oligonucleotide
  Sense strand starting at position 3474 SEQ ID NO: 3282
aggugaauugauugacucu

SEQ ID NO: 255021 - RNA, 19 nt, Artificial Sequence
  Description of Artificial Sequence: Synthetic oligonucleotide
  Antisense strand to SEQ ID NO: 255020
agagucaaucaauucaccu

SEQ ID NO: 255022 - RNA, 19 nt, Artificial Sequence
  Description of Artificial Sequence: Synthetic oligonucleotide
  Sense strand starting at position 3480 SEQ ID NO: 3282
auugauugacucuggguua

SEQ ID NO: 255023 - RNA, 19 nt, Artificial Sequence
  Description of Artificial Sequence: Synthetic oligonucleotide
  Antisense strand to SEQ ID NO: 255022
uaacccagagucaaucaau

SEQ ID NO: 255024 - RNA, 19 nt, Artificial Sequence
  Description of Artificial Sequence: Synthetic oligonucleotide
  Sense strand starting at position 3483 SEQ ID NO: 3282
gauugacucuggguuauau

SEQ ID NO: 255025 - RNA, 19 nt, Artificial Sequence
  Description of Artificial Sequence: Synthetic oligonucleotide
  Antisense strand to SEQ ID NO: 255024
auauaacccagagucaauc

SEQ ID NO: 255026 - RNA, 19 nt, Artificial Sequence
  Description of Artificial Sequence: Synthetic oligonucleotide
  Sense strand starting at position 3485 SEQ ID NO: 3282
uugacucuggguuauauua

SEQ ID NO: 255027 - RNA, 19 nt, Artificial Sequence
  Description of Artificial Sequence: Synthetic oligonucleotide
  Antisense strand to SEQ ID NO: 255026
uaauauaacccagagucaa

SEQ ID NO: 255028 - RNA, 19 nt, Artificial Sequence
  Description of Artificial Sequence: Synthetic oligonucleotide
  Sense strand starting at position 3492 SEQ ID NO: 3282
uggguuauauuacugagca

SEQ ID NO: 255029 - RNA, 19 nt, Artificial Sequence
  Description of Artificial Sequence: Synthetic oligonucleotide
  Antisense strand to SEQ ID NO: 255028
ugcucaguaauauaaccca

SEQ ID NO: 255030 - RNA, 19 nt, Artificial Sequence
  Description of Artificial Sequence: Synthetic oligonucleotide
  Sense strand starting at position 3500 SEQ ID NO: 3282
auuacugagcacugggaau

SEQ ID NO: 255031 - RNA, 19 nt, Artificial Sequence
  Description of Artificial Sequence: Synthetic oligonucleotide
  Antisense strand to SEQ ID NO: 255030
auucccagugcucaguaau

SEQ ID NO: 255032 - RNA, 19 nt, Artificial Sequence
  Description of Artificial Sequence: Synthetic oligonucleotide
  Sense strand starting at position 3554 SEQ ID NO: 3282
auacauauccagugccaua

SEQ ID NO: 255033 - RNA, 19 nt, Artificial Sequence
  Description of Artificial Sequence: Synthetic oligonucleotide
  Antisense strand to SEQ ID NO: 255032
uauggcacuggauauguau

SEQ ID NO: 255034 - RNA, 19 nt, Artificial Sequence
  Description of Artificial Sequence: Synthetic oligonucleotide
  Sense strand starting at position 3643 SEQ ID NO: 3282
aaaguuuaauuugggaaga

SEQ ID NO: 255035 - RNA, 19 nt, Artificial Sequence
  Description of Artificial Sequence: Synthetic oligonucleotide
  Antisense strand to SEQ ID NO: 255034
ucuucccaaauuaaacuuu

SEQ ID NO: 255036 - RNA, 19 nt, Artificial Sequence
  Description of Artificial Sequence: Synthetic oligonucleotide
  Sense strand starting at position 3644 SEQ ID NO: 3282
aaguuuaauuugggaagac

SEQ ID NO: 255037 - RNA, 19 nt, Artificial Sequence
  Description of Artificial Sequence: Synthetic oligonucleotide
  Antisense strand to SEQ ID NO: 255036
gucuucccaaauuaaacuu

SEQ ID NO: 255038 - RNA, 19 nt, Artificial Sequence
  Description of Artificial Sequence: Synthetic oligonucleotide
  Sense strand starting at position 3645 SEQ ID NO: 3282
aguuuaauuugggaagaca

SEQ ID NO: 255039 - RNA, 19 nt, Artificial Sequence
  Description of Artificial Sequence: Synthetic oligonucleotide
  Antisense strand to SEQ ID NO: 255038
ugucuucccaaauuaaacu

SEQ ID NO: 255040 - RNA, 19 nt, Artificial Sequence
  Description of Artificial Sequence: Synthetic oligonucleotide
  Sense strand starting at position 3697 SEQ ID NO: 3282
agggauugagggugucaug

SEQ ID NO: 255041 - RNA, 19 nt, Artificial Sequence
  Description of Artificial Sequence: Synthetic oligonucleotide
  Antisense strand to SEQ ID NO: 255040
caugacacccucaaucccu

SEQ ID NO: 255042 - RNA, 19 nt, Artificial Sequence
  Description of Artificial Sequence: Synthetic oligonucleotide
  Sense strand starting at position 197 SEQ ID NO: 3283
caagacaaggcuugcgauu

SEQ ID NO: 255043 - RNA, 19 nt, Artificial Sequence
  Description of Artificial Sequence: Synthetic oligonucleotide
  Antisense strand to SEQ ID NO: 255042
aaucgcaagccuugucuug

SEQ ID NO: 255044 - RNA, 19 nt, Artificial Sequence
  Description of Artificial Sequence: Synthetic oligonucleotide
  Sense strand starting at position 261 SEQ ID NO: 3283
uggucaaaugcauacauaa

SEQ ID NO: 255045 - RNA, 19 nt, Artificial Sequence
  Description of Artificial Sequence: Synthetic oligonucleotide
  Antisense strand to SEQ ID NO: 255044
uuauguaugcauuugacca

SEQ ID NO: 255046 - RNA, 19 nt, Artificial Sequence
  Description of Artificial Sequence: Synthetic oligonucleotide
  Sense strand starting at position 298 SEQ ID NO: 3283
gggaguuauacucaagcua

SEQ ID NO: 255047 - RNA, 19 nt, Artificial Sequence
  Description of Artificial Sequence: Synthetic oligonucleotide
  Antisense strand to SEQ ID NO: 255046
uagcuugaguauaacuccc

SEQ ID NO: 255048 - RNA, 19 nt, Artificial Sequence
  Description of Artificial Sequence: Synthetic oligonucleotide
  Sense strand starting at position 342 SEQ ID NO: 3283
agccaaagguccuuuaaau

SEQ ID NO: 255049 - RNA, 19 nt, Artificial Sequence
  Description of Artificial Sequence: Synthetic oligonucleotide
  Antisense strand to SEQ ID NO: 255048
auuuaaaggaccuuuggcu

SEQ ID NO: 255050 - RNA, 19 nt, Artificial Sequence
  Description of Artificial Sequence: Synthetic oligonucleotide
  Sense strand starting at position 432 SEQ ID NO: 3283
ugcugagcucuugggauac

SEQ ID NO: 255051 - RNA, 19 nt, Artificial Sequence
  Description of Artificial Sequence: Synthetic oligonucleotide
  Antisense strand to SEQ ID NO: 255050
guaucccaagagcucagca

SEQ ID NO: 255052 - RNA, 19 nt, Artificial Sequence
  Description of Artificial Sequence: Synthetic oligonucleotide
  Sense strand starting at position 502 SEQ ID NO: 3283
augauaagguauccugacu

SEQ ID NO: 255053 - RNA, 19 nt, Artificial Sequence
  Description of Artificial Sequence: Synthetic oligonucleotide
  Antisense strand to SEQ ID NO: 255052
agucaggauaccuuaucau

SEQ ID NO: 255054 - RNA, 19 nt, Artificial Sequence
  Description of Artificial Sequence: Synthetic oligonucleotide
  Sense strand starting at position 507 SEQ ID NO: 3283
aagguauccugacugccau

SEQ ID NO: 255055 - RNA, 19 nt, Artificial Sequence
  Description of Artificial Sequence: Synthetic oligonucleotide
  Antisense strand to SEQ ID NO: 255054
auggcagucaggauaccuu

SEQ ID NO: 255056 - RNA, 19 nt, Artificial Sequence
  Description of Artificial Sequence: Synthetic oligonucleotide
  Sense strand starting at position 625 SEQ ID NO: 3283
gugggcuuccaggaaugaa

SEQ ID NO: 255057 - RNA, 19 nt, Artificial Sequence
  Description of Artificial Sequence: Synthetic oligonucleotide
  Antisense strand to SEQ ID NO: 255056
uucauuccuggaagcccac

SEQ ID NO: 255058 - RNA, 19 nt, Artificial Sequence
  Description of Artificial Sequence: Synthetic oligonucleotide
  Sense strand starting at position 628 SEQ ID NO: 3283
ggcuuccaggaaugaauaa

SEQ ID NO: 255059 - RNA, 19 nt, Artificial Sequence
  Description of Artificial Sequence: Synthetic oligonucleotide
  Antisense strand to SEQ ID NO: 255058
uuauucauuccuggaagcc

SEQ ID NO: 255060 - RNA, 19 nt, Artificial Sequence
  Description of Artificial Sequence: Synthetic oligonucleotide
  Sense strand starting at position 857 SEQ ID NO: 3283
agguguuuccugugggaag

SEQ ID NO: 255061 - RNA, 19 nt, Artificial Sequence
  Description of Artificial Sequence: Synthetic oligonucleotide
  Antisense strand to SEQ ID NO: 255060
cuucccacaggaaacaccu

SEQ ID NO: 255062 - RNA, 19 nt, Artificial Sequence
  Description of Artificial Sequence: Synthetic oligonucleotide
  Sense strand starting at position 859 SEQ ID NO: 3283
guguuuccugugggaagaa

SEQ ID NO: 255063 - RNA, 19 nt, Artificial Sequence
  Description of Artificial Sequence: Synthetic oligonucleotide
  Antisense strand to SEQ ID NO: 255062
uucuucccacaggaaacac

SEQ ID NO: 255064 - RNA, 19 nt, Artificial Sequence
  Description of Artificial Sequence: Synthetic oligonucleotide
  Sense strand starting at position 928 SEQ ID NO: 3283
ggcagagacuuucuuugca

SEQ ID NO: 255065 - RNA, 19 nt, Artificial Sequence
  Description of Artificial Sequence: Synthetic oligonucleotide
  Antisense strand to SEQ ID NO: 255064
ugcaaagaaagucucugcc

SEQ ID NO: 255066 - RNA, 19 nt, Artificial Sequence
  Description of Artificial Sequence: Synthetic oligonucleotide
  Sense strand starting at position 1088 SEQ ID NO: 3283
ggaugucauguacauucuu

SEQ ID NO: 255067 - RNA, 19 nt, Artificial Sequence
  Description of Artificial Sequence: Synthetic oligonucleotide
  Antisense strand to SEQ ID NO: 255066
aagaauguacaugacaucc

SEQ ID NO: 255068 - RNA, 19 nt, Artificial Sequence
  Description of Artificial Sequence: Synthetic oligonucleotide
  Sense strand starting at position 1101 SEQ ID NO: 3283
auucuuuagccuuaaggua

SEQ ID NO: 255069 - RNA, 19 nt, Artificial Sequence
  Description of Artificial Sequence: Synthetic oligonucleotide
  Antisense strand to SEQ ID NO: 255068
uaccuuaaggcuaaagaau

SEQ ID NO: 255070 - RNA, 19 nt, Artificial Sequence
  Description of Artificial Sequence: Synthetic oligonucleotide
  Sense strand starting at position 1114 SEQ ID NO: 3283
aagguagaauccuugcgga

SEQ ID NO: 255071 - RNA, 19 nt, Artificial Sequence
  Description of Artificial Sequence: Synthetic oligonucleotide
  Antisense strand to SEQ ID NO: 255070
uccgcaaggauucuaccuu

SEQ ID NO: 255072 - RNA, 19 nt, Artificial Sequence
  Description of Artificial Sequence: Synthetic oligonucleotide
  Sense strand starting at position 1241 SEQ ID NO: 3283
aggaaacuuuaaugaagac

SEQ ID NO: 255073 - RNA, 19 nt, Artificial Sequence
  Description of Artificial Sequence: Synthetic oligonucleotide
  Antisense strand to SEQ ID NO: 255072
gucuucauuaaaguuuccu

SEQ ID NO: 255074 - RNA, 19 nt, Artificial Sequence
  Description of Artificial Sequence: Synthetic oligonucleotide
  Sense strand starting at position 1344 SEQ ID NO: 3283
uugagugacaucgauggau

SEQ ID NO: 255075 - RNA, 19 nt, Artificial Sequence
  Description of Artificial Sequence: Synthetic oligonucleotide
  Antisense strand to SEQ ID NO: 255074
auccaucgaugucacucaa

SEQ ID NO: 255076 - RNA, 19 nt, Artificial Sequence
  Description of Artificial Sequence: Synthetic oligonucleotide
  Sense strand starting at position 2193 SEQ ID NO: 3283
gccaggugucagggacgau

SEQ ID NO: 255077 - RNA, 19 nt, Artificial Sequence
  Description of Artificial Sequence: Synthetic oligonucleotide
  Antisense strand to SEQ ID NO: 255076
aucgucccugacaccuggc

SEQ ID NO: 255078 - RNA, 19 nt, Artificial Sequence
  Description of Artificial Sequence: Synthetic oligonucleotide
  Sense strand starting at position 2653 SEQ ID NO: 3283
cguguucuccgugcuagca

SEQ ID NO: 255079 - RNA, 19 nt, Artificial Sequence
  Description of Artificial Sequence: Synthetic oligonucleotide
  Antisense strand to SEQ ID NO: 255078
ugcuagcacggagaacacg

SEQ ID NO: 255080 - RNA, 19 nt, Artificial Sequence
  Description of Artificial Sequence: Synthetic oligonucleotide
  Sense strand starting at position 2654 SEQ ID NO: 3283
guguucuccgugcuagcau

SEQ ID NO: 255081 - RNA, 19 nt, Artificial Sequence
  Description of Artificial Sequence: Synthetic oligonucleotide
  Antisense strand to SEQ ID NO: 255080
augcuagcacggagaacac

SEQ ID NO: 255082 - RNA, 19 nt, Artificial Sequence
  Description of Artificial Sequence: Synthetic oligonucleotide
  Sense strand starting at position 2822 SEQ ID NO: 3283
cagucuaugcuccagaggu

SEQ ID NO: 255083 - RNA, 19 nt, Artificial Sequence
  Description of Artificial Sequence: Synthetic oligonucleotide
  Antisense strand to SEQ ID NO: 255082
accucuggagcauagacug

SEQ ID NO: 255084 - RNA, 19 nt, Artificial Sequence
  Description of Artificial Sequence: Synthetic oligonucleotide
  Sense strand starting at position 2826 SEQ ID NO: 3283
cuaugcuccagagguggau

SEQ ID NO: 255085 - RNA, 19 nt, Artificial Sequence
  Description of Artificial Sequence: Synthetic oligonucleotide
  Antisense strand to SEQ ID NO: 255084
auccaccucuggagcauag

SEQ ID NO: 255086 - RNA, 19 nt, Artificial Sequence
  Description of Artificial Sequence: Synthetic oligonucleotide
  Sense strand starting at position 2919 SEQ ID NO: 3283
gggaaaguuacuggugugu

SEQ ID NO: 255087 - RNA, 19 nt, Artificial Sequence
  Description of Artificial Sequence: Synthetic oligonucleotide
  Antisense strand to SEQ ID NO: 255086
acacaccaguaacuuuccc

SEQ ID NO: 255088 - RNA, 19 nt, Artificial Sequence
  Description of Artificial Sequence: Synthetic oligonucleotide
  Sense strand starting at position 2949 SEQ ID NO: 3283
ggagaacuucaguguggcu

SEQ ID NO: 255089 - RNA, 19 nt, Artificial Sequence
  Description of Artificial Sequence: Synthetic oligonucleotide
  Antisense strand to SEQ ID NO: 255088
agccacacugaaguucucc

SEQ ID NO: 255090 - RNA, 19 nt, Artificial Sequence
  Description of Artificial Sequence: Synthetic oligonucleotide
  Sense strand starting at position 3064 SEQ ID NO: 3283
guuaacauuucgguguauu

SEQ ID NO: 255091 - RNA, 19 nt, Artificial Sequence
  Description of Artificial Sequence: Synthetic oligonucleotide
  Antisense strand to SEQ ID NO: 255090
aauacaccgaaauguuaac

SEQ ID NO: 255092 - RNA, 19 nt, Artificial Sequence
  Description of Artificial Sequence: Synthetic oligonucleotide
  Sense strand starting at position 3098 SEQ ID NO: 3283
ugaccagauugcuuuggau

SEQ ID NO: 255093 - RNA, 19 nt, Artificial Sequence
  Description of Artificial Sequence: Synthetic oligonucleotide
  Antisense strand to SEQ ID NO: 255092
auccaaagcaaucugguca

SEQ ID NO: 255094 - RNA, 19 nt, Artificial Sequence
  Description of Artificial Sequence: Synthetic oligonucleotide
  Sense strand starting at position 3100 SEQ ID NO: 3283
accagauugcuuuggauuc

SEQ ID NO: 255095 - RNA, 19 nt, Artificial Sequence
  Description of Artificial Sequence: Synthetic oligonucleotide
  Antisense strand to SEQ ID NO: 255094
gaauccaaagcaaucuggu

SEQ ID NO: 255096 - RNA, 19 nt, Artificial Sequence
  Description of Artificial Sequence: Synthetic oligonucleotide
  Sense strand starting at position 3107 SEQ ID NO: 3283
ugcuuuggauucuuaagga

SEQ ID NO: 255097 - RNA, 19 nt, Artificial Sequence
  Description of Artificial Sequence: Synthetic oligonucleotide
  Antisense strand to SEQ ID NO: 255096
uccuuaagaauccaaagca

SEQ ID NO: 255098 - RNA, 19 nt, Artificial Sequence
  Description of Artificial Sequence: Synthetic oligonucleotide
  Sense strand starting at position 3187 SEQ ID NO: 3283
gggaaagcuguuggagguu

SEQ ID NO: 255099 - RNA, 19 nt, Artificial Sequence
  Description of Artificial Sequence: Synthetic oligonucleotide
  Antisense strand to SEQ ID NO: 255098
aaccuccaacagcuuuccc

SEQ ID NO: 255100 - RNA, 19 nt, Artificial Sequence
  Description of Artificial Sequence: Synthetic oligonucleotide
  Sense strand starting at position 3223 SEQ ID NO: 3283
cagcgaguccagugacaug

SEQ ID NO: 255101 - RNA, 19 nt, Artificial Sequence
  Description of Artificial Sequence: Synthetic oligonucleotide
  Antisense strand to SEQ ID NO: 255100
caugucacuggacucgcug

SEQ ID NO: 255102 - RNA, 19 nt, Artificial Sequence
  Description of Artificial Sequence: Synthetic oligonucleotide
  Sense strand starting at position 3250 SEQ ID NO: 3283
ggcagauccaggugacauu

SEQ ID NO: 255103 - RNA, 19 nt, Artificial Sequence
  Description of Artificial Sequence: Synthetic oligonucleotide
  Antisense strand to SEQ ID NO: 255102
aaugucaccuggaucugcc

SEQ ID NO: 255104 - RNA, 19 nt, Artificial Sequence
  Description of Artificial Sequence: Synthetic oligonucleotide
  Sense strand starting at position 3380 SEQ ID NO: 3283
auagguguugacugaaucu

SEQ ID NO: 255105 - RNA, 19 nt, Artificial Sequence
  Description of Artificial Sequence: Synthetic oligonucleotide
  Antisense strand to SEQ ID NO: 255104
agauucagucaacaccuau

SEQ ID NO: 255106 - RNA, 19 nt, Artificial Sequence
  Description of Artificial Sequence: Synthetic oligonucleotide
  Sense strand starting at position 3391 SEQ ID NO: 3283
cugaaucuuccaggccaua

SEQ ID NO: 255107 - RNA, 19 nt, Artificial Sequence
  Description of Artificial Sequence: Synthetic oligonucleotide
  Antisense strand to SEQ ID NO: 255106
uauggccuggaagauucag

SEQ ID NO: 255108 - RNA, 19 nt, Artificial Sequence
  Description of Artificial Sequence: Synthetic oligonucleotide
  Sense strand starting at position 3426 SEQ ID NO: 3283
ggccauacuccuuaaguga

SEQ ID NO: 255109 - RNA, 19 nt, Artificial Sequence
  Description of Artificial Sequence: Synthetic oligonucleotide
  Antisense strand to SEQ ID NO: 255108
ucacuuaaggaguauggcc

SEQ ID NO: 255110 - RNA, 19 nt, Artificial Sequence
  Description of Artificial Sequence: Synthetic oligonucleotide
  Sense strand starting at position 3693 SEQ ID NO: 3283
ccuggagcuccuuaacuaa

SEQ ID NO: 255111 - RNA, 19 nt, Artificial Sequence
  Description of Artificial Sequence: Synthetic oligonucleotide
  Antisense strand to SEQ ID NO: 255110
uuaguuaaggagcuccagg

SEQ ID NO: 255112 - RNA, 19 nt, Artificial Sequence
  Description of Artificial Sequence: Synthetic oligonucleotide
  Sense strand starting at position 3916 SEQ ID NO: 3283
agugguugaacuuguggaa

SEQ ID NO: 255113 - RNA, 19 nt, Artificial Sequence
  Description of Artificial Sequence: Synthetic oligonucleotide
  Antisense strand to SEQ ID NO: 255112
uuccacaaguucaaccacu

SEQ ID NO: 255114 - RNA, 19 nt, Artificial Sequence
  Description of Artificial Sequence: Synthetic oligonucleotide
  Sense strand starting at position 3972 SEQ ID NO: 3283
guuggauuguuguccagag

SEQ ID NO: 255115 - RNA, 19 nt, Artificial Sequence
  Description of Artificial Sequence: Synthetic oligonucleotide
  Antisense strand to SEQ ID NO: 255114
cucuggacaacaauccaac

SEQ ID NO: 255116 - RNA, 19 nt, Artificial Sequence
  Description of Artificial Sequence: Synthetic oligonucleotide
  Sense strand starting at position 3973 SEQ ID NO: 3283
uuggauuguuguccagaga

SEQ ID NO: 255117 - RNA, 19 nt, Artificial Sequence
  Description of Artificial Sequence: Synthetic oligonucleotide
  Antisense strand to SEQ ID NO: 255116
ucucuggacaacaauccaa

SEQ ID NO: 255118 - RNA, 19 nt, Artificial Sequence
  Description of Artificial Sequence: Synthetic oligonucleotide
  Sense strand starting at position 3974 SEQ ID NO: 3283
uggauuguuguccagagac

SEQ ID NO: 255119 - RNA, 19 nt, Artificial Sequence
  Description of Artificial Sequence: Synthetic oligonucleotide
  Antisense strand to SEQ ID NO: 255118
gucucuggacaacaaucca

SEQ ID NO: 255120 - RNA, 19 nt, Artificial Sequence
  Description of Artificial Sequence: Synthetic oligonucleotide
  Sense strand starting at position 3976 SEQ ID NO: 3283
gauuguuguccagagacag

SEQ ID NO: 255121 - RNA, 19 nt, Artificial Sequence
  Description of Artificial Sequence: Synthetic oligonucleotide
  Antisense strand to SEQ ID NO: 255120
cugucucuggacaacaauc

SEQ ID NO: 255122 - RNA, 19 nt, Artificial Sequence
  Description of Artificial Sequence: Synthetic oligonucleotide
  Sense strand starting at position 56 SEQ ID NO: 3284
gggcaagucucacugccaa

SEQ ID NO: 255123 - RNA, 19 nt, Artificial Sequence
  Description of Artificial Sequence: Synthetic oligonucleotide
  Antisense strand to SEQ ID NO: 255122
uuggcagugagacuugccc

SEQ ID NO: 255124 - RNA, 19 nt, Artificial Sequence
  Description of Artificial Sequence: Synthetic oligonucleotide
  Sense strand starting at position 273 SEQ ID NO: 3284
ggcucccagccuuaaguaa

SEQ ID NO: 255125 - RNA, 19 nt, Artificial Sequence
  Description of Artificial Sequence: Synthetic oligonucleotide
  Antisense strand to SEQ ID NO: 255124
uuacuuaaggcugggagcc

SEQ ID NO: 255126 - RNA, 19 nt, Artificial Sequence
  Description of Artificial Sequence: Synthetic oligonucleotide
  Sense strand starting at position 356 SEQ ID NO: 3284
gucccuaguuuccucacau

SEQ ID NO: 255127 - RNA, 19 nt, Artificial Sequence
  Description of Artificial Sequence: Synthetic oligonucleotide
  Antisense strand to SEQ ID NO: 255126
augugaggaaacuagggac

SEQ ID NO: 255128 - RNA, 19 nt, Artificial Sequence
  Description of Artificial Sequence: Synthetic oligonucleotide
  Sense strand starting at position 371 SEQ ID NO: 3284
acauccuguucucaauguu

SEQ ID NO: 255129 - RNA, 19 nt, Artificial Sequence
  Description of Artificial Sequence: Synthetic oligonucleotide
  Antisense strand to SEQ ID NO: 255128
aacauugagaacaggaugu

SEQ ID NO: 255130 - RNA, 19 nt, Artificial Sequence
  Description of Artificial Sequence: Synthetic oligonucleotide
  Sense strand starting at position 374 SEQ ID NO: 3284
uccuguucucaauguuuac

SEQ ID NO: 255131 - RNA, 19 nt, Artificial Sequence
  Description of Artificial Sequence: Synthetic oligonucleotide
  Antisense strand to SEQ ID NO: 255130
guaaacauugagaacagga

SEQ ID NO: 255132 - RNA, 19 nt, Artificial Sequence
  Description of Artificial Sequence: Synthetic oligonucleotide
  Sense strand starting at position 471 SEQ ID NO: 3284
ggcugcuccucagaacacu

SEQ ID NO: 255133 - RNA, 19 nt, Artificial Sequence
  Description of Artificial Sequence: Synthetic oligonucleotide
  Antisense strand to SEQ ID NO: 255132
aguguucugaggagcagcc

SEQ ID NO: 255134 - RNA, 19 nt, Artificial Sequence
  Description of Artificial Sequence: Synthetic oligonucleotide
  Sense strand starting at position 686 SEQ ID NO: 3284
gcaaccaucugacaagcaa

SEQ ID NO: 255135 - RNA, 19 nt, Artificial Sequence
  Description of Artificial Sequence: Synthetic oligonucleotide
  Antisense strand to SEQ ID NO: 255134
uugcuugucagaugguugc

SEQ ID NO: 255136 - RNA, 19 nt, Artificial Sequence
  Description of Artificial Sequence: Synthetic oligonucleotide
  Sense strand starting at position 755 SEQ ID NO: 3284
ucuggcauuuccuaauaag

SEQ ID NO: 255137 - RNA, 19 nt, Artificial Sequence
  Description of Artificial Sequence: Synthetic oligonucleotide
  Antisense strand to SEQ ID NO: 255136
cuuauuaggaaaugccaga

SEQ ID NO: 255138 - RNA, 19 nt, Artificial Sequence
  Description of Artificial Sequence: Synthetic oligonucleotide
  Sense strand starting at position 838 SEQ ID NO: 3284
auuucuaccugaugaaaga

SEQ ID NO: 255139 - RNA, 19 nt, Artificial Sequence
  Description of Artificial Sequence: Synthetic oligonucleotide
  Antisense strand to SEQ ID NO: 255138
ucuuucaucagguagaaau

SEQ ID NO: 255140 - RNA, 19 nt, Artificial Sequence
  Description of Artificial Sequence: Synthetic oligonucleotide
  Sense strand starting at position 1071 SEQ ID NO: 3284
ugcauauugagcuggacaa

SEQ ID NO: 255141 - RNA, 19 nt, Artificial Sequence
  Description of Artificial Sequence: Synthetic oligonucleotide
  Antisense strand to SEQ ID NO: 255140
uuguccagcucaauaugca

SEQ ID NO: 255142 - RNA, 19 nt, Artificial Sequence
  Description of Artificial Sequence: Synthetic oligonucleotide
  Sense strand starting at position 1072 SEQ ID NO: 3284
gcauauugagcuggacaac

SEQ ID NO: 255143 - RNA, 19 nt, Artificial Sequence
  Description of Artificial Sequence: Synthetic oligonucleotide
  Antisense strand to SEQ ID NO: 255142
guuguccagcucaauaugc

SEQ ID NO: 255144 - RNA, 19 nt, Artificial Sequence
  Description of Artificial Sequence: Synthetic oligonucleotide
  Sense strand starting at position 1200 SEQ ID NO: 3284
cggguugagugcuccaaag

SEQ ID NO: 255145 - RNA, 19 nt, Artificial Sequence
  Description of Artificial Sequence: Synthetic oligonucleotide
  Antisense strand to SEQ ID NO: 255144
cuuuggagcacucaacccg

SEQ ID NO: 255146 - RNA, 19 nt, Artificial Sequence
  Description of Artificial Sequence: Synthetic oligonucleotide
  Sense strand starting at position 1202 SEQ ID NO: 3284
gguugagugcuccaaagca

SEQ ID NO: 255147 - RNA, 19 nt, Artificial Sequence
  Description of Artificial Sequence: Synthetic oligonucleotide
  Antisense strand to SEQ ID NO: 255146
ugcuuuggagcacucaacc

SEQ ID NO: 255148 - RNA, 19 nt, Artificial Sequence
  Description of Artificial Sequence: Synthetic oligonucleotide
  Sense strand starting at position 1278 SEQ ID NO: 3284
gguccuugaugcuguauuu

SEQ ID NO: 255149 - RNA, 19 nt, Artificial Sequence
  Description of Artificial Sequence: Synthetic oligonucleotide
  Antisense strand to SEQ ID NO: 255148
aaauacagcaucaaggacc

SEQ ID NO: 255150 - RNA, 19 nt, Artificial Sequence
  Description of Artificial Sequence: Synthetic oligonucleotide
  Sense strand starting at position 1415 SEQ ID NO: 3284
gguggcgucccacaauaaa

SEQ ID NO: 255151 - RNA, 19 nt, Artificial Sequence
  Description of Artificial Sequence: Synthetic oligonucleotide
  Antisense strand to SEQ ID NO: 255150
uuuauugugggacgccacc

SEQ ID NO: 255152 - RNA, 19 nt, Artificial Sequence
  Description of Artificial Sequence: Synthetic oligonucleotide
  Sense strand starting at position 1561 SEQ ID NO: 3284
gccauugaccucggaacga

SEQ ID NO: 255153 - RNA, 19 nt, Artificial Sequence
  Description of Artificial Sequence: Synthetic oligonucleotide
  Antisense strand to SEQ ID NO: 255152
ucguuccgaggucaauggc

SEQ ID NO: 255154 - RNA, 19 nt, Artificial Sequence
  Description of Artificial Sequence: Synthetic oligonucleotide
  Sense strand starting at position 1604 SEQ ID NO: 3284
gcagucacgaaagaaaguu

SEQ ID NO: 255155 - RNA, 19 nt, Artificial Sequence
  Description of Artificial Sequence: Synthetic oligonucleotide
  Antisense strand to SEQ ID NO: 255154
aacuuucuuucgugacugc

SEQ ID NO: 255156 - RNA, 19 nt, Artificial Sequence
  Description of Artificial Sequence: Synthetic oligonucleotide
  Sense strand starting at position 2273 SEQ ID NO: 3284
gaaggaucuuccugguccu

SEQ ID NO: 255157 - RNA, 19 nt, Artificial Sequence
  Description of Artificial Sequence: Synthetic oligonucleotide
  Antisense strand to SEQ ID NO: 255156
aggaccaggaagauccuuc

SEQ ID NO: 255158 - RNA, 19 nt, Artificial Sequence
  Description of Artificial Sequence: Synthetic oligonucleotide
  Sense strand starting at position 2859 SEQ ID NO: 3284
ccucguaacucccaaugaa

SEQ ID NO: 255159 - RNA, 19 nt, Artificial Sequence
  Description of Artificial Sequence: Synthetic oligonucleotide
  Antisense strand to SEQ ID NO: 255158
uucauugggaguuacgagg

SEQ ID NO: 255160 - RNA, 19 nt, Artificial Sequence
  Description of Artificial Sequence: Synthetic oligonucleotide
  Sense strand starting at position 2862 SEQ ID NO: 3284
cguaacucccaaugaaagu

SEQ ID NO: 255161 - RNA, 19 nt, Artificial Sequence
  Description of Artificial Sequence: Synthetic oligonucleotide
  Antisense strand to SEQ ID NO: 255160
acuuucauugggaguuacg

SEQ ID NO: 255162 - RNA, 19 nt, Artificial Sequence
  Description of Artificial Sequence: Synthetic oligonucleotide
  Sense strand starting at position 2871 SEQ ID NO: 3284
caaugaaaguccugcggga

SEQ ID NO: 255163 - RNA, 19 nt, Artificial Sequence
  Description of Artificial Sequence: Synthetic oligonucleotide
  Antisense strand to SEQ ID NO: 255162
ucccgcaggacuuucauug

SEQ ID NO: 255164 - RNA, 19 nt, Artificial Sequence
  Description of Artificial Sequence: Synthetic oligonucleotide
  Sense strand starting at position 2873 SEQ ID NO: 3284
augaaaguccugcgggaaa

SEQ ID NO: 255165 - RNA, 19 nt, Artificial Sequence
  Description of Artificial Sequence: Synthetic oligonucleotide
  Antisense strand to SEQ ID NO: 255164
uuucccgcaggacuuucau

SEQ ID NO: 255166 - RNA, 19 nt, Artificial Sequence
  Description of Artificial Sequence: Synthetic oligonucleotide
  Sense strand starting at position 2928 SEQ ID NO: 3284
cgggaugacgcggauugua

SEQ ID NO: 255167 - RNA, 19 nt, Artificial Sequence
  Description of Artificial Sequence: Synthetic oligonucleotide
  Antisense strand to SEQ ID NO: 255166
uacaauccgcgucaucccg

SEQ ID NO: 255168 - RNA, 19 nt, Artificial Sequence
  Description of Artificial Sequence: Synthetic oligonucleotide
  Sense strand starting at position 2936 SEQ ID NO: 3284
cgcggauuguaaucggaag

SEQ ID NO: 255169 - RNA, 19 nt, Artificial Sequence
  Description of Artificial Sequence: Synthetic oligonucleotide
  Antisense strand to SEQ ID NO: 255168
cuuccgauuacaauccgcg

SEQ ID NO: 255170 - RNA, 19 nt, Artificial Sequence
  Description of Artificial Sequence: Synthetic oligonucleotide
  Sense strand starting at position 2938 SEQ ID NO: 3284
cggauuguaaucggaaggu

SEQ ID NO: 255171 - RNA, 19 nt, Artificial Sequence
  Description of Artificial Sequence: Synthetic oligonucleotide
  Antisense strand to SEQ ID NO: 255170
accuuccgauuacaauccg

SEQ ID NO: 255172 - RNA, 19 nt, Artificial Sequence
  Description of Artificial Sequence: Synthetic oligonucleotide
  Sense strand starting at position 3219 SEQ ID NO: 3284
cgagcaaaggccuagagaa

SEQ ID NO: 255173 - RNA, 19 nt, Artificial Sequence
  Description of Artificial Sequence: Synthetic oligonucleotide
  Antisense strand to SEQ ID NO: 255172
uucucuaggccuuugcucg

SEQ ID NO: 255174 - RNA, 19 nt, Artificial Sequence
  Description of Artificial Sequence: Synthetic oligonucleotide
  Sense strand starting at position 3368 SEQ ID NO: 3284
cuguaacgcuuauuuaaau

SEQ ID NO: 255175 - RNA, 19 nt, Artificial Sequence
  Description of Artificial Sequence: Synthetic oligonucleotide
  Antisense strand to SEQ ID NO: 255174
auuuaaauaagcguuacag

SEQ ID NO: 255176 - RNA, 19 nt, Artificial Sequence
  Description of Artificial Sequence: Synthetic oligonucleotide
  Sense strand starting at position 3759 SEQ ID NO: 3284
uuuaaauguucucugggaa

SEQ ID NO: 255177 - RNA, 19 nt, Artificial Sequence
  Description of Artificial Sequence: Synthetic oligonucleotide
  Antisense strand to SEQ ID NO: 255176
uucccagagaacauuuaaa

SEQ ID NO: 255178 - RNA, 19 nt, Artificial Sequence
  Description of Artificial Sequence: Synthetic oligonucleotide
  Sense strand starting at position 3763 SEQ ID NO: 3284
aauguucucugggaauuua

SEQ ID NO: 255179 - RNA, 19 nt, Artificial Sequence
  Description of Artificial Sequence: Synthetic oligonucleotide
  Antisense strand to SEQ ID NO: 255178
uaaauucccagagaacauu

SEQ ID NO: 255180 - RNA, 19 nt, Artificial Sequence
  Description of Artificial Sequence: Synthetic oligonucleotide
  Sense strand starting at position 3771 SEQ ID NO: 3284
cugggaauuuauuguagaa

SEQ ID NO: 255181 - RNA, 19 nt, Artificial Sequence
  Description of Artificial Sequence: Synthetic oligonucleotide
  Antisense strand to SEQ ID NO: 255180
uucuacaauaaauucccag

SEQ ID NO: 255182 - RNA, 19 nt, Artificial Sequence
  Description of Artificial Sequence: Synthetic oligonucleotide
  Sense strand starting at position 3773 SEQ ID NO: 3284
gggaauuuauuguagaaag

SEQ ID NO: 255183 - RNA, 19 nt, Artificial Sequence
  Description of Artificial Sequence: Synthetic oligonucleotide
  Antisense strand to SEQ ID NO: 255182
cuuucuacaauaaauuccc

SEQ ID NO: 255184 - RNA, 19 nt, Artificial Sequence
  Description of Artificial Sequence: Synthetic oligonucleotide
  Sense strand starting at position 3825 SEQ ID NO: 3284
ugaugagaaugauaaccca

SEQ ID NO: 255185 - RNA, 19 nt, Artificial Sequence
  Description of Artificial Sequence: Synthetic oligonucleotide
  Antisense strand to SEQ ID NO: 255184
uggguuaucauucucauca

SEQ ID NO: 255186 - RNA, 19 nt, Artificial Sequence
  Description of Artificial Sequence: Synthetic oligonucleotide
  Sense strand starting at position 3855 SEQ ID NO: 3284
gcccucuucuucugagacu

SEQ ID NO: 255187 - RNA, 19 nt, Artificial Sequence
  Description of Artificial Sequence: Synthetic oligonucleotide
  Antisense strand to SEQ ID NO: 255186
agucucagaagaagagggc

SEQ ID NO: 255188 - RNA, 19 nt, Artificial Sequence
  Description of Artificial Sequence: Synthetic oligonucleotide
  Sense strand starting at position 3858 SEQ ID NO: 3284
cucuucuucugagacuuga

SEQ ID NO: 255189 - RNA, 19 nt, Artificial Sequence
  Description of Artificial Sequence: Synthetic oligonucleotide
  Antisense strand to SEQ ID NO: 255188
ucaagucucagaagaagag

SEQ ID NO: 255190 - RNA, 19 nt, Artificial Sequence
  Description of Artificial Sequence: Synthetic oligonucleotide
  Sense strand starting at position 3878 SEQ ID NO: 3284
uuugaauauucugaucuag

SEQ ID NO: 255191 - RNA, 19 nt, Artificial Sequence
  Description of Artificial Sequence: Synthetic oligonucleotide
  Antisense strand to SEQ ID NO: 255190
cuagaucagaauauucaaa

SEQ ID NO: 255192 - RNA, 19 nt, Artificial Sequence
  Description of Artificial Sequence: Synthetic oligonucleotide
  Sense strand starting at position 3889 SEQ ID NO: 3284
ugaucuagauaggcagauu

SEQ ID NO: 255193 - RNA, 19 nt, Artificial Sequence
  Description of Artificial Sequence: Synthetic oligonucleotide
  Antisense strand to SEQ ID NO: 255192
aaucugccuaucuagauca

SEQ ID NO: 255194 - RNA, 19 nt, Artificial Sequence
  Description of Artificial Sequence: Synthetic oligonucleotide
  Sense strand starting at position 3982 SEQ ID NO: 3284
uuggcaugucccugaggca

SEQ ID NO: 255195 - RNA, 19 nt, Artificial Sequence
  Description of Artificial Sequence: Synthetic oligonucleotide
  Antisense strand to SEQ ID NO: 255194
ugccucagggacaugccaa

SEQ ID NO: 255196 - RNA, 19 nt, Artificial Sequence
  Description of Artificial Sequence: Synthetic oligonucleotide
  Sense strand starting at position 3983 SEQ ID NO: 3284
uggcaugucccugaggcaa

SEQ ID NO: 255197 - RNA, 19 nt, Artificial Sequence
  Description of Artificial Sequence: Synthetic oligonucleotide
  Antisense strand to SEQ ID NO: 255196
uugccucagggacaugcca

SEQ ID NO: 255198 - RNA, 19 nt, Artificial Sequence
  Description of Artificial Sequence: Synthetic oligonucleotide
  Sense strand starting at position 61 SEQ ID NO: 3285
gugacaaagcacugucuga

SEQ ID NO: 255199 - RNA, 19 nt, Artificial Sequence
  Description of Artificial Sequence: Synthetic oligonucleotide
  Antisense strand to SEQ ID NO: 255198
ucagacagugcuuugucac

SEQ ID NO: 255200 - RNA, 19 nt, Artificial Sequence
  Description of Artificial Sequence: Synthetic oligonucleotide
  Sense strand starting at position 527 SEQ ID NO: 3285
gggugaugcuugucaggga

SEQ ID NO: 255201 - RNA, 19 nt, Artificial Sequence
  Description of Artificial Sequence: Synthetic oligonucleotide
  Antisense strand to SEQ ID NO: 255200
ucccugacaagcaucaccc

SEQ ID NO: 255202 - RNA, 19 nt, Artificial Sequence
  Description of Artificial Sequence: Synthetic oligonucleotide
  Sense strand starting at position 545 SEQ ID NO: 3285
acuuccaagaguugaggau

SEQ ID NO: 255203 - RNA, 19 nt, Artificial Sequence
  Description of Artificial Sequence: Synthetic oligonucleotide
  Antisense strand to SEQ ID NO: 255202
auccucaacucuuggaagu

SEQ ID NO: 255204 - RNA, 19 nt, Artificial Sequence
  Description of Artificial Sequence: Synthetic oligonucleotide
  Sense strand starting at position 845 SEQ ID NO: 3285
aagaguugcgcgccagacu

SEQ ID NO: 255205 - RNA, 19 nt, Artificial Sequence
  Description of Artificial Sequence: Synthetic oligonucleotide
  Antisense strand to SEQ ID NO: 255204
agucuggcgcgcaacucuu

SEQ ID NO: 255206 - RNA, 19 nt, Artificial Sequence
  Description of Artificial Sequence: Synthetic oligonucleotide
  Sense strand starting at position 857 SEQ ID NO: 3285
ccagacucuugagcugauu

SEQ ID NO: 255207 - RNA, 19 nt, Artificial Sequence
  Description of Artificial Sequence: Synthetic oligonucleotide
  Antisense strand to SEQ ID NO: 255206
aaucagcucaagagucugg

SEQ ID NO: 255208 - RNA, 19 nt, Artificial Sequence
  Description of Artificial Sequence: Synthetic oligonucleotide
  Sense strand starting at position 859 SEQ ID NO: 3285
agacucuugagcugauugu

SEQ ID NO: 255209 - RNA, 19 nt, Artificial Sequence
  Description of Artificial Sequence: Synthetic oligonucleotide
  Antisense strand to SEQ ID NO: 255208
acaaucagcucaagagucu

SEQ ID NO: 255210 - RNA, 19 nt, Artificial Sequence
  Description of Artificial Sequence: Synthetic oligonucleotide
  Sense strand starting at position 860 SEQ ID NO: 3285
gacucuugagcugauugua

SEQ ID NO: 255211 - RNA, 19 nt, Artificial Sequence
  Description of Artificial Sequence: Synthetic oligonucleotide
  Antisense strand to SEQ ID NO: 255210
uacaaucagcucaagaguc

SEQ ID NO: 255212 - RNA, 19 nt, Artificial Sequence
  Description of Artificial Sequence: Synthetic oligonucleotide
  Sense strand starting at position 878 SEQ ID NO: 3285
auccgaugucgagaaacuu

SEQ ID NO: 255213 - RNA, 19 nt, Artificial Sequence
  Description of Artificial Sequence: Synthetic oligonucleotide
  Antisense strand to SEQ ID NO: 255212
aaguuucucgacaucggau

SEQ ID NO: 255214 - RNA, 19 nt, Artificial Sequence
  Description of Artificial Sequence: Synthetic oligonucleotide
  Sense strand starting at position 903 SEQ ID NO: 3285
gcggcaguccuggaagaug

SEQ ID NO: 255215 - RNA, 19 nt, Artificial Sequence
  Description of Artificial Sequence: Synthetic oligonucleotide
  Antisense strand to SEQ ID NO: 255214
caucuuccaggacugccgc

SEQ ID NO: 255216 - RNA, 19 nt, Artificial Sequence
  Description of Artificial Sequence: Synthetic oligonucleotide
  Sense strand starting at position 1079 SEQ ID NO: 3285
gggugaucugguuggaacu

SEQ ID NO: 255217 - RNA, 19 nt, Artificial Sequence
  Description of Artificial Sequence: Synthetic oligonucleotide
  Antisense strand to SEQ ID NO: 255216
aguuccaaccagaucaccc

SEQ ID NO: 255218 - RNA, 19 nt, Artificial Sequence
  Description of Artificial Sequence: Synthetic oligonucleotide
  Sense strand starting at position 1151 SEQ ID NO: 3285
agcagaugugauugugauc

SEQ ID NO: 255219 - RNA, 19 nt, Artificial Sequence
  Description of Artificial Sequence: Synthetic oligonucleotide
  Antisense strand to SEQ ID NO: 255218
gaucacaaucacaucugcu

SEQ ID NO: 255220 - RNA, 19 nt, Artificial Sequence
  Description of Artificial Sequence: Synthetic oligonucleotide
  Sense strand starting at position 1156 SEQ ID NO: 3285
augugauugugauccagau

SEQ ID NO: 255221 - RNA, 19 nt, Artificial Sequence
  Description of Artificial Sequence: Synthetic oligonucleotide
  Antisense strand to SEQ ID NO: 255220
aucuggaucacaaucacau

SEQ ID NO: 255222 - RNA, 19 nt, Artificial Sequence
  Description of Artificial Sequence: Synthetic oligonucleotide
  Sense strand starting at position 1158 SEQ ID NO: 3285
gugauugugauccagauag

SEQ ID NO: 255223 - RNA, 19 nt, Artificial Sequence
  Description of Artificial Sequence: Synthetic oligonucleotide
  Antisense strand to SEQ ID NO: 255222
cuaucuggaucacaaucac

SEQ ID NO: 255224 - RNA, 19 nt, Artificial Sequence
  Description of Artificial Sequence: Synthetic oligonucleotide
  Sense strand starting at position 1448 SEQ ID NO: 3285
ggaaauccauuagcgagaa

SEQ ID NO: 255225 - RNA, 19 nt, Artificial Sequence
  Description of Artificial Sequence: Synthetic oligonucleotide
  Antisense strand to SEQ ID NO: 255224
uucucgcuaauggauuucc

SEQ ID NO: 255226 - RNA, 19 nt, Artificial Sequence
  Description of Artificial Sequence: Synthetic oligonucleotide
  Sense strand starting at position 1452 SEQ ID NO: 3285
auccauuagcgagaaucuu

SEQ ID NO: 255227 - RNA, 19 nt, Artificial Sequence
  Description of Artificial Sequence: Synthetic oligonucleotide
  Antisense strand to SEQ ID NO: 255226
aagauucucgcuaauggau

SEQ ID NO: 255228 - RNA, 19 nt, Artificial Sequence
  Description of Artificial Sequence: Synthetic oligonucleotide
  Sense strand starting at position 1458 SEQ ID NO: 3285
uagcgagaaucuuuccaga

SEQ ID NO: 255229 - RNA, 19 nt, Artificial Sequence
  Description of Artificial Sequence: Synthetic oligonucleotide
  Antisense strand to SEQ ID NO: 255228
ucuggaaagauucucgcua

SEQ ID NO: 255230 - RNA, 19 nt, Artificial Sequence
  Description of Artificial Sequence: Synthetic oligonucleotide
  Sense strand starting at position 1460 SEQ ID NO: 3285
gcgagaaucuuuccagaga

SEQ ID NO: 255231 - RNA, 19 nt, Artificial Sequence
  Description of Artificial Sequence: Synthetic oligonucleotide
  Antisense strand to SEQ ID NO: 255230
ucucuggaaagauucucgc

SEQ ID NO: 255232 - RNA, 19 nt, Artificial Sequence
  Description of Artificial Sequence: Synthetic oligonucleotide
  Sense strand starting at position 1484 SEQ ID NO: 3285
gagaauguccauuggaagc

SEQ ID NO: 255233 - RNA, 19 nt, Artificial Sequence
  Description of Artificial Sequence: Synthetic oligonucleotide
  Antisense strand to SEQ ID NO: 255232
gcuuccaauggacauucuc

SEQ ID NO: 255234 - RNA, 19 nt, Artificial Sequence
  Description of Artificial Sequence: Synthetic oligonucleotide
  Sense strand starting at position 1843 SEQ ID NO: 3285
aauuauaugcagggcgaga

SEQ ID NO: 255235 - RNA, 19 nt, Artificial Sequence
  Description of Artificial Sequence: Synthetic oligonucleotide
  Antisense strand to SEQ ID NO: 255234
ucucgcccugcauauaauu

SEQ ID NO: 255236 - RNA, 19 nt, Artificial Sequence
  Description of Artificial Sequence: Synthetic oligonucleotide
  Sense strand starting at position 2139 SEQ ID NO: 3285
uaauguccgucauuggaaa

SEQ ID NO: 255237 - RNA, 19 nt, Artificial Sequence
  Description of Artificial Sequence: Synthetic oligonucleotide
  Antisense strand to SEQ ID NO: 255236
uuuccaaugacggacauua

SEQ ID NO: 255238 - RNA, 19 nt, Artificial Sequence
  Description of Artificial Sequence: Synthetic oligonucleotide
  Sense strand starting at position 2598 SEQ ID NO: 3285
agcaucauccacgacaaga

SEQ ID NO: 255239 - RNA, 19 nt, Artificial Sequence
  Description of Artificial Sequence: Synthetic oligonucleotide
  Antisense strand to SEQ ID NO: 255238
ucuugucguggaugaugcu

SEQ ID NO: 255240 - RNA, 19 nt, Artificial Sequence
  Description of Artificial Sequence: Synthetic oligonucleotide
  Sense strand starting at position 2693 SEQ ID NO: 3285
acugucuacguguaagaga

SEQ ID NO: 255241 - RNA, 19 nt, Artificial Sequence
  Description of Artificial Sequence: Synthetic oligonucleotide
  Antisense strand to SEQ ID NO: 255240
ucucuuacacguagacagu

SEQ ID NO: 255242 - RNA, 19 nt, Artificial Sequence
  Description of Artificial Sequence: Synthetic oligonucleotide
  Sense strand starting at position 2706 SEQ ID NO: 3285
aagagauacguaggaaucu

SEQ ID NO: 255243 - RNA, 19 nt, Artificial Sequence
  Description of Artificial Sequence: Synthetic oligonucleotide
  Antisense strand to SEQ ID NO: 255242
agauuccuacguaucucuu

SEQ ID NO: 255244 - RNA, 19 nt, Artificial Sequence
  Description of Artificial Sequence: Synthetic oligonucleotide
  Sense strand starting at position 2741 SEQ ID NO: 3285
uuggaccuuugcuuuagaa

SEQ ID NO: 255245 - RNA, 19 nt, Artificial Sequence
  Description of Artificial Sequence: Synthetic oligonucleotide
  Antisense strand to SEQ ID NO: 255244
uucuaaagcaaagguccaa

SEQ ID NO: 255246 - RNA, 19 nt, Artificial Sequence
  Description of Artificial Sequence: Synthetic oligonucleotide
  Sense strand starting at position 3055 SEQ ID NO: 3285
gauuguacugucugacaug

SEQ ID NO: 255247 - RNA, 19 nt, Artificial Sequence
  Description of Artificial Sequence: Synthetic oligonucleotide
  Antisense strand to SEQ ID NO: 255246
caugucagacaguacaauc

SEQ ID NO: 255248 - RNA, 19 nt, Artificial Sequence
  Description of Artificial Sequence: Synthetic oligonucleotide
  Sense strand starting at position 3134 SEQ ID NO: 3285
acuccaagagagugugaau

SEQ ID NO: 255249 - RNA, 19 nt, Artificial Sequence
  Description of Artificial Sequence: Synthetic oligonucleotide
  Antisense strand to SEQ ID NO: 255248
auucacacucucuuggagu

SEQ ID NO: 255250 - RNA, 19 nt, Artificial Sequence
  Description of Artificial Sequence: Synthetic oligonucleotide
  Sense strand starting at position 3153 SEQ ID NO: 3285
guguagggacgugauaguu

SEQ ID NO: 255251 - RNA, 19 nt, Artificial Sequence
  Description of Artificial Sequence: Synthetic oligonucleotide
  Antisense strand to SEQ ID NO: 255250
aacuaucacgucccuacac

SEQ ID NO: 255252 - RNA, 19 nt, Artificial Sequence
  Description of Artificial Sequence: Synthetic oligonucleotide
  Sense strand starting at position 3163 SEQ ID NO: 3285
gugauaguuuaagccauaa

SEQ ID NO: 255253 - RNA, 19 nt, Artificial Sequence
  Description of Artificial Sequence: Synthetic oligonucleotide
  Antisense strand to SEQ ID NO: 255252
uuauggcuuaaacuaucac

SEQ ID NO: 255254 - RNA, 19 nt, Artificial Sequence
  Description of Artificial Sequence: Synthetic oligonucleotide
  Sense strand starting at position 3402 SEQ ID NO: 3285
uuggucaucuguuuaaaca

SEQ ID NO: 255255 - RNA, 19 nt, Artificial Sequence
  Description of Artificial Sequence: Synthetic oligonucleotide
  Antisense strand to SEQ ID NO: 255254
uguuuaaacagaugaccaa

SEQ ID NO: 255256 - RNA, 19 nt, Artificial Sequence
  Description of Artificial Sequence: Synthetic oligonucleotide
  Sense strand starting at position 3403 SEQ ID NO: 3285
uggucaucuguuuaaacaa

SEQ ID NO: 255257 - RNA, 19 nt, Artificial Sequence
  Description of Artificial Sequence: Synthetic oligonucleotide
  Antisense strand to SEQ ID NO: 255256
uuguuuaaacagaugacca

SEQ ID NO: 255258 - RNA, 19 nt, Artificial Sequence
  Description of Artificial Sequence: Synthetic oligonucleotide
  Sense strand starting at position 3426 SEQ ID NO: 3285
cuccaagauggcugagaaa

SEQ ID NO: 255259 - RNA, 19 nt, Artificial Sequence
  Description of Artificial Sequence: Synthetic oligonucleotide
  Antisense strand to SEQ ID NO: 255258
uuucucagccaucuuggag

SEQ ID NO: 255260 - RNA, 19 nt, Artificial Sequence
  Description of Artificial Sequence: Synthetic oligonucleotide
  Sense strand starting at position 3507 SEQ ID NO: 3285
gggagagucaaaugugagu

SEQ ID NO: 255261 - RNA, 19 nt, Artificial Sequence
  Description of Artificial Sequence: Synthetic oligonucleotide
  Antisense strand to SEQ ID NO: 255260
acucacauuugacucuccc

SEQ ID NO: 255262 - RNA, 19 nt, Artificial Sequence
  Description of Artificial Sequence: Synthetic oligonucleotide
  Sense strand starting at position 3553 SEQ ID NO: 3285
cguuucugccucuaaggaa

SEQ ID NO: 255263 - RNA, 19 nt, Artificial Sequence
  Description of Artificial Sequence: Synthetic oligonucleotide
  Antisense strand to SEQ ID NO: 255262
uuccuuagaggcagaaacg

SEQ ID NO: 255264 - RNA, 19 nt, Artificial Sequence
  Description of Artificial Sequence: Synthetic oligonucleotide
  Sense strand starting at position 3578 SEQ ID NO: 3285
aucaguaggcauuauaugu

SEQ ID NO: 255265 - RNA, 19 nt, Artificial Sequence
  Description of Artificial Sequence: Synthetic oligonucleotide
  Antisense strand to SEQ ID NO: 255264
acauauaaugccuacugau

SEQ ID NO: 255266 - RNA, 19 nt, Artificial Sequence
  Description of Artificial Sequence: Synthetic oligonucleotide
  Sense strand starting at position 3597 SEQ ID NO: 3285
aguggcacuuacuuugaua

SEQ ID NO: 255267 - RNA, 19 nt, Artificial Sequence
  Description of Artificial Sequence: Synthetic oligonucleotide
  Antisense strand to SEQ ID NO: 255266
uaucaaaguaagugccacu

SEQ ID NO: 255268 - RNA, 19 nt, Artificial Sequence
  Description of Artificial Sequence: Synthetic oligonucleotide
  Sense strand starting at position 3608 SEQ ID NO: 3285
cuuugauaggaaugagggu

SEQ ID NO: 255269 - RNA, 19 nt, Artificial Sequence
  Description of Artificial Sequence: Synthetic oligonucleotide
  Antisense strand to SEQ ID NO: 255268
acccucauuccuaucaaag

SEQ ID NO: 255270 - RNA, 19 nt, Artificial Sequence
  Description of Artificial Sequence: Synthetic oligonucleotide
  Sense strand starting at position 3666 SEQ ID NO: 3285
uggauugguccuuagcauc

SEQ ID NO: 255271 - RNA, 19 nt, Artificial Sequence
  Description of Artificial Sequence: Synthetic oligonucleotide
  Antisense strand to SEQ ID NO: 255270
gaugcuaaggaccaaucca

SEQ ID NO: 255272 - RNA, 19 nt, Artificial Sequence
  Description of Artificial Sequence: Synthetic oligonucleotide
  Sense strand starting at position 3717 SEQ ID NO: 3285
ucaccaaagacugguggua

SEQ ID NO: 255273 - RNA, 19 nt, Artificial Sequence
  Description of Artificial Sequence: Synthetic oligonucleotide
  Antisense strand to SEQ ID NO: 255272
uaccaccagucuuugguga

SEQ ID NO: 255274 - RNA, 19 nt, Artificial Sequence
  Description of Artificial Sequence: Synthetic oligonucleotide
  Sense strand starting at position 3762 SEQ ID NO: 3285
gggcaugaaucauuccauu

SEQ ID NO: 255275 - RNA, 19 nt, Artificial Sequence
  Description of Artificial Sequence: Synthetic oligonucleotide
  Antisense strand to SEQ ID NO: 255274
aauggaaugauucaugccc

SEQ ID NO: 255276 - RNA, 19 nt, Artificial Sequence
  Description of Artificial Sequence: Synthetic oligonucleotide
  Sense strand starting at position 3946 SEQ ID NO: 3285
aagagacaucaugguuuau

SEQ ID NO: 255277 - RNA, 19 nt, Artificial Sequence
  Description of Artificial Sequence: Synthetic oligonucleotide
  Antisense strand to SEQ ID NO: 255276
auaaaccaugaugucucuu

SEQ ID NO: 255278 - RNA, 19 nt, Artificial Sequence
  Description of Artificial Sequence: Synthetic oligonucleotide
  Sense strand starting at position 1 SEQ ID NO: 3287
ccugaaauuguguacuuau

SEQ ID NO: 255279 - RNA, 19 nt, Artificial Sequence
  Description of Artificial Sequence: Synthetic oligonucleotide
  Antisense strand to SEQ ID NO: 255278
auaaguacacaauuucagg

SEQ ID NO: 255280 - RNA, 19 nt, Artificial Sequence
  Description of Artificial Sequence: Synthetic oligonucleotide
  Sense strand starting at position 21 SEQ ID NO: 3287
gcauaauaggaucgcaaua

SEQ ID NO: 255281 - RNA, 19 nt, Artificial Sequence
  Description of Artificial Sequence: Synthetic oligonucleotide
  Antisense strand to SEQ ID NO: 255280
uauugcgauccuauuaugc

SEQ ID NO: 255282 - RNA, 19 nt, Artificial Sequence
  Description of Artificial Sequence: Synthetic oligonucleotide
  Sense strand starting at position 26 SEQ ID NO: 3287
auaggaucgcaauauguga

SEQ ID NO: 255283 - RNA, 19 nt, Artificial Sequence
  Description of Artificial Sequence: Synthetic oligonucleotide
  Antisense strand to SEQ ID NO: 255282
ucacauauugcgauccuau

SEQ ID NO: 255284 - RNA, 19 nt, Artificial Sequence
  Description of Artificial Sequence: Synthetic oligonucleotide
  Sense strand starting at position 57 SEQ ID NO: 3287
cagcauugagacuaguaua

SEQ ID NO: 255285 - RNA, 19 nt, Artificial Sequence
  Description of Artificial Sequence: Synthetic oligonucleotide
  Antisense strand to SEQ ID NO: 255284
uauacuagucucaaugcug

SEQ ID NO: 255286 - RNA, 19 nt, Artificial Sequence
  Description of Artificial Sequence: Synthetic oligonucleotide
  Sense strand starting at position 128 SEQ ID NO: 3287
aguuguuaauaagcauaga

SEQ ID NO: 255287 - RNA, 19 nt, Artificial Sequence
  Description of Artificial Sequence: Synthetic oligonucleotide
  Antisense strand to SEQ ID NO: 255286
ucuaugcuuauuaacaacu

SEQ ID NO: 255288 - RNA, 19 nt, Artificial Sequence
  Description of Artificial Sequence: Synthetic oligonucleotide
  Sense strand starting at position 241 SEQ ID NO: 3287
uucguauuauuugccuaaa

SEQ ID NO: 255289 - RNA, 19 nt, Artificial Sequence
  Description of Artificial Sequence: Synthetic oligonucleotide
  Antisense strand to SEQ ID NO: 255288
uuuaggcaaauaauacgaa

SEQ ID NO: 255290 - RNA, 19 nt, Artificial Sequence
  Description of Artificial Sequence: Synthetic oligonucleotide
  Sense strand starting at position 312 SEQ ID NO: 3287
ugcaaauucgaaggauaaa

SEQ ID NO: 255291 - RNA, 19 nt, Artificial Sequence
  Description of Artificial Sequence: Synthetic oligonucleotide
  Antisense strand to SEQ ID NO: 255290
uuuauccuucgaauuugca

SEQ ID NO: 255292 - RNA, 19 nt, Artificial Sequence
  Description of Artificial Sequence: Synthetic oligonucleotide
  Sense strand starting at position 425 SEQ ID NO: 3287
ucagaaagccugcaaaguu

SEQ ID NO: 255293 - RNA, 19 nt, Artificial Sequence
  Description of Artificial Sequence: Synthetic oligonucleotide
  Antisense strand to SEQ ID NO: 255292
aacuuugcaggcuuucuga

SEQ ID NO: 255294 - RNA, 19 nt, Artificial Sequence
  Description of Artificial Sequence: Synthetic oligonucleotide
  Sense strand starting at position 522 SEQ ID NO: 3287
auuauuucuuaauggagag

SEQ ID NO: 255295 - RNA, 19 nt, Artificial Sequence
  Description of Artificial Sequence: Synthetic oligonucleotide
  Antisense strand to SEQ ID NO: 255294
cucuccauuaagaaauaau

SEQ ID NO: 255296 - RNA, 19 nt, Artificial Sequence
  Description of Artificial Sequence: Synthetic oligonucleotide
  Sense strand starting at position 724 SEQ ID NO: 3287
gcuacagacucauugaaau

SEQ ID NO: 255297 - RNA, 19 nt, Artificial Sequence
  Description of Artificial Sequence: Synthetic oligonucleotide
  Antisense strand to SEQ ID NO: 255296
auuucaaugagucuguagc

SEQ ID NO: 255298 - RNA, 19 nt, Artificial Sequence
  Description of Artificial Sequence: Synthetic oligonucleotide
  Sense strand starting at position 876 SEQ ID NO: 3287
uugugcaaccucugauaaa

SEQ ID NO: 255299 - RNA, 19 nt, Artificial Sequence
  Description of Artificial Sequence: Synthetic oligonucleotide
  Antisense strand to SEQ ID NO: 255298
uuuaucagagguugcacaa

SEQ ID NO: 255300 - RNA, 19 nt, Artificial Sequence
  Description of Artificial Sequence: Synthetic oligonucleotide
  Sense strand starting at position 929 SEQ ID NO: 3287
uguuaauagucauccugac

SEQ ID NO: 255301 - RNA, 19 nt, Artificial Sequence
  Description of Artificial Sequence: Synthetic oligonucleotide
  Antisense strand to SEQ ID NO: 255300
gucaggaugacuauuaaca

SEQ ID NO: 255302 - RNA, 19 nt, Artificial Sequence
  Description of Artificial Sequence: Synthetic oligonucleotide
  Sense strand starting at position 1069 SEQ ID NO: 3287
ucucuagagucuguuuaag

SEQ ID NO: 255303 - RNA, 19 nt, Artificial Sequence
  Description of Artificial Sequence: Synthetic oligonucleotide
  Antisense strand to SEQ ID NO: 255302
cuuaaacagacucuagaga

SEQ ID NO: 255304 - RNA, 19 nt, Artificial Sequence
  Description of Artificial Sequence: Synthetic oligonucleotide
  Sense strand starting at position 1077 SEQ ID NO: 3287
gucuguuuaaguucguguu

SEQ ID NO: 255305 - RNA, 19 nt, Artificial Sequence
  Description of Artificial Sequence: Synthetic oligonucleotide
  Antisense strand to SEQ ID NO: 255304
aacacgaacuuaaacagac

SEQ ID NO: 255306 - RNA, 19 nt, Artificial Sequence
  Description of Artificial Sequence: Synthetic oligonucleotide
  Sense strand starting at position 1257 SEQ ID NO: 3287
aggaucagcuuugcucaga

SEQ ID NO: 255307 - RNA, 19 nt, Artificial Sequence
  Description of Artificial Sequence: Synthetic oligonucleotide
  Antisense strand to SEQ ID NO: 255306
ucugagcaaagcugauccu

SEQ ID NO: 255308 - RNA, 19 nt, Artificial Sequence
  Description of Artificial Sequence: Synthetic oligonucleotide
  Sense strand starting at position 1258 SEQ ID NO: 3287
ggaucagcuuugcucagaa

SEQ ID NO: 255309 - RNA, 19 nt, Artificial Sequence
  Description of Artificial Sequence: Synthetic oligonucleotide
  Antisense strand to SEQ ID NO: 255308
uucugagcaaagcugaucc

SEQ ID NO: 255310 - RNA, 19 nt, Artificial Sequence
  Description of Artificial Sequence: Synthetic oligonucleotide
  Sense strand starting at position 1632 SEQ ID NO: 3287
gagacccaucagcaguaau

SEQ ID NO: 255311 - RNA, 19 nt, Artificial Sequence
  Description of Artificial Sequence: Synthetic oligonucleotide
  Antisense strand to SEQ ID NO: 255310
auuacugcugaugggucuc

SEQ ID NO: 255312 - RNA, 19 nt, Artificial Sequence
  Description of Artificial Sequence: Synthetic oligonucleotide
  Sense strand starting at position 1766 SEQ ID NO: 3287
uugccauucccagauaaag

SEQ ID NO: 255313 - RNA, 19 nt, Artificial Sequence
  Description of Artificial Sequence: Synthetic oligonucleotide
  Antisense strand to SEQ ID NO: 255312
cuuuaucugggaauggcaa

SEQ ID NO: 255314 - RNA, 19 nt, Artificial Sequence
  Description of Artificial Sequence: Synthetic oligonucleotide
  Sense strand starting at position 1877 SEQ ID NO: 3287
ccauuuagcuggucagguu

SEQ ID NO: 255315 - RNA, 19 nt, Artificial Sequence
  Description of Artificial Sequence: Synthetic oligonucleotide
  Antisense strand to SEQ ID NO: 255314
aaccugaccagcuaaaugg

SEQ ID NO: 255316 - RNA, 19 nt, Artificial Sequence
  Description of Artificial Sequence: Synthetic oligonucleotide
  Sense strand starting at position 1939 SEQ ID NO: 3287
ucagaaggcuuuccagaga

SEQ ID NO: 255317 - RNA, 19 nt, Artificial Sequence
  Description of Artificial Sequence: Synthetic oligonucleotide
  Antisense strand to SEQ ID NO: 255316
ucucuggaaagccuucuga

SEQ ID NO: 255318 - RNA, 19 nt, Artificial Sequence
  Description of Artificial Sequence: Synthetic oligonucleotide
  Sense strand starting at position 2380 SEQ ID NO: 3287
ccgcuuauggaagaaaucu

SEQ ID NO: 255319 - RNA, 19 nt, Artificial Sequence
  Description of Artificial Sequence: Synthetic oligonucleotide
  Antisense strand to SEQ ID NO: 255318
agauuucuuccauaagcgg

SEQ ID NO: 255320 - RNA, 19 nt, Artificial Sequence
  Description of Artificial Sequence: Synthetic oligonucleotide
  Sense strand starting at position 2624 SEQ ID NO: 3287
guagaauucuagcuugaca

SEQ ID NO: 255321 - RNA, 19 nt, Artificial Sequence
  Description of Artificial Sequence: Synthetic oligonucleotide
  Antisense strand to SEQ ID NO: 255320
ugucaagcuagaauucuac

SEQ ID NO: 255322 - RNA, 19 nt, Artificial Sequence
  Description of Artificial Sequence: Synthetic oligonucleotide
  Sense strand starting at position 2626 SEQ ID NO: 3287
agaauucuagcuugacauu

SEQ ID NO: 255323 - RNA, 19 nt, Artificial Sequence
  Description of Artificial Sequence: Synthetic oligonucleotide
  Antisense strand to SEQ ID NO: 255322
aaugucaagcuagaauucu

SEQ ID NO: 255324 - RNA, 19 nt, Artificial Sequence
  Description of Artificial Sequence: Synthetic oligonucleotide
  Sense strand starting at position 2745 SEQ ID NO: 3287
acuugaguucugcauuauc

SEQ ID NO: 255325 - RNA, 19 nt, Artificial Sequence
  Description of Artificial Sequence: Synthetic oligonucleotide
  Antisense strand to SEQ ID NO: 255324
gauaaugcagaacucaagu

SEQ ID NO: 255326 - RNA, 19 nt, Artificial Sequence
  Description of Artificial Sequence: Synthetic oligonucleotide
  Sense strand starting at position 2748 SEQ ID NO: 3287
ugaguucugcauuaucaug

SEQ ID NO: 255327 - RNA, 19 nt, Artificial Sequence
  Description of Artificial Sequence: Synthetic oligonucleotide
  Antisense strand to SEQ ID NO: 255326
caugauaaugcagaacuca

SEQ ID NO: 255328 - RNA, 19 nt, Artificial Sequence
  Description of Artificial Sequence: Synthetic oligonucleotide
  Sense strand starting at position 2783 SEQ ID NO: 3287
ugcagaauauccucagaau

SEQ ID NO: 255329 - RNA, 19 nt, Artificial Sequence
  Description of Artificial Sequence: Synthetic oligonucleotide
  Antisense strand to SEQ ID NO: 255328
auucugaggauauucugca

SEQ ID NO: 255330 - RNA, 19 nt, Artificial Sequence
  Description of Artificial Sequence: Synthetic oligonucleotide
  Sense strand starting at position 2862 SEQ ID NO: 3287
uucuuuaagcuuggacaga

SEQ ID NO: 255331 - RNA, 19 nt, Artificial Sequence
  Description of Artificial Sequence: Synthetic oligonucleotide
  Antisense strand to SEQ ID NO: 255330
ucuguccaagcuuaaagaa

SEQ ID NO: 255332 - RNA, 19 nt, Artificial Sequence
  Description of Artificial Sequence: Synthetic oligonucleotide
  Sense strand starting at position 2935 SEQ ID NO: 3287
uccauaauccucuggcaga

SEQ ID NO: 255333 - RNA, 19 nt, Artificial Sequence
  Description of Artificial Sequence: Synthetic oligonucleotide
  Antisense strand to SEQ ID NO: 255332
ucugccagaggauuaugga

SEQ ID NO: 255334 - RNA, 19 nt, Artificial Sequence
  Description of Artificial Sequence: Synthetic oligonucleotide
  Sense strand starting at position 3001 SEQ ID NO: 3287
gagagacugcuagguaaga

SEQ ID NO: 255335 - RNA, 19 nt, Artificial Sequence
  Description of Artificial Sequence: Synthetic oligonucleotide
  Antisense strand to SEQ ID NO: 255334
ucuuaccuagcagucucuc

SEQ ID NO: 255336 - RNA, 19 nt, Artificial Sequence
  Description of Artificial Sequence: Synthetic oligonucleotide
  Sense strand starting at position 3032 SEQ ID NO: 3287
uuuagcagacgugagaaau

SEQ ID NO: 255337 - RNA, 19 nt, Artificial Sequence
  Description of Artificial Sequence: Synthetic oligonucleotide
  Antisense strand to SEQ ID NO: 255336
auuucucacgucugcuaaa

SEQ ID NO: 255338 - RNA, 19 nt, Artificial Sequence
  Description of Artificial Sequence: Synthetic oligonucleotide
  Sense strand starting at position 3074 SEQ ID NO: 3287
uuagaauugcuguggauca

SEQ ID NO: 255339 - RNA, 19 nt, Artificial Sequence
  Description of Artificial Sequence: Synthetic oligonucleotide
  Antisense strand to SEQ ID NO: 255338
ugauccacagcaauucuaa

SEQ ID NO: 255340 - RNA, 19 nt, Artificial Sequence
  Description of Artificial Sequence: Synthetic oligonucleotide
  Sense strand starting at position 3189 SEQ ID NO: 3287
uugacucagauguaugagu

SEQ ID NO: 255341 - RNA, 19 nt, Artificial Sequence
  Description of Artificial Sequence: Synthetic oligonucleotide
  Antisense strand to SEQ ID NO: 255340
acucauacaucugagucaa

SEQ ID NO: 255342 - RNA, 19 nt, Artificial Sequence
  Description of Artificial Sequence: Synthetic oligonucleotide
  Sense strand starting at position 3191 SEQ ID NO: 3287
gacucagauguaugaguag

SEQ ID NO: 255343 - RNA, 19 nt, Artificial Sequence
  Description of Artificial Sequence: Synthetic oligonucleotide
  Antisense strand to SEQ ID NO: 255342
cuacucauacaucugaguc

SEQ ID NO: 255344 - RNA, 19 nt, Artificial Sequence
  Description of Artificial Sequence: Synthetic oligonucleotide
  Sense strand starting at position 3237 SEQ ID NO: 3287
aagauuucuugaggaacag

SEQ ID NO: 255345 - RNA, 19 nt, Artificial Sequence
  Description of Artificial Sequence: Synthetic oligonucleotide
  Antisense strand to SEQ ID NO: 255344
cuguuccucaagaaaucuu

SEQ ID NO: 255346 - RNA, 19 nt, Artificial Sequence
  Description of Artificial Sequence: Synthetic oligonucleotide
  Sense strand starting at position 3448 SEQ ID NO: 3287
agugguguaguuuaauaua

SEQ ID NO: 255347 - RNA, 19 nt, Artificial Sequence
  Description of Artificial Sequence: Synthetic oligonucleotide
  Antisense strand to SEQ ID NO: 255346
uauauuaaacuacaccacu

SEQ ID NO: 255348 - RNA, 19 nt, Artificial Sequence
  Description of Artificial Sequence: Synthetic oligonucleotide
  Sense strand starting at position 3637 SEQ ID NO: 3287
gauaguuaagggcagugaa

SEQ ID NO: 255349 - RNA, 19 nt, Artificial Sequence
  Description of Artificial Sequence: Synthetic oligonucleotide
  Antisense strand to SEQ ID NO: 255348
uucacugcccuuaacuauc

SEQ ID NO: 255350 - RNA, 19 nt, Artificial Sequence
  Description of Artificial Sequence: Synthetic oligonucleotide
  Sense strand starting at position 3657 SEQ ID NO: 3287
gggagucuauuacuguaaa

SEQ ID NO: 255351 - RNA, 19 nt, Artificial Sequence
  Description of Artificial Sequence: Synthetic oligonucleotide
  Antisense strand to SEQ ID NO: 255350
uuuacaguaauagacuccc

SEQ ID NO: 255352 - RNA, 19 nt, Artificial Sequence
  Description of Artificial Sequence: Synthetic oligonucleotide
  Sense strand starting at position 3660 SEQ ID NO: 3287
agucuauuacuguaaauag

SEQ ID NO: 255353 - RNA, 19 nt, Artificial Sequence
  Description of Artificial Sequence: Synthetic oligonucleotide
  Antisense strand to SEQ ID NO: 255352
cuauuuacaguaauagacu

SEQ ID NO: 255354 - RNA, 19 nt, Artificial Sequence
  Description of Artificial Sequence: Synthetic oligonucleotide
  Sense strand starting at position 3919 SEQ ID NO: 3287
ucucuacauccauagugua

SEQ ID NO: 255355 - RNA, 19 nt, Artificial Sequence
  Description of Artificial Sequence: Synthetic oligonucleotide
  Antisense strand to SEQ ID NO: 255354
uacacuauggauguagaga

SEQ ID NO: 255356 - RNA, 19 nt, Artificial Sequence
  Description of Artificial Sequence: Synthetic oligonucleotide
  Sense strand starting at position 3942 SEQ ID NO: 3287
cuggcacaucuauagugua

SEQ ID NO: 255357 - RNA, 19 nt, Artificial Sequence
  Description of Artificial Sequence: Synthetic oligonucleotide
  Antisense strand to SEQ ID NO: 255356
uacacuauagaugugccag

SEQ ID NO: 255358 - RNA, 19 nt, Artificial Sequence
  Description of Artificial Sequence: Synthetic oligonucleotide
  Sense strand starting at position 13 SEQ ID NO: 3286
gcauaauaggaucgcaaua

SEQ ID NO: 255359 - RNA, 19 nt, Artificial Sequence
  Description of Artificial Sequence: Synthetic oligonucleotide
  Antisense strand to SEQ ID NO: 255358
uauugcgauccuauuaugc

SEQ ID NO: 255360 - RNA, 19 nt, Artificial Sequence
  Description of Artificial Sequence: Synthetic oligonucleotide
  Sense strand starting at position 18 SEQ ID NO: 3286
auaggaucgcaauauguga

SEQ ID NO: 255361 - RNA, 19 nt, Artificial Sequence
  Description of Artificial Sequence: Synthetic oligonucleotide
  Antisense strand to SEQ ID NO: 255360
ucacauauugcgauccuau

SEQ ID NO: 255362 - RNA, 19 nt, Artificial Sequence
  Description of Artificial Sequence: Synthetic oligonucleotide
  Sense strand starting at position 49 SEQ ID NO: 3286
cagcauugagacuaguaua

SEQ ID NO: 255363 - RNA, 19 nt, Artificial Sequence
  Description of Artificial Sequence: Synthetic oligonucleotide
  Antisense strand to SEQ ID NO: 255362
uauacuagucucaaugcug

SEQ ID NO: 255364 - RNA, 19 nt, Artificial Sequence
  Description of Artificial Sequence: Synthetic oligonucleotide
  Sense strand starting at position 120 SEQ ID NO: 3286
aguuguuaauaagcauaga

SEQ ID NO: 255365 - RNA, 19 nt, Artificial Sequence
  Description of Artificial Sequence: Synthetic oligonucleotide
  Antisense strand to SEQ ID NO: 255364
ucuaugcuuauuaacaacu

SEQ ID NO: 255366 - RNA, 19 nt, Artificial Sequence
  Description of Artificial Sequence: Synthetic oligonucleotide
  Sense strand starting at position 233 SEQ ID NO: 3286
uucguauuauuugccuaaa

SEQ ID NO: 255367 - RNA, 19 nt, Artificial Sequence
  Description of Artificial Sequence: Synthetic oligonucleotide
  Antisense strand to SEQ ID NO: 255366
uuuaggcaaauaauacgaa

SEQ ID NO: 255368 - RNA, 19 nt, Artificial Sequence
  Description of Artificial Sequence: Synthetic oligonucleotide
  Sense strand starting at position 304 SEQ ID NO: 3286
ugcaaauucgaaggauaaa

SEQ ID NO: 255369 - RNA, 19 nt, Artificial Sequence
  Description of Artificial Sequence: Synthetic oligonucleotide
  Antisense strand to SEQ ID NO: 255368
uuuauccuucgaauuugca

SEQ ID NO: 255370 - RNA, 19 nt, Artificial Sequence
  Description of Artificial Sequence: Synthetic oligonucleotide
  Sense strand starting at position 417 SEQ ID NO: 3286
ucagaaagccugcaaaguu

SEQ ID NO: 255371 - RNA, 19 nt, Artificial Sequence
  Description of Artificial Sequence: Synthetic oligonucleotide
  Antisense strand to SEQ ID NO: 255370
aacuuugcaggcuuucuga

SEQ ID NO: 255372 - RNA, 19 nt, Artificial Sequence
  Description of Artificial Sequence: Synthetic oligonucleotide
  Sense strand starting at position 514 SEQ ID NO: 3286
auuauuucuuaauggagag

SEQ ID NO: 255373 - RNA, 19 nt, Artificial Sequence
  Description of Artificial Sequence: Synthetic oligonucleotide
  Antisense strand to SEQ ID NO: 255372
cucuccauuaagaaauaau

SEQ ID NO: 255374 - RNA, 19 nt, Artificial Sequence
  Description of Artificial Sequence: Synthetic oligonucleotide
  Sense strand starting at position 716 SEQ ID NO: 3286
gcuacagacucauugaaau

SEQ ID NO: 255375 - RNA, 19 nt, Artificial Sequence
  Description of Artificial Sequence: Synthetic oligonucleotide
  Antisense strand to SEQ ID NO: 255374
auuucaaugagucuguagc

SEQ ID NO: 255376 - RNA, 19 nt, Artificial Sequence
  Description of Artificial Sequence: Synthetic oligonucleotide
  Sense strand starting at position 868 SEQ ID NO: 3286
uugugcaaccucugauaaa

SEQ ID NO: 255377 - RNA, 19 nt, Artificial Sequence
  Description of Artificial Sequence: Synthetic oligonucleotide
  Antisense strand to SEQ ID NO: 255376
uuuaucagagguugcacaa

SEQ ID NO: 255378 - RNA, 19 nt, Artificial Sequence
  Description of Artificial Sequence: Synthetic oligonucleotide
  Sense strand starting at position 921 SEQ ID NO: 3286
uguuaauagucauccugac

SEQ ID NO: 255379 - RNA, 19 nt, Artificial Sequence
  Description of Artificial Sequence: Synthetic oligonucleotide
  Antisense strand to SEQ ID NO: 255378
gucaggaugacuauuaaca

SEQ ID NO: 255380 - RNA, 19 nt, Artificial Sequence
  Description of Artificial Sequence: Synthetic oligonucleotide
  Sense strand starting at position 1061 SEQ ID NO: 3286
ucucuagagucuguuuaag

SEQ ID NO: 255381 - RNA, 19 nt, Artificial Sequence
  Description of Artificial Sequence: Synthetic oligonucleotide
  Antisense strand to SEQ ID NO: 255380
cuuaaacagacucuagaga

SEQ ID NO: 255382 - RNA, 19 nt, Artificial Sequence
  Description of Artificial Sequence: Synthetic oligonucleotide
  Sense strand starting at position 1069 SEQ ID NO: 3286
gucuguuuaaguucguguu

SEQ ID NO: 255383 - RNA, 19 nt, Artificial Sequence
  Description of Artificial Sequence: Synthetic oligonucleotide
  Antisense strand to SEQ ID NO: 255382
aacacgaacuuaaacagac

SEQ ID NO: 255384 - RNA, 19 nt, Artificial Sequence
  Description of Artificial Sequence: Synthetic oligonucleotide
  Sense strand starting at position 1249 SEQ ID NO: 3286
aggaucagcuuugcucaga

SEQ ID NO: 255385 - RNA, 19 nt, Artificial Sequence
  Description of Artificial Sequence: Synthetic oligonucleotide
  Antisense strand to SEQ ID NO: 255384
ucugagcaaagcugauccu

SEQ ID NO: 255386 - RNA, 19 nt, Artificial Sequence
  Description of Artificial Sequence: Synthetic oligonucleotide
  Sense strand starting at position 1250 SEQ ID NO: 3286
ggaucagcuuugcucagaa

SEQ ID NO: 255387 - RNA, 19 nt, Artificial Sequence
  Description of Artificial Sequence: Synthetic oligonucleotide
  Antisense strand to SEQ ID NO: 255386
uucugagcaaagcugaucc

SEQ ID NO: 255388 - RNA, 19 nt, Artificial Sequence
  Description of Artificial Sequence: Synthetic oligonucleotide
  Sense strand starting at position 1624 SEQ ID NO: 3286
gagacccaucagcaguaau

SEQ ID NO: 255389 - RNA, 19 nt, Artificial Sequence
  Description of Artificial Sequence: Synthetic oligonucleotide
  Antisense strand to SEQ ID NO: 255388
auuacugcugaugggucuc

SEQ ID NO: 255390 - RNA, 19 nt, Artificial Sequence
  Description of Artificial Sequence: Synthetic oligonucleotide
  Sense strand starting at position 1758 SEQ ID NO: 3286
uugccauucccagauaaag

SEQ ID NO: 255391 - RNA, 19 nt, Artificial Sequence
  Description of Artificial Sequence: Synthetic oligonucleotide
  Antisense strand to SEQ ID NO: 255390
cuuuaucugggaauggcaa

SEQ ID NO: 255392 - RNA, 19 nt, Artificial Sequence
  Description of Artificial Sequence: Synthetic oligonucleotide
  Sense strand starting at position 1869 SEQ ID NO: 3286
ccauuuagcuggucagguu

SEQ ID NO: 255393 - RNA, 19 nt, Artificial Sequence
  Description of Artificial Sequence: Synthetic oligonucleotide
  Antisense strand to SEQ ID NO: 255392
aaccugaccagcuaaaugg

SEQ ID NO: 255394 - RNA, 19 nt, Artificial Sequence
  Description of Artificial Sequence: Synthetic oligonucleotide
  Sense strand starting at position 1931 SEQ ID NO: 3286
ucagaaggcuuuccagaga

SEQ ID NO: 255395 - RNA, 19 nt, Artificial Sequence
  Description of Artificial Sequence: Synthetic oligonucleotide
  Antisense strand to SEQ ID NO: 255394
ucucuggaaagccuucuga

SEQ ID NO: 255396 - RNA, 19 nt, Artificial Sequence
  Description of Artificial Sequence: Synthetic oligonucleotide
  Sense strand starting at position 2372 SEQ ID NO: 3286
ccgcuuauggaagaaaucu

SEQ ID NO: 255397 - RNA, 19 nt, Artificial Sequence
  Description of Artificial Sequence: Synthetic oligonucleotide
  Antisense strand to SEQ ID NO: 255396
agauuucuuccauaagcgg

SEQ ID NO: 255398 - RNA, 19 nt, Artificial Sequence
  Description of Artificial Sequence: Synthetic oligonucleotide
  Sense strand starting at position 2616 SEQ ID NO: 3286
guagaauucuagcuugaca

SEQ ID NO: 255399 - RNA, 19 nt, Artificial Sequence
  Description of Artificial Sequence: Synthetic oligonucleotide
  Antisense strand to SEQ ID NO: 255398
ugucaagcuagaauucuac

SEQ ID NO: 255400 - RNA, 19 nt, Artificial Sequence
  Description of Artificial Sequence: Synthetic oligonucleotide
  Sense strand starting at position 2618 SEQ ID NO: 3286
agaauucuagcuugacauu

SEQ ID NO: 255401 - RNA, 19 nt, Artificial Sequence
  Description of Artificial Sequence: Synthetic oligonucleotide
  Antisense strand to SEQ ID NO: 255400
aaugucaagcuagaauucu

SEQ ID NO: 255402 - RNA, 19 nt, Artificial Sequence
  Description of Artificial Sequence: Synthetic oligonucleotide
  Sense strand starting at position 2737 SEQ ID NO: 3286
acuugaguucugcauuauc

SEQ ID NO: 255403 - RNA, 19 nt, Artificial Sequence
  Description of Artificial Sequence: Synthetic oligonucleotide
  Antisense strand to SEQ ID NO: 255402
gauaaugcagaacucaagu

SEQ ID NO: 255404 - RNA, 19 nt, Artificial Sequence
  Description of Artificial Sequence: Synthetic oligonucleotide
  Sense strand starting at position 2740 SEQ ID NO: 3286
ugaguucugcauuaucaug

SEQ ID NO: 255405 - RNA, 19 nt, Artificial Sequence
  Description of Artificial Sequence: Synthetic oligonucleotide
  Antisense strand to SEQ ID NO: 255404
caugauaaugcagaacuca

SEQ ID NO: 255406 - RNA, 19 nt, Artificial Sequence
  Description of Artificial Sequence: Synthetic oligonucleotide
  Sense strand starting at position 2775 SEQ ID NO: 3286
ugcagaauauccucagaau

SEQ ID NO: 255407 - RNA, 19 nt, Artificial Sequence
  Description of Artificial Sequence: Synthetic oligonucleotide
  Antisense strand to SEQ ID NO: 255406
auucugaggauauucugca

SEQ ID NO: 255408 - RNA, 19 nt, Artificial Sequence
  Description of Artificial Sequence: Synthetic oligonucleotide
  Sense strand starting at position 2854 SEQ ID NO: 3286
uucuuuaagcuuggacaga

SEQ ID NO: 255409 - RNA, 19 nt, Artificial Sequence
  Description of Artificial Sequence: Synthetic oligonucleotide
  Antisense strand to SEQ ID NO: 255408
ucuguccaagcuuaaagaa

SEQ ID NO: 255410 - RNA, 19 nt, Artificial Sequence
  Description of Artificial Sequence: Synthetic oligonucleotide
  Sense strand starting at position 2927 SEQ ID NO: 3286
uccauaauccucuggcaga

SEQ ID NO: 255411 - RNA, 19 nt, Artificial Sequence
  Description of Artificial Sequence: Synthetic oligonucleotide
  Antisense strand to SEQ ID NO: 255410
ucugccagaggauuaugga

SEQ ID NO: 255412 - RNA, 19 nt, Artificial Sequence
  Description of Artificial Sequence: Synthetic oligonucleotide
  Sense strand starting at position 2993 SEQ ID NO: 3286
gagagacugcuagguaaga

SEQ ID NO: 255413 - RNA, 19 nt, Artificial Sequence
  Description of Artificial Sequence: Synthetic oligonucleotide
  Antisense strand to SEQ ID NO: 255412
ucuuaccuagcagucucuc

SEQ ID NO: 255414 - RNA, 19 nt, Artificial Sequence
  Description of Artificial Sequence: Synthetic oligonucleotide
  Sense strand starting at position 3024 SEQ ID NO: 3286
uuuagcagacgugagaaau

SEQ ID NO: 255415 - RNA, 19 nt, Artificial Sequence
  Description of Artificial Sequence: Synthetic oligonucleotide
  Antisense strand to SEQ ID NO: 255414
auuucucacgucugcuaaa

SEQ ID NO: 255416 - RNA, 19 nt, Artificial Sequence
  Description of Artificial Sequence: Synthetic oligonucleotide
  Sense strand starting at position 3066 SEQ ID NO: 3286
uuagaauugcuguggauca

SEQ ID NO: 255417 - RNA, 19 nt, Artificial Sequence
  Description of Artificial Sequence: Synthetic oligonucleotide
  Antisense strand to SEQ ID NO: 255416
ugauccacagcaauucuaa

SEQ ID NO: 255418 - RNA, 19 nt, Artificial Sequence
  Description of Artificial Sequence: Synthetic oligonucleotide
  Sense strand starting at position 3181 SEQ ID NO: 3286
uugacucagauguaugagu

SEQ ID NO: 255419 - RNA, 19 nt, Artificial Sequence
  Description of Artificial Sequence: Synthetic oligonucleotide
  Antisense strand to SEQ ID NO: 255418
acucauacaucugagucaa

SEQ ID NO: 255420 - RNA, 19 nt, Artificial Sequence
  Description of Artificial Sequence: Synthetic oligonucleotide
  Sense strand starting at position 3183 SEQ ID NO: 3286
gacucagauguaugaguag

SEQ ID NO: 255421 - RNA, 19 nt, Artificial Sequence
  Description of Artificial Sequence: Synthetic oligonucleotide
  Antisense strand to SEQ ID NO: 255420
cuacucauacaucugaguc

SEQ ID NO: 255422 - RNA, 19 nt, Artificial Sequence
  Description of Artificial Sequence: Synthetic oligonucleotide
  Sense strand starting at position 3229 SEQ ID NO: 3286
aagauuucuugaggaacag

SEQ ID NO: 255423 - RNA, 19 nt, Artificial Sequence
  Description of Artificial Sequence: Synthetic oligonucleotide
  Antisense strand to SEQ ID NO: 255422
cuguuccucaagaaaucuu

SEQ ID NO: 255424 - RNA, 19 nt, Artificial Sequence
  Description of Artificial Sequence: Synthetic oligonucleotide
  Sense strand starting at position 3440 SEQ ID NO: 3286
agugguguaguuuaauaua

SEQ ID NO: 255425 - RNA, 19 nt, Artificial Sequence
  Description of Artificial Sequence: Synthetic oligonucleotide
  Antisense strand to SEQ ID NO: 255424
uauauuaaacuacaccacu

SEQ ID NO: 255426 - RNA, 19 nt, Artificial Sequence
  Description of Artificial Sequence: Synthetic oligonucleotide
  Sense strand starting at position 3629 SEQ ID NO: 3286
gauaguuaagggcagugaa

SEQ ID NO: 255427 - RNA, 19 nt, Artificial Sequence
  Description of Artificial Sequence: Synthetic oligonucleotide
  Antisense strand to SEQ ID NO: 255426
uucacugcccuuaacuauc

SEQ ID NO: 255428 - RNA, 19 nt, Artificial Sequence
  Description of Artificial Sequence: Synthetic oligonucleotide
  Sense strand starting at position 3649 SEQ ID NO: 3286
gggagucuauuacuguaaa

SEQ ID NO: 255429 - RNA, 19 nt, Artificial Sequence
  Description of Artificial Sequence: Synthetic oligonucleotide
  Antisense strand to SEQ ID NO: 255428
uuuacaguaauagacuccc

SEQ ID NO: 255430 - RNA, 19 nt, Artificial Sequence
  Description of Artificial Sequence: Synthetic oligonucleotide
  Sense strand starting at position 3652 SEQ ID NO: 3286
agucuauuacuguaaauag

SEQ ID NO: 255431 - RNA, 19 nt, Artificial Sequence
  Description of Artificial Sequence: Synthetic oligonucleotide
  Antisense strand to SEQ ID NO: 255430
cuauuuacaguaauagacu

SEQ ID NO: 255432 - RNA, 19 nt, Artificial Sequence
  Description of Artificial Sequence: Synthetic oligonucleotide
  Sense strand starting at position 3874 SEQ ID NO: 3286
acagcuuugcuagaauguu

SEQ ID NO: 255433 - RNA, 19 nt, Artificial Sequence
  Description of Artificial Sequence: Synthetic oligonucleotide
  Antisense strand to SEQ ID NO: 255432
aacauucuagcaaagcugu

SEQ ID NO: 255434 - RNA, 19 nt, Artificial Sequence
  Description of Artificial Sequence: Synthetic oligonucleotide
  Sense strand starting at position 3911 SEQ ID NO: 3286
ucucuacauccauagugua

SEQ ID NO: 255435 - RNA, 19 nt, Artificial Sequence
  Description of Artificial Sequence: Synthetic oligonucleotide
  Antisense strand to SEQ ID NO: 255434
uacacuauggauguagaga

SEQ ID NO: 255436 - RNA, 19 nt, Artificial Sequence
  Description of Artificial Sequence: Synthetic oligonucleotide
  Sense strand starting at position 3934 SEQ ID NO: 3286
cuggcacaucuauagugua

SEQ ID NO: 255437 - RNA, 19 nt, Artificial Sequence
  Description of Artificial Sequence: Synthetic oligonucleotide
  Antisense strand to SEQ ID NO: 255436
uacacuauagaugugccag

SEQ ID NO: 255438 - RNA, 19 nt, Artificial Sequence
  Description of Artificial Sequence: Synthetic oligonucleotide
  Sense strand starting at position 34 SEQ ID NO: 3289
gguucugccauauggcaua

SEQ ID NO: 255439 - RNA, 19 nt, Artificial Sequence
  Description of Artificial Sequence: Synthetic oligonucleotide
  Antisense strand to SEQ ID NO: 255438
uaugccauauggcagaacc

SEQ ID NO: 255440 - RNA, 19 nt, Artificial Sequence
  Description of Artificial Sequence: Synthetic oligonucleotide
  Sense strand starting at position 95 SEQ ID NO: 3289
gugccagaaugaugaauau

SEQ ID NO: 255441 - RNA, 19 nt, Artificial Sequence
  Description of Artificial Sequence: Synthetic oligonucleotide
  Antisense strand to SEQ ID NO: 255440
auauucaucauucuggcac

SEQ ID NO: 255442 - RNA, 19 nt, Artificial Sequence
  Description of Artificial Sequence: Synthetic oligonucleotide
  Sense strand starting at position 104 SEQ ID NO: 3289
ugaugaauaucucuguuga

SEQ ID NO: 255443 - RNA, 19 nt, Artificial Sequence
  Description of Artificial Sequence: Synthetic oligonucleotide
  Antisense strand to SEQ ID NO: 255442
ucaacagagauauucauca

SEQ ID NO: 255444 - RNA, 19 nt, Artificial Sequence
  Description of Artificial Sequence: Synthetic oligonucleotide
  Sense strand starting at position 105 SEQ ID NO: 3289
gaugaauaucucuguugag

SEQ ID NO: 255445 - RNA, 19 nt, Artificial Sequence
  Description of Artificial Sequence: Synthetic oligonucleotide
  Antisense strand to SEQ ID NO: 255444
cucaacagagauauucauc

SEQ ID NO: 255446 - RNA, 19 nt, Artificial Sequence
  Description of Artificial Sequence: Synthetic oligonucleotide
  Sense strand starting at position 106 SEQ ID NO: 3289
augaauaucucuguugagu

SEQ ID NO: 255447 - RNA, 19 nt, Artificial Sequence
  Description of Artificial Sequence: Synthetic oligonucleotide
  Antisense strand to SEQ ID NO: 255446
acucaacagagauauucau

SEQ ID NO: 255448 - RNA, 19 nt, Artificial Sequence
  Description of Artificial Sequence: Synthetic oligonucleotide
  Sense strand starting at position 145 SEQ ID NO: 3289
cagcacgguucuguacaau

SEQ ID NO: 255449 - RNA, 19 nt, Artificial Sequence
  Description of Artificial Sequence: Synthetic oligonucleotide
  Antisense strand to SEQ ID NO: 255448
auuguacagaaccgugcug

SEQ ID NO: 255450 - RNA, 19 nt, Artificial Sequence
  Description of Artificial Sequence: Synthetic oligonucleotide
  Sense strand starting at position 148 SEQ ID NO: 3289
cacgguucuguacaaugua

SEQ ID NO: 255451 - RNA, 19 nt, Artificial Sequence
  Description of Artificial Sequence: Synthetic oligonucleotide
  Antisense strand to SEQ ID NO: 255450
uacauuguacagaaccgug

SEQ ID NO: 255452 - RNA, 19 nt, Artificial Sequence
  Description of Artificial Sequence: Synthetic oligonucleotide
  Sense strand starting at position 168 SEQ ID NO: 3289
ugcugcuggcauugauacu

SEQ ID NO: 255453 - RNA, 19 nt, Artificial Sequence
  Description of Artificial Sequence: Synthetic oligonucleotide
  Antisense strand to SEQ ID NO: 255452
aguaucaaugccagcagca

SEQ ID NO: 255454 - RNA, 19 nt, Artificial Sequence
  Description of Artificial Sequence: Synthetic oligonucleotide
  Sense strand starting at position 169 SEQ ID NO: 3289
gcugcuggcauugauacua

SEQ ID NO: 255455 - RNA, 19 nt, Artificial Sequence
  Description of Artificial Sequence: Synthetic oligonucleotide
  Antisense strand to SEQ ID NO: 255454
uaguaucaaugccagcagc

SEQ ID NO: 255456 - RNA, 19 nt, Artificial Sequence
  Description of Artificial Sequence: Synthetic oligonucleotide
  Sense strand starting at position 174 SEQ ID NO: 3289
uggcauugauacuaacauu

SEQ ID NO: 255457 - RNA, 19 nt, Artificial Sequence
  Description of Artificial Sequence: Synthetic oligonucleotide
  Antisense strand to SEQ ID NO: 255456
aauguuaguaucaaugcca

SEQ ID NO: 255458 - RNA, 19 nt, Artificial Sequence
  Description of Artificial Sequence: Synthetic oligonucleotide
  Sense strand starting at position 204 SEQ ID NO: 3289
gcccuuccuaggugguaau

SEQ ID NO: 255459 - RNA, 19 nt, Artificial Sequence
  Description of Artificial Sequence: Synthetic oligonucleotide
  Antisense strand to SEQ ID NO: 255458
auuaccaccuaggaagggc

SEQ ID NO: 255460 - RNA, 19 nt, Artificial Sequence
  Description of Artificial Sequence: Synthetic oligonucleotide
  Sense strand starting at position 207 SEQ ID NO: 3289
cuuccuaggugguaaugaa

SEQ ID NO: 255461 - RNA, 19 nt, Artificial Sequence
  Description of Artificial Sequence: Synthetic oligonucleotide
  Antisense strand to SEQ ID NO: 255460
uucauuaccaccuaggaag

SEQ ID NO: 255462 - RNA, 19 nt, Artificial Sequence
  Description of Artificial Sequence: Synthetic oligonucleotide
  Sense strand starting at position 219 SEQ ID NO: 3289
uaaugaagccuggguggau

SEQ ID NO: 255463 - RNA, 19 nt, Artificial Sequence
  Description of Artificial Sequence: Synthetic oligonucleotide
  Antisense strand to SEQ ID NO: 255462
auccacccaggcuucauua

SEQ ID NO: 255464 - RNA, 19 nt, Artificial Sequence
  Description of Artificial Sequence: Synthetic oligonucleotide
  Sense strand starting at position 271 SEQ ID NO: 3289
ucaaguggcccuugugaga

SEQ ID NO: 255465 - RNA, 19 nt, Artificial Sequence
  Description of Artificial Sequence: Synthetic oligonucleotide
  Antisense strand to SEQ ID NO: 255464
ucucacaagggccacuuga

SEQ ID NO: 255466 - RNA, 19 nt, Artificial Sequence
  Description of Artificial Sequence: Synthetic oligonucleotide
  Sense strand starting at position 598 SEQ ID NO: 3289
gggcaaggcccauacauau

SEQ ID NO: 255467 - RNA, 19 nt, Artificial Sequence
  Description of Artificial Sequence: Synthetic oligonucleotide
  Antisense strand to SEQ ID NO: 255466
auauguaugggccuugccc

SEQ ID NO: 255468 - RNA, 19 nt, Artificial Sequence
  Description of Artificial Sequence: Synthetic oligonucleotide
  Sense strand starting at position 607 SEQ ID NO: 3289
ccauacauauaucagggaa

SEQ ID NO: 255469 - RNA, 19 nt, Artificial Sequence
  Description of Artificial Sequence: Synthetic oligonucleotide
  Antisense strand to SEQ ID NO: 255468
uucccugauauauguaugg

SEQ ID NO: 255470 - RNA, 19 nt, Artificial Sequence
  Description of Artificial Sequence: Synthetic oligonucleotide
  Sense strand starting at position 609 SEQ ID NO: 3289
auacauauaucagggaaug

SEQ ID NO: 255471 - RNA, 19 nt, Artificial Sequence
  Description of Artificial Sequence: Synthetic oligonucleotide
  Antisense strand to SEQ ID NO: 255470
cauucccugauauauguau

SEQ ID NO: 255472 - RNA, 19 nt, Artificial Sequence
  Description of Artificial Sequence: Synthetic oligonucleotide
  Sense strand starting at position 648 SEQ ID NO: 3289
gcauaaaccuagggcuaua

SEQ ID NO: 255473 - RNA, 19 nt, Artificial Sequence
  Description of Artificial Sequence: Synthetic oligonucleotide
  Antisense strand to SEQ ID NO: 255472
uauagcccuagguuuaugc

SEQ ID NO: 255474 - RNA, 19 nt, Artificial Sequence
  Description of Artificial Sequence: Synthetic oligonucleotide
  Sense strand starting at position 736 SEQ ID NO: 3289
uuucuauuaucugggccaa

SEQ ID NO: 255475 - RNA, 19 nt, Artificial Sequence
  Description of Artificial Sequence: Synthetic oligonucleotide
  Antisense strand to SEQ ID NO: 255474
uuggcccagauaauagaaa

SEQ ID NO: 255476 - RNA, 19 nt, Artificial Sequence
  Description of Artificial Sequence: Synthetic oligonucleotide
  Sense strand starting at position 738 SEQ ID NO: 3289
ucuauuaucugggccaaca

SEQ ID NO: 255477 - RNA, 19 nt, Artificial Sequence
  Description of Artificial Sequence: Synthetic oligonucleotide
  Antisense strand to SEQ ID NO: 255476
uguuggcccagauaauaga

SEQ ID NO: 255478 - RNA, 19 nt, Artificial Sequence
  Description of Artificial Sequence: Synthetic oligonucleotide
  Sense strand starting at position 766 SEQ ID NO: 3289
ggaaaugaguuucagagag

SEQ ID NO: 255479 - RNA, 19 nt, Artificial Sequence
  Description of Artificial Sequence: Synthetic oligonucleotide
  Antisense strand to SEQ ID NO: 255478
cucucugaaacucauuucc

SEQ ID NO: 255480 - RNA, 19 nt, Artificial Sequence
  Description of Artificial Sequence: Synthetic oligonucleotide
  Sense strand starting at position 1012 SEQ ID NO: 3289
caugauuucucugaugcug

SEQ ID NO: 255481 - RNA, 19 nt, Artificial Sequence
  Description of Artificial Sequence: Synthetic oligonucleotide
  Antisense strand to SEQ ID NO: 255480
cagcaucagagaaaucaug

SEQ ID NO: 255482 - RNA, 19 nt, Artificial Sequence
  Description of Artificial Sequence: Synthetic oligonucleotide
  Sense strand starting at position 1118 SEQ ID NO: 3289
aacucaguugcagaguuua

SEQ ID NO: 255483 - RNA, 19 nt, Artificial Sequence
  Description of Artificial Sequence: Synthetic oligonucleotide
  Antisense strand to SEQ ID NO: 255482
uaaacucugcaacugaguu

SEQ ID NO: 255484 - RNA, 19 nt, Artificial Sequence
  Description of Artificial Sequence: Synthetic oligonucleotide
  Sense strand starting at position 1123 SEQ ID NO: 3289
aguugcagaguuuaauuga

SEQ ID NO: 255485 - RNA, 19 nt, Artificial Sequence
  Description of Artificial Sequence: Synthetic oligonucleotide
  Antisense strand to SEQ ID NO: 255484
ucaauuaaacucugcaacu

SEQ ID NO: 255486 - RNA, 19 nt, Artificial Sequence
  Description of Artificial Sequence: Synthetic oligonucleotide
  Sense strand starting at position 1130 SEQ ID NO: 3289
gaguuuaauugaugcugag

SEQ ID NO: 255487 - RNA, 19 nt, Artificial Sequence
  Description of Artificial Sequence: Synthetic oligonucleotide
  Antisense strand to SEQ ID NO: 255486
cucagcaucaauuaaacuc

SEQ ID NO: 255488 - RNA, 19 nt, Artificial Sequence
  Description of Artificial Sequence: Synthetic oligonucleotide
  Sense strand starting at position 1133 SEQ ID NO: 3289
uuuaauugaugcugaggga

SEQ ID NO: 255489 - RNA, 19 nt, Artificial Sequence
  Description of Artificial Sequence: Synthetic oligonucleotide
  Antisense strand to SEQ ID NO: 255488
ucccucagcaucaauuaaa

SEQ ID NO: 255490 - RNA, 19 nt, Artificial Sequence
  Description of Artificial Sequence: Synthetic oligonucleotide
  Sense strand starting at position 1136 SEQ ID NO: 3289
aauugaugcugagggauua

SEQ ID NO: 255491 - RNA, 19 nt, Artificial Sequence
  Description of Artificial Sequence: Synthetic oligonucleotide
  Antisense strand to SEQ ID NO: 255490
uaaucccucagcaucaauu

SEQ ID NO: 255492 - RNA, 19 nt, Artificial Sequence
  Description of Artificial Sequence: Synthetic oligonucleotide
  Sense strand starting at position 1137 SEQ ID NO: 3289
auugaugcugagggauuaa

SEQ ID NO: 255493 - RNA, 19 nt, Artificial Sequence
  Description of Artificial Sequence: Synthetic oligonucleotide
  Antisense strand to SEQ ID NO: 255492
uuaaucccucagcaucaau

SEQ ID NO: 255494 - RNA, 19 nt, Artificial Sequence
  Description of Artificial Sequence: Synthetic oligonucleotide
  Sense strand starting at position 1146 SEQ ID NO: 3289
gagggauuaaacuguagug

SEQ ID NO: 255495 - RNA, 19 nt, Artificial Sequence
  Description of Artificial Sequence: Synthetic oligonucleotide
  Antisense strand to SEQ ID NO: 255494
cacuacaguuuaaucccuc

SEQ ID NO: 255496 - RNA, 19 nt, Artificial Sequence
  Description of Artificial Sequence: Synthetic oligonucleotide
  Sense strand starting at position 1196 SEQ ID NO: 3289
guuggguuugcgcgcagaa

SEQ ID NO: 255497 - RNA, 19 nt, Artificial Sequence
  Description of Artificial Sequence: Synthetic oligonucleotide
  Antisense strand to SEQ ID NO: 255496
uucugcgcgcaaacccaac

SEQ ID NO: 255498 - RNA, 19 nt, Artificial Sequence
  Description of Artificial Sequence: Synthetic oligonucleotide
  Sense strand starting at position 1250 SEQ ID NO: 3289
cccgcagcucgguaacaau

SEQ ID NO: 255499 - RNA, 19 nt, Artificial Sequence
  Description of Artificial Sequence: Synthetic oligonucleotide
  Antisense strand to SEQ ID NO: 255498
auuguuaccgagcugcggg

SEQ ID NO: 255500 - RNA, 19 nt, Artificial Sequence
  Description of Artificial Sequence: Synthetic oligonucleotide
  Sense strand starting at position 1275 SEQ ID NO: 3289
ggaguuucacgucaguaaa

SEQ ID NO: 255501 - RNA, 19 nt, Artificial Sequence
  Description of Artificial Sequence: Synthetic oligonucleotide
  Antisense strand to SEQ ID NO: 255500
uuuacugacgugaaacucc

SEQ ID NO: 255502 - RNA, 19 nt, Artificial Sequence
  Description of Artificial Sequence: Synthetic oligonucleotide
  Sense strand starting at position 2577 SEQ ID NO: 3289
ggacaaagcgcucagcaaa

SEQ ID NO: 255503 - RNA, 19 nt, Artificial Sequence
  Description of Artificial Sequence: Synthetic oligonucleotide
  Antisense strand to SEQ ID NO: 255502
uuugcugagcgcuuugucc

SEQ ID NO: 255504 - RNA, 19 nt, Artificial Sequence
  Description of Artificial Sequence: Synthetic oligonucleotide
  Sense strand starting at position 2590 SEQ ID NO: 3289
agcaaaguuacugaacgau

SEQ ID NO: 255505 - RNA, 19 nt, Artificial Sequence
  Description of Artificial Sequence: Synthetic oligonucleotide
  Antisense strand to SEQ ID NO: 255504
aucguucaguaacuuugcu

SEQ ID NO: 255506 - RNA, 19 nt, Artificial Sequence
  Description of Artificial Sequence: Synthetic oligonucleotide
  Sense strand starting at position 2633 SEQ ID NO: 3289
guuugauauuguuuggaag

SEQ ID NO: 255507 - RNA, 19 nt, Artificial Sequence
  Description of Artificial Sequence: Synthetic oligonucleotide
  Antisense strand to SEQ ID NO: 255506
cuuccaaacaauaucaaac

SEQ ID NO: 255508 - RNA, 19 nt, Artificial Sequence
  Description of Artificial Sequence: Synthetic oligonucleotide
  Sense strand starting at position 2661 SEQ ID NO: 3289
uuucuuauccguguuugcu

SEQ ID NO: 255509 - RNA, 19 nt, Artificial Sequence
  Description of Artificial Sequence: Synthetic oligonucleotide
  Antisense strand to SEQ ID NO: 255508
agcaaacacggauaagaaa

SEQ ID NO: 255510 - RNA, 19 nt, Artificial Sequence
  Description of Artificial Sequence: Synthetic oligonucleotide
  Sense strand starting at position 2669 SEQ ID NO: 3289
ccguguuugcugugauacu

SEQ ID NO: 255511 - RNA, 19 nt, Artificial Sequence
  Description of Artificial Sequence: Synthetic oligonucleotide
  Antisense strand to SEQ ID NO: 255510
aguaucacagcaaacacgg

SEQ ID NO: 255512 - RNA, 19 nt, Artificial Sequence
  Description of Artificial Sequence: Synthetic oligonucleotide
  Sense strand starting at position 2744 SEQ ID NO: 3289
cgcugaggucuccaucgga

SEQ ID NO: 255513 - RNA, 19 nt, Artificial Sequence
  Description of Artificial Sequence: Synthetic oligonucleotide
  Antisense strand to SEQ ID NO: 255512
uccgauggagaccucagcg

SEQ ID NO: 255514 - RNA, 19 nt, Artificial Sequence
  Description of Artificial Sequence: Synthetic oligonucleotide
  Sense strand starting at position 2747 SEQ ID NO: 3289
ugaggucuccaucggaaac

SEQ ID NO: 255515 - RNA, 19 nt, Artificial Sequence
  Description of Artificial Sequence: Synthetic oligonucleotide
  Antisense strand to SEQ ID NO: 255514
guuuccgauggagaccuca

SEQ ID NO: 255516 - RNA, 19 nt, Artificial Sequence
  Description of Artificial Sequence: Synthetic oligonucleotide
  Sense strand starting at position 3082 SEQ ID NO: 3289
ggcagaauguaccagggau

SEQ ID NO: 255517 - RNA, 19 nt, Artificial Sequence
  Description of Artificial Sequence: Synthetic oligonucleotide
  Antisense strand to SEQ ID NO: 255516
aucccugguacauucugcc

SEQ ID NO: 255518 - RNA, 19 nt, Artificial Sequence
  Description of Artificial Sequence: Synthetic oligonucleotide
  Sense strand starting at position 289 SEQ ID NO: 3288
ccaguuuccugaucaucag

SEQ ID NO: 255519 - RNA, 19 nt, Artificial Sequence
  Description of Artificial Sequence: Synthetic oligonucleotide
  Antisense strand to SEQ ID NO: 255518
cugaugaucaggaaacugg

SEQ ID NO: 255520 - RNA, 19 nt, Artificial Sequence
  Description of Artificial Sequence: Synthetic oligonucleotide
  Sense strand starting at position 361 SEQ ID NO: 3288
ggcaccuaauggcuaaauu

SEQ ID NO: 255521 - RNA, 19 nt, Artificial Sequence
  Description of Artificial Sequence: Synthetic oligonucleotide
  Antisense strand to SEQ ID NO: 255520
aauuuagccauuaggugcc

SEQ ID NO: 255522 - RNA, 19 nt, Artificial Sequence
  Description of Artificial Sequence: Synthetic oligonucleotide
  Sense strand starting at position 407 SEQ ID NO: 3288
cuaucauagccaggaaacu

SEQ ID NO: 255523 - RNA, 19 nt, Artificial Sequence
  Description of Artificial Sequence: Synthetic oligonucleotide
  Antisense strand to SEQ ID NO: 255522
aguuuccuggcuaugauag

SEQ ID NO: 255524 - RNA, 19 nt, Artificial Sequence
  Description of Artificial Sequence: Synthetic oligonucleotide
  Sense strand starting at position 444 SEQ ID NO: 3288
cguaucuaugggcacauau

SEQ ID NO: 255525 - RNA, 19 nt, Artificial Sequence
  Description of Artificial Sequence: Synthetic oligonucleotide
  Antisense strand to SEQ ID NO: 255524
auaugugcccauagauacg

SEQ ID NO: 255526 - RNA, 19 nt, Artificial Sequence
  Description of Artificial Sequence: Synthetic oligonucleotide
  Sense strand starting at position 586 SEQ ID NO: 3288
uguaaaucaguuugacaca

SEQ ID NO: 255527 - RNA, 19 nt, Artificial Sequence
  Description of Artificial Sequence: Synthetic oligonucleotide
  Antisense strand to SEQ ID NO: 255526
ugugucaaacugauuuaca

SEQ ID NO: 255528 - RNA, 19 nt, Artificial Sequence
  Description of Artificial Sequence: Synthetic oligonucleotide
  Sense strand starting at position 718 SEQ ID NO: 3288
ucuugugaguaacucagaa

SEQ ID NO: 255529 - RNA, 19 nt, Artificial Sequence
  Description of Artificial Sequence: Synthetic oligonucleotide
  Antisense strand to SEQ ID NO: 255528
uucugaguuacucacaaga

SEQ ID NO: 255530 - RNA, 19 nt, Artificial Sequence
  Description of Artificial Sequence: Synthetic oligonucleotide
  Sense strand starting at position 746 SEQ ID NO: 3288
ggugucugcgauuauuuga

SEQ ID NO: 255531 - RNA, 19 nt, Artificial Sequence
  Description of Artificial Sequence: Synthetic oligonucleotide
  Antisense strand to SEQ ID NO: 255530
ucaaauaaucgcagacacc

SEQ ID NO: 255532 - RNA, 19 nt, Artificial Sequence
  Description of Artificial Sequence: Synthetic oligonucleotide
  Sense strand starting at position 749 SEQ ID NO: 3288
gucugcgauuauuugagua

SEQ ID NO: 255533 - RNA, 19 nt, Artificial Sequence
  Description of Artificial Sequence: Synthetic oligonucleotide
  Antisense strand to SEQ ID NO: 255532
uacucaaauaaucgcagac

SEQ ID NO: 255534 - RNA, 19 nt, Artificial Sequence
  Description of Artificial Sequence: Synthetic oligonucleotide
  Sense strand starting at position 827 SEQ ID NO: 3288
acuguauugcaugacaaca

SEQ ID NO: 255535 - RNA, 19 nt, Artificial Sequence
  Description of Artificial Sequence: Synthetic oligonucleotide
  Antisense strand to SEQ ID NO: 255534
uguugucaugcaauacagu

SEQ ID NO: 255536 - RNA, 19 nt, Artificial Sequence
  Description of Artificial Sequence: Synthetic oligonucleotide
  Sense strand starting at position 1110 SEQ ID NO: 3288
ggagcagaaacguggcaaa

SEQ ID NO: 255537 - RNA, 19 nt, Artificial Sequence
  Description of Artificial Sequence: Synthetic oligonucleotide
  Antisense strand to SEQ ID NO: 255536
uuugccacguuucugcucc

SEQ ID NO: 255538 - RNA, 19 nt, Artificial Sequence
  Description of Artificial Sequence: Synthetic oligonucleotide
  Sense strand starting at position 1170 SEQ ID NO: 3288
uuugacaauccucggaguu

SEQ ID NO: 255539 - RNA, 19 nt, Artificial Sequence
  Description of Artificial Sequence: Synthetic oligonucleotide
  Antisense strand to SEQ ID NO: 255538
aacuccgaggauugucaaa

SEQ ID NO: 255540 - RNA, 19 nt, Artificial Sequence
  Description of Artificial Sequence: Synthetic oligonucleotide
  Sense strand starting at position 1171 SEQ ID NO: 3288
uugacaauccucggaguuu

SEQ ID NO: 255541 - RNA, 19 nt, Artificial Sequence
  Description of Artificial Sequence: Synthetic oligonucleotide
  Antisense strand to SEQ ID NO: 255540
aaacuccgaggauugucaa

SEQ ID NO: 255542 - RNA, 19 nt, Artificial Sequence
  Description of Artificial Sequence: Synthetic oligonucleotide
  Sense strand starting at position 1283 SEQ ID NO: 3288
cacuuaucacugggcugau

SEQ ID NO: 255543 - RNA, 19 nt, Artificial Sequence
  Description of Artificial Sequence: Synthetic oligonucleotide
  Antisense strand to SEQ ID NO: 255542
aucagcccagugauaagug

SEQ ID NO: 255544 - RNA, 19 nt, Artificial Sequence
  Description of Artificial Sequence: Synthetic oligonucleotide
  Sense strand starting at position 1284 SEQ ID NO: 3288
acuuaucacugggcugaua

SEQ ID NO: 255545 - RNA, 19 nt, Artificial Sequence
  Description of Artificial Sequence: Synthetic oligonucleotide
  Antisense strand to SEQ ID NO: 255544
uaucagcccagugauaagu

SEQ ID NO: 255546 - RNA, 19 nt, Artificial Sequence
  Description of Artificial Sequence: Synthetic oligonucleotide
  Sense strand starting at position 1286 SEQ ID NO: 3288
uuaucacugggcugauaaa

SEQ ID NO: 255547 - RNA, 19 nt, Artificial Sequence
  Description of Artificial Sequence: Synthetic oligonucleotide
  Antisense strand to SEQ ID NO: 255546
uuuaucagcccagugauaa

SEQ ID NO: 255548 - RNA, 19 nt, Artificial Sequence
  Description of Artificial Sequence: Synthetic oligonucleotide
  Sense strand starting at position 1309 SEQ ID NO: 3288
gaagcuuaucagcacaagu

SEQ ID NO: 255549 - RNA, 19 nt, Artificial Sequence
  Description of Artificial Sequence: Synthetic oligonucleotide
  Antisense strand to SEQ ID NO: 255548
acuugugcugauaagcuuc

SEQ ID NO: 255550 - RNA, 19 nt, Artificial Sequence
  Description of Artificial Sequence: Synthetic oligonucleotide
  Sense strand starting at position 1311 SEQ ID NO: 3288
agcuuaucagcacaaguca

SEQ ID NO: 255551 - RNA, 19 nt, Artificial Sequence
  Description of Artificial Sequence: Synthetic oligonucleotide
  Antisense strand to SEQ ID NO: 255550
ugacuugugcugauaagcu

SEQ ID NO: 255552 - RNA, 19 nt, Artificial Sequence
  Description of Artificial Sequence: Synthetic oligonucleotide
  Sense strand starting at position 1330 SEQ ID NO: 3288
ugccuuagggucuaaaucu

SEQ ID NO: 255553 - RNA, 19 nt, Artificial Sequence
  Description of Artificial Sequence: Synthetic oligonucleotide
  Antisense strand to SEQ ID NO: 255552
agauuuagacccuaaggca

SEQ ID NO: 255554 - RNA, 19 nt, Artificial Sequence
  Description of Artificial Sequence: Synthetic oligonucleotide
  Sense strand starting at position 1401 SEQ ID NO: 3288
uguaaaugcuaagcaauaa

SEQ ID NO: 255555 - RNA, 19 nt, Artificial Sequence
  Description of Artificial Sequence: Synthetic oligonucleotide
  Antisense strand to SEQ ID NO: 255554
uuauugcuuagcauuuaca

SEQ ID NO: 255556 - RNA, 19 nt, Artificial Sequence
  Description of Artificial Sequence: Synthetic oligonucleotide
  Sense strand starting at position 1510 SEQ ID NO: 3288
acauacucguacucauaga

SEQ ID NO: 255557 - RNA, 19 nt, Artificial Sequence
  Description of Artificial Sequence: Synthetic oligonucleotide
  Antisense strand to SEQ ID NO: 255556
ucuaugaguacgaguaugu

SEQ ID NO: 255558 - RNA, 19 nt, Artificial Sequence
  Description of Artificial Sequence: Synthetic oligonucleotide
  Sense strand starting at position 2012 SEQ ID NO: 3288
guaggaagcuuagcaaaca

SEQ ID NO: 255559 - RNA, 19 nt, Artificial Sequence
  Description of Artificial Sequence: Synthetic oligonucleotide
  Antisense strand to SEQ ID NO: 255558
uguuugcuaagcuuccuac

SEQ ID NO: 255560 - RNA, 19 nt, Artificial Sequence
  Description of Artificial Sequence: Synthetic oligonucleotide
  Sense strand starting at position 2027 SEQ ID NO: 3288
aacagaacucugggaugca

SEQ ID NO: 255561 - RNA, 19 nt, Artificial Sequence
  Description of Artificial Sequence: Synthetic oligonucleotide
  Antisense strand to SEQ ID NO: 255560
ugcaucccagaguucuguu

SEQ ID NO: 255562 - RNA, 19 nt, Artificial Sequence
  Description of Artificial Sequence: Synthetic oligonucleotide
  Sense strand starting at position 2068 SEQ ID NO: 3288
gagucacuggagugggauu

SEQ ID NO: 255563 - RNA, 19 nt, Artificial Sequence
  Description of Artificial Sequence: Synthetic oligonucleotide
  Antisense strand to SEQ ID NO: 255562
aaucccacuccagugacuc

SEQ ID NO: 255564 - RNA, 19 nt, Artificial Sequence
  Description of Artificial Sequence: Synthetic oligonucleotide
  Sense strand starting at position 2162 SEQ ID NO: 3288
cccugacaggcagauguaa

SEQ ID NO: 255565 - RNA, 19 nt, Artificial Sequence
  Description of Artificial Sequence: Synthetic oligonucleotide
  Antisense strand to SEQ ID NO: 255564
uuacaucugccugucaggg

SEQ ID NO: 255566 - RNA, 19 nt, Artificial Sequence
  Description of Artificial Sequence: Synthetic oligonucleotide
  Sense strand starting at position 2199 SEQ ID NO: 3288
gcaccuagcggugaauaaa

SEQ ID NO: 255567 - RNA, 19 nt, Artificial Sequence
  Description of Artificial Sequence: Synthetic oligonucleotide
  Antisense strand to SEQ ID NO: 255566
uuuauucaccgcuaggugc

SEQ ID NO: 255568 - RNA, 19 nt, Artificial Sequence
  Description of Artificial Sequence: Synthetic oligonucleotide
  Sense strand starting at position 2348 SEQ ID NO: 3288
cucggcugaagugaucaaa

SEQ ID NO: 255569 - RNA, 19 nt, Artificial Sequence
  Description of Artificial Sequence: Synthetic oligonucleotide
  Antisense strand to SEQ ID NO: 255568
uuugaucacuucagccgag

SEQ ID NO: 255570 - RNA, 19 nt, Artificial Sequence
  Description of Artificial Sequence: Synthetic oligonucleotide
  Sense strand starting at position 2602 SEQ ID NO: 3288
uagcguggccuucucuuaa

SEQ ID NO: 255571 - RNA, 19 nt, Artificial Sequence
  Description of Artificial Sequence: Synthetic oligonucleotide
  Antisense strand to SEQ ID NO: 255570
uuaagagaaggccacgcua

SEQ ID NO: 255572 - RNA, 19 nt, Artificial Sequence
  Description of Artificial Sequence: Synthetic oligonucleotide
  Sense strand starting at position 2690 SEQ ID NO: 3288
aguauauccugguuuacaa

SEQ ID NO: 255573 - RNA, 19 nt, Artificial Sequence
  Description of Artificial Sequence: Synthetic oligonucleotide
  Antisense strand to SEQ ID NO: 255572
uuguaaaccaggauauacu

SEQ ID NO: 255574 - RNA, 19 nt, Artificial Sequence
  Description of Artificial Sequence: Synthetic oligonucleotide
  Sense strand starting at position 3028 SEQ ID NO: 3288
accugaacucucuggcaaa

SEQ ID NO: 255575 - RNA, 19 nt, Artificial Sequence
  Description of Artificial Sequence: Synthetic oligonucleotide
  Antisense strand to SEQ ID NO: 255574
uuugccagagaguucaggu

SEQ ID NO: 255576 - RNA, 19 nt, Artificial Sequence
  Description of Artificial Sequence: Synthetic oligonucleotide
  Sense strand starting at position 3104 SEQ ID NO: 3288
uuccucuuuccaggagacu

SEQ ID NO: 255577 - RNA, 19 nt, Artificial Sequence
  Description of Artificial Sequence: Synthetic oligonucleotide
  Antisense strand to SEQ ID NO: 255576
agucuccuggaaagaggaa

SEQ ID NO: 255578 - RNA, 19 nt, Artificial Sequence
  Description of Artificial Sequence: Synthetic oligonucleotide
  Sense strand starting at position 3150 SEQ ID NO: 3288
gcugaagacagccagucau

SEQ ID NO: 255579 - RNA, 19 nt, Artificial Sequence
  Description of Artificial Sequence: Synthetic oligonucleotide
  Antisense strand to SEQ ID NO: 255578
augacuggcugucuucagc

SEQ ID NO: 255580 - RNA, 19 nt, Artificial Sequence
  Description of Artificial Sequence: Synthetic oligonucleotide
  Sense strand starting at position 3523 SEQ ID NO: 3288
ucguguaaccuuuacuuga

SEQ ID NO: 255581 - RNA, 19 nt, Artificial Sequence
  Description of Artificial Sequence: Synthetic oligonucleotide
  Antisense strand to SEQ ID NO: 255580
ucaaguaaagguuacacga

SEQ ID NO: 255582 - RNA, 19 nt, Artificial Sequence
  Description of Artificial Sequence: Synthetic oligonucleotide
  Sense strand starting at position 3525 SEQ ID NO: 3288
guguaaccuuuacuugaaa

SEQ ID NO: 255583 - RNA, 19 nt, Artificial Sequence
  Description of Artificial Sequence: Synthetic oligonucleotide
  Antisense strand to SEQ ID NO: 255582
uuucaaguaaagguuacac

SEQ ID NO: 255584 - RNA, 19 nt, Artificial Sequence
  Description of Artificial Sequence: Synthetic oligonucleotide
  Sense strand starting at position 3578 SEQ ID NO: 3288
gcacaugauaguuauggca

SEQ ID NO: 255585 - RNA, 19 nt, Artificial Sequence
  Description of Artificial Sequence: Synthetic oligonucleotide
  Antisense strand to SEQ ID NO: 255584
ugccauaacuaucaugugc

SEQ ID NO: 255586 - RNA, 19 nt, Artificial Sequence
  Description of Artificial Sequence: Synthetic oligonucleotide
  Sense strand starting at position 3625 SEQ ID NO: 3288
gcugaaaucuggccucaca

SEQ ID NO: 255587 - RNA, 19 nt, Artificial Sequence
  Description of Artificial Sequence: Synthetic oligonucleotide
  Antisense strand to SEQ ID NO: 255586
ugugaggccagauuucagc

SEQ ID NO: 255588 - RNA, 19 nt, Artificial Sequence
  Description of Artificial Sequence: Synthetic oligonucleotide
  Sense strand starting at position 3628 SEQ ID NO: 3288
gaaaucuggccucacagua

SEQ ID NO: 255589 - RNA, 19 nt, Artificial Sequence
  Description of Artificial Sequence: Synthetic oligonucleotide
  Antisense strand to SEQ ID NO: 255588
uacugugaggccagauuuc

SEQ ID NO: 255590 - RNA, 19 nt, Artificial Sequence
  Description of Artificial Sequence: Synthetic oligonucleotide
  Sense strand starting at position 3795 SEQ ID NO: 3288
uuggucaucucacuuagaa

SEQ ID NO: 255591 - RNA, 19 nt, Artificial Sequence
  Description of Artificial Sequence: Synthetic oligonucleotide
  Antisense strand to SEQ ID NO: 255590
uucuaagugagaugaccaa

SEQ ID NO: 255592 - RNA, 19 nt, Artificial Sequence
  Description of Artificial Sequence: Synthetic oligonucleotide
  Sense strand starting at position 3893 SEQ ID NO: 3288
ugguucuaacccuggagga

SEQ ID NO: 255593 - RNA, 19 nt, Artificial Sequence
  Description of Artificial Sequence: Synthetic oligonucleotide
  Antisense strand to SEQ ID NO: 255592
uccuccaggguuagaacca

SEQ ID NO: 255594 - RNA, 19 nt, Artificial Sequence
  Description of Artificial Sequence: Synthetic oligonucleotide
  Sense strand starting at position 3894 SEQ ID NO: 3288
gguucuaacccuggaggau

SEQ ID NO: 255595 - RNA, 19 nt, Artificial Sequence
  Description of Artificial Sequence: Synthetic oligonucleotide
  Antisense strand to SEQ ID NO: 255594
auccuccaggguuagaacc

SEQ ID NO: 255596 - RNA, 19 nt, Artificial Sequence
  Description of Artificial Sequence: Synthetic oligonucleotide
  Sense strand starting at position 3915 SEQ ID NO: 3288
agacauguugucugaaaug

SEQ ID NO: 255597 - RNA, 19 nt, Artificial Sequence
  Description of Artificial Sequence: Synthetic oligonucleotide
  Antisense strand to SEQ ID NO: 255596
cauuucagacaacaugucu

SEQ ID NO: 255598 - RNA, 19 nt, Artificial Sequence
  Description of Artificial Sequence: Synthetic oligonucleotide
  Sense strand starting at position 128 SEQ ID NO: 3290
gcaucucuccaaggacaca

SEQ ID NO: 255599 - RNA, 19 nt, Artificial Sequence
  Description of Artificial Sequence: Synthetic oligonucleotide
  Antisense strand to SEQ ID NO: 255598
uguguccuuggagagaugc

SEQ ID NO: 255600 - RNA, 19 nt, Artificial Sequence
  Description of Artificial Sequence: Synthetic oligonucleotide
  Sense strand starting at position 157 SEQ ID NO: 3290
uucaguguuuggguaauag

SEQ ID NO: 255601 - RNA, 19 nt, Artificial Sequence
  Description of Artificial Sequence: Synthetic oligonucleotide
  Antisense strand to SEQ ID NO: 255600
cuauuacccaaacacugaa

SEQ ID NO: 255602 - RNA, 19 nt, Artificial Sequence
  Description of Artificial Sequence: Synthetic oligonucleotide
  Sense strand starting at position 242 SEQ ID NO: 3290
cggacacucuugccaaaca

SEQ ID NO: 255603 - RNA, 19 nt, Artificial Sequence
  Description of Artificial Sequence: Synthetic oligonucleotide
  Antisense strand to SEQ ID NO: 255602
uguuuggcaagaguguccg

SEQ ID NO: 255604 - RNA, 19 nt, Artificial Sequence
  Description of Artificial Sequence: Synthetic oligonucleotide
  Sense strand starting at position 318 SEQ ID NO: 3290
gucugcucugagggugaga

SEQ ID NO: 255605 - RNA, 19 nt, Artificial Sequence
  Description of Artificial Sequence: Synthetic oligonucleotide
  Antisense strand to SEQ ID NO: 255604
ucucacccucagagcagac

SEQ ID NO: 255606 - RNA, 19 nt, Artificial Sequence
  Description of Artificial Sequence: Synthetic oligonucleotide
  Sense strand starting at position 417 SEQ ID NO: 3290
agaguuaaaccuggugcuu

SEQ ID NO: 255607 - RNA, 19 nt, Artificial Sequence
  Description of Artificial Sequence: Synthetic oligonucleotide
  Antisense strand to SEQ ID NO: 255606
aagcaccagguuuaacucu

SEQ ID NO: 255608 - RNA, 19 nt, Artificial Sequence
  Description of Artificial Sequence: Synthetic oligonucleotide
  Sense strand starting at position 436 SEQ ID NO: 3290
uuugcuuugggucagugau

SEQ ID NO: 255609 - RNA, 19 nt, Artificial Sequence
  Description of Artificial Sequence: Synthetic oligonucleotide
  Antisense strand to SEQ ID NO: 255608
aucacugacccaaagcaaa

SEQ ID NO: 255610 - RNA, 19 nt, Artificial Sequence
  Description of Artificial Sequence: Synthetic oligonucleotide
  Sense strand starting at position 438 SEQ ID NO: 3290
ugcuuugggucagugauaa

SEQ ID NO: 255611 - RNA, 19 nt, Artificial Sequence
  Description of Artificial Sequence: Synthetic oligonucleotide
  Antisense strand to SEQ ID NO: 255610
uuaucacugacccaaagca

SEQ ID NO: 255612 - RNA, 19 nt, Artificial Sequence
  Description of Artificial Sequence: Synthetic oligonucleotide
  Sense strand starting at position 524 SEQ ID NO: 3290
gacugaagcagaugucgau

SEQ ID NO: 255613 - RNA, 19 nt, Artificial Sequence
  Description of Artificial Sequence: Synthetic oligonucleotide
  Antisense strand to SEQ ID NO: 255612
aucgacaucugcuucaguc

SEQ ID NO: 255614 - RNA, 19 nt, Artificial Sequence
  Description of Artificial Sequence: Synthetic oligonucleotide
  Sense strand starting at position 530 SEQ ID NO: 3290
agcagaugucgaugggaac

SEQ ID NO: 255615 - RNA, 19 nt, Artificial Sequence
  Description of Artificial Sequence: Synthetic oligonucleotide
  Antisense strand to SEQ ID NO: 255614
guucccaucgacaucugcu

SEQ ID NO: 255616 - RNA, 19 nt, Artificial Sequence
  Description of Artificial Sequence: Synthetic oligonucleotide
  Sense strand starting at position 715 SEQ ID NO: 3290
aauagagaagugugacuca

SEQ ID NO: 255617 - RNA, 19 nt, Artificial Sequence
  Description of Artificial Sequence: Synthetic oligonucleotide
  Antisense strand to SEQ ID NO: 255616
ugagucacacuucucuauu

SEQ ID NO: 255618 - RNA, 19 nt, Artificial Sequence
  Description of Artificial Sequence: Synthetic oligonucleotide
  Sense strand starting at position 720 SEQ ID NO: 3290
agaagugugacucagagca

SEQ ID NO: 255619 - RNA, 19 nt, Artificial Sequence
  Description of Artificial Sequence: Synthetic oligonucleotide
  Antisense strand to SEQ ID NO: 255618
ugcucugagucacacuucu

SEQ ID NO: 255620 - RNA, 19 nt, Artificial Sequence
  Description of Artificial Sequence: Synthetic oligonucleotide
  Sense strand starting at position 841 SEQ ID NO: 3290
uuagcuuagcugcaaagaa

SEQ ID NO: 255621 - RNA, 19 nt, Artificial Sequence
  Description of Artificial Sequence: Synthetic oligonucleotide
  Antisense strand to SEQ ID NO: 255620
uucuuugcagcuaagcuaa

SEQ ID NO: 255622 - RNA, 19 nt, Artificial Sequence
  Description of Artificial Sequence: Synthetic oligonucleotide
  Sense strand starting at position 958 SEQ ID NO: 3290
cccauugagugcccaugau

SEQ ID NO: 255623 - RNA, 19 nt, Artificial Sequence
  Description of Artificial Sequence: Synthetic oligonucleotide
  Antisense strand to SEQ ID NO: 255622
aucaugggcacucaauggg

SEQ ID NO: 255624 - RNA, 19 nt, Artificial Sequence
  Description of Artificial Sequence: Synthetic oligonucleotide
  Sense strand starting at position 1078 SEQ ID NO: 3290
cuggcacuacccugaacau

SEQ ID NO: 255625 - RNA, 19 nt, Artificial Sequence
  Description of Artificial Sequence: Synthetic oligonucleotide
  Antisense strand to SEQ ID NO: 255624
auguucaggguagugccag

SEQ ID NO: 255626 - RNA, 19 nt, Artificial Sequence
  Description of Artificial Sequence: Synthetic oligonucleotide
  Sense strand starting at position 1229 SEQ ID NO: 3290
agaagaaagguuuguugcu

SEQ ID NO: 255627 - RNA, 19 nt, Artificial Sequence
  Description of Artificial Sequence: Synthetic oligonucleotide
  Antisense strand to SEQ ID NO: 255626
agcaacaaaccuuucuucu

SEQ ID NO: 255628 - RNA, 19 nt, Artificial Sequence
  Description of Artificial Sequence: Synthetic oligonucleotide
  Sense strand starting at position 1254 SEQ ID NO: 3290
ggugggugagggcaucaua

SEQ ID NO: 255629 - RNA, 19 nt, Artificial Sequence
  Description of Artificial Sequence: Synthetic oligonucleotide
  Antisense strand to SEQ ID NO: 255628
uaugaugcccucacccacc

SEQ ID NO: 255630 - RNA, 19 nt, Artificial Sequence
  Description of Artificial Sequence: Synthetic oligonucleotide
  Sense strand starting at position 1290 SEQ ID NO: 3290
gucacuuucggaggagaug

SEQ ID NO: 255631 - RNA, 19 nt, Artificial Sequence
  Description of Artificial Sequence: Synthetic oligonucleotide
  Antisense strand to SEQ ID NO: 255630
caucuccuccgaaagugac

SEQ ID NO: 255632 - RNA, 19 nt, Artificial Sequence
  Description of Artificial Sequence: Synthetic oligonucleotide
  Sense strand starting at position 1349 SEQ ID NO: 3290
cgcagugaaauccgggaau

SEQ ID NO: 255633 - RNA, 19 nt, Artificial Sequence
  Description of Artificial Sequence: Synthetic oligonucleotide
  Antisense strand to SEQ ID NO: 255632
auucccggauuucacugcg

SEQ ID NO: 255634 - RNA, 19 nt, Artificial Sequence
  Description of Artificial Sequence: Synthetic oligonucleotide
  Sense strand starting at position 1352 SEQ ID NO: 3290
agugaaauccgggaaucgu

SEQ ID NO: 255635 - RNA, 19 nt, Artificial Sequence
  Description of Artificial Sequence: Synthetic oligonucleotide
  Antisense strand to SEQ ID NO: 255634
acgauucccggauuucacu

SEQ ID NO: 255636 - RNA, 19 nt, Artificial Sequence
  Description of Artificial Sequence: Synthetic oligonucleotide
  Sense strand starting at position 2301 SEQ ID NO: 3290
uggguucuaucaguuuaga

SEQ ID NO: 255637 - RNA, 19 nt, Artificial Sequence
  Description of Artificial Sequence: Synthetic oligonucleotide
  Antisense strand to SEQ ID NO: 255636
ucuaaacugauagaaccca

SEQ ID NO: 255638 - RNA, 19 nt, Artificial Sequence
  Description of Artificial Sequence: Synthetic oligonucleotide
  Sense strand starting at position 2352 SEQ ID NO: 3290
ggacgacuucuccauucca

SEQ ID NO: 255639 - RNA, 19 nt, Artificial Sequence
  Description of Artificial Sequence: Synthetic oligonucleotide
  Antisense strand to SEQ ID NO: 255638
uggaauggagaagucgucc

SEQ ID NO: 255640 - RNA, 19 nt, Artificial Sequence
  Description of Artificial Sequence: Synthetic oligonucleotide
  Sense strand starting at position 2529 SEQ ID NO: 3290
caguucuacccauaguugu

SEQ ID NO: 255641 - RNA, 19 nt, Artificial Sequence
  Description of Artificial Sequence: Synthetic oligonucleotide
  Antisense strand to SEQ ID NO: 255640
acaacuauggguagaacug

SEQ ID NO: 255642 - RNA, 19 nt, Artificial Sequence
  Description of Artificial Sequence: Synthetic oligonucleotide
  Sense strand starting at position 2630 SEQ ID NO: 3290
gcgaguaagcucuuugcuu

SEQ ID NO: 255643 - RNA, 19 nt, Artificial Sequence
  Description of Artificial Sequence: Synthetic oligonucleotide
  Antisense strand to SEQ ID NO: 255642
aagcaaagagcuuacucgc

SEQ ID NO: 255644 - RNA, 19 nt, Artificial Sequence
  Description of Artificial Sequence: Synthetic oligonucleotide
  Sense strand starting at position 2675 SEQ ID NO: 3290
cugguagaaauguagaagu

SEQ ID NO: 255645 - RNA, 19 nt, Artificial Sequence
  Description of Artificial Sequence: Synthetic oligonucleotide
  Antisense strand to SEQ ID NO: 255644
acuucuacauuucuaccag

SEQ ID NO: 255646 - RNA, 19 nt, Artificial Sequence
  Description of Artificial Sequence: Synthetic oligonucleotide
  Sense strand starting at position 2677 SEQ ID NO: 3290
gguagaaauguagaagucu

SEQ ID NO: 255647 - RNA, 19 nt, Artificial Sequence
  Description of Artificial Sequence: Synthetic oligonucleotide
  Antisense strand to SEQ ID NO: 255646
agacuucuacauuucuacc

SEQ ID NO: 255648 - RNA, 19 nt, Artificial Sequence
  Description of Artificial Sequence: Synthetic oligonucleotide
  Sense strand starting at position 2778 SEQ ID NO: 3290
ugaccuaaguugcucaaau

SEQ ID NO: 255649 - RNA, 19 nt, Artificial Sequence
  Description of Artificial Sequence: Synthetic oligonucleotide
  Antisense strand to SEQ ID NO: 255648
auuugagcaacuuagguca

SEQ ID NO: 255650 - RNA, 19 nt, Artificial Sequence
  Description of Artificial Sequence: Synthetic oligonucleotide
  Sense strand starting at position 2779 SEQ ID NO: 3290
gaccuaaguugcucaaaug

SEQ ID NO: 255651 - RNA, 19 nt, Artificial Sequence
  Description of Artificial Sequence: Synthetic oligonucleotide
  Antisense strand to SEQ ID NO: 255650
cauuugagcaacuuagguc

SEQ ID NO: 255652 - RNA, 19 nt, Artificial Sequence
  Description of Artificial Sequence: Synthetic oligonucleotide
  Sense strand starting at position 2780 SEQ ID NO: 3290
accuaaguugcucaaaugu

SEQ ID NO: 255653 - RNA, 19 nt, Artificial Sequence
  Description of Artificial Sequence: Synthetic oligonucleotide
  Antisense strand to SEQ ID NO: 255652
acauuugagcaacuuaggu

SEQ ID NO: 255654 - RNA, 19 nt, Artificial Sequence
  Description of Artificial Sequence: Synthetic oligonucleotide
  Sense strand starting at position 2834 SEQ ID NO: 3290
gcacauaauguguacuuga

SEQ ID NO: 255655 - RNA, 19 nt, Artificial Sequence
  Description of Artificial Sequence: Synthetic oligonucleotide
  Antisense strand to SEQ ID NO: 255654
ucaaguacacauuaugugc

SEQ ID NO: 255656 - RNA, 19 nt, Artificial Sequence
  Description of Artificial Sequence: Synthetic oligonucleotide
  Sense strand starting at position 2863 SEQ ID NO: 3290
auccuuguugcaugaggau

SEQ ID NO: 255657 - RNA, 19 nt, Artificial Sequence
  Description of Artificial Sequence: Synthetic oligonucleotide
  Antisense strand to SEQ ID NO: 255656
auccucaugcaacaaggau

SEQ ID NO: 255658 - RNA, 19 nt, Artificial Sequence
  Description of Artificial Sequence: Synthetic oligonucleotide
  Sense strand starting at position 3085 SEQ ID NO: 3290
aggcacugugauggauaau

SEQ ID NO: 255659 - RNA, 19 nt, Artificial Sequence
  Description of Artificial Sequence: Synthetic oligonucleotide
  Antisense strand to SEQ ID NO: 255658
auuauccaucacagugccu

SEQ ID NO: 255660 - RNA, 19 nt, Artificial Sequence
  Description of Artificial Sequence: Synthetic oligonucleotide
  Sense strand starting at position 3099 SEQ ID NO: 3290
auaauauugucagcucgau

SEQ ID NO: 255661 - RNA, 19 nt, Artificial Sequence
  Description of Artificial Sequence: Synthetic oligonucleotide
  Antisense strand to SEQ ID NO: 255660
aucgagcugacaauauuau

SEQ ID NO: 255662 - RNA, 19 nt, Artificial Sequence
  Description of Artificial Sequence: Synthetic oligonucleotide
  Sense strand starting at position 3103 SEQ ID NO: 3290
uauugucagcucgauugau

SEQ ID NO: 255663 - RNA, 19 nt, Artificial Sequence
  Description of Artificial Sequence: Synthetic oligonucleotide
  Antisense strand to SEQ ID NO: 255662
aucaaucgagcugacaaua

SEQ ID NO: 255664 - RNA, 19 nt, Artificial Sequence
  Description of Artificial Sequence: Synthetic oligonucleotide
  Sense strand starting at position 3107 SEQ ID NO: 3290
gucagcucgauugauauga

SEQ ID NO: 255665 - RNA, 19 nt, Artificial Sequence
  Description of Artificial Sequence: Synthetic oligonucleotide
  Antisense strand to SEQ ID NO: 255664
ucauaucaaucgagcugac

SEQ ID NO: 255666 - RNA, 19 nt, Artificial Sequence
  Description of Artificial Sequence: Synthetic oligonucleotide
  Sense strand starting at position 3111 SEQ ID NO: 3290
gcucgauugauaugaacga

SEQ ID NO: 255667 - RNA, 19 nt, Artificial Sequence
  Description of Artificial Sequence: Synthetic oligonucleotide
  Antisense strand to SEQ ID NO: 255666
ucguucauaucaaucgagc

SEQ ID NO: 255668 - RNA, 19 nt, Artificial Sequence
  Description of Artificial Sequence: Synthetic oligonucleotide
  Sense strand starting at position 3684 SEQ ID NO: 3290
acaucuuagcugggucuua

SEQ ID NO: 255669 - RNA, 19 nt, Artificial Sequence
  Description of Artificial Sequence: Synthetic oligonucleotide
  Antisense strand to SEQ ID NO: 255668
uaagacccagcuaagaugu

SEQ ID NO: 255670 - RNA, 19 nt, Artificial Sequence
  Description of Artificial Sequence: Synthetic oligonucleotide
  Sense strand starting at position 3685 SEQ ID NO: 3290
caucuuagcugggucuuaa

SEQ ID NO: 255671 - RNA, 19 nt, Artificial Sequence
  Description of Artificial Sequence: Synthetic oligonucleotide
  Antisense strand to SEQ ID NO: 255670
uuaagacccagcuaagaug

SEQ ID NO: 255672 - RNA, 19 nt, Artificial Sequence
  Description of Artificial Sequence: Synthetic oligonucleotide
  Sense strand starting at position 3838 SEQ ID NO: 3290
gagagaucaaagugguugu

SEQ ID NO: 255673 - RNA, 19 nt, Artificial Sequence
  Description of Artificial Sequence: Synthetic oligonucleotide
  Antisense strand to SEQ ID NO: 255672
acaaccacuuugaucucuc

SEQ ID NO: 255674 - RNA, 19 nt, Artificial Sequence
  Description of Artificial Sequence: Synthetic oligonucleotide
  Sense strand starting at position 3918 SEQ ID NO: 3290
uugaauuuauucuaaggca

SEQ ID NO: 255675 - RNA, 19 nt, Artificial Sequence
  Description of Artificial Sequence: Synthetic oligonucleotide
  Antisense strand to SEQ ID NO: 255674
ugccuuagaauaaauucaa

SEQ ID NO: 255676 - RNA, 19 nt, Artificial Sequence
  Description of Artificial Sequence: Synthetic oligonucleotide
  Sense strand starting at position 3945 SEQ ID NO: 3290
gggaaguucugaguaggag

SEQ ID NO: 255677 - RNA, 19 nt, Artificial Sequence
  Description of Artificial Sequence: Synthetic oligonucleotide
  Antisense strand to SEQ ID NO: 255676
cuccuacucagaacuuccc

SEQ ID NO: 255678 - RNA, 19 nt, Artificial Sequence
  Description of Artificial Sequence: Synthetic oligonucleotide
  Sense strand starting at position 128 SEQ ID NO: 3290
gcaucucuccaaggacaca

SEQ ID NO: 255679 - RNA, 19 nt, Artificial Sequence
  Description of Artificial Sequence: Synthetic oligonucleotide
  Antisense strand to SEQ ID NO: 255678
uguguccuuggagagaugc

SEQ ID NO: 255680 - RNA, 19 nt, Artificial Sequence
  Description of Artificial Sequence: Synthetic oligonucleotide
  Sense strand starting at position 157 SEQ ID NO: 3290
uucaguguuuggguaauag

SEQ ID NO: 255681 - RNA, 19 nt, Artificial Sequence
  Description of Artificial Sequence: Synthetic oligonucleotide
  Antisense strand to SEQ ID NO: 255680
cuauuacccaaacacugaa

SEQ ID NO: 255682 - RNA, 19 nt, Artificial Sequence
  Description of Artificial Sequence: Synthetic oligonucleotide
  Sense strand starting at position 242 SEQ ID NO: 3290
cggacacucuugccaaaca

SEQ ID NO: 255683 - RNA, 19 nt, Artificial Sequence
  Description of Artificial Sequence: Synthetic oligonucleotide
  Antisense strand to SEQ ID NO: 255682
uguuuggcaagaguguccg

SEQ ID NO: 255684 - RNA, 19 nt, Artificial Sequence
  Description of Artificial Sequence: Synthetic oligonucleotide
  Sense strand starting at position 318 SEQ ID NO: 3290
gucugcucugagggugaga

SEQ ID NO: 255685 - RNA, 19 nt, Artificial Sequence
  Description of Artificial Sequence: Synthetic oligonucleotide
  Antisense strand to SEQ ID NO: 255684
ucucacccucagagcagac

SEQ ID NO: 255686 - RNA, 19 nt, Artificial Sequence
  Description of Artificial Sequence: Synthetic oligonucleotide
  Sense strand starting at position 417 SEQ ID NO: 3290
agaguuaaaccuggugcuu

SEQ ID NO: 255687 - RNA, 19 nt, Artificial Sequence
  Description of Artificial Sequence: Synthetic oligonucleotide
  Antisense strand to SEQ ID NO: 255686
aagcaccagguuuaacucu

SEQ ID NO: 255688 - RNA, 19 nt, Artificial Sequence
  Description of Artificial Sequence: Synthetic oligonucleotide
  Sense strand starting at position 436 SEQ ID NO: 3290
uuugcuuugggucagugau

SEQ ID NO: 255689 - RNA, 19 nt, Artificial Sequence
  Description of Artificial Sequence: Synthetic oligonucleotide
  Antisense strand to SEQ ID NO: 255688
aucacugacccaaagcaaa

SEQ ID NO: 255690 - RNA, 19 nt, Artificial Sequence
  Description of Artificial Sequence: Synthetic oligonucleotide
  Sense strand starting at position 438 SEQ ID NO: 3290
ugcuuugggucagugauaa

SEQ ID NO: 255691 - RNA, 19 nt, Artificial Sequence
  Description of Artificial Sequence: Synthetic oligonucleotide
  Antisense strand to SEQ ID NO: 255690
uuaucacugacccaaagca

SEQ ID NO: 255692 - RNA, 19 nt, Artificial Sequence
  Description of Artificial Sequence: Synthetic oligonucleotide
  Sense strand starting at position 524 SEQ ID NO: 3290
gacugaagcagaugucgau

SEQ ID NO: 255693 - RNA, 19 nt, Artificial Sequence
  Description of Artificial Sequence: Synthetic oligonucleotide
  Antisense strand to SEQ ID NO: 255692
aucgacaucugcuucaguc

SEQ ID NO: 255694 - RNA, 19 nt, Artificial Sequence
  Description of Artificial Sequence: Synthetic oligonucleotide
  Sense strand starting at position 530 SEQ ID NO: 3290
agcagaugucgaugggaac

SEQ ID NO: 255695 - RNA, 19 nt, Artificial Sequence
  Description of Artificial Sequence: Synthetic oligonucleotide
  Antisense strand to SEQ ID NO: 255694
guucccaucgacaucugcu

SEQ ID NO: 255696 - RNA, 19 nt, Artificial Sequence
  Description of Artificial Sequence: Synthetic oligonucleotide
  Sense strand starting at position 715 SEQ ID NO: 3290
aauagagaagugugacuca

SEQ ID NO: 255697 - RNA, 19 nt, Artificial Sequence
  Description of Artificial Sequence: Synthetic oligonucleotide
  Antisense strand to SEQ ID NO: 255696
ugagucacacuucucuauu

SEQ ID NO: 255698 - RNA, 19 nt, Artificial Sequence
  Description of Artificial Sequence: Synthetic oligonucleotide
  Sense strand starting at position 720 SEQ ID NO: 3290
agaagugugacucagagca

SEQ ID NO: 255699 - RNA, 19 nt, Artificial Sequence
  Description of Artificial Sequence: Synthetic oligonucleotide
  Antisense strand to SEQ ID NO: 255698
ugcucugagucacacuucu

SEQ ID NO: 255700 - RNA, 19 nt, Artificial Sequence
  Description of Artificial Sequence: Synthetic oligonucleotide
  Sense strand starting at position 841 SEQ ID NO: 3290
uuagcuuagcugcaaagaa

SEQ ID NO: 255701 - RNA, 19 nt, Artificial Sequence
  Description of Artificial Sequence: Synthetic oligonucleotide
  Antisense strand to SEQ ID NO: 255700
uucuuugcagcuaagcuaa

SEQ ID NO: 255702 - RNA, 19 nt, Artificial Sequence
  Description of Artificial Sequence: Synthetic oligonucleotide
  Sense strand starting at position 958 SEQ ID NO: 3290
cccauugagugcccaugau

SEQ ID NO: 255703 - RNA, 19 nt, Artificial Sequence
  Description of Artificial Sequence: Synthetic oligonucleotide
  Antisense strand to SEQ ID NO: 255702
aucaugggcacucaauggg

SEQ ID NO: 255704 - RNA, 19 nt, Artificial Sequence
  Description of Artificial Sequence: Synthetic oligonucleotide
  Sense strand starting at position 1078 SEQ ID NO: 3290
cuggcacuacccugaacau

SEQ ID NO: 255705 - RNA, 19 nt, Artificial Sequence
  Description of Artificial Sequence: Synthetic oligonucleotide
  Antisense strand to SEQ ID NO: 255704
auguucaggguagugccag

SEQ ID NO: 255706 - RNA, 19 nt, Artificial Sequence
  Description of Artificial Sequence: Synthetic oligonucleotide
  Sense strand starting at position 1229 SEQ ID NO: 3290
agaagaaagguuuguugcu

SEQ ID NO: 255707 - RNA, 19 nt, Artificial Sequence
  Description of Artificial Sequence: Synthetic oligonucleotide
  Antisense strand to SEQ ID NO: 255706
agcaacaaaccuuucuucu

SEQ ID NO: 255708 - RNA, 19 nt, Artificial Sequence
  Description of Artificial Sequence: Synthetic oligonucleotide
  Sense strand starting at position 1254 SEQ ID NO: 3290
ggugggugagggcaucaua

SEQ ID NO: 255709 - RNA, 19 nt, Artificial Sequence
  Description of Artificial Sequence: Synthetic oligonucleotide
  Antisense strand to SEQ ID NO: 255708
uaugaugcccucacccacc

SEQ ID NO: 255710 - RNA, 19 nt, Artificial Sequence
  Description of Artificial Sequence: Synthetic oligonucleotide
  Sense strand starting at position 1290 SEQ ID NO: 3290
gucacuuucggaggagaug

SEQ ID NO: 255711 - RNA, 19 nt, Artificial Sequence
  Description of Artificial Sequence: Synthetic oligonucleotide
  Antisense strand to SEQ ID NO: 255710
caucuccuccgaaagugac

SEQ ID NO: 255712 - RNA, 19 nt, Artificial Sequence
  Description of Artificial Sequence: Synthetic oligonucleotide
  Sense strand starting at position 1349 SEQ ID NO: 3290
cgcagugaaauccgggaau

SEQ ID NO: 255713 - RNA, 19 nt, Artificial Sequence
  Description of Artificial Sequence: Synthetic oligonucleotide
  Antisense strand to SEQ ID NO: 255712
auucccggauuucacugcg

SEQ ID NO: 255714 - RNA, 19 nt, Artificial Sequence
  Description of Artificial Sequence: Synthetic oligonucleotide
  Sense strand starting at position 1352 SEQ ID NO: 3290
agugaaauccgggaaucgu

SEQ ID NO: 255715 - RNA, 19 nt, Artificial Sequence
  Description of Artificial Sequence: Synthetic oligonucleotide
  Antisense strand to SEQ ID NO: 255714
acgauucccggauuucacu

SEQ ID NO: 255716 - RNA, 19 nt, Artificial Sequence
  Description of Artificial Sequence: Synthetic oligonucleotide
  Sense strand starting at position 2301 SEQ ID NO: 3290
uggguucuaucaguuuaga

SEQ ID NO: 255717 - RNA, 19 nt, Artificial Sequence
  Description of Artificial Sequence: Synthetic oligonucleotide
  Antisense strand to SEQ ID NO: 255716
ucuaaacugauagaaccca

SEQ ID NO: 255718 - RNA, 19 nt, Artificial Sequence
  Description of Artificial Sequence: Synthetic oligonucleotide
  Sense strand starting at position 2352 SEQ ID NO: 3290
ggacgacuucuccauucca

SEQ ID NO: 255719 - RNA, 19 nt, Artificial Sequence
  Description of Artificial Sequence: Synthetic oligonucleotide
  Antisense strand to SEQ ID NO: 255718
uggaauggagaagucgucc

SEQ ID NO: 255720 - RNA, 19 nt, Artificial Sequence
  Description of Artificial Sequence: Synthetic oligonucleotide
  Sense strand starting at position 2529 SEQ ID NO: 3290
caguucuacccauaguugu

SEQ ID NO: 255721 - RNA, 19 nt, Artificial Sequence
  Description of Artificial Sequence: Synthetic oligonucleotide
  Antisense strand to SEQ ID NO: 255720
acaacuauggguagaacug

SEQ ID NO: 255722 - RNA, 19 nt, Artificial Sequence
  Description of Artificial Sequence: Synthetic oligonucleotide
  Sense strand starting at position 2630 SEQ ID NO: 3290
gcgaguaagcucuuugcuu

SEQ ID NO: 255723 - RNA, 19 nt, Artificial Sequence
  Description of Artificial Sequence: Synthetic oligonucleotide
  Antisense strand to SEQ ID NO: 255722
aagcaaagagcuuacucgc

SEQ ID NO: 255724 - RNA, 19 nt, Artificial Sequence
  Description of Artificial Sequence: Synthetic oligonucleotide
  Sense strand starting at position 2675 SEQ ID NO: 3290
cugguagaaauguagaagu

SEQ ID NO: 255725 - RNA, 19 nt, Artificial Sequence
  Description of Artificial Sequence: Synthetic oligonucleotide
  Antisense strand to SEQ ID NO: 255724
acuucuacauuucuaccag

SEQ ID NO: 255726 - RNA, 19 nt, Artificial Sequence
  Description of Artificial Sequence: Synthetic oligonucleotide
  Sense strand starting at position 2677 SEQ ID NO: 3290
gguagaaauguagaagucu

SEQ ID NO: 255727 - RNA, 19 nt, Artificial Sequence
  Description of Artificial Sequence: Synthetic oligonucleotide
  Antisense strand to SEQ ID NO: 255726
agacuucuacauuucuacc

SEQ ID NO: 255728 - RNA, 19 nt, Artificial Sequence
  Description of Artificial Sequence: Synthetic oligonucleotide
  Sense strand starting at position 2778 SEQ ID NO: 3290
ugaccuaaguugcucaaau

SEQ ID NO: 255729 - RNA, 19 nt, Artificial Sequence
  Description of Artificial Sequence: Synthetic oligonucleotide
  Antisense strand to SEQ ID NO: 255728
auuugagcaacuuagguca

SEQ ID NO: 255730 - RNA, 19 nt, Artificial Sequence
  Description of Artificial Sequence: Synthetic oligonucleotide
  Sense strand starting at position 2779 SEQ ID NO: 3290
gaccuaaguugcucaaaug

SEQ ID NO: 255731 - RNA, 19 nt, Artificial Sequence
  Description of Artificial Sequence: Synthetic oligonucleotide
  Antisense strand to SEQ ID NO: 255730
cauuugagcaacuuagguc

SEQ ID NO: 255732 - RNA, 19 nt, Artificial Sequence
  Description of Artificial Sequence: Synthetic oligonucleotide
  Sense strand starting at position 2780 SEQ ID NO: 3290
accuaaguugcucaaaugu

SEQ ID NO: 255733 - RNA, 19 nt, Artificial Sequence
  Description of Artificial Sequence: Synthetic oligonucleotide
  Antisense strand to SEQ ID NO: 255732
acauuugagcaacuuaggu

SEQ ID NO: 255734 - RNA, 19 nt, Artificial Sequence
  Description of Artificial Sequence: Synthetic oligonucleotide
  Sense strand starting at position 2834 SEQ ID NO: 3290
gcacauaauguguacuuga

SEQ ID NO: 255735 - RNA, 19 nt, Artificial Sequence
  Description of Artificial Sequence: Synthetic oligonucleotide
  Antisense strand to SEQ ID NO: 255734
ucaaguacacauuaugugc

SEQ ID NO: 255736 - RNA, 19 nt, Artificial Sequence
  Description of Artificial Sequence: Synthetic oligonucleotide
  Sense strand starting at position 2863 SEQ ID NO: 3290
auccuuguugcaugaggau

SEQ ID NO: 255737 - RNA, 19 nt, Artificial Sequence
  Description of Artificial Sequence: Synthetic oligonucleotide
  Antisense strand to SEQ ID NO: 255736
auccucaugcaacaaggau

SEQ ID NO: 255738 - RNA, 19 nt, Artificial Sequence
  Description of Artificial Sequence: Synthetic oligonucleotide
  Sense strand starting at position 3085 SEQ ID NO: 3290
aggcacugugauggauaau

SEQ ID NO: 255739 - RNA, 19 nt, Artificial Sequence
  Description of Artificial Sequence: Synthetic oligonucleotide
  Antisense strand to SEQ ID NO: 255738
auuauccaucacagugccu

SEQ ID NO: 255740 - RNA, 19 nt, Artificial Sequence
  Description of Artificial Sequence: Synthetic oligonucleotide
  Sense strand starting at position 3099 SEQ ID NO: 3290
auaauauugucagcucgau

SEQ ID NO: 255741 - RNA, 19 nt, Artificial Sequence
  Description of Artificial Sequence: Synthetic oligonucleotide
  Antisense strand to SEQ ID NO: 255740
aucgagcugacaauauuau

SEQ ID NO: 255742 - RNA, 19 nt, Artificial Sequence
  Description of Artificial Sequence: Synthetic oligonucleotide
  Sense strand starting at position 3103 SEQ ID NO: 3290
uauugucagcucgauugau

SEQ ID NO: 255743 - RNA, 19 nt, Artificial Sequence
  Description of Artificial Sequence: Synthetic oligonucleotide
  Antisense strand to SEQ ID NO: 255742
aucaaucgagcugacaaua

SEQ ID NO: 255744 - RNA, 19 nt, Artificial Sequence
  Description of Artificial Sequence: Synthetic oligonucleotide
  Sense strand starting at position 3107 SEQ ID NO: 3290
gucagcucgauugauauga

SEQ ID NO: 255745 - RNA, 19 nt, Artificial Sequence
  Description of Artificial Sequence: Synthetic oligonucleotide
  Antisense strand to SEQ ID NO: 255744
ucauaucaaucgagcugac

SEQ ID NO: 255746 - RNA, 19 nt, Artificial Sequence
  Description of Artificial Sequence: Synthetic oligonucleotide
  Sense strand starting at position 3111 SEQ ID NO: 3290
gcucgauugauaugaacga

SEQ ID NO: 255747 - RNA, 19 nt, Artificial Sequence
  Description of Artificial Sequence: Synthetic oligonucleotide
  Antisense strand to SEQ ID NO: 255746
ucguucauaucaaucgagc

SEQ ID NO: 255748 - RNA, 19 nt, Artificial Sequence
  Description of Artificial Sequence: Synthetic oligonucleotide
  Sense strand starting at position 3684 SEQ ID NO: 3290
acaucuuagcugggucuua

SEQ ID NO: 255749 - RNA, 19 nt, Artificial Sequence
  Description of Artificial Sequence: Synthetic oligonucleotide
  Antisense strand to SEQ ID NO: 255748
uaagacccagcuaagaugu

SEQ ID NO: 255750 - RNA, 19 nt, Artificial Sequence
  Description of Artificial Sequence: Synthetic oligonucleotide
  Sense strand starting at position 3685 SEQ ID NO: 3290
caucuuagcugggucuuaa

SEQ ID NO: 255751 - RNA, 19 nt, Artificial Sequence
  Description of Artificial Sequence: Synthetic oligonucleotide
  Antisense strand to SEQ ID NO: 255750
uuaagacccagcuaagaug

SEQ ID NO: 255752 - RNA, 19 nt, Artificial Sequence
  Description of Artificial Sequence: Synthetic oligonucleotide
  Sense strand starting at position 3838 SEQ ID NO: 3290
gagagaucaaagugguugu

SEQ ID NO: 255753 - RNA, 19 nt, Artificial Sequence
  Description of Artificial Sequence: Synthetic oligonucleotide
  Antisense strand to SEQ ID NO: 255752
acaaccacuuugaucucuc

SEQ ID NO: 255754 - RNA, 19 nt, Artificial Sequence
  Description of Artificial Sequence: Synthetic oligonucleotide
  Sense strand starting at position 3918 SEQ ID NO: 3290
uugaauuuauucuaaggca

SEQ ID NO: 255755 - RNA, 19 nt, Artificial Sequence
  Description of Artificial Sequence: Synthetic oligonucleotide
  Antisense strand to SEQ ID NO: 255754
ugccuuagaauaaauucaa

SEQ ID NO: 255756 - RNA, 19 nt, Artificial Sequence
  Description of Artificial Sequence: Synthetic oligonucleotide
  Sense strand starting at position 3945 SEQ ID NO: 3290
gggaaguucugaguaggag

SEQ ID NO: 255757 - RNA, 19 nt, Artificial Sequence
  Description of Artificial Sequence: Synthetic oligonucleotide
  Antisense strand to SEQ ID NO: 255756
cuccuacucagaacuuccc

SEQ ID NO: 255758 - RNA, 19 nt, Artificial Sequence
  Description of Artificial Sequence: Synthetic oligonucleotide
  Sense strand starting at position 194 SEQ ID NO: 3291
ccauuauaagccuguaaga

SEQ ID NO: 255759 - RNA, 19 nt, Artificial Sequence
  Description of Artificial Sequence: Synthetic oligonucleotide
  Antisense strand to SEQ ID NO: 255758
ucuuacaggcuuauaaugg

SEQ ID NO: 255760 - RNA, 19 nt, Artificial Sequence
  Description of Artificial Sequence: Synthetic oligonucleotide
  Sense strand starting at position 196 SEQ ID NO: 3291
auuauaagccuguaagaau

SEQ ID NO: 255761 - RNA, 19 nt, Artificial Sequence
  Description of Artificial Sequence: Synthetic oligonucleotide
  Antisense strand to SEQ ID NO: 255760
auucuuacaggcuuauaau

SEQ ID NO: 255762 - RNA, 19 nt, Artificial Sequence
  Description of Artificial Sequence: Synthetic oligonucleotide
  Sense strand starting at position 205 SEQ ID NO: 3291
cuguaagaaugucucauua

SEQ ID NO: 255763 - RNA, 19 nt, Artificial Sequence
  Description of Artificial Sequence: Synthetic oligonucleotide
  Antisense strand to SEQ ID NO: 255762
uaaugagacauucuuacag

SEQ ID NO: 255764 - RNA, 19 nt, Artificial Sequence
  Description of Artificial Sequence: Synthetic oligonucleotide
  Sense strand starting at position 215 SEQ ID NO: 3291
gucucauuagauuacucuu

SEQ ID NO: 255765 - RNA, 19 nt, Artificial Sequence
  Description of Artificial Sequence: Synthetic oligonucleotide
  Antisense strand to SEQ ID NO: 255764
aagaguaaucuaaugagac

SEQ ID NO: 255766 - RNA, 19 nt, Artificial Sequence
  Description of Artificial Sequence: Synthetic oligonucleotide
  Sense strand starting at position 797 SEQ ID NO: 3291
agcccauugccucacagau

SEQ ID NO: 255767 - RNA, 19 nt, Artificial Sequence
  Description of Artificial Sequence: Synthetic oligonucleotide
  Antisense strand to SEQ ID NO: 255766
aucugugaggcaaugggcu

SEQ ID NO: 255768 - RNA, 19 nt, Artificial Sequence
  Description of Artificial Sequence: Synthetic oligonucleotide
  Sense strand starting at position 810 SEQ ID NO: 3291
acagauugcuaugcaccaa

SEQ ID NO: 255769 - RNA, 19 nt, Artificial Sequence
  Description of Artificial Sequence: Synthetic oligonucleotide
  Antisense strand to SEQ ID NO: 255768
uuggugcauagcaaucugu

SEQ ID NO: 255770 - RNA, 19 nt, Artificial Sequence
  Description of Artificial Sequence: Synthetic oligonucleotide
  Sense strand starting at position 851 SEQ ID NO: 3291
auagcaauguagucacaaa

SEQ ID NO: 255771 - RNA, 19 nt, Artificial Sequence
  Description of Artificial Sequence: Synthetic oligonucleotide
  Antisense strand to SEQ ID NO: 255770
uuugugacuacauugcuau

SEQ ID NO: 255772 - RNA, 19 nt, Artificial Sequence
  Description of Artificial Sequence: Synthetic oligonucleotide
  Sense strand starting at position 976 SEQ ID NO: 3291
agcuguuacgcugcguaga

SEQ ID NO: 255773 - RNA, 19 nt, Artificial Sequence
  Description of Artificial Sequence: Synthetic oligonucleotide
  Antisense strand to SEQ ID NO: 255772
ucuacgcagcguaacagcu

SEQ ID NO: 255774 - RNA, 19 nt, Artificial Sequence
  Description of Artificial Sequence: Synthetic oligonucleotide
  Sense strand starting at position 1064 SEQ ID NO: 3291
cuagaagaccucugaaagu

SEQ ID NO: 255775 - RNA, 19 nt, Artificial Sequence
  Description of Artificial Sequence: Synthetic oligonucleotide
  Antisense strand to SEQ ID NO: 255774
acuuucagaggucuucuag

SEQ ID NO: 255776 - RNA, 19 nt, Artificial Sequence
  Description of Artificial Sequence: Synthetic oligonucleotide
  Sense strand starting at position 1225 SEQ ID NO: 3291
ucauccuaugcuggagauu

SEQ ID NO: 255777 - RNA, 19 nt, Artificial Sequence
  Description of Artificial Sequence: Synthetic oligonucleotide
  Antisense strand to SEQ ID NO: 255776
aaucuccagcauaggauga

SEQ ID NO: 255778 - RNA, 19 nt, Artificial Sequence
  Description of Artificial Sequence: Synthetic oligonucleotide
  Sense strand starting at position 1419 SEQ ID NO: 3291
acucauggucuauggguua

SEQ ID NO: 255779 - RNA, 19 nt, Artificial Sequence
  Description of Artificial Sequence: Synthetic oligonucleotide
  Antisense strand to SEQ ID NO: 255778
uaacccauagaccaugagu

SEQ ID NO: 255780 - RNA, 19 nt, Artificial Sequence
  Description of Artificial Sequence: Synthetic oligonucleotide
  Sense strand starting at position 1424 SEQ ID NO: 3291
uggucuauggguuaaugua

SEQ ID NO: 255781 - RNA, 19 nt, Artificial Sequence
  Description of Artificial Sequence: Synthetic oligonucleotide
  Antisense strand to SEQ ID NO: 255780
uacauuaacccauagacca

SEQ ID NO: 255782 - RNA, 19 nt, Artificial Sequence
  Description of Artificial Sequence: Synthetic oligonucleotide
  Sense strand starting at position 1529 SEQ ID NO: 3291
caaauaugacgucgcauuu

SEQ ID NO: 255783 - RNA, 19 nt, Artificial Sequence
  Description of Artificial Sequence: Synthetic oligonucleotide
  Antisense strand to SEQ ID NO: 255782
aaaugcgacgucauauuug

SEQ ID NO: 255784 - RNA, 19 nt, Artificial Sequence
  Description of Artificial Sequence: Synthetic oligonucleotide
  Sense strand starting at position 1541 SEQ ID NO: 3291
cgcauuuggcccuauuaca

SEQ ID NO: 255785 - RNA, 19 nt, Artificial Sequence
  Description of Artificial Sequence: Synthetic oligonucleotide
  Antisense strand to SEQ ID NO: 255784
uguaauagggccaaaugcg

SEQ ID NO: 255786 - RNA, 19 nt, Artificial Sequence
  Description of Artificial Sequence: Synthetic oligonucleotide
  Sense strand starting at position 1971 SEQ ID NO: 3291
uggagagauuuaugacauc

SEQ ID NO: 255787 - RNA, 19 nt, Artificial Sequence
  Description of Artificial Sequence: Synthetic oligonucleotide
  Antisense strand to SEQ ID NO: 255786
gaugucauaaaucucucca

SEQ ID NO: 255788 - RNA, 19 nt, Artificial Sequence
  Description of Artificial Sequence: Synthetic oligonucleotide
  Sense strand starting at position 1974 SEQ ID NO: 3291
agagauuuaugacaucuca

SEQ ID NO: 255789 - RNA, 19 nt, Artificial Sequence
  Description of Artificial Sequence: Synthetic oligonucleotide
  Antisense strand to SEQ ID NO: 255788
ugagaugucauaaaucucu

SEQ ID NO: 255790 - RNA, 19 nt, Artificial Sequence
  Description of Artificial Sequence: Synthetic oligonucleotide
  Sense strand starting at position 2054 SEQ ID NO: 3291
cgagaauguccuggcauuu

SEQ ID NO: 255791 - RNA, 19 nt, Artificial Sequence
  Description of Artificial Sequence: Synthetic oligonucleotide
  Antisense strand to SEQ ID NO: 255790
aaaugccaggacauucucg

SEQ ID NO: 255792 - RNA, 19 nt, Artificial Sequence
  Description of Artificial Sequence: Synthetic oligonucleotide
  Sense strand starting at position 2184 SEQ ID NO: 3291
gggaauguggguuagguaa

SEQ ID NO: 255793 - RNA, 19 nt, Artificial Sequence
  Description of Artificial Sequence: Synthetic oligonucleotide
  Antisense strand to SEQ ID NO: 255792
uuaccuaacccacauuccc

SEQ ID NO: 255794 - RNA, 19 nt, Artificial Sequence
  Description of Artificial Sequence: Synthetic oligonucleotide
  Sense strand starting at position 2350 SEQ ID NO: 3291
ugaacuuggugugucagaa

SEQ ID NO: 255795 - RNA, 19 nt, Artificial Sequence
  Description of Artificial Sequence: Synthetic oligonucleotide
  Antisense strand to SEQ ID NO: 255794
uucugacacaccaaguuca

SEQ ID NO: 255796 - RNA, 19 nt, Artificial Sequence
  Description of Artificial Sequence: Synthetic oligonucleotide
  Sense strand starting at position 2457 SEQ ID NO: 3291
cuacguggucuuuauaaug

SEQ ID NO: 255797 - RNA, 19 nt, Artificial Sequence
  Description of Artificial Sequence: Synthetic oligonucleotide
  Antisense strand to SEQ ID NO: 255796
cauuauaaagaccacguag

SEQ ID NO: 255798 - RNA, 19 nt, Artificial Sequence
  Description of Artificial Sequence: Synthetic oligonucleotide
  Sense strand starting at position 2481 SEQ ID NO: 3291
gacauuguagcaugagagu

SEQ ID NO: 255799 - RNA, 19 nt, Artificial Sequence
  Description of Artificial Sequence: Synthetic oligonucleotide
  Antisense strand to SEQ ID NO: 255798
acucucaugcuacaauguc

SEQ ID NO: 255800 - RNA, 19 nt, Artificial Sequence
  Description of Artificial Sequence: Synthetic oligonucleotide
  Sense strand starting at position 2487 SEQ ID NO: 3291
guagcaugagagugaucau

SEQ ID NO: 255801 - RNA, 19 nt, Artificial Sequence
  Description of Artificial Sequence: Synthetic oligonucleotide
  Antisense strand to SEQ ID NO: 255800
augaucacucucaugcuac

SEQ ID NO: 255802 - RNA, 19 nt, Artificial Sequence
  Description of Artificial Sequence: Synthetic oligonucleotide
  Sense strand starting at position 2490 SEQ ID NO: 3291
gcaugagagugaucauaga

SEQ ID NO: 255803 - RNA, 19 nt, Artificial Sequence
  Description of Artificial Sequence: Synthetic oligonucleotide
  Antisense strand to SEQ ID NO: 255802
ucuaugaucacucucaugc

SEQ ID NO: 255804 - RNA, 19 nt, Artificial Sequence
  Description of Artificial Sequence: Synthetic oligonucleotide
  Sense strand starting at position 2657 SEQ ID NO: 3291
gagagaugaucggcuggau

SEQ ID NO: 255805 - RNA, 19 nt, Artificial Sequence
  Description of Artificial Sequence: Synthetic oligonucleotide
  Antisense strand to SEQ ID NO: 255804
auccagccgaucaucucuc

SEQ ID NO: 255806 - RNA, 19 nt, Artificial Sequence
  Description of Artificial Sequence: Synthetic oligonucleotide
  Sense strand starting at position 2660 SEQ ID NO: 3291
agaugaucggcuggaugau

SEQ ID NO: 255807 - RNA, 19 nt, Artificial Sequence
  Description of Artificial Sequence: Synthetic oligonucleotide
  Antisense strand to SEQ ID NO: 255806
aucauccagccgaucaucu

SEQ ID NO: 255808 - RNA, 19 nt, Artificial Sequence
  Description of Artificial Sequence: Synthetic oligonucleotide
  Sense strand starting at position 2719 SEQ ID NO: 3291
ugucuacaucaauaaguac

SEQ ID NO: 255809 - RNA, 19 nt, Artificial Sequence
  Description of Artificial Sequence: Synthetic oligonucleotide
  Antisense strand to SEQ ID NO: 255808
guacuuauugauguagaca

SEQ ID NO: 255810 - RNA, 19 nt, Artificial Sequence
  Description of Artificial Sequence: Synthetic oligonucleotide
  Sense strand starting at position 2734 SEQ ID NO: 3291
guacuuugagaggguucau

SEQ ID NO: 255811 - RNA, 19 nt, Artificial Sequence
  Description of Artificial Sequence: Synthetic oligonucleotide
  Antisense strand to SEQ ID NO: 255810
augaacccucucaaaguac

SEQ ID NO: 255812 - RNA, 19 nt, Artificial Sequence
  Description of Artificial Sequence: Synthetic oligonucleotide
  Sense strand starting at position 2766 SEQ ID NO: 3291
gaaggauucuuucccaagu

SEQ ID NO: 255813 - RNA, 19 nt, Artificial Sequence
  Description of Artificial Sequence: Synthetic oligonucleotide
  Antisense strand to SEQ ID NO: 255812
acuugggaaagaauccuuc

SEQ ID NO: 255814 - RNA, 19 nt, Artificial Sequence
  Description of Artificial Sequence: Synthetic oligonucleotide
  Sense strand starting at position 2900 SEQ ID NO: 3291
uaggcauuccuacaggauc

SEQ ID NO: 255815 - RNA, 19 nt, Artificial Sequence
  Description of Artificial Sequence: Synthetic oligonucleotide
  Antisense strand to SEQ ID NO: 255814
gauccuguaggaaugccua

SEQ ID NO: 255816 - RNA, 19 nt, Artificial Sequence
  Description of Artificial Sequence: Synthetic oligonucleotide
  Sense strand starting at position 2983 SEQ ID NO: 3291
ugcaacacucugcaugaua

SEQ ID NO: 255817 - RNA, 19 nt, Artificial Sequence
  Description of Artificial Sequence: Synthetic oligonucleotide
  Antisense strand to SEQ ID NO: 255816
uaucaugcagaguguugca

SEQ ID NO: 255818 - RNA, 19 nt, Artificial Sequence
  Description of Artificial Sequence: Synthetic oligonucleotide
  Sense strand starting at position 3212 SEQ ID NO: 3291
aguaaaucuuuguugaauc

SEQ ID NO: 255819 - RNA, 19 nt, Artificial Sequence
  Description of Artificial Sequence: Synthetic oligonucleotide
  Antisense strand to SEQ ID NO: 255818
gauucaacaaagauuuacu

SEQ ID NO: 255820 - RNA, 19 nt, Artificial Sequence
  Description of Artificial Sequence: Synthetic oligonucleotide
  Sense strand starting at position 3220 SEQ ID NO: 3291
uuuguugaaucagucaaug

SEQ ID NO: 255821 - RNA, 19 nt, Artificial Sequence
  Description of Artificial Sequence: Synthetic oligonucleotide
  Antisense strand to SEQ ID NO: 255820
cauugacugauucaacaaa

SEQ ID NO: 255822 - RNA, 19 nt, Artificial Sequence
  Description of Artificial Sequence: Synthetic oligonucleotide
  Sense strand starting at position 3225 SEQ ID NO: 3291
ugaaucagucaaugacuga

SEQ ID NO: 255823 - RNA, 19 nt, Artificial Sequence
  Description of Artificial Sequence: Synthetic oligonucleotide
  Antisense strand to SEQ ID NO: 255822
ucagucauugacugauuca

SEQ ID NO: 255824 - RNA, 19 nt, Artificial Sequence
  Description of Artificial Sequence: Synthetic oligonucleotide
  Sense strand starting at position 3339 SEQ ID NO: 3291
ggauauuucuaccauagca

SEQ ID NO: 255825 - RNA, 19 nt, Artificial Sequence
  Description of Artificial Sequence: Synthetic oligonucleotide
  Antisense strand to SEQ ID NO: 255824
ugcuaugguagaaauaucc

SEQ ID NO: 255826 - RNA, 19 nt, Artificial Sequence
  Description of Artificial Sequence: Synthetic oligonucleotide
  Sense strand starting at position 3375 SEQ ID NO: 3291
uguuguugucuugagaaca

SEQ ID NO: 255827 - RNA, 19 nt, Artificial Sequence
  Description of Artificial Sequence: Synthetic oligonucleotide
  Antisense strand to SEQ ID NO: 255826
uguucucaagacaacaaca

SEQ ID NO: 255828 - RNA, 19 nt, Artificial Sequence
  Description of Artificial Sequence: Synthetic oligonucleotide
  Sense strand starting at position 3443 SEQ ID NO: 3291
ucaguacauguuuacggaa

SEQ ID NO: 255829 - RNA, 19 nt, Artificial Sequence
  Description of Artificial Sequence: Synthetic oligonucleotide
  Antisense strand to SEQ ID NO: 255828
uuccguaaacauguacuga

SEQ ID NO: 255830 - RNA, 19 nt, Artificial Sequence
  Description of Artificial Sequence: Synthetic oligonucleotide
  Sense strand starting at position 3450 SEQ ID NO: 3291
auguuuacggaaugaguaa

SEQ ID NO: 255831 - RNA, 19 nt, Artificial Sequence
  Description of Artificial Sequence: Synthetic oligonucleotide
  Antisense strand to SEQ ID NO: 255830
uuacucauuccguaaacau

SEQ ID NO: 255832 - RNA, 19 nt, Artificial Sequence
  Description of Artificial Sequence: Synthetic oligonucleotide
  Sense strand starting at position 3451 SEQ ID NO: 3291
uguuuacggaaugaguaaa

SEQ ID NO: 255833 - RNA, 19 nt, Artificial Sequence
  Description of Artificial Sequence: Synthetic oligonucleotide
  Antisense strand to SEQ ID NO: 255832
uuuacucauuccguaaaca

SEQ ID NO: 255834 - RNA, 19 nt, Artificial Sequence
  Description of Artificial Sequence: Synthetic oligonucleotide
  Sense strand starting at position 3870 SEQ ID NO: 3291
cucuacuugugacugagau

SEQ ID NO: 255835 - RNA, 19 nt, Artificial Sequence
  Description of Artificial Sequence: Synthetic oligonucleotide
  Antisense strand to SEQ ID NO: 255834
aucucagucacaaguagag

SEQ ID NO: 255836 - RNA, 19 nt, Artificial Sequence
  Description of Artificial Sequence: Synthetic oligonucleotide
  Sense strand starting at position 3871 SEQ ID NO: 3291
ucuacuugugacugagaug

SEQ ID NO: 255837 - RNA, 19 nt, Artificial Sequence
  Description of Artificial Sequence: Synthetic oligonucleotide
  Antisense strand to SEQ ID NO: 255836
caucucagucacaaguaga

SEQ ID NO: 255838 - RNA, 19 nt, Artificial Sequence
  Description of Artificial Sequence: Synthetic oligonucleotide
  Sense strand starting at position 10 SEQ ID NO: 3292
gcaguauaaggcgaaagaa

SEQ ID NO: 255839 - RNA, 19 nt, Artificial Sequence
  Description of Artificial Sequence: Synthetic oligonucleotide
  Antisense strand to SEQ ID NO: 255838
uucuuucgccuuauacugc

SEQ ID NO: 255840 - RNA, 19 nt, Artificial Sequence
  Description of Artificial Sequence: Synthetic oligonucleotide
  Sense strand starting at position 124 SEQ ID NO: 3292
cuguguaggccuuauaaac

SEQ ID NO: 255841 - RNA, 19 nt, Artificial Sequence
  Description of Artificial Sequence: Synthetic oligonucleotide
  Antisense strand to SEQ ID NO: 255840
guuuauaaggccuacacag

SEQ ID NO: 255842 - RNA, 19 nt, Artificial Sequence
  Description of Artificial Sequence: Synthetic oligonucleotide
  Sense strand starting at position 189 SEQ ID NO: 3292
cuaauaugguagcucauaa

SEQ ID NO: 255843 - RNA, 19 nt, Artificial Sequence
  Description of Artificial Sequence: Synthetic oligonucleotide
  Antisense strand to SEQ ID NO: 255842
uuaugagcuaccauauuag

SEQ ID NO: 255844 - RNA, 19 nt, Artificial Sequence
  Description of Artificial Sequence: Synthetic oligonucleotide
  Sense strand starting at position 398 SEQ ID NO: 3292
uugaacauugcucauaaug

SEQ ID NO: 255845 - RNA, 19 nt, Artificial Sequence
  Description of Artificial Sequence: Synthetic oligonucleotide
  Antisense strand to SEQ ID NO: 255844
cauuaugagcaauguucaa

SEQ ID NO: 255846 - RNA, 19 nt, Artificial Sequence
  Description of Artificial Sequence: Synthetic oligonucleotide
  Sense strand starting at position 810 SEQ ID NO: 3292
ggcacuguuccauauaccu

SEQ ID NO: 255847 - RNA, 19 nt, Artificial Sequence
  Description of Artificial Sequence: Synthetic oligonucleotide
  Antisense strand to SEQ ID NO: 255846
agguauauggaacagugcc

SEQ ID NO: 255848 - RNA, 19 nt, Artificial Sequence
  Description of Artificial Sequence: Synthetic oligonucleotide
  Sense strand starting at position 822 SEQ ID NO: 3292
uauaccucucgguaaggua

SEQ ID NO: 255849 - RNA, 19 nt, Artificial Sequence
  Description of Artificial Sequence: Synthetic oligonucleotide
  Antisense strand to SEQ ID NO: 255848
uaccuuaccgagagguaua

SEQ ID NO: 255850 - RNA, 19 nt, Artificial Sequence
  Description of Artificial Sequence: Synthetic oligonucleotide
  Sense strand starting at position 940 SEQ ID NO: 3292
agcagaacacacuguuaau

SEQ ID NO: 255851 - RNA, 19 nt, Artificial Sequence
  Description of Artificial Sequence: Synthetic oligonucleotide
  Antisense strand to SEQ ID NO: 255850
auuaacaguguguucugcu

SEQ ID NO: 255852 - RNA, 19 nt, Artificial Sequence
  Description of Artificial Sequence: Synthetic oligonucleotide
  Sense strand starting at position 1046 SEQ ID NO: 3292
augauugugcuggagguuu

SEQ ID NO: 255853 - RNA, 19 nt, Artificial Sequence
  Description of Artificial Sequence: Synthetic oligonucleotide
  Antisense strand to SEQ ID NO: 255852
aaaccuccagcacaaucau

SEQ ID NO: 255854 - RNA, 19 nt, Artificial Sequence
  Description of Artificial Sequence: Synthetic oligonucleotide
  Sense strand starting at position 1067 SEQ ID NO: 3292
guggacacccugugaacaa

SEQ ID NO: 255855 - RNA, 19 nt, Artificial Sequence
  Description of Artificial Sequence: Synthetic oligonucleotide
  Antisense strand to SEQ ID NO: 255854
uuguucacaggguguccac

SEQ ID NO: 255856 - RNA, 19 nt, Artificial Sequence
  Description of Artificial Sequence: Synthetic oligonucleotide
  Sense strand starting at position 1074 SEQ ID NO: 3292
cccugugaacaaugcuaaa

SEQ ID NO: 255857 - RNA, 19 nt, Artificial Sequence
  Description of Artificial Sequence: Synthetic oligonucleotide
  Antisense strand to SEQ ID NO: 255856
uuuagcauuguucacaggg

SEQ ID NO: 255858 - RNA, 19 nt, Artificial Sequence
  Description of Artificial Sequence: Synthetic oligonucleotide
  Sense strand starting at position 1098 SEQ ID NO: 3292
gccagugacuuaccaauga

SEQ ID NO: 255859 - RNA, 19 nt, Artificial Sequence
  Description of Artificial Sequence: Synthetic oligonucleotide
  Antisense strand to SEQ ID NO: 255858
ucauugguaagucacuggc

SEQ ID NO: 255860 - RNA, 19 nt, Artificial Sequence
  Description of Artificial Sequence: Synthetic oligonucleotide
  Sense strand starting at position 1792 SEQ ID NO: 3292
augagaacgugacuuagaa

SEQ ID NO: 255861 - RNA, 19 nt, Artificial Sequence
  Description of Artificial Sequence: Synthetic oligonucleotide
  Antisense strand to SEQ ID NO: 255860
uucuaagucacguucucau

SEQ ID NO: 255862 - RNA, 19 nt, Artificial Sequence
  Description of Artificial Sequence: Synthetic oligonucleotide
  Sense strand starting at position 2021 SEQ ID NO: 3292
guaacauaggcuuaacaau

SEQ ID NO: 255863 - RNA, 19 nt, Artificial Sequence
  Description of Artificial Sequence: Synthetic oligonucleotide
  Antisense strand to SEQ ID NO: 255862
auuguuaagccuauguuac

SEQ ID NO: 255864 - RNA, 19 nt, Artificial Sequence
  Description of Artificial Sequence: Synthetic oligonucleotide
  Sense strand starting at position 2042 SEQ ID NO: 3292
gagaauccauuagucagua

SEQ ID NO: 255865 - RNA, 19 nt, Artificial Sequence
  Description of Artificial Sequence: Synthetic oligonucleotide
  Antisense strand to SEQ ID NO: 255864
uacugacuaauggauucuc

SEQ ID NO: 255866 - RNA, 19 nt, Artificial Sequence
  Description of Artificial Sequence: Synthetic oligonucleotide
  Sense strand starting at position 2046 SEQ ID NO: 3292
auccauuagucaguagauc

SEQ ID NO: 255867 - RNA, 19 nt, Artificial Sequence
  Description of Artificial Sequence: Synthetic oligonucleotide
  Antisense strand to SEQ ID NO: 255866
gaucuacugacuaauggau

SEQ ID NO: 255868 - RNA, 19 nt, Artificial Sequence
  Description of Artificial Sequence: Synthetic oligonucleotide
  Sense strand starting at position 2047 SEQ ID NO: 3292
uccauuagucaguagauca

SEQ ID NO: 255869 - RNA, 19 nt, Artificial Sequence
  Description of Artificial Sequence: Synthetic oligonucleotide
  Antisense strand to SEQ ID NO: 255868
ugaucuacugacuaaugga

SEQ ID NO: 255870 - RNA, 19 nt, Artificial Sequence
  Description of Artificial Sequence: Synthetic oligonucleotide
  Sense strand starting at position 2191 SEQ ID NO: 3292
aggagcuuuauauaugguu

SEQ ID NO: 255871 - RNA, 19 nt, Artificial Sequence
  Description of Artificial Sequence: Synthetic oligonucleotide
  Antisense strand to SEQ ID NO: 255870
aaccauauauaaagcuccu

SEQ ID NO: 255872 - RNA, 19 nt, Artificial Sequence
  Description of Artificial Sequence: Synthetic oligonucleotide
  Sense strand starting at position 2258 SEQ ID NO: 3292
guacuuaggacuuagguga

SEQ ID NO: 255873 - RNA, 19 nt, Artificial Sequence
  Description of Artificial Sequence: Synthetic oligonucleotide
  Antisense strand to SEQ ID NO: 255872
ucaccuaaguccuaaguac

SEQ ID NO: 255874 - RNA, 19 nt, Artificial Sequence
  Description of Artificial Sequence: Synthetic oligonucleotide
  Sense strand starting at position 2265 SEQ ID NO: 3292
ggacuuaggugacccaauu

SEQ ID NO: 255875 - RNA, 19 nt, Artificial Sequence
  Description of Artificial Sequence: Synthetic oligonucleotide
  Antisense strand to SEQ ID NO: 255874
aauugggucaccuaagucc

SEQ ID NO: 255876 - RNA, 19 nt, Artificial Sequence
  Description of Artificial Sequence: Synthetic oligonucleotide
  Sense strand starting at position 2365 SEQ ID NO: 3292
uugauagauuguuucuaga

SEQ ID NO: 255877 - RNA, 19 nt, Artificial Sequence
  Description of Artificial Sequence: Synthetic oligonucleotide
  Antisense strand to SEQ ID NO: 255876
ucuagaaacaaucuaucaa

SEQ ID NO: 255878 - RNA, 19 nt, Artificial Sequence
  Description of Artificial Sequence: Synthetic oligonucleotide
  Sense strand starting at position 2367 SEQ ID NO: 3292
gauagauuguuucuagaua

SEQ ID NO: 255879 - RNA, 19 nt, Artificial Sequence
  Description of Artificial Sequence: Synthetic oligonucleotide
  Antisense strand to SEQ ID NO: 255878
uaucuagaaacaaucuauc

SEQ ID NO: 255880 - RNA, 19 nt, Artificial Sequence
  Description of Artificial Sequence: Synthetic oligonucleotide
  Sense strand starting at position 2405 SEQ ID NO: 3292
gcuucuaaauuugcgaaua

SEQ ID NO: 255881 - RNA, 19 nt, Artificial Sequence
  Description of Artificial Sequence: Synthetic oligonucleotide
  Antisense strand to SEQ ID NO: 255880
uauucgcaaauuuagaagc

SEQ ID NO: 255882 - RNA, 19 nt, Artificial Sequence
  Description of Artificial Sequence: Synthetic oligonucleotide
  Sense strand starting at position 2658 SEQ ID NO: 3292
ccugcucuaggagaucaau

SEQ ID NO: 255883 - RNA, 19 nt, Artificial Sequence
  Description of Artificial Sequence: Synthetic oligonucleotide
  Antisense strand to SEQ ID NO: 255882
auugaucuccuagagcagg

SEQ ID NO: 255884 - RNA, 19 nt, Artificial Sequence
  Description of Artificial Sequence: Synthetic oligonucleotide
  Sense strand starting at position 2694 SEQ ID NO: 3292
caacgugagugcucauuug

SEQ ID NO: 255885 - RNA, 19 nt, Artificial Sequence
  Description of Artificial Sequence: Synthetic oligonucleotide
  Antisense strand to SEQ ID NO: 255884
caaaugagcacucacguug

SEQ ID NO: 255886 - RNA, 19 nt, Artificial Sequence
  Description of Artificial Sequence: Synthetic oligonucleotide
  Sense strand starting at position 2700 SEQ ID NO: 3292
gagugcucauuugcccaua

SEQ ID NO: 255887 - RNA, 19 nt, Artificial Sequence
  Description of Artificial Sequence: Synthetic oligonucleotide
  Antisense strand to SEQ ID NO: 255886
uaugggcaaaugagcacuc

SEQ ID NO: 255888 - RNA, 19 nt, Artificial Sequence
  Description of Artificial Sequence: Synthetic oligonucleotide
  Sense strand starting at position 2771 SEQ ID NO: 3292
agaagagaguaucuuucuu

SEQ ID NO: 255889 - RNA, 19 nt, Artificial Sequence
  Description of Artificial Sequence: Synthetic oligonucleotide
  Antisense strand to SEQ ID NO: 255888
aagaaagauacucucuucu

SEQ ID NO: 255890 - RNA, 19 nt, Artificial Sequence
  Description of Artificial Sequence: Synthetic oligonucleotide
  Sense strand starting at position 2922 SEQ ID NO: 3292
aagcguguccaguuucuca

SEQ ID NO: 255891 - RNA, 19 nt, Artificial Sequence
  Description of Artificial Sequence: Synthetic oligonucleotide
  Antisense strand to SEQ ID NO: 255890
ugagaaacuggacacgcuu

SEQ ID NO: 255892 - RNA, 19 nt, Artificial Sequence
  Description of Artificial Sequence: Synthetic oligonucleotide
  Sense strand starting at position 2924 SEQ ID NO: 3292
gcguguccaguuucucaga

SEQ ID NO: 255893 - RNA, 19 nt, Artificial Sequence
  Description of Artificial Sequence: Synthetic oligonucleotide
  Antisense strand to SEQ ID NO: 255892
ucugagaaacuggacacgc

SEQ ID NO: 255894 - RNA, 19 nt, Artificial Sequence
  Description of Artificial Sequence: Synthetic oligonucleotide
  Sense strand starting at position 3174 SEQ ID NO: 3292
gccuuccaucccuggaaga

SEQ ID NO: 255895 - RNA, 19 nt, Artificial Sequence
  Description of Artificial Sequence: Synthetic oligonucleotide
  Antisense strand to SEQ ID NO: 255894
ucuuccagggauggaaggc

SEQ ID NO: 255896 - RNA, 19 nt, Artificial Sequence
  Description of Artificial Sequence: Synthetic oligonucleotide
  Sense strand starting at position 3176 SEQ ID NO: 3292
cuuccaucccuggaagagu

SEQ ID NO: 255897 - RNA, 19 nt, Artificial Sequence
  Description of Artificial Sequence: Synthetic oligonucleotide
  Antisense strand to SEQ ID NO: 255896
acucuuccagggauggaag

SEQ ID NO: 255898 - RNA, 19 nt, Artificial Sequence
  Description of Artificial Sequence: Synthetic oligonucleotide
  Sense strand starting at position 3205 SEQ ID NO: 3292
uucugagccaauggaugau

SEQ ID NO: 255899 - RNA, 19 nt, Artificial Sequence
  Description of Artificial Sequence: Synthetic oligonucleotide
  Antisense strand to SEQ ID NO: 255898
aucauccauuggcucagaa

SEQ ID NO: 255900 - RNA, 19 nt, Artificial Sequence
  Description of Artificial Sequence: Synthetic oligonucleotide
  Sense strand starting at position 3306 SEQ ID NO: 3292
agggauauugcaggagucu

SEQ ID NO: 255901 - RNA, 19 nt, Artificial Sequence
  Description of Artificial Sequence: Synthetic oligonucleotide
  Antisense strand to SEQ ID NO: 255900
agacuccugcaauaucccu

SEQ ID NO: 255902 - RNA, 19 nt, Artificial Sequence
  Description of Artificial Sequence: Synthetic oligonucleotide
  Sense strand starting at position 3307 SEQ ID NO: 3292
gggauauugcaggagucua

SEQ ID NO: 255903 - RNA, 19 nt, Artificial Sequence
  Description of Artificial Sequence: Synthetic oligonucleotide
  Antisense strand to SEQ ID NO: 255902
uagacuccugcaauauccc

SEQ ID NO: 255904 - RNA, 19 nt, Artificial Sequence
  Description of Artificial Sequence: Synthetic oligonucleotide
  Sense strand starting at position 3433 SEQ ID NO: 3292
ggcuaagugcaaugagaaa

SEQ ID NO: 255905 - RNA, 19 nt, Artificial Sequence
  Description of Artificial Sequence: Synthetic oligonucleotide
  Antisense strand to SEQ ID NO: 255904
uuucucauugcacuuagcc

SEQ ID NO: 255906 - RNA, 19 nt, Artificial Sequence
  Description of Artificial Sequence: Synthetic oligonucleotide
  Sense strand starting at position 3635 SEQ ID NO: 3292
guaugagguccuuaauguc

SEQ ID NO: 255907 - RNA, 19 nt, Artificial Sequence
  Description of Artificial Sequence: Synthetic oligonucleotide
  Antisense strand to SEQ ID NO: 255906
gacauuaaggaccucauac

SEQ ID NO: 255908 - RNA, 19 nt, Artificial Sequence
  Description of Artificial Sequence: Synthetic oligonucleotide
  Sense strand starting at position 3708 SEQ ID NO: 3292
ucacucaagcugugagaga

SEQ ID NO: 255909 - RNA, 19 nt, Artificial Sequence
  Description of Artificial Sequence: Synthetic oligonucleotide
  Antisense strand to SEQ ID NO: 255908
ucucucacagcuugaguga

SEQ ID NO: 255910 - RNA, 19 nt, Artificial Sequence
  Description of Artificial Sequence: Synthetic oligonucleotide
  Sense strand starting at position 3844 SEQ ID NO: 3292
cugugacucagagaagcua

SEQ ID NO: 255911 - RNA, 19 nt, Artificial Sequence
  Description of Artificial Sequence: Synthetic oligonucleotide
  Antisense strand to SEQ ID NO: 255910
uagcuucucugagucacag

SEQ ID NO: 255912 - RNA, 19 nt, Artificial Sequence
  Description of Artificial Sequence: Synthetic oligonucleotide
  Sense strand starting at position 3911 SEQ ID NO: 3292
ugaaucuaggccuguaaga

SEQ ID NO: 255913 - RNA, 19 nt, Artificial Sequence
  Description of Artificial Sequence: Synthetic oligonucleotide
  Antisense strand to SEQ ID NO: 255912
ucuuacaggccuagauuca

SEQ ID NO: 255914 - RNA, 19 nt, Artificial Sequence
  Description of Artificial Sequence: Synthetic oligonucleotide
  Sense strand starting at position 3913 SEQ ID NO: 3292
aaucuaggccuguaagauu

SEQ ID NO: 255915 - RNA, 19 nt, Artificial Sequence
  Description of Artificial Sequence: Synthetic oligonucleotide
  Antisense strand to SEQ ID NO: 255914
aaucuuacaggccuagauu

SEQ ID NO: 255916 - RNA, 19 nt, Artificial Sequence
  Description of Artificial Sequence: Synthetic oligonucleotide
  Sense strand starting at position 3976 SEQ ID NO: 3292
gacaaaugccucugcagag

SEQ ID NO: 255917 - RNA, 19 nt, Artificial Sequence
  Description of Artificial Sequence: Synthetic oligonucleotide
  Antisense strand to SEQ ID NO: 255916
cucugcagaggcauuuguc

SEQ ID NO: 255918 - RNA, 19 nt, Artificial Sequence
  Description of Artificial Sequence: Synthetic oligonucleotide
  Sense strand starting at position 1 SEQ ID NO: 3294
uugcuaauugguuacaaau

SEQ ID NO: 255919 - RNA, 19 nt, Artificial Sequence
  Description of Artificial Sequence: Synthetic oligonucleotide
  Antisense strand to SEQ ID NO: 255918
auuuguaaccaauuagcaa

SEQ ID NO: 255920 - RNA, 19 nt, Artificial Sequence
  Description of Artificial Sequence: Synthetic oligonucleotide
  Sense strand starting at position 37 SEQ ID NO: 3294
ggcaccauucgugauuaca

SEQ ID NO: 255921 - RNA, 19 nt, Artificial Sequence
  Description of Artificial Sequence: Synthetic oligonucleotide
  Antisense strand to SEQ ID NO: 255920
uguaaucacgaauggugcc

SEQ ID NO: 255922 - RNA, 19 nt, Artificial Sequence
  Description of Artificial Sequence: Synthetic oligonucleotide
  Sense strand starting at position 110 SEQ ID NO: 3294
gugccagggcucugaggau

SEQ ID NO: 255923 - RNA, 19 nt, Artificial Sequence
  Description of Artificial Sequence: Synthetic oligonucleotide
  Antisense strand to SEQ ID NO: 255922
auccucagagcccuggcac

SEQ ID NO: 255924 - RNA, 19 nt, Artificial Sequence
  Description of Artificial Sequence: Synthetic oligonucleotide
  Sense strand starting at position 960 SEQ ID NO: 3294
uggguauucucaccuggaa

SEQ ID NO: 255925 - RNA, 19 nt, Artificial Sequence
  Description of Artificial Sequence: Synthetic oligonucleotide
  Antisense strand to SEQ ID NO: 255924
uuccaggugagaauaccca

SEQ ID NO: 255926 - RNA, 19 nt, Artificial Sequence
  Description of Artificial Sequence: Synthetic oligonucleotide
  Sense strand starting at position 962 SEQ ID NO: 3294
gguauucucaccuggaagc

SEQ ID NO: 255927 - RNA, 19 nt, Artificial Sequence
  Description of Artificial Sequence: Synthetic oligonucleotide
  Antisense strand to SEQ ID NO: 255926
gcuuccaggugagaauacc

SEQ ID NO: 255928 - RNA, 19 nt, Artificial Sequence
  Description of Artificial Sequence: Synthetic oligonucleotide
  Sense strand starting at position 963 SEQ ID NO: 3294
guauucucaccuggaagca

SEQ ID NO: 255929 - RNA, 19 nt, Artificial Sequence
  Description of Artificial Sequence: Synthetic oligonucleotide
  Antisense strand to SEQ ID NO: 255928
ugcuuccaggugagaauac

SEQ ID NO: 255930 - RNA, 19 nt, Artificial Sequence
  Description of Artificial Sequence: Synthetic oligonucleotide
  Sense strand starting at position 1852 SEQ ID NO: 3294
ccgcgaaggccuucuguca

SEQ ID NO: 255931 - RNA, 19 nt, Artificial Sequence
  Description of Artificial Sequence: Synthetic oligonucleotide
  Antisense strand to SEQ ID NO: 255930
ugacagaaggccuucgcgg

SEQ ID NO: 255932 - RNA, 19 nt, Artificial Sequence
  Description of Artificial Sequence: Synthetic oligonucleotide
  Sense strand starting at position 1853 SEQ ID NO: 3294
cgcgaaggccuucugucaa

SEQ ID NO: 255933 - RNA, 19 nt, Artificial Sequence
  Description of Artificial Sequence: Synthetic oligonucleotide
  Antisense strand to SEQ ID NO: 255932
uugacagaaggccuucgcg

SEQ ID NO: 255934 - RNA, 19 nt, Artificial Sequence
  Description of Artificial Sequence: Synthetic oligonucleotide
  Sense strand starting at position 1912 SEQ ID NO: 3294
gggacacugccuuaacugu

SEQ ID NO: 255935 - RNA, 19 nt, Artificial Sequence
  Description of Artificial Sequence: Synthetic oligonucleotide
  Antisense strand to SEQ ID NO: 255934
acaguuaaggcaguguccc

SEQ ID NO: 255936 - RNA, 19 nt, Artificial Sequence
  Description of Artificial Sequence: Synthetic oligonucleotide
  Sense strand starting at position 2079 SEQ ID NO: 3294
gaggguuguucuccuccau

SEQ ID NO: 255937 - RNA, 19 nt, Artificial Sequence
  Description of Artificial Sequence: Synthetic oligonucleotide
  Antisense strand to SEQ ID NO: 255936
auggaggagaacaacccuc

SEQ ID NO: 255938 - RNA, 19 nt, Artificial Sequence
  Description of Artificial Sequence: Synthetic oligonucleotide
  Sense strand starting at position 2236 SEQ ID NO: 3294
auucgucuucuuuccgcaa

SEQ ID NO: 255939 - RNA, 19 nt, Artificial Sequence
  Description of Artificial Sequence: Synthetic oligonucleotide
  Antisense strand to SEQ ID NO: 255938
uugcggaaagaagacgaau

SEQ ID NO: 255940 - RNA, 19 nt, Artificial Sequence
  Description of Artificial Sequence: Synthetic oligonucleotide
  Sense strand starting at position 2425 SEQ ID NO: 3294
gcauccauuuccguggaaa

SEQ ID NO: 255941 - RNA, 19 nt, Artificial Sequence
  Description of Artificial Sequence: Synthetic oligonucleotide
  Antisense strand to SEQ ID NO: 255940
uuuccacggaaauggaugc

SEQ ID NO: 255942 - RNA, 19 nt, Artificial Sequence
  Description of Artificial Sequence: Synthetic oligonucleotide
  Sense strand starting at position 2514 SEQ ID NO: 3294
ccgggacgcugaucauuua

SEQ ID NO: 255943 - RNA, 19 nt, Artificial Sequence
  Description of Artificial Sequence: Synthetic oligonucleotide
  Antisense strand to SEQ ID NO: 255942
uaaaugaucagcgucccgg

SEQ ID NO: 255944 - RNA, 19 nt, Artificial Sequence
  Description of Artificial Sequence: Synthetic oligonucleotide
  Sense strand starting at position 2568 SEQ ID NO: 3294
gggcuuaaaugacuuucuu

SEQ ID NO: 255945 - RNA, 19 nt, Artificial Sequence
  Description of Artificial Sequence: Synthetic oligonucleotide
  Antisense strand to SEQ ID NO: 255944
aagaaagucauuuaagccc

SEQ ID NO: 255946 - RNA, 19 nt, Artificial Sequence
  Description of Artificial Sequence: Synthetic oligonucleotide
  Sense strand starting at position 2587 SEQ ID NO: 3294
uguaauuccucugcagaga

SEQ ID NO: 255947 - RNA, 19 nt, Artificial Sequence
  Description of Artificial Sequence: Synthetic oligonucleotide
  Antisense strand to SEQ ID NO: 255946
ucucugcagaggaauuaca

SEQ ID NO: 255948 - RNA, 19 nt, Artificial Sequence
  Description of Artificial Sequence: Synthetic oligonucleotide
  Sense strand starting at position 2588 SEQ ID NO: 3294
guaauuccucugcagagau

SEQ ID NO: 255949 - RNA, 19 nt, Artificial Sequence
  Description of Artificial Sequence: Synthetic oligonucleotide
  Antisense strand to SEQ ID NO: 255948
aucucugcagaggaauuac

SEQ ID NO: 255950 - RNA, 19 nt, Artificial Sequence
  Description of Artificial Sequence: Synthetic oligonucleotide
  Sense strand starting at position 2695 SEQ ID NO: 3294
acugaaaugcuuugaccau

SEQ ID NO: 255951 - RNA, 19 nt, Artificial Sequence
  Description of Artificial Sequence: Synthetic oligonucleotide
  Antisense strand to SEQ ID NO: 255950
auggucaaagcauuucagu

SEQ ID NO: 255952 - RNA, 19 nt, Artificial Sequence
  Description of Artificial Sequence: Synthetic oligonucleotide
  Sense strand starting at position 2723 SEQ ID NO: 3294
gucugcagacucugaucuu

SEQ ID NO: 255953 - RNA, 19 nt, Artificial Sequence
  Description of Artificial Sequence: Synthetic oligonucleotide
  Antisense strand to SEQ ID NO: 255952
aagaucagagucugcagac

SEQ ID NO: 255954 - RNA, 19 nt, Artificial Sequence
  Description of Artificial Sequence: Synthetic oligonucleotide
  Sense strand starting at position 2726 SEQ ID NO: 3294
ugcagacucugaucuuaca

SEQ ID NO: 255955 - RNA, 19 nt, Artificial Sequence
  Description of Artificial Sequence: Synthetic oligonucleotide
  Antisense strand to SEQ ID NO: 255954
uguaagaucagagucugca

SEQ ID NO: 255956 - RNA, 19 nt, Artificial Sequence
  Description of Artificial Sequence: Synthetic oligonucleotide
  Sense strand starting at position 2755 SEQ ID NO: 3294
uuacuaucucuggagcaaa

SEQ ID NO: 255957 - RNA, 19 nt, Artificial Sequence
  Description of Artificial Sequence: Synthetic oligonucleotide
  Antisense strand to SEQ ID NO: 255956
uuugcuccagagauaguaa

SEQ ID NO: 255958 - RNA, 19 nt, Artificial Sequence
  Description of Artificial Sequence: Synthetic oligonucleotide
  Sense strand starting at position 2785 SEQ ID NO: 3294
auuuauuccuucugggaac

SEQ ID NO: 255959 - RNA, 19 nt, Artificial Sequence
  Description of Artificial Sequence: Synthetic oligonucleotide
  Antisense strand to SEQ ID NO: 255958
guucccagaaggaauaaau

SEQ ID NO: 255960 - RNA, 19 nt, Artificial Sequence
  Description of Artificial Sequence: Synthetic oligonucleotide
  Sense strand starting at position 2796 SEQ ID NO: 3294
cugggaacccauuguaaga

SEQ ID NO: 255961 - RNA, 19 nt, Artificial Sequence
  Description of Artificial Sequence: Synthetic oligonucleotide
  Antisense strand to SEQ ID NO: 255960
ucuuacaauggguucccag

SEQ ID NO: 255962 - RNA, 19 nt, Artificial Sequence
  Description of Artificial Sequence: Synthetic oligonucleotide
  Sense strand starting at position 3043 SEQ ID NO: 3294
agaaacaauuaugugcuaa

SEQ ID NO: 255963 - RNA, 19 nt, Artificial Sequence
  Description of Artificial Sequence: Synthetic oligonucleotide
  Antisense strand to SEQ ID NO: 255962
uuagcacauaauuguuucu

SEQ ID NO: 255964 - RNA, 19 nt, Artificial Sequence
  Description of Artificial Sequence: Synthetic oligonucleotide
  Sense strand starting at position 3088 SEQ ID NO: 3294
uucuauugggccuaguuua

SEQ ID NO: 255965 - RNA, 19 nt, Artificial Sequence
  Description of Artificial Sequence: Synthetic oligonucleotide
  Antisense strand to SEQ ID NO: 255964
uaaacuaggcccaauagaa

SEQ ID NO: 255966 - RNA, 19 nt, Artificial Sequence
  Description of Artificial Sequence: Synthetic oligonucleotide
  Sense strand starting at position 3191 SEQ ID NO: 3294
auaaacagucuuuguagaa

SEQ ID NO: 255967 - RNA, 19 nt, Artificial Sequence
  Description of Artificial Sequence: Synthetic oligonucleotide
  Antisense strand to SEQ ID NO: 255966
uucuacaaagacuguuuau

SEQ ID NO: 255968 - RNA, 19 nt, Artificial Sequence
  Description of Artificial Sequence: Synthetic oligonucleotide
  Sense strand starting at position 3225 SEQ ID NO: 3294
aaagaauucuucguagcac

SEQ ID NO: 255969 - RNA, 19 nt, Artificial Sequence
  Description of Artificial Sequence: Synthetic oligonucleotide
  Antisense strand to SEQ ID NO: 255968
gugcuacgaagaauucuuu

SEQ ID NO: 255970 - RNA, 19 nt, Artificial Sequence
  Description of Artificial Sequence: Synthetic oligonucleotide
  Sense strand starting at position 3419 SEQ ID NO: 3294
gggaauagaauucggucau

SEQ ID NO: 255971 - RNA, 19 nt, Artificial Sequence
  Description of Artificial Sequence: Synthetic oligonucleotide
  Antisense strand to SEQ ID NO: 255970
augaccgaauucuauuccc

SEQ ID NO: 255972 - RNA, 19 nt, Artificial Sequence
  Description of Artificial Sequence: Synthetic oligonucleotide
  Sense strand starting at position 3430 SEQ ID NO: 3294
ucggucauuucugauacaa

SEQ ID NO: 255973 - RNA, 19 nt, Artificial Sequence
  Description of Artificial Sequence: Synthetic oligonucleotide
  Antisense strand to SEQ ID NO: 255972
uuguaucagaaaugaccga

SEQ ID NO: 255974 - RNA, 19 nt, Artificial Sequence
  Description of Artificial Sequence: Synthetic oligonucleotide
  Sense strand starting at position 3432 SEQ ID NO: 3294
ggucauuucugauacaaug

SEQ ID NO: 255975 - RNA, 19 nt, Artificial Sequence
  Description of Artificial Sequence: Synthetic oligonucleotide
  Antisense strand to SEQ ID NO: 255974
cauuguaucagaaaugacc

SEQ ID NO: 255976 - RNA, 19 nt, Artificial Sequence
  Description of Artificial Sequence: Synthetic oligonucleotide
  Sense strand starting at position 3576 SEQ ID NO: 3294
ccaucaaauugagauuugu

SEQ ID NO: 255977 - RNA, 19 nt, Artificial Sequence
  Description of Artificial Sequence: Synthetic oligonucleotide
  Antisense strand to SEQ ID NO: 255976
acaaaucucaauuugaugg

SEQ ID NO: 255978 - RNA, 19 nt, Artificial Sequence
  Description of Artificial Sequence: Synthetic oligonucleotide
  Sense strand starting at position 3582 SEQ ID NO: 3294
aauugagauuugugagaug

SEQ ID NO: 255979 - RNA, 19 nt, Artificial Sequence
  Description of Artificial Sequence: Synthetic oligonucleotide
  Antisense strand to SEQ ID NO: 255978
caucucacaaaucucaauu

SEQ ID NO: 255980 - RNA, 19 nt, Artificial Sequence
  Description of Artificial Sequence: Synthetic oligonucleotide
  Sense strand starting at position 3585 SEQ ID NO: 3294
ugagauuugugagauggag

SEQ ID NO: 255981 - RNA, 19 nt, Artificial Sequence
  Description of Artificial Sequence: Synthetic oligonucleotide
  Antisense strand to SEQ ID NO: 255980
cuccaucucacaaaucuca

SEQ ID NO: 255982 - RNA, 19 nt, Artificial Sequence
  Description of Artificial Sequence: Synthetic oligonucleotide
  Sense strand starting at position 3773 SEQ ID NO: 3294
uggcacugauuccauuuau

SEQ ID NO: 255983 - RNA, 19 nt, Artificial Sequence
  Description of Artificial Sequence: Synthetic oligonucleotide
  Antisense strand to SEQ ID NO: 255982
auaaauggaaucagugcca

SEQ ID NO: 255984 - RNA, 19 nt, Artificial Sequence
  Description of Artificial Sequence: Synthetic oligonucleotide
  Sense strand starting at position 3881 SEQ ID NO: 3294
uucuguaucauagaugugu

SEQ ID NO: 255985 - RNA, 19 nt, Artificial Sequence
  Description of Artificial Sequence: Synthetic oligonucleotide
  Antisense strand to SEQ ID NO: 255984
acacaucuaugauacagaa

SEQ ID NO: 255986 - RNA, 19 nt, Artificial Sequence
  Description of Artificial Sequence: Synthetic oligonucleotide
  Sense strand starting at position 3883 SEQ ID NO: 3294
cuguaucauagauguguuu

SEQ ID NO: 255987 - RNA, 19 nt, Artificial Sequence
  Description of Artificial Sequence: Synthetic oligonucleotide
  Antisense strand to SEQ ID NO: 255986
aaacacaucuaugauacag

SEQ ID NO: 255988 - RNA, 19 nt, Artificial Sequence
  Description of Artificial Sequence: Synthetic oligonucleotide
  Sense strand starting at position 3885 SEQ ID NO: 3294
guaucauagauguguuuac

SEQ ID NO: 255989 - RNA, 19 nt, Artificial Sequence
  Description of Artificial Sequence: Synthetic oligonucleotide
  Antisense strand to SEQ ID NO: 255988
guaaacacaucuaugauac

SEQ ID NO: 255990 - RNA, 19 nt, Artificial Sequence
  Description of Artificial Sequence: Synthetic oligonucleotide
  Sense strand starting at position 3889 SEQ ID NO: 3294
cauagauguguuuacgcuu

SEQ ID NO: 255991 - RNA, 19 nt, Artificial Sequence
  Description of Artificial Sequence: Synthetic oligonucleotide
  Antisense strand to SEQ ID NO: 255990
aagcguaaacacaucuaug

SEQ ID NO: 255992 - RNA, 19 nt, Artificial Sequence
  Description of Artificial Sequence: Synthetic oligonucleotide
  Sense strand starting at position 3971 SEQ ID NO: 3294
guggguugccugcugugaa

SEQ ID NO: 255993 - RNA, 19 nt, Artificial Sequence
  Description of Artificial Sequence: Synthetic oligonucleotide
  Antisense strand to SEQ ID NO: 255992
uucacagcaggcaacccac

SEQ ID NO: 255994 - RNA, 19 nt, Artificial Sequence
  Description of Artificial Sequence: Synthetic oligonucleotide
  Sense strand starting at position 3974 SEQ ID NO: 3294
gguugccugcugugaauuu

SEQ ID NO: 255995 - RNA, 19 nt, Artificial Sequence
  Description of Artificial Sequence: Synthetic oligonucleotide
  Antisense strand to SEQ ID NO: 255994
aaauucacagcaggcaacc

SEQ ID NO: 255996 - RNA, 19 nt, Artificial Sequence
  Description of Artificial Sequence: Synthetic oligonucleotide
  Sense strand starting at position 3983 SEQ ID NO: 3294
cugugaauuugacaaggaa

SEQ ID NO: 255997 - RNA, 19 nt, Artificial Sequence
  Description of Artificial Sequence: Synthetic oligonucleotide
  Antisense strand to SEQ ID NO: 255996
uuccuugucaaauucacag

SEQ ID NO: 255998 - RNA, 19 nt, Artificial Sequence
  Description of Artificial Sequence: Synthetic oligonucleotide
  Sense strand starting at position 371 SEQ ID NO: 3293
uggguauucucaccuggaa

SEQ ID NO: 255999 - RNA, 19 nt, Artificial Sequence
  Description of Artificial Sequence: Synthetic oligonucleotide
  Antisense strand to SEQ ID NO: 255998
uuccaggugagaauaccca

SEQ ID NO: 256000 - RNA, 19 nt, Artificial Sequence
  Description of Artificial Sequence: Synthetic oligonucleotide
  Sense strand starting at position 373 SEQ ID NO: 3293
gguauucucaccuggaagc

SEQ ID NO: 256001 - RNA, 19 nt, Artificial Sequence
  Description of Artificial Sequence: Synthetic oligonucleotide
  Antisense strand to SEQ ID NO: 256000
gcuuccaggugagaauacc

SEQ ID NO: 256002 - RNA, 19 nt, Artificial Sequence
  Description of Artificial Sequence: Synthetic oligonucleotide
  Sense strand starting at position 374 SEQ ID NO: 3293
guauucucaccuggaagca

SEQ ID NO: 256003 - RNA, 19 nt, Artificial Sequence
  Description of Artificial Sequence: Synthetic oligonucleotide
  Antisense strand to SEQ ID NO: 256002
ugcuuccaggugagaauac

SEQ ID NO: 256004 - RNA, 19 nt, Artificial Sequence
  Description of Artificial Sequence: Synthetic oligonucleotide
  Sense strand starting at position 1263 SEQ ID NO: 3293
ccgcgaaggccuucuguca

SEQ ID NO: 256005 - RNA, 19 nt, Artificial Sequence
  Description of Artificial Sequence: Synthetic oligonucleotide
  Antisense strand to SEQ ID NO: 256004
ugacagaaggccuucgcgg

SEQ ID NO: 256006 - RNA, 19 nt, Artificial Sequence
  Description of Artificial Sequence: Synthetic oligonucleotide
  Sense strand starting at position 1264 SEQ ID NO: 3293
cgcgaaggccuucugucaa

SEQ ID NO: 256007 - RNA, 19 nt, Artificial Sequence
  Description of Artificial Sequence: Synthetic oligonucleotide
  Antisense strand to SEQ ID NO: 256006
uugacagaaggccuucgcg

SEQ ID NO: 256008 - RNA, 19 nt, Artificial Sequence
  Description of Artificial Sequence: Synthetic oligonucleotide
  Sense strand starting at position 1323 SEQ ID NO: 3293
gggacacugccuuaacugu

SEQ ID NO: 256009 - RNA, 19 nt, Artificial Sequence
  Description of Artificial Sequence: Synthetic oligonucleotide
  Antisense strand to SEQ ID NO: 256008
acaguuaaggcaguguccc

SEQ ID NO: 256010 - RNA, 19 nt, Artificial Sequence
  Description of Artificial Sequence: Synthetic oligonucleotide
  Sense strand starting at position 1490 SEQ ID NO: 3293
gaggguuguucuccuccau

SEQ ID NO: 256011 - RNA, 19 nt, Artificial Sequence
  Description of Artificial Sequence: Synthetic oligonucleotide
  Antisense strand to SEQ ID NO: 256010
auggaggagaacaacccuc

SEQ ID NO: 256012 - RNA, 19 nt, Artificial Sequence
  Description of Artificial Sequence: Synthetic oligonucleotide
  Sense strand starting at position 1647 SEQ ID NO: 3293
auucgucuucuuuccgcaa

SEQ ID NO: 256013 - RNA, 19 nt, Artificial Sequence
  Description of Artificial Sequence: Synthetic oligonucleotide
  Antisense strand to SEQ ID NO: 256012
uugcggaaagaagacgaau

SEQ ID NO: 256014 - RNA, 19 nt, Artificial Sequence
  Description of Artificial Sequence: Synthetic oligonucleotide
  Sense strand starting at position 1836 SEQ ID NO: 3293
gcauccauuuccguggaaa

SEQ ID NO: 256015 - RNA, 19 nt, Artificial Sequence
  Description of Artificial Sequence: Synthetic oligonucleotide
  Antisense strand to SEQ ID NO: 256014
uuuccacggaaauggaugc

SEQ ID NO: 256016 - RNA, 19 nt, Artificial Sequence
  Description of Artificial Sequence: Synthetic oligonucleotide
  Sense strand starting at position 1925 SEQ ID NO: 3293
ccgggacgcugaucauuua

SEQ ID NO: 256017 - RNA, 19 nt, Artificial Sequence
  Description of Artificial Sequence: Synthetic oligonucleotide
  Antisense strand to SEQ ID NO: 256016
uaaaugaucagcgucccgg

SEQ ID NO: 256018 - RNA, 19 nt, Artificial Sequence
  Description of Artificial Sequence: Synthetic oligonucleotide
  Sense strand starting at position 1979 SEQ ID NO: 3293
gggcuuaaaugacuuucuu

SEQ ID NO: 256019 - RNA, 19 nt, Artificial Sequence
  Description of Artificial Sequence: Synthetic oligonucleotide
  Antisense strand to SEQ ID NO: 256018
aagaaagucauuuaagccc

SEQ ID NO: 256020 - RNA, 19 nt, Artificial Sequence
  Description of Artificial Sequence: Synthetic oligonucleotide
  Sense strand starting at position 1998 SEQ ID NO: 3293
uguaauuccucugcagaga

SEQ ID NO: 256021 - RNA, 19 nt, Artificial Sequence
  Description of Artificial Sequence: Synthetic oligonucleotide
  Antisense strand to SEQ ID NO: 256020
ucucugcagaggaauuaca

SEQ ID NO: 256022 - RNA, 19 nt, Artificial Sequence
  Description of Artificial Sequence: Synthetic oligonucleotide
  Sense strand starting at position 1999 SEQ ID NO: 3293
guaauuccucugcagagau

SEQ ID NO: 256023 - RNA, 19 nt, Artificial Sequence
  Description of Artificial Sequence: Synthetic oligonucleotide
  Antisense strand to SEQ ID NO: 256022
aucucugcagaggaauuac

SEQ ID NO: 256024 - RNA, 19 nt, Artificial Sequence
  Description of Artificial Sequence: Synthetic oligonucleotide
  Sense strand starting at position 2106 SEQ ID NO: 3293
acugaaaugcuuugaccau

SEQ ID NO: 256025 - RNA, 19 nt, Artificial Sequence
  Description of Artificial Sequence: Synthetic oligonucleotide
  Antisense strand to SEQ ID NO: 256024
auggucaaagcauuucagu

SEQ ID NO: 256026 - RNA, 19 nt, Artificial Sequence
  Description of Artificial Sequence: Synthetic oligonucleotide
  Sense strand starting at position 2134 SEQ ID NO: 3293
gucugcagacucugaucuu

SEQ ID NO: 256027 - RNA, 19 nt, Artificial Sequence
  Description of Artificial Sequence: Synthetic oligonucleotide
  Antisense strand to SEQ ID NO: 256026
aagaucagagucugcagac

SEQ ID NO: 256028 - RNA, 19 nt, Artificial Sequence
  Description of Artificial Sequence: Synthetic oligonucleotide
  Sense strand starting at position 2137 SEQ ID NO: 3293
ugcagacucugaucuuaca

SEQ ID NO: 256029 - RNA, 19 nt, Artificial Sequence
  Description of Artificial Sequence: Synthetic oligonucleotide
  Antisense strand to SEQ ID NO: 256028
uguaagaucagagucugca

SEQ ID NO: 256030 - RNA, 19 nt, Artificial Sequence
  Description of Artificial Sequence: Synthetic oligonucleotide
  Sense strand starting at position 2166 SEQ ID NO: 3293
uuacuaucucuggagcaaa

SEQ ID NO: 256031 - RNA, 19 nt, Artificial Sequence
  Description of Artificial Sequence: Synthetic oligonucleotide
  Antisense strand to SEQ ID NO: 256030
uuugcuccagagauaguaa

SEQ ID NO: 256032 - RNA, 19 nt, Artificial Sequence
  Description of Artificial Sequence: Synthetic oligonucleotide
  Sense strand starting at position 2196 SEQ ID NO: 3293
auuuauuccuucugggaac

SEQ ID NO: 256033 - RNA, 19 nt, Artificial Sequence
  Description of Artificial Sequence: Synthetic oligonucleotide
  Antisense strand to SEQ ID NO: 256032
guucccagaaggaauaaau

SEQ ID NO: 256034 - RNA, 19 nt, Artificial Sequence
  Description of Artificial Sequence: Synthetic oligonucleotide
  Sense strand starting at position 2207 SEQ ID NO: 3293
cugggaacccauuguaaga

SEQ ID NO: 256035 - RNA, 19 nt, Artificial Sequence
  Description of Artificial Sequence: Synthetic oligonucleotide
  Antisense strand to SEQ ID NO: 256034
ucuuacaauggguucccag

SEQ ID NO: 256036 - RNA, 19 nt, Artificial Sequence
  Description of Artificial Sequence: Synthetic oligonucleotide
  Sense strand starting at position 2454 SEQ ID NO: 3293
agaaacaauuaugugcuaa

SEQ ID NO: 256037 - RNA, 19 nt, Artificial Sequence
  Description of Artificial Sequence: Synthetic oligonucleotide
  Antisense strand to SEQ ID NO: 256036
uuagcacauaauuguuucu

SEQ ID NO: 256038 - RNA, 19 nt, Artificial Sequence
  Description of Artificial Sequence: Synthetic oligonucleotide
  Sense strand starting at position 2499 SEQ ID NO: 3293
uucuauugggccuaguuua

SEQ ID NO: 256039 - RNA, 19 nt, Artificial Sequence
  Description of Artificial Sequence: Synthetic oligonucleotide
  Antisense strand to SEQ ID NO: 256038
uaaacuaggcccaauagaa

SEQ ID NO: 256040 - RNA, 19 nt, Artificial Sequence
  Description of Artificial Sequence: Synthetic oligonucleotide
  Sense strand starting at position 2602 SEQ ID NO: 3293
auaaacagucuuuguagaa

SEQ ID NO: 256041 - RNA, 19 nt, Artificial Sequence
  Description of Artificial Sequence: Synthetic oligonucleotide
  Antisense strand to SEQ ID NO: 256040
uucuacaaagacuguuuau

SEQ ID NO: 256042 - RNA, 19 nt, Artificial Sequence
  Description of Artificial Sequence: Synthetic oligonucleotide
  Sense strand starting at position 2636 SEQ ID NO: 3293
aaagaauucuucguagcac

SEQ ID NO: 256043 - RNA, 19 nt, Artificial Sequence
  Description of Artificial Sequence: Synthetic oligonucleotide
  Antisense strand to SEQ ID NO: 256042
gugcuacgaagaauucuuu

SEQ ID NO: 256044 - RNA, 19 nt, Artificial Sequence
  Description of Artificial Sequence: Synthetic oligonucleotide
  Sense strand starting at position 2830 SEQ ID NO: 3293
gggaauagaauucggucau

SEQ ID NO: 256045 - RNA, 19 nt, Artificial Sequence
  Description of Artificial Sequence: Synthetic oligonucleotide
  Antisense strand to SEQ ID NO: 256044
augaccgaauucuauuccc

SEQ ID NO: 256046 - RNA, 19 nt, Artificial Sequence
  Description of Artificial Sequence: Synthetic oligonucleotide
  Sense strand starting at position 2841 SEQ ID NO: 3293
ucggucauuucugauacaa

SEQ ID NO: 256047 - RNA, 19 nt, Artificial Sequence
  Description of Artificial Sequence: Synthetic oligonucleotide
  Antisense strand to SEQ ID NO: 256046
uuguaucagaaaugaccga

SEQ ID NO: 256048 - RNA, 19 nt, Artificial Sequence
  Description of Artificial Sequence: Synthetic oligonucleotide
  Sense strand starting at position 2843 SEQ ID NO: 3293
ggucauuucugauacaaug

SEQ ID NO: 256049 - RNA, 19 nt, Artificial Sequence
  Description of Artificial Sequence: Synthetic oligonucleotide
  Antisense strand to SEQ ID NO: 256048
cauuguaucagaaaugacc

SEQ ID NO: 256050 - RNA, 19 nt, Artificial Sequence
  Description of Artificial Sequence: Synthetic oligonucleotide
  Sense strand starting at position 2987 SEQ ID NO: 3293
ccaucaaauugagauuugu

SEQ ID NO: 256051 - RNA, 19 nt, Artificial Sequence
  Description of Artificial Sequence: Synthetic oligonucleotide
  Antisense strand to SEQ ID NO: 256050
acaaaucucaauuugaugg

SEQ ID NO: 256052 - RNA, 19 nt, Artificial Sequence
  Description of Artificial Sequence: Synthetic oligonucleotide
  Sense strand starting at position 2993 SEQ ID NO: 3293
aauugagauuugugagaug

SEQ ID NO: 256053 - RNA, 19 nt, Artificial Sequence
  Description of Artificial Sequence: Synthetic oligonucleotide
  Antisense strand to SEQ ID NO: 256052
caucucacaaaucucaauu

SEQ ID NO: 256054 - RNA, 19 nt, Artificial Sequence
  Description of Artificial Sequence: Synthetic oligonucleotide
  Sense strand starting at position 2996 SEQ ID NO: 3293
ugagauuugugagauggag

SEQ ID NO: 256055 - RNA, 19 nt, Artificial Sequence
  Description of Artificial Sequence: Synthetic oligonucleotide
  Antisense strand to SEQ ID NO: 256054
cuccaucucacaaaucuca

SEQ ID NO: 256056 - RNA, 19 nt, Artificial Sequence
  Description of Artificial Sequence: Synthetic oligonucleotide
  Sense strand starting at position 3184 SEQ ID NO: 3293
uggcacugauuccauuuau

SEQ ID NO: 256057 - RNA, 19 nt, Artificial Sequence
  Description of Artificial Sequence: Synthetic oligonucleotide
  Antisense strand to SEQ ID NO: 256056
auaaauggaaucagugcca

SEQ ID NO: 256058 - RNA, 19 nt, Artificial Sequence
  Description of Artificial Sequence: Synthetic oligonucleotide
  Sense strand starting at position 3292 SEQ ID NO: 3293
uucuguaucauagaugugu

SEQ ID NO: 256059 - RNA, 19 nt, Artificial Sequence
  Description of Artificial Sequence: Synthetic oligonucleotide
  Antisense strand to SEQ ID NO: 256058
acacaucuaugauacagaa

SEQ ID NO: 256060 - RNA, 19 nt, Artificial Sequence
  Description of Artificial Sequence: Synthetic oligonucleotide
  Sense strand starting at position 3296 SEQ ID NO: 3293
guaucauagauguguuuac

SEQ ID NO: 256061 - RNA, 19 nt, Artificial Sequence
  Description of Artificial Sequence: Synthetic oligonucleotide
  Antisense strand to SEQ ID NO: 256060
guaaacacaucuaugauac

SEQ ID NO: 256062 - RNA, 19 nt, Artificial Sequence
  Description of Artificial Sequence: Synthetic oligonucleotide
  Sense strand starting at position 3382 SEQ ID NO: 3293
guggguugccugcugugaa

SEQ ID NO: 256063 - RNA, 19 nt, Artificial Sequence
  Description of Artificial Sequence: Synthetic oligonucleotide
  Antisense strand to SEQ ID NO: 256062
uucacagcaggcaacccac

SEQ ID NO: 256064 - RNA, 19 nt, Artificial Sequence
  Description of Artificial Sequence: Synthetic oligonucleotide
  Sense strand starting at position 3385 SEQ ID NO: 3293
gguugccugcugugaauuu

SEQ ID NO: 256065 - RNA, 19 nt, Artificial Sequence
  Description of Artificial Sequence: Synthetic oligonucleotide
  Antisense strand to SEQ ID NO: 256064
aaauucacagcaggcaacc

SEQ ID NO: 256066 - RNA, 19 nt, Artificial Sequence
  Description of Artificial Sequence: Synthetic oligonucleotide
  Sense strand starting at position 3394 SEQ ID NO: 3293
cugugaauuugacaaggaa

SEQ ID NO: 256067 - RNA, 19 nt, Artificial Sequence
  Description of Artificial Sequence: Synthetic oligonucleotide
  Antisense strand to SEQ ID NO: 256066
uuccuugucaaauucacag

SEQ ID NO: 256068 - RNA, 19 nt, Artificial Sequence
  Description of Artificial Sequence: Synthetic oligonucleotide
  Sense strand starting at position 3406 SEQ ID NO: 3293
caaggaaggcucugguacu

SEQ ID NO: 256069 - RNA, 19 nt, Artificial Sequence
  Description of Artificial Sequence: Synthetic oligonucleotide
  Antisense strand to SEQ ID NO: 256068
aguaccagagccuuccuug

SEQ ID NO: 256070 - RNA, 19 nt, Artificial Sequence
  Description of Artificial Sequence: Synthetic oligonucleotide
  Sense strand starting at position 3417 SEQ ID NO: 3293
cugguacugcaauaguuua

SEQ ID NO: 256071 - RNA, 19 nt, Artificial Sequence
  Description of Artificial Sequence: Synthetic oligonucleotide
  Antisense strand to SEQ ID NO: 256070
uaaacuauugcaguaccag

SEQ ID NO: 256072 - RNA, 19 nt, Artificial Sequence
  Description of Artificial Sequence: Synthetic oligonucleotide
  Sense strand starting at position 3711 SEQ ID NO: 3293
aucacaguauugcuguuaa

SEQ ID NO: 256073 - RNA, 19 nt, Artificial Sequence
  Description of Artificial Sequence: Synthetic oligonucleotide
  Antisense strand to SEQ ID NO: 256072
uuaacagcaauacugugau

SEQ ID NO: 256074 - RNA, 19 nt, Artificial Sequence
  Description of Artificial Sequence: Synthetic oligonucleotide
  Sense strand starting at position 3759 SEQ ID NO: 3293
gauaaucuauucucgggau

SEQ ID NO: 256075 - RNA, 19 nt, Artificial Sequence
  Description of Artificial Sequence: Synthetic oligonucleotide
  Antisense strand to SEQ ID NO: 256074
aucccgagaauagauuauc

SEQ ID NO: 256076 - RNA, 19 nt, Artificial Sequence
  Description of Artificial Sequence: Synthetic oligonucleotide
  Sense strand starting at position 3940 SEQ ID NO: 3293
cuucuaguauaauuagaug

SEQ ID NO: 256077 - RNA, 19 nt, Artificial Sequence
  Description of Artificial Sequence: Synthetic oligonucleotide
  Antisense strand to SEQ ID NO: 256076
caucuaauuauacuagaag

SEQ ID NO: 256078 - RNA, 19 nt, Artificial Sequence
  Description of Artificial Sequence: Synthetic oligonucleotide
  Sense strand starting at position 26 SEQ ID NO: 3295
gaguuccucucacucgaaa

SEQ ID NO: 256079 - RNA, 19 nt, Artificial Sequence
  Description of Artificial Sequence: Synthetic oligonucleotide
  Antisense strand to SEQ ID NO: 256078
uuucgagugagaggaacuc

SEQ ID NO: 256080 - RNA, 19 nt, Artificial Sequence
  Description of Artificial Sequence: Synthetic oligonucleotide
  Sense strand starting at position 112 SEQ ID NO: 3295
agagcagaacaguguguau

SEQ ID NO: 256081 - RNA, 19 nt, Artificial Sequence
  Description of Artificial Sequence: Synthetic oligonucleotide
  Antisense strand to SEQ ID NO: 256080
auacacacuguucugcucu

SEQ ID NO: 256082 - RNA, 19 nt, Artificial Sequence
  Description of Artificial Sequence: Synthetic oligonucleotide
  Sense strand starting at position 228 SEQ ID NO: 3295
uuggguagguuaccauaga

SEQ ID NO: 256083 - RNA, 19 nt, Artificial Sequence
  Description of Artificial Sequence: Synthetic oligonucleotide
  Antisense strand to SEQ ID NO: 256082
ucuaugguaaccuacccaa

SEQ ID NO: 256084 - RNA, 19 nt, Artificial Sequence
  Description of Artificial Sequence: Synthetic oligonucleotide
  Sense strand starting at position 272 SEQ ID NO: 3295
uaugcucugggaggucaau

SEQ ID NO: 256085 - RNA, 19 nt, Artificial Sequence
  Description of Artificial Sequence: Synthetic oligonucleotide
  Antisense strand to SEQ ID NO: 256084
auugaccucccagagcaua

SEQ ID NO: 256086 - RNA, 19 nt, Artificial Sequence
  Description of Artificial Sequence: Synthetic oligonucleotide
  Sense strand starting at position 278 SEQ ID NO: 3295
cugggaggucaaugcuguu

SEQ ID NO: 256087 - RNA, 19 nt, Artificial Sequence
  Description of Artificial Sequence: Synthetic oligonucleotide
  Antisense strand to SEQ ID NO: 256086
aacagcauugaccucccag

SEQ ID NO: 256088 - RNA, 19 nt, Artificial Sequence
  Description of Artificial Sequence: Synthetic oligonucleotide
  Sense strand starting at position 292 SEQ ID NO: 3295
cuguucuuccaacaaguga

SEQ ID NO: 256089 - RNA, 19 nt, Artificial Sequence
  Description of Artificial Sequence: Synthetic oligonucleotide
  Antisense strand to SEQ ID NO: 256088
ucacuuguuggaagaacag

SEQ ID NO: 256090 - RNA, 19 nt, Artificial Sequence
  Description of Artificial Sequence: Synthetic oligonucleotide
  Sense strand starting at position 365 SEQ ID NO: 3295
uauaacaagucuuuggagu

SEQ ID NO: 256091 - RNA, 19 nt, Artificial Sequence
  Description of Artificial Sequence: Synthetic oligonucleotide
  Antisense strand to SEQ ID NO: 256090
acuccaaagacuuguuaua

SEQ ID NO: 256092 - RNA, 19 nt, Artificial Sequence
  Description of Artificial Sequence: Synthetic oligonucleotide
  Sense strand starting at position 388 SEQ ID NO: 3295
uaggaaacgggaugugauu

SEQ ID NO: 256093 - RNA, 19 nt, Artificial Sequence
  Description of Artificial Sequence: Synthetic oligonucleotide
  Antisense strand to SEQ ID NO: 256092
aaucacaucccguuuccua

SEQ ID NO: 256094 - RNA, 19 nt, Artificial Sequence
  Description of Artificial Sequence: Synthetic oligonucleotide
  Sense strand starting at position 394 SEQ ID NO: 3295
acgggaugugauugugaca

SEQ ID NO: 256095 - RNA, 19 nt, Artificial Sequence
  Description of Artificial Sequence: Synthetic oligonucleotide
  Antisense strand to SEQ ID NO: 256094
ugucacaaucacaucccgu

SEQ ID NO: 256096 - RNA, 19 nt, Artificial Sequence
  Description of Artificial Sequence: Synthetic oligonucleotide
  Sense strand starting at position 439 SEQ ID NO: 3295
aggcaaucaugcucaaaca

SEQ ID NO: 256097 - RNA, 19 nt, Artificial Sequence
  Description of Artificial Sequence: Synthetic oligonucleotide
  Antisense strand to SEQ ID NO: 256096
uguuugagcaugauugccu

SEQ ID NO: 256098 - RNA, 19 nt, Artificial Sequence
  Description of Artificial Sequence: Synthetic oligonucleotide
  Sense strand starting at position 572 SEQ ID NO: 3295
ccgucagauagugagcuuu

SEQ ID NO: 256099 - RNA, 19 nt, Artificial Sequence
  Description of Artificial Sequence: Synthetic oligonucleotide
  Antisense strand to SEQ ID NO: 256098
aaagcucacuaucugacgg

SEQ ID NO: 256100 - RNA, 19 nt, Artificial Sequence
  Description of Artificial Sequence: Synthetic oligonucleotide
  Sense strand starting at position 574 SEQ ID NO: 3295
gucagauagugagcuuuag

SEQ ID NO: 256101 - RNA, 19 nt, Artificial Sequence
  Description of Artificial Sequence: Synthetic oligonucleotide
  Antisense strand to SEQ ID NO: 256100
cuaaagcucacuaucugac

SEQ ID NO: 256102 - RNA, 19 nt, Artificial Sequence
  Description of Artificial Sequence: Synthetic oligonucleotide
  Sense strand starting at position 578 SEQ ID NO: 3295
gauagugagcuuuagguug

SEQ ID NO: 256103 - RNA, 19 nt, Artificial Sequence
  Description of Artificial Sequence: Synthetic oligonucleotide
  Antisense strand to SEQ ID NO: 256102
caaccuaaagcucacuauc

SEQ ID NO: 256104 - RNA, 19 nt, Artificial Sequence
  Description of Artificial Sequence: Synthetic oligonucleotide
  Sense strand starting at position 583 SEQ ID NO: 3295
ugagcuuuagguuguaacu

SEQ ID NO: 256105 - RNA, 19 nt, Artificial Sequence
  Description of Artificial Sequence: Synthetic oligonucleotide
  Antisense strand to SEQ ID NO: 256104
aguuacaaccuaaagcuca

SEQ ID NO: 256106 - RNA, 19 nt, Artificial Sequence
  Description of Artificial Sequence: Synthetic oligonucleotide
  Sense strand starting at position 631 SEQ ID NO: 3295
acugcuguuaccggagaga

SEQ ID NO: 256107 - RNA, 19 nt, Artificial Sequence
  Description of Artificial Sequence: Synthetic oligonucleotide
  Antisense strand to SEQ ID NO: 256106
ucucuccgguaacagcagu

SEQ ID NO: 256108 - RNA, 19 nt, Artificial Sequence
  Description of Artificial Sequence: Synthetic oligonucleotide
  Sense strand starting at position 914 SEQ ID NO: 3295
cauguugggccgugagaag

SEQ ID NO: 256109 - RNA, 19 nt, Artificial Sequence
  Description of Artificial Sequence: Synthetic oligonucleotide
  Antisense strand to SEQ ID NO: 256108
cuucucacggcccaacaug

SEQ ID NO: 256110 - RNA, 19 nt, Artificial Sequence
  Description of Artificial Sequence: Synthetic oligonucleotide
  Sense strand starting at position 1579 SEQ ID NO: 3295
ggcccaacuccgggagaau

SEQ ID NO: 256111 - RNA, 19 nt, Artificial Sequence
  Description of Artificial Sequence: Synthetic oligonucleotide
  Antisense strand to SEQ ID NO: 256110
auucucccggaguugggcc

SEQ ID NO: 256112 - RNA, 19 nt, Artificial Sequence
  Description of Artificial Sequence: Synthetic oligonucleotide
  Sense strand starting at position 1701 SEQ ID NO: 3295
uggagagauuugggaccuu

SEQ ID NO: 256113 - RNA, 19 nt, Artificial Sequence
  Description of Artificial Sequence: Synthetic oligonucleotide
  Antisense strand to SEQ ID NO: 256112
aaggucccaaaucucucca

SEQ ID NO: 256114 - RNA, 19 nt, Artificial Sequence
  Description of Artificial Sequence: Synthetic oligonucleotide
  Sense strand starting at position 2058 SEQ ID NO: 3295
ggucuuaggaagugggaau

SEQ ID NO: 256115 - RNA, 19 nt, Artificial Sequence
  Description of Artificial Sequence: Synthetic oligonucleotide
  Antisense strand to SEQ ID NO: 256114
auucccacuuccuaagacc

SEQ ID NO: 256116 - RNA, 19 nt, Artificial Sequence
  Description of Artificial Sequence: Synthetic oligonucleotide
  Sense strand starting at position 2070 SEQ ID NO: 3295
ugggaauccgguuaugggu

SEQ ID NO: 256117 - RNA, 19 nt, Artificial Sequence
  Description of Artificial Sequence: Synthetic oligonucleotide
  Antisense strand to SEQ ID NO: 256116
acccauaaccggauuccca

SEQ ID NO: 256118 - RNA, 19 nt, Artificial Sequence
  Description of Artificial Sequence: Synthetic oligonucleotide
  Sense strand starting at position 2184 SEQ ID NO: 3295
uucucuuccuuguuguaaa

SEQ ID NO: 256119 - RNA, 19 nt, Artificial Sequence
  Description of Artificial Sequence: Synthetic oligonucleotide
  Antisense strand to SEQ ID NO: 256118
uuuacaacaaggaagagaa

SEQ ID NO: 256120 - RNA, 19 nt, Artificial Sequence
  Description of Artificial Sequence: Synthetic oligonucleotide
  Sense strand starting at position 2191 SEQ ID NO: 3295
ccuuguuguaaaucguguu

SEQ ID NO: 256121 - RNA, 19 nt, Artificial Sequence
  Description of Artificial Sequence: Synthetic oligonucleotide
  Antisense strand to SEQ ID NO: 256120
aacacgauuuacaacaagg

SEQ ID NO: 256122 - RNA, 19 nt, Artificial Sequence
  Description of Artificial Sequence: Synthetic oligonucleotide
  Sense strand starting at position 2229 SEQ ID NO: 3295
gaucuagagccuuagagug

SEQ ID NO: 256123 - RNA, 19 nt, Artificial Sequence
  Description of Artificial Sequence: Synthetic oligonucleotide
  Antisense strand to SEQ ID NO: 256122
cacucuaaggcucuagauc

SEQ ID NO: 256124 - RNA, 19 nt, Artificial Sequence
  Description of Artificial Sequence: Synthetic oligonucleotide
  Sense strand starting at position 2347 SEQ ID NO: 3295
acggauaugcccggaaacu

SEQ ID NO: 256125 - RNA, 19 nt, Artificial Sequence
  Description of Artificial Sequence: Synthetic oligonucleotide
  Antisense strand to SEQ ID NO: 256124
aguuuccgggcauauccgu

SEQ ID NO: 256126 - RNA, 19 nt, Artificial Sequence
  Description of Artificial Sequence: Synthetic oligonucleotide
  Sense strand starting at position 2436 SEQ ID NO: 3295
uggcuauuugucgaucuuu

SEQ ID NO: 256127 - RNA, 19 nt, Artificial Sequence
  Description of Artificial Sequence: Synthetic oligonucleotide
  Antisense strand to SEQ ID NO: 256126
aaagaucgacaaauagcca

SEQ ID NO: 256128 - RNA, 19 nt, Artificial Sequence
  Description of Artificial Sequence: Synthetic oligonucleotide
  Sense strand starting at position 2858 SEQ ID NO: 3295
cggguuagcaucuacuaau

SEQ ID NO: 256129 - RNA, 19 nt, Artificial Sequence
  Description of Artificial Sequence: Synthetic oligonucleotide
  Antisense strand to SEQ ID NO: 256128
auuaguagaugcuaacccg

SEQ ID NO: 256130 - RNA, 19 nt, Artificial Sequence
  Description of Artificial Sequence: Synthetic oligonucleotide
  Sense strand starting at position 2899 SEQ ID NO: 3295
ugcugacacucauuuaguu

SEQ ID NO: 256131 - RNA, 19 nt, Artificial Sequence
  Description of Artificial Sequence: Synthetic oligonucleotide
  Antisense strand to SEQ ID NO: 256130
aacuaaaugagugucagca

SEQ ID NO: 256132 - RNA, 19 nt, Artificial Sequence
  Description of Artificial Sequence: Synthetic oligonucleotide
  Sense strand starting at position 2969 SEQ ID NO: 3295
cggugcauaguuuagugaa

SEQ ID NO: 256133 - RNA, 19 nt, Artificial Sequence
  Description of Artificial Sequence: Synthetic oligonucleotide
  Antisense strand to SEQ ID NO: 256132
uucacuaaacuaugcaccg

SEQ ID NO: 256134 - RNA, 19 nt, Artificial Sequence
  Description of Artificial Sequence: Synthetic oligonucleotide
  Sense strand starting at position 3024 SEQ ID NO: 3295
auuaaugcaguuuaugaga

SEQ ID NO: 256135 - RNA, 19 nt, Artificial Sequence
  Description of Artificial Sequence: Synthetic oligonucleotide
  Antisense strand to SEQ ID NO: 256134
ucucauaaacugcauuaau

SEQ ID NO: 256136 - RNA, 19 nt, Artificial Sequence
  Description of Artificial Sequence: Synthetic oligonucleotide
  Sense strand starting at position 3042 SEQ ID NO: 3295
agccgaguuccugguagag

SEQ ID NO: 256137 - RNA, 19 nt, Artificial Sequence
  Description of Artificial Sequence: Synthetic oligonucleotide
  Antisense strand to SEQ ID NO: 256136
cucuaccaggaacucggcu

SEQ ID NO: 256138 - RNA, 19 nt, Artificial Sequence
  Description of Artificial Sequence: Synthetic oligonucleotide
  Sense strand starting at position 3106 SEQ ID NO: 3295
gcuggaaagauaugcauau

SEQ ID NO: 256139 - RNA, 19 nt, Artificial Sequence
  Description of Artificial Sequence: Synthetic oligonucleotide
  Antisense strand to SEQ ID NO: 256138
auaugcauaucuuuccagc

SEQ ID NO: 256140 - RNA, 19 nt, Artificial Sequence
  Description of Artificial Sequence: Synthetic oligonucleotide
  Sense strand starting at position 3121 SEQ ID NO: 3295
auaugaaaugucugcagug

SEQ ID NO: 256141 - RNA, 19 nt, Artificial Sequence
  Description of Artificial Sequence: Synthetic oligonucleotide
  Antisense strand to SEQ ID NO: 256140
cacugcagacauuucauau

SEQ ID NO: 256142 - RNA, 19 nt, Artificial Sequence
  Description of Artificial Sequence: Synthetic oligonucleotide
  Sense strand starting at position 3123 SEQ ID NO: 3295
augaaaugucugcaguggu

SEQ ID NO: 256143 - RNA, 19 nt, Artificial Sequence
  Description of Artificial Sequence: Synthetic oligonucleotide
  Antisense strand to SEQ ID NO: 256142
accacugcagacauuucau

SEQ ID NO: 256144 - RNA, 19 nt, Artificial Sequence
  Description of Artificial Sequence: Synthetic oligonucleotide
  Sense strand starting at position 3126 SEQ ID NO: 3295
aaaugucugcagugguuau

SEQ ID NO: 256145 - RNA, 19 nt, Artificial Sequence
  Description of Artificial Sequence: Synthetic oligonucleotide
  Antisense strand to SEQ ID NO: 256144
auaaccacugcagacauuu

SEQ ID NO: 256146 - RNA, 19 nt, Artificial Sequence
  Description of Artificial Sequence: Synthetic oligonucleotide
  Sense strand starting at position 3148 SEQ ID NO: 3295
ugcguguugggauaaugga

SEQ ID NO: 256147 - RNA, 19 nt, Artificial Sequence
  Description of Artificial Sequence: Synthetic oligonucleotide
  Antisense strand to SEQ ID NO: 256146
uccauuaucccaacacgca

SEQ ID NO: 256148 - RNA, 19 nt, Artificial Sequence
  Description of Artificial Sequence: Synthetic oligonucleotide
  Sense strand starting at position 3341 SEQ ID NO: 3295
guguuucugucuccuagga

SEQ ID NO: 256149 - RNA, 19 nt, Artificial Sequence
  Description of Artificial Sequence: Synthetic oligonucleotide
  Antisense strand to SEQ ID NO: 256148
uccuaggagacagaaacac

SEQ ID NO: 256150 - RNA, 19 nt, Artificial Sequence
  Description of Artificial Sequence: Synthetic oligonucleotide
  Sense strand starting at position 3863 SEQ ID NO: 3295
gccuucuuucuguacauca

SEQ ID NO: 256151 - RNA, 19 nt, Artificial Sequence
  Description of Artificial Sequence: Synthetic oligonucleotide
  Antisense strand to SEQ ID NO: 256150
ugauguacagaaagaaggc

SEQ ID NO: 256152 - RNA, 19 nt, Artificial Sequence
  Description of Artificial Sequence: Synthetic oligonucleotide
  Sense strand starting at position 3865 SEQ ID NO: 3295
cuucuuucuguacaucaga

SEQ ID NO: 256153 - RNA, 19 nt, Artificial Sequence
  Description of Artificial Sequence: Synthetic oligonucleotide
  Antisense strand to SEQ ID NO: 256152
ucugauguacagaaagaag

SEQ ID NO: 256154 - RNA, 19 nt, Artificial Sequence
  Description of Artificial Sequence: Synthetic oligonucleotide
  Sense strand starting at position 3949 SEQ ID NO: 3295
agcaaagugacgcgaugaa

SEQ ID NO: 256155 - RNA, 19 nt, Artificial Sequence
  Description of Artificial Sequence: Synthetic oligonucleotide
  Antisense strand to SEQ ID NO: 256154
uucaucgcgucacuuugcu

SEQ ID NO: 256156 - RNA, 19 nt, Artificial Sequence
  Description of Artificial Sequence: Synthetic oligonucleotide
  Sense strand starting at position 3953 SEQ ID NO: 3295
aagugacgcgaugaagaaa

SEQ ID NO: 256157 - RNA, 19 nt, Artificial Sequence
  Description of Artificial Sequence: Synthetic oligonucleotide
  Antisense strand to SEQ ID NO: 256156
uuucuucaucgcgucacuu

SEQ ID NO: 256158 - RNA, 19 nt, Artificial Sequence
  Description of Artificial Sequence: Synthetic oligonucleotide
  Sense strand starting at position 136 SEQ ID NO: 3296
cugucaacagcuugagagu

SEQ ID NO: 256159 - RNA, 19 nt, Artificial Sequence
  Description of Artificial Sequence: Synthetic oligonucleotide
  Antisense strand to SEQ ID NO: 256158
acucucaagcuguugacag

SEQ ID NO: 256160 - RNA, 19 nt, Artificial Sequence
  Description of Artificial Sequence: Synthetic oligonucleotide
  Sense strand starting at position 161 SEQ ID NO: 3296
ucaucaauugucugucuua

SEQ ID NO: 256161 - RNA, 19 nt, Artificial Sequence
  Description of Artificial Sequence: Synthetic oligonucleotide
  Antisense strand to SEQ ID NO: 256160
uaagacagacaauugauga

SEQ ID NO: 256162 - RNA, 19 nt, Artificial Sequence
  Description of Artificial Sequence: Synthetic oligonucleotide
  Sense strand starting at position 164 SEQ ID NO: 3296
ucaauugucugucuuaauu

SEQ ID NO: 256163 - RNA, 19 nt, Artificial Sequence
  Description of Artificial Sequence: Synthetic oligonucleotide
  Antisense strand to SEQ ID NO: 256162
aauuaagacagacaauuga

SEQ ID NO: 256164 - RNA, 19 nt, Artificial Sequence
  Description of Artificial Sequence: Synthetic oligonucleotide
  Sense strand starting at position 173 SEQ ID NO: 3296
ugucuuaauuggucuggaa

SEQ ID NO: 256165 - RNA, 19 nt, Artificial Sequence
  Description of Artificial Sequence: Synthetic oligonucleotide
  Antisense strand to SEQ ID NO: 256164
uuccagaccaauuaagaca

SEQ ID NO: 256166 - RNA, 19 nt, Artificial Sequence
  Description of Artificial Sequence: Synthetic oligonucleotide
  Sense strand starting at position 177 SEQ ID NO: 3296
uuaauuggucuggaagcau

SEQ ID NO: 256167 - RNA, 19 nt, Artificial Sequence
  Description of Artificial Sequence: Synthetic oligonucleotide
  Antisense strand to SEQ ID NO: 256166
augcuuccagaccaauuaa

SEQ ID NO: 256168 - RNA, 19 nt, Artificial Sequence
  Description of Artificial Sequence: Synthetic oligonucleotide
  Sense strand starting at position 274 SEQ ID NO: 3296
gugugcucucaggacuaga

SEQ ID NO: 256169 - RNA, 19 nt, Artificial Sequence
  Description of Artificial Sequence: Synthetic oligonucleotide
  Antisense strand to SEQ ID NO: 256168
ucuaguccugagagcacac

SEQ ID NO: 256170 - RNA, 19 nt, Artificial Sequence
  Description of Artificial Sequence: Synthetic oligonucleotide
  Sense strand starting at position 277 SEQ ID NO: 3296
ugcucucaggacuagaguu

SEQ ID NO: 256171 - RNA, 19 nt, Artificial Sequence
  Description of Artificial Sequence: Synthetic oligonucleotide
  Antisense strand to SEQ ID NO: 256170
aacucuaguccugagagca

SEQ ID NO: 256172 - RNA, 19 nt, Artificial Sequence
  Description of Artificial Sequence: Synthetic oligonucleotide
  Sense strand starting at position 499 SEQ ID NO: 3296
ccauuaaugucuucuagag

SEQ ID NO: 256173 - RNA, 19 nt, Artificial Sequence
  Description of Artificial Sequence: Synthetic oligonucleotide
  Antisense strand to SEQ ID NO: 256172
cucuagaagacauuaaugg

SEQ ID NO: 256174 - RNA, 19 nt, Artificial Sequence
  Description of Artificial Sequence: Synthetic oligonucleotide
  Sense strand starting at position 556 SEQ ID NO: 3296
gaguuccucucacucgaaa

SEQ ID NO: 256175 - RNA, 19 nt, Artificial Sequence
  Description of Artificial Sequence: Synthetic oligonucleotide
  Antisense strand to SEQ ID NO: 256174
uuucgagugagaggaacuc

SEQ ID NO: 256176 - RNA, 19 nt, Artificial Sequence
  Description of Artificial Sequence: Synthetic oligonucleotide
  Sense strand starting at position 642 SEQ ID NO: 3296
agagcagaacaguguguau

SEQ ID NO: 256177 - RNA, 19 nt, Artificial Sequence
  Description of Artificial Sequence: Synthetic oligonucleotide
  Antisense strand to SEQ ID NO: 256176
auacacacuguucugcucu

SEQ ID NO: 256178 - RNA, 19 nt, Artificial Sequence
  Description of Artificial Sequence: Synthetic oligonucleotide
  Sense strand starting at position 758 SEQ ID NO: 3296
uuggguagguuaccauaga

SEQ ID NO: 256179 - RNA, 19 nt, Artificial Sequence
  Description of Artificial Sequence: Synthetic oligonucleotide
  Antisense strand to SEQ ID NO: 256178
ucuaugguaaccuacccaa

SEQ ID NO: 256180 - RNA, 19 nt, Artificial Sequence
  Description of Artificial Sequence: Synthetic oligonucleotide
  Sense strand starting at position 802 SEQ ID NO: 3296
uaugcucugggaggucaau

SEQ ID NO: 256181 - RNA, 19 nt, Artificial Sequence
  Description of Artificial Sequence: Synthetic oligonucleotide
  Antisense strand to SEQ ID NO: 256180
auugaccucccagagcaua

SEQ ID NO: 256182 - RNA, 19 nt, Artificial Sequence
  Description of Artificial Sequence: Synthetic oligonucleotide
  Sense strand starting at position 808 SEQ ID NO: 3296
cugggaggucaaugcuguu

SEQ ID NO: 256183 - RNA, 19 nt, Artificial Sequence
  Description of Artificial Sequence: Synthetic oligonucleotide
  Antisense strand to SEQ ID NO: 256182
aacagcauugaccucccag

SEQ ID NO: 256184 - RNA, 19 nt, Artificial Sequence
  Description of Artificial Sequence: Synthetic oligonucleotide
  Sense strand starting at position 822 SEQ ID NO: 3296
cuguucuuccaacaaguga

SEQ ID NO: 256185 - RNA, 19 nt, Artificial Sequence
  Description of Artificial Sequence: Synthetic oligonucleotide
  Antisense strand to SEQ ID NO: 256184
ucacuuguuggaagaacag

SEQ ID NO: 256186 - RNA, 19 nt, Artificial Sequence
  Description of Artificial Sequence: Synthetic oligonucleotide
  Sense strand starting at position 895 SEQ ID NO: 3296
uauaacaagucuuuggagu

SEQ ID NO: 256187 - RNA, 19 nt, Artificial Sequence
  Description of Artificial Sequence: Synthetic oligonucleotide
  Antisense strand to SEQ ID NO: 256186
acuccaaagacuuguuaua

SEQ ID NO: 256188 - RNA, 19 nt, Artificial Sequence
  Description of Artificial Sequence: Synthetic oligonucleotide
  Sense strand starting at position 918 SEQ ID NO: 3296
uaggaaacgggaugugauu

SEQ ID NO: 256189 - RNA, 19 nt, Artificial Sequence
  Description of Artificial Sequence: Synthetic oligonucleotide
  Antisense strand to SEQ ID NO: 256188
aaucacaucccguuuccua

SEQ ID NO: 256190 - RNA, 19 nt, Artificial Sequence
  Description of Artificial Sequence: Synthetic oligonucleotide
  Sense strand starting at position 924 SEQ ID NO: 3296
acgggaugugauugugaca

SEQ ID NO: 256191 - RNA, 19 nt, Artificial Sequence
  Description of Artificial Sequence: Synthetic oligonucleotide
  Antisense strand to SEQ ID NO: 256190
ugucacaaucacaucccgu

SEQ ID NO: 256192 - RNA, 19 nt, Artificial Sequence
  Description of Artificial Sequence: Synthetic oligonucleotide
  Sense strand starting at position 969 SEQ ID NO: 3296
aggcaaucaugcucaaaca

SEQ ID NO: 256193 - RNA, 19 nt, Artificial Sequence
  Description of Artificial Sequence: Synthetic oligonucleotide
  Antisense strand to SEQ ID NO: 256192
uguuugagcaugauugccu

SEQ ID NO: 256194 - RNA, 19 nt, Artificial Sequence
  Description of Artificial Sequence: Synthetic oligonucleotide
  Sense strand starting at position 1102 SEQ ID NO: 3296
ccgucagauagugagcuuu

SEQ ID NO: 256195 - RNA, 19 nt, Artificial Sequence
  Description of Artificial Sequence: Synthetic oligonucleotide
  Antisense strand to SEQ ID NO: 256194
aaagcucacuaucugacgg

SEQ ID NO: 256196 - RNA, 19 nt, Artificial Sequence
  Description of Artificial Sequence: Synthetic oligonucleotide
  Sense strand starting at position 1104 SEQ ID NO: 3296
gucagauagugagcuuuag

SEQ ID NO: 256197 - RNA, 19 nt, Artificial Sequence
  Description of Artificial Sequence: Synthetic oligonucleotide
  Antisense strand to SEQ ID NO: 256196
cuaaagcucacuaucugac

SEQ ID NO: 256198 - RNA, 19 nt, Artificial Sequence
  Description of Artificial Sequence: Synthetic oligonucleotide
  Sense strand starting at position 1108 SEQ ID NO: 3296
gauagugagcuuuagguug

SEQ ID NO: 256199 - RNA, 19 nt, Artificial Sequence
  Description of Artificial Sequence: Synthetic oligonucleotide
  Antisense strand to SEQ ID NO: 256198
caaccuaaagcucacuauc

SEQ ID NO: 256200 - RNA, 19 nt, Artificial Sequence
  Description of Artificial Sequence: Synthetic oligonucleotide
  Sense strand starting at position 1113 SEQ ID NO: 3296
ugagcuuuagguuguaacu

SEQ ID NO: 256201 - RNA, 19 nt, Artificial Sequence
  Description of Artificial Sequence: Synthetic oligonucleotide
  Antisense strand to SEQ ID NO: 256200
aguuacaaccuaaagcuca

SEQ ID NO: 256202 - RNA, 19 nt, Artificial Sequence
  Description of Artificial Sequence: Synthetic oligonucleotide
  Sense strand starting at position 1161 SEQ ID NO: 3296
acugcuguuaccggagaga

SEQ ID NO: 256203 - RNA, 19 nt, Artificial Sequence
  Description of Artificial Sequence: Synthetic oligonucleotide
  Antisense strand to SEQ ID NO: 256202
ucucuccgguaacagcagu

SEQ ID NO: 256204 - RNA, 19 nt, Artificial Sequence
  Description of Artificial Sequence: Synthetic oligonucleotide
  Sense strand starting at position 1444 SEQ ID NO: 3296
cauguugggccgugagaag

SEQ ID NO: 256205 - RNA, 19 nt, Artificial Sequence
  Description of Artificial Sequence: Synthetic oligonucleotide
  Antisense strand to SEQ ID NO: 256204
cuucucacggcccaacaug

SEQ ID NO: 256206 - RNA, 19 nt, Artificial Sequence
  Description of Artificial Sequence: Synthetic oligonucleotide
  Sense strand starting at position 2109 SEQ ID NO: 3296
ggcccaacuccgggagaau

SEQ ID NO: 256207 - RNA, 19 nt, Artificial Sequence
  Description of Artificial Sequence: Synthetic oligonucleotide
  Antisense strand to SEQ ID NO: 256206
auucucccggaguugggcc

SEQ ID NO: 256208 - RNA, 19 nt, Artificial Sequence
  Description of Artificial Sequence: Synthetic oligonucleotide
  Sense strand starting at position 2231 SEQ ID NO: 3296
uggagagauuugggaccuu

SEQ ID NO: 256209 - RNA, 19 nt, Artificial Sequence
  Description of Artificial Sequence: Synthetic oligonucleotide
  Antisense strand to SEQ ID NO: 256208
aaggucccaaaucucucca

SEQ ID NO: 256210 - RNA, 19 nt, Artificial Sequence
  Description of Artificial Sequence: Synthetic oligonucleotide
  Sense strand starting at position 2588 SEQ ID NO: 3296
ggucuuaggaagugggaau

SEQ ID NO: 256211 - RNA, 19 nt, Artificial Sequence
  Description of Artificial Sequence: Synthetic oligonucleotide
  Antisense strand to SEQ ID NO: 256210
auucccacuuccuaagacc

SEQ ID NO: 256212 - RNA, 19 nt, Artificial Sequence
  Description of Artificial Sequence: Synthetic oligonucleotide
  Sense strand starting at position 2600 SEQ ID NO: 3296
ugggaauccgguuaugggu

SEQ ID NO: 256213 - RNA, 19 nt, Artificial Sequence
  Description of Artificial Sequence: Synthetic oligonucleotide
  Antisense strand to SEQ ID NO: 256212
acccauaaccggauuccca

SEQ ID NO: 256214 - RNA, 19 nt, Artificial Sequence
  Description of Artificial Sequence: Synthetic oligonucleotide
  Sense strand starting at position 2721 SEQ ID NO: 3296
ccuuguuguaaaucguguu

SEQ ID NO: 256215 - RNA, 19 nt, Artificial Sequence
  Description of Artificial Sequence: Synthetic oligonucleotide
  Antisense strand to SEQ ID NO: 256214
aacacgauuuacaacaagg

SEQ ID NO: 256216 - RNA, 19 nt, Artificial Sequence
  Description of Artificial Sequence: Synthetic oligonucleotide
  Sense strand starting at position 2759 SEQ ID NO: 3296
gaucuagagccuuagagug

SEQ ID NO: 256217 - RNA, 19 nt, Artificial Sequence
  Description of Artificial Sequence: Synthetic oligonucleotide
  Antisense strand to SEQ ID NO: 256216
cacucuaaggcucuagauc

SEQ ID NO: 256218 - RNA, 19 nt, Artificial Sequence
  Description of Artificial Sequence: Synthetic oligonucleotide
  Sense strand starting at position 2877 SEQ ID NO: 3296
acggauaugcccggaaacu

SEQ ID NO: 256219 - RNA, 19 nt, Artificial Sequence
  Description of Artificial Sequence: Synthetic oligonucleotide
  Antisense strand to SEQ ID NO: 256218
aguuuccgggcauauccgu

SEQ ID NO: 256220 - RNA, 19 nt, Artificial Sequence
  Description of Artificial Sequence: Synthetic oligonucleotide
  Sense strand starting at position 2966 SEQ ID NO: 3296
uggcuauuugucgaucuuu

SEQ ID NO: 256221 - RNA, 19 nt, Artificial Sequence
  Description of Artificial Sequence: Synthetic oligonucleotide
  Antisense strand to SEQ ID NO: 256220
aaagaucgacaaauagcca

SEQ ID NO: 256222 - RNA, 19 nt, Artificial Sequence
  Description of Artificial Sequence: Synthetic oligonucleotide
  Sense strand starting at position 3388 SEQ ID NO: 3296
cggguuagcaucuacuaau

SEQ ID NO: 256223 - RNA, 19 nt, Artificial Sequence
  Description of Artificial Sequence: Synthetic oligonucleotide
  Antisense strand to SEQ ID NO: 256222
auuaguagaugcuaacccg

SEQ ID NO: 256224 - RNA, 19 nt, Artificial Sequence
  Description of Artificial Sequence: Synthetic oligonucleotide
  Sense strand starting at position 3429 SEQ ID NO: 3296
ugcugacacucauuuaguu

SEQ ID NO: 256225 - RNA, 19 nt, Artificial Sequence
  Description of Artificial Sequence: Synthetic oligonucleotide
  Antisense strand to SEQ ID NO: 256224
aacuaaaugagugucagca

SEQ ID NO: 256226 - RNA, 19 nt, Artificial Sequence
  Description of Artificial Sequence: Synthetic oligonucleotide
  Sense strand starting at position 3499 SEQ ID NO: 3296
cggugcauaguuuagugaa

SEQ ID NO: 256227 - RNA, 19 nt, Artificial Sequence
  Description of Artificial Sequence: Synthetic oligonucleotide
  Antisense strand to SEQ ID NO: 256226
uucacuaaacuaugcaccg

SEQ ID NO: 256228 - RNA, 19 nt, Artificial Sequence
  Description of Artificial Sequence: Synthetic oligonucleotide
  Sense strand starting at position 3554 SEQ ID NO: 3296
auuaaugcaguuuaugaga

SEQ ID NO: 256229 - RNA, 19 nt, Artificial Sequence
  Description of Artificial Sequence: Synthetic oligonucleotide
  Antisense strand to SEQ ID NO: 256228
ucucauaaacugcauuaau

SEQ ID NO: 256230 - RNA, 19 nt, Artificial Sequence
  Description of Artificial Sequence: Synthetic oligonucleotide
  Sense strand starting at position 3636 SEQ ID NO: 3296
gcuggaaagauaugcauau

SEQ ID NO: 256231 - RNA, 19 nt, Artificial Sequence
  Description of Artificial Sequence: Synthetic oligonucleotide
  Antisense strand to SEQ ID NO: 256230
auaugcauaucuuuccagc

SEQ ID NO: 256232 - RNA, 19 nt, Artificial Sequence
  Description of Artificial Sequence: Synthetic oligonucleotide
  Sense strand starting at position 3651 SEQ ID NO: 3296
auaugaaaugucugcagug

SEQ ID NO: 256233 - RNA, 19 nt, Artificial Sequence
  Description of Artificial Sequence: Synthetic oligonucleotide
  Antisense strand to SEQ ID NO: 256232
cacugcagacauuucauau

SEQ ID NO: 256234 - RNA, 19 nt, Artificial Sequence
  Description of Artificial Sequence: Synthetic oligonucleotide
  Sense strand starting at position 3653 SEQ ID NO: 3296
augaaaugucugcaguggu

SEQ ID NO: 256235 - RNA, 19 nt, Artificial Sequence
  Description of Artificial Sequence: Synthetic oligonucleotide
  Antisense strand to SEQ ID NO: 256234
accacugcagacauuucau

SEQ ID NO: 256236 - RNA, 19 nt, Artificial Sequence
  Description of Artificial Sequence: Synthetic oligonucleotide
  Sense strand starting at position 3678 SEQ ID NO: 3296
ugcguguugggauaaugga

SEQ ID NO: 256237 - RNA, 19 nt, Artificial Sequence
  Description of Artificial Sequence: Synthetic oligonucleotide
  Antisense strand to SEQ ID NO: 256236
uccauuaucccaacacgca

SEQ ID NO: 256238 - RNA, 19 nt, Artificial Sequence
  Description of Artificial Sequence: Synthetic oligonucleotide
  Sense strand starting at position 342 SEQ ID NO: 3297
agcagauaagccugaaggu

SEQ ID NO: 256239 - RNA, 19 nt, Artificial Sequence
  Description of Artificial Sequence: Synthetic oligonucleotide
  Antisense strand to SEQ ID NO: 256238
accuucaggcuuaucugcu

SEQ ID NO: 256240 - RNA, 19 nt, Artificial Sequence
  Description of Artificial Sequence: Synthetic oligonucleotide
  Sense strand starting at position 366 SEQ ID NO: 3297
uccuauuuaucguccauac

SEQ ID NO: 256241 - RNA, 19 nt, Artificial Sequence
  Description of Artificial Sequence: Synthetic oligonucleotide
  Antisense strand to SEQ ID NO: 256240
guauggacgauaaauagga

SEQ ID NO: 256242 - RNA, 19 nt, Artificial Sequence
  Description of Artificial Sequence: Synthetic oligonucleotide
  Sense strand starting at position 586 SEQ ID NO: 3297
ugacaaauacgauggguaa

SEQ ID NO: 256243 - RNA, 19 nt, Artificial Sequence
  Description of Artificial Sequence: Synthetic oligonucleotide
  Antisense strand to SEQ ID NO: 256242
uuacccaucguauuuguca

SEQ ID NO: 256244 - RNA, 19 nt, Artificial Sequence
  Description of Artificial Sequence: Synthetic oligonucleotide
  Sense strand starting at position 587 SEQ ID NO: 3297
gacaaauacgauggguaau

SEQ ID NO: 256245 - RNA, 19 nt, Artificial Sequence
  Description of Artificial Sequence: Synthetic oligonucleotide
  Antisense strand to SEQ ID NO: 256244
auuacccaucguauuuguc

SEQ ID NO: 256246 - RNA, 19 nt, Artificial Sequence
  Description of Artificial Sequence: Synthetic oligonucleotide
  Sense strand starting at position 664 SEQ ID NO: 3297
aaucuuggccucugugaug

SEQ ID NO: 256247 - RNA, 19 nt, Artificial Sequence
  Description of Artificial Sequence: Synthetic oligonucleotide
  Antisense strand to SEQ ID NO: 256246
caucacagaggccaagauu

SEQ ID NO: 256248 - RNA, 19 nt, Artificial Sequence
  Description of Artificial Sequence: Synthetic oligonucleotide
  Sense strand starting at position 678 SEQ ID NO: 3297
ugaugcugucagcaaguaa

SEQ ID NO: 256249 - RNA, 19 nt, Artificial Sequence
  Description of Artificial Sequence: Synthetic oligonucleotide
  Antisense strand to SEQ ID NO: 256248
uuacuugcugacagcauca

SEQ ID NO: 256250 - RNA, 19 nt, Artificial Sequence
  Description of Artificial Sequence: Synthetic oligonucleotide
  Sense strand starting at position 807 SEQ ID NO: 3297
ugcuauguacuccaugaac

SEQ ID NO: 256251 - RNA, 19 nt, Artificial Sequence
  Description of Artificial Sequence: Synthetic oligonucleotide
  Antisense strand to SEQ ID NO: 256250
guucauggaguacauagca

SEQ ID NO: 256252 - RNA, 19 nt, Artificial Sequence
  Description of Artificial Sequence: Synthetic oligonucleotide
  Sense strand starting at position 840 SEQ ID NO: 3297
gucuguuguaaugauuaua

SEQ ID NO: 256253 - RNA, 19 nt, Artificial Sequence
  Description of Artificial Sequence: Synthetic oligonucleotide
  Antisense strand to SEQ ID NO: 256252
uauaaucauuacaacagac

SEQ ID NO: 256254 - RNA, 19 nt, Artificial Sequence
  Description of Artificial Sequence: Synthetic oligonucleotide
  Sense strand starting at position 1124 SEQ ID NO: 3297
guaacuaaccaauguguaa

SEQ ID NO: 256255 - RNA, 19 nt, Artificial Sequence
  Description of Artificial Sequence: Synthetic oligonucleotide
  Antisense strand to SEQ ID NO: 256254
uuacacauugguuaguuac

SEQ ID NO: 256256 - RNA, 19 nt, Artificial Sequence
  Description of Artificial Sequence: Synthetic oligonucleotide
  Sense strand starting at position 1128 SEQ ID NO: 3297
cuaaccaauguguaaggua

SEQ ID NO: 256257 - RNA, 19 nt, Artificial Sequence
  Description of Artificial Sequence: Synthetic oligonucleotide
  Antisense strand to SEQ ID NO: 256256
uaccuuacacauugguuag

SEQ ID NO: 256258 - RNA, 19 nt, Artificial Sequence
  Description of Artificial Sequence: Synthetic oligonucleotide
  Sense strand starting at position 1133 SEQ ID NO: 3297
caauguguaagguagguua

SEQ ID NO: 256259 - RNA, 19 nt, Artificial Sequence
  Description of Artificial Sequence: Synthetic oligonucleotide
  Antisense strand to SEQ ID NO: 256258
uaaccuaccuuacacauug

SEQ ID NO: 256260 - RNA, 19 nt, Artificial Sequence
  Description of Artificial Sequence: Synthetic oligonucleotide
  Sense strand starting at position 1135 SEQ ID NO: 3297
auguguaagguagguuauu

SEQ ID NO: 256261 - RNA, 19 nt, Artificial Sequence
  Description of Artificial Sequence: Synthetic oligonucleotide
  Antisense strand to SEQ ID NO: 256260
aauaaccuaccuuacacau

SEQ ID NO: 256262 - RNA, 19 nt, Artificial Sequence
  Description of Artificial Sequence: Synthetic oligonucleotide
  Sense strand starting at position 1365 SEQ ID NO: 3297
agggcucuggacgauuaga

SEQ ID NO: 256263 - RNA, 19 nt, Artificial Sequence
  Description of Artificial Sequence: Synthetic oligonucleotide
  Antisense strand to SEQ ID NO: 256262
ucuaaucguccagagcccu

SEQ ID NO: 256264 - RNA, 19 nt, Artificial Sequence
  Description of Artificial Sequence: Synthetic oligonucleotide
  Sense strand starting at position 2343 SEQ ID NO: 3297
acugaaucaccagagcuuu

SEQ ID NO: 256265 - RNA, 19 nt, Artificial Sequence
  Description of Artificial Sequence: Synthetic oligonucleotide
  Antisense strand to SEQ ID NO: 256264
aaagcucuggugauucagu

SEQ ID NO: 256266 - RNA, 19 nt, Artificial Sequence
  Description of Artificial Sequence: Synthetic oligonucleotide
  Sense strand starting at position 2468 SEQ ID NO: 3297
ccaagcuuacuagggagaa

SEQ ID NO: 256267 - RNA, 19 nt, Artificial Sequence
  Description of Artificial Sequence: Synthetic oligonucleotide
  Antisense strand to SEQ ID NO: 256266
uucucccuaguaagcuugg

SEQ ID NO: 256268 - RNA, 19 nt, Artificial Sequence
  Description of Artificial Sequence: Synthetic oligonucleotide
  Sense strand starting at position 2594 SEQ ID NO: 3297
gcaccuuauaguggucaag

SEQ ID NO: 256269 - RNA, 19 nt, Artificial Sequence
  Description of Artificial Sequence: Synthetic oligonucleotide
  Antisense strand to SEQ ID NO: 256268
cuugaccacuauaaggugc

SEQ ID NO: 256270 - RNA, 19 nt, Artificial Sequence
  Description of Artificial Sequence: Synthetic oligonucleotide
  Sense strand starting at position 2596 SEQ ID NO: 3297
accuuauaguggucaagca

SEQ ID NO: 256271 - RNA, 19 nt, Artificial Sequence
  Description of Artificial Sequence: Synthetic oligonucleotide
  Antisense strand to SEQ ID NO: 256270
ugcuugaccacuauaaggu

SEQ ID NO: 256272 - RNA, 19 nt, Artificial Sequence
  Description of Artificial Sequence: Synthetic oligonucleotide
  Sense strand starting at position 2597 SEQ ID NO: 3297
ccuuauaguggucaagcaa

SEQ ID NO: 256273 - RNA, 19 nt, Artificial Sequence
  Description of Artificial Sequence: Synthetic oligonucleotide
  Antisense strand to SEQ ID NO: 256272
uugcuugaccacuauaagg

SEQ ID NO: 256274 - RNA, 19 nt, Artificial Sequence
  Description of Artificial Sequence: Synthetic oligonucleotide
  Sense strand starting at position 2720 SEQ ID NO: 3297
ccaagauuccauggcuggu

SEQ ID NO: 256275 - RNA, 19 nt, Artificial Sequence
  Description of Artificial Sequence: Synthetic oligonucleotide
  Antisense strand to SEQ ID NO: 256274
accagccauggaaucuugg

SEQ ID NO: 256276 - RNA, 19 nt, Artificial Sequence
  Description of Artificial Sequence: Synthetic oligonucleotide
  Sense strand starting at position 2836 SEQ ID NO: 3297
acagaacuucugcagaagu

SEQ ID NO: 256277 - RNA, 19 nt, Artificial Sequence
  Description of Artificial Sequence: Synthetic oligonucleotide
  Antisense strand to SEQ ID NO: 256276
acuucugcagaaguucugu

SEQ ID NO: 256278 - RNA, 19 nt, Artificial Sequence
  Description of Artificial Sequence: Synthetic oligonucleotide
  Sense strand starting at position 2878 SEQ ID NO: 3297
ugagacuucuaaucugucu

SEQ ID NO: 256279 - RNA, 19 nt, Artificial Sequence
  Description of Artificial Sequence: Synthetic oligonucleotide
  Antisense strand to SEQ ID NO: 256278
agacagauuagaagucuca

SEQ ID NO: 256280 - RNA, 19 nt, Artificial Sequence
  Description of Artificial Sequence: Synthetic oligonucleotide
  Sense strand starting at position 3142 SEQ ID NO: 3297
ugcagaaagcacuguacaa

SEQ ID NO: 256281 - RNA, 19 nt, Artificial Sequence
  Description of Artificial Sequence: Synthetic oligonucleotide
  Antisense strand to SEQ ID NO: 256280
uuguacagugcuuucugca

SEQ ID NO: 256282 - RNA, 19 nt, Artificial Sequence
  Description of Artificial Sequence: Synthetic oligonucleotide
  Sense strand starting at position 3162 SEQ ID NO: 3297
uuuaaaguuguauggagaa

SEQ ID NO: 256283 - RNA, 19 nt, Artificial Sequence
  Description of Artificial Sequence: Synthetic oligonucleotide
  Antisense strand to SEQ ID NO: 256282
uucuccauacaacuuuaaa

SEQ ID NO: 256284 - RNA, 19 nt, Artificial Sequence
  Description of Artificial Sequence: Synthetic oligonucleotide
  Sense strand starting at position 3174 SEQ ID NO: 3297
uggagaacauuccuucuua

SEQ ID NO: 256285 - RNA, 19 nt, Artificial Sequence
  Description of Artificial Sequence: Synthetic oligonucleotide
  Antisense strand to SEQ ID NO: 256284
uaagaaggaauguucucca

SEQ ID NO: 256286 - RNA, 19 nt, Artificial Sequence
  Description of Artificial Sequence: Synthetic oligonucleotide
  Sense strand starting at position 3175 SEQ ID NO: 3297
ggagaacauuccuucuuau

SEQ ID NO: 256287 - RNA, 19 nt, Artificial Sequence
  Description of Artificial Sequence: Synthetic oligonucleotide
  Antisense strand to SEQ ID NO: 256286
auaagaaggaauguucucc

SEQ ID NO: 256288 - RNA, 19 nt, Artificial Sequence
  Description of Artificial Sequence: Synthetic oligonucleotide
  Sense strand starting at position 3202 SEQ ID NO: 3297
caguacacuuccgugacua

SEQ ID NO: 256289 - RNA, 19 nt, Artificial Sequence
  Description of Artificial Sequence: Synthetic oligonucleotide
  Antisense strand to SEQ ID NO: 256288
uagucacggaaguguacug

SEQ ID NO: 256290 - RNA, 19 nt, Artificial Sequence
  Description of Artificial Sequence: Synthetic oligonucleotide
  Sense strand starting at position 3203 SEQ ID NO: 3297
aguacacuuccgugacuau

SEQ ID NO: 256291 - RNA, 19 nt, Artificial Sequence
  Description of Artificial Sequence: Synthetic oligonucleotide
  Antisense strand to SEQ ID NO: 256290
auagucacggaaguguacu

SEQ ID NO: 256292 - RNA, 19 nt, Artificial Sequence
  Description of Artificial Sequence: Synthetic oligonucleotide
  Sense strand starting at position 3204 SEQ ID NO: 3297
guacacuuccgugacuaua

SEQ ID NO: 256293 - RNA, 19 nt, Artificial Sequence
  Description of Artificial Sequence: Synthetic oligonucleotide
  Antisense strand to SEQ ID NO: 256292
uauagucacggaaguguac

SEQ ID NO: 256294 - RNA, 19 nt, Artificial Sequence
  Description of Artificial Sequence: Synthetic oligonucleotide
  Sense strand starting at position 3206 SEQ ID NO: 3297
acacuuccgugacuauaua

SEQ ID NO: 256295 - RNA, 19 nt, Artificial Sequence
  Description of Artificial Sequence: Synthetic oligonucleotide
  Antisense strand to SEQ ID NO: 256294
uauauagucacggaagugu

SEQ ID NO: 256296 - RNA, 19 nt, Artificial Sequence
  Description of Artificial Sequence: Synthetic oligonucleotide
  Sense strand starting at position 3631 SEQ ID NO: 3297
gguuucagucaguagagca

SEQ ID NO: 256297 - RNA, 19 nt, Artificial Sequence
  Description of Artificial Sequence: Synthetic oligonucleotide
  Antisense strand to SEQ ID NO: 256296
ugcucuacugacugaaacc

SEQ ID NO: 256298 - RNA, 19 nt, Artificial Sequence
  Description of Artificial Sequence: Synthetic oligonucleotide
  Sense strand starting at position 3638 SEQ ID NO: 3297
gucaguagagcaugugauc

SEQ ID NO: 256299 - RNA, 19 nt, Artificial Sequence
  Description of Artificial Sequence: Synthetic oligonucleotide
  Antisense strand to SEQ ID NO: 256298
gaucacaugcucuacugac

SEQ ID NO: 256300 - RNA, 19 nt, Artificial Sequence
  Description of Artificial Sequence: Synthetic oligonucleotide
  Sense strand starting at position 3733 SEQ ID NO: 3297
gccugagaaucaucaggag

SEQ ID NO: 256301 - RNA, 19 nt, Artificial Sequence
  Description of Artificial Sequence: Synthetic oligonucleotide
  Antisense strand to SEQ ID NO: 256300
cuccugaugauucucaggc

SEQ ID NO: 256302 - RNA, 19 nt, Artificial Sequence
  Description of Artificial Sequence: Synthetic oligonucleotide
  Sense strand starting at position 3839 SEQ ID NO: 3297
uugggcauguuccucaauu

SEQ ID NO: 256303 - RNA, 19 nt, Artificial Sequence
  Description of Artificial Sequence: Synthetic oligonucleotide
  Antisense strand to SEQ ID NO: 256302
aauugaggaacaugcccaa

SEQ ID NO: 256304 - RNA, 19 nt, Artificial Sequence
  Description of Artificial Sequence: Synthetic oligonucleotide
  Sense strand starting at position 3840 SEQ ID NO: 3297
ugggcauguuccucaauug

SEQ ID NO: 256305 - RNA, 19 nt, Artificial Sequence
  Description of Artificial Sequence: Synthetic oligonucleotide
  Antisense strand to SEQ ID NO: 256304
caauugaggaacaugccca

SEQ ID NO: 256306 - RNA, 19 nt, Artificial Sequence
  Description of Artificial Sequence: Synthetic oligonucleotide
  Sense strand starting at position 3841 SEQ ID NO: 3297
gggcauguuccucaauugu

SEQ ID NO: 256307 - RNA, 19 nt, Artificial Sequence
  Description of Artificial Sequence: Synthetic oligonucleotide
  Antisense strand to SEQ ID NO: 256306
acaauugaggaacaugccc

SEQ ID NO: 256308 - RNA, 19 nt, Artificial Sequence
  Description of Artificial Sequence: Synthetic oligonucleotide
  Sense strand starting at position 3880 SEQ ID NO: 3297
augugcagccaugaaauca

SEQ ID NO: 256309 - RNA, 19 nt, Artificial Sequence
  Description of Artificial Sequence: Synthetic oligonucleotide
  Antisense strand to SEQ ID NO: 256308
ugauuucauggcugcacau

SEQ ID NO: 256310 - RNA, 19 nt, Artificial Sequence
  Description of Artificial Sequence: Synthetic oligonucleotide
  Sense strand starting at position 3898 SEQ ID NO: 3297
agacaagaucucuguuuga

SEQ ID NO: 256311 - RNA, 19 nt, Artificial Sequence
  Description of Artificial Sequence: Synthetic oligonucleotide
  Antisense strand to SEQ ID NO: 256310
ucaaacagagaucuugucu

SEQ ID NO: 256312 - RNA, 19 nt, Artificial Sequence
  Description of Artificial Sequence: Synthetic oligonucleotide
  Sense strand starting at position 3901 SEQ ID NO: 3297
caagaucucuguuugaagu

SEQ ID NO: 256313 - RNA, 19 nt, Artificial Sequence
  Description of Artificial Sequence: Synthetic oligonucleotide
  Antisense strand to SEQ ID NO: 256312
acuucaaacagagaucuug

SEQ ID NO: 256314 - RNA, 19 nt, Artificial Sequence
  Description of Artificial Sequence: Synthetic oligonucleotide
  Sense strand starting at position 3902 SEQ ID NO: 3297
aagaucucuguuugaaguu

SEQ ID NO: 256315 - RNA, 19 nt, Artificial Sequence
  Description of Artificial Sequence: Synthetic oligonucleotide
  Antisense strand to SEQ ID NO: 256314
aacuucaaacagagaucuu

SEQ ID NO: 256316 - RNA, 19 nt, Artificial Sequence
  Description of Artificial Sequence: Synthetic oligonucleotide
  Sense strand starting at position 3977 SEQ ID NO: 3297
uuaaauaauccacguaaag

SEQ ID NO: 256317 - RNA, 19 nt, Artificial Sequence
  Description of Artificial Sequence: Synthetic oligonucleotide
  Antisense strand to SEQ ID NO: 256316
cuuuacguggauuauuuaa

SEQ ID NO: 256318 - RNA, 19 nt, Artificial Sequence
  Description of Artificial Sequence: Synthetic oligonucleotide
  Sense strand starting at position 15 SEQ ID NO: 3299
aguauacugauauagcgua

SEQ ID NO: 256319 - RNA, 19 nt, Artificial Sequence
  Description of Artificial Sequence: Synthetic oligonucleotide
  Antisense strand to SEQ ID NO: 256318
uacgcuauaucaguauacu

SEQ ID NO: 256320 - RNA, 19 nt, Artificial Sequence
  Description of Artificial Sequence: Synthetic oligonucleotide
  Sense strand starting at position 20 SEQ ID NO: 3299
acugauauagcguacugau

SEQ ID NO: 256321 - RNA, 19 nt, Artificial Sequence
  Description of Artificial Sequence: Synthetic oligonucleotide
  Antisense strand to SEQ ID NO: 256320
aucaguacgcuauaucagu

SEQ ID NO: 256322 - RNA, 19 nt, Artificial Sequence
  Description of Artificial Sequence: Synthetic oligonucleotide
  Sense strand starting at position 40 SEQ ID NO: 3299
uaauauagugaucagugca

SEQ ID NO: 256323 - RNA, 19 nt, Artificial Sequence
  Description of Artificial Sequence: Synthetic oligonucleotide
  Antisense strand to SEQ ID NO: 256322
ugcacugaucacuauauua

SEQ ID NO: 256324 - RNA, 19 nt, Artificial Sequence
  Description of Artificial Sequence: Synthetic oligonucleotide
  Sense strand starting at position 45 SEQ ID NO: 3299
uagugaucagugcaucaug

SEQ ID NO: 256325 - RNA, 19 nt, Artificial Sequence
  Description of Artificial Sequence: Synthetic oligonucleotide
  Antisense strand to SEQ ID NO: 256324
caugaugcacugaucacua

SEQ ID NO: 256326 - RNA, 19 nt, Artificial Sequence
  Description of Artificial Sequence: Synthetic oligonucleotide
  Sense strand starting at position 48 SEQ ID NO: 3299
ugaucagugcaucaugauc

SEQ ID NO: 256327 - RNA, 19 nt, Artificial Sequence
  Description of Artificial Sequence: Synthetic oligonucleotide
  Antisense strand to SEQ ID NO: 256326
gaucaugaugcacugauca

SEQ ID NO: 256328 - RNA, 19 nt, Artificial Sequence
  Description of Artificial Sequence: Synthetic oligonucleotide
  Sense strand starting at position 53 SEQ ID NO: 3299
agugcaucaugaucaguaa

SEQ ID NO: 256329 - RNA, 19 nt, Artificial Sequence
  Description of Artificial Sequence: Synthetic oligonucleotide
  Antisense strand to SEQ ID NO: 256328
uuacugaucaugaugcacu

SEQ ID NO: 256330 - RNA, 19 nt, Artificial Sequence
  Description of Artificial Sequence: Synthetic oligonucleotide
  Sense strand starting at position 54 SEQ ID NO: 3299
gugcaucaugaucaguaau

SEQ ID NO: 256331 - RNA, 19 nt, Artificial Sequence
  Description of Artificial Sequence: Synthetic oligonucleotide
  Antisense strand to SEQ ID NO: 256330
auuacugaucaugaugcac

SEQ ID NO: 256332 - RNA, 19 nt, Artificial Sequence
  Description of Artificial Sequence: Synthetic oligonucleotide
  Sense strand starting at position 56 SEQ ID NO: 3299
gcaucaugaucaguaauua

SEQ ID NO: 256333 - RNA, 19 nt, Artificial Sequence
  Description of Artificial Sequence: Synthetic oligonucleotide
  Antisense strand to SEQ ID NO: 256332
uaauuacugaucaugaugc

SEQ ID NO: 256334 - RNA, 19 nt, Artificial Sequence
  Description of Artificial Sequence: Synthetic oligonucleotide
  Sense strand starting at position 120 SEQ ID NO: 3299
auccauuagucaguuaaag

SEQ ID NO: 256335 - RNA, 19 nt, Artificial Sequence
  Description of Artificial Sequence: Synthetic oligonucleotide
  Antisense strand to SEQ ID NO: 256334
cuuuaacugacuaauggau

SEQ ID NO: 256336 - RNA, 19 nt, Artificial Sequence
  Description of Artificial Sequence: Synthetic oligonucleotide
  Sense strand starting at position 143 SEQ ID NO: 3299
gacagaaguguguaguugu

SEQ ID NO: 256337 - RNA, 19 nt, Artificial Sequence
  Description of Artificial Sequence: Synthetic oligonucleotide
  Antisense strand to SEQ ID NO: 256336
acaacuacacacuucuguc

SEQ ID NO: 256338 - RNA, 19 nt, Artificial Sequence
  Description of Artificial Sequence: Synthetic oligonucleotide
  Sense strand starting at position 179 SEQ ID NO: 3299
uagugauaagcccauguga

SEQ ID NO: 256339 - RNA, 19 nt, Artificial Sequence
  Description of Artificial Sequence: Synthetic oligonucleotide
  Antisense strand to SEQ ID NO: 256338
ucacaugggcuuaucacua

SEQ ID NO: 256340 - RNA, 19 nt, Artificial Sequence
  Description of Artificial Sequence: Synthetic oligonucleotide
  Sense strand starting at position 181 SEQ ID NO: 3299
gugauaagcccaugugaug

SEQ ID NO: 256341 - RNA, 19 nt, Artificial Sequence
  Description of Artificial Sequence: Synthetic oligonucleotide
  Antisense strand to SEQ ID NO: 256340
caucacaugggcuuaucac

SEQ ID NO: 256342 - RNA, 19 nt, Artificial Sequence
  Description of Artificial Sequence: Synthetic oligonucleotide
  Sense strand starting at position 222 SEQ ID NO: 3299
agaggaaacuagccgauaa

SEQ ID NO: 256343 - RNA, 19 nt, Artificial Sequence
  Description of Artificial Sequence: Synthetic oligonucleotide
  Antisense strand to SEQ ID NO: 256342
uuaucggcuaguuuccucu

SEQ ID NO: 256344 - RNA, 19 nt, Artificial Sequence
  Description of Artificial Sequence: Synthetic oligonucleotide
  Sense strand starting at position 264 SEQ ID NO: 3299
augauaaugccaggaguga

SEQ ID NO: 256345 - RNA, 19 nt, Artificial Sequence
  Description of Artificial Sequence: Synthetic oligonucleotide
  Antisense strand to SEQ ID NO: 256344
ucacuccuggcauuaucau

SEQ ID NO: 256346 - RNA, 19 nt, Artificial Sequence
  Description of Artificial Sequence: Synthetic oligonucleotide
  Sense strand starting at position 323 SEQ ID NO: 3299
ugacuaugagaguguugac

SEQ ID NO: 256347 - RNA, 19 nt, Artificial Sequence
  Description of Artificial Sequence: Synthetic oligonucleotide
  Antisense strand to SEQ ID NO: 256346
gucaacacucucauaguca

SEQ ID NO: 256348 - RNA, 19 nt, Artificial Sequence
  Description of Artificial Sequence: Synthetic oligonucleotide
  Sense strand starting at position 413 SEQ ID NO: 3299
ugaggaaagucauugugau

SEQ ID NO: 256349 - RNA, 19 nt, Artificial Sequence
  Description of Artificial Sequence: Synthetic oligonucleotide
  Antisense strand to SEQ ID NO: 256348
aucacaaugacuuuccuca

SEQ ID NO: 256350 - RNA, 19 nt, Artificial Sequence
  Description of Artificial Sequence: Synthetic oligonucleotide
  Sense strand starting at position 414 SEQ ID NO: 3299
gaggaaagucauugugaug

SEQ ID NO: 256351 - RNA, 19 nt, Artificial Sequence
  Description of Artificial Sequence: Synthetic oligonucleotide
  Antisense strand to SEQ ID NO: 256350
caucacaaugacuuuccuc

SEQ ID NO: 256352 - RNA, 19 nt, Artificial Sequence
  Description of Artificial Sequence: Synthetic oligonucleotide
  Sense strand starting at position 557 SEQ ID NO: 3299
uagaaagaaguaugucagu

SEQ ID NO: 256353 - RNA, 19 nt, Artificial Sequence
  Description of Artificial Sequence: Synthetic oligonucleotide
  Antisense strand to SEQ ID NO: 256352
acugacauacuucuuucua

SEQ ID NO: 256354 - RNA, 19 nt, Artificial Sequence
  Description of Artificial Sequence: Synthetic oligonucleotide
  Sense strand starting at position 716 SEQ ID NO: 3299
ccuauacaguuaguaagaa

SEQ ID NO: 256355 - RNA, 19 nt, Artificial Sequence
  Description of Artificial Sequence: Synthetic oligonucleotide
  Antisense strand to SEQ ID NO: 256354
uucuuacuaacuguauagg

SEQ ID NO: 256356 - RNA, 19 nt, Artificial Sequence
  Description of Artificial Sequence: Synthetic oligonucleotide
  Sense strand starting at position 785 SEQ ID NO: 3299
ucccauugguguuuaagau

SEQ ID NO: 256357 - RNA, 19 nt, Artificial Sequence
  Description of Artificial Sequence: Synthetic oligonucleotide
  Antisense strand to SEQ ID NO: 256356
aucuuaaacaccaauggga

SEQ ID NO: 256358 - RNA, 19 nt, Artificial Sequence
  Description of Artificial Sequence: Synthetic oligonucleotide
  Sense strand starting at position 786 SEQ ID NO: 3299
cccauugguguuuaagauc

SEQ ID NO: 256359 - RNA, 19 nt, Artificial Sequence
  Description of Artificial Sequence: Synthetic oligonucleotide
  Antisense strand to SEQ ID NO: 256358
gaucuuaaacaccaauggg

SEQ ID NO: 256360 - RNA, 19 nt, Artificial Sequence
  Description of Artificial Sequence: Synthetic oligonucleotide
  Sense strand starting at position 797 SEQ ID NO: 3299
uuaagaucucuuugaaugg

SEQ ID NO: 256361 - RNA, 19 nt, Artificial Sequence
  Description of Artificial Sequence: Synthetic oligonucleotide
  Antisense strand to SEQ ID NO: 256360
ccauucaaagagaucuuaa

SEQ ID NO: 256362 - RNA, 19 nt, Artificial Sequence
  Description of Artificial Sequence: Synthetic oligonucleotide
  Sense strand starting at position 852 SEQ ID NO: 3299
gugcaauuggaagacugua

SEQ ID NO: 256363 - RNA, 19 nt, Artificial Sequence
  Description of Artificial Sequence: Synthetic oligonucleotide
  Antisense strand to SEQ ID NO: 256362
uacagucuuccaauugcac

SEQ ID NO: 256364 - RNA, 19 nt, Artificial Sequence
  Description of Artificial Sequence: Synthetic oligonucleotide
  Sense strand starting at position 1003 SEQ ID NO: 3299
agaacacucgcuuaaugaa

SEQ ID NO: 256365 - RNA, 19 nt, Artificial Sequence
  Description of Artificial Sequence: Synthetic oligonucleotide
  Antisense strand to SEQ ID NO: 256364
uucauuaagcgaguguucu

SEQ ID NO: 256366 - RNA, 19 nt, Artificial Sequence
  Description of Artificial Sequence: Synthetic oligonucleotide
  Sense strand starting at position 1331 SEQ ID NO: 3299
ucacuuugucgcgugauaa

SEQ ID NO: 256367 - RNA, 19 nt, Artificial Sequence
  Description of Artificial Sequence: Synthetic oligonucleotide
  Antisense strand to SEQ ID NO: 256366
uuaucacgcgacaaaguga

SEQ ID NO: 256368 - RNA, 19 nt, Artificial Sequence
  Description of Artificial Sequence: Synthetic oligonucleotide
  Sense strand starting at position 1370 SEQ ID NO: 3299
cuggcagggcccuauuaaa

SEQ ID NO: 256369 - RNA, 19 nt, Artificial Sequence
  Description of Artificial Sequence: Synthetic oligonucleotide
  Antisense strand to SEQ ID NO: 256368
uuuaauagggcccugccag

SEQ ID NO: 256370 - RNA, 19 nt, Artificial Sequence
  Description of Artificial Sequence: Synthetic oligonucleotide
  Sense strand starting at position 1385 SEQ ID NO: 3299
uaaagauuucgugggcccu

SEQ ID NO: 256371 - RNA, 19 nt, Artificial Sequence
  Description of Artificial Sequence: Synthetic oligonucleotide
  Antisense strand to SEQ ID NO: 256370
agggcccacgaaaucuuua

SEQ ID NO: 256372 - RNA, 19 nt, Artificial Sequence
  Description of Artificial Sequence: Synthetic oligonucleotide
  Sense strand starting at position 1737 SEQ ID NO: 3299
auuccagcuuacucgagaa

SEQ ID NO: 256373 - RNA, 19 nt, Artificial Sequence
  Description of Artificial Sequence: Synthetic oligonucleotide
  Antisense strand to SEQ ID NO: 256372
uucucgaguaagcuggaau

SEQ ID NO: 256374 - RNA, 19 nt, Artificial Sequence
  Description of Artificial Sequence: Synthetic oligonucleotide
  Sense strand starting at position 2042 SEQ ID NO: 3299
ggaugacuccgacagcgau

SEQ ID NO: 256375 - RNA, 19 nt, Artificial Sequence
  Description of Artificial Sequence: Synthetic oligonucleotide
  Antisense strand to SEQ ID NO: 256374
aucgcugucggagucaucc

SEQ ID NO: 256376 - RNA, 19 nt, Artificial Sequence
  Description of Artificial Sequence: Synthetic oligonucleotide
  Sense strand starting at position 2399 SEQ ID NO: 3299
gucuccaagucccuagaua

SEQ ID NO: 256377 - RNA, 19 nt, Artificial Sequence
  Description of Artificial Sequence: Synthetic oligonucleotide
  Antisense strand to SEQ ID NO: 256376
uaucuagggacuuggagac

SEQ ID NO: 256378 - RNA, 19 nt, Artificial Sequence
  Description of Artificial Sequence: Synthetic oligonucleotide
  Sense strand starting at position 2781 SEQ ID NO: 3299
cucauucucgcuuacuuga

SEQ ID NO: 256379 - RNA, 19 nt, Artificial Sequence
  Description of Artificial Sequence: Synthetic oligonucleotide
  Antisense strand to SEQ ID NO: 256378
ucaaguaagcgagaaugag

SEQ ID NO: 256380 - RNA, 19 nt, Artificial Sequence
  Description of Artificial Sequence: Synthetic oligonucleotide
  Sense strand starting at position 2797 SEQ ID NO: 3299
ugagguugauucccauagu

SEQ ID NO: 256381 - RNA, 19 nt, Artificial Sequence
  Description of Artificial Sequence: Synthetic oligonucleotide
  Antisense strand to SEQ ID NO: 256380
acuaugggaaucaaccuca

SEQ ID NO: 256382 - RNA, 19 nt, Artificial Sequence
  Description of Artificial Sequence: Synthetic oligonucleotide
  Sense strand starting at position 2931 SEQ ID NO: 3299
agauaaugcuaguuccaag

SEQ ID NO: 256383 - RNA, 19 nt, Artificial Sequence
  Description of Artificial Sequence: Synthetic oligonucleotide
  Antisense strand to SEQ ID NO: 256382
cuuggaacuagcauuaucu

SEQ ID NO: 256384 - RNA, 19 nt, Artificial Sequence
  Description of Artificial Sequence: Synthetic oligonucleotide
  Sense strand starting at position 3141 SEQ ID NO: 3299
aucaacuguuccucaggua

SEQ ID NO: 256385 - RNA, 19 nt, Artificial Sequence
  Description of Artificial Sequence: Synthetic oligonucleotide
  Antisense strand to SEQ ID NO: 256384
uaccugaggaacaguugau

SEQ ID NO: 256386 - RNA, 19 nt, Artificial Sequence
  Description of Artificial Sequence: Synthetic oligonucleotide
  Sense strand starting at position 3142 SEQ ID NO: 3299
ucaacuguuccucagguaa

SEQ ID NO: 256387 - RNA, 19 nt, Artificial Sequence
  Description of Artificial Sequence: Synthetic oligonucleotide
  Antisense strand to SEQ ID NO: 256386
uuaccugaggaacaguuga

SEQ ID NO: 256388 - RNA, 19 nt, Artificial Sequence
  Description of Artificial Sequence: Synthetic oligonucleotide
  Sense strand starting at position 3305 SEQ ID NO: 3299
agauuaucguuuccacuga

SEQ ID NO: 256389 - RNA, 19 nt, Artificial Sequence
  Description of Artificial Sequence: Synthetic oligonucleotide
  Antisense strand to SEQ ID NO: 256388
ucaguggaaacgauaaucu

SEQ ID NO: 256390 - RNA, 19 nt, Artificial Sequence
  Description of Artificial Sequence: Synthetic oligonucleotide
  Sense strand starting at position 3326 SEQ ID NO: 3299
uuagaauuguccuuguaaa

SEQ ID NO: 256391 - RNA, 19 nt, Artificial Sequence
  Description of Artificial Sequence: Synthetic oligonucleotide
  Antisense strand to SEQ ID NO: 256390
uuuacaaggacaauucuaa

SEQ ID NO: 256392 - RNA, 19 nt, Artificial Sequence
  Description of Artificial Sequence: Synthetic oligonucleotide
  Sense strand starting at position 3788 SEQ ID NO: 3299
acacuauuccauuggguac

SEQ ID NO: 256393 - RNA, 19 nt, Artificial Sequence
  Description of Artificial Sequence: Synthetic oligonucleotide
  Antisense strand to SEQ ID NO: 256392
guacccaauggaauagugu

SEQ ID NO: 256394 - RNA, 19 nt, Artificial Sequence
  Description of Artificial Sequence: Synthetic oligonucleotide
  Sense strand starting at position 3802 SEQ ID NO: 3299
gguacuaaguuuccagcaa

SEQ ID NO: 256395 - RNA, 19 nt, Artificial Sequence
  Description of Artificial Sequence: Synthetic oligonucleotide
  Antisense strand to SEQ ID NO: 256394
uugcuggaaacuuaguacc

SEQ ID NO: 256396 - RNA, 19 nt, Artificial Sequence
  Description of Artificial Sequence: Synthetic oligonucleotide
  Sense strand starting at position 3806 SEQ ID NO: 3299
cuaaguuuccagcaaauga

SEQ ID NO: 256397 - RNA, 19 nt, Artificial Sequence
  Description of Artificial Sequence: Synthetic oligonucleotide
  Antisense strand to SEQ ID NO: 256396
ucauuugcuggaaacuuag

SEQ ID NO: 256398 - RNA, 19 nt, Artificial Sequence
  Description of Artificial Sequence: Synthetic oligonucleotide
  Sense strand starting at position 22 SEQ ID NO: 3298
ugacuaugagaguguugac

SEQ ID NO: 256399 - RNA, 19 nt, Artificial Sequence
  Description of Artificial Sequence: Synthetic oligonucleotide
  Antisense strand to SEQ ID NO: 256398
gucaacacucucauaguca

SEQ ID NO: 256400 - RNA, 19 nt, Artificial Sequence
  Description of Artificial Sequence: Synthetic oligonucleotide
  Sense strand starting at position 112 SEQ ID NO: 3298
ugaggaaagucauugugau

SEQ ID NO: 256401 - RNA, 19 nt, Artificial Sequence
  Description of Artificial Sequence: Synthetic oligonucleotide
  Antisense strand to SEQ ID NO: 256400
aucacaaugacuuuccuca

SEQ ID NO: 256402 - RNA, 19 nt, Artificial Sequence
  Description of Artificial Sequence: Synthetic oligonucleotide
  Sense strand starting at position 113 SEQ ID NO: 3298
gaggaaagucauugugaug

SEQ ID NO: 256403 - RNA, 19 nt, Artificial Sequence
  Description of Artificial Sequence: Synthetic oligonucleotide
  Antisense strand to SEQ ID NO: 256402
caucacaaugacuuuccuc

SEQ ID NO: 256404 - RNA, 19 nt, Artificial Sequence
  Description of Artificial Sequence: Synthetic oligonucleotide
  Sense strand starting at position 256 SEQ ID NO: 3298
uagaaagaaguaugucagu

SEQ ID NO: 256405 - RNA, 19 nt, Artificial Sequence
  Description of Artificial Sequence: Synthetic oligonucleotide
  Antisense strand to SEQ ID NO: 256404
acugacauacuucuuucua

SEQ ID NO: 256406 - RNA, 19 nt, Artificial Sequence
  Description of Artificial Sequence: Synthetic oligonucleotide
  Sense strand starting at position 265 SEQ ID NO: 3298
guaugucaguuugccaaga

SEQ ID NO: 256407 - RNA, 19 nt, Artificial Sequence
  Description of Artificial Sequence: Synthetic oligonucleotide
  Antisense strand to SEQ ID NO: 256406
ucuuggcaaacugacauac

SEQ ID NO: 256408 - RNA, 19 nt, Artificial Sequence
  Description of Artificial Sequence: Synthetic oligonucleotide
  Sense strand starting at position 355 SEQ ID NO: 3298
cucucaauguuucuaaugu

SEQ ID NO: 256409 - RNA, 19 nt, Artificial Sequence
  Description of Artificial Sequence: Synthetic oligonucleotide
  Antisense strand to SEQ ID NO: 256408
acauuagaaacauugagag

SEQ ID NO: 256410 - RNA, 19 nt, Artificial Sequence
  Description of Artificial Sequence: Synthetic oligonucleotide
  Sense strand starting at position 415 SEQ ID NO: 3298
ccuauacaguuaguaagaa

SEQ ID NO: 256411 - RNA, 19 nt, Artificial Sequence
  Description of Artificial Sequence: Synthetic oligonucleotide
  Antisense strand to SEQ ID NO: 256410
uucuuacuaacuguauagg

SEQ ID NO: 256412 - RNA, 19 nt, Artificial Sequence
  Description of Artificial Sequence: Synthetic oligonucleotide
  Sense strand starting at position 484 SEQ ID NO: 3298
ucccauugguguuuaagau

SEQ ID NO: 256413 - RNA, 19 nt, Artificial Sequence
  Description of Artificial Sequence: Synthetic oligonucleotide
  Antisense strand to SEQ ID NO: 256412
aucuuaaacaccaauggga

SEQ ID NO: 256414 - RNA, 19 nt, Artificial Sequence
  Description of Artificial Sequence: Synthetic oligonucleotide
  Sense strand starting at position 485 SEQ ID NO: 3298
cccauugguguuuaagauc

SEQ ID NO: 256415 - RNA, 19 nt, Artificial Sequence
  Description of Artificial Sequence: Synthetic oligonucleotide
  Antisense strand to SEQ ID NO: 256414
gaucuuaaacaccaauggg

SEQ ID NO: 256416 - RNA, 19 nt, Artificial Sequence
  Description of Artificial Sequence: Synthetic oligonucleotide
  Sense strand starting at position 496 SEQ ID NO: 3298
uuaagaucucuuugaaugg

SEQ ID NO: 256417 - RNA, 19 nt, Artificial Sequence
  Description of Artificial Sequence: Synthetic oligonucleotide
  Antisense strand to SEQ ID NO: 256416
ccauucaaagagaucuuaa

SEQ ID NO: 256418 - RNA, 19 nt, Artificial Sequence
  Description of Artificial Sequence: Synthetic oligonucleotide
  Sense strand starting at position 551 SEQ ID NO: 3298
gugcaauuggaagacugua

SEQ ID NO: 256419 - RNA, 19 nt, Artificial Sequence
  Description of Artificial Sequence: Synthetic oligonucleotide
  Antisense strand to SEQ ID NO: 256418
uacagucuuccaauugcac

SEQ ID NO: 256420 - RNA, 19 nt, Artificial Sequence
  Description of Artificial Sequence: Synthetic oligonucleotide
  Sense strand starting at position 630 SEQ ID NO: 3298
aucugaugugucugggcau

SEQ ID NO: 256421 - RNA, 19 nt, Artificial Sequence
  Description of Artificial Sequence: Synthetic oligonucleotide
  Antisense strand to SEQ ID NO: 256420
augcccagacacaucagau

SEQ ID NO: 256422 - RNA, 19 nt, Artificial Sequence
  Description of Artificial Sequence: Synthetic oligonucleotide
  Sense strand starting at position 633 SEQ ID NO: 3298
ugaugugucugggcauagu

SEQ ID NO: 256423 - RNA, 19 nt, Artificial Sequence
  Description of Artificial Sequence: Synthetic oligonucleotide
  Antisense strand to SEQ ID NO: 256422
acuaugcccagacacauca

SEQ ID NO: 256424 - RNA, 19 nt, Artificial Sequence
  Description of Artificial Sequence: Synthetic oligonucleotide
  Sense strand starting at position 702 SEQ ID NO: 3298
agaacacucgcuuaaugaa

SEQ ID NO: 256425 - RNA, 19 nt, Artificial Sequence
  Description of Artificial Sequence: Synthetic oligonucleotide
  Antisense strand to SEQ ID NO: 256424
uucauuaagcgaguguucu

SEQ ID NO: 256426 - RNA, 19 nt, Artificial Sequence
  Description of Artificial Sequence: Synthetic oligonucleotide
  Sense strand starting at position 1030 SEQ ID NO: 3298
ucacuuugucgcgugauaa

SEQ ID NO: 256427 - RNA, 19 nt, Artificial Sequence
  Description of Artificial Sequence: Synthetic oligonucleotide
  Antisense strand to SEQ ID NO: 256426
uuaucacgcgacaaaguga

SEQ ID NO: 256428 - RNA, 19 nt, Artificial Sequence
  Description of Artificial Sequence: Synthetic oligonucleotide
  Sense strand starting at position 1069 SEQ ID NO: 3298
cuggcagggcccuauuaaa

SEQ ID NO: 256429 - RNA, 19 nt, Artificial Sequence
  Description of Artificial Sequence: Synthetic oligonucleotide
  Antisense strand to SEQ ID NO: 256428
uuuaauagggcccugccag

SEQ ID NO: 256430 - RNA, 19 nt, Artificial Sequence
  Description of Artificial Sequence: Synthetic oligonucleotide
  Sense strand starting at position 1084 SEQ ID NO: 3298
uaaagauuucgugggcccu

SEQ ID NO: 256431 - RNA, 19 nt, Artificial Sequence
  Description of Artificial Sequence: Synthetic oligonucleotide
  Antisense strand to SEQ ID NO: 256430
agggcccacgaaaucuuua

SEQ ID NO: 256432 - RNA, 19 nt, Artificial Sequence
  Description of Artificial Sequence: Synthetic oligonucleotide
  Sense strand starting at position 1436 SEQ ID NO: 3298
auuccagcuuacucgagaa

SEQ ID NO: 256433 - RNA, 19 nt, Artificial Sequence
  Description of Artificial Sequence: Synthetic oligonucleotide
  Antisense strand to SEQ ID NO: 256432
uucucgaguaagcuggaau

SEQ ID NO: 256434 - RNA, 19 nt, Artificial Sequence
  Description of Artificial Sequence: Synthetic oligonucleotide
  Sense strand starting at position 1741 SEQ ID NO: 3298
ggaugacuccgacagcgau

SEQ ID NO: 256435 - RNA, 19 nt, Artificial Sequence
  Description of Artificial Sequence: Synthetic oligonucleotide
  Antisense strand to SEQ ID NO: 256434
aucgcugucggagucaucc

SEQ ID NO: 256436 - RNA, 19 nt, Artificial Sequence
  Description of Artificial Sequence: Synthetic oligonucleotide
  Sense strand starting at position 1922 SEQ ID NO: 3298
cguaccugucuucggaaga

SEQ ID NO: 256437 - RNA, 19 nt, Artificial Sequence
  Description of Artificial Sequence: Synthetic oligonucleotide
  Antisense strand to SEQ ID NO: 256436
ucuuccgaagacagguacg

SEQ ID NO: 256438 - RNA, 19 nt, Artificial Sequence
  Description of Artificial Sequence: Synthetic oligonucleotide
  Sense strand starting at position 2098 SEQ ID NO: 3298
gucuccaagucccuagaua

SEQ ID NO: 256439 - RNA, 19 nt, Artificial Sequence
  Description of Artificial Sequence: Synthetic oligonucleotide
  Antisense strand to SEQ ID NO: 256438
uaucuagggacuuggagac

SEQ ID NO: 256440 - RNA, 19 nt, Artificial Sequence
  Description of Artificial Sequence: Synthetic oligonucleotide
  Sense strand starting at position 2166 SEQ ID NO: 3298
uuggaaaugcugugcuaaa

SEQ ID NO: 256441 - RNA, 19 nt, Artificial Sequence
  Description of Artificial Sequence: Synthetic oligonucleotide
  Antisense strand to SEQ ID NO: 256440
uuuagcacagcauuuccaa

SEQ ID NO: 256442 - RNA, 19 nt, Artificial Sequence
  Description of Artificial Sequence: Synthetic oligonucleotide
  Sense strand starting at position 2167 SEQ ID NO: 3298
uggaaaugcugugcuaaac

SEQ ID NO: 256443 - RNA, 19 nt, Artificial Sequence
  Description of Artificial Sequence: Synthetic oligonucleotide
  Antisense strand to SEQ ID NO: 256442
guuuagcacagcauuucca

SEQ ID NO: 256444 - RNA, 19 nt, Artificial Sequence
  Description of Artificial Sequence: Synthetic oligonucleotide
  Sense strand starting at position 2345 SEQ ID NO: 3298
uugugcuaggauuggagua

SEQ ID NO: 256445 - RNA, 19 nt, Artificial Sequence
  Description of Artificial Sequence: Synthetic oligonucleotide
  Antisense strand to SEQ ID NO: 256444
uacuccaauccuagcacaa

SEQ ID NO: 256446 - RNA, 19 nt, Artificial Sequence
  Description of Artificial Sequence: Synthetic oligonucleotide
  Sense strand starting at position 2398 SEQ ID NO: 3298
ggaaguuauagcugccuuc

SEQ ID NO: 256447 - RNA, 19 nt, Artificial Sequence
  Description of Artificial Sequence: Synthetic oligonucleotide
  Antisense strand to SEQ ID NO: 256446
gaaggcagcuauaacuucc

SEQ ID NO: 256448 - RNA, 19 nt, Artificial Sequence
  Description of Artificial Sequence: Synthetic oligonucleotide
  Sense strand starting at position 2480 SEQ ID NO: 3298
cucauucucgcuuacuuga

SEQ ID NO: 256449 - RNA, 19 nt, Artificial Sequence
  Description of Artificial Sequence: Synthetic oligonucleotide
  Antisense strand to SEQ ID NO: 256448
ucaaguaagcgagaaugag

SEQ ID NO: 256450 - RNA, 19 nt, Artificial Sequence
  Description of Artificial Sequence: Synthetic oligonucleotide
  Sense strand starting at position 2496 SEQ ID NO: 3298
ugagguugauucccauagu

SEQ ID NO: 256451 - RNA, 19 nt, Artificial Sequence
  Description of Artificial Sequence: Synthetic oligonucleotide
  Antisense strand to SEQ ID NO: 256450
acuaugggaaucaaccuca

SEQ ID NO: 256452 - RNA, 19 nt, Artificial Sequence
  Description of Artificial Sequence: Synthetic oligonucleotide
  Sense strand starting at position 2545 SEQ ID NO: 3298
cguccugguccuuaacagu

SEQ ID NO: 256453 - RNA, 19 nt, Artificial Sequence
  Description of Artificial Sequence: Synthetic oligonucleotide
  Antisense strand to SEQ ID NO: 256452
acuguuaaggaccaggacg

SEQ ID NO: 256454 - RNA, 19 nt, Artificial Sequence
  Description of Artificial Sequence: Synthetic oligonucleotide
  Sense strand starting at position 2630 SEQ ID NO: 3298
agauaaugcuaguuccaag

SEQ ID NO: 256455 - RNA, 19 nt, Artificial Sequence
  Description of Artificial Sequence: Synthetic oligonucleotide
  Antisense strand to SEQ ID NO: 256454
cuuggaacuagcauuaucu

SEQ ID NO: 256456 - RNA, 19 nt, Artificial Sequence
  Description of Artificial Sequence: Synthetic oligonucleotide
  Sense strand starting at position 2805 SEQ ID NO: 3298
cuuguauucuagucccacu

SEQ ID NO: 256457 - RNA, 19 nt, Artificial Sequence
  Description of Artificial Sequence: Synthetic oligonucleotide
  Antisense strand to SEQ ID NO: 256456
agugggacuagaauacaag

SEQ ID NO: 256458 - RNA, 19 nt, Artificial Sequence
  Description of Artificial Sequence: Synthetic oligonucleotide
  Sense strand starting at position 2840 SEQ ID NO: 3298
aucaacuguuccucaggua

SEQ ID NO: 256459 - RNA, 19 nt, Artificial Sequence
  Description of Artificial Sequence: Synthetic oligonucleotide
  Antisense strand to SEQ ID NO: 256458
uaccugaggaacaguugau

SEQ ID NO: 256460 - RNA, 19 nt, Artificial Sequence
  Description of Artificial Sequence: Synthetic oligonucleotide
  Sense strand starting at position 2841 SEQ ID NO: 3298
ucaacuguuccucagguaa

SEQ ID NO: 256461 - RNA, 19 nt, Artificial Sequence
  Description of Artificial Sequence: Synthetic oligonucleotide
  Antisense strand to SEQ ID NO: 256460
uuaccugaggaacaguuga

SEQ ID NO: 256462 - RNA, 19 nt, Artificial Sequence
  Description of Artificial Sequence: Synthetic oligonucleotide
  Sense strand starting at position 2910 SEQ ID NO: 3298
ucaauagaguuccuguguu

SEQ ID NO: 256463 - RNA, 19 nt, Artificial Sequence
  Description of Artificial Sequence: Synthetic oligonucleotide
  Antisense strand to SEQ ID NO: 256462
aacacaggaacucuauuga

SEQ ID NO: 256464 - RNA, 19 nt, Artificial Sequence
  Description of Artificial Sequence: Synthetic oligonucleotide
  Sense strand starting at position 3001 SEQ ID NO: 3298
uccagauuaucguuuccac

SEQ ID NO: 256465 - RNA, 19 nt, Artificial Sequence
  Description of Artificial Sequence: Synthetic oligonucleotide
  Antisense strand to SEQ ID NO: 256464
guggaaacgauaaucugga

SEQ ID NO: 256466 - RNA, 19 nt, Artificial Sequence
  Description of Artificial Sequence: Synthetic oligonucleotide
  Sense strand starting at position 3004 SEQ ID NO: 3298
agauuaucguuuccacuga

SEQ ID NO: 256467 - RNA, 19 nt, Artificial Sequence
  Description of Artificial Sequence: Synthetic oligonucleotide
  Antisense strand to SEQ ID NO: 256466
ucaguggaaacgauaaucu

SEQ ID NO: 256468 - RNA, 19 nt, Artificial Sequence
  Description of Artificial Sequence: Synthetic oligonucleotide
  Sense strand starting at position 3022 SEQ ID NO: 3298
auguuagaauuguccuugu

SEQ ID NO: 256469 - RNA, 19 nt, Artificial Sequence
  Description of Artificial Sequence: Synthetic oligonucleotide
  Antisense strand to SEQ ID NO: 256468
acaaggacaauucuaacau

SEQ ID NO: 256470 - RNA, 19 nt, Artificial Sequence
  Description of Artificial Sequence: Synthetic oligonucleotide
  Sense strand starting at position 3025 SEQ ID NO: 3298
uuagaauuguccuuguaaa

SEQ ID NO: 256471 - RNA, 19 nt, Artificial Sequence
  Description of Artificial Sequence: Synthetic oligonucleotide
  Antisense strand to SEQ ID NO: 256470
uuuacaaggacaauucuaa

SEQ ID NO: 256472 - RNA, 19 nt, Artificial Sequence
  Description of Artificial Sequence: Synthetic oligonucleotide
  Sense strand starting at position 3487 SEQ ID NO: 3298
acacuauuccauuggguac

SEQ ID NO: 256473 - RNA, 19 nt, Artificial Sequence
  Description of Artificial Sequence: Synthetic oligonucleotide
  Antisense strand to SEQ ID NO: 256472
guacccaauggaauagugu

SEQ ID NO: 256474 - RNA, 19 nt, Artificial Sequence
  Description of Artificial Sequence: Synthetic oligonucleotide
  Sense strand starting at position 3501 SEQ ID NO: 3298
gguacuaaguuuccagcaa

SEQ ID NO: 256475 - RNA, 19 nt, Artificial Sequence
  Description of Artificial Sequence: Synthetic oligonucleotide
  Antisense strand to SEQ ID NO: 256474
uugcuggaaacuuaguacc

SEQ ID NO: 256476 - RNA, 19 nt, Artificial Sequence
  Description of Artificial Sequence: Synthetic oligonucleotide
  Sense strand starting at position 3505 SEQ ID NO: 3298
cuaaguuuccagcaaauga

SEQ ID NO: 256477 - RNA, 19 nt, Artificial Sequence
  Description of Artificial Sequence: Synthetic oligonucleotide
  Antisense strand to SEQ ID NO: 256476
ucauuugcuggaaacuuag

SEQ ID NO: 256478 - RNA, 19 nt, Artificial Sequence
  Description of Artificial Sequence: Synthetic oligonucleotide
  Sense strand starting at position 20 SEQ ID NO: 3300
auauacagcuucguauuua

SEQ ID NO: 256479 - RNA, 19 nt, Artificial Sequence
  Description of Artificial Sequence: Synthetic oligonucleotide
  Antisense strand to SEQ ID NO: 256478
uaaauacgaagcuguauau

SEQ ID NO: 256480 - RNA, 19 nt, Artificial Sequence
  Description of Artificial Sequence: Synthetic oligonucleotide
  Sense strand starting at position 117 SEQ ID NO: 3300
uaaucuagagcauguggaa

SEQ ID NO: 256481 - RNA, 19 nt, Artificial Sequence
  Description of Artificial Sequence: Synthetic oligonucleotide
  Antisense strand to SEQ ID NO: 256480
uuccacaugcucuagauua

SEQ ID NO: 256482 - RNA, 19 nt, Artificial Sequence
  Description of Artificial Sequence: Synthetic oligonucleotide
  Sense strand starting at position 130 SEQ ID NO: 3300
guggaagaugccuggagau

SEQ ID NO: 256483 - RNA, 19 nt, Artificial Sequence
  Description of Artificial Sequence: Synthetic oligonucleotide
  Antisense strand to SEQ ID NO: 256482
aucuccaggcaucuuccac

SEQ ID NO: 256484 - RNA, 19 nt, Artificial Sequence
  Description of Artificial Sequence: Synthetic oligonucleotide
  Sense strand starting at position 142 SEQ ID NO: 3300
uggagaugacuaugcauug

SEQ ID NO: 256485 - RNA, 19 nt, Artificial Sequence
  Description of Artificial Sequence: Synthetic oligonucleotide
  Antisense strand to SEQ ID NO: 256484
caaugcauagucaucucca

SEQ ID NO: 256486 - RNA, 19 nt, Artificial Sequence
  Description of Artificial Sequence: Synthetic oligonucleotide
  Sense strand starting at position 211 SEQ ID NO: 3300
agaagugacuuucuaaguc

SEQ ID NO: 256487 - RNA, 19 nt, Artificial Sequence
  Description of Artificial Sequence: Synthetic oligonucleotide
  Antisense strand to SEQ ID NO: 256486
gacuuagaaagucacuucu

SEQ ID NO: 256488 - RNA, 19 nt, Artificial Sequence
  Description of Artificial Sequence: Synthetic oligonucleotide
  Sense strand starting at position 219 SEQ ID NO: 3300
cuuucuaagucagcugaga

SEQ ID NO: 256489 - RNA, 19 nt, Artificial Sequence
  Description of Artificial Sequence: Synthetic oligonucleotide
  Antisense strand to SEQ ID NO: 256488
ucucagcugacuuagaaag

SEQ ID NO: 256490 - RNA, 19 nt, Artificial Sequence
  Description of Artificial Sequence: Synthetic oligonucleotide
  Sense strand starting at position 221 SEQ ID NO: 3300
uucuaagucagcugagaga

SEQ ID NO: 256491 - RNA, 19 nt, Artificial Sequence
  Description of Artificial Sequence: Synthetic oligonucleotide
  Antisense strand to SEQ ID NO: 256490
ucucucagcugacuuagaa

SEQ ID NO: 256492 - RNA, 19 nt, Artificial Sequence
  Description of Artificial Sequence: Synthetic oligonucleotide
  Sense strand starting at position 256 SEQ ID NO: 3300
gggaguuguuucuucugga

SEQ ID NO: 256493 - RNA, 19 nt, Artificial Sequence
  Description of Artificial Sequence: Synthetic oligonucleotide
  Antisense strand to SEQ ID NO: 256492
uccagaagaaacaacuccc

SEQ ID NO: 256494 - RNA, 19 nt, Artificial Sequence
  Description of Artificial Sequence: Synthetic oligonucleotide
  Sense strand starting at position 257 SEQ ID NO: 3300
ggaguuguuucuucuggaa

SEQ ID NO: 256495 - RNA, 19 nt, Artificial Sequence
  Description of Artificial Sequence: Synthetic oligonucleotide
  Antisense strand to SEQ ID NO: 256494
uuccagaagaaacaacucc

SEQ ID NO: 256496 - RNA, 19 nt, Artificial Sequence
  Description of Artificial Sequence: Synthetic oligonucleotide
  Sense strand starting at position 314 SEQ ID NO: 3300
gcaagcugccaguaguaga

SEQ ID NO: 256497 - RNA, 19 nt, Artificial Sequence
  Description of Artificial Sequence: Synthetic oligonucleotide
  Antisense strand to SEQ ID NO: 256496
ucuacuacuggcagcuugc

SEQ ID NO: 256498 - RNA, 19 nt, Artificial Sequence
  Description of Artificial Sequence: Synthetic oligonucleotide
  Sense strand starting at position 355 SEQ ID NO: 3300
ccuguaauuucugcagcau

SEQ ID NO: 256499 - RNA, 19 nt, Artificial Sequence
  Description of Artificial Sequence: Synthetic oligonucleotide
  Antisense strand to SEQ ID NO: 256498
augcugcagaaauuacagg

SEQ ID NO: 256500 - RNA, 19 nt, Artificial Sequence
  Description of Artificial Sequence: Synthetic oligonucleotide
  Sense strand starting at position 356 SEQ ID NO: 3300
cuguaauuucugcagcauu

SEQ ID NO: 256501 - RNA, 19 nt, Artificial Sequence
  Description of Artificial Sequence: Synthetic oligonucleotide
  Antisense strand to SEQ ID NO: 256500
aaugcugcagaaauuacag

SEQ ID NO: 256502 - RNA, 19 nt, Artificial Sequence
  Description of Artificial Sequence: Synthetic oligonucleotide
  Sense strand starting at position 399 SEQ ID NO: 3300
ucaccuuucccgcagauca

SEQ ID NO: 256503 - RNA, 19 nt, Artificial Sequence
  Description of Artificial Sequence: Synthetic oligonucleotide
  Antisense strand to SEQ ID NO: 256502
ugaucugcgggaaagguga

SEQ ID NO: 256504 - RNA, 19 nt, Artificial Sequence
  Description of Artificial Sequence: Synthetic oligonucleotide
  Sense strand starting at position 401 SEQ ID NO: 3300
accuuucccgcagaucaga

SEQ ID NO: 256505 - RNA, 19 nt, Artificial Sequence
  Description of Artificial Sequence: Synthetic oligonucleotide
  Antisense strand to SEQ ID NO: 256504
ucugaucugcgggaaaggu

SEQ ID NO: 256506 - RNA, 19 nt, Artificial Sequence
  Description of Artificial Sequence: Synthetic oligonucleotide
  Sense strand starting at position 459 SEQ ID NO: 3300
cuccuucuuguaugcugaa

SEQ ID NO: 256507 - RNA, 19 nt, Artificial Sequence
  Description of Artificial Sequence: Synthetic oligonucleotide
  Antisense strand to SEQ ID NO: 256506
uucagcauacaagaaggag

SEQ ID NO: 256508 - RNA, 19 nt, Artificial Sequence
  Description of Artificial Sequence: Synthetic oligonucleotide
  Sense strand starting at position 539 SEQ ID NO: 3300
cguccaggguuucuucuaa

SEQ ID NO: 256509 - RNA, 19 nt, Artificial Sequence
  Description of Artificial Sequence: Synthetic oligonucleotide
  Antisense strand to SEQ ID NO: 256508
uuagaagaaacccuggacg

SEQ ID NO: 256510 - RNA, 19 nt, Artificial Sequence
  Description of Artificial Sequence: Synthetic oligonucleotide
  Sense strand starting at position 574 SEQ ID NO: 3300
uccgccuaucccuaggauu

SEQ ID NO: 256511 - RNA, 19 nt, Artificial Sequence
  Description of Artificial Sequence: Synthetic oligonucleotide
  Antisense strand to SEQ ID NO: 256510
aauccuagggauaggcgga

SEQ ID NO: 256512 - RNA, 19 nt, Artificial Sequence
  Description of Artificial Sequence: Synthetic oligonucleotide
  Sense strand starting at position 576 SEQ ID NO: 3300
cgccuaucccuaggauuuc

SEQ ID NO: 256513 - RNA, 19 nt, Artificial Sequence
  Description of Artificial Sequence: Synthetic oligonucleotide
  Antisense strand to SEQ ID NO: 256512
gaaauccuagggauaggcg

SEQ ID NO: 256514 - RNA, 19 nt, Artificial Sequence
  Description of Artificial Sequence: Synthetic oligonucleotide
  Sense strand starting at position 1222 SEQ ID NO: 3300
gaucgaauuggucgcaaau

SEQ ID NO: 256515 - RNA, 19 nt, Artificial Sequence
  Description of Artificial Sequence: Synthetic oligonucleotide
  Antisense strand to SEQ ID NO: 256514
auuugcgaccaauucgauc

SEQ ID NO: 256516 - RNA, 19 nt, Artificial Sequence
  Description of Artificial Sequence: Synthetic oligonucleotide
  Sense strand starting at position 1243 SEQ ID NO: 3300
guucccucgccagaaacuu

SEQ ID NO: 256517 - RNA, 19 nt, Artificial Sequence
  Description of Artificial Sequence: Synthetic oligonucleotide
  Antisense strand to SEQ ID NO: 256516
aaguuucuggcgagggaac

SEQ ID NO: 256518 - RNA, 19 nt, Artificial Sequence
  Description of Artificial Sequence: Synthetic oligonucleotide
  Sense strand starting at position 1305 SEQ ID NO: 3300
cuccaaaucucgguuggua

SEQ ID NO: 256519 - RNA, 19 nt, Artificial Sequence
  Description of Artificial Sequence: Synthetic oligonucleotide
  Antisense strand to SEQ ID NO: 256518
uaccaaccgagauuuggag

SEQ ID NO: 256520 - RNA, 19 nt, Artificial Sequence
  Description of Artificial Sequence: Synthetic oligonucleotide
  Sense strand starting at position 1307 SEQ ID NO: 3300
ccaaaucucgguugguaau

SEQ ID NO: 256521 - RNA, 19 nt, Artificial Sequence
  Description of Artificial Sequence: Synthetic oligonucleotide
  Antisense strand to SEQ ID NO: 256520
auuaccaaccgagauuugg

SEQ ID NO: 256522 - RNA, 19 nt, Artificial Sequence
  Description of Artificial Sequence: Synthetic oligonucleotide
  Sense strand starting at position 1308 SEQ ID NO: 3300
caaaucucgguugguaaua

SEQ ID NO: 256523 - RNA, 19 nt, Artificial Sequence
  Description of Artificial Sequence: Synthetic oligonucleotide
  Antisense strand to SEQ ID NO: 256522
uauuaccaaccgagauuug

SEQ ID NO: 256524 - RNA, 19 nt, Artificial Sequence
  Description of Artificial Sequence: Synthetic oligonucleotide
  Sense strand starting at position 1571 SEQ ID NO: 3300
cucauucuguuggucuaga

SEQ ID NO: 256525 - RNA, 19 nt, Artificial Sequence
  Description of Artificial Sequence: Synthetic oligonucleotide
  Antisense strand to SEQ ID NO: 256524
ucuagaccaacagaaugag

SEQ ID NO: 256526 - RNA, 19 nt, Artificial Sequence
  Description of Artificial Sequence: Synthetic oligonucleotide
  Sense strand starting at position 1572 SEQ ID NO: 3300
ucauucuguuggucuagaa

SEQ ID NO: 256527 - RNA, 19 nt, Artificial Sequence
  Description of Artificial Sequence: Synthetic oligonucleotide
  Antisense strand to SEQ ID NO: 256526
uucuagaccaacagaauga

SEQ ID NO: 256528 - RNA, 19 nt, Artificial Sequence
  Description of Artificial Sequence: Synthetic oligonucleotide
  Sense strand starting at position 2301 SEQ ID NO: 3300
ucgggucaccauuacuuua

SEQ ID NO: 256529 - RNA, 19 nt, Artificial Sequence
  Description of Artificial Sequence: Synthetic oligonucleotide
  Antisense strand to SEQ ID NO: 256528
uaaaguaauggugacccga

SEQ ID NO: 256530 - RNA, 19 nt, Artificial Sequence
  Description of Artificial Sequence: Synthetic oligonucleotide
  Sense strand starting at position 2831 SEQ ID NO: 3300
gcagcaguugcccauuuau

SEQ ID NO: 256531 - RNA, 19 nt, Artificial Sequence
  Description of Artificial Sequence: Synthetic oligonucleotide
  Antisense strand to SEQ ID NO: 256530
auaaaugggcaacugcugc

SEQ ID NO: 256532 - RNA, 19 nt, Artificial Sequence
  Description of Artificial Sequence: Synthetic oligonucleotide
  Sense strand starting at position 2903 SEQ ID NO: 3300
gccugaaauccgcccgagu

SEQ ID NO: 256533 - RNA, 19 nt, Artificial Sequence
  Description of Artificial Sequence: Synthetic oligonucleotide
  Antisense strand to SEQ ID NO: 256532
acucgggcggauuucaggc

SEQ ID NO: 256534 - RNA, 19 nt, Artificial Sequence
  Description of Artificial Sequence: Synthetic oligonucleotide
  Sense strand starting at position 2922 SEQ ID NO: 3300
ccggauucucgccugccaa

SEQ ID NO: 256535 - RNA, 19 nt, Artificial Sequence
  Description of Artificial Sequence: Synthetic oligonucleotide
  Antisense strand to SEQ ID NO: 256534
uuggcaggcgagaauccgg

SEQ ID NO: 256536 - RNA, 19 nt, Artificial Sequence
  Description of Artificial Sequence: Synthetic oligonucleotide
  Sense strand starting at position 3093 SEQ ID NO: 3300
gggagagaaguauauucgu

SEQ ID NO: 256537 - RNA, 19 nt, Artificial Sequence
  Description of Artificial Sequence: Synthetic oligonucleotide
  Antisense strand to SEQ ID NO: 256536
acgaauauacuucucuccc

SEQ ID NO: 256538 - RNA, 19 nt, Artificial Sequence
  Description of Artificial Sequence: Synthetic oligonucleotide
  Sense strand starting at position 3096 SEQ ID NO: 3300
agagaaguauauucgugga

SEQ ID NO: 256539 - RNA, 19 nt, Artificial Sequence
  Description of Artificial Sequence: Synthetic oligonucleotide
  Antisense strand to SEQ ID NO: 256538
uccacgaauauacuucucu

SEQ ID NO: 256540 - RNA, 19 nt, Artificial Sequence
  Description of Artificial Sequence: Synthetic oligonucleotide
  Sense strand starting at position 3101 SEQ ID NO: 3300
aguauauucguggacgcau

SEQ ID NO: 256541 - RNA, 19 nt, Artificial Sequence
  Description of Artificial Sequence: Synthetic oligonucleotide
  Antisense strand to SEQ ID NO: 256540
augcguccacgaauauacu

SEQ ID NO: 256542 - RNA, 19 nt, Artificial Sequence
  Description of Artificial Sequence: Synthetic oligonucleotide
  Sense strand starting at position 3272 SEQ ID NO: 3300
ggcagcaucucucuggaca

SEQ ID NO: 256543 - RNA, 19 nt, Artificial Sequence
  Description of Artificial Sequence: Synthetic oligonucleotide
  Antisense strand to SEQ ID NO: 256542
uguccagagagaugcugcc

SEQ ID NO: 256544 - RNA, 19 nt, Artificial Sequence
  Description of Artificial Sequence: Synthetic oligonucleotide
  Sense strand starting at position 3485 SEQ ID NO: 3300
agcgaaagcugcuuggaga

SEQ ID NO: 256545 - RNA, 19 nt, Artificial Sequence
  Description of Artificial Sequence: Synthetic oligonucleotide
  Antisense strand to SEQ ID NO: 256544
ucuccaagcagcuuucgcu

SEQ ID NO: 256546 - RNA, 19 nt, Artificial Sequence
  Description of Artificial Sequence: Synthetic oligonucleotide
  Sense strand starting at position 3486 SEQ ID NO: 3300
gcgaaagcugcuuggagau

SEQ ID NO: 256547 - RNA, 19 nt, Artificial Sequence
  Description of Artificial Sequence: Synthetic oligonucleotide
  Antisense strand to SEQ ID NO: 256546
aucuccaagcagcuuucgc

SEQ ID NO: 256548 - RNA, 19 nt, Artificial Sequence
  Description of Artificial Sequence: Synthetic oligonucleotide
  Sense strand starting at position 3591 SEQ ID NO: 3300
ugguuugguuuggugauuu

SEQ ID NO: 256549 - RNA, 19 nt, Artificial Sequence
  Description of Artificial Sequence: Synthetic oligonucleotide
  Antisense strand to SEQ ID NO: 256548
aaaucaccaaaccaaacca

SEQ ID NO: 256550 - RNA, 19 nt, Artificial Sequence
  Description of Artificial Sequence: Synthetic oligonucleotide
  Sense strand starting at position 3736 SEQ ID NO: 3300
ggcagcaaucucugaaaga

SEQ ID NO: 256551 - RNA, 19 nt, Artificial Sequence
  Description of Artificial Sequence: Synthetic oligonucleotide
  Antisense strand to SEQ ID NO: 256550
ucuuucagagauugcugcc

SEQ ID NO: 256552 - RNA, 19 nt, Artificial Sequence
  Description of Artificial Sequence: Synthetic oligonucleotide
  Sense strand starting at position 3834 SEQ ID NO: 3300
ggaguucuccgcucgacgu

SEQ ID NO: 256553 - RNA, 19 nt, Artificial Sequence
  Description of Artificial Sequence: Synthetic oligonucleotide
  Antisense strand to SEQ ID NO: 256552
acgucgagcggagaacucc

SEQ ID NO: 256554 - RNA, 19 nt, Artificial Sequence
  Description of Artificial Sequence: Synthetic oligonucleotide
  Sense strand starting at position 3963 SEQ ID NO: 3300
ucuggugagugcucauuaa

SEQ ID NO: 256555 - RNA, 19 nt, Artificial Sequence
  Description of Artificial Sequence: Synthetic oligonucleotide
  Antisense strand to SEQ ID NO: 256554
uuaaugagcacucaccaga

SEQ ID NO: 256556 - RNA, 19 nt, Artificial Sequence
  Description of Artificial Sequence: Synthetic oligonucleotide
  Sense strand starting at position 3967 SEQ ID NO: 3300
gugagugcucauuaaaccu

SEQ ID NO: 256557 - RNA, 19 nt, Artificial Sequence
  Description of Artificial Sequence: Synthetic oligonucleotide
  Antisense strand to SEQ ID NO: 256556
agguuuaaugagcacucac

SEQ ID NO: 256558 - RNA, 19 nt, Artificial Sequence
  Description of Artificial Sequence: Synthetic oligonucleotide
  Sense strand starting at position 64 SEQ ID NO: 3301
cuuucuggucgccaucaau

SEQ ID NO: 256559 - RNA, 19 nt, Artificial Sequence
  Description of Artificial Sequence: Synthetic oligonucleotide
  Antisense strand to SEQ ID NO: 256558
auugauggcgaccagaaag

SEQ ID NO: 256560 - RNA, 19 nt, Artificial Sequence
  Description of Artificial Sequence: Synthetic oligonucleotide
  Sense strand starting at position 328 SEQ ID NO: 3301
ccgugaagaggauguggua

SEQ ID NO: 256561 - RNA, 19 nt, Artificial Sequence
  Description of Artificial Sequence: Synthetic oligonucleotide
  Antisense strand to SEQ ID NO: 256560
uaccacauccucuucacgg

SEQ ID NO: 256562 - RNA, 19 nt, Artificial Sequence
  Description of Artificial Sequence: Synthetic oligonucleotide
  Sense strand starting at position 350 SEQ ID NO: 3301
gccaguuccgagggaacuu

SEQ ID NO: 256563 - RNA, 19 nt, Artificial Sequence
  Description of Artificial Sequence: Synthetic oligonucleotide
  Antisense strand to SEQ ID NO: 256562
aaguucccucggaacuggc

SEQ ID NO: 256564 - RNA, 19 nt, Artificial Sequence
  Description of Artificial Sequence: Synthetic oligonucleotide
  Sense strand starting at position 615 SEQ ID NO: 3301
gaccuacucucagagggaa

SEQ ID NO: 256565 - RNA, 19 nt, Artificial Sequence
  Description of Artificial Sequence: Synthetic oligonucleotide
  Antisense strand to SEQ ID NO: 256564
uucccucugagaguagguc

SEQ ID NO: 256566 - RNA, 19 nt, Artificial Sequence
  Description of Artificial Sequence: Synthetic oligonucleotide
  Sense strand starting at position 680 SEQ ID NO: 3301
aaagaagccgcguaauuaa

SEQ ID NO: 256567 - RNA, 19 nt, Artificial Sequence
  Description of Artificial Sequence: Synthetic oligonucleotide
  Antisense strand to SEQ ID NO: 256566
uuaauuacgcggcuucuuu

SEQ ID NO: 256568 - RNA, 19 nt, Artificial Sequence
  Description of Artificial Sequence: Synthetic oligonucleotide
  Sense strand starting at position 707 SEQ ID NO: 3301
ugcaacaucucccugggaa

SEQ ID NO: 256569 - RNA, 19 nt, Artificial Sequence
  Description of Artificial Sequence: Synthetic oligonucleotide
  Antisense strand to SEQ ID NO: 256568
uucccagggagauguugca

SEQ ID NO: 256570 - RNA, 19 nt, Artificial Sequence
  Description of Artificial Sequence: Synthetic oligonucleotide
  Sense strand starting at position 708 SEQ ID NO: 3301
gcaacaucucccugggaag

SEQ ID NO: 256571 - RNA, 19 nt, Artificial Sequence
  Description of Artificial Sequence: Synthetic oligonucleotide
  Antisense strand to SEQ ID NO: 256570
cuucccagggagauguugc

SEQ ID NO: 256572 - RNA, 19 nt, Artificial Sequence
  Description of Artificial Sequence: Synthetic oligonucleotide
  Sense strand starting at position 1266 SEQ ID NO: 3301
gcgcgcagccugucaaaua

SEQ ID NO: 256573 - RNA, 19 nt, Artificial Sequence
  Description of Artificial Sequence: Synthetic oligonucleotide
  Antisense strand to SEQ ID NO: 256572
uauuugacaggcugcgcgc

SEQ ID NO: 256574 - RNA, 19 nt, Artificial Sequence
  Description of Artificial Sequence: Synthetic oligonucleotide
  Sense strand starting at position 1465 SEQ ID NO: 3301
gcgggagucuccuccuaga

SEQ ID NO: 256575 - RNA, 19 nt, Artificial Sequence
  Description of Artificial Sequence: Synthetic oligonucleotide
  Antisense strand to SEQ ID NO: 256574
ucuaggaggagacucccgc

SEQ ID NO: 256576 - RNA, 19 nt, Artificial Sequence
  Description of Artificial Sequence: Synthetic oligonucleotide
  Sense strand starting at position 2058 SEQ ID NO: 3301
gcuugagaccaagaaguuu

SEQ ID NO: 256577 - RNA, 19 nt, Artificial Sequence
  Description of Artificial Sequence: Synthetic oligonucleotide
  Antisense strand to SEQ ID NO: 256576
aaacuucuuggucucaagc

SEQ ID NO: 256578 - RNA, 19 nt, Artificial Sequence
  Description of Artificial Sequence: Synthetic oligonucleotide
  Sense strand starting at position 2066 SEQ ID NO: 3301
ccaagaaguuucuuccuga

SEQ ID NO: 256579 - RNA, 19 nt, Artificial Sequence
  Description of Artificial Sequence: Synthetic oligonucleotide
  Antisense strand to SEQ ID NO: 256578
ucaggaagaaacuucuugg

SEQ ID NO: 256580 - RNA, 19 nt, Artificial Sequence
  Description of Artificial Sequence: Synthetic oligonucleotide
  Sense strand starting at position 2069 SEQ ID NO: 3301
agaaguuucuuccugacuc

SEQ ID NO: 256581 - RNA, 19 nt, Artificial Sequence
  Description of Artificial Sequence: Synthetic oligonucleotide
  Antisense strand to SEQ ID NO: 256580
gagucaggaagaaacuucu

SEQ ID NO: 256582 - RNA, 19 nt, Artificial Sequence
  Description of Artificial Sequence: Synthetic oligonucleotide
  Sense strand starting at position 2190 SEQ ID NO: 3301
cuuugaauuggcgaaccuu

SEQ ID NO: 256583 - RNA, 19 nt, Artificial Sequence
  Description of Artificial Sequence: Synthetic oligonucleotide
  Antisense strand to SEQ ID NO: 256582
aagguucgccaauucaaag

SEQ ID NO: 256584 - RNA, 19 nt, Artificial Sequence
  Description of Artificial Sequence: Synthetic oligonucleotide
  Sense strand starting at position 2228 SEQ ID NO: 3301
gaaacagucugcucaggau

SEQ ID NO: 256585 - RNA, 19 nt, Artificial Sequence
  Description of Artificial Sequence: Synthetic oligonucleotide
  Antisense strand to SEQ ID NO: 256584
auccugagcagacuguuuc

SEQ ID NO: 256586 - RNA, 19 nt, Artificial Sequence
  Description of Artificial Sequence: Synthetic oligonucleotide
  Sense strand starting at position 2315 SEQ ID NO: 3301
ugugugagggcuggaguaa

SEQ ID NO: 256587 - RNA, 19 nt, Artificial Sequence
  Description of Artificial Sequence: Synthetic oligonucleotide
  Antisense strand to SEQ ID NO: 256586
uuacuccagcccucacaca

SEQ ID NO: 256588 - RNA, 19 nt, Artificial Sequence
  Description of Artificial Sequence: Synthetic oligonucleotide
  Sense strand starting at position 2316 SEQ ID NO: 3301
gugugagggcuggaguaau

SEQ ID NO: 256589 - RNA, 19 nt, Artificial Sequence
  Description of Artificial Sequence: Synthetic oligonucleotide
  Antisense strand to SEQ ID NO: 256588
auuacuccagcccucacac

SEQ ID NO: 256590 - RNA, 19 nt, Artificial Sequence
  Description of Artificial Sequence: Synthetic oligonucleotide
  Sense strand starting at position 2341 SEQ ID NO: 3301
aggccaugucuugaucuca

SEQ ID NO: 256591 - RNA, 19 nt, Artificial Sequence
  Description of Artificial Sequence: Synthetic oligonucleotide
  Antisense strand to SEQ ID NO: 256590
ugagaucaagacauggccu

SEQ ID NO: 256592 - RNA, 19 nt, Artificial Sequence
  Description of Artificial Sequence: Synthetic oligonucleotide
  Sense strand starting at position 2349 SEQ ID NO: 3301
ucuugaucucauuagcaga

SEQ ID NO: 256593 - RNA, 19 nt, Artificial Sequence
  Description of Artificial Sequence: Synthetic oligonucleotide
  Antisense strand to SEQ ID NO: 256592
ucugcuaaugagaucaaga

SEQ ID NO: 256594 - RNA, 19 nt, Artificial Sequence
  Description of Artificial Sequence: Synthetic oligonucleotide
  Sense strand starting at position 2351 SEQ ID NO: 3301
uugaucucauuagcagaaa

SEQ ID NO: 256595 - RNA, 19 nt, Artificial Sequence
  Description of Artificial Sequence: Synthetic oligonucleotide
  Antisense strand to SEQ ID NO: 256594
uuucugcuaaugagaucaa

SEQ ID NO: 256596 - RNA, 19 nt, Artificial Sequence
  Description of Artificial Sequence: Synthetic oligonucleotide
  Sense strand starting at position 2625 SEQ ID NO: 3301
ccuuguuuacaggauuaau

SEQ ID NO: 256597 - RNA, 19 nt, Artificial Sequence
  Description of Artificial Sequence: Synthetic oligonucleotide
  Antisense strand to SEQ ID NO: 256596
auuaauccuguaaacaagg

SEQ ID NO: 256598 - RNA, 19 nt, Artificial Sequence
  Description of Artificial Sequence: Synthetic oligonucleotide
  Sense strand starting at position 2689 SEQ ID NO: 3301
ucucuuaaagguugcaaau

SEQ ID NO: 256599 - RNA, 19 nt, Artificial Sequence
  Description of Artificial Sequence: Synthetic oligonucleotide
  Antisense strand to SEQ ID NO: 256598
auuugcaaccuuuaagaga

SEQ ID NO: 256600 - RNA, 19 nt, Artificial Sequence
  Description of Artificial Sequence: Synthetic oligonucleotide
  Sense strand starting at position 2733 SEQ ID NO: 3301
guaggauaccuuugacuug

SEQ ID NO: 256601 - RNA, 19 nt, Artificial Sequence
  Description of Artificial Sequence: Synthetic oligonucleotide
  Antisense strand to SEQ ID NO: 256600
caagucaaagguauccuac

SEQ ID NO: 256602 - RNA, 19 nt, Artificial Sequence
  Description of Artificial Sequence: Synthetic oligonucleotide
  Sense strand starting at position 2744 SEQ ID NO: 3301
uugacuugcccauggacaa

SEQ ID NO: 256603 - RNA, 19 nt, Artificial Sequence
  Description of Artificial Sequence: Synthetic oligonucleotide
  Antisense strand to SEQ ID NO: 256602
uuguccaugggcaagucaa

SEQ ID NO: 256604 - RNA, 19 nt, Artificial Sequence
  Description of Artificial Sequence: Synthetic oligonucleotide
  Sense strand starting at position 2808 SEQ ID NO: 3301
uuaggcucauaucuaugaa

SEQ ID NO: 256605 - RNA, 19 nt, Artificial Sequence
  Description of Artificial Sequence: Synthetic oligonucleotide
  Antisense strand to SEQ ID NO: 256604
uucauagauaugagccuaa

SEQ ID NO: 256606 - RNA, 19 nt, Artificial Sequence
  Description of Artificial Sequence: Synthetic oligonucleotide
  Sense strand starting at position 2811 SEQ ID NO: 3301
ggcucauaucuaugaaaug

SEQ ID NO: 256607 - RNA, 19 nt, Artificial Sequence
  Description of Artificial Sequence: Synthetic oligonucleotide
  Antisense strand to SEQ ID NO: 256606
cauuucauagauaugagcc

SEQ ID NO: 256608 - RNA, 19 nt, Artificial Sequence
  Description of Artificial Sequence: Synthetic oligonucleotide
  Sense strand starting at position 2923 SEQ ID NO: 3301
gaagauaugccuuggucuu

SEQ ID NO: 256609 - RNA, 19 nt, Artificial Sequence
  Description of Artificial Sequence: Synthetic oligonucleotide
  Antisense strand to SEQ ID NO: 256608
aagaccaaggcauaucuuc

SEQ ID NO: 256610 - RNA, 19 nt, Artificial Sequence
  Description of Artificial Sequence: Synthetic oligonucleotide
  Sense strand starting at position 2924 SEQ ID NO: 3301
aagauaugccuuggucuuc

SEQ ID NO: 256611 - RNA, 19 nt, Artificial Sequence
  Description of Artificial Sequence: Synthetic oligonucleotide
  Antisense strand to SEQ ID NO: 256610
gaagaccaaggcauaucuu

SEQ ID NO: 256612 - RNA, 19 nt, Artificial Sequence
  Description of Artificial Sequence: Synthetic oligonucleotide
  Sense strand starting at position 2935 SEQ ID NO: 3301
uggucuucuggcuaaagac

SEQ ID NO: 256613 - RNA, 19 nt, Artificial Sequence
  Description of Artificial Sequence: Synthetic oligonucleotide
  Antisense strand to SEQ ID NO: 256612
gucuuuagccagaagacca

SEQ ID NO: 256614 - RNA, 19 nt, Artificial Sequence
  Description of Artificial Sequence: Synthetic oligonucleotide
  Sense strand starting at position 3010 SEQ ID NO: 3301
ggaccaaagcaaugugugu

SEQ ID NO: 256615 - RNA, 19 nt, Artificial Sequence
  Description of Artificial Sequence: Synthetic oligonucleotide
  Antisense strand to SEQ ID NO: 256614
acacacauugcuuuggucc

SEQ ID NO: 256616 - RNA, 19 nt, Artificial Sequence
  Description of Artificial Sequence: Synthetic oligonucleotide
  Sense strand starting at position 3127 SEQ ID NO: 3301
ggaucaugguuccucugau

SEQ ID NO: 256617 - RNA, 19 nt, Artificial Sequence
  Description of Artificial Sequence: Synthetic oligonucleotide
  Antisense strand to SEQ ID NO: 256616
aucagaggaaccaugaucc

SEQ ID NO: 256618 - RNA, 19 nt, Artificial Sequence
  Description of Artificial Sequence: Synthetic oligonucleotide
  Sense strand starting at position 3128 SEQ ID NO: 3301
gaucaugguuccucugauc

SEQ ID NO: 256619 - RNA, 19 nt, Artificial Sequence
  Description of Artificial Sequence: Synthetic oligonucleotide
  Antisense strand to SEQ ID NO: 256618
gaucagaggaaccaugauc

SEQ ID NO: 256620 - RNA, 19 nt, Artificial Sequence
  Description of Artificial Sequence: Synthetic oligonucleotide
  Sense strand starting at position 3133 SEQ ID NO: 3301
ugguuccucugaucagaga

SEQ ID NO: 256621 - RNA, 19 nt, Artificial Sequence
  Description of Artificial Sequence: Synthetic oligonucleotide
  Antisense strand to SEQ ID NO: 256620
ucucugaucagaggaacca

SEQ ID NO: 256622 - RNA, 19 nt, Artificial Sequence
  Description of Artificial Sequence: Synthetic oligonucleotide
  Sense strand starting at position 3353 SEQ ID NO: 3301
ggagaugucuuugucugca

SEQ ID NO: 256623 - RNA, 19 nt, Artificial Sequence
  Description of Artificial Sequence: Synthetic oligonucleotide
  Antisense strand to SEQ ID NO: 256622
ugcagacaaagacaucucc

SEQ ID NO: 256624 - RNA, 19 nt, Artificial Sequence
  Description of Artificial Sequence: Synthetic oligonucleotide
  Sense strand starting at position 3468 SEQ ID NO: 3301
uuugaauucugguuuccuu

SEQ ID NO: 256625 - RNA, 19 nt, Artificial Sequence
  Description of Artificial Sequence: Synthetic oligonucleotide
  Antisense strand to SEQ ID NO: 256624
aaggaaaccagaauucaaa

SEQ ID NO: 256626 - RNA, 19 nt, Artificial Sequence
  Description of Artificial Sequence: Synthetic oligonucleotide
  Sense strand starting at position 3518 SEQ ID NO: 3301
cuagaauccucaguuagcu

SEQ ID NO: 256627 - RNA, 19 nt, Artificial Sequence
  Description of Artificial Sequence: Synthetic oligonucleotide
  Antisense strand to SEQ ID NO: 256626
agcuaacugaggauucuag

SEQ ID NO: 256628 - RNA, 19 nt, Artificial Sequence
  Description of Artificial Sequence: Synthetic oligonucleotide
  Sense strand starting at position 3587 SEQ ID NO: 3301
ggaggaguauccuucucua

SEQ ID NO: 256629 - RNA, 19 nt, Artificial Sequence
  Description of Artificial Sequence: Synthetic oligonucleotide
  Antisense strand to SEQ ID NO: 256628
uagagaaggauacuccucc

SEQ ID NO: 256630 - RNA, 19 nt, Artificial Sequence
  Description of Artificial Sequence: Synthetic oligonucleotide
  Sense strand starting at position 3679 SEQ ID NO: 3301
ugauuaauuugccuauugu

SEQ ID NO: 256631 - RNA, 19 nt, Artificial Sequence
  Description of Artificial Sequence: Synthetic oligonucleotide
  Antisense strand to SEQ ID NO: 256630
acaauaggcaaauuaauca

SEQ ID NO: 256632 - RNA, 19 nt, Artificial Sequence
  Description of Artificial Sequence: Synthetic oligonucleotide
  Sense strand starting at position 3788 SEQ ID NO: 3301
cuugaauacugucugauac

SEQ ID NO: 256633 - RNA, 19 nt, Artificial Sequence
  Description of Artificial Sequence: Synthetic oligonucleotide
  Antisense strand to SEQ ID NO: 256632
guaucagacaguauucaag

SEQ ID NO: 256634 - RNA, 19 nt, Artificial Sequence
  Description of Artificial Sequence: Synthetic oligonucleotide
  Sense strand starting at position 3789 SEQ ID NO: 3301
uugaauacugucugauaca

SEQ ID NO: 256635 - RNA, 19 nt, Artificial Sequence
  Description of Artificial Sequence: Synthetic oligonucleotide
  Antisense strand to SEQ ID NO: 256634
uguaucagacaguauucaa

SEQ ID NO: 256636 - RNA, 19 nt, Artificial Sequence
  Description of Artificial Sequence: Synthetic oligonucleotide
  Sense strand starting at position 3960 SEQ ID NO: 3301
auuuacuaguugcaugaaa

SEQ ID NO: 256637 - RNA, 19 nt, Artificial Sequence
  Description of Artificial Sequence: Synthetic oligonucleotide
  Antisense strand to SEQ ID NO: 256636
uuucaugcaacuaguaaau

SEQ ID NO: 256638 - RNA, 19 nt, Artificial Sequence
  Description of Artificial Sequence: Synthetic oligonucleotide
  Sense strand starting at position 138 SEQ ID NO: 3302
acaccuauugcccgguuaa

SEQ ID NO: 256639 - RNA, 19 nt, Artificial Sequence
  Description of Artificial Sequence: Synthetic oligonucleotide
  Antisense strand to SEQ ID NO: 256638
uuaaccgggcaauaggugu

SEQ ID NO: 256640 - RNA, 19 nt, Artificial Sequence
  Description of Artificial Sequence: Synthetic oligonucleotide
  Sense strand starting at position 139 SEQ ID NO: 3302
caccuauugcccgguuaaa

SEQ ID NO: 256641 - RNA, 19 nt, Artificial Sequence
  Description of Artificial Sequence: Synthetic oligonucleotide
  Antisense strand to SEQ ID NO: 256640
uuuaaccgggcaauaggug

SEQ ID NO: 256642 - RNA, 19 nt, Artificial Sequence
  Description of Artificial Sequence: Synthetic oligonucleotide
  Sense strand starting at position 159 SEQ ID NO: 3302
ggcugcuuuguguuauauu

SEQ ID NO: 256643 - RNA, 19 nt, Artificial Sequence
  Description of Artificial Sequence: Synthetic oligonucleotide
  Antisense strand to SEQ ID NO: 256642
aauauaacacaaagcagcc

SEQ ID NO: 256644 - RNA, 19 nt, Artificial Sequence
  Description of Artificial Sequence: Synthetic oligonucleotide
  Sense strand starting at position 180 SEQ ID NO: 3302
gauggaaggcuguaaucuu

SEQ ID NO: 256645 - RNA, 19 nt, Artificial Sequence
  Description of Artificial Sequence: Synthetic oligonucleotide
  Antisense strand to SEQ ID NO: 256644
aagauuacagccuuccauc

SEQ ID NO: 256646 - RNA, 19 nt, Artificial Sequence
  Description of Artificial Sequence: Synthetic oligonucleotide
  Sense strand starting at position 275 SEQ ID NO: 3302
aauuguccacagugaaaug

SEQ ID NO: 256647 - RNA, 19 nt, Artificial Sequence
  Description of Artificial Sequence: Synthetic oligonucleotide
  Antisense strand to SEQ ID NO: 256646
cauuucacuguggacaauu

SEQ ID NO: 256648 - RNA, 19 nt, Artificial Sequence
  Description of Artificial Sequence: Synthetic oligonucleotide
  Sense strand starting at position 337 SEQ ID NO: 3302
agcucaugcaugggacauu

SEQ ID NO: 256649 - RNA, 19 nt, Artificial Sequence
  Description of Artificial Sequence: Synthetic oligonucleotide
  Antisense strand to SEQ ID NO: 256648
aaugucccaugcaugagcu

SEQ ID NO: 256650 - RNA, 19 nt, Artificial Sequence
  Description of Artificial Sequence: Synthetic oligonucleotide
  Sense strand starting at position 493 SEQ ID NO: 3302
guuccuuaccaacagucau

SEQ ID NO: 256651 - RNA, 19 nt, Artificial Sequence
  Description of Artificial Sequence: Synthetic oligonucleotide
  Antisense strand to SEQ ID NO: 256650
augacuguugguaaggaac

SEQ ID NO: 256652 - RNA, 19 nt, Artificial Sequence
  Description of Artificial Sequence: Synthetic oligonucleotide
  Sense strand starting at position 655 SEQ ID NO: 3302
guaacauguauauagugua

SEQ ID NO: 256653 - RNA, 19 nt, Artificial Sequence
  Description of Artificial Sequence: Synthetic oligonucleotide
  Antisense strand to SEQ ID NO: 256652
uacacuauauacauguuac

SEQ ID NO: 256654 - RNA, 19 nt, Artificial Sequence
  Description of Artificial Sequence: Synthetic oligonucleotide
  Sense strand starting at position 674 SEQ ID NO: 3302
uuauacauuugugugcaua

SEQ ID NO: 256655 - RNA, 19 nt, Artificial Sequence
  Description of Artificial Sequence: Synthetic oligonucleotide
  Antisense strand to SEQ ID NO: 256654
uaugcacacaaauguauaa

SEQ ID NO: 256656 - RNA, 19 nt, Artificial Sequence
  Description of Artificial Sequence: Synthetic oligonucleotide
  Sense strand starting at position 676 SEQ ID NO: 3302
auacauuugugugcauacu

SEQ ID NO: 256657 - RNA, 19 nt, Artificial Sequence
  Description of Artificial Sequence: Synthetic oligonucleotide
  Antisense strand to SEQ ID NO: 256656
aguaugcacacaaauguau

SEQ ID NO: 256658 - RNA, 19 nt, Artificial Sequence
  Description of Artificial Sequence: Synthetic oligonucleotide
  Sense strand starting at position 749 SEQ ID NO: 3302
gucuauguccuggaagcau

SEQ ID NO: 256659 - RNA, 19 nt, Artificial Sequence
  Description of Artificial Sequence: Synthetic oligonucleotide
  Antisense strand to SEQ ID NO: 256658
augcuuccaggacauagac

SEQ ID NO: 256660 - RNA, 19 nt, Artificial Sequence
  Description of Artificial Sequence: Synthetic oligonucleotide
  Sense strand starting at position 769 SEQ ID NO: 3302
gugcuaagagcuuacgaca

SEQ ID NO: 256661 - RNA, 19 nt, Artificial Sequence
  Description of Artificial Sequence: Synthetic oligonucleotide
  Antisense strand to SEQ ID NO: 256660
ugucguaagcucuuagcac

SEQ ID NO: 256662 - RNA, 19 nt, Artificial Sequence
  Description of Artificial Sequence: Synthetic oligonucleotide
  Sense strand starting at position 776 SEQ ID NO: 3302
gagcuuacgacagauggca

SEQ ID NO: 256663 - RNA, 19 nt, Artificial Sequence
  Description of Artificial Sequence: Synthetic oligonucleotide
  Antisense strand to SEQ ID NO: 256662
ugccaucugucguaagcuc

SEQ ID NO: 256664 - RNA, 19 nt, Artificial Sequence
  Description of Artificial Sequence: Synthetic oligonucleotide
  Sense strand starting at position 864 SEQ ID NO: 3302
ccggaugccaggcagaaua

SEQ ID NO: 256665 - RNA, 19 nt, Artificial Sequence
  Description of Artificial Sequence: Synthetic oligonucleotide
  Antisense strand to SEQ ID NO: 256664
uauucugccuggcauccgg

SEQ ID NO: 256666 - RNA, 19 nt, Artificial Sequence
  Description of Artificial Sequence: Synthetic oligonucleotide
  Sense strand starting at position 1266 SEQ ID NO: 3302
gcuguuucugaaggaauua

SEQ ID NO: 256667 - RNA, 19 nt, Artificial Sequence
  Description of Artificial Sequence: Synthetic oligonucleotide
  Antisense strand to SEQ ID NO: 256666
uaauuccuucagaaacagc

SEQ ID NO: 256668 - RNA, 19 nt, Artificial Sequence
  Description of Artificial Sequence: Synthetic oligonucleotide
  Sense strand starting at position 1394 SEQ ID NO: 3302
uuuccacuaucuuuguaga

SEQ ID NO: 256669 - RNA, 19 nt, Artificial Sequence
  Description of Artificial Sequence: Synthetic oligonucleotide
  Antisense strand to SEQ ID NO: 256668
ucuacaaagauaguggaaa

SEQ ID NO: 256670 - RNA, 19 nt, Artificial Sequence
  Description of Artificial Sequence: Synthetic oligonucleotide
  Sense strand starting at position 1439 SEQ ID NO: 3302
agguaauacuggcuuucga

SEQ ID NO: 256671 - RNA, 19 nt, Artificial Sequence
  Description of Artificial Sequence: Synthetic oligonucleotide
  Antisense strand to SEQ ID NO: 256670
ucgaaagccaguauuaccu

SEQ ID NO: 256672 - RNA, 19 nt, Artificial Sequence
  Description of Artificial Sequence: Synthetic oligonucleotide
  Sense strand starting at position 1448 SEQ ID NO: 3302
uggcuuucgauacacguau

SEQ ID NO: 256673 - RNA, 19 nt, Artificial Sequence
  Description of Artificial Sequence: Synthetic oligonucleotide
  Antisense strand to SEQ ID NO: 256672
auacguguaucgaaagcca

SEQ ID NO: 256674 - RNA, 19 nt, Artificial Sequence
  Description of Artificial Sequence: Synthetic oligonucleotide
  Sense strand starting at position 2525 SEQ ID NO: 3302
ggcgcuugagaacauagaa

SEQ ID NO: 256675 - RNA, 19 nt, Artificial Sequence
  Description of Artificial Sequence: Synthetic oligonucleotide
  Antisense strand to SEQ ID NO: 256674
uucuauguucucaagcgcc

SEQ ID NO: 256676 - RNA, 19 nt, Artificial Sequence
  Description of Artificial Sequence: Synthetic oligonucleotide
  Sense strand starting at position 2548 SEQ ID NO: 3302
ucuugucagcacuaaagga

SEQ ID NO: 256677 - RNA, 19 nt, Artificial Sequence
  Description of Artificial Sequence: Synthetic oligonucleotide
  Antisense strand to SEQ ID NO: 256676
uccuuuagugcugacaaga

SEQ ID NO: 256678 - RNA, 19 nt, Artificial Sequence
  Description of Artificial Sequence: Synthetic oligonucleotide
  Sense strand starting at position 2632 SEQ ID NO: 3302
ugagucaacgaauguuuau

SEQ ID NO: 256679 - RNA, 19 nt, Artificial Sequence
  Description of Artificial Sequence: Synthetic oligonucleotide
  Antisense strand to SEQ ID NO: 256678
auaaacauucguugacuca

SEQ ID NO: 256680 - RNA, 19 nt, Artificial Sequence
  Description of Artificial Sequence: Synthetic oligonucleotide
  Sense strand starting at position 2758 SEQ ID NO: 3302
ucuagauagccagacguau

SEQ ID NO: 256681 - RNA, 19 nt, Artificial Sequence
  Description of Artificial Sequence: Synthetic oligonucleotide
  Antisense strand to SEQ ID NO: 256680
auacgucuggcuaucuaga

SEQ ID NO: 256682 - RNA, 19 nt, Artificial Sequence
  Description of Artificial Sequence: Synthetic oligonucleotide
  Sense strand starting at position 2769 SEQ ID NO: 3302
agacguaugcucuagagac

SEQ ID NO: 256683 - RNA, 19 nt, Artificial Sequence
  Description of Artificial Sequence: Synthetic oligonucleotide
  Antisense strand to SEQ ID NO: 256682
gucucuagagcauacgucu

SEQ ID NO: 256684 - RNA, 19 nt, Artificial Sequence
  Description of Artificial Sequence: Synthetic oligonucleotide
  Sense strand starting at position 2773 SEQ ID NO: 3302
guaugcucuagagacaguu

SEQ ID NO: 256685 - RNA, 19 nt, Artificial Sequence
  Description of Artificial Sequence: Synthetic oligonucleotide
  Antisense strand to SEQ ID NO: 256684
aacugucucuagagcauac

SEQ ID NO: 256686 - RNA, 19 nt, Artificial Sequence
  Description of Artificial Sequence: Synthetic oligonucleotide
  Sense strand starting at position 2798 SEQ ID NO: 3302
aucuaacucucaguguauu

SEQ ID NO: 256687 - RNA, 19 nt, Artificial Sequence
  Description of Artificial Sequence: Synthetic oligonucleotide
  Antisense strand to SEQ ID NO: 256686
aauacacugagaguuagau

SEQ ID NO: 256688 - RNA, 19 nt, Artificial Sequence
  Description of Artificial Sequence: Synthetic oligonucleotide
  Sense strand starting at position 2870 SEQ ID NO: 3302
gauaaugaauaugaaggau

SEQ ID NO: 256689 - RNA, 19 nt, Artificial Sequence
  Description of Artificial Sequence: Synthetic oligonucleotide
  Antisense strand to SEQ ID NO: 256688
auccuucauauucauuauc

SEQ ID NO: 256690 - RNA, 19 nt, Artificial Sequence
  Description of Artificial Sequence: Synthetic oligonucleotide
  Sense strand starting at position 2931 SEQ ID NO: 3302
aaguguugaccuugaaaua

SEQ ID NO: 256691 - RNA, 19 nt, Artificial Sequence
  Description of Artificial Sequence: Synthetic oligonucleotide
  Antisense strand to SEQ ID NO: 256690
uauuucaaggucaacacuu

SEQ ID NO: 256692 - RNA, 19 nt, Artificial Sequence
  Description of Artificial Sequence: Synthetic oligonucleotide
  Sense strand starting at position 2932 SEQ ID NO: 3302
aguguugaccuugaaauau

SEQ ID NO: 256693 - RNA, 19 nt, Artificial Sequence
  Description of Artificial Sequence: Synthetic oligonucleotide
  Antisense strand to SEQ ID NO: 256692
auauuucaaggucaacacu

SEQ ID NO: 256694 - RNA, 19 nt, Artificial Sequence
  Description of Artificial Sequence: Synthetic oligonucleotide
  Sense strand starting at position 3029 SEQ ID NO: 3302
cguacuaaggaguaugaau

SEQ ID NO: 256695 - RNA, 19 nt, Artificial Sequence
  Description of Artificial Sequence: Synthetic oligonucleotide
  Antisense strand to SEQ ID NO: 256694
auucauacuccuuaguacg

SEQ ID NO: 256696 - RNA, 19 nt, Artificial Sequence
  Description of Artificial Sequence: Synthetic oligonucleotide
  Sense strand starting at position 3101 SEQ ID NO: 3302
uuagaauuacuucgagugu

SEQ ID NO: 256697 - RNA, 19 nt, Artificial Sequence
  Description of Artificial Sequence: Synthetic oligonucleotide
  Antisense strand to SEQ ID NO: 256696
acacucgaaguaauucuaa

SEQ ID NO: 256698 - RNA, 19 nt, Artificial Sequence
  Description of Artificial Sequence: Synthetic oligonucleotide
  Sense strand starting at position 3105 SEQ ID NO: 3302
aauuacuucgagugucuau

SEQ ID NO: 256699 - RNA, 19 nt, Artificial Sequence
  Description of Artificial Sequence: Synthetic oligonucleotide
  Antisense strand to SEQ ID NO: 256698
auagacacucgaaguaauu

SEQ ID NO: 256700 - RNA, 19 nt, Artificial Sequence
  Description of Artificial Sequence: Synthetic oligonucleotide
  Sense strand starting at position 3260 SEQ ID NO: 3302
aacauuagaguugauguuu

SEQ ID NO: 256701 - RNA, 19 nt, Artificial Sequence
  Description of Artificial Sequence: Synthetic oligonucleotide
  Antisense strand to SEQ ID NO: 256700
aaacaucaacucuaauguu

SEQ ID NO: 256702 - RNA, 19 nt, Artificial Sequence
  Description of Artificial Sequence: Synthetic oligonucleotide
  Sense strand starting at position 3329 SEQ ID NO: 3302
gugggagccugcaaggauu

SEQ ID NO: 256703 - RNA, 19 nt, Artificial Sequence
  Description of Artificial Sequence: Synthetic oligonucleotide
  Antisense strand to SEQ ID NO: 256702
aauccuugcaggcucccac

SEQ ID NO: 256704 - RNA, 19 nt, Artificial Sequence
  Description of Artificial Sequence: Synthetic oligonucleotide
  Sense strand starting at position 3332 SEQ ID NO: 3302
ggagccugcaaggauuaga

SEQ ID NO: 256705 - RNA, 19 nt, Artificial Sequence
  Description of Artificial Sequence: Synthetic oligonucleotide
  Antisense strand to SEQ ID NO: 256704
ucuaauccuugcaggcucc

SEQ ID NO: 256706 - RNA, 19 nt, Artificial Sequence
  Description of Artificial Sequence: Synthetic oligonucleotide
  Sense strand starting at position 3510 SEQ ID NO: 3302
gaugcuccuccucggaaga

SEQ ID NO: 256707 - RNA, 19 nt, Artificial Sequence
  Description of Artificial Sequence: Synthetic oligonucleotide
  Antisense strand to SEQ ID NO: 256706
ucuuccgaggaggagcauc

SEQ ID NO: 256708 - RNA, 19 nt, Artificial Sequence
  Description of Artificial Sequence: Synthetic oligonucleotide
  Sense strand starting at position 3651 SEQ ID NO: 3302
gcaggugcucaaugagagu

SEQ ID NO: 256709 - RNA, 19 nt, Artificial Sequence
  Description of Artificial Sequence: Synthetic oligonucleotide
  Antisense strand to SEQ ID NO: 256708
acucucauugagcaccugc

SEQ ID NO: 256710 - RNA, 19 nt, Artificial Sequence
  Description of Artificial Sequence: Synthetic oligonucleotide
  Sense strand starting at position 3722 SEQ ID NO: 3302
gagggaguaucgcuugaag

SEQ ID NO: 256711 - RNA, 19 nt, Artificial Sequence
  Description of Artificial Sequence: Synthetic oligonucleotide
  Antisense strand to SEQ ID NO: 256710
cuucaagcgauacucccuc

SEQ ID NO: 256712 - RNA, 19 nt, Artificial Sequence
  Description of Artificial Sequence: Synthetic oligonucleotide
  Sense strand starting at position 3845 SEQ ID NO: 3302
uuucucugauaguuuaaag

SEQ ID NO: 256713 - RNA, 19 nt, Artificial Sequence
  Description of Artificial Sequence: Synthetic oligonucleotide
  Antisense strand to SEQ ID NO: 256712
cuuuaaacuaucagagaaa

SEQ ID NO: 256714 - RNA, 19 nt, Artificial Sequence
  Description of Artificial Sequence: Synthetic oligonucleotide
  Sense strand starting at position 3923 SEQ ID NO: 3302
ccacuuuaagauuagcuga

SEQ ID NO: 256715 - RNA, 19 nt, Artificial Sequence
  Description of Artificial Sequence: Synthetic oligonucleotide
  Antisense strand to SEQ ID NO: 256714
ucagcuaaucuuaaagugg

SEQ ID NO: 256716 - RNA, 19 nt, Artificial Sequence
  Description of Artificial Sequence: Synthetic oligonucleotide
  Sense strand starting at position 3981 SEQ ID NO: 3302
gguccuuauaugggagauu

SEQ ID NO: 256717 - RNA, 19 nt, Artificial Sequence
  Description of Artificial Sequence: Synthetic oligonucleotide
  Antisense strand to SEQ ID NO: 256716
aaucucccauauaaggacc

SEQ ID NO: 256718 - RNA, 19 nt, Artificial Sequence
  Description of Artificial Sequence: Synthetic oligonucleotide
  Sense strand starting at position 110 SEQ ID NO: 3303
acuuacuuugagugaaauc

SEQ ID NO: 256719 - RNA, 19 nt, Artificial Sequence
  Description of Artificial Sequence: Synthetic oligonucleotide
  Antisense strand to SEQ ID NO: 256718
gauuucacucaaaguaagu

SEQ ID NO: 256720 - RNA, 19 nt, Artificial Sequence
  Description of Artificial Sequence: Synthetic oligonucleotide
  Sense strand starting at position 198 SEQ ID NO: 3303
acacgauuccacugaguaa

SEQ ID NO: 256721 - RNA, 19 nt, Artificial Sequence
  Description of Artificial Sequence: Synthetic oligonucleotide
  Antisense strand to SEQ ID NO: 256720
uuacucaguggaaucgugu

SEQ ID NO: 256722 - RNA, 19 nt, Artificial Sequence
  Description of Artificial Sequence: Synthetic oligonucleotide
  Sense strand starting at position 210 SEQ ID NO: 3303
ugaguaauuucugaagaag

SEQ ID NO: 256723 - RNA, 19 nt, Artificial Sequence
  Description of Artificial Sequence: Synthetic oligonucleotide
  Antisense strand to SEQ ID NO: 256722
cuucuucagaaauuacuca

SEQ ID NO: 256724 - RNA, 19 nt, Artificial Sequence
  Description of Artificial Sequence: Synthetic oligonucleotide
  Sense strand starting at position 248 SEQ ID NO: 3303
gugucucaagacuaguauu

SEQ ID NO: 256725 - RNA, 19 nt, Artificial Sequence
  Description of Artificial Sequence: Synthetic oligonucleotide
  Antisense strand to SEQ ID NO: 256724
aauacuagucuugagacac

SEQ ID NO: 256726 - RNA, 19 nt, Artificial Sequence
  Description of Artificial Sequence: Synthetic oligonucleotide
  Sense strand starting at position 459 SEQ ID NO: 3303
gugcuuguggaaugaauaa

SEQ ID NO: 256727 - RNA, 19 nt, Artificial Sequence
  Description of Artificial Sequence: Synthetic oligonucleotide
  Antisense strand to SEQ ID NO: 256726
uuauucauuccacaagcac

SEQ ID NO: 256728 - RNA, 19 nt, Artificial Sequence
  Description of Artificial Sequence: Synthetic oligonucleotide
  Sense strand starting at position 482 SEQ ID NO: 3303
agguucucaugauuauaca

SEQ ID NO: 256729 - RNA, 19 nt, Artificial Sequence
  Description of Artificial Sequence: Synthetic oligonucleotide
  Antisense strand to SEQ ID NO: 256728
uguauaaucaugagaaccu

SEQ ID NO: 256730 - RNA, 19 nt, Artificial Sequence
  Description of Artificial Sequence: Synthetic oligonucleotide
  Sense strand starting at position 483 SEQ ID NO: 3303
gguucucaugauuauacau

SEQ ID NO: 256731 - RNA, 19 nt, Artificial Sequence
  Description of Artificial Sequence: Synthetic oligonucleotide
  Antisense strand to SEQ ID NO: 256730
auguauaaucaugagaacc

SEQ ID NO: 256732 - RNA, 19 nt, Artificial Sequence
  Description of Artificial Sequence: Synthetic oligonucleotide
  Sense strand starting at position 490 SEQ ID NO: 3303
augauuauacauugcagau

SEQ ID NO: 256733 - RNA, 19 nt, Artificial Sequence
  Description of Artificial Sequence: Synthetic oligonucleotide
  Antisense strand to SEQ ID NO: 256732
aucugcaauguauaaucau

SEQ ID NO: 256734 - RNA, 19 nt, Artificial Sequence
  Description of Artificial Sequence: Synthetic oligonucleotide
  Sense strand starting at position 599 SEQ ID NO: 3303
ucaguaguuggacauuauu

SEQ ID NO: 256735 - RNA, 19 nt, Artificial Sequence
  Description of Artificial Sequence: Synthetic oligonucleotide
  Antisense strand to SEQ ID NO: 256734
aauaauguccaacuacuga

SEQ ID NO: 256736 - RNA, 19 nt, Artificial Sequence
  Description of Artificial Sequence: Synthetic oligonucleotide
  Sense strand starting at position 815 SEQ ID NO: 3303
aaaguuaaagacggucuua

SEQ ID NO: 256737 - RNA, 19 nt, Artificial Sequence
  Description of Artificial Sequence: Synthetic oligonucleotide
  Antisense strand to SEQ ID NO: 256736
uaagaccgucuuuaacuuu

SEQ ID NO: 256738 - RNA, 19 nt, Artificial Sequence
  Description of Artificial Sequence: Synthetic oligonucleotide
  Sense strand starting at position 840 SEQ ID NO: 3303
agguaauauccauaauugc

SEQ ID NO: 256739 - RNA, 19 nt, Artificial Sequence
  Description of Artificial Sequence: Synthetic oligonucleotide
  Antisense strand to SEQ ID NO: 256738
gcaauuauggauauuaccu

SEQ ID NO: 256740 - RNA, 19 nt, Artificial Sequence
  Description of Artificial Sequence: Synthetic oligonucleotide
  Sense strand starting at position 967 SEQ ID NO: 3303
aggauuacuuucuuaugcu

SEQ ID NO: 256741 - RNA, 19 nt, Artificial Sequence
  Description of Artificial Sequence: Synthetic oligonucleotide
  Antisense strand to SEQ ID NO: 256740
agcauaagaaaguaauccu

SEQ ID NO: 256742 - RNA, 19 nt, Artificial Sequence
  Description of Artificial Sequence: Synthetic oligonucleotide
  Sense strand starting at position 1131 SEQ ID NO: 3303
ugggcuuucgucucuagca

SEQ ID NO: 256743 - RNA, 19 nt, Artificial Sequence
  Description of Artificial Sequence: Synthetic oligonucleotide
  Antisense strand to SEQ ID NO: 256742
ugcuagagacgaaagccca

SEQ ID NO: 256744 - RNA, 19 nt, Artificial Sequence
  Description of Artificial Sequence: Synthetic oligonucleotide
  Sense strand starting at position 1422 SEQ ID NO: 3303
auagaaguaucugcauaga

SEQ ID NO: 256745 - RNA, 19 nt, Artificial Sequence
  Description of Artificial Sequence: Synthetic oligonucleotide
  Antisense strand to SEQ ID NO: 256744
ucuaugcagauacuucuau

SEQ ID NO: 256746 - RNA, 19 nt, Artificial Sequence
  Description of Artificial Sequence: Synthetic oligonucleotide
  Sense strand starting at position 1766 SEQ ID NO: 3303
ccuggaggucuguagcaca

SEQ ID NO: 256747 - RNA, 19 nt, Artificial Sequence
  Description of Artificial Sequence: Synthetic oligonucleotide
  Antisense strand to SEQ ID NO: 256746
ugugcuacagaccuccagg

SEQ ID NO: 256748 - RNA, 19 nt, Artificial Sequence
  Description of Artificial Sequence: Synthetic oligonucleotide
  Sense strand starting at position 1835 SEQ ID NO: 3303
agaucuuuacucugagauu

SEQ ID NO: 256749 - RNA, 19 nt, Artificial Sequence
  Description of Artificial Sequence: Synthetic oligonucleotide
  Antisense strand to SEQ ID NO: 256748
aaucucagaguaaagaucu

SEQ ID NO: 256750 - RNA, 19 nt, Artificial Sequence
  Description of Artificial Sequence: Synthetic oligonucleotide
  Sense strand starting at position 2151 SEQ ID NO: 3303
agagcucacuagucucaga

SEQ ID NO: 256751 - RNA, 19 nt, Artificial Sequence
  Description of Artificial Sequence: Synthetic oligonucleotide
  Antisense strand to SEQ ID NO: 256750
ucugagacuagugagcucu

SEQ ID NO: 256752 - RNA, 19 nt, Artificial Sequence
  Description of Artificial Sequence: Synthetic oligonucleotide
  Sense strand starting at position 2242 SEQ ID NO: 3303
gauuuagcgguuugccaua

SEQ ID NO: 256753 - RNA, 19 nt, Artificial Sequence
  Description of Artificial Sequence: Synthetic oligonucleotide
  Antisense strand to SEQ ID NO: 256752
uauggcaaaccgcuaaauc

SEQ ID NO: 256754 - RNA, 19 nt, Artificial Sequence
  Description of Artificial Sequence: Synthetic oligonucleotide
  Sense strand starting at position 2330 SEQ ID NO: 3303
agucuaucagccuaugaau

SEQ ID NO: 256755 - RNA, 19 nt, Artificial Sequence
  Description of Artificial Sequence: Synthetic oligonucleotide
  Antisense strand to SEQ ID NO: 256754
auucauaggcugauagacu

SEQ ID NO: 256756 - RNA, 19 nt, Artificial Sequence
  Description of Artificial Sequence: Synthetic oligonucleotide
  Sense strand starting at position 2341 SEQ ID NO: 3303
cuaugaaugucaucaucug

SEQ ID NO: 256757 - RNA, 19 nt, Artificial Sequence
  Description of Artificial Sequence: Synthetic oligonucleotide
  Antisense strand to SEQ ID NO: 256756
cagaugaugacauucauag

SEQ ID NO: 256758 - RNA, 19 nt, Artificial Sequence
  Description of Artificial Sequence: Synthetic oligonucleotide
  Sense strand starting at position 2369 SEQ ID NO: 3303
guguuaaugccagacacac

SEQ ID NO: 256759 - RNA, 19 nt, Artificial Sequence
  Description of Artificial Sequence: Synthetic oligonucleotide
  Antisense strand to SEQ ID NO: 256758
gugugucuggcauuaacac

SEQ ID NO: 256760 - RNA, 19 nt, Artificial Sequence
  Description of Artificial Sequence: Synthetic oligonucleotide
  Sense strand starting at position 2559 SEQ ID NO: 3303
uugucauuggcagauaauu

SEQ ID NO: 256761 - RNA, 19 nt, Artificial Sequence
  Description of Artificial Sequence: Synthetic oligonucleotide
  Antisense strand to SEQ ID NO: 256760
aauuaucugccaaugacaa

SEQ ID NO: 256762 - RNA, 19 nt, Artificial Sequence
  Description of Artificial Sequence: Synthetic oligonucleotide
  Sense strand starting at position 2564 SEQ ID NO: 3303
auuggcagauaauuacaau

SEQ ID NO: 256763 - RNA, 19 nt, Artificial Sequence
  Description of Artificial Sequence: Synthetic oligonucleotide
  Antisense strand to SEQ ID NO: 256762
auuguaauuaucugccaau

SEQ ID NO: 256764 - RNA, 19 nt, Artificial Sequence
  Description of Artificial Sequence: Synthetic oligonucleotide
  Sense strand starting at position 2593 SEQ ID NO: 3303
aucgcauauugcuuauuua

SEQ ID NO: 256765 - RNA, 19 nt, Artificial Sequence
  Description of Artificial Sequence: Synthetic oligonucleotide
  Antisense strand to SEQ ID NO: 256764
uaaauaagcaauaugcgau

SEQ ID NO: 256766 - RNA, 19 nt, Artificial Sequence
  Description of Artificial Sequence: Synthetic oligonucleotide
  Sense strand starting at position 2594 SEQ ID NO: 3303
ucgcauauugcuuauuuau

SEQ ID NO: 256767 - RNA, 19 nt, Artificial Sequence
  Description of Artificial Sequence: Synthetic oligonucleotide
  Antisense strand to SEQ ID NO: 256766
auaaauaagcaauaugcga

SEQ ID NO: 256768 - RNA, 19 nt, Artificial Sequence
  Description of Artificial Sequence: Synthetic oligonucleotide
  Sense strand starting at position 2966 SEQ ID NO: 3303
ggagguuaaguguggaaua

SEQ ID NO: 256769 - RNA, 19 nt, Artificial Sequence
  Description of Artificial Sequence: Synthetic oligonucleotide
  Antisense strand to SEQ ID NO: 256768
uauuccacacuuaaccucc

SEQ ID NO: 256770 - RNA, 19 nt, Artificial Sequence
  Description of Artificial Sequence: Synthetic oligonucleotide
  Sense strand starting at position 2968 SEQ ID NO: 3303
agguuaaguguggaauaau

SEQ ID NO: 256771 - RNA, 19 nt, Artificial Sequence
  Description of Artificial Sequence: Synthetic oligonucleotide
  Antisense strand to SEQ ID NO: 256770
auuauuccacacuuaaccu

SEQ ID NO: 256772 - RNA, 19 nt, Artificial Sequence
  Description of Artificial Sequence: Synthetic oligonucleotide
  Sense strand starting at position 3136 SEQ ID NO: 3303
gaagcaucaccaugguuac

SEQ ID NO: 256773 - RNA, 19 nt, Artificial Sequence
  Description of Artificial Sequence: Synthetic oligonucleotide
  Antisense strand to SEQ ID NO: 256772
guaaccauggugaugcuuc

SEQ ID NO: 256774 - RNA, 19 nt, Artificial Sequence
  Description of Artificial Sequence: Synthetic oligonucleotide
  Sense strand starting at position 3142 SEQ ID NO: 3303
ucaccaugguuacuggaaa

SEQ ID NO: 256775 - RNA, 19 nt, Artificial Sequence
  Description of Artificial Sequence: Synthetic oligonucleotide
  Antisense strand to SEQ ID NO: 256774
uuuccaguaaccaugguga

SEQ ID NO: 256776 - RNA, 19 nt, Artificial Sequence
  Description of Artificial Sequence: Synthetic oligonucleotide
  Sense strand starting at position 3231 SEQ ID NO: 3303
gacagaugauauguuucuu

SEQ ID NO: 256777 - RNA, 19 nt, Artificial Sequence
  Description of Artificial Sequence: Synthetic oligonucleotide
  Antisense strand to SEQ ID NO: 256776
aagaaacauaucaucuguc

SEQ ID NO: 256778 - RNA, 19 nt, Artificial Sequence
  Description of Artificial Sequence: Synthetic oligonucleotide
  Sense strand starting at position 3266 SEQ ID NO: 3303
uugaaagaaucgccuccau

SEQ ID NO: 256779 - RNA, 19 nt, Artificial Sequence
  Description of Artificial Sequence: Synthetic oligonucleotide
  Antisense strand to SEQ ID NO: 256778
auggaggcgauucuuucaa

SEQ ID NO: 256780 - RNA, 19 nt, Artificial Sequence
  Description of Artificial Sequence: Synthetic oligonucleotide
  Sense strand starting at position 3270 SEQ ID NO: 3303
aagaaucgccuccaucagu

SEQ ID NO: 256781 - RNA, 19 nt, Artificial Sequence
  Description of Artificial Sequence: Synthetic oligonucleotide
  Antisense strand to SEQ ID NO: 256780
acugauggaggcgauucuu

SEQ ID NO: 256782 - RNA, 19 nt, Artificial Sequence
  Description of Artificial Sequence: Synthetic oligonucleotide
  Sense strand starting at position 3402 SEQ ID NO: 3303
uuuguaugagaucaauucu

SEQ ID NO: 256783 - RNA, 19 nt, Artificial Sequence
  Description of Artificial Sequence: Synthetic oligonucleotide
  Antisense strand to SEQ ID NO: 256782
agaauugaucucauacaaa

SEQ ID NO: 256784 - RNA, 19 nt, Artificial Sequence
  Description of Artificial Sequence: Synthetic oligonucleotide
  Sense strand starting at position 3623 SEQ ID NO: 3303
guuugcaagcaauacagau

SEQ ID NO: 256785 - RNA, 19 nt, Artificial Sequence
  Description of Artificial Sequence: Synthetic oligonucleotide
  Antisense strand to SEQ ID NO: 256784
aucuguauugcuugcaaac

SEQ ID NO: 256786 - RNA, 19 nt, Artificial Sequence
  Description of Artificial Sequence: Synthetic oligonucleotide
  Sense strand starting at position 3680 SEQ ID NO: 3303
uuguauuugcuacagcagu

SEQ ID NO: 256787 - RNA, 19 nt, Artificial Sequence
  Description of Artificial Sequence: Synthetic oligonucleotide
  Antisense strand to SEQ ID NO: 256786
acugcuguagcaaauacaa

SEQ ID NO: 256788 - RNA, 19 nt, Artificial Sequence
  Description of Artificial Sequence: Synthetic oligonucleotide
  Sense strand starting at position 3751 SEQ ID NO: 3303
auaucugugcuggauugua

SEQ ID NO: 256789 - RNA, 19 nt, Artificial Sequence
  Description of Artificial Sequence: Synthetic oligonucleotide
  Antisense strand to SEQ ID NO: 256788
uacaauccagcacagauau

SEQ ID NO: 256790 - RNA, 19 nt, Artificial Sequence
  Description of Artificial Sequence: Synthetic oligonucleotide
  Sense strand starting at position 3759 SEQ ID NO: 3303
gcuggauuguauuugaggu

SEQ ID NO: 256791 - RNA, 19 nt, Artificial Sequence
  Description of Artificial Sequence: Synthetic oligonucleotide
  Antisense strand to SEQ ID NO: 256790
accucaaauacaauccagc

SEQ ID NO: 256792 - RNA, 19 nt, Artificial Sequence
  Description of Artificial Sequence: Synthetic oligonucleotide
  Sense strand starting at position 3815 SEQ ID NO: 3303
ucauuuccagucuggcaau

SEQ ID NO: 256793 - RNA, 19 nt, Artificial Sequence
  Description of Artificial Sequence: Synthetic oligonucleotide
  Antisense strand to SEQ ID NO: 256792
auugccagacuggaaauga

SEQ ID NO: 256794 - RNA, 19 nt, Artificial Sequence
  Description of Artificial Sequence: Synthetic oligonucleotide
  Sense strand starting at position 3924 SEQ ID NO: 3303
gccucauuauuucugcaag

SEQ ID NO: 256795 - RNA, 19 nt, Artificial Sequence
  Description of Artificial Sequence: Synthetic oligonucleotide
  Antisense strand to SEQ ID NO: 256794
cuugcagaaauaaugaggc

SEQ ID NO: 256796 - RNA, 19 nt, Artificial Sequence
  Description of Artificial Sequence: Synthetic oligonucleotide
  Sense strand starting at position 3980 SEQ ID NO: 3303
ggcaccuucuagguauaga

SEQ ID NO: 256797 - RNA, 19 nt, Artificial Sequence
  Description of Artificial Sequence: Synthetic oligonucleotide
  Antisense strand to SEQ ID NO: 256796
ucuauaccuagaaggugcc

SEQ ID NO: 256798 - RNA, 19 nt, Artificial Sequence
  Description of Artificial Sequence: Synthetic oligonucleotide
  Sense strand starting at position 33 SEQ ID NO: 3304
guuuguagaagggagugau

SEQ ID NO: 256799 - RNA, 19 nt, Artificial Sequence
  Description of Artificial Sequence: Synthetic oligonucleotide
  Antisense strand to SEQ ID NO: 256798
aucacucccuucuacaaac

SEQ ID NO: 256800 - RNA, 19 nt, Artificial Sequence
  Description of Artificial Sequence: Synthetic oligonucleotide
  Sense strand starting at position 36 SEQ ID NO: 3304
uguagaagggagugaucau

SEQ ID NO: 256801 - RNA, 19 nt, Artificial Sequence
  Description of Artificial Sequence: Synthetic oligonucleotide
  Antisense strand to SEQ ID NO: 256800
augaucacucccuucuaca

SEQ ID NO: 256802 - RNA, 19 nt, Artificial Sequence
  Description of Artificial Sequence: Synthetic oligonucleotide
  Sense strand starting at position 63 SEQ ID NO: 3304
auuaauagcgaucaacagu

SEQ ID NO: 256803 - RNA, 19 nt, Artificial Sequence
  Description of Artificial Sequence: Synthetic oligonucleotide
  Antisense strand to SEQ ID NO: 256802
acuguugaucgcuauuaau

SEQ ID NO: 256804 - RNA, 19 nt, Artificial Sequence
  Description of Artificial Sequence: Synthetic oligonucleotide
  Sense strand starting at position 66 SEQ ID NO: 3304
aauagcgaucaacaguuau

SEQ ID NO: 256805 - RNA, 19 nt, Artificial Sequence
  Description of Artificial Sequence: Synthetic oligonucleotide
  Antisense strand to SEQ ID NO: 256804
auaacuguugaucgcuauu

SEQ ID NO: 256806 - RNA, 19 nt, Artificial Sequence
  Description of Artificial Sequence: Synthetic oligonucleotide
  Sense strand starting at position 101 SEQ ID NO: 3304
gauuaaugguuugugguag

SEQ ID NO: 256807 - RNA, 19 nt, Artificial Sequence
  Description of Artificial Sequence: Synthetic oligonucleotide
  Antisense strand to SEQ ID NO: 256806
cuaccacaaaccauuaauc

SEQ ID NO: 256808 - RNA, 19 nt, Artificial Sequence
  Description of Artificial Sequence: Synthetic oligonucleotide
  Sense strand starting at position 121 SEQ ID NO: 3304
caaaguugcuaagugaaac

SEQ ID NO: 256809 - RNA, 19 nt, Artificial Sequence
  Description of Artificial Sequence: Synthetic oligonucleotide
  Antisense strand to SEQ ID NO: 256808
guuucacuuagcaacuuug

SEQ ID NO: 256810 - RNA, 19 nt, Artificial Sequence
  Description of Artificial Sequence: Synthetic oligonucleotide
  Sense strand starting at position 169 SEQ ID NO: 3304
ucuauaguugcccaggaca

SEQ ID NO: 256811 - RNA, 19 nt, Artificial Sequence
  Description of Artificial Sequence: Synthetic oligonucleotide
  Antisense strand to SEQ ID NO: 256810
uguccugggcaacuauaga

SEQ ID NO: 256812 - RNA, 19 nt, Artificial Sequence
  Description of Artificial Sequence: Synthetic oligonucleotide
  Sense strand starting at position 171 SEQ ID NO: 3304
uauaguugcccaggacaaa

SEQ ID NO: 256813 - RNA, 19 nt, Artificial Sequence
  Description of Artificial Sequence: Synthetic oligonucleotide
  Antisense strand to SEQ ID NO: 256812
uuuguccugggcaacuaua

SEQ ID NO: 256814 - RNA, 19 nt, Artificial Sequence
  Description of Artificial Sequence: Synthetic oligonucleotide
  Sense strand starting at position 280 SEQ ID NO: 3304
guuuguacccuagggacau

SEQ ID NO: 256815 - RNA, 19 nt, Artificial Sequence
  Description of Artificial Sequence: Synthetic oligonucleotide
  Antisense strand to SEQ ID NO: 256814
augucccuaggguacaaac

SEQ ID NO: 256816 - RNA, 19 nt, Artificial Sequence
  Description of Artificial Sequence: Synthetic oligonucleotide
  Sense strand starting at position 290 SEQ ID NO: 3304
uagggacauugcucucaua

SEQ ID NO: 256817 - RNA, 19 nt, Artificial Sequence
  Description of Artificial Sequence: Synthetic oligonucleotide
  Antisense strand to SEQ ID NO: 256816
uaugagagcaaugucccua

SEQ ID NO: 256818 - RNA, 19 nt, Artificial Sequence
  Description of Artificial Sequence: Synthetic oligonucleotide
  Sense strand starting at position 417 SEQ ID NO: 3304
uugaacaagugaucuauac

SEQ ID NO: 256819 - RNA, 19 nt, Artificial Sequence
  Description of Artificial Sequence: Synthetic oligonucleotide
  Antisense strand to SEQ ID NO: 256818
guauagaucacuuguucaa

SEQ ID NO: 256820 - RNA, 19 nt, Artificial Sequence
  Description of Artificial Sequence: Synthetic oligonucleotide
  Sense strand starting at position 747 SEQ ID NO: 3304
aucuccucucuguagagaa

SEQ ID NO: 256821 - RNA, 19 nt, Artificial Sequence
  Description of Artificial Sequence: Synthetic oligonucleotide
  Antisense strand to SEQ ID NO: 256820
uucucuacagagaggagau

SEQ ID NO: 256822 - RNA, 19 nt, Artificial Sequence
  Description of Artificial Sequence: Synthetic oligonucleotide
  Sense strand starting at position 897 SEQ ID NO: 3304
uuuagucaucuuugacuca

SEQ ID NO: 256823 - RNA, 19 nt, Artificial Sequence
  Description of Artificial Sequence: Synthetic oligonucleotide
  Antisense strand to SEQ ID NO: 256822
ugagucaaagaugacuaaa

SEQ ID NO: 256824 - RNA, 19 nt, Artificial Sequence
  Description of Artificial Sequence: Synthetic oligonucleotide
  Sense strand starting at position 900 SEQ ID NO: 3304
agucaucuuugacucaagu

SEQ ID NO: 256825 - RNA, 19 nt, Artificial Sequence
  Description of Artificial Sequence: Synthetic oligonucleotide
  Antisense strand to SEQ ID NO: 256824
acuugagucaaagaugacu

SEQ ID NO: 256826 - RNA, 19 nt, Artificial Sequence
  Description of Artificial Sequence: Synthetic oligonucleotide
  Sense strand starting at position 937 SEQ ID NO: 3304
gugucuccgcugucaacau

SEQ ID NO: 256827 - RNA, 19 nt, Artificial Sequence
  Description of Artificial Sequence: Synthetic oligonucleotide
  Antisense strand to SEQ ID NO: 256826
auguugacagcggagacac

SEQ ID NO: 256828 - RNA, 19 nt, Artificial Sequence
  Description of Artificial Sequence: Synthetic oligonucleotide
  Sense strand starting at position 1049 SEQ ID NO: 3304
ggacacauucccuaguucu

SEQ ID NO: 256829 - RNA, 19 nt, Artificial Sequence
  Description of Artificial Sequence: Synthetic oligonucleotide
  Antisense strand to SEQ ID NO: 256828
agaacuagggaaugugucc

SEQ ID NO: 256830 - RNA, 19 nt, Artificial Sequence
  Description of Artificial Sequence: Synthetic oligonucleotide
  Sense strand starting at position 1128 SEQ ID NO: 3304
agauguagccaacacgaua

SEQ ID NO: 256831 - RNA, 19 nt, Artificial Sequence
  Description of Artificial Sequence: Synthetic oligonucleotide
  Antisense strand to SEQ ID NO: 256830
uaucguguuggcuacaucu

SEQ ID NO: 256832 - RNA, 19 nt, Artificial Sequence
  Description of Artificial Sequence: Synthetic oligonucleotide
  Sense strand starting at position 1141 SEQ ID NO: 3304
acgauaggaacagguuaau

SEQ ID NO: 256833 - RNA, 19 nt, Artificial Sequence
  Description of Artificial Sequence: Synthetic oligonucleotide
  Antisense strand to SEQ ID NO: 256832
auuaaccuguuccuaucgu

SEQ ID NO: 256834 - RNA, 19 nt, Artificial Sequence
  Description of Artificial Sequence: Synthetic oligonucleotide
  Sense strand starting at position 1764 SEQ ID NO: 3304
ugcguuagacuucuuugca

SEQ ID NO: 256835 - RNA, 19 nt, Artificial Sequence
  Description of Artificial Sequence: Synthetic oligonucleotide
  Antisense strand to SEQ ID NO: 256834
ugcaaagaagucuaacgca

SEQ ID NO: 256836 - RNA, 19 nt, Artificial Sequence
  Description of Artificial Sequence: Synthetic oligonucleotide
  Sense strand starting at position 1818 SEQ ID NO: 3304
gucacugcuccauaaauag

SEQ ID NO: 256837 - RNA, 19 nt, Artificial Sequence
  Description of Artificial Sequence: Synthetic oligonucleotide
  Antisense strand to SEQ ID NO: 256836
cuauuuauggagcagugac

SEQ ID NO: 256838 - RNA, 19 nt, Artificial Sequence
  Description of Artificial Sequence: Synthetic oligonucleotide
  Sense strand starting at position 1916 SEQ ID NO: 3304
ggaaauuaugcauguggag

SEQ ID NO: 256839 - RNA, 19 nt, Artificial Sequence
  Description of Artificial Sequence: Synthetic oligonucleotide
  Antisense strand to SEQ ID NO: 256838
cuccacaugcauaauuucc

SEQ ID NO: 256840 - RNA, 19 nt, Artificial Sequence
  Description of Artificial Sequence: Synthetic oligonucleotide
  Sense strand starting at position 2052 SEQ ID NO: 3304
aguuuaggaucucuaggaa

SEQ ID NO: 256841 - RNA, 19 nt, Artificial Sequence
  Description of Artificial Sequence: Synthetic oligonucleotide
  Antisense strand to SEQ ID NO: 256840
uuccuagagauccuaaacu

SEQ ID NO: 256842 - RNA, 19 nt, Artificial Sequence
  Description of Artificial Sequence: Synthetic oligonucleotide
  Sense strand starting at position 2096 SEQ ID NO: 3304
uuaguugaaucuguugaaa

SEQ ID NO: 256843 - RNA, 19 nt, Artificial Sequence
  Description of Artificial Sequence: Synthetic oligonucleotide
  Antisense strand to SEQ ID NO: 256842
uuucaacagauucaacuaa

SEQ ID NO: 256844 - RNA, 19 nt, Artificial Sequence
  Description of Artificial Sequence: Synthetic oligonucleotide
  Sense strand starting at position 2120 SEQ ID NO: 3304
aaacuaauaugagagggaa

SEQ ID NO: 256845 - RNA, 19 nt, Artificial Sequence
  Description of Artificial Sequence: Synthetic oligonucleotide
  Antisense strand to SEQ ID NO: 256844
uucccucucauauuaguuu

SEQ ID NO: 256846 - RNA, 19 nt, Artificial Sequence
  Description of Artificial Sequence: Synthetic oligonucleotide
  Sense strand starting at position 2247 SEQ ID NO: 3304
aggaauuugcuguguaucu

SEQ ID NO: 256847 - RNA, 19 nt, Artificial Sequence
  Description of Artificial Sequence: Synthetic oligonucleotide
  Antisense strand to SEQ ID NO: 256846
agauacacagcaaauuccu

SEQ ID NO: 256848 - RNA, 19 nt, Artificial Sequence
  Description of Artificial Sequence: Synthetic oligonucleotide
  Sense strand starting at position 2248 SEQ ID NO: 3304
ggaauuugcuguguaucuu

SEQ ID NO: 256849 - RNA, 19 nt, Artificial Sequence
  Description of Artificial Sequence: Synthetic oligonucleotide
  Antisense strand to SEQ ID NO: 256848
aagauacacagcaaauucc

SEQ ID NO: 256850 - RNA, 19 nt, Artificial Sequence
  Description of Artificial Sequence: Synthetic oligonucleotide
  Sense strand starting at position 2302 SEQ ID NO: 3304
ugcagagaauucccaacuu

SEQ ID NO: 256851 - RNA, 19 nt, Artificial Sequence
  Description of Artificial Sequence: Synthetic oligonucleotide
  Antisense strand to SEQ ID NO: 256850
aaguugggaauucucugca

SEQ ID NO: 256852 - RNA, 19 nt, Artificial Sequence
  Description of Artificial Sequence: Synthetic oligonucleotide
  Sense strand starting at position 2582 SEQ ID NO: 3304
ggcauagaaucuucucuuu

SEQ ID NO: 256853 - RNA, 19 nt, Artificial Sequence
  Description of Artificial Sequence: Synthetic oligonucleotide
  Antisense strand to SEQ ID NO: 256852
aaagagaagauucuaugcc

SEQ ID NO: 256854 - RNA, 19 nt, Artificial Sequence
  Description of Artificial Sequence: Synthetic oligonucleotide
  Sense strand starting at position 2633 SEQ ID NO: 3304
cuuggaugaguggagcaau

SEQ ID NO: 256855 - RNA, 19 nt, Artificial Sequence
  Description of Artificial Sequence: Synthetic oligonucleotide
  Antisense strand to SEQ ID NO: 256854
auugcuccacucauccaag

SEQ ID NO: 256856 - RNA, 19 nt, Artificial Sequence
  Description of Artificial Sequence: Synthetic oligonucleotide
  Sense strand starting at position 2636 SEQ ID NO: 3304
ggaugaguggagcaaucuu

SEQ ID NO: 256857 - RNA, 19 nt, Artificial Sequence
  Description of Artificial Sequence: Synthetic oligonucleotide
  Antisense strand to SEQ ID NO: 256856
aagauugcuccacucaucc

SEQ ID NO: 256858 - RNA, 19 nt, Artificial Sequence
  Description of Artificial Sequence: Synthetic oligonucleotide
  Sense strand starting at position 2644 SEQ ID NO: 3304
ggagcaaucuugucauaaa

SEQ ID NO: 256859 - RNA, 19 nt, Artificial Sequence
  Description of Artificial Sequence: Synthetic oligonucleotide
  Antisense strand to SEQ ID NO: 256858
uuuaugacaagauugcucc

SEQ ID NO: 256860 - RNA, 19 nt, Artificial Sequence
  Description of Artificial Sequence: Synthetic oligonucleotide
  Sense strand starting at position 3055 SEQ ID NO: 3304
gcccaacuggcugaucuua

SEQ ID NO: 256861 - RNA, 19 nt, Artificial Sequence
  Description of Artificial Sequence: Synthetic oligonucleotide
  Antisense strand to SEQ ID NO: 256860
uaagaucagccaguugggc

SEQ ID NO: 256862 - RNA, 19 nt, Artificial Sequence
  Description of Artificial Sequence: Synthetic oligonucleotide
  Sense strand starting at position 3112 SEQ ID NO: 3304
cuauuaugacagcacaagu

SEQ ID NO: 256863 - RNA, 19 nt, Artificial Sequence
  Description of Artificial Sequence: Synthetic oligonucleotide
  Antisense strand to SEQ ID NO: 256862
acuugugcugucauaauag

SEQ ID NO: 256864 - RNA, 19 nt, Artificial Sequence
  Description of Artificial Sequence: Synthetic oligonucleotide
  Sense strand starting at position 3238 SEQ ID NO: 3304
ugaugaaacuugcuuuacu

SEQ ID NO: 256865 - RNA, 19 nt, Artificial Sequence
  Description of Artificial Sequence: Synthetic oligonucleotide
  Antisense strand to SEQ ID NO: 256864
aguaaagcaaguuucauca

SEQ ID NO: 256866 - RNA, 19 nt, Artificial Sequence
  Description of Artificial Sequence: Synthetic oligonucleotide
  Sense strand starting at position 3275 SEQ ID NO: 3304
ggagcaaguugaucauggu

SEQ ID NO: 256867 - RNA, 19 nt, Artificial Sequence
  Description of Artificial Sequence: Synthetic oligonucleotide
  Antisense strand to SEQ ID NO: 256866
accaugaucaacuugcucc

SEQ ID NO: 256868 - RNA, 19 nt, Artificial Sequence
  Description of Artificial Sequence: Synthetic oligonucleotide
  Sense strand starting at position 3350 SEQ ID NO: 3304
ugucaugagccacaguaau

SEQ ID NO: 256869 - RNA, 19 nt, Artificial Sequence
  Description of Artificial Sequence: Synthetic oligonucleotide
  Antisense strand to SEQ ID NO: 256868
auuacuguggcucaugaca

SEQ ID NO: 256870 - RNA, 19 nt, Artificial Sequence
  Description of Artificial Sequence: Synthetic oligonucleotide
  Sense strand starting at position 3476 SEQ ID NO: 3304
uuaucauauuugcagagaa

SEQ ID NO: 256871 - RNA, 19 nt, Artificial Sequence
  Description of Artificial Sequence: Synthetic oligonucleotide
  Antisense strand to SEQ ID NO: 256870
uucucugcaaauaugauaa

SEQ ID NO: 256872 - RNA, 19 nt, Artificial Sequence
  Description of Artificial Sequence: Synthetic oligonucleotide
  Sense strand starting at position 3663 SEQ ID NO: 3304
ggaugacguccaggaaucu

SEQ ID NO: 256873 - RNA, 19 nt, Artificial Sequence
  Description of Artificial Sequence: Synthetic oligonucleotide
  Antisense strand to SEQ ID NO: 256872
agauuccuggacgucaucc

SEQ ID NO: 256874 - RNA, 19 nt, Artificial Sequence
  Description of Artificial Sequence: Synthetic oligonucleotide
  Sense strand starting at position 3781 SEQ ID NO: 3304
ucuuguauucuugacuaua

SEQ ID NO: 256875 - RNA, 19 nt, Artificial Sequence
  Description of Artificial Sequence: Synthetic oligonucleotide
  Antisense strand to SEQ ID NO: 256874
uauagucaagaauacaaga

SEQ ID NO: 256876 - RNA, 19 nt, Artificial Sequence
  Description of Artificial Sequence: Synthetic oligonucleotide
  Sense strand starting at position 3884 SEQ ID NO: 3304
cuuauuugaugacaagaua

SEQ ID NO: 256877 - RNA, 19 nt, Artificial Sequence
  Description of Artificial Sequence: Synthetic oligonucleotide
  Antisense strand to SEQ ID NO: 256876
uaucuugucaucaaauaag

SEQ ID NO: 256878 - RNA, 19 nt, Artificial Sequence
  Description of Artificial Sequence: Synthetic oligonucleotide
  Sense strand starting at position 54 SEQ ID NO: 3305
ccggccuacuuauuuauua

SEQ ID NO: 256879 - RNA, 19 nt, Artificial Sequence
  Description of Artificial Sequence: Synthetic oligonucleotide
  Antisense strand to SEQ ID NO: 256878
uaauaaauaaguaggccgg

SEQ ID NO: 256880 - RNA, 19 nt, Artificial Sequence
  Description of Artificial Sequence: Synthetic oligonucleotide
  Sense strand starting at position 263 SEQ ID NO: 3305
acguacuuauggguaagua

SEQ ID NO: 256881 - RNA, 19 nt, Artificial Sequence
  Description of Artificial Sequence: Synthetic oligonucleotide
  Antisense strand to SEQ ID NO: 256880
uacuuacccauaaguacgu

SEQ ID NO: 256882 - RNA, 19 nt, Artificial Sequence
  Description of Artificial Sequence: Synthetic oligonucleotide
  Sense strand starting at position 264 SEQ ID NO: 3305
cguacuuauggguaaguac

SEQ ID NO: 256883 - RNA, 19 nt, Artificial Sequence
  Description of Artificial Sequence: Synthetic oligonucleotide
  Antisense strand to SEQ ID NO: 256882
guacuuacccauaaguacg

SEQ ID NO: 256884 - RNA, 19 nt, Artificial Sequence
  Description of Artificial Sequence: Synthetic oligonucleotide
  Sense strand starting at position 267 SEQ ID NO: 3305
acuuauggguaaguacaau

SEQ ID NO: 256885 - RNA, 19 nt, Artificial Sequence
  Description of Artificial Sequence: Synthetic oligonucleotide
  Antisense strand to SEQ ID NO: 256884
auuguacuuacccauaagu

SEQ ID NO: 256886 - RNA, 19 nt, Artificial Sequence
  Description of Artificial Sequence: Synthetic oligonucleotide
  Sense strand starting at position 273 SEQ ID NO: 3305
ggguaaguacaauggguuu

SEQ ID NO: 256887 - RNA, 19 nt, Artificial Sequence
  Description of Artificial Sequence: Synthetic oligonucleotide
  Antisense strand to SEQ ID NO: 256886
aaacccauuguacuuaccc

SEQ ID NO: 256888 - RNA, 19 nt, Artificial Sequence
  Description of Artificial Sequence: Synthetic oligonucleotide
  Sense strand starting at position 607 SEQ ID NO: 3305
ggguuucugacacauguug

SEQ ID NO: 256889 - RNA, 19 nt, Artificial Sequence
  Description of Artificial Sequence: Synthetic oligonucleotide
  Antisense strand to SEQ ID NO: 256888
caacaugugucagaaaccc

SEQ ID NO: 256890 - RNA, 19 nt, Artificial Sequence
  Description of Artificial Sequence: Synthetic oligonucleotide
  Sense strand starting at position 609 SEQ ID NO: 3305
guuucugacacauguugga

SEQ ID NO: 256891 - RNA, 19 nt, Artificial Sequence
  Description of Artificial Sequence: Synthetic oligonucleotide
  Antisense strand to SEQ ID NO: 256890
uccaacaugugucagaaac

SEQ ID NO: 256892 - RNA, 19 nt, Artificial Sequence
  Description of Artificial Sequence: Synthetic oligonucleotide
  Sense strand starting at position 791 SEQ ID NO: 3305
guguucugugacuaacuuu

SEQ ID NO: 256893 - RNA, 19 nt, Artificial Sequence
  Description of Artificial Sequence: Synthetic oligonucleotide
  Antisense strand to SEQ ID NO: 256892
aaaguuagucacagaacac

SEQ ID NO: 256894 - RNA, 19 nt, Artificial Sequence
  Description of Artificial Sequence: Synthetic oligonucleotide
  Sense strand starting at position 794 SEQ ID NO: 3305
uucugugacuaacuuugua

SEQ ID NO: 256895 - RNA, 19 nt, Artificial Sequence
  Description of Artificial Sequence: Synthetic oligonucleotide
  Antisense strand to SEQ ID NO: 256894
uacaaaguuagucacagaa

SEQ ID NO: 256896 - RNA, 19 nt, Artificial Sequence
  Description of Artificial Sequence: Synthetic oligonucleotide
  Sense strand starting at position 836 SEQ ID NO: 3305
ccuacuauagagcaguauu

SEQ ID NO: 256897 - RNA, 19 nt, Artificial Sequence
  Description of Artificial Sequence: Synthetic oligonucleotide
  Antisense strand to SEQ ID NO: 256896
aauacugcucuauaguagg

SEQ ID NO: 256898 - RNA, 19 nt, Artificial Sequence
  Description of Artificial Sequence: Synthetic oligonucleotide
  Sense strand starting at position 839 SEQ ID NO: 3305
acuauagagcaguauuauu

SEQ ID NO: 256899 - RNA, 19 nt, Artificial Sequence
  Description of Artificial Sequence: Synthetic oligonucleotide
  Antisense strand to SEQ ID NO: 256898
aauaauacugcucuauagu

SEQ ID NO: 256900 - RNA, 19 nt, Artificial Sequence
  Description of Artificial Sequence: Synthetic oligonucleotide
  Sense strand starting at position 846 SEQ ID NO: 3305
agcaguauuauuugaggcu

SEQ ID NO: 256901 - RNA, 19 nt, Artificial Sequence
  Description of Artificial Sequence: Synthetic oligonucleotide
  Antisense strand to SEQ ID NO: 256900
agccucaaauaauacugcu

SEQ ID NO: 256902 - RNA, 19 nt, Artificial Sequence
  Description of Artificial Sequence: Synthetic oligonucleotide
  Sense strand starting at position 971 SEQ ID NO: 3305
gcugacuagaguggagaau

SEQ ID NO: 256903 - RNA, 19 nt, Artificial Sequence
  Description of Artificial Sequence: Synthetic oligonucleotide
  Antisense strand to SEQ ID NO: 256902
auucuccacucuagucagc

SEQ ID NO: 256904 - RNA, 19 nt, Artificial Sequence
  Description of Artificial Sequence: Synthetic oligonucleotide
  Sense strand starting at position 1009 SEQ ID NO: 3305
ugcuacucaugacuacaga

SEQ ID NO: 256905 - RNA, 19 nt, Artificial Sequence
  Description of Artificial Sequence: Synthetic oligonucleotide
  Antisense strand to SEQ ID NO: 256904
ucuguagucaugaguagca

SEQ ID NO: 256906 - RNA, 19 nt, Artificial Sequence
  Description of Artificial Sequence: Synthetic oligonucleotide
  Sense strand starting at position 1059 SEQ ID NO: 3305
ggaggugaagucuaagcuu

SEQ ID NO: 256907 - RNA, 19 nt, Artificial Sequence
  Description of Artificial Sequence: Synthetic oligonucleotide
  Antisense strand to SEQ ID NO: 256906
aagcuuagacuucaccucc

SEQ ID NO: 256908 - RNA, 19 nt, Artificial Sequence
  Description of Artificial Sequence: Synthetic oligonucleotide
  Sense strand starting at position 1062 SEQ ID NO: 3305
ggugaagucuaagcuuaca

SEQ ID NO: 256909 - RNA, 19 nt, Artificial Sequence
  Description of Artificial Sequence: Synthetic oligonucleotide
  Antisense strand to SEQ ID NO: 256908
uguaagcuuagacuucacc

SEQ ID NO: 256910 - RNA, 19 nt, Artificial Sequence
  Description of Artificial Sequence: Synthetic oligonucleotide
  Sense strand starting at position 1258 SEQ ID NO: 3305
agaauuaaaucccaggauc

SEQ ID NO: 256911 - RNA, 19 nt, Artificial Sequence
  Description of Artificial Sequence: Synthetic oligonucleotide
  Antisense strand to SEQ ID NO: 256910
gauccugggauuuaauucu

SEQ ID NO: 256912 - RNA, 19 nt, Artificial Sequence
  Description of Artificial Sequence: Synthetic oligonucleotide
  Sense strand starting at position 1269 SEQ ID NO: 3305
ccaggaucagucuaaguuu

SEQ ID NO: 256913 - RNA, 19 nt, Artificial Sequence
  Description of Artificial Sequence: Synthetic oligonucleotide
  Antisense strand to SEQ ID NO: 256912
aaacuuagacugauccugg

SEQ ID NO: 256914 - RNA, 19 nt, Artificial Sequence
  Description of Artificial Sequence: Synthetic oligonucleotide
  Sense strand starting at position 1370 SEQ ID NO: 3305
ugucuuccugucuaacuaa

SEQ ID NO: 256915 - RNA, 19 nt, Artificial Sequence
  Description of Artificial Sequence: Synthetic oligonucleotide
  Antisense strand to SEQ ID NO: 256914
uuaguuagacaggaagaca

SEQ ID NO: 256916 - RNA, 19 nt, Artificial Sequence
  Description of Artificial Sequence: Synthetic oligonucleotide
  Sense strand starting at position 1499 SEQ ID NO: 3305
acuuuagugucuuuaaacu

SEQ ID NO: 256917 - RNA, 19 nt, Artificial Sequence
  Description of Artificial Sequence: Synthetic oligonucleotide
  Antisense strand to SEQ ID NO: 256916
aguuuaaagacacuaaagu

SEQ ID NO: 256918 - RNA, 19 nt, Artificial Sequence
  Description of Artificial Sequence: Synthetic oligonucleotide
  Sense strand starting at position 1536 SEQ ID NO: 3305
acgaccaagaguuguauaa

SEQ ID NO: 256919 - RNA, 19 nt, Artificial Sequence
  Description of Artificial Sequence: Synthetic oligonucleotide
  Antisense strand to SEQ ID NO: 256918
uuauacaacucuuggucgu

SEQ ID NO: 256920 - RNA, 19 nt, Artificial Sequence
  Description of Artificial Sequence: Synthetic oligonucleotide
  Sense strand starting at position 1579 SEQ ID NO: 3305
uuugcugcucuaugaauga

SEQ ID NO: 256921 - RNA, 19 nt, Artificial Sequence
  Description of Artificial Sequence: Synthetic oligonucleotide
  Antisense strand to SEQ ID NO: 256920
ucauucauagagcagcaaa

SEQ ID NO: 256922 - RNA, 19 nt, Artificial Sequence
  Description of Artificial Sequence: Synthetic oligonucleotide
  Sense strand starting at position 1583 SEQ ID NO: 3305
cugcucuaugaaugauaaa

SEQ ID NO: 256923 - RNA, 19 nt, Artificial Sequence
  Description of Artificial Sequence: Synthetic oligonucleotide
  Antisense strand to SEQ ID NO: 256922
uuuaucauucauagagcag

SEQ ID NO: 256924 - RNA, 19 nt, Artificial Sequence
  Description of Artificial Sequence: Synthetic oligonucleotide
  Sense strand starting at position 1626 SEQ ID NO: 3305
gccaucagacuuuaagcaa

SEQ ID NO: 256925 - RNA, 19 nt, Artificial Sequence
  Description of Artificial Sequence: Synthetic oligonucleotide
  Antisense strand to SEQ ID NO: 256924
uugcuuaaagucugauggc

SEQ ID NO: 256926 - RNA, 19 nt, Artificial Sequence
  Description of Artificial Sequence: Synthetic oligonucleotide
  Sense strand starting at position 1903 SEQ ID NO: 3305
uggcaaacagcucaacaau

SEQ ID NO: 256927 - RNA, 19 nt, Artificial Sequence
  Description of Artificial Sequence: Synthetic oligonucleotide
  Antisense strand to SEQ ID NO: 256926
auuguugagcuguuugcca

SEQ ID NO: 256928 - RNA, 19 nt, Artificial Sequence
  Description of Artificial Sequence: Synthetic oligonucleotide
  Sense strand starting at position 1938 SEQ ID NO: 3305
ugguucucccaucagcauu

SEQ ID NO: 256929 - RNA, 19 nt, Artificial Sequence
  Description of Artificial Sequence: Synthetic oligonucleotide
  Antisense strand to SEQ ID NO: 256928
aaugcugaugggagaacca

SEQ ID NO: 256930 - RNA, 19 nt, Artificial Sequence
  Description of Artificial Sequence: Synthetic oligonucleotide
  Sense strand starting at position 1953 SEQ ID NO: 3305
cauucuuuauggccugaga

SEQ ID NO: 256931 - RNA, 19 nt, Artificial Sequence
  Description of Artificial Sequence: Synthetic oligonucleotide
  Antisense strand to SEQ ID NO: 256930
ucucaggccauaaagaaug

SEQ ID NO: 256932 - RNA, 19 nt, Artificial Sequence
  Description of Artificial Sequence: Synthetic oligonucleotide
  Sense strand starting at position 1955 SEQ ID NO: 3305
uucuuuauggccugagaag

SEQ ID NO: 256933 - RNA, 19 nt, Artificial Sequence
  Description of Artificial Sequence: Synthetic oligonucleotide
  Antisense strand to SEQ ID NO: 256932
cuucucaggccauaaagaa

SEQ ID NO: 256934 - RNA, 19 nt, Artificial Sequence
  Description of Artificial Sequence: Synthetic oligonucleotide
  Sense strand starting at position 2109 SEQ ID NO: 3305
uauauugaagguugaucau

SEQ ID NO: 256935 - RNA, 19 nt, Artificial Sequence
  Description of Artificial Sequence: Synthetic oligonucleotide
  Antisense strand to SEQ ID NO: 256934
augaucaaccuucaauaua

SEQ ID NO: 256936 - RNA, 19 nt, Artificial Sequence
  Description of Artificial Sequence: Synthetic oligonucleotide
  Sense strand starting at position 2112 SEQ ID NO: 3305
auugaagguugaucaugua

SEQ ID NO: 256937 - RNA, 19 nt, Artificial Sequence
  Description of Artificial Sequence: Synthetic oligonucleotide
  Antisense strand to SEQ ID NO: 256936
uacaugaucaaccuucaau

SEQ ID NO: 256938 - RNA, 19 nt, Artificial Sequence
  Description of Artificial Sequence: Synthetic oligonucleotide
  Sense strand starting at position 2198 SEQ ID NO: 3305
accauaguguuuguacaaa

SEQ ID NO: 256939 - RNA, 19 nt, Artificial Sequence
  Description of Artificial Sequence: Synthetic oligonucleotide
  Antisense strand to SEQ ID NO: 256938
uuuguacaaacacuauggu

SEQ ID NO: 256940 - RNA, 19 nt, Artificial Sequence
  Description of Artificial Sequence: Synthetic oligonucleotide
  Sense strand starting at position 2209 SEQ ID NO: 3305
uguacaaaccauuaucagu

SEQ ID NO: 256941 - RNA, 19 nt, Artificial Sequence
  Description of Artificial Sequence: Synthetic oligonucleotide
  Antisense strand to SEQ ID NO: 256940
acugauaaugguuuguaca

SEQ ID NO: 256942 - RNA, 19 nt, Artificial Sequence
  Description of Artificial Sequence: Synthetic oligonucleotide
  Sense strand starting at position 2217 SEQ ID NO: 3305
ccauuaucaguuggaggca

SEQ ID NO: 256943 - RNA, 19 nt, Artificial Sequence
  Description of Artificial Sequence: Synthetic oligonucleotide
  Antisense strand to SEQ ID NO: 256942
ugccuccaacugauaaugg

SEQ ID NO: 256944 - RNA, 19 nt, Artificial Sequence
  Description of Artificial Sequence: Synthetic oligonucleotide
  Sense strand starting at position 2386 SEQ ID NO: 3305
ugcauaacgcaauaauuau

SEQ ID NO: 256945 - RNA, 19 nt, Artificial Sequence
  Description of Artificial Sequence: Synthetic oligonucleotide
  Antisense strand to SEQ ID NO: 256944
auaauuauugcguuaugca

SEQ ID NO: 256946 - RNA, 19 nt, Artificial Sequence
  Description of Artificial Sequence: Synthetic oligonucleotide
  Sense strand starting at position 2408 SEQ ID NO: 3305
uguguugcuggguauacaa

SEQ ID NO: 256947 - RNA, 19 nt, Artificial Sequence
  Description of Artificial Sequence: Synthetic oligonucleotide
  Antisense strand to SEQ ID NO: 256946
uuguauacccagcaacaca

SEQ ID NO: 256948 - RNA, 19 nt, Artificial Sequence
  Description of Artificial Sequence: Synthetic oligonucleotide
  Sense strand starting at position 2410 SEQ ID NO: 3305
uguugcuggguauacaaua

SEQ ID NO: 256949 - RNA, 19 nt, Artificial Sequence
  Description of Artificial Sequence: Synthetic oligonucleotide
  Antisense strand to SEQ ID NO: 256948
uauuguauacccagcaaca

SEQ ID NO: 256950 - RNA, 19 nt, Artificial Sequence
  Description of Artificial Sequence: Synthetic oligonucleotide
  Sense strand starting at position 2492 SEQ ID NO: 3305
aaagaaagguguuuaugac

SEQ ID NO: 256951 - RNA, 19 nt, Artificial Sequence
  Description of Artificial Sequence: Synthetic oligonucleotide
  Antisense strand to SEQ ID NO: 256950
gucauaaacaccuuucuuu

SEQ ID NO: 256952 - RNA, 19 nt, Artificial Sequence
  Description of Artificial Sequence: Synthetic oligonucleotide
  Sense strand starting at position 3612 SEQ ID NO: 3305
cugaauauguugccuacaa

SEQ ID NO: 256953 - RNA, 19 nt, Artificial Sequence
  Description of Artificial Sequence: Synthetic oligonucleotide
  Antisense strand to SEQ ID NO: 256952
uuguaggcaacauauucag

SEQ ID NO: 256954 - RNA, 19 nt, Artificial Sequence
  Description of Artificial Sequence: Synthetic oligonucleotide
  Sense strand starting at position 3613 SEQ ID NO: 3305
ugaauauguugccuacaac

SEQ ID NO: 256955 - RNA, 19 nt, Artificial Sequence
  Description of Artificial Sequence: Synthetic oligonucleotide
  Antisense strand to SEQ ID NO: 256954
guuguaggcaacauauuca

SEQ ID NO: 256956 - RNA, 19 nt, Artificial Sequence
  Description of Artificial Sequence: Synthetic oligonucleotide
  Sense strand starting at position 3616 SEQ ID NO: 3305
auauguugccuacaacaga

SEQ ID NO: 256957 - RNA, 19 nt, Artificial Sequence
  Description of Artificial Sequence: Synthetic oligonucleotide
  Antisense strand to SEQ ID NO: 256956
ucuguuguaggcaacauau

SEQ ID NO: 256958 - RNA, 19 nt, Artificial Sequence
  Description of Artificial Sequence: Synthetic oligonucleotide
  Sense strand starting at position 194 SEQ ID NO: 3306
ugagaucucagcugaaagg

SEQ ID NO: 256959 - RNA, 19 nt, Artificial Sequence
  Description of Artificial Sequence: Synthetic oligonucleotide
  Antisense strand to SEQ ID NO: 256958
ccuuucagcugagaucuca

SEQ ID NO: 256960 - RNA, 19 nt, Artificial Sequence
  Description of Artificial Sequence: Synthetic oligonucleotide
  Sense strand starting at position 360 SEQ ID NO: 3306
agaaacacuuaggaagauu

SEQ ID NO: 256961 - RNA, 19 nt, Artificial Sequence
  Description of Artificial Sequence: Synthetic oligonucleotide
  Antisense strand to SEQ ID NO: 256960
aaucuuccuaaguguuucu

SEQ ID NO: 256962 - RNA, 19 nt, Artificial Sequence
  Description of Artificial Sequence: Synthetic oligonucleotide
  Sense strand starting at position 485 SEQ ID NO: 3306
ugaugagauccacgauggu

SEQ ID NO: 256963 - RNA, 19 nt, Artificial Sequence
  Description of Artificial Sequence: Synthetic oligonucleotide
  Antisense strand to SEQ ID NO: 256962
accaucguggaucucauca

SEQ ID NO: 256964 - RNA, 19 nt, Artificial Sequence
  Description of Artificial Sequence: Synthetic oligonucleotide
  Sense strand starting at position 488 SEQ ID NO: 3306
ugagauccacgauggugaa

SEQ ID NO: 256965 - RNA, 19 nt, Artificial Sequence
  Description of Artificial Sequence: Synthetic oligonucleotide
  Antisense strand to SEQ ID NO: 256964
uucaccaucguggaucuca

SEQ ID NO: 256966 - RNA, 19 nt, Artificial Sequence
  Description of Artificial Sequence: Synthetic oligonucleotide
  Sense strand starting at position 489 SEQ ID NO: 3306
gagauccacgauggugaaa

SEQ ID NO: 256967 - RNA, 19 nt, Artificial Sequence
  Description of Artificial Sequence: Synthetic oligonucleotide
  Antisense strand to SEQ ID NO: 256966
uuucaccaucguggaucuc

SEQ ID NO: 256968 - RNA, 19 nt, Artificial Sequence
  Description of Artificial Sequence: Synthetic oligonucleotide
  Sense strand starting at position 544 SEQ ID NO: 3306
cuggcugcacuguauuaaa

SEQ ID NO: 256969 - RNA, 19 nt, Artificial Sequence
  Description of Artificial Sequence: Synthetic oligonucleotide
  Antisense strand to SEQ ID NO: 256968
uuuaauacagugcagccag

SEQ ID NO: 256970 - RNA, 19 nt, Artificial Sequence
  Description of Artificial Sequence: Synthetic oligonucleotide
  Sense strand starting at position 603 SEQ ID NO: 3306
cugcuuaaacaugggcaaa

SEQ ID NO: 256971 - RNA, 19 nt, Artificial Sequence
  Description of Artificial Sequence: Synthetic oligonucleotide
  Antisense strand to SEQ ID NO: 256970
uuugcccauguuuaagcag

SEQ ID NO: 256972 - RNA, 19 nt, Artificial Sequence
  Description of Artificial Sequence: Synthetic oligonucleotide
  Sense strand starting at position 801 SEQ ID NO: 3306
aguugaguuggccagggaa

SEQ ID NO: 256973 - RNA, 19 nt, Artificial Sequence
  Description of Artificial Sequence: Synthetic oligonucleotide
  Antisense strand to SEQ ID NO: 256972
uucccuggccaacucaacu

SEQ ID NO: 256974 - RNA, 19 nt, Artificial Sequence
  Description of Artificial Sequence: Synthetic oligonucleotide
  Sense strand starting at position 803 SEQ ID NO: 3306
uugaguuggccagggaaga

SEQ ID NO: 256975 - RNA, 19 nt, Artificial Sequence
  Description of Artificial Sequence: Synthetic oligonucleotide
  Antisense strand to SEQ ID NO: 256974
ucuucccuggccaacucaa

SEQ ID NO: 256976 - RNA, 19 nt, Artificial Sequence
  Description of Artificial Sequence: Synthetic oligonucleotide
  Sense strand starting at position 1057 SEQ ID NO: 3306
ggaugaauaaggcgcuaaa

SEQ ID NO: 256977 - RNA, 19 nt, Artificial Sequence
  Description of Artificial Sequence: Synthetic oligonucleotide
  Antisense strand to SEQ ID NO: 256976
uuuagcgccuuauucaucc

SEQ ID NO: 256978 - RNA, 19 nt, Artificial Sequence
  Description of Artificial Sequence: Synthetic oligonucleotide
  Sense strand starting at position 1078 SEQ ID NO: 3306
cugagagcugucgauggaa

SEQ ID NO: 256979 - RNA, 19 nt, Artificial Sequence
  Description of Artificial Sequence: Synthetic oligonucleotide
  Antisense strand to SEQ ID NO: 256978
uuccaucgacagcucucag

SEQ ID NO: 256980 - RNA, 19 nt, Artificial Sequence
  Description of Artificial Sequence: Synthetic oligonucleotide
  Sense strand starting at position 1080 SEQ ID NO: 3306
gagagcugucgauggaaga

SEQ ID NO: 256981 - RNA, 19 nt, Artificial Sequence
  Description of Artificial Sequence: Synthetic oligonucleotide
  Antisense strand to SEQ ID NO: 256980
ucuuccaucgacagcucuc

SEQ ID NO: 256982 - RNA, 19 nt, Artificial Sequence
  Description of Artificial Sequence: Synthetic oligonucleotide
  Sense strand starting at position 1081 SEQ ID NO: 3306
agagcugucgauggaagau

SEQ ID NO: 256983 - RNA, 19 nt, Artificial Sequence
  Description of Artificial Sequence: Synthetic oligonucleotide
  Antisense strand to SEQ ID NO: 256982
aucuuccaucgacagcucu

SEQ ID NO: 256984 - RNA, 19 nt, Artificial Sequence
  Description of Artificial Sequence: Synthetic oligonucleotide
  Sense strand starting at position 2298 SEQ ID NO: 3306
aaaguuggaccuuggucua

SEQ ID NO: 256985 - RNA, 19 nt, Artificial Sequence
  Description of Artificial Sequence: Synthetic oligonucleotide
  Antisense strand to SEQ ID NO: 256984
uagaccaagguccaacuuu

SEQ ID NO: 256986 - RNA, 19 nt, Artificial Sequence
  Description of Artificial Sequence: Synthetic oligonucleotide
  Sense strand starting at position 2393 SEQ ID NO: 3306
agcagcuacauguaggaua

SEQ ID NO: 256987 - RNA, 19 nt, Artificial Sequence
  Description of Artificial Sequence: Synthetic oligonucleotide
  Antisense strand to SEQ ID NO: 256986
uauccuacauguagcugcu

SEQ ID NO: 256988 - RNA, 19 nt, Artificial Sequence
  Description of Artificial Sequence: Synthetic oligonucleotide
  Sense strand starting at position 2606 SEQ ID NO: 3306
gugaaagcuccgggaggaa

SEQ ID NO: 256989 - RNA, 19 nt, Artificial Sequence
  Description of Artificial Sequence: Synthetic oligonucleotide
  Antisense strand to SEQ ID NO: 256988
uuccucccggagcuuucac

SEQ ID NO: 256990 - RNA, 19 nt, Artificial Sequence
  Description of Artificial Sequence: Synthetic oligonucleotide
  Sense strand starting at position 2676 SEQ ID NO: 3306
gaacuaaagcagugauuga

SEQ ID NO: 256991 - RNA, 19 nt, Artificial Sequence
  Description of Artificial Sequence: Synthetic oligonucleotide
  Antisense strand to SEQ ID NO: 256990
ucaaucacugcuuuaguuc

SEQ ID NO: 256992 - RNA, 19 nt, Artificial Sequence
  Description of Artificial Sequence: Synthetic oligonucleotide
  Sense strand starting at position 2692 SEQ ID NO: 3306
ugaccucccucuucgaaga

SEQ ID NO: 256993 - RNA, 19 nt, Artificial Sequence
  Description of Artificial Sequence: Synthetic oligonucleotide
  Antisense strand to SEQ ID NO: 256992
ucuucgaagagggagguca

SEQ ID NO: 256994 - RNA, 19 nt, Artificial Sequence
  Description of Artificial Sequence: Synthetic oligonucleotide
  Sense strand starting at position 2789 SEQ ID NO: 3306
gaucuauuaccgcaccuga

SEQ ID NO: 256995 - RNA, 19 nt, Artificial Sequence
  Description of Artificial Sequence: Synthetic oligonucleotide
  Antisense strand to SEQ ID NO: 256994
ucaggugcgguaauagauc

SEQ ID NO: 256996 - RNA, 19 nt, Artificial Sequence
  Description of Artificial Sequence: Synthetic oligonucleotide
  Sense strand starting at position 2883 SEQ ID NO: 3306
ccagauugcgcgucuuaca

SEQ ID NO: 256997 - RNA, 19 nt, Artificial Sequence
  Description of Artificial Sequence: Synthetic oligonucleotide
  Antisense strand to SEQ ID NO: 256996
uguaagacgcgcaaucugg

SEQ ID NO: 256998 - RNA, 19 nt, Artificial Sequence
  Description of Artificial Sequence: Synthetic oligonucleotide
  Sense strand starting at position 2884 SEQ ID NO: 3306
cagauugcgcgucuuacau

SEQ ID NO: 256999 - RNA, 19 nt, Artificial Sequence
  Description of Artificial Sequence: Synthetic oligonucleotide
  Antisense strand to SEQ ID NO: 256998
auguaagacgcgcaaucug

SEQ ID NO: 257000 - RNA, 19 nt, Artificial Sequence
  Description of Artificial Sequence: Synthetic oligonucleotide
  Sense strand starting at position 2930 SEQ ID NO: 3306
uguuaauacuugcccaaga

SEQ ID NO: 257001 - RNA, 19 nt, Artificial Sequence
  Description of Artificial Sequence: Synthetic oligonucleotide
  Antisense strand to SEQ ID NO: 257000
ucuugggcaaguauuaaca

SEQ ID NO: 257002 - RNA, 19 nt, Artificial Sequence
  Description of Artificial Sequence: Synthetic oligonucleotide
  Sense strand starting at position 2931 SEQ ID NO: 3306
guuaauacuugcccaagaa

SEQ ID NO: 257003 - RNA, 19 nt, Artificial Sequence
  Description of Artificial Sequence: Synthetic oligonucleotide
  Antisense strand to SEQ ID NO: 257002
uucuugggcaaguauuaac

SEQ ID NO: 257004 - RNA, 19 nt, Artificial Sequence
  Description of Artificial Sequence: Synthetic oligonucleotide
  Sense strand starting at position 2956 SEQ ID NO: 3306
aggguaauggaagguuauu

SEQ ID NO: 257005 - RNA, 19 nt, Artificial Sequence
  Description of Artificial Sequence: Synthetic oligonucleotide
  Antisense strand to SEQ ID NO: 257004
aauaaccuuccauuacccu

SEQ ID NO: 257006 - RNA, 19 nt, Artificial Sequence
  Description of Artificial Sequence: Synthetic oligonucleotide
  Sense strand starting at position 3142 SEQ ID NO: 3306
cugagaaacuaggucucau

SEQ ID NO: 257007 - RNA, 19 nt, Artificial Sequence
  Description of Artificial Sequence: Synthetic oligonucleotide
  Antisense strand to SEQ ID NO: 257006
augagaccuaguuucucag

SEQ ID NO: 257008 - RNA, 19 nt, Artificial Sequence
  Description of Artificial Sequence: Synthetic oligonucleotide
  Sense strand starting at position 3197 SEQ ID NO: 3306
agagcaaacuacuuagagu

SEQ ID NO: 257009 - RNA, 19 nt, Artificial Sequence
  Description of Artificial Sequence: Synthetic oligonucleotide
  Antisense strand to SEQ ID NO: 257008
acucuaaguaguuugcucu

SEQ ID NO: 257010 - RNA, 19 nt, Artificial Sequence
  Description of Artificial Sequence: Synthetic oligonucleotide
  Sense strand starting at position 3300 SEQ ID NO: 3306
uacuuugaguaucuguuga

SEQ ID NO: 257011 - RNA, 19 nt, Artificial Sequence
  Description of Artificial Sequence: Synthetic oligonucleotide
  Antisense strand to SEQ ID NO: 257010
ucaacagauacucaaagua

SEQ ID NO: 257012 - RNA, 19 nt, Artificial Sequence
  Description of Artificial Sequence: Synthetic oligonucleotide
  Sense strand starting at position 3305 SEQ ID NO: 3306
ugaguaucuguugacuaaa

SEQ ID NO: 257013 - RNA, 19 nt, Artificial Sequence
  Description of Artificial Sequence: Synthetic oligonucleotide
  Antisense strand to SEQ ID NO: 257012
uuuagucaacagauacuca

SEQ ID NO: 257014 - RNA, 19 nt, Artificial Sequence
  Description of Artificial Sequence: Synthetic oligonucleotide
  Sense strand starting at position 3307 SEQ ID NO: 3306
aguaucuguugacuaaauu

SEQ ID NO: 257015 - RNA, 19 nt, Artificial Sequence
  Description of Artificial Sequence: Synthetic oligonucleotide
  Antisense strand to SEQ ID NO: 257014
aauuuagucaacagauacu

SEQ ID NO: 257016 - RNA, 19 nt, Artificial Sequence
  Description of Artificial Sequence: Synthetic oligonucleotide
  Sense strand starting at position 3308 SEQ ID NO: 3306
guaucuguugacuaaauug

SEQ ID NO: 257017 - RNA, 19 nt, Artificial Sequence
  Description of Artificial Sequence: Synthetic oligonucleotide
  Antisense strand to SEQ ID NO: 257016
caauuuagucaacagauac

SEQ ID NO: 257018 - RNA, 19 nt, Artificial Sequence
  Description of Artificial Sequence: Synthetic oligonucleotide
  Sense strand starting at position 3361 SEQ ID NO: 3306
guagccuuucaguugugua

SEQ ID NO: 257019 - RNA, 19 nt, Artificial Sequence
  Description of Artificial Sequence: Synthetic oligonucleotide
  Antisense strand to SEQ ID NO: 257018
uacacaacugaaaggcuac

SEQ ID NO: 257020 - RNA, 19 nt, Artificial Sequence
  Description of Artificial Sequence: Synthetic oligonucleotide
  Sense strand starting at position 3429 SEQ ID NO: 3306
aaauuauugccuuaggagu

SEQ ID NO: 257021 - RNA, 19 nt, Artificial Sequence
  Description of Artificial Sequence: Synthetic oligonucleotide
  Antisense strand to SEQ ID NO: 257020
acuccuaaggcaauaauuu

SEQ ID NO: 257022 - RNA, 19 nt, Artificial Sequence
  Description of Artificial Sequence: Synthetic oligonucleotide
  Sense strand starting at position 3444 SEQ ID NO: 3306
gagugcauaucauugaaua

SEQ ID NO: 257023 - RNA, 19 nt, Artificial Sequence
  Description of Artificial Sequence: Synthetic oligonucleotide
  Antisense strand to SEQ ID NO: 257022
uauucaaugauaugcacuc

SEQ ID NO: 257024 - RNA, 19 nt, Artificial Sequence
  Description of Artificial Sequence: Synthetic oligonucleotide
  Sense strand starting at position 3445 SEQ ID NO: 3306
agugcauaucauugaauau

SEQ ID NO: 257025 - RNA, 19 nt, Artificial Sequence
  Description of Artificial Sequence: Synthetic oligonucleotide
  Antisense strand to SEQ ID NO: 257024
auauucaaugauaugcacu

SEQ ID NO: 257026 - RNA, 19 nt, Artificial Sequence
  Description of Artificial Sequence: Synthetic oligonucleotide
  Sense strand starting at position 3460 SEQ ID NO: 3306
auaucuucucgauggaucu

SEQ ID NO: 257027 - RNA, 19 nt, Artificial Sequence
  Description of Artificial Sequence: Synthetic oligonucleotide
  Antisense strand to SEQ ID NO: 257026
agauccaucgagaagauau

SEQ ID NO: 257028 - RNA, 19 nt, Artificial Sequence
  Description of Artificial Sequence: Synthetic oligonucleotide
  Sense strand starting at position 3461 SEQ ID NO: 3306
uaucuucucgauggaucua

SEQ ID NO: 257029 - RNA, 19 nt, Artificial Sequence
  Description of Artificial Sequence: Synthetic oligonucleotide
  Antisense strand to SEQ ID NO: 257028
uagauccaucgagaagaua

SEQ ID NO: 257030 - RNA, 19 nt, Artificial Sequence
  Description of Artificial Sequence: Synthetic oligonucleotide
  Sense strand starting at position 3485 SEQ ID NO: 3306
aggcucugguaucuugaga

SEQ ID NO: 257031 - RNA, 19 nt, Artificial Sequence
  Description of Artificial Sequence: Synthetic oligonucleotide
  Antisense strand to SEQ ID NO: 257030
ucucaagauaccagagccu

SEQ ID NO: 257032 - RNA, 19 nt, Artificial Sequence
  Description of Artificial Sequence: Synthetic oligonucleotide
  Sense strand starting at position 3601 SEQ ID NO: 3306
uguccacauuuggagaauu

SEQ ID NO: 257033 - RNA, 19 nt, Artificial Sequence
  Description of Artificial Sequence: Synthetic oligonucleotide
  Antisense strand to SEQ ID NO: 257032
aauucuccaaauguggaca

SEQ ID NO: 257034 - RNA, 19 nt, Artificial Sequence
  Description of Artificial Sequence: Synthetic oligonucleotide
  Sense strand starting at position 3611 SEQ ID NO: 3306
uggagaauuguuuggcaug

SEQ ID NO: 257035 - RNA, 19 nt, Artificial Sequence
  Description of Artificial Sequence: Synthetic oligonucleotide
  Antisense strand to SEQ ID NO: 257034
caugccaaacaauucucca

SEQ ID NO: 257036 - RNA, 19 nt, Artificial Sequence
  Description of Artificial Sequence: Synthetic oligonucleotide
  Sense strand starting at position 3634 SEQ ID NO: 3306
ggccaagcgcaagaauaau

SEQ ID NO: 257037 - RNA, 19 nt, Artificial Sequence
  Description of Artificial Sequence: Synthetic oligonucleotide
  Antisense strand to SEQ ID NO: 257036
auuauucuugcgcuuggcc

SEQ ID NO: 257038 - RNA, 19 nt, Artificial Sequence
  Description of Artificial Sequence: Synthetic oligonucleotide
  Sense strand starting at position 394 SEQ ID NO: 3308
ucuccagauuugcuaguuu

SEQ ID NO: 257039 - RNA, 19 nt, Artificial Sequence
  Description of Artificial Sequence: Synthetic oligonucleotide
  Antisense strand to SEQ ID NO: 257038
aaacuagcaaaucuggaga

SEQ ID NO: 257040 - RNA, 19 nt, Artificial Sequence
  Description of Artificial Sequence: Synthetic oligonucleotide
  Sense strand starting at position 427 SEQ ID NO: 3308
guggaggguggguguuaaa

SEQ ID NO: 257041 - RNA, 19 nt, Artificial Sequence
  Description of Artificial Sequence: Synthetic oligonucleotide
  Antisense strand to SEQ ID NO: 257040
uuuaacacccacccuccac

SEQ ID NO: 257042 - RNA, 19 nt, Artificial Sequence
  Description of Artificial Sequence: Synthetic oligonucleotide
  Sense strand starting at position 546 SEQ ID NO: 3308
cagguuauuccuggaauuc

SEQ ID NO: 257043 - RNA, 19 nt, Artificial Sequence
  Description of Artificial Sequence: Synthetic oligonucleotide
  Antisense strand to SEQ ID NO: 257042
gaauuccaggaauaaccug

SEQ ID NO: 257044 - RNA, 19 nt, Artificial Sequence
  Description of Artificial Sequence: Synthetic oligonucleotide
  Sense strand starting at position 680 SEQ ID NO: 3308
aaaguauucccagguaacg

SEQ ID NO: 257045 - RNA, 19 nt, Artificial Sequence
  Description of Artificial Sequence: Synthetic oligonucleotide
  Antisense strand to SEQ ID NO: 257044
cguuaccugggaauacuuu

SEQ ID NO: 257046 - RNA, 19 nt, Artificial Sequence
  Description of Artificial Sequence: Synthetic oligonucleotide
  Sense strand starting at position 768 SEQ ID NO: 3308
uggccaaagcagugguuua

SEQ ID NO: 257047 - RNA, 19 nt, Artificial Sequence
  Description of Artificial Sequence: Synthetic oligonucleotide
  Antisense strand to SEQ ID NO: 257046
uaaaccacugcuuuggcca

SEQ ID NO: 257048 - RNA, 19 nt, Artificial Sequence
  Description of Artificial Sequence: Synthetic oligonucleotide
  Sense strand starting at position 779 SEQ ID NO: 3308
gugguuuaggaucgucaga

SEQ ID NO: 257049 - RNA, 19 nt, Artificial Sequence
  Description of Artificial Sequence: Synthetic oligonucleotide
  Antisense strand to SEQ ID NO: 257048
ucugacgauccuaaaccac

SEQ ID NO: 257050 - RNA, 19 nt, Artificial Sequence
  Description of Artificial Sequence: Synthetic oligonucleotide
  Sense strand starting at position 916 SEQ ID NO: 3308
aaguaaagugcaugccuaa

SEQ ID NO: 257051 - RNA, 19 nt, Artificial Sequence
  Description of Artificial Sequence: Synthetic oligonucleotide
  Antisense strand to SEQ ID NO: 257050
uuaggcaugcacuuuacuu

SEQ ID NO: 257052 - RNA, 19 nt, Artificial Sequence
  Description of Artificial Sequence: Synthetic oligonucleotide
  Sense strand starting at position 928 SEQ ID NO: 3308
ugccuaagaguguagcuua

SEQ ID NO: 257053 - RNA, 19 nt, Artificial Sequence
  Description of Artificial Sequence: Synthetic oligonucleotide
  Antisense strand to SEQ ID NO: 257052
uaagcuacacucuuaggca

SEQ ID NO: 257054 - RNA, 19 nt, Artificial Sequence
  Description of Artificial Sequence: Synthetic oligonucleotide
  Sense strand starting at position 931 SEQ ID NO: 3308
cuaagaguguagcuuauuu

SEQ ID NO: 257055 - RNA, 19 nt, Artificial Sequence
  Description of Artificial Sequence: Synthetic oligonucleotide
  Antisense strand to SEQ ID NO: 257054
aaauaagcuacacucuuag

SEQ ID NO: 257056 - RNA, 19 nt, Artificial Sequence
  Description of Artificial Sequence: Synthetic oligonucleotide
  Sense strand starting at position 935 SEQ ID NO: 3308
gaguguagcuuauuuccuu

SEQ ID NO: 257057 - RNA, 19 nt, Artificial Sequence
  Description of Artificial Sequence: Synthetic oligonucleotide
  Antisense strand to SEQ ID NO: 257056
aaggaaauaagcuacacuc

SEQ ID NO: 257058 - RNA, 19 nt, Artificial Sequence
  Description of Artificial Sequence: Synthetic oligonucleotide
  Sense strand starting at position 994 SEQ ID NO: 3308
aauauaaacucggugugca

SEQ ID NO: 257059 - RNA, 19 nt, Artificial Sequence
  Description of Artificial Sequence: Synthetic oligonucleotide
  Antisense strand to SEQ ID NO: 257058
ugcacaccgaguuuauauu

SEQ ID NO: 257060 - RNA, 19 nt, Artificial Sequence
  Description of Artificial Sequence: Synthetic oligonucleotide
  Sense strand starting at position 995 SEQ ID NO: 3308
auauaaacucggugugcaa

SEQ ID NO: 257061 - RNA, 19 nt, Artificial Sequence
  Description of Artificial Sequence: Synthetic oligonucleotide
  Antisense strand to SEQ ID NO: 257060
uugcacaccgaguuuauau

SEQ ID NO: 257062 - RNA, 19 nt, Artificial Sequence
  Description of Artificial Sequence: Synthetic oligonucleotide
  Sense strand starting at position 2111 SEQ ID NO: 3308
aauauauucugaggagaga

SEQ ID NO: 257063 - RNA, 19 nt, Artificial Sequence
  Description of Artificial Sequence: Synthetic oligonucleotide
  Antisense strand to SEQ ID NO: 257062
ucucuccucagaauauauu

SEQ ID NO: 257064 - RNA, 19 nt, Artificial Sequence
  Description of Artificial Sequence: Synthetic oligonucleotide
  Sense strand starting at position 2716 SEQ ID NO: 3308
gcuaaaugugugguacggu

SEQ ID NO: 257065 - RNA, 19 nt, Artificial Sequence
  Description of Artificial Sequence: Synthetic oligonucleotide
  Antisense strand to SEQ ID NO: 257064
accguaccacacauuuagc

SEQ ID NO: 257066 - RNA, 19 nt, Artificial Sequence
  Description of Artificial Sequence: Synthetic oligonucleotide
  Sense strand starting at position 2748 SEQ ID NO: 3308
gugggauucgcugagcauc

SEQ ID NO: 257067 - RNA, 19 nt, Artificial Sequence
  Description of Artificial Sequence: Synthetic oligonucleotide
  Antisense strand to SEQ ID NO: 257066
gaugcucagcgaaucccac

SEQ ID NO: 257068 - RNA, 19 nt, Artificial Sequence
  Description of Artificial Sequence: Synthetic oligonucleotide
  Sense strand starting at position 2889 SEQ ID NO: 3308
ggagaucacuaaggaucaa

SEQ ID NO: 257069 - RNA, 19 nt, Artificial Sequence
  Description of Artificial Sequence: Synthetic oligonucleotide
  Antisense strand to SEQ ID NO: 257068
uugauccuuagugaucucc

SEQ ID NO: 257070 - RNA, 19 nt, Artificial Sequence
  Description of Artificial Sequence: Synthetic oligonucleotide
  Sense strand starting at position 2956 SEQ ID NO: 3308
cuuuaaugccagugaauca

SEQ ID NO: 257071 - RNA, 19 nt, Artificial Sequence
  Description of Artificial Sequence: Synthetic oligonucleotide
  Antisense strand to SEQ ID NO: 257070
ugauucacuggcauuaaag

SEQ ID NO: 257072 - RNA, 19 nt, Artificial Sequence
  Description of Artificial Sequence: Synthetic oligonucleotide
  Sense strand starting at position 3032 SEQ ID NO: 3308
ccugacagguguucucaaa

SEQ ID NO: 257073 - RNA, 19 nt, Artificial Sequence
  Description of Artificial Sequence: Synthetic oligonucleotide
  Antisense strand to SEQ ID NO: 257072
uuugagaacaccugucagg

SEQ ID NO: 257074 - RNA, 19 nt, Artificial Sequence
  Description of Artificial Sequence: Synthetic oligonucleotide
  Sense strand starting at position 3051 SEQ ID NO: 3308
acgugagugcuucaggcaa

SEQ ID NO: 257075 - RNA, 19 nt, Artificial Sequence
  Description of Artificial Sequence: Synthetic oligonucleotide
  Antisense strand to SEQ ID NO: 257074
uugccugaagcacucacgu

SEQ ID NO: 257076 - RNA, 19 nt, Artificial Sequence
  Description of Artificial Sequence: Synthetic oligonucleotide
  Sense strand starting at position 3117 SEQ ID NO: 3308
cugcaaugggccugagaau

SEQ ID NO: 257077 - RNA, 19 nt, Artificial Sequence
  Description of Artificial Sequence: Synthetic oligonucleotide
  Antisense strand to SEQ ID NO: 257076
auucucaggcccauugcag

SEQ ID NO: 257078 - RNA, 19 nt, Artificial Sequence
  Description of Artificial Sequence: Synthetic oligonucleotide
  Sense strand starting at position 3129 SEQ ID NO: 3308
ugagaaugugcauguguaa

SEQ ID NO: 257079 - RNA, 19 nt, Artificial Sequence
  Description of Artificial Sequence: Synthetic oligonucleotide
  Antisense strand to SEQ ID NO: 257078
uuacacaugcacauucuca

SEQ ID NO: 257080 - RNA, 19 nt, Artificial Sequence
  Description of Artificial Sequence: Synthetic oligonucleotide
  Sense strand starting at position 3146 SEQ ID NO: 3308
aaguucucaguguagcuaa

SEQ ID NO: 257081 - RNA, 19 nt, Artificial Sequence
  Description of Artificial Sequence: Synthetic oligonucleotide
  Antisense strand to SEQ ID NO: 257080
uuagcuacacugagaacuu

SEQ ID NO: 257082 - RNA, 19 nt, Artificial Sequence
  Description of Artificial Sequence: Synthetic oligonucleotide
  Sense strand starting at position 3157 SEQ ID NO: 3308
guagcuaacgucgcuguua

SEQ ID NO: 257083 - RNA, 19 nt, Artificial Sequence
  Description of Artificial Sequence: Synthetic oligonucleotide
  Antisense strand to SEQ ID NO: 257082
uaacagcgacguuagcuac

SEQ ID NO: 257084 - RNA, 19 nt, Artificial Sequence
  Description of Artificial Sequence: Synthetic oligonucleotide
  Sense strand starting at position 3168 SEQ ID NO: 3308
cgcuguuacagggaucacu

SEQ ID NO: 257085 - RNA, 19 nt, Artificial Sequence
  Description of Artificial Sequence: Synthetic oligonucleotide
  Antisense strand to SEQ ID NO: 257084
agugaucccuguaacagcg

SEQ ID NO: 257086 - RNA, 19 nt, Artificial Sequence
  Description of Artificial Sequence: Synthetic oligonucleotide
  Sense strand starting at position 3177 SEQ ID NO: 3308
agggaucacucguugacaa

SEQ ID NO: 257087 - RNA, 19 nt, Artificial Sequence
  Description of Artificial Sequence: Synthetic oligonucleotide
  Antisense strand to SEQ ID NO: 257086
uugucaacgagugaucccu

SEQ ID NO: 257088 - RNA, 19 nt, Artificial Sequence
  Description of Artificial Sequence: Synthetic oligonucleotide
  Sense strand starting at position 3178 SEQ ID NO: 3308
gggaucacucguugacaac

SEQ ID NO: 257089 - RNA, 19 nt, Artificial Sequence
  Description of Artificial Sequence: Synthetic oligonucleotide
  Antisense strand to SEQ ID NO: 257088
guugucaacgagugauccc

SEQ ID NO: 257090 - RNA, 19 nt, Artificial Sequence
  Description of Artificial Sequence: Synthetic oligonucleotide
  Sense strand starting at position 3179 SEQ ID NO: 3308
ggaucacucguugacaaca

SEQ ID NO: 257091 - RNA, 19 nt, Artificial Sequence
  Description of Artificial Sequence: Synthetic oligonucleotide
  Antisense strand to SEQ ID NO: 257090
uguugucaacgagugaucc

SEQ ID NO: 257092 - RNA, 19 nt, Artificial Sequence
  Description of Artificial Sequence: Synthetic oligonucleotide
  Sense strand starting at position 3291 SEQ ID NO: 3308
gcguugugccgagugcuuu

SEQ ID NO: 257093 - RNA, 19 nt, Artificial Sequence
  Description of Artificial Sequence: Synthetic oligonucleotide
  Antisense strand to SEQ ID NO: 257092
aaagcacucggcacaacgc

SEQ ID NO: 257094 - RNA, 19 nt, Artificial Sequence
  Description of Artificial Sequence: Synthetic oligonucleotide
  Sense strand starting at position 3336 SEQ ID NO: 3308
gaaggaauguuauccuccu

SEQ ID NO: 257095 - RNA, 19 nt, Artificial Sequence
  Description of Artificial Sequence: Synthetic oligonucleotide
  Antisense strand to SEQ ID NO: 257094
aggaggauaacauuccuuc

SEQ ID NO: 257096 - RNA, 19 nt, Artificial Sequence
  Description of Artificial Sequence: Synthetic oligonucleotide
  Sense strand starting at position 3376 SEQ ID NO: 3308
acugaaagauaaggaguau

SEQ ID NO: 257097 - RNA, 19 nt, Artificial Sequence
  Description of Artificial Sequence: Synthetic oligonucleotide
  Antisense strand to SEQ ID NO: 257096
auacuccuuaucuuucagu

SEQ ID NO: 257098 - RNA, 19 nt, Artificial Sequence
  Description of Artificial Sequence: Synthetic oligonucleotide
  Sense strand starting at position 3382 SEQ ID NO: 3308
agauaaggaguauguccaa

SEQ ID NO: 257099 - RNA, 19 nt, Artificial Sequence
  Description of Artificial Sequence: Synthetic oligonucleotide
  Antisense strand to SEQ ID NO: 257098
uuggacauacuccuuaucu

SEQ ID NO: 257100 - RNA, 19 nt, Artificial Sequence
  Description of Artificial Sequence: Synthetic oligonucleotide
  Sense strand starting at position 3385 SEQ ID NO: 3308
uaaggaguauguccaaauu

SEQ ID NO: 257101 - RNA, 19 nt, Artificial Sequence
  Description of Artificial Sequence: Synthetic oligonucleotide
  Antisense strand to SEQ ID NO: 257100
aauuuggacauacuccuua

SEQ ID NO: 257102 - RNA, 19 nt, Artificial Sequence
  Description of Artificial Sequence: Synthetic oligonucleotide
  Sense strand starting at position 3445 SEQ ID NO: 3308
agguuagccuguucccaaa

SEQ ID NO: 257103 - RNA, 19 nt, Artificial Sequence
  Description of Artificial Sequence: Synthetic oligonucleotide
  Antisense strand to SEQ ID NO: 257102
uuugggaacaggcuaaccu

SEQ ID NO: 257104 - RNA, 19 nt, Artificial Sequence
  Description of Artificial Sequence: Synthetic oligonucleotide
  Sense strand starting at position 3498 SEQ ID NO: 3308
ccagaauauguauagcacu

SEQ ID NO: 257105 - RNA, 19 nt, Artificial Sequence
  Description of Artificial Sequence: Synthetic oligonucleotide
  Antisense strand to SEQ ID NO: 257104
agugcuauacauauucugg

SEQ ID NO: 257106 - RNA, 19 nt, Artificial Sequence
  Description of Artificial Sequence: Synthetic oligonucleotide
  Sense strand starting at position 3527 SEQ ID NO: 3308
ccaacaguuugguuucuga

SEQ ID NO: 257107 - RNA, 19 nt, Artificial Sequence
  Description of Artificial Sequence: Synthetic oligonucleotide
  Antisense strand to SEQ ID NO: 257106
ucagaaaccaaacuguugg

SEQ ID NO: 257108 - RNA, 19 nt, Artificial Sequence
  Description of Artificial Sequence: Synthetic oligonucleotide
  Sense strand starting at position 3530 SEQ ID NO: 3308
acaguuugguuucugaaau

SEQ ID NO: 257109 - RNA, 19 nt, Artificial Sequence
  Description of Artificial Sequence: Synthetic oligonucleotide
  Antisense strand to SEQ ID NO: 257108
auuucagaaaccaaacugu

SEQ ID NO: 257110 - RNA, 19 nt, Artificial Sequence
  Description of Artificial Sequence: Synthetic oligonucleotide
  Sense strand starting at position 3555 SEQ ID NO: 3308
cuaugagaaucccugguaa

SEQ ID NO: 257111 - RNA, 19 nt, Artificial Sequence
  Description of Artificial Sequence: Synthetic oligonucleotide
  Antisense strand to SEQ ID NO: 257110
uuaccagggauucucauag

SEQ ID NO: 257112 - RNA, 19 nt, Artificial Sequence
  Description of Artificial Sequence: Synthetic oligonucleotide
  Sense strand starting at position 3599 SEQ ID NO: 3308
gguauccauuuguaaggaa

SEQ ID NO: 257113 - RNA, 19 nt, Artificial Sequence
  Description of Artificial Sequence: Synthetic oligonucleotide
  Antisense strand to SEQ ID NO: 257112
uuccuuacaaauggauacc

SEQ ID NO: 257114 - RNA, 19 nt, Artificial Sequence
  Description of Artificial Sequence: Synthetic oligonucleotide
  Sense strand starting at position 3682 SEQ ID NO: 3308
gcagcaaugucauuaucua

SEQ ID NO: 257115 - RNA, 19 nt, Artificial Sequence
  Description of Artificial Sequence: Synthetic oligonucleotide
  Antisense strand to SEQ ID NO: 257114
uagauaaugacauugcugc

SEQ ID NO: 257116 - RNA, 19 nt, Artificial Sequence
  Description of Artificial Sequence: Synthetic oligonucleotide
  Sense strand starting at position 3689 SEQ ID NO: 3308
ugucauuaucuaugagugu

SEQ ID NO: 257117 - RNA, 19 nt, Artificial Sequence
  Description of Artificial Sequence: Synthetic oligonucleotide
  Antisense strand to SEQ ID NO: 257116
acacucauagauaaugaca

SEQ ID NO: 257118 - RNA, 19 nt, Artificial Sequence
  Description of Artificial Sequence: Synthetic oligonucleotide
  Sense strand starting at position 28 SEQ ID NO: 3307
accauuuaauuuggcgaga

SEQ ID NO: 257119 - RNA, 19 nt, Artificial Sequence
  Description of Artificial Sequence: Synthetic oligonucleotide
  Antisense strand to SEQ ID NO: 257118
ucucgccaaauuaaauggu

SEQ ID NO: 257120 - RNA, 19 nt, Artificial Sequence
  Description of Artificial Sequence: Synthetic oligonucleotide
  Sense strand starting at position 30 SEQ ID NO: 3307
cauuuaauuuggcgagaaa

SEQ ID NO: 257121 - RNA, 19 nt, Artificial Sequence
  Description of Artificial Sequence: Synthetic oligonucleotide
  Antisense strand to SEQ ID NO: 257120
uuucucgccaaauuaaaug

SEQ ID NO: 257122 - RNA, 19 nt, Artificial Sequence
  Description of Artificial Sequence: Synthetic oligonucleotide
  Sense strand starting at position 67 SEQ ID NO: 3307
aaugacuggugcuuaaaca

SEQ ID NO: 257123 - RNA, 19 nt, Artificial Sequence
  Description of Artificial Sequence: Synthetic oligonucleotide
  Antisense strand to SEQ ID NO: 257122
uguuuaagcaccagucauu

SEQ ID NO: 257124 - RNA, 19 nt, Artificial Sequence
  Description of Artificial Sequence: Synthetic oligonucleotide
  Sense strand starting at position 68 SEQ ID NO: 3307
augacuggugcuuaaacaa

SEQ ID NO: 257125 - RNA, 19 nt, Artificial Sequence
  Description of Artificial Sequence: Synthetic oligonucleotide
  Antisense strand to SEQ ID NO: 257124
uuguuuaagcaccagucau

SEQ ID NO: 257126 - RNA, 19 nt, Artificial Sequence
  Description of Artificial Sequence: Synthetic oligonucleotide
  Sense strand starting at position 342 SEQ ID NO: 3307
aggcuagaagucuaggcua

SEQ ID NO: 257127 - RNA, 19 nt, Artificial Sequence
  Description of Artificial Sequence: Synthetic oligonucleotide
  Antisense strand to SEQ ID NO: 257126
uagccuagacuucuagccu

SEQ ID NO: 257128 - RNA, 19 nt, Artificial Sequence
  Description of Artificial Sequence: Synthetic oligonucleotide
  Sense strand starting at position 344 SEQ ID NO: 3307
gcuagaagucuaggcuaag

SEQ ID NO: 257129 - RNA, 19 nt, Artificial Sequence
  Description of Artificial Sequence: Synthetic oligonucleotide
  Antisense strand to SEQ ID NO: 257128
cuuagccuagacuucuagc

SEQ ID NO: 257130 - RNA, 19 nt, Artificial Sequence
  Description of Artificial Sequence: Synthetic oligonucleotide
  Sense strand starting at position 361 SEQ ID NO: 3307
aggagaggcguucaaguga

SEQ ID NO: 257131 - RNA, 19 nt, Artificial Sequence
  Description of Artificial Sequence: Synthetic oligonucleotide
  Antisense strand to SEQ ID NO: 257130
ucacuugaacgccucuccu

SEQ ID NO: 257132 - RNA, 19 nt, Artificial Sequence
  Description of Artificial Sequence: Synthetic oligonucleotide
  Sense strand starting at position 767 SEQ ID NO: 3307
ucuccagauuugcuaguuu

SEQ ID NO: 257133 - RNA, 19 nt, Artificial Sequence
  Description of Artificial Sequence: Synthetic oligonucleotide
  Antisense strand to SEQ ID NO: 257132
aaacuagcaaaucuggaga

SEQ ID NO: 257134 - RNA, 19 nt, Artificial Sequence
  Description of Artificial Sequence: Synthetic oligonucleotide
  Sense strand starting at position 800 SEQ ID NO: 3307
guggaggguggguguuaaa

SEQ ID NO: 257135 - RNA, 19 nt, Artificial Sequence
  Description of Artificial Sequence: Synthetic oligonucleotide
  Antisense strand to SEQ ID NO: 257134
uuuaacacccacccuccac

SEQ ID NO: 257136 - RNA, 19 nt, Artificial Sequence
  Description of Artificial Sequence: Synthetic oligonucleotide
  Sense strand starting at position 919 SEQ ID NO: 3307
cagguuauuccuggaauuc

SEQ ID NO: 257137 - RNA, 19 nt, Artificial Sequence
  Description of Artificial Sequence: Synthetic oligonucleotide
  Antisense strand to SEQ ID NO: 257136
gaauuccaggaauaaccug

SEQ ID NO: 257138 - RNA, 19 nt, Artificial Sequence
  Description of Artificial Sequence: Synthetic oligonucleotide
  Sense strand starting at position 1053 SEQ ID NO: 3307
aaaguauucccagguaacg

SEQ ID NO: 257139 - RNA, 19 nt, Artificial Sequence
  Description of Artificial Sequence: Synthetic oligonucleotide
  Antisense strand to SEQ ID NO: 257138
cguuaccugggaauacuuu

SEQ ID NO: 257140 - RNA, 19 nt, Artificial Sequence
  Description of Artificial Sequence: Synthetic oligonucleotide
  Sense strand starting at position 1152 SEQ ID NO: 3307
gugguuuaggaucgucaga

SEQ ID NO: 257141 - RNA, 19 nt, Artificial Sequence
  Description of Artificial Sequence: Synthetic oligonucleotide
  Antisense strand to SEQ ID NO: 257140
ucugacgauccuaaaccac

SEQ ID NO: 257142 - RNA, 19 nt, Artificial Sequence
  Description of Artificial Sequence: Synthetic oligonucleotide
  Sense strand starting at position 1289 SEQ ID NO: 3307
aaguaaagugcaugccuaa

SEQ ID NO: 257143 - RNA, 19 nt, Artificial Sequence
  Description of Artificial Sequence: Synthetic oligonucleotide
  Antisense strand to SEQ ID NO: 257142
uuaggcaugcacuuuacuu

SEQ ID NO: 257144 - RNA, 19 nt, Artificial Sequence
  Description of Artificial Sequence: Synthetic oligonucleotide
  Sense strand starting at position 1301 SEQ ID NO: 3307
ugccuaagaguguagcuua

SEQ ID NO: 257145 - RNA, 19 nt, Artificial Sequence
  Description of Artificial Sequence: Synthetic oligonucleotide
  Antisense strand to SEQ ID NO: 257144
uaagcuacacucuuaggca

SEQ ID NO: 257146 - RNA, 19 nt, Artificial Sequence
  Description of Artificial Sequence: Synthetic oligonucleotide
  Sense strand starting at position 1304 SEQ ID NO: 3307
cuaagaguguagcuuauuu

SEQ ID NO: 257147 - RNA, 19 nt, Artificial Sequence
  Description of Artificial Sequence: Synthetic oligonucleotide
  Antisense strand to SEQ ID NO: 257146
aaauaagcuacacucuuag

SEQ ID NO: 257148 - RNA, 19 nt, Artificial Sequence
  Description of Artificial Sequence: Synthetic oligonucleotide
  Sense strand starting at position 1308 SEQ ID NO: 3307
gaguguagcuuauuuccuu

SEQ ID NO: 257149 - RNA, 19 nt, Artificial Sequence
  Description of Artificial Sequence: Synthetic oligonucleotide
  Antisense strand to SEQ ID NO: 257148
aaggaaauaagcuacacuc

SEQ ID NO: 257150 - RNA, 19 nt, Artificial Sequence
  Description of Artificial Sequence: Synthetic oligonucleotide
  Sense strand starting at position 1367 SEQ ID NO: 3307
aauauaaacucggugugca

SEQ ID NO: 257151 - RNA, 19 nt, Artificial Sequence
  Description of Artificial Sequence: Synthetic oligonucleotide
  Antisense strand to SEQ ID NO: 257150
ugcacaccgaguuuauauu

SEQ ID NO: 257152 - RNA, 19 nt, Artificial Sequence
  Description of Artificial Sequence: Synthetic oligonucleotide
  Sense strand starting at position 1368 SEQ ID NO: 3307
auauaaacucggugugcaa

SEQ ID NO: 257153 - RNA, 19 nt, Artificial Sequence
  Description of Artificial Sequence: Synthetic oligonucleotide
  Antisense strand to SEQ ID NO: 257152
uugcacaccgaguuuauau

SEQ ID NO: 257154 - RNA, 19 nt, Artificial Sequence
  Description of Artificial Sequence: Synthetic oligonucleotide
  Sense strand starting at position 3089 SEQ ID NO: 3307
gcuaaaugugugguacggu

SEQ ID NO: 257155 - RNA, 19 nt, Artificial Sequence
  Description of Artificial Sequence: Synthetic oligonucleotide
  Antisense strand to SEQ ID NO: 257154
accguaccacacauuuagc

SEQ ID NO: 257156 - RNA, 19 nt, Artificial Sequence
  Description of Artificial Sequence: Synthetic oligonucleotide
  Sense strand starting at position 3121 SEQ ID NO: 3307
gugggauucgcugagcauc

SEQ ID NO: 257157 - RNA, 19 nt, Artificial Sequence
  Description of Artificial Sequence: Synthetic oligonucleotide
  Antisense strand to SEQ ID NO: 257156
gaugcucagcgaaucccac

SEQ ID NO: 257158 - RNA, 19 nt, Artificial Sequence
  Description of Artificial Sequence: Synthetic oligonucleotide
  Sense strand starting at position 3329 SEQ ID NO: 3307
cuuuaaugccagugaauca

SEQ ID NO: 257159 - RNA, 19 nt, Artificial Sequence
  Description of Artificial Sequence: Synthetic oligonucleotide
  Antisense strand to SEQ ID NO: 257158
ugauucacuggcauuaaag

SEQ ID NO: 257160 - RNA, 19 nt, Artificial Sequence
  Description of Artificial Sequence: Synthetic oligonucleotide
  Sense strand starting at position 3405 SEQ ID NO: 3307
ccugacagguguucucaaa

SEQ ID NO: 257161 - RNA, 19 nt, Artificial Sequence
  Description of Artificial Sequence: Synthetic oligonucleotide
  Antisense strand to SEQ ID NO: 257160
uuugagaacaccugucagg

SEQ ID NO: 257162 - RNA, 19 nt, Artificial Sequence
  Description of Artificial Sequence: Synthetic oligonucleotide
  Sense strand starting at position 3424 SEQ ID NO: 3307
acgugagugcuucaggcaa

SEQ ID NO: 257163 - RNA, 19 nt, Artificial Sequence
  Description of Artificial Sequence: Synthetic oligonucleotide
  Antisense strand to SEQ ID NO: 257162
uugccugaagcacucacgu

SEQ ID NO: 257164 - RNA, 19 nt, Artificial Sequence
  Description of Artificial Sequence: Synthetic oligonucleotide
  Sense strand starting at position 3490 SEQ ID NO: 3307
cugcaaugggccugagaau

SEQ ID NO: 257165 - RNA, 19 nt, Artificial Sequence
  Description of Artificial Sequence: Synthetic oligonucleotide
  Antisense strand to SEQ ID NO: 257164
auucucaggcccauugcag

SEQ ID NO: 257166 - RNA, 19 nt, Artificial Sequence
  Description of Artificial Sequence: Synthetic oligonucleotide
  Sense strand starting at position 3502 SEQ ID NO: 3307
ugagaaugugcauguguaa

SEQ ID NO: 257167 - RNA, 19 nt, Artificial Sequence
  Description of Artificial Sequence: Synthetic oligonucleotide
  Antisense strand to SEQ ID NO: 257166
uuacacaugcacauucuca

SEQ ID NO: 257168 - RNA, 19 nt, Artificial Sequence
  Description of Artificial Sequence: Synthetic oligonucleotide
  Sense strand starting at position 3519 SEQ ID NO: 3307
aaguucucaguguagcuaa

SEQ ID NO: 257169 - RNA, 19 nt, Artificial Sequence
  Description of Artificial Sequence: Synthetic oligonucleotide
  Antisense strand to SEQ ID NO: 257168
uuagcuacacugagaacuu

SEQ ID NO: 257170 - RNA, 19 nt, Artificial Sequence
  Description of Artificial Sequence: Synthetic oligonucleotide
  Sense strand starting at position 3530 SEQ ID NO: 3307
guagcuaacgucgcuguua

SEQ ID NO: 257171 - RNA, 19 nt, Artificial Sequence
  Description of Artificial Sequence: Synthetic oligonucleotide
  Antisense strand to SEQ ID NO: 257170
uaacagcgacguuagcuac

SEQ ID NO: 257172 - RNA, 19 nt, Artificial Sequence
  Description of Artificial Sequence: Synthetic oligonucleotide
  Sense strand starting at position 3541 SEQ ID NO: 3307
cgcuguuacagggaucacu

SEQ ID NO: 257173 - RNA, 19 nt, Artificial Sequence
  Description of Artificial Sequence: Synthetic oligonucleotide
  Antisense strand to SEQ ID NO: 257172
agugaucccuguaacagcg

SEQ ID NO: 257174 - RNA, 19 nt, Artificial Sequence
  Description of Artificial Sequence: Synthetic oligonucleotide
  Sense strand starting at position 3550 SEQ ID NO: 3307
agggaucacucguugacaa

SEQ ID NO: 257175 - RNA, 19 nt, Artificial Sequence
  Description of Artificial Sequence: Synthetic oligonucleotide
  Antisense strand to SEQ ID NO: 257174
uugucaacgagugaucccu

SEQ ID NO: 257176 - RNA, 19 nt, Artificial Sequence
  Description of Artificial Sequence: Synthetic oligonucleotide
  Sense strand starting at position 3551 SEQ ID NO: 3307
gggaucacucguugacaac

SEQ ID NO: 257177 - RNA, 19 nt, Artificial Sequence
  Description of Artificial Sequence: Synthetic oligonucleotide
  Antisense strand to SEQ ID NO: 257176
guugucaacgagugauccc

SEQ ID NO: 257178 - RNA, 19 nt, Artificial Sequence
  Description of Artificial Sequence: Synthetic oligonucleotide
  Sense strand starting at position 3552 SEQ ID NO: 3307
ggaucacucguugacaaca

SEQ ID NO: 257179 - RNA, 19 nt, Artificial Sequence
  Description of Artificial Sequence: Synthetic oligonucleotide
  Antisense strand to SEQ ID NO: 257178
uguugucaacgagugaucc

SEQ ID NO: 257180 - RNA, 19 nt, Artificial Sequence
  Description of Artificial Sequence: Synthetic oligonucleotide
  Sense strand starting at position 3709 SEQ ID NO: 3307
gaaggaauguuauccuccu

SEQ ID NO: 257181 - RNA, 19 nt, Artificial Sequence
  Description of Artificial Sequence: Synthetic oligonucleotide
  Antisense strand to SEQ ID NO: 257180
aggaggauaacauuccuuc

SEQ ID NO: 257182 - RNA, 19 nt, Artificial Sequence
  Description of Artificial Sequence: Synthetic oligonucleotide
  Sense strand starting at position 3755 SEQ ID NO: 3307
agauaaggaguauguccaa

SEQ ID NO: 257183 - RNA, 19 nt, Artificial Sequence
  Description of Artificial Sequence: Synthetic oligonucleotide
  Antisense strand to SEQ ID NO: 257182
uuggacauacuccuuaucu

SEQ ID NO: 257184 - RNA, 19 nt, Artificial Sequence
  Description of Artificial Sequence: Synthetic oligonucleotide
  Sense strand starting at position 3758 SEQ ID NO: 3307
uaaggaguauguccaaauu

SEQ ID NO: 257185 - RNA, 19 nt, Artificial Sequence
  Description of Artificial Sequence: Synthetic oligonucleotide
  Antisense strand to SEQ ID NO: 257184
aauuuggacauacuccuua

SEQ ID NO: 257186 - RNA, 19 nt, Artificial Sequence
  Description of Artificial Sequence: Synthetic oligonucleotide
  Sense strand starting at position 3818 SEQ ID NO: 3307
agguuagccuguucccaaa

SEQ ID NO: 257187 - RNA, 19 nt, Artificial Sequence
  Description of Artificial Sequence: Synthetic oligonucleotide
  Antisense strand to SEQ ID NO: 257186
uuugggaacaggcuaaccu

SEQ ID NO: 257188 - RNA, 19 nt, Artificial Sequence
  Description of Artificial Sequence: Synthetic oligonucleotide
  Sense strand starting at position 3871 SEQ ID NO: 3307
ccagaauauguauagcacu

SEQ ID NO: 257189 - RNA, 19 nt, Artificial Sequence
  Description of Artificial Sequence: Synthetic oligonucleotide
  Antisense strand to SEQ ID NO: 257188
agugcuauacauauucugg

SEQ ID NO: 257190 - RNA, 19 nt, Artificial Sequence
  Description of Artificial Sequence: Synthetic oligonucleotide
  Sense strand starting at position 3900 SEQ ID NO: 3307
ccaacaguuugguuucuga

SEQ ID NO: 257191 - RNA, 19 nt, Artificial Sequence
  Description of Artificial Sequence: Synthetic oligonucleotide
  Antisense strand to SEQ ID NO: 257190
ucagaaaccaaacuguugg

SEQ ID NO: 257192 - RNA, 19 nt, Artificial Sequence
  Description of Artificial Sequence: Synthetic oligonucleotide
  Sense strand starting at position 3903 SEQ ID NO: 3307
acaguuugguuucugaaau

SEQ ID NO: 257193 - RNA, 19 nt, Artificial Sequence
  Description of Artificial Sequence: Synthetic oligonucleotide
  Antisense strand to SEQ ID NO: 257192
auuucagaaaccaaacugu

SEQ ID NO: 257194 - RNA, 19 nt, Artificial Sequence
  Description of Artificial Sequence: Synthetic oligonucleotide
  Sense strand starting at position 3928 SEQ ID NO: 3307
cuaugagaaucccugguaa

SEQ ID NO: 257195 - RNA, 19 nt, Artificial Sequence
  Description of Artificial Sequence: Synthetic oligonucleotide
  Antisense strand to SEQ ID NO: 257194
uuaccagggauucucauag

SEQ ID NO: 257196 - RNA, 19 nt, Artificial Sequence
  Description of Artificial Sequence: Synthetic oligonucleotide
  Sense strand starting at position 3972 SEQ ID NO: 3307
gguauccauuuguaaggaa

SEQ ID NO: 257197 - RNA, 19 nt, Artificial Sequence
  Description of Artificial Sequence: Synthetic oligonucleotide
  Antisense strand to SEQ ID NO: 257196
uuccuuacaaauggauacc

SEQ ID NO: 257198 - RNA, 19 nt, Artificial Sequence
  Description of Artificial Sequence: Synthetic oligonucleotide
  Sense strand starting at position 48 SEQ ID NO: 3309
uuuggugagcuaugugaca

SEQ ID NO: 257199 - RNA, 19 nt, Artificial Sequence
  Description of Artificial Sequence: Synthetic oligonucleotide
  Antisense strand to SEQ ID NO: 257198
ugucacauagcucaccaaa

SEQ ID NO: 257200 - RNA, 19 nt, Artificial Sequence
  Description of Artificial Sequence: Synthetic oligonucleotide
  Sense strand starting at position 50 SEQ ID NO: 3309
uggugagcuaugugacaca

SEQ ID NO: 257201 - RNA, 19 nt, Artificial Sequence
  Description of Artificial Sequence: Synthetic oligonucleotide
  Antisense strand to SEQ ID NO: 257200
ugugucacauagcucacca

SEQ ID NO: 257202 - RNA, 19 nt, Artificial Sequence
  Description of Artificial Sequence: Synthetic oligonucleotide
  Sense strand starting at position 53 SEQ ID NO: 3309
ugagcuaugugacacagga

SEQ ID NO: 257203 - RNA, 19 nt, Artificial Sequence
  Description of Artificial Sequence: Synthetic oligonucleotide
  Antisense strand to SEQ ID NO: 257202
uccugugucacauagcuca

SEQ ID NO: 257204 - RNA, 19 nt, Artificial Sequence
  Description of Artificial Sequence: Synthetic oligonucleotide
  Sense strand starting at position 250 SEQ ID NO: 3309
acuguaaacuaaucugaug

SEQ ID NO: 257205 - RNA, 19 nt, Artificial Sequence
  Description of Artificial Sequence: Synthetic oligonucleotide
  Antisense strand to SEQ ID NO: 257204
caucagauuaguuuacagu

SEQ ID NO: 257206 - RNA, 19 nt, Artificial Sequence
  Description of Artificial Sequence: Synthetic oligonucleotide
  Sense strand starting at position 302 SEQ ID NO: 3309
gccaauaggccaugauuga

SEQ ID NO: 257207 - RNA, 19 nt, Artificial Sequence
  Description of Artificial Sequence: Synthetic oligonucleotide
  Antisense strand to SEQ ID NO: 257206
ucaaucauggccuauuggc

SEQ ID NO: 257208 - RNA, 19 nt, Artificial Sequence
  Description of Artificial Sequence: Synthetic oligonucleotide
  Sense strand starting at position 309 SEQ ID NO: 3309
ggccaugauugagcaaagu

SEQ ID NO: 257209 - RNA, 19 nt, Artificial Sequence
  Description of Artificial Sequence: Synthetic oligonucleotide
  Antisense strand to SEQ ID NO: 257208
acuuugcucaaucauggcc

SEQ ID NO: 257210 - RNA, 19 nt, Artificial Sequence
  Description of Artificial Sequence: Synthetic oligonucleotide
  Sense strand starting at position 452 SEQ ID NO: 3309
gccucuugugcgguagauc

SEQ ID NO: 257211 - RNA, 19 nt, Artificial Sequence
  Description of Artificial Sequence: Synthetic oligonucleotide
  Antisense strand to SEQ ID NO: 257210
gaucuaccgcacaagaggc

SEQ ID NO: 257212 - RNA, 19 nt, Artificial Sequence
  Description of Artificial Sequence: Synthetic oligonucleotide
  Sense strand starting at position 453 SEQ ID NO: 3309
ccucuugugcgguagaucu

SEQ ID NO: 257213 - RNA, 19 nt, Artificial Sequence
  Description of Artificial Sequence: Synthetic oligonucleotide
  Antisense strand to SEQ ID NO: 257212
agaucuaccgcacaagagg

SEQ ID NO: 257214 - RNA, 19 nt, Artificial Sequence
  Description of Artificial Sequence: Synthetic oligonucleotide
  Sense strand starting at position 479 SEQ ID NO: 3309
auuuacacgugcuuucuaa

SEQ ID NO: 257215 - RNA, 19 nt, Artificial Sequence
  Description of Artificial Sequence: Synthetic oligonucleotide
  Antisense strand to SEQ ID NO: 257214
uuagaaagcacguguaaau

SEQ ID NO: 257216 - RNA, 19 nt, Artificial Sequence
  Description of Artificial Sequence: Synthetic oligonucleotide
  Sense strand starting at position 533 SEQ ID NO: 3309
agcugacaaugaggucaua

SEQ ID NO: 257217 - RNA, 19 nt, Artificial Sequence
  Description of Artificial Sequence: Synthetic oligonucleotide
  Antisense strand to SEQ ID NO: 257216
uaugaccucauugucagcu

SEQ ID NO: 257218 - RNA, 19 nt, Artificial Sequence
  Description of Artificial Sequence: Synthetic oligonucleotide
  Sense strand starting at position 576 SEQ ID NO: 3309
agacauguuuauuaagagu

SEQ ID NO: 257219 - RNA, 19 nt, Artificial Sequence
  Description of Artificial Sequence: Synthetic oligonucleotide
  Antisense strand to SEQ ID NO: 257218
acucuuaauaaacaugucu

SEQ ID NO: 257220 - RNA, 19 nt, Artificial Sequence
  Description of Artificial Sequence: Synthetic oligonucleotide
  Sense strand starting at position 856 SEQ ID NO: 3309
cucugcacacguuauguua

SEQ ID NO: 257221 - RNA, 19 nt, Artificial Sequence
  Description of Artificial Sequence: Synthetic oligonucleotide
  Antisense strand to SEQ ID NO: 257220
uaacauaacgugugcagag

SEQ ID NO: 257222 - RNA, 19 nt, Artificial Sequence
  Description of Artificial Sequence: Synthetic oligonucleotide
  Sense strand starting at position 953 SEQ ID NO: 3309
guaagcacuuccuauggau

SEQ ID NO: 257223 - RNA, 19 nt, Artificial Sequence
  Description of Artificial Sequence: Synthetic oligonucleotide
  Antisense strand to SEQ ID NO: 257222
auccauaggaagugcuuac

SEQ ID NO: 257224 - RNA, 19 nt, Artificial Sequence
  Description of Artificial Sequence: Synthetic oligonucleotide
  Sense strand starting at position 957 SEQ ID NO: 3309
gcacuuccuauggauggua

SEQ ID NO: 257225 - RNA, 19 nt, Artificial Sequence
  Description of Artificial Sequence: Synthetic oligonucleotide
  Antisense strand to SEQ ID NO: 257224
uaccauccauaggaagugc

SEQ ID NO: 257226 - RNA, 19 nt, Artificial Sequence
  Description of Artificial Sequence: Synthetic oligonucleotide
  Sense strand starting at position 997 SEQ ID NO: 3309
acauuauaccaggguugua

SEQ ID NO: 257227 - RNA, 19 nt, Artificial Sequence
  Description of Artificial Sequence: Synthetic oligonucleotide
  Antisense strand to SEQ ID NO: 257226
uacaacccugguauaaugu

SEQ ID NO: 257228 - RNA, 19 nt, Artificial Sequence
  Description of Artificial Sequence: Synthetic oligonucleotide
  Sense strand starting at position 1007 SEQ ID NO: 3309
aggguuguagugcgauuua

SEQ ID NO: 257229 - RNA, 19 nt, Artificial Sequence
  Description of Artificial Sequence: Synthetic oligonucleotide
  Antisense strand to SEQ ID NO: 257228
uaaaucgcacuacaacccu

SEQ ID NO: 257230 - RNA, 19 nt, Artificial Sequence
  Description of Artificial Sequence: Synthetic oligonucleotide
  Sense strand starting at position 1045 SEQ ID NO: 3309
uaaagaguuccgcaagaug

SEQ ID NO: 257231 - RNA, 19 nt, Artificial Sequence
  Description of Artificial Sequence: Synthetic oligonucleotide
  Antisense strand to SEQ ID NO: 257230
caucuugcggaacucuuua

SEQ ID NO: 257232 - RNA, 19 nt, Artificial Sequence
  Description of Artificial Sequence: Synthetic oligonucleotide
  Sense strand starting at position 1202 SEQ ID NO: 3309
gcacuagccgcguucauua

SEQ ID NO: 257233 - RNA, 19 nt, Artificial Sequence
  Description of Artificial Sequence: Synthetic oligonucleotide
  Antisense strand to SEQ ID NO: 257232
uaaugaacgcggcuagugc

SEQ ID NO: 257234 - RNA, 19 nt, Artificial Sequence
  Description of Artificial Sequence: Synthetic oligonucleotide
  Sense strand starting at position 1257 SEQ ID NO: 3309
agccaaaucuauucggaaa

SEQ ID NO: 257235 - RNA, 19 nt, Artificial Sequence
  Description of Artificial Sequence: Synthetic oligonucleotide
  Antisense strand to SEQ ID NO: 257234
uuuccgaauagauuuggcu

SEQ ID NO: 257236 - RNA, 19 nt, Artificial Sequence
  Description of Artificial Sequence: Synthetic oligonucleotide
  Sense strand starting at position 1523 SEQ ID NO: 3309
gggagguaguuuggagaaa

SEQ ID NO: 257237 - RNA, 19 nt, Artificial Sequence
  Description of Artificial Sequence: Synthetic oligonucleotide
  Antisense strand to SEQ ID NO: 257236
uuucuccaaacuaccuccc

SEQ ID NO: 257238 - RNA, 19 nt, Artificial Sequence
  Description of Artificial Sequence: Synthetic oligonucleotide
  Sense strand starting at position 2319 SEQ ID NO: 3309
ugucucaucacaggaggaa

SEQ ID NO: 257239 - RNA, 19 nt, Artificial Sequence
  Description of Artificial Sequence: Synthetic oligonucleotide
  Antisense strand to SEQ ID NO: 257238
uuccuccugugaugagaca

SEQ ID NO: 257240 - RNA, 19 nt, Artificial Sequence
  Description of Artificial Sequence: Synthetic oligonucleotide
  Sense strand starting at position 2895 SEQ ID NO: 3309
agcuaacgaaaucgucuau

SEQ ID NO: 257241 - RNA, 19 nt, Artificial Sequence
  Description of Artificial Sequence: Synthetic oligonucleotide
  Antisense strand to SEQ ID NO: 257240
auagacgauuucguuagcu

SEQ ID NO: 257242 - RNA, 19 nt, Artificial Sequence
  Description of Artificial Sequence: Synthetic oligonucleotide
  Sense strand starting at position 2899 SEQ ID NO: 3309
aacgaaaucgucuauccac

SEQ ID NO: 257243 - RNA, 19 nt, Artificial Sequence
  Description of Artificial Sequence: Synthetic oligonucleotide
  Antisense strand to SEQ ID NO: 257242
guggauagacgauuucguu

SEQ ID NO: 257244 - RNA, 19 nt, Artificial Sequence
  Description of Artificial Sequence: Synthetic oligonucleotide
  Sense strand starting at position 2902 SEQ ID NO: 3309
gaaaucgucuauccacaga

SEQ ID NO: 257245 - RNA, 19 nt, Artificial Sequence
  Description of Artificial Sequence: Synthetic oligonucleotide
  Antisense strand to SEQ ID NO: 257244
ucuguggauagacgauuuc

SEQ ID NO: 257246 - RNA, 19 nt, Artificial Sequence
  Description of Artificial Sequence: Synthetic oligonucleotide
  Sense strand starting at position 2953 SEQ ID NO: 3309
cucccauugcaaggauaaa

SEQ ID NO: 257247 - RNA, 19 nt, Artificial Sequence
  Description of Artificial Sequence: Synthetic oligonucleotide
  Antisense strand to SEQ ID NO: 257246
uuuauccuugcaaugggag

SEQ ID NO: 257248 - RNA, 19 nt, Artificial Sequence
  Description of Artificial Sequence: Synthetic oligonucleotide
  Sense strand starting at position 3241 SEQ ID NO: 3309
agcccugauucccauggau

SEQ ID NO: 257249 - RNA, 19 nt, Artificial Sequence
  Description of Artificial Sequence: Synthetic oligonucleotide
  Antisense strand to SEQ ID NO: 257248
auccaugggaaucagggcu

SEQ ID NO: 257250 - RNA, 19 nt, Artificial Sequence
  Description of Artificial Sequence: Synthetic oligonucleotide
  Sense strand starting at position 3253 SEQ ID NO: 3309
cauggaugccuugagguca

SEQ ID NO: 257251 - RNA, 19 nt, Artificial Sequence
  Description of Artificial Sequence: Synthetic oligonucleotide
  Antisense strand to SEQ ID NO: 257250
ugaccucaaggcauccaug

SEQ ID NO: 257252 - RNA, 19 nt, Artificial Sequence
  Description of Artificial Sequence: Synthetic oligonucleotide
  Sense strand starting at position 3264 SEQ ID NO: 3309
ugaggucaccuuuguacca

SEQ ID NO: 257253 - RNA, 19 nt, Artificial Sequence
  Description of Artificial Sequence: Synthetic oligonucleotide
  Antisense strand to SEQ ID NO: 257252
ugguacaaaggugaccuca

SEQ ID NO: 257254 - RNA, 19 nt, Artificial Sequence
  Description of Artificial Sequence: Synthetic oligonucleotide
  Sense strand starting at position 3265 SEQ ID NO: 3309
gaggucaccuuuguaccaa

SEQ ID NO: 257255 - RNA, 19 nt, Artificial Sequence
  Description of Artificial Sequence: Synthetic oligonucleotide
  Antisense strand to SEQ ID NO: 257254
uugguacaaaggugaccuc

SEQ ID NO: 257256 - RNA, 19 nt, Artificial Sequence
  Description of Artificial Sequence: Synthetic oligonucleotide
  Sense strand starting at position 3317 SEQ ID NO: 3309
acacuaucgucauuuguuu

SEQ ID NO: 257257 - RNA, 19 nt, Artificial Sequence
  Description of Artificial Sequence: Synthetic oligonucleotide
  Antisense strand to SEQ ID NO: 257256
aaacaaaugacgauagugu

SEQ ID NO: 257258 - RNA, 19 nt, Artificial Sequence
  Description of Artificial Sequence: Synthetic oligonucleotide
  Sense strand starting at position 3338 SEQ ID NO: 3309
gugucugugucuccagacu

SEQ ID NO: 257259 - RNA, 19 nt, Artificial Sequence
  Description of Artificial Sequence: Synthetic oligonucleotide
  Antisense strand to SEQ ID NO: 257258
agucuggagacacagacac

SEQ ID NO: 257260 - RNA, 19 nt, Artificial Sequence
  Description of Artificial Sequence: Synthetic oligonucleotide
  Sense strand starting at position 3417 SEQ ID NO: 3309
gcaugugacacauagcaga

SEQ ID NO: 257261 - RNA, 19 nt, Artificial Sequence
  Description of Artificial Sequence: Synthetic oligonucleotide
  Antisense strand to SEQ ID NO: 257260
ucugcuaugugucacaugc

SEQ ID NO: 257262 - RNA, 19 nt, Artificial Sequence
  Description of Artificial Sequence: Synthetic oligonucleotide
  Sense strand starting at position 3428 SEQ ID NO: 3309
auagcagauucugagaaau

SEQ ID NO: 257263 - RNA, 19 nt, Artificial Sequence
  Description of Artificial Sequence: Synthetic oligonucleotide
  Antisense strand to SEQ ID NO: 257262
auuucucagaaucugcuau

SEQ ID NO: 257264 - RNA, 19 nt, Artificial Sequence
  Description of Artificial Sequence: Synthetic oligonucleotide
  Sense strand starting at position 3430 SEQ ID NO: 3309
agcagauucugagaaaugc

SEQ ID NO: 257265 - RNA, 19 nt, Artificial Sequence
  Description of Artificial Sequence: Synthetic oligonucleotide
  Antisense strand to SEQ ID NO: 257264
gcauuucucagaaucugcu

SEQ ID NO: 257266 - RNA, 19 nt, Artificial Sequence
  Description of Artificial Sequence: Synthetic oligonucleotide
  Sense strand starting at position 3438 SEQ ID NO: 3309
cugagaaaugcuuauguaa

SEQ ID NO: 257267 - RNA, 19 nt, Artificial Sequence
  Description of Artificial Sequence: Synthetic oligonucleotide
  Antisense strand to SEQ ID NO: 257266
uuacauaagcauuucucag

SEQ ID NO: 257268 - RNA, 19 nt, Artificial Sequence
  Description of Artificial Sequence: Synthetic oligonucleotide
  Sense strand starting at position 3440 SEQ ID NO: 3309
gagaaaugcuuauguaauu

SEQ ID NO: 257269 - RNA, 19 nt, Artificial Sequence
  Description of Artificial Sequence: Synthetic oligonucleotide
  Antisense strand to SEQ ID NO: 257268
aauuacauaagcauuucuc

SEQ ID NO: 257270 - RNA, 19 nt, Artificial Sequence
  Description of Artificial Sequence: Synthetic oligonucleotide
  Sense strand starting at position 3441 SEQ ID NO: 3309
agaaaugcuuauguaauug

SEQ ID NO: 257271 - RNA, 19 nt, Artificial Sequence
  Description of Artificial Sequence: Synthetic oligonucleotide
  Antisense strand to SEQ ID NO: 257270
caauuacauaagcauuucu

SEQ ID NO: 257272 - RNA, 19 nt, Artificial Sequence
  Description of Artificial Sequence: Synthetic oligonucleotide
  Sense strand starting at position 3445 SEQ ID NO: 3309
augcuuauguaauugaauc

SEQ ID NO: 257273 - RNA, 19 nt, Artificial Sequence
  Description of Artificial Sequence: Synthetic oligonucleotide
  Antisense strand to SEQ ID NO: 257272
gauucaauuacauaagcau

SEQ ID NO: 257274 - RNA, 19 nt, Artificial Sequence
  Description of Artificial Sequence: Synthetic oligonucleotide
  Sense strand starting at position 3562 SEQ ID NO: 3309
guacuaugcuacuauuaua

SEQ ID NO: 257275 - RNA, 19 nt, Artificial Sequence
  Description of Artificial Sequence: Synthetic oligonucleotide
  Antisense strand to SEQ ID NO: 257274
uauaauaguagcauaguac

SEQ ID NO: 257276 - RNA, 19 nt, Artificial Sequence
  Description of Artificial Sequence: Synthetic oligonucleotide
  Sense strand starting at position 3813 SEQ ID NO: 3309
uggugaacguuacuggauu

SEQ ID NO: 257277 - RNA, 19 nt, Artificial Sequence
  Description of Artificial Sequence: Synthetic oligonucleotide
  Antisense strand to SEQ ID NO: 257276
aauccaguaacguucacca

SEQ ID NO: 257278 - RNA, 19 nt, Artificial Sequence
  Description of Artificial Sequence: Synthetic oligonucleotide
  Sense strand starting at position 395 SEQ ID NO: 3310
aggacugagaagugugagu

SEQ ID NO: 257279 - RNA, 19 nt, Artificial Sequence
  Description of Artificial Sequence: Synthetic oligonucleotide
  Antisense strand to SEQ ID NO: 257278
acucacacuucucaguccu

SEQ ID NO: 257280 - RNA, 19 nt, Artificial Sequence
  Description of Artificial Sequence: Synthetic oligonucleotide
  Sense strand starting at position 397 SEQ ID NO: 3310
gacugagaagugugaguca

SEQ ID NO: 257281 - RNA, 19 nt, Artificial Sequence
  Description of Artificial Sequence: Synthetic oligonucleotide
  Antisense strand to SEQ ID NO: 257280
ugacucacacuucucaguc

SEQ ID NO: 257282 - RNA, 19 nt, Artificial Sequence
  Description of Artificial Sequence: Synthetic oligonucleotide
  Sense strand starting at position 408 SEQ ID NO: 3310
gugagucacugguucugaa

SEQ ID NO: 257283 - RNA, 19 nt, Artificial Sequence
  Description of Artificial Sequence: Synthetic oligonucleotide
  Antisense strand to SEQ ID NO: 257282
uucagaaccagugacucac

SEQ ID NO: 257284 - RNA, 19 nt, Artificial Sequence
  Description of Artificial Sequence: Synthetic oligonucleotide
  Sense strand starting at position 588 SEQ ID NO: 3310
ugucgaauuguuuaaauca

SEQ ID NO: 257285 - RNA, 19 nt, Artificial Sequence
  Description of Artificial Sequence: Synthetic oligonucleotide
  Antisense strand to SEQ ID NO: 257284
ugauuuaaacaauucgaca

SEQ ID NO: 257286 - RNA, 19 nt, Artificial Sequence
  Description of Artificial Sequence: Synthetic oligonucleotide
  Sense strand starting at position 596 SEQ ID NO: 3310
uguuuaaaucaaugucgaa

SEQ ID NO: 257287 - RNA, 19 nt, Artificial Sequence
  Description of Artificial Sequence: Synthetic oligonucleotide
  Antisense strand to SEQ ID NO: 257286
uucgacauugauuuaaaca

SEQ ID NO: 257288 - RNA, 19 nt, Artificial Sequence
  Description of Artificial Sequence: Synthetic oligonucleotide
  Sense strand starting at position 600 SEQ ID NO: 3310
uaaaucaaugucgaauugu

SEQ ID NO: 257289 - RNA, 19 nt, Artificial Sequence
  Description of Artificial Sequence: Synthetic oligonucleotide
  Antisense strand to SEQ ID NO: 257288
acaauucgacauugauuua

SEQ ID NO: 257290 - RNA, 19 nt, Artificial Sequence
  Description of Artificial Sequence: Synthetic oligonucleotide
  Sense strand starting at position 640 SEQ ID NO: 3310
auuauuggguucuucucaa

SEQ ID NO: 257291 - RNA, 19 nt, Artificial Sequence
  Description of Artificial Sequence: Synthetic oligonucleotide
  Antisense strand to SEQ ID NO: 257290
uugagaagaacccaauaau

SEQ ID NO: 257292 - RNA, 19 nt, Artificial Sequence
  Description of Artificial Sequence: Synthetic oligonucleotide
  Sense strand starting at position 659 SEQ ID NO: 3310
auuccuacgcagugagaaa

SEQ ID NO: 257293 - RNA, 19 nt, Artificial Sequence
  Description of Artificial Sequence: Synthetic oligonucleotide
  Antisense strand to SEQ ID NO: 257292
uuucucacugcguaggaau

SEQ ID NO: 257294 - RNA, 19 nt, Artificial Sequence
  Description of Artificial Sequence: Synthetic oligonucleotide
  Sense strand starting at position 660 SEQ ID NO: 3310
uuccuacgcagugagaaau

SEQ ID NO: 257295 - RNA, 19 nt, Artificial Sequence
  Description of Artificial Sequence: Synthetic oligonucleotide
  Antisense strand to SEQ ID NO: 257294
auuucucacugcguaggaa

SEQ ID NO: 257296 - RNA, 19 nt, Artificial Sequence
  Description of Artificial Sequence: Synthetic oligonucleotide
  Sense strand starting at position 731 SEQ ID NO: 3310
uugagcugggcuuagagaa

SEQ ID NO: 257297 - RNA, 19 nt, Artificial Sequence
  Description of Artificial Sequence: Synthetic oligonucleotide
  Antisense strand to SEQ ID NO: 257296
uucucuaagcccagcucaa

SEQ ID NO: 257298 - RNA, 19 nt, Artificial Sequence
  Description of Artificial Sequence: Synthetic oligonucleotide
  Sense strand starting at position 770 SEQ ID NO: 3310
gaggacugcaugugugaga

SEQ ID NO: 257299 - RNA, 19 nt, Artificial Sequence
  Description of Artificial Sequence: Synthetic oligonucleotide
  Antisense strand to SEQ ID NO: 257298
ucucacacaugcaguccuc

SEQ ID NO: 257300 - RNA, 19 nt, Artificial Sequence
  Description of Artificial Sequence: Synthetic oligonucleotide
  Sense strand starting at position 845 SEQ ID NO: 3310
agagaagauugggagaagu

SEQ ID NO: 257301 - RNA, 19 nt, Artificial Sequence
  Description of Artificial Sequence: Synthetic oligonucleotide
  Antisense strand to SEQ ID NO: 257300
acuucucccaaucuucucu

SEQ ID NO: 257302 - RNA, 19 nt, Artificial Sequence
  Description of Artificial Sequence: Synthetic oligonucleotide
  Sense strand starting at position 864 SEQ ID NO: 3310
uuuaauucuccugggcaga

SEQ ID NO: 257303 - RNA, 19 nt, Artificial Sequence
  Description of Artificial Sequence: Synthetic oligonucleotide
  Antisense strand to SEQ ID NO: 257302
ucugcccaggagaauuaaa

SEQ ID NO: 257304 - RNA, 19 nt, Artificial Sequence
  Description of Artificial Sequence: Synthetic oligonucleotide
  Sense strand starting at position 865 SEQ ID NO: 3310
uuaauucuccugggcagaa

SEQ ID NO: 257305 - RNA, 19 nt, Artificial Sequence
  Description of Artificial Sequence: Synthetic oligonucleotide
  Antisense strand to SEQ ID NO: 257304
uucugcccaggagaauuaa

SEQ ID NO: 257306 - RNA, 19 nt, Artificial Sequence
  Description of Artificial Sequence: Synthetic oligonucleotide
  Sense strand starting at position 1113 SEQ ID NO: 3310
ccuccuuccugagcaugaa

SEQ ID NO: 257307 - RNA, 19 nt, Artificial Sequence
  Description of Artificial Sequence: Synthetic oligonucleotide
  Antisense strand to SEQ ID NO: 257306
uucaugcucaggaaggagg

SEQ ID NO: 257308 - RNA, 19 nt, Artificial Sequence
  Description of Artificial Sequence: Synthetic oligonucleotide
  Sense strand starting at position 1116 SEQ ID NO: 3310
ccuuccugagcaugaagau

SEQ ID NO: 257309 - RNA, 19 nt, Artificial Sequence
  Description of Artificial Sequence: Synthetic oligonucleotide
  Antisense strand to SEQ ID NO: 257308
aucuucaugcucaggaagg

SEQ ID NO: 257310 - RNA, 19 nt, Artificial Sequence
  Description of Artificial Sequence: Synthetic oligonucleotide
  Sense strand starting at position 1126 SEQ ID NO: 3310
caugaagauccuggcuaga

SEQ ID NO: 257311 - RNA, 19 nt, Artificial Sequence
  Description of Artificial Sequence: Synthetic oligonucleotide
  Antisense strand to SEQ ID NO: 257310
ucuagccaggaucuucaug

SEQ ID NO: 257312 - RNA, 19 nt, Artificial Sequence
  Description of Artificial Sequence: Synthetic oligonucleotide
  Sense strand starting at position 1172 SEQ ID NO: 3310
ggcaguggagcagagaaua

SEQ ID NO: 257313 - RNA, 19 nt, Artificial Sequence
  Description of Artificial Sequence: Synthetic oligonucleotide
  Antisense strand to SEQ ID NO: 257312
uauucucugcuccacugcc

SEQ ID NO: 257314 - RNA, 19 nt, Artificial Sequence
  Description of Artificial Sequence: Synthetic oligonucleotide
  Sense strand starting at position 1732 SEQ ID NO: 3310
ucgguucucaggcaagagu

SEQ ID NO: 257315 - RNA, 19 nt, Artificial Sequence
  Description of Artificial Sequence: Synthetic oligonucleotide
  Antisense strand to SEQ ID NO: 257314
acucuugccugagaaccga

SEQ ID NO: 257316 - RNA, 19 nt, Artificial Sequence
  Description of Artificial Sequence: Synthetic oligonucleotide
  Sense strand starting at position 2537 SEQ ID NO: 3310
gagcgaagugaagaguaaa

SEQ ID NO: 257317 - RNA, 19 nt, Artificial Sequence
  Description of Artificial Sequence: Synthetic oligonucleotide
  Antisense strand to SEQ ID NO: 257316
uuuacucuucacuucgcuc

SEQ ID NO: 257318 - RNA, 19 nt, Artificial Sequence
  Description of Artificial Sequence: Synthetic oligonucleotide
  Sense strand starting at position 2766 SEQ ID NO: 3310
gaucucagucugcaagcuu

SEQ ID NO: 257319 - RNA, 19 nt, Artificial Sequence
  Description of Artificial Sequence: Synthetic oligonucleotide
  Antisense strand to SEQ ID NO: 257318
aagcuugcagacugagauc

SEQ ID NO: 257320 - RNA, 19 nt, Artificial Sequence
  Description of Artificial Sequence: Synthetic oligonucleotide
  Sense strand starting at position 2777 SEQ ID NO: 3310
gcaagcuuucgaggagaua

SEQ ID NO: 257321 - RNA, 19 nt, Artificial Sequence
  Description of Artificial Sequence: Synthetic oligonucleotide
  Antisense strand to SEQ ID NO: 257320
uaucuccucgaaagcuugc

SEQ ID NO: 257322 - RNA, 19 nt, Artificial Sequence
  Description of Artificial Sequence: Synthetic oligonucleotide
  Sense strand starting at position 2861 SEQ ID NO: 3310
augcuugagacaugagaca

SEQ ID NO: 257323 - RNA, 19 nt, Artificial Sequence
  Description of Artificial Sequence: Synthetic oligonucleotide
  Antisense strand to SEQ ID NO: 257322
ugucucaugucucaagcau

SEQ ID NO: 257324 - RNA, 19 nt, Artificial Sequence
  Description of Artificial Sequence: Synthetic oligonucleotide
  Sense strand starting at position 2886 SEQ ID NO: 3310
ggaaauguuucauugaggc

SEQ ID NO: 257325 - RNA, 19 nt, Artificial Sequence
  Description of Artificial Sequence: Synthetic oligonucleotide
  Antisense strand to SEQ ID NO: 257324
gccucaaugaaacauuucc

SEQ ID NO: 257326 - RNA, 19 nt, Artificial Sequence
  Description of Artificial Sequence: Synthetic oligonucleotide
  Sense strand starting at position 3038 SEQ ID NO: 3310
gugugccuaagucagagau

SEQ ID NO: 257327 - RNA, 19 nt, Artificial Sequence
  Description of Artificial Sequence: Synthetic oligonucleotide
  Antisense strand to SEQ ID NO: 257326
aucucugacuuaggcacac

SEQ ID NO: 257328 - RNA, 19 nt, Artificial Sequence
  Description of Artificial Sequence: Synthetic oligonucleotide
  Sense strand starting at position 3042 SEQ ID NO: 3310
gccuaagucagagauggca

SEQ ID NO: 257329 - RNA, 19 nt, Artificial Sequence
  Description of Artificial Sequence: Synthetic oligonucleotide
  Antisense strand to SEQ ID NO: 257328
ugccaucucugacuuaggc

SEQ ID NO: 257330 - RNA, 19 nt, Artificial Sequence
  Description of Artificial Sequence: Synthetic oligonucleotide
  Sense strand starting at position 3325 SEQ ID NO: 3310
ggaguuucuugagcagcaa

SEQ ID NO: 257331 - RNA, 19 nt, Artificial Sequence
  Description of Artificial Sequence: Synthetic oligonucleotide
  Antisense strand to SEQ ID NO: 257330
uugcugcucaagaaacucc

SEQ ID NO: 257332 - RNA, 19 nt, Artificial Sequence
  Description of Artificial Sequence: Synthetic oligonucleotide
  Sense strand starting at position 3326 SEQ ID NO: 3310
gaguuucuugagcagcaaa

SEQ ID NO: 257333 - RNA, 19 nt, Artificial Sequence
  Description of Artificial Sequence: Synthetic oligonucleotide
  Antisense strand to SEQ ID NO: 257332
uuugcugcucaagaaacuc

SEQ ID NO: 257334 - RNA, 19 nt, Artificial Sequence
  Description of Artificial Sequence: Synthetic oligonucleotide
  Sense strand starting at position 3377 SEQ ID NO: 3310
ggaaacuuaaaguggucua

SEQ ID NO: 257335 - RNA, 19 nt, Artificial Sequence
  Description of Artificial Sequence: Synthetic oligonucleotide
  Antisense strand to SEQ ID NO: 257334
uagaccacuuuaaguuucc

SEQ ID NO: 257336 - RNA, 19 nt, Artificial Sequence
  Description of Artificial Sequence: Synthetic oligonucleotide
  Sense strand starting at position 3382 SEQ ID NO: 3310
cuuaaaguggucuauauaa

SEQ ID NO: 257337 - RNA, 19 nt, Artificial Sequence
  Description of Artificial Sequence: Synthetic oligonucleotide
  Antisense strand to SEQ ID NO: 257336
uuauauagaccacuuuaag

SEQ ID NO: 257338 - RNA, 19 nt, Artificial Sequence
  Description of Artificial Sequence: Synthetic oligonucleotide
  Sense strand starting at position 3419 SEQ ID NO: 3310
uguagacuuuggucacuga

SEQ ID NO: 257339 - RNA, 19 nt, Artificial Sequence
  Description of Artificial Sequence: Synthetic oligonucleotide
  Antisense strand to SEQ ID NO: 257338
ucagugaccaaagucuaca

SEQ ID NO: 257340 - RNA, 19 nt, Artificial Sequence
  Description of Artificial Sequence: Synthetic oligonucleotide
  Sense strand starting at position 3420 SEQ ID NO: 3310
guagacuuuggucacugaa

SEQ ID NO: 257341 - RNA, 19 nt, Artificial Sequence
  Description of Artificial Sequence: Synthetic oligonucleotide
  Antisense strand to SEQ ID NO: 257340
uucagugaccaaagucuac

SEQ ID NO: 257342 - RNA, 19 nt, Artificial Sequence
  Description of Artificial Sequence: Synthetic oligonucleotide
  Sense strand starting at position 3582 SEQ ID NO: 3310
uccaaacagccaugguaau

SEQ ID NO: 257343 - RNA, 19 nt, Artificial Sequence
  Description of Artificial Sequence: Synthetic oligonucleotide
  Antisense strand to SEQ ID NO: 257342
auuaccauggcuguuugga

SEQ ID NO: 257344 - RNA, 19 nt, Artificial Sequence
  Description of Artificial Sequence: Synthetic oligonucleotide
  Sense strand starting at position 3594 SEQ ID NO: 3310
ugguaaugccuuuacaaau

SEQ ID NO: 257345 - RNA, 19 nt, Artificial Sequence
  Description of Artificial Sequence: Synthetic oligonucleotide
  Antisense strand to SEQ ID NO: 257344
auuuguaaaggcauuacca

SEQ ID NO: 257346 - RNA, 19 nt, Artificial Sequence
  Description of Artificial Sequence: Synthetic oligonucleotide
  Sense strand starting at position 3657 SEQ ID NO: 3310
auaucauuggaacgaaguu

SEQ ID NO: 257347 - RNA, 19 nt, Artificial Sequence
  Description of Artificial Sequence: Synthetic oligonucleotide
  Antisense strand to SEQ ID NO: 257346
aacuucguuccaaugauau

SEQ ID NO: 257348 - RNA, 19 nt, Artificial Sequence
  Description of Artificial Sequence: Synthetic oligonucleotide
  Sense strand starting at position 3708 SEQ ID NO: 3310
ugcugccaucucuaugaaa

SEQ ID NO: 257349 - RNA, 19 nt, Artificial Sequence
  Description of Artificial Sequence: Synthetic oligonucleotide
  Antisense strand to SEQ ID NO: 257348
uuucauagagauggcagca

SEQ ID NO: 257350 - RNA, 19 nt, Artificial Sequence
  Description of Artificial Sequence: Synthetic oligonucleotide
  Sense strand starting at position 3710 SEQ ID NO: 3310
cugccaucucuaugaaaug

SEQ ID NO: 257351 - RNA, 19 nt, Artificial Sequence
  Description of Artificial Sequence: Synthetic oligonucleotide
  Antisense strand to SEQ ID NO: 257350
cauuucauagagauggcag

SEQ ID NO: 257352 - RNA, 19 nt, Artificial Sequence
  Description of Artificial Sequence: Synthetic oligonucleotide
  Sense strand starting at position 3787 SEQ ID NO: 3310
cauggcuacuugucugaau

SEQ ID NO: 257353 - RNA, 19 nt, Artificial Sequence
  Description of Artificial Sequence: Synthetic oligonucleotide
  Antisense strand to SEQ ID NO: 257352
auucagacaaguagccaug

SEQ ID NO: 257354 - RNA, 19 nt, Artificial Sequence
  Description of Artificial Sequence: Synthetic oligonucleotide
  Sense strand starting at position 3789 SEQ ID NO: 3310
uggcuacuugucugaauca

SEQ ID NO: 257355 - RNA, 19 nt, Artificial Sequence
  Description of Artificial Sequence: Synthetic oligonucleotide
  Antisense strand to SEQ ID NO: 257354
ugauucagacaaguagcca

SEQ ID NO: 257356 - RNA, 19 nt, Artificial Sequence
  Description of Artificial Sequence: Synthetic oligonucleotide
  Sense strand starting at position 3840 SEQ ID NO: 3310
agcccaaggugcucauuua

SEQ ID NO: 257357 - RNA, 19 nt, Artificial Sequence
  Description of Artificial Sequence: Synthetic oligonucleotide
  Antisense strand to SEQ ID NO: 257356
uaaaugagcaccuugggcu

SEQ ID NO: 257358 - RNA, 19 nt, Artificial Sequence
  Description of Artificial Sequence: Synthetic oligonucleotide
  Sense strand starting at position 76 SEQ ID NO: 3311
guuuauacauuagucugau

SEQ ID NO: 257359 - RNA, 19 nt, Artificial Sequence
  Description of Artificial Sequence: Synthetic oligonucleotide
  Antisense strand to SEQ ID NO: 257358
aucagacuaauguauaaac

SEQ ID NO: 257360 - RNA, 19 nt, Artificial Sequence
  Description of Artificial Sequence: Synthetic oligonucleotide
  Sense strand starting at position 77 SEQ ID NO: 3311
uuuauacauuagucugaug

SEQ ID NO: 257361 - RNA, 19 nt, Artificial Sequence
  Description of Artificial Sequence: Synthetic oligonucleotide
  Antisense strand to SEQ ID NO: 257360
caucagacuaauguauaaa

SEQ ID NO: 257362 - RNA, 19 nt, Artificial Sequence
  Description of Artificial Sequence: Synthetic oligonucleotide
  Sense strand starting at position 85 SEQ ID NO: 3311
uuagucugaugacuaaaca

SEQ ID NO: 257363 - RNA, 19 nt, Artificial Sequence
  Description of Artificial Sequence: Synthetic oligonucleotide
  Antisense strand to SEQ ID NO: 257362
uguuuagucaucagacuaa

SEQ ID NO: 257364 - RNA, 19 nt, Artificial Sequence
  Description of Artificial Sequence: Synthetic oligonucleotide
  Sense strand starting at position 94 SEQ ID NO: 3311
ugacuaaacagugaguugu

SEQ ID NO: 257365 - RNA, 19 nt, Artificial Sequence
  Description of Artificial Sequence: Synthetic oligonucleotide
  Antisense strand to SEQ ID NO: 257364
acaacucacuguuuaguca

SEQ ID NO: 257366 - RNA, 19 nt, Artificial Sequence
  Description of Artificial Sequence: Synthetic oligonucleotide
  Sense strand starting at position 105 SEQ ID NO: 3311
ugaguuguggagggcagau

SEQ ID NO: 257367 - RNA, 19 nt, Artificial Sequence
  Description of Artificial Sequence: Synthetic oligonucleotide
  Antisense strand to SEQ ID NO: 257366
aucugcccuccacaacuca

SEQ ID NO: 257368 - RNA, 19 nt, Artificial Sequence
  Description of Artificial Sequence: Synthetic oligonucleotide
  Sense strand starting at position 148 SEQ ID NO: 3311
ugugaagcucuccauaauu

SEQ ID NO: 257369 - RNA, 19 nt, Artificial Sequence
  Description of Artificial Sequence: Synthetic oligonucleotide
  Antisense strand to SEQ ID NO: 257368
aauuauggagagcuucaca

SEQ ID NO: 257370 - RNA, 19 nt, Artificial Sequence
  Description of Artificial Sequence: Synthetic oligonucleotide
  Sense strand starting at position 268 SEQ ID NO: 3311
uguagacgauucuugaaca

SEQ ID NO: 257371 - RNA, 19 nt, Artificial Sequence
  Description of Artificial Sequence: Synthetic oligonucleotide
  Antisense strand to SEQ ID NO: 257370
uguucaagaaucgucuaca

SEQ ID NO: 257372 - RNA, 19 nt, Artificial Sequence
  Description of Artificial Sequence: Synthetic oligonucleotide
  Sense strand starting at position 315 SEQ ID NO: 3311
ggguauggagcggacuaaa

SEQ ID NO: 257373 - RNA, 19 nt, Artificial Sequence
  Description of Artificial Sequence: Synthetic oligonucleotide
  Antisense strand to SEQ ID NO: 257372
uuuaguccgcuccauaccc

SEQ ID NO: 257374 - RNA, 19 nt, Artificial Sequence
  Description of Artificial Sequence: Synthetic oligonucleotide
  Sense strand starting at position 346 SEQ ID NO: 3311
gagagucauggaugacuuu

SEQ ID NO: 257375 - RNA, 19 nt, Artificial Sequence
  Description of Artificial Sequence: Synthetic oligonucleotide
  Antisense strand to SEQ ID NO: 257374
aaagucauccaugacucuc

SEQ ID NO: 257376 - RNA, 19 nt, Artificial Sequence
  Description of Artificial Sequence: Synthetic oligonucleotide
  Sense strand starting at position 410 SEQ ID NO: 3311
gggcauccucgugcuuuau

SEQ ID NO: 257377 - RNA, 19 nt, Artificial Sequence
  Description of Artificial Sequence: Synthetic oligonucleotide
  Antisense strand to SEQ ID NO: 257376
auaaagcacgaggaugccc

SEQ ID NO: 257378 - RNA, 19 nt, Artificial Sequence
  Description of Artificial Sequence: Synthetic oligonucleotide
  Sense strand starting at position 464 SEQ ID NO: 3311
agaaaucauuuguacuuga

SEQ ID NO: 257379 - RNA, 19 nt, Artificial Sequence
  Description of Artificial Sequence: Synthetic oligonucleotide
  Antisense strand to SEQ ID NO: 257378
ucaaguacaaaugauuucu

SEQ ID NO: 257380 - RNA, 19 nt, Artificial Sequence
  Description of Artificial Sequence: Synthetic oligonucleotide
  Sense strand starting at position 475 SEQ ID NO: 3311
guacuugaauaaguaggaa

SEQ ID NO: 257381 - RNA, 19 nt, Artificial Sequence
  Description of Artificial Sequence: Synthetic oligonucleotide
  Antisense strand to SEQ ID NO: 257380
uuccuacuuauucaaguac

SEQ ID NO: 257382 - RNA, 19 nt, Artificial Sequence
  Description of Artificial Sequence: Synthetic oligonucleotide
  Sense strand starting at position 628 SEQ ID NO: 3311
agacaaucucgugaacuua

SEQ ID NO: 257383 - RNA, 19 nt, Artificial Sequence
  Description of Artificial Sequence: Synthetic oligonucleotide
  Antisense strand to SEQ ID NO: 257382
uaaguucacgagauugucu

SEQ ID NO: 257384 - RNA, 19 nt, Artificial Sequence
  Description of Artificial Sequence: Synthetic oligonucleotide
  Sense strand starting at position 1022 SEQ ID NO: 3311
aacauuagucgugacgaau

SEQ ID NO: 257385 - RNA, 19 nt, Artificial Sequence
  Description of Artificial Sequence: Synthetic oligonucleotide
  Antisense strand to SEQ ID NO: 257384
auucgucacgacuaauguu

SEQ ID NO: 257386 - RNA, 19 nt, Artificial Sequence
  Description of Artificial Sequence: Synthetic oligonucleotide
  Sense strand starting at position 1071 SEQ ID NO: 3311
uuacuuugguacuugagaa

SEQ ID NO: 257387 - RNA, 19 nt, Artificial Sequence
  Description of Artificial Sequence: Synthetic oligonucleotide
  Antisense strand to SEQ ID NO: 257386
uucucaaguaccaaaguaa

SEQ ID NO: 257388 - RNA, 19 nt, Artificial Sequence
  Description of Artificial Sequence: Synthetic oligonucleotide
  Sense strand starting at position 1322 SEQ ID NO: 3311
aagacaaucuuggccgaau

SEQ ID NO: 257389 - RNA, 19 nt, Artificial Sequence
  Description of Artificial Sequence: Synthetic oligonucleotide
  Antisense strand to SEQ ID NO: 257388
auucggccaagauugucuu

SEQ ID NO: 257390 - RNA, 19 nt, Artificial Sequence
  Description of Artificial Sequence: Synthetic oligonucleotide
  Sense strand starting at position 1323 SEQ ID NO: 3311
agacaaucuuggccgaauc

SEQ ID NO: 257391 - RNA, 19 nt, Artificial Sequence
  Description of Artificial Sequence: Synthetic oligonucleotide
  Antisense strand to SEQ ID NO: 257390
gauucggccaagauugucu

SEQ ID NO: 257392 - RNA, 19 nt, Artificial Sequence
  Description of Artificial Sequence: Synthetic oligonucleotide
  Sense strand starting at position 1324 SEQ ID NO: 3311
gacaaucuuggccgaaucu

SEQ ID NO: 257393 - RNA, 19 nt, Artificial Sequence
  Description of Artificial Sequence: Synthetic oligonucleotide
  Antisense strand to SEQ ID NO: 257392
agauucggccaagauuguc

SEQ ID NO: 257394 - RNA, 19 nt, Artificial Sequence
  Description of Artificial Sequence: Synthetic oligonucleotide
  Sense strand starting at position 1325 SEQ ID NO: 3311
acaaucuuggccgaaucua

SEQ ID NO: 257395 - RNA, 19 nt, Artificial Sequence
  Description of Artificial Sequence: Synthetic oligonucleotide
  Antisense strand to SEQ ID NO: 257394
uagauucggccaagauugu

SEQ ID NO: 257396 - RNA, 19 nt, Artificial Sequence
  Description of Artificial Sequence: Synthetic oligonucleotide
  Sense strand starting at position 2480 SEQ ID NO: 3311
agcccuuucccuuaagagu

SEQ ID NO: 257397 - RNA, 19 nt, Artificial Sequence
  Description of Artificial Sequence: Synthetic oligonucleotide
  Antisense strand to SEQ ID NO: 257396
acucuuaagggaaagggcu

SEQ ID NO: 257398 - RNA, 19 nt, Artificial Sequence
  Description of Artificial Sequence: Synthetic oligonucleotide
  Sense strand starting at position 2521 SEQ ID NO: 3311
gugaucauuuccuuguggu

SEQ ID NO: 257399 - RNA, 19 nt, Artificial Sequence
  Description of Artificial Sequence: Synthetic oligonucleotide
  Antisense strand to SEQ ID NO: 257398
accacaaggaaaugaucac

SEQ ID NO: 257400 - RNA, 19 nt, Artificial Sequence
  Description of Artificial Sequence: Synthetic oligonucleotide
  Sense strand starting at position 2538 SEQ ID NO: 3311
guaagaaucuugguaaaug

SEQ ID NO: 257401 - RNA, 19 nt, Artificial Sequence
  Description of Artificial Sequence: Synthetic oligonucleotide
  Antisense strand to SEQ ID NO: 257400
cauuuaccaagauucuuac

SEQ ID NO: 257402 - RNA, 19 nt, Artificial Sequence
  Description of Artificial Sequence: Synthetic oligonucleotide
  Sense strand starting at position 2552 SEQ ID NO: 3311
aaaugauggugaucauguc

SEQ ID NO: 257403 - RNA, 19 nt, Artificial Sequence
  Description of Artificial Sequence: Synthetic oligonucleotide
  Antisense strand to SEQ ID NO: 257402
gacaugaucaccaucauuu

SEQ ID NO: 257404 - RNA, 19 nt, Artificial Sequence
  Description of Artificial Sequence: Synthetic oligonucleotide
  Sense strand starting at position 2579 SEQ ID NO: 3311
ucgugauaguaaccuuuaa

SEQ ID NO: 257405 - RNA, 19 nt, Artificial Sequence
  Description of Artificial Sequence: Synthetic oligonucleotide
  Antisense strand to SEQ ID NO: 257404
uuaaagguuacuaucacga

SEQ ID NO: 257406 - RNA, 19 nt, Artificial Sequence
  Description of Artificial Sequence: Synthetic oligonucleotide
  Sense strand starting at position 2662 SEQ ID NO: 3311
aggugaauggucuggugaa

SEQ ID NO: 257407 - RNA, 19 nt, Artificial Sequence
  Description of Artificial Sequence: Synthetic oligonucleotide
  Antisense strand to SEQ ID NO: 257406
uucaccagaccauucaccu

SEQ ID NO: 257408 - RNA, 19 nt, Artificial Sequence
  Description of Artificial Sequence: Synthetic oligonucleotide
  Sense strand starting at position 2669 SEQ ID NO: 3311
uggucuggugaauauuaga

SEQ ID NO: 257409 - RNA, 19 nt, Artificial Sequence
  Description of Artificial Sequence: Synthetic oligonucleotide
  Antisense strand to SEQ ID NO: 257408
ucuaauauucaccagacca

SEQ ID NO: 257410 - RNA, 19 nt, Artificial Sequence
  Description of Artificial Sequence: Synthetic oligonucleotide
  Sense strand starting at position 2773 SEQ ID NO: 3311
acaucuaacuauguguaaa

SEQ ID NO: 257411 - RNA, 19 nt, Artificial Sequence
  Description of Artificial Sequence: Synthetic oligonucleotide
  Antisense strand to SEQ ID NO: 257410
uuuacacauaguuagaugu

SEQ ID NO: 257412 - RNA, 19 nt, Artificial Sequence
  Description of Artificial Sequence: Synthetic oligonucleotide
  Sense strand starting at position 2967 SEQ ID NO: 3311
uguuucuacguguuuguca

SEQ ID NO: 257413 - RNA, 19 nt, Artificial Sequence
  Description of Artificial Sequence: Synthetic oligonucleotide
  Antisense strand to SEQ ID NO: 257412
ugacaaacacguagaaaca

SEQ ID NO: 257414 - RNA, 19 nt, Artificial Sequence
  Description of Artificial Sequence: Synthetic oligonucleotide
  Sense strand starting at position 3000 SEQ ID NO: 3311
aauggaguaucagucacua

SEQ ID NO: 257415 - RNA, 19 nt, Artificial Sequence
  Description of Artificial Sequence: Synthetic oligonucleotide
  Antisense strand to SEQ ID NO: 257414
uagugacugauacuccauu

SEQ ID NO: 257416 - RNA, 19 nt, Artificial Sequence
  Description of Artificial Sequence: Synthetic oligonucleotide
  Sense strand starting at position 3042 SEQ ID NO: 3311
ggacuaacagacuguacau

SEQ ID NO: 257417 - RNA, 19 nt, Artificial Sequence
  Description of Artificial Sequence: Synthetic oligonucleotide
  Antisense strand to SEQ ID NO: 257416
auguacagucuguuagucc

SEQ ID NO: 257418 - RNA, 19 nt, Artificial Sequence
  Description of Artificial Sequence: Synthetic oligonucleotide
  Sense strand starting at position 3166 SEQ ID NO: 3311
aagcaucugguaugggaua

SEQ ID NO: 257419 - RNA, 19 nt, Artificial Sequence
  Description of Artificial Sequence: Synthetic oligonucleotide
  Antisense strand to SEQ ID NO: 257418
uaucccauaccagaugcuu

SEQ ID NO: 257420 - RNA, 19 nt, Artificial Sequence
  Description of Artificial Sequence: Synthetic oligonucleotide
  Sense strand starting at position 3168 SEQ ID NO: 3311
gcaucugguaugggauaaa

SEQ ID NO: 257421 - RNA, 19 nt, Artificial Sequence
  Description of Artificial Sequence: Synthetic oligonucleotide
  Antisense strand to SEQ ID NO: 257420
uuuaucccauaccagaugc

SEQ ID NO: 257422 - RNA, 19 nt, Artificial Sequence
  Description of Artificial Sequence: Synthetic oligonucleotide
  Sense strand starting at position 3268 SEQ ID NO: 3311
cagcauugugguuauagau

SEQ ID NO: 257423 - RNA, 19 nt, Artificial Sequence
  Description of Artificial Sequence: Synthetic oligonucleotide
  Antisense strand to SEQ ID NO: 257422
aucuauaaccacaaugcug

SEQ ID NO: 257424 - RNA, 19 nt, Artificial Sequence
  Description of Artificial Sequence: Synthetic oligonucleotide
  Sense strand starting at position 3429 SEQ ID NO: 3311
ugcucuguagcauuguuua

SEQ ID NO: 257425 - RNA, 19 nt, Artificial Sequence
  Description of Artificial Sequence: Synthetic oligonucleotide
  Antisense strand to SEQ ID NO: 257424
uaaacaaugcuacagagca

SEQ ID NO: 257426 - RNA, 19 nt, Artificial Sequence
  Description of Artificial Sequence: Synthetic oligonucleotide
  Sense strand starting at position 3434 SEQ ID NO: 3311
uguagcauuguuuagauga

SEQ ID NO: 257427 - RNA, 19 nt, Artificial Sequence
  Description of Artificial Sequence: Synthetic oligonucleotide
  Antisense strand to SEQ ID NO: 257426
ucaucuaaacaaugcuaca

SEQ ID NO: 257428 - RNA, 19 nt, Artificial Sequence
  Description of Artificial Sequence: Synthetic oligonucleotide
  Sense strand starting at position 3459 SEQ ID NO: 3311
acgucaguuccugaaacaa

SEQ ID NO: 257429 - RNA, 19 nt, Artificial Sequence
  Description of Artificial Sequence: Synthetic oligonucleotide
  Antisense strand to SEQ ID NO: 257428
uuguuucaggaacugacgu

SEQ ID NO: 257430 - RNA, 19 nt, Artificial Sequence
  Description of Artificial Sequence: Synthetic oligonucleotide
  Sense strand starting at position 3556 SEQ ID NO: 3311
uuacauaggucucuuagac

SEQ ID NO: 257431 - RNA, 19 nt, Artificial Sequence
  Description of Artificial Sequence: Synthetic oligonucleotide
  Antisense strand to SEQ ID NO: 257430
gucuaagagaccuauguaa

SEQ ID NO: 257432 - RNA, 19 nt, Artificial Sequence
  Description of Artificial Sequence: Synthetic oligonucleotide
  Sense strand starting at position 3579 SEQ ID NO: 3311
ucucaagauuaugcuaaga

SEQ ID NO: 257433 - RNA, 19 nt, Artificial Sequence
  Description of Artificial Sequence: Synthetic oligonucleotide
  Antisense strand to SEQ ID NO: 257432
ucuuagcauaaucuugaga

SEQ ID NO: 257434 - RNA, 19 nt, Artificial Sequence
  Description of Artificial Sequence: Synthetic oligonucleotide
  Sense strand starting at position 3640 SEQ ID NO: 3311
ggcagugguaacuacucua

SEQ ID NO: 257435 - RNA, 19 nt, Artificial Sequence
  Description of Artificial Sequence: Synthetic oligonucleotide
  Antisense strand to SEQ ID NO: 257434
uagaguaguuaccacugcc

SEQ ID NO: 257436 - RNA, 19 nt, Artificial Sequence
  Description of Artificial Sequence: Synthetic oligonucleotide
  Sense strand starting at position 3719 SEQ ID NO: 3311
cccagcacugaugauauua

SEQ ID NO: 257437 - RNA, 19 nt, Artificial Sequence
  Description of Artificial Sequence: Synthetic oligonucleotide
  Antisense strand to SEQ ID NO: 257436
uaauaucaucagugcuggg

SEQ ID NO: 257438 - RNA, 19 nt, Artificial Sequence
  Description of Artificial Sequence: Synthetic oligonucleotide
  Sense strand starting at position 313 SEQ ID NO: 3312
accuguuucuacucaugua

SEQ ID NO: 257439 - RNA, 19 nt, Artificial Sequence
  Description of Artificial Sequence: Synthetic oligonucleotide
  Antisense strand to SEQ ID NO: 257438
uacaugaguagaaacaggu

SEQ ID NO: 257440 - RNA, 19 nt, Artificial Sequence
  Description of Artificial Sequence: Synthetic oligonucleotide
  Sense strand starting at position 490 SEQ ID NO: 3312
aacuauaugguaugugaaa

SEQ ID NO: 257441 - RNA, 19 nt, Artificial Sequence
  Description of Artificial Sequence: Synthetic oligonucleotide
  Antisense strand to SEQ ID NO: 257440
uuucacauaccauauaguu

SEQ ID NO: 257442 - RNA, 19 nt, Artificial Sequence
  Description of Artificial Sequence: Synthetic oligonucleotide
  Sense strand starting at position 491 SEQ ID NO: 3312
acuauaugguaugugaaau

SEQ ID NO: 257443 - RNA, 19 nt, Artificial Sequence
  Description of Artificial Sequence: Synthetic oligonucleotide
  Antisense strand to SEQ ID NO: 257442
auuucacauaccauauagu

SEQ ID NO: 257444 - RNA, 19 nt, Artificial Sequence
  Description of Artificial Sequence: Synthetic oligonucleotide
  Sense strand starting at position 580 SEQ ID NO: 3312
acuggcaaaugauuaauua

SEQ ID NO: 257445 - RNA, 19 nt, Artificial Sequence
  Description of Artificial Sequence: Synthetic oligonucleotide
  Antisense strand to SEQ ID NO: 257444
uaauuaaucauuugccagu

SEQ ID NO: 257446 - RNA, 19 nt, Artificial Sequence
  Description of Artificial Sequence: Synthetic oligonucleotide
  Sense strand starting at position 668 SEQ ID NO: 3312
augaguuaaugacuugacu

SEQ ID NO: 257447 - RNA, 19 nt, Artificial Sequence
  Description of Artificial Sequence: Synthetic oligonucleotide
  Antisense strand to SEQ ID NO: 257446
agucaagucauuaacucau

SEQ ID NO: 257448 - RNA, 19 nt, Artificial Sequence
  Description of Artificial Sequence: Synthetic oligonucleotide
  Sense strand starting at position 674 SEQ ID NO: 3312
uaaugacuugacugugaag

SEQ ID NO: 257449 - RNA, 19 nt, Artificial Sequence
  Description of Artificial Sequence: Synthetic oligonucleotide
  Antisense strand to SEQ ID NO: 257448
cuucacagucaagucauua

SEQ ID NO: 257450 - RNA, 19 nt, Artificial Sequence
  Description of Artificial Sequence: Synthetic oligonucleotide
  Sense strand starting at position 676 SEQ ID NO: 3312
augacuugacugugaagug

SEQ ID NO: 257451 - RNA, 19 nt, Artificial Sequence
  Description of Artificial Sequence: Synthetic oligonucleotide
  Antisense strand to SEQ ID NO: 257450
cacuucacagucaagucau

SEQ ID NO: 257452 - RNA, 19 nt, Artificial Sequence
  Description of Artificial Sequence: Synthetic oligonucleotide
  Sense strand starting at position 681 SEQ ID NO: 3312
uugacugugaagugaauaa

SEQ ID NO: 257453 - RNA, 19 nt, Artificial Sequence
  Description of Artificial Sequence: Synthetic oligonucleotide
  Antisense strand to SEQ ID NO: 257452
uuauucacuucacagucaa

SEQ ID NO: 257454 - RNA, 19 nt, Artificial Sequence
  Description of Artificial Sequence: Synthetic oligonucleotide
  Sense strand starting at position 730 SEQ ID NO: 3312
uuaccuuagccaugagcaa

SEQ ID NO: 257455 - RNA, 19 nt, Artificial Sequence
  Description of Artificial Sequence: Synthetic oligonucleotide
  Antisense strand to SEQ ID NO: 257454
uugcucauggcuaagguaa

SEQ ID NO: 257456 - RNA, 19 nt, Artificial Sequence
  Description of Artificial Sequence: Synthetic oligonucleotide
  Sense strand starting at position 764 SEQ ID NO: 3312
agcucucccuuguuugaaa

SEQ ID NO: 257457 - RNA, 19 nt, Artificial Sequence
  Description of Artificial Sequence: Synthetic oligonucleotide
  Antisense strand to SEQ ID NO: 257456
uuucaaacaagggagagcu

SEQ ID NO: 257458 - RNA, 19 nt, Artificial Sequence
  Description of Artificial Sequence: Synthetic oligonucleotide
  Sense strand starting at position 872 SEQ ID NO: 3312
cuguguuuccuuggaggaa

SEQ ID NO: 257459 - RNA, 19 nt, Artificial Sequence
  Description of Artificial Sequence: Synthetic oligonucleotide
  Antisense strand to SEQ ID NO: 257458
uuccuccaaggaaacacag

SEQ ID NO: 257460 - RNA, 19 nt, Artificial Sequence
  Description of Artificial Sequence: Synthetic oligonucleotide
  Sense strand starting at position 943 SEQ ID NO: 3312
agugcaauugcaugaucaa

SEQ ID NO: 257461 - RNA, 19 nt, Artificial Sequence
  Description of Artificial Sequence: Synthetic oligonucleotide
  Antisense strand to SEQ ID NO: 257460
uugaucaugcaauugcacu

SEQ ID NO: 257462 - RNA, 19 nt, Artificial Sequence
  Description of Artificial Sequence: Synthetic oligonucleotide
  Sense strand starting at position 944 SEQ ID NO: 3312
gugcaauugcaugaucaag

SEQ ID NO: 257463 - RNA, 19 nt, Artificial Sequence
  Description of Artificial Sequence: Synthetic oligonucleotide
  Antisense strand to SEQ ID NO: 257462
cuugaucaugcaauugcac

SEQ ID NO: 257464 - RNA, 19 nt, Artificial Sequence
  Description of Artificial Sequence: Synthetic oligonucleotide
  Sense strand starting at position 950 SEQ ID NO: 3312
uugcaugaucaagggucau

SEQ ID NO: 257465 - RNA, 19 nt, Artificial Sequence
  Description of Artificial Sequence: Synthetic oligonucleotide
  Antisense strand to SEQ ID NO: 257464
augacccuugaucaugcaa

SEQ ID NO: 257466 - RNA, 19 nt, Artificial Sequence
  Description of Artificial Sequence: Synthetic oligonucleotide
  Sense strand starting at position 956 SEQ ID NO: 3312
gaucaagggucauugcaac

SEQ ID NO: 257467 - RNA, 19 nt, Artificial Sequence
  Description of Artificial Sequence: Synthetic oligonucleotide
  Antisense strand to SEQ ID NO: 257466
guugcaaugacccuugauc

SEQ ID NO: 257468 - RNA, 19 nt, Artificial Sequence
  Description of Artificial Sequence: Synthetic oligonucleotide
  Sense strand starting at position 1026 SEQ ID NO: 3312
gggacuaagaugugugcua

SEQ ID NO: 257469 - RNA, 19 nt, Artificial Sequence
  Description of Artificial Sequence: Synthetic oligonucleotide
  Antisense strand to SEQ ID NO: 257468
uagcacacaucuuaguccc

SEQ ID NO: 257470 - RNA, 19 nt, Artificial Sequence
  Description of Artificial Sequence: Synthetic oligonucleotide
  Sense strand starting at position 1362 SEQ ID NO: 3312
ucaguauucuaucuguaua

SEQ ID NO: 257471 - RNA, 19 nt, Artificial Sequence
  Description of Artificial Sequence: Synthetic oligonucleotide
  Antisense strand to SEQ ID NO: 257470
uauacagauagaauacuga

SEQ ID NO: 257472 - RNA, 19 nt, Artificial Sequence
  Description of Artificial Sequence: Synthetic oligonucleotide
  Sense strand starting at position 1457 SEQ ID NO: 3312
acuacacuugcauaaggua

SEQ ID NO: 257473 - RNA, 19 nt, Artificial Sequence
  Description of Artificial Sequence: Synthetic oligonucleotide
  Antisense strand to SEQ ID NO: 257472
uaccuuaugcaaguguagu

SEQ ID NO: 257474 - RNA, 19 nt, Artificial Sequence
  Description of Artificial Sequence: Synthetic oligonucleotide
  Sense strand starting at position 1496 SEQ ID NO: 3312
cugguucuacacuaugcaa

SEQ ID NO: 257475 - RNA, 19 nt, Artificial Sequence
  Description of Artificial Sequence: Synthetic oligonucleotide
  Antisense strand to SEQ ID NO: 257474
uugcauaguguagaaccag

SEQ ID NO: 257476 - RNA, 19 nt, Artificial Sequence
  Description of Artificial Sequence: Synthetic oligonucleotide
  Sense strand starting at position 1525 SEQ ID NO: 3312
gguacugaucucuauagca

SEQ ID NO: 257477 - RNA, 19 nt, Artificial Sequence
  Description of Artificial Sequence: Synthetic oligonucleotide
  Antisense strand to SEQ ID NO: 257476
ugcuauagagaucaguacc

SEQ ID NO: 257478 - RNA, 19 nt, Artificial Sequence
  Description of Artificial Sequence: Synthetic oligonucleotide
  Sense strand starting at position 1681 SEQ ID NO: 3312
acagauuagugcuuccuua

SEQ ID NO: 257479 - RNA, 19 nt, Artificial Sequence
  Description of Artificial Sequence: Synthetic oligonucleotide
  Antisense strand to SEQ ID NO: 257478
uaaggaagcacuaaucugu

SEQ ID NO: 257480 - RNA, 19 nt, Artificial Sequence
  Description of Artificial Sequence: Synthetic oligonucleotide
  Sense strand starting at position 1803 SEQ ID NO: 3312
ugcuuacuguuacuaaaga

SEQ ID NO: 257481 - RNA, 19 nt, Artificial Sequence
  Description of Artificial Sequence: Synthetic oligonucleotide
  Antisense strand to SEQ ID NO: 257480
ucuuuaguaacaguaagca

SEQ ID NO: 257482 - RNA, 19 nt, Artificial Sequence
  Description of Artificial Sequence: Synthetic oligonucleotide
  Sense strand starting at position 2042 SEQ ID NO: 3312
auaauaaucguguaaguga

SEQ ID NO: 257483 - RNA, 19 nt, Artificial Sequence
  Description of Artificial Sequence: Synthetic oligonucleotide
  Antisense strand to SEQ ID NO: 257482
ucacuuacacgauuauuau

SEQ ID NO: 257484 - RNA, 19 nt, Artificial Sequence
  Description of Artificial Sequence: Synthetic oligonucleotide
  Sense strand starting at position 2047 SEQ ID NO: 3312
aaucguguaagugagagaa

SEQ ID NO: 257485 - RNA, 19 nt, Artificial Sequence
  Description of Artificial Sequence: Synthetic oligonucleotide
  Antisense strand to SEQ ID NO: 257484
uucucucacuuacacgauu

SEQ ID NO: 257486 - RNA, 19 nt, Artificial Sequence
  Description of Artificial Sequence: Synthetic oligonucleotide
  Sense strand starting at position 2089 SEQ ID NO: 3312
gaaccuuaucgaugaacug

SEQ ID NO: 257487 - RNA, 19 nt, Artificial Sequence
  Description of Artificial Sequence: Synthetic oligonucleotide
  Antisense strand to SEQ ID NO: 257486
caguucaucgauaagguuc

SEQ ID NO: 257488 - RNA, 19 nt, Artificial Sequence
  Description of Artificial Sequence: Synthetic oligonucleotide
  Sense strand starting at position 2258 SEQ ID NO: 3312
uuaccaagugccugagaua

SEQ ID NO: 257489 - RNA, 19 nt, Artificial Sequence
  Description of Artificial Sequence: Synthetic oligonucleotide
  Antisense strand to SEQ ID NO: 257488
uaucucaggcacuugguaa

SEQ ID NO: 257490 - RNA, 19 nt, Artificial Sequence
  Description of Artificial Sequence: Synthetic oligonucleotide
  Sense strand starting at position 2259 SEQ ID NO: 3312
uaccaagugccugagauaa

SEQ ID NO: 257491 - RNA, 19 nt, Artificial Sequence
  Description of Artificial Sequence: Synthetic oligonucleotide
  Antisense strand to SEQ ID NO: 257490
uuaucucaggcacuuggua

SEQ ID NO: 257492 - RNA, 19 nt, Artificial Sequence
  Description of Artificial Sequence: Synthetic oligonucleotide
  Sense strand starting at position 2286 SEQ ID NO: 3312
uuaugucuccaagaguugu

SEQ ID NO: 257493 - RNA, 19 nt, Artificial Sequence
  Description of Artificial Sequence: Synthetic oligonucleotide
  Antisense strand to SEQ ID NO: 257492
acaacucuuggagacauaa

SEQ ID NO: 257494 - RNA, 19 nt, Artificial Sequence
  Description of Artificial Sequence: Synthetic oligonucleotide
  Sense strand starting at position 2407 SEQ ID NO: 3312
caggaagacugcuugaucu

SEQ ID NO: 257495 - RNA, 19 nt, Artificial Sequence
  Description of Artificial Sequence: Synthetic oligonucleotide
  Antisense strand to SEQ ID NO: 257494
agaucaagcagucuuccug

SEQ ID NO: 257496 - RNA, 19 nt, Artificial Sequence
  Description of Artificial Sequence: Synthetic oligonucleotide
  Sense strand starting at position 2659 SEQ ID NO: 3312
ucccuuugacacugaguaa

SEQ ID NO: 257497 - RNA, 19 nt, Artificial Sequence
  Description of Artificial Sequence: Synthetic oligonucleotide
  Antisense strand to SEQ ID NO: 257496
uuacucagugucaaaggga

SEQ ID NO: 257498 - RNA, 19 nt, Artificial Sequence
  Description of Artificial Sequence: Synthetic oligonucleotide
  Sense strand starting at position 2662 SEQ ID NO: 3312
cuuugacacugaguaaucu

SEQ ID NO: 257499 - RNA, 19 nt, Artificial Sequence
  Description of Artificial Sequence: Synthetic oligonucleotide
  Antisense strand to SEQ ID NO: 257498
agauuacucagugucaaag

SEQ ID NO: 257500 - RNA, 19 nt, Artificial Sequence
  Description of Artificial Sequence: Synthetic oligonucleotide
  Sense strand starting at position 2663 SEQ ID NO: 3312
uuugacacugaguaaucuu

SEQ ID NO: 257501 - RNA, 19 nt, Artificial Sequence
  Description of Artificial Sequence: Synthetic oligonucleotide
  Antisense strand to SEQ ID NO: 257500
aagauuacucagugucaaa

SEQ ID NO: 257502 - RNA, 19 nt, Artificial Sequence
  Description of Artificial Sequence: Synthetic oligonucleotide
  Sense strand starting at position 2985 SEQ ID NO: 3312
uauagauguggcuguauga

SEQ ID NO: 257503 - RNA, 19 nt, Artificial Sequence
  Description of Artificial Sequence: Synthetic oligonucleotide
  Antisense strand to SEQ ID NO: 257502
ucauacagccacaucuaua

SEQ ID NO: 257504 - RNA, 19 nt, Artificial Sequence
  Description of Artificial Sequence: Synthetic oligonucleotide
  Sense strand starting at position 3001 SEQ ID NO: 3312
ugaagaaaccgcuaucacu

SEQ ID NO: 257505 - RNA, 19 nt, Artificial Sequence
  Description of Artificial Sequence: Synthetic oligonucleotide
  Antisense strand to SEQ ID NO: 257504
agugauagcgguuucuuca

SEQ ID NO: 257506 - RNA, 19 nt, Artificial Sequence
  Description of Artificial Sequence: Synthetic oligonucleotide
  Sense strand starting at position 3306 SEQ ID NO: 3312
gagucaugauugcucaacu

SEQ ID NO: 257507 - RNA, 19 nt, Artificial Sequence
  Description of Artificial Sequence: Synthetic oligonucleotide
  Antisense strand to SEQ ID NO: 257506
aguugagcaaucaugacuc

SEQ ID NO: 257508 - RNA, 19 nt, Artificial Sequence
  Description of Artificial Sequence: Synthetic oligonucleotide
  Sense strand starting at position 3307 SEQ ID NO: 3312
agucaugauugcucaacua

SEQ ID NO: 257509 - RNA, 19 nt, Artificial Sequence
  Description of Artificial Sequence: Synthetic oligonucleotide
  Antisense strand to SEQ ID NO: 257508
uaguugagcaaucaugacu

SEQ ID NO: 257510 - RNA, 19 nt, Artificial Sequence
  Description of Artificial Sequence: Synthetic oligonucleotide
  Sense strand starting at position 3445 SEQ ID NO: 3312
guugacuuauggcugaaac

SEQ ID NO: 257511 - RNA, 19 nt, Artificial Sequence
  Description of Artificial Sequence: Synthetic oligonucleotide
  Antisense strand to SEQ ID NO: 257510
guuucagccauaagucaac

SEQ ID NO: 257512 - RNA, 19 nt, Artificial Sequence
  Description of Artificial Sequence: Synthetic oligonucleotide
  Sense strand starting at position 3446 SEQ ID NO: 3312
uugacuuauggcugaaacu

SEQ ID NO: 257513 - RNA, 19 nt, Artificial Sequence
  Description of Artificial Sequence: Synthetic oligonucleotide
  Antisense strand to SEQ ID NO: 257512
aguuucagccauaagucaa

SEQ ID NO: 257514 - RNA, 19 nt, Artificial Sequence
  Description of Artificial Sequence: Synthetic oligonucleotide
  Sense strand starting at position 3455 SEQ ID NO: 3312
ggcugaaacugcucccaua

SEQ ID NO: 257515 - RNA, 19 nt, Artificial Sequence
  Description of Artificial Sequence: Synthetic oligonucleotide
  Antisense strand to SEQ ID NO: 257514
uaugggagcaguuucagcc

SEQ ID NO: 257516 - RNA, 19 nt, Artificial Sequence
  Description of Artificial Sequence: Synthetic oligonucleotide
  Sense strand starting at position 3641 SEQ ID NO: 3312
uuacuuggguacuuaaaua

SEQ ID NO: 257517 - RNA, 19 nt, Artificial Sequence
  Description of Artificial Sequence: Synthetic oligonucleotide
  Antisense strand to SEQ ID NO: 257516
uauuuaaguacccaaguaa

SEQ ID NO: 257518 - RNA, 19 nt, Artificial Sequence
  Description of Artificial Sequence: Synthetic oligonucleotide
  Sense strand starting at position 132 SEQ ID NO: 3313
ucugauuuccgguguuucu

SEQ ID NO: 257519 - RNA, 19 nt, Artificial Sequence
  Description of Artificial Sequence: Synthetic oligonucleotide
  Antisense strand to SEQ ID NO: 257518
agaaacaccggaaaucaga

SEQ ID NO: 257520 - RNA, 19 nt, Artificial Sequence
  Description of Artificial Sequence: Synthetic oligonucleotide
  Sense strand starting at position 142 SEQ ID NO: 3313
gguguuucuccagagcauu

SEQ ID NO: 257521 - RNA, 19 nt, Artificial Sequence
  Description of Artificial Sequence: Synthetic oligonucleotide
  Antisense strand to SEQ ID NO: 257520
aaugcucuggagaaacacc

SEQ ID NO: 257522 - RNA, 19 nt, Artificial Sequence
  Description of Artificial Sequence: Synthetic oligonucleotide
  Sense strand starting at position 241 SEQ ID NO: 3313
cagccaucccuauguagga

SEQ ID NO: 257523 - RNA, 19 nt, Artificial Sequence
  Description of Artificial Sequence: Synthetic oligonucleotide
  Antisense strand to SEQ ID NO: 257522
uccuacauagggauggcug

SEQ ID NO: 257524 - RNA, 19 nt, Artificial Sequence
  Description of Artificial Sequence: Synthetic oligonucleotide
  Sense strand starting at position 513 SEQ ID NO: 3313
uccuuuaaacuuuggaaga

SEQ ID NO: 257525 - RNA, 19 nt, Artificial Sequence
  Description of Artificial Sequence: Synthetic oligonucleotide
  Antisense strand to SEQ ID NO: 257524
ucuuccaaaguuuaaagga

SEQ ID NO: 257526 - RNA, 19 nt, Artificial Sequence
  Description of Artificial Sequence: Synthetic oligonucleotide
  Sense strand starting at position 553 SEQ ID NO: 3313
ggcucuacaccugguuaga

SEQ ID NO: 257527 - RNA, 19 nt, Artificial Sequence
  Description of Artificial Sequence: Synthetic oligonucleotide
  Antisense strand to SEQ ID NO: 257526
ucuaaccagguguagagcc

SEQ ID NO: 257528 - RNA, 19 nt, Artificial Sequence
  Description of Artificial Sequence: Synthetic oligonucleotide
  Sense strand starting at position 566 SEQ ID NO: 3313
guuagaucuguccaucaug

SEQ ID NO: 257529 - RNA, 19 nt, Artificial Sequence
  Description of Artificial Sequence: Synthetic oligonucleotide
  Antisense strand to SEQ ID NO: 257528
caugauggacagaucuaac

SEQ ID NO: 257530 - RNA, 19 nt, Artificial Sequence
  Description of Artificial Sequence: Synthetic oligonucleotide
  Sense strand starting at position 589 SEQ ID NO: 3313
guggaagucucagucacaa

SEQ ID NO: 257531 - RNA, 19 nt, Artificial Sequence
  Description of Artificial Sequence: Synthetic oligonucleotide
  Antisense strand to SEQ ID NO: 257530
uugugacugagacuuccac

SEQ ID NO: 257532 - RNA, 19 nt, Artificial Sequence
  Description of Artificial Sequence: Synthetic oligonucleotide
  Sense strand starting at position 731 SEQ ID NO: 3313
gaaauaggugcugaguaug

SEQ ID NO: 257533 - RNA, 19 nt, Artificial Sequence
  Description of Artificial Sequence: Synthetic oligonucleotide
  Antisense strand to SEQ ID NO: 257532
cauacucagcaccuauuuc

SEQ ID NO: 257534 - RNA, 19 nt, Artificial Sequence
  Description of Artificial Sequence: Synthetic oligonucleotide
  Sense strand starting at position 757 SEQ ID NO: 3313
agcugacuuugcuugaaca

SEQ ID NO: 257535 - RNA, 19 nt, Artificial Sequence
  Description of Artificial Sequence: Synthetic oligonucleotide
  Antisense strand to SEQ ID NO: 257534
uguucaagcaaagucagcu

SEQ ID NO: 257536 - RNA, 19 nt, Artificial Sequence
  Description of Artificial Sequence: Synthetic oligonucleotide
  Sense strand starting at position 759 SEQ ID NO: 3313
cugacuuugcuugaacauc

SEQ ID NO: 257537 - RNA, 19 nt, Artificial Sequence
  Description of Artificial Sequence: Synthetic oligonucleotide
  Antisense strand to SEQ ID NO: 257536
gauguucaagcaaagucag

SEQ ID NO: 257538 - RNA, 19 nt, Artificial Sequence
  Description of Artificial Sequence: Synthetic oligonucleotide
  Sense strand starting at position 791 SEQ ID NO: 3313
acagucauguauccagaau

SEQ ID NO: 257539 - RNA, 19 nt, Artificial Sequence
  Description of Artificial Sequence: Synthetic oligonucleotide
  Antisense strand to SEQ ID NO: 257538
auucuggauacaugacugu

SEQ ID NO: 257540 - RNA, 19 nt, Artificial Sequence
  Description of Artificial Sequence: Synthetic oligonucleotide
  Sense strand starting at position 840 SEQ ID NO: 3313
ugauuauuauagccauuag

SEQ ID NO: 257541 - RNA, 19 nt, Artificial Sequence
  Description of Artificial Sequence: Synthetic oligonucleotide
  Antisense strand to SEQ ID NO: 257540
cuaauggcuauaauaauca

SEQ ID NO: 257542 - RNA, 19 nt, Artificial Sequence
  Description of Artificial Sequence: Synthetic oligonucleotide
  Sense strand starting at position 874 SEQ ID NO: 3313
cuguuauuacacuguaaau

SEQ ID NO: 257543 - RNA, 19 nt, Artificial Sequence
  Description of Artificial Sequence: Synthetic oligonucleotide
  Antisense strand to SEQ ID NO: 257542
auuuacaguguaauaacag

SEQ ID NO: 257544 - RNA, 19 nt, Artificial Sequence
  Description of Artificial Sequence: Synthetic oligonucleotide
  Sense strand starting at position 876 SEQ ID NO: 3313
guuauuacacuguaaauuc

SEQ ID NO: 257545 - RNA, 19 nt, Artificial Sequence
  Description of Artificial Sequence: Synthetic oligonucleotide
  Antisense strand to SEQ ID NO: 257544
gaauuuacaguguaauaac

SEQ ID NO: 257546 - RNA, 19 nt, Artificial Sequence
  Description of Artificial Sequence: Synthetic oligonucleotide
  Sense strand starting at position 886 SEQ ID NO: 3313
uguaaauuccuagaggcag

SEQ ID NO: 257547 - RNA, 19 nt, Artificial Sequence
  Description of Artificial Sequence: Synthetic oligonucleotide
  Antisense strand to SEQ ID NO: 257546
cugccucuaggaauuuaca

SEQ ID NO: 257548 - RNA, 19 nt, Artificial Sequence
  Description of Artificial Sequence: Synthetic oligonucleotide
  Sense strand starting at position 980 SEQ ID NO: 3313
acacucuggccaggagaua

SEQ ID NO: 257549 - RNA, 19 nt, Artificial Sequence
  Description of Artificial Sequence: Synthetic oligonucleotide
  Antisense strand to SEQ ID NO: 257548
uaucuccuggccagagugu

SEQ ID NO: 257550 - RNA, 19 nt, Artificial Sequence
  Description of Artificial Sequence: Synthetic oligonucleotide
  Sense strand starting at position 1066 SEQ ID NO: 3313
ggaagaugaucccaagaga

SEQ ID NO: 257551 - RNA, 19 nt, Artificial Sequence
  Description of Artificial Sequence: Synthetic oligonucleotide
  Antisense strand to SEQ ID NO: 257550
ucucuugggaucaucuucc

SEQ ID NO: 257552 - RNA, 19 nt, Artificial Sequence
  Description of Artificial Sequence: Synthetic oligonucleotide
  Sense strand starting at position 1086 SEQ ID NO: 3313
cguucuagacuaggaaauc

SEQ ID NO: 257553 - RNA, 19 nt, Artificial Sequence
  Description of Artificial Sequence: Synthetic oligonucleotide
  Antisense strand to SEQ ID NO: 257552
gauuuccuagucuagaacg

SEQ ID NO: 257554 - RNA, 19 nt, Artificial Sequence
  Description of Artificial Sequence: Synthetic oligonucleotide
  Sense strand starting at position 1184 SEQ ID NO: 3313
guugaaugcugagugagaa

SEQ ID NO: 257555 - RNA, 19 nt, Artificial Sequence
  Description of Artificial Sequence: Synthetic oligonucleotide
  Antisense strand to SEQ ID NO: 257554
uucucacucagcauucaac

SEQ ID NO: 257556 - RNA, 19 nt, Artificial Sequence
  Description of Artificial Sequence: Synthetic oligonucleotide
  Sense strand starting at position 1185 SEQ ID NO: 3313
uugaaugcugagugagaaa

SEQ ID NO: 257557 - RNA, 19 nt, Artificial Sequence
  Description of Artificial Sequence: Synthetic oligonucleotide
  Antisense strand to SEQ ID NO: 257556
uuucucacucagcauucaa

SEQ ID NO: 257558 - RNA, 19 nt, Artificial Sequence
  Description of Artificial Sequence: Synthetic oligonucleotide
  Sense strand starting at position 1236 SEQ ID NO: 3313
accugaguuuaaccuaaga

SEQ ID NO: 257559 - RNA, 19 nt, Artificial Sequence
  Description of Artificial Sequence: Synthetic oligonucleotide
  Antisense strand to SEQ ID NO: 257558
ucuuagguuaaacucaggu

SEQ ID NO: 257560 - RNA, 19 nt, Artificial Sequence
  Description of Artificial Sequence: Synthetic oligonucleotide
  Sense strand starting at position 1493 SEQ ID NO: 3313
uuuaauaagcauuggcauu

SEQ ID NO: 257561 - RNA, 19 nt, Artificial Sequence
  Description of Artificial Sequence: Synthetic oligonucleotide
  Antisense strand to SEQ ID NO: 257560
aaugccaaugcuuauuaaa

SEQ ID NO: 257562 - RNA, 19 nt, Artificial Sequence
  Description of Artificial Sequence: Synthetic oligonucleotide
  Sense strand starting at position 1632 SEQ ID NO: 3313
cagacaguauuagugauga

SEQ ID NO: 257563 - RNA, 19 nt, Artificial Sequence
  Description of Artificial Sequence: Synthetic oligonucleotide
  Antisense strand to SEQ ID NO: 257562
ucaucacuaauacugucug

SEQ ID NO: 257564 - RNA, 19 nt, Artificial Sequence
  Description of Artificial Sequence: Synthetic oligonucleotide
  Sense strand starting at position 1758 SEQ ID NO: 3313
ggaaucguacuuuaccauu

SEQ ID NO: 257565 - RNA, 19 nt, Artificial Sequence
  Description of Artificial Sequence: Synthetic oligonucleotide
  Antisense strand to SEQ ID NO: 257564
aaugguaaaguacgauucc

SEQ ID NO: 257566 - RNA, 19 nt, Artificial Sequence
  Description of Artificial Sequence: Synthetic oligonucleotide
  Sense strand starting at position 2018 SEQ ID NO: 3313
gcaggauguuuccugacau

SEQ ID NO: 257567 - RNA, 19 nt, Artificial Sequence
  Description of Artificial Sequence: Synthetic oligonucleotide
  Antisense strand to SEQ ID NO: 257566
augucaggaaacauccugc

SEQ ID NO: 257568 - RNA, 19 nt, Artificial Sequence
  Description of Artificial Sequence: Synthetic oligonucleotide
  Sense strand starting at position 2121 SEQ ID NO: 3313
gaggcuuugggacacaagu

SEQ ID NO: 257569 - RNA, 19 nt, Artificial Sequence
  Description of Artificial Sequence: Synthetic oligonucleotide
  Antisense strand to SEQ ID NO: 257568
acuugugucccaaagccuc

SEQ ID NO: 257570 - RNA, 19 nt, Artificial Sequence
  Description of Artificial Sequence: Synthetic oligonucleotide
  Sense strand starting at position 2123 SEQ ID NO: 3313
ggcuuugggacacaaguua

SEQ ID NO: 257571 - RNA, 19 nt, Artificial Sequence
  Description of Artificial Sequence: Synthetic oligonucleotide
  Antisense strand to SEQ ID NO: 257570
uaacuugugucccaaagcc

SEQ ID NO: 257572 - RNA, 19 nt, Artificial Sequence
  Description of Artificial Sequence: Synthetic oligonucleotide
  Sense strand starting at position 2294 SEQ ID NO: 3313
ugccucaaccuuuagaguu

SEQ ID NO: 257573 - RNA, 19 nt, Artificial Sequence
  Description of Artificial Sequence: Synthetic oligonucleotide
  Antisense strand to SEQ ID NO: 257572
aacucuaaagguugaggca

SEQ ID NO: 257574 - RNA, 19 nt, Artificial Sequence
  Description of Artificial Sequence: Synthetic oligonucleotide
  Sense strand starting at position 2392 SEQ ID NO: 3313
uuguucuaacaaugagucu

SEQ ID NO: 257575 - RNA, 19 nt, Artificial Sequence
  Description of Artificial Sequence: Synthetic oligonucleotide
  Antisense strand to SEQ ID NO: 257574
agacucauuguuagaacaa

SEQ ID NO: 257576 - RNA, 19 nt, Artificial Sequence
  Description of Artificial Sequence: Synthetic oligonucleotide
  Sense strand starting at position 2461 SEQ ID NO: 3313
ccaggugauuuauauacac

SEQ ID NO: 257577 - RNA, 19 nt, Artificial Sequence
  Description of Artificial Sequence: Synthetic oligonucleotide
  Antisense strand to SEQ ID NO: 257576
guguauauaaaucaccugg

SEQ ID NO: 257578 - RNA, 19 nt, Artificial Sequence
  Description of Artificial Sequence: Synthetic oligonucleotide
  Sense strand starting at position 2489 SEQ ID NO: 3313
ugagaagccuugcucugaa

SEQ ID NO: 257579 - RNA, 19 nt, Artificial Sequence
  Description of Artificial Sequence: Synthetic oligonucleotide
  Antisense strand to SEQ ID NO: 257578
uucagagcaaggcuucuca

SEQ ID NO: 257580 - RNA, 19 nt, Artificial Sequence
  Description of Artificial Sequence: Synthetic oligonucleotide
  Sense strand starting at position 2523 SEQ ID NO: 3313
cuuaguauuucuucuugua

SEQ ID NO: 257581 - RNA, 19 nt, Artificial Sequence
  Description of Artificial Sequence: Synthetic oligonucleotide
  Antisense strand to SEQ ID NO: 257580
uacaagaagaaauacuaag

SEQ ID NO: 257582 - RNA, 19 nt, Artificial Sequence
  Description of Artificial Sequence: Synthetic oligonucleotide
  Sense strand starting at position 2702 SEQ ID NO: 3313
uagcauggugguuaagaca

SEQ ID NO: 257583 - RNA, 19 nt, Artificial Sequence
  Description of Artificial Sequence: Synthetic oligonucleotide
  Antisense strand to SEQ ID NO: 257582
ugucuuaaccaccaugcua

SEQ ID NO: 257584 - RNA, 19 nt, Artificial Sequence
  Description of Artificial Sequence: Synthetic oligonucleotide
  Sense strand starting at position 2789 SEQ ID NO: 3313
ggcaaaucacuugagcuuu

SEQ ID NO: 257585 - RNA, 19 nt, Artificial Sequence
  Description of Artificial Sequence: Synthetic oligonucleotide
  Antisense strand to SEQ ID NO: 257584
aaagcucaagugauuugcc

SEQ ID NO: 257586 - RNA, 19 nt, Artificial Sequence
  Description of Artificial Sequence: Synthetic oligonucleotide
  Sense strand starting at position 2817 SEQ ID NO: 3313
acucuucuguuuguauaaa

SEQ ID NO: 257587 - RNA, 19 nt, Artificial Sequence
  Description of Artificial Sequence: Synthetic oligonucleotide
  Antisense strand to SEQ ID NO: 257586
uuuauacaaacagaagagu

SEQ ID NO: 257588 - RNA, 19 nt, Artificial Sequence
  Description of Artificial Sequence: Synthetic oligonucleotide
  Sense strand starting at position 2847 SEQ ID NO: 3313
ugaauuucgugagccuuaa

SEQ ID NO: 257589 - RNA, 19 nt, Artificial Sequence
  Description of Artificial Sequence: Synthetic oligonucleotide
  Antisense strand to SEQ ID NO: 257588
uuaaggcucacgaaauuca

SEQ ID NO: 257590 - RNA, 19 nt, Artificial Sequence
  Description of Artificial Sequence: Synthetic oligonucleotide
  Sense strand starting at position 2851 SEQ ID NO: 3313
uuucgugagccuuaaauga

SEQ ID NO: 257591 - RNA, 19 nt, Artificial Sequence
  Description of Artificial Sequence: Synthetic oligonucleotide
  Antisense strand to SEQ ID NO: 257590
ucauuuaaggcucacgaaa

SEQ ID NO: 257592 - RNA, 19 nt, Artificial Sequence
  Description of Artificial Sequence: Synthetic oligonucleotide
  Sense strand starting at position 3077 SEQ ID NO: 3313
aaagguugaugucccugaa

SEQ ID NO: 257593 - RNA, 19 nt, Artificial Sequence
  Description of Artificial Sequence: Synthetic oligonucleotide
  Antisense strand to SEQ ID NO: 257592
uucagggacaucaaccuuu

SEQ ID NO: 257594 - RNA, 19 nt, Artificial Sequence
  Description of Artificial Sequence: Synthetic oligonucleotide
  Sense strand starting at position 3775 SEQ ID NO: 3313
aaugucaugggcuaauuau

SEQ ID NO: 257595 - RNA, 19 nt, Artificial Sequence
  Description of Artificial Sequence: Synthetic oligonucleotide
  Antisense strand to SEQ ID NO: 257594
auaauuagcccaugacauu

SEQ ID NO: 257596 - RNA, 19 nt, Artificial Sequence
  Description of Artificial Sequence: Synthetic oligonucleotide
  Sense strand starting at position 3795 SEQ ID NO: 3313
gaggaucccuguucuuaaa

SEQ ID NO: 257597 - RNA, 19 nt, Artificial Sequence
  Description of Artificial Sequence: Synthetic oligonucleotide
  Antisense strand to SEQ ID NO: 257596
uuuaagaacagggauccuc

SEQ ID NO: 257598 - RNA, 19 nt, Artificial Sequence
  Description of Artificial Sequence: Synthetic oligonucleotide
  Sense strand starting at position 2178 SEQ ID NO: 3314
ccucuuugccuucguauaa

SEQ ID NO: 257599 - RNA, 19 nt, Artificial Sequence
  Description of Artificial Sequence: Synthetic oligonucleotide
  Antisense strand to SEQ ID NO: 257598
uuauacgaaggcaaagagg

SEQ ID NO: 257600 - RNA, 19 nt, Artificial Sequence
  Description of Artificial Sequence: Synthetic oligonucleotide
  Sense strand starting at position 2182 SEQ ID NO: 3314
uuugccuucguauaacaua

SEQ ID NO: 257601 - RNA, 19 nt, Artificial Sequence
  Description of Artificial Sequence: Synthetic oligonucleotide
  Antisense strand to SEQ ID NO: 257600
uauguuauacgaaggcaaa

SEQ ID NO: 257602 - RNA, 19 nt, Artificial Sequence
  Description of Artificial Sequence: Synthetic oligonucleotide
  Sense strand starting at position 2202 SEQ ID NO: 3314
uguguuuccugcuuuggau

SEQ ID NO: 257603 - RNA, 19 nt, Artificial Sequence
  Description of Artificial Sequence: Synthetic oligonucleotide
  Antisense strand to SEQ ID NO: 257602
auccaaagcaggaaacaca

SEQ ID NO: 257604 - RNA, 19 nt, Artificial Sequence
  Description of Artificial Sequence: Synthetic oligonucleotide
  Sense strand starting at position 2209 SEQ ID NO: 3314
ccugcuuuggauuguaauu

SEQ ID NO: 257605 - RNA, 19 nt, Artificial Sequence
  Description of Artificial Sequence: Synthetic oligonucleotide
  Antisense strand to SEQ ID NO: 257604
aauuacaauccaaagcagg

SEQ ID NO: 257606 - RNA, 19 nt, Artificial Sequence
  Description of Artificial Sequence: Synthetic oligonucleotide
  Sense strand starting at position 2263 SEQ ID NO: 3314
gcugcuuguaggcaagagu

SEQ ID NO: 257607 - RNA, 19 nt, Artificial Sequence
  Description of Artificial Sequence: Synthetic oligonucleotide
  Antisense strand to SEQ ID NO: 257606
acucuugccuacaagcagc

SEQ ID NO: 257608 - RNA, 19 nt, Artificial Sequence
  Description of Artificial Sequence: Synthetic oligonucleotide
  Sense strand starting at position 2335 SEQ ID NO: 3314
agaguauugcucugcacau

SEQ ID NO: 257609 - RNA, 19 nt, Artificial Sequence
  Description of Artificial Sequence: Synthetic oligonucleotide
  Antisense strand to SEQ ID NO: 257608
augugcagagcaauacucu

SEQ ID NO: 257610 - RNA, 19 nt, Artificial Sequence
  Description of Artificial Sequence: Synthetic oligonucleotide
  Sense strand starting at position 2336 SEQ ID NO: 3314
gaguauugcucugcacaug

SEQ ID NO: 257611 - RNA, 19 nt, Artificial Sequence
  Description of Artificial Sequence: Synthetic oligonucleotide
  Antisense strand to SEQ ID NO: 257610
caugugcagagcaauacuc

SEQ ID NO: 257612 - RNA, 19 nt, Artificial Sequence
  Description of Artificial Sequence: Synthetic oligonucleotide
  Sense strand starting at position 2352 SEQ ID NO: 3314
augcccugucgauaucuaa

SEQ ID NO: 257613 - RNA, 19 nt, Artificial Sequence
  Description of Artificial Sequence: Synthetic oligonucleotide
  Antisense strand to SEQ ID NO: 257612
uuagauaucgacagggcau

SEQ ID NO: 257614 - RNA, 19 nt, Artificial Sequence
  Description of Artificial Sequence: Synthetic oligonucleotide
  Sense strand starting at position 2523 SEQ ID NO: 3314
aaaguagauuugugaucug

SEQ ID NO: 257615 - RNA, 19 nt, Artificial Sequence
  Description of Artificial Sequence: Synthetic oligonucleotide
  Antisense strand to SEQ ID NO: 257614
cagaucacaaaucuacuuu

SEQ ID NO: 257616 - RNA, 19 nt, Artificial Sequence
  Description of Artificial Sequence: Synthetic oligonucleotide
  Sense strand starting at position 2526 SEQ ID NO: 3314
guagauuugugaucugcca

SEQ ID NO: 257617 - RNA, 19 nt, Artificial Sequence
  Description of Artificial Sequence: Synthetic oligonucleotide
  Antisense strand to SEQ ID NO: 257616
uggcagaucacaaaucuac

SEQ ID NO: 257618 - RNA, 19 nt, Artificial Sequence
  Description of Artificial Sequence: Synthetic oligonucleotide
  Sense strand starting at position 2551 SEQ ID NO: 3314
ugccaaaguuuauugagau

SEQ ID NO: 257619 - RNA, 19 nt, Artificial Sequence
  Description of Artificial Sequence: Synthetic oligonucleotide
  Antisense strand to SEQ ID NO: 257618
aucucaauaaacuuuggca

SEQ ID NO: 257620 - RNA, 19 nt, Artificial Sequence
  Description of Artificial Sequence: Synthetic oligonucleotide
  Sense strand starting at position 2572 SEQ ID NO: 3314
aggaaaguagagugcaaua

SEQ ID NO: 257621 - RNA, 19 nt, Artificial Sequence
  Description of Artificial Sequence: Synthetic oligonucleotide
  Antisense strand to SEQ ID NO: 257620
uauugcacucuacuuuccu

SEQ ID NO: 257622 - RNA, 19 nt, Artificial Sequence
  Description of Artificial Sequence: Synthetic oligonucleotide
  Sense strand starting at position 2591 SEQ ID NO: 3314
ugcugucacugugcauaua

SEQ ID NO: 257623 - RNA, 19 nt, Artificial Sequence
  Description of Artificial Sequence: Synthetic oligonucleotide
  Antisense strand to SEQ ID NO: 257622
uauaugcacagugacagca

SEQ ID NO: 257624 - RNA, 19 nt, Artificial Sequence
  Description of Artificial Sequence: Synthetic oligonucleotide
  Sense strand starting at position 2592 SEQ ID NO: 3314
gcugucacugugcauauaa

SEQ ID NO: 257625 - RNA, 19 nt, Artificial Sequence
  Description of Artificial Sequence: Synthetic oligonucleotide
  Antisense strand to SEQ ID NO: 257624
uuauaugcacagugacagc

SEQ ID NO: 257626 - RNA, 19 nt, Artificial Sequence
  Description of Artificial Sequence: Synthetic oligonucleotide
  Sense strand starting at position 2932 SEQ ID NO: 3314
ccuggaacuucguucgaua

SEQ ID NO: 257627 - RNA, 19 nt, Artificial Sequence
  Description of Artificial Sequence: Synthetic oligonucleotide
  Antisense strand to SEQ ID NO: 257626
uaucgaacgaaguuccagg

SEQ ID NO: 257628 - RNA, 19 nt, Artificial Sequence
  Description of Artificial Sequence: Synthetic oligonucleotide
  Sense strand starting at position 2934 SEQ ID NO: 3314
uggaacuucguucgauaug

SEQ ID NO: 257629 - RNA, 19 nt, Artificial Sequence
  Description of Artificial Sequence: Synthetic oligonucleotide
  Antisense strand to SEQ ID NO: 257628
cauaucgaacgaaguucca

SEQ ID NO: 257630 - RNA, 19 nt, Artificial Sequence
  Description of Artificial Sequence: Synthetic oligonucleotide
  Sense strand starting at position 2937 SEQ ID NO: 3314
aacuucguucgauauguau

SEQ ID NO: 257631 - RNA, 19 nt, Artificial Sequence
  Description of Artificial Sequence: Synthetic oligonucleotide
  Antisense strand to SEQ ID NO: 257630
auacauaucgaacgaaguu

SEQ ID NO: 257632 - RNA, 19 nt, Artificial Sequence
  Description of Artificial Sequence: Synthetic oligonucleotide
  Sense strand starting at position 2939 SEQ ID NO: 3314
cuucguucgauauguauau

SEQ ID NO: 257633 - RNA, 19 nt, Artificial Sequence
  Description of Artificial Sequence: Synthetic oligonucleotide
  Antisense strand to SEQ ID NO: 257632
auauacauaucgaacgaag

SEQ ID NO: 257634 - RNA, 19 nt, Artificial Sequence
  Description of Artificial Sequence: Synthetic oligonucleotide
  Sense strand starting at position 2940 SEQ ID NO: 3314
uucguucgauauguauauu

SEQ ID NO: 257635 - RNA, 19 nt, Artificial Sequence
  Description of Artificial Sequence: Synthetic oligonucleotide
  Antisense strand to SEQ ID NO: 257634
aauauacauaucgaacgaa

SEQ ID NO: 257636 - RNA, 19 nt, Artificial Sequence
  Description of Artificial Sequence: Synthetic oligonucleotide
  Sense strand starting at position 2943 SEQ ID NO: 3314
guucgauauguauauucuu

SEQ ID NO: 257637 - RNA, 19 nt, Artificial Sequence
  Description of Artificial Sequence: Synthetic oligonucleotide
  Antisense strand to SEQ ID NO: 257636
aagaauauacauaucgaac

SEQ ID NO: 257638 - RNA, 19 nt, Artificial Sequence
  Description of Artificial Sequence: Synthetic oligonucleotide
  Sense strand starting at position 2998 SEQ ID NO: 3314
gaggguagggcccaguaau

SEQ ID NO: 257639 - RNA, 19 nt, Artificial Sequence
  Description of Artificial Sequence: Synthetic oligonucleotide
  Antisense strand to SEQ ID NO: 257638
auuacugggcccuacccuc

SEQ ID NO: 257640 - RNA, 19 nt, Artificial Sequence
  Description of Artificial Sequence: Synthetic oligonucleotide
  Sense strand starting at position 3077 SEQ ID NO: 3314
accagugauuuagaucugu

SEQ ID NO: 257641 - RNA, 19 nt, Artificial Sequence
  Description of Artificial Sequence: Synthetic oligonucleotide
  Antisense strand to SEQ ID NO: 257640
acagaucuaaaucacuggu

SEQ ID NO: 257642 - RNA, 19 nt, Artificial Sequence
  Description of Artificial Sequence: Synthetic oligonucleotide
  Sense strand starting at position 3082 SEQ ID NO: 3314
ugauuuagaucugugugcu

SEQ ID NO: 257643 - RNA, 19 nt, Artificial Sequence
  Description of Artificial Sequence: Synthetic oligonucleotide
  Antisense strand to SEQ ID NO: 257642
agcacacagaucuaaauca

SEQ ID NO: 257644 - RNA, 19 nt, Artificial Sequence
  Description of Artificial Sequence: Synthetic oligonucleotide
  Sense strand starting at position 3083 SEQ ID NO: 3314
gauuuagaucugugugcuc

SEQ ID NO: 257645 - RNA, 19 nt, Artificial Sequence
  Description of Artificial Sequence: Synthetic oligonucleotide
  Antisense strand to SEQ ID NO: 257644
gagcacacagaucuaaauc

SEQ ID NO: 257646 - RNA, 19 nt, Artificial Sequence
  Description of Artificial Sequence: Synthetic oligonucleotide
  Sense strand starting at position 3114 SEQ ID NO: 3314
uacuguccucccugaggua

SEQ ID NO: 257647 - RNA, 19 nt, Artificial Sequence
  Description of Artificial Sequence: Synthetic oligonucleotide
  Antisense strand to SEQ ID NO: 257646
uaccucagggaggacagua

SEQ ID NO: 257648 - RNA, 19 nt, Artificial Sequence
  Description of Artificial Sequence: Synthetic oligonucleotide
  Sense strand starting at position 3129 SEQ ID NO: 3314
gguagucauuguccugaau

SEQ ID NO: 257649 - RNA, 19 nt, Artificial Sequence
  Description of Artificial Sequence: Synthetic oligonucleotide
  Antisense strand to SEQ ID NO: 257648
auucaggacaaugacuacc

SEQ ID NO: 257650 - RNA, 19 nt, Artificial Sequence
  Description of Artificial Sequence: Synthetic oligonucleotide
  Sense strand starting at position 3154 SEQ ID NO: 3314
cuugcacauuugugugauc

SEQ ID NO: 257651 - RNA, 19 nt, Artificial Sequence
  Description of Artificial Sequence: Synthetic oligonucleotide
  Antisense strand to SEQ ID NO: 257650
gaucacacaaaugugcaag

SEQ ID NO: 257652 - RNA, 19 nt, Artificial Sequence
  Description of Artificial Sequence: Synthetic oligonucleotide
  Sense strand starting at position 3155 SEQ ID NO: 3314
uugcacauuugugugauca

SEQ ID NO: 257653 - RNA, 19 nt, Artificial Sequence
  Description of Artificial Sequence: Synthetic oligonucleotide
  Antisense strand to SEQ ID NO: 257652
ugaucacacaaaugugcaa

SEQ ID NO: 257654 - RNA, 19 nt, Artificial Sequence
  Description of Artificial Sequence: Synthetic oligonucleotide
  Sense strand starting at position 3156 SEQ ID NO: 3314
ugcacauuugugugaucac

SEQ ID NO: 257655 - RNA, 19 nt, Artificial Sequence
  Description of Artificial Sequence: Synthetic oligonucleotide
  Antisense strand to SEQ ID NO: 257654
gugaucacacaaaugugca

SEQ ID NO: 257656 - RNA, 19 nt, Artificial Sequence
  Description of Artificial Sequence: Synthetic oligonucleotide
  Sense strand starting at position 3157 SEQ ID NO: 3314
gcacauuugugugaucaca

SEQ ID NO: 257657 - RNA, 19 nt, Artificial Sequence
  Description of Artificial Sequence: Synthetic oligonucleotide
  Antisense strand to SEQ ID NO: 257656
ugugaucacacaaaugugc

SEQ ID NO: 257658 - RNA, 19 nt, Artificial Sequence
  Description of Artificial Sequence: Synthetic oligonucleotide
  Sense strand starting at position 3233 SEQ ID NO: 3314
aggauauaauacuacaugu

SEQ ID NO: 257659 - RNA, 19 nt, Artificial Sequence
  Description of Artificial Sequence: Synthetic oligonucleotide
  Antisense strand to SEQ ID NO: 257658
acauguaguauuauauccu

SEQ ID NO: 257660 - RNA, 19 nt, Artificial Sequence
  Description of Artificial Sequence: Synthetic oligonucleotide
  Sense strand starting at position 3335 SEQ ID NO: 3314
auacauguugcauguaauu

SEQ ID NO: 257661 - RNA, 19 nt, Artificial Sequence
  Description of Artificial Sequence: Synthetic oligonucleotide
  Antisense strand to SEQ ID NO: 257660
aauuacaugcaacauguau

SEQ ID NO: 257662 - RNA, 19 nt, Artificial Sequence
  Description of Artificial Sequence: Synthetic oligonucleotide
  Sense strand starting at position 3368 SEQ ID NO: 3314
gcuguauaauaaccuuuga

SEQ ID NO: 257663 - RNA, 19 nt, Artificial Sequence
  Description of Artificial Sequence: Synthetic oligonucleotide
  Antisense strand to SEQ ID NO: 257662
ucaaagguuauuauacagc

SEQ ID NO: 257664 - RNA, 19 nt, Artificial Sequence
  Description of Artificial Sequence: Synthetic oligonucleotide
  Sense strand starting at position 3396 SEQ ID NO: 3314
uaugguaacuuggaucuga

SEQ ID NO: 257665 - RNA, 19 nt, Artificial Sequence
  Description of Artificial Sequence: Synthetic oligonucleotide
  Antisense strand to SEQ ID NO: 257664
ucagauccaaguuaccaua

SEQ ID NO: 257666 - RNA, 19 nt, Artificial Sequence
  Description of Artificial Sequence: Synthetic oligonucleotide
  Sense strand starting at position 3412 SEQ ID NO: 3314
ugauuucucuagugauaug

SEQ ID NO: 257667 - RNA, 19 nt, Artificial Sequence
  Description of Artificial Sequence: Synthetic oligonucleotide
  Antisense strand to SEQ ID NO: 257666
cauaucacuagagaaauca

SEQ ID NO: 257668 - RNA, 19 nt, Artificial Sequence
  Description of Artificial Sequence: Synthetic oligonucleotide
  Sense strand starting at position 3415 SEQ ID NO: 3314
uuucucuagugauaugaug

SEQ ID NO: 257669 - RNA, 19 nt, Artificial Sequence
  Description of Artificial Sequence: Synthetic oligonucleotide
  Antisense strand to SEQ ID NO: 257668
caucauaucacuagagaaa

SEQ ID NO: 257670 - RNA, 19 nt, Artificial Sequence
  Description of Artificial Sequence: Synthetic oligonucleotide
  Sense strand starting at position 3479 SEQ ID NO: 3314
uuuggauacucaguugaug

SEQ ID NO: 257671 - RNA, 19 nt, Artificial Sequence
  Description of Artificial Sequence: Synthetic oligonucleotide
  Antisense strand to SEQ ID NO: 257670
caucaacugaguauccaaa

SEQ ID NO: 257672 - RNA, 19 nt, Artificial Sequence
  Description of Artificial Sequence: Synthetic oligonucleotide
  Sense strand starting at position 3487 SEQ ID NO: 3314
cucaguugaugugcucuua

SEQ ID NO: 257673 - RNA, 19 nt, Artificial Sequence
  Description of Artificial Sequence: Synthetic oligonucleotide
  Antisense strand to SEQ ID NO: 257672
uaagagcacaucaacugag

SEQ ID NO: 257674 - RNA, 19 nt, Artificial Sequence
  Description of Artificial Sequence: Synthetic oligonucleotide
  Sense strand starting at position 3515 SEQ ID NO: 3314
gcaguuuaagaaugaccua

SEQ ID NO: 257675 - RNA, 19 nt, Artificial Sequence
  Description of Artificial Sequence: Synthetic oligonucleotide
  Antisense strand to SEQ ID NO: 257674
uaggucauucuuaaacugc

SEQ ID NO: 257676 - RNA, 19 nt, Artificial Sequence
  Description of Artificial Sequence: Synthetic oligonucleotide
  Sense strand starting at position 3773 SEQ ID NO: 3314
ucaucaugaggaugccaaa

SEQ ID NO: 257677 - RNA, 19 nt, Artificial Sequence
  Description of Artificial Sequence: Synthetic oligonucleotide
  Antisense strand to SEQ ID NO: 257676
uuuggcauccucaugauga

SEQ ID NO: 257678 - RNA, 19 nt, Artificial Sequence
  Description of Artificial Sequence: Synthetic oligonucleotide
  Sense strand starting at position 93 SEQ ID NO: 3315
ggugaacuguuaguccuau

SEQ ID NO: 257679 - RNA, 19 nt, Artificial Sequence
  Description of Artificial Sequence: Synthetic oligonucleotide
  Antisense strand to SEQ ID NO: 257678
auaggacuaacaguucacc

SEQ ID NO: 257680 - RNA, 19 nt, Artificial Sequence
  Description of Artificial Sequence: Synthetic oligonucleotide
  Sense strand starting at position 94 SEQ ID NO: 3315
gugaacuguuaguccuaua

SEQ ID NO: 257681 - RNA, 19 nt, Artificial Sequence
  Description of Artificial Sequence: Synthetic oligonucleotide
  Antisense strand to SEQ ID NO: 257680
uauaggacuaacaguucac

SEQ ID NO: 257682 - RNA, 19 nt, Artificial Sequence
  Description of Artificial Sequence: Synthetic oligonucleotide
  Sense strand starting at position 99 SEQ ID NO: 3315
cuguuaguccuauauccuu

SEQ ID NO: 257683 - RNA, 19 nt, Artificial Sequence
  Description of Artificial Sequence: Synthetic oligonucleotide
  Antisense strand to SEQ ID NO: 257682
aaggauauaggacuaacag

SEQ ID NO: 257684 - RNA, 19 nt, Artificial Sequence
  Description of Artificial Sequence: Synthetic oligonucleotide
  Sense strand starting at position 211 SEQ ID NO: 3315
aggccaguuucccuaaucu

SEQ ID NO: 257685 - RNA, 19 nt, Artificial Sequence
  Description of Artificial Sequence: Synthetic oligonucleotide
  Antisense strand to SEQ ID NO: 257684
agauuagggaaacuggccu

SEQ ID NO: 257686 - RNA, 19 nt, Artificial Sequence
  Description of Artificial Sequence: Synthetic oligonucleotide
  Sense strand starting at position 252 SEQ ID NO: 3315
gcaacaagauaauucgauu

SEQ ID NO: 257687 - RNA, 19 nt, Artificial Sequence
  Description of Artificial Sequence: Synthetic oligonucleotide
  Antisense strand to SEQ ID NO: 257686
aaucgaauuaucuuguugc

SEQ ID NO: 257688 - RNA, 19 nt, Artificial Sequence
  Description of Artificial Sequence: Synthetic oligonucleotide
  Sense strand starting at position 327 SEQ ID NO: 3315
uuaggaguugcgcaggaaa

SEQ ID NO: 257689 - RNA, 19 nt, Artificial Sequence
  Description of Artificial Sequence: Synthetic oligonucleotide
  Antisense strand to SEQ ID NO: 257688
uuuccugcgcaacuccuaa

SEQ ID NO: 257690 - RNA, 19 nt, Artificial Sequence
  Description of Artificial Sequence: Synthetic oligonucleotide
  Sense strand starting at position 329 SEQ ID NO: 3315
aggaguugcgcaggaaaca

SEQ ID NO: 257691 - RNA, 19 nt, Artificial Sequence
  Description of Artificial Sequence: Synthetic oligonucleotide
  Antisense strand to SEQ ID NO: 257690
uguuuccugcgcaacuccu

SEQ ID NO: 257692 - RNA, 19 nt, Artificial Sequence
  Description of Artificial Sequence: Synthetic oligonucleotide
  Sense strand starting at position 330 SEQ ID NO: 3315
ggaguugcgcaggaaacaa

SEQ ID NO: 257693 - RNA, 19 nt, Artificial Sequence
  Description of Artificial Sequence: Synthetic oligonucleotide
  Antisense strand to SEQ ID NO: 257692
uuguuuccugcgcaacucc

SEQ ID NO: 257694 - RNA, 19 nt, Artificial Sequence
  Description of Artificial Sequence: Synthetic oligonucleotide
  Sense strand starting at position 348 SEQ ID NO: 3315
aaagcucaacaguguagaa

SEQ ID NO: 257695 - RNA, 19 nt, Artificial Sequence
  Description of Artificial Sequence: Synthetic oligonucleotide
  Antisense strand to SEQ ID NO: 257694
uucuacacuguugagcuuu

SEQ ID NO: 257696 - RNA, 19 nt, Artificial Sequence
  Description of Artificial Sequence: Synthetic oligonucleotide
  Sense strand starting at position 350 SEQ ID NO: 3315
agcucaacaguguagaaga

SEQ ID NO: 257697 - RNA, 19 nt, Artificial Sequence
  Description of Artificial Sequence: Synthetic oligonucleotide
  Antisense strand to SEQ ID NO: 257696
ucuucuacacuguugagcu

SEQ ID NO: 257698 - RNA, 19 nt, Artificial Sequence
  Description of Artificial Sequence: Synthetic oligonucleotide
  Sense strand starting at position 361 SEQ ID NO: 3315
guagaagaugcucaaacgu

SEQ ID NO: 257699 - RNA, 19 nt, Artificial Sequence
  Description of Artificial Sequence: Synthetic oligonucleotide
  Antisense strand to SEQ ID NO: 257698
acguuugagcaucuucuac

SEQ ID NO: 257700 - RNA, 19 nt, Artificial Sequence
  Description of Artificial Sequence: Synthetic oligonucleotide
  Sense strand starting at position 668 SEQ ID NO: 3315
agauaacuacugcggucau

SEQ ID NO: 257701 - RNA, 19 nt, Artificial Sequence
  Description of Artificial Sequence: Synthetic oligonucleotide
  Antisense strand to SEQ ID NO: 257700
augaccgcaguaguuaucu

SEQ ID NO: 257702 - RNA, 19 nt, Artificial Sequence
  Description of Artificial Sequence: Synthetic oligonucleotide
  Sense strand starting at position 737 SEQ ID NO: 3315
auaugcucaggcugagauu

SEQ ID NO: 257703 - RNA, 19 nt, Artificial Sequence
  Description of Artificial Sequence: Synthetic oligonucleotide
  Antisense strand to SEQ ID NO: 257702
aaucucagccugagcauau

SEQ ID NO: 257704 - RNA, 19 nt, Artificial Sequence
  Description of Artificial Sequence: Synthetic oligonucleotide
  Sense strand starting at position 764 SEQ ID NO: 3315
cuggaaauauagcuuuacu

SEQ ID NO: 257705 - RNA, 19 nt, Artificial Sequence
  Description of Artificial Sequence: Synthetic oligonucleotide
  Antisense strand to SEQ ID NO: 257704
aguaaagcuauauuuccag

SEQ ID NO: 257706 - RNA, 19 nt, Artificial Sequence
  Description of Artificial Sequence: Synthetic oligonucleotide
  Sense strand starting at position 824 SEQ ID NO: 3315
cggacaaagccucaaguaa

SEQ ID NO: 257707 - RNA, 19 nt, Artificial Sequence
  Description of Artificial Sequence: Synthetic oligonucleotide
  Antisense strand to SEQ ID NO: 257706
uuacuugaggcuuuguccg

SEQ ID NO: 257708 - RNA, 19 nt, Artificial Sequence
  Description of Artificial Sequence: Synthetic oligonucleotide
  Sense strand starting at position 932 SEQ ID NO: 3315
aggacugccuucuuggaca

SEQ ID NO: 257709 - RNA, 19 nt, Artificial Sequence
  Description of Artificial Sequence: Synthetic oligonucleotide
  Antisense strand to SEQ ID NO: 257708
uguccaagaaggcaguccu

SEQ ID NO: 257710 - RNA, 19 nt, Artificial Sequence
  Description of Artificial Sequence: Synthetic oligonucleotide
  Sense strand starting at position 1014 SEQ ID NO: 3315
gcguauucuccagugugua

SEQ ID NO: 257711 - RNA, 19 nt, Artificial Sequence
  Description of Artificial Sequence: Synthetic oligonucleotide
  Antisense strand to SEQ ID NO: 257710
uacacacuggagaauacgc

SEQ ID NO: 257712 - RNA, 19 nt, Artificial Sequence
  Description of Artificial Sequence: Synthetic oligonucleotide
  Sense strand starting at position 1026 SEQ ID NO: 3315
guguguagucaagaccuaa

SEQ ID NO: 257713 - RNA, 19 nt, Artificial Sequence
  Description of Artificial Sequence: Synthetic oligonucleotide
  Antisense strand to SEQ ID NO: 257712
uuaggucuugacuacacac

SEQ ID NO: 257714 - RNA, 19 nt, Artificial Sequence
  Description of Artificial Sequence: Synthetic oligonucleotide
  Sense strand starting at position 2029 SEQ ID NO: 3315
ccgcuagagcuaggagaaa

SEQ ID NO: 257715 - RNA, 19 nt, Artificial Sequence
  Description of Artificial Sequence: Synthetic oligonucleotide
  Antisense strand to SEQ ID NO: 257714
uuucuccuagcucuagcgg

SEQ ID NO: 257716 - RNA, 19 nt, Artificial Sequence
  Description of Artificial Sequence: Synthetic oligonucleotide
  Sense strand starting at position 2083 SEQ ID NO: 3315
ccuuguuugaugugggaga

SEQ ID NO: 257717 - RNA, 19 nt, Artificial Sequence
  Description of Artificial Sequence: Synthetic oligonucleotide
  Antisense strand to SEQ ID NO: 257716
ucucccacaucaaacaagg

SEQ ID NO: 257718 - RNA, 19 nt, Artificial Sequence
  Description of Artificial Sequence: Synthetic oligonucleotide
  Sense strand starting at position 2085 SEQ ID NO: 3315
uuguuugaugugggagaaa

SEQ ID NO: 257719 - RNA, 19 nt, Artificial Sequence
  Description of Artificial Sequence: Synthetic oligonucleotide
  Antisense strand to SEQ ID NO: 257718
uuucucccacaucaaacaa

SEQ ID NO: 257720 - RNA, 19 nt, Artificial Sequence
  Description of Artificial Sequence: Synthetic oligonucleotide
  Sense strand starting at position 2433 SEQ ID NO: 3315
gugaauggcucugcugaag

SEQ ID NO: 257721 - RNA, 19 nt, Artificial Sequence
  Description of Artificial Sequence: Synthetic oligonucleotide
  Antisense strand to SEQ ID NO: 257720
cuucagcagagccauucac

SEQ ID NO: 257722 - RNA, 19 nt, Artificial Sequence
  Description of Artificial Sequence: Synthetic oligonucleotide
  Sense strand starting at position 2475 SEQ ID NO: 3315
aggugcugccaucgauuua

SEQ ID NO: 257723 - RNA, 19 nt, Artificial Sequence
  Description of Artificial Sequence: Synthetic oligonucleotide
  Antisense strand to SEQ ID NO: 257722
uaaaucgauggcagcaccu

SEQ ID NO: 257724 - RNA, 19 nt, Artificial Sequence
  Description of Artificial Sequence: Synthetic oligonucleotide
  Sense strand starting at position 2476 SEQ ID NO: 3315
ggugcugccaucgauuuaa

SEQ ID NO: 257725 - RNA, 19 nt, Artificial Sequence
  Description of Artificial Sequence: Synthetic oligonucleotide
  Antisense strand to SEQ ID NO: 257724
uuaaaucgauggcagcacc

SEQ ID NO: 257726 - RNA, 19 nt, Artificial Sequence
  Description of Artificial Sequence: Synthetic oligonucleotide
  Sense strand starting at position 2526 SEQ ID NO: 3315
aaaguuucugagggauccu

SEQ ID NO: 257727 - RNA, 19 nt, Artificial Sequence
  Description of Artificial Sequence: Synthetic oligonucleotide
  Antisense strand to SEQ ID NO: 257726
aggaucccucagaaacuuu

SEQ ID NO: 257728 - RNA, 19 nt, Artificial Sequence
  Description of Artificial Sequence: Synthetic oligonucleotide
  Sense strand starting at position 2552 SEQ ID NO: 3315
cgugguucguggacuuaaa

SEQ ID NO: 257729 - RNA, 19 nt, Artificial Sequence
  Description of Artificial Sequence: Synthetic oligonucleotide
  Antisense strand to SEQ ID NO: 257728
uuuaaguccacgaaccacg

SEQ ID NO: 257730 - RNA, 19 nt, Artificial Sequence
  Description of Artificial Sequence: Synthetic oligonucleotide
  Sense strand starting at position 2748 SEQ ID NO: 3315
cuugaaugugcuuaagcag

SEQ ID NO: 257731 - RNA, 19 nt, Artificial Sequence
  Description of Artificial Sequence: Synthetic oligonucleotide
  Antisense strand to SEQ ID NO: 257730
cugcuuaagcacauucaag

SEQ ID NO: 257732 - RNA, 19 nt, Artificial Sequence
  Description of Artificial Sequence: Synthetic oligonucleotide
  Sense strand starting at position 3023 SEQ ID NO: 3315
acaagaacgccggguuuaa

SEQ ID NO: 257733 - RNA, 19 nt, Artificial Sequence
  Description of Artificial Sequence: Synthetic oligonucleotide
  Antisense strand to SEQ ID NO: 257732
uuaaacccggcguucuugu

SEQ ID NO: 257734 - RNA, 19 nt, Artificial Sequence
  Description of Artificial Sequence: Synthetic oligonucleotide
  Sense strand starting at position 3157 SEQ ID NO: 3315
gugcauucccaagaacaau

SEQ ID NO: 257735 - RNA, 19 nt, Artificial Sequence
  Description of Artificial Sequence: Synthetic oligonucleotide
  Antisense strand to SEQ ID NO: 257734
auuguucuugggaaugcac

SEQ ID NO: 257736 - RNA, 19 nt, Artificial Sequence
  Description of Artificial Sequence: Synthetic oligonucleotide
  Sense strand starting at position 3210 SEQ ID NO: 3315
gcuaaaggcucagugggaa

SEQ ID NO: 257737 - RNA, 19 nt, Artificial Sequence
  Description of Artificial Sequence: Synthetic oligonucleotide
  Antisense strand to SEQ ID NO: 257736
uucccacugagccuuuagc

SEQ ID NO: 257738 - RNA, 19 nt, Artificial Sequence
  Description of Artificial Sequence: Synthetic oligonucleotide
  Sense strand starting at position 3411 SEQ ID NO: 3315
augggaaaguaacuguaua

SEQ ID NO: 257739 - RNA, 19 nt, Artificial Sequence
  Description of Artificial Sequence: Synthetic oligonucleotide
  Antisense strand to SEQ ID NO: 257738
uauacaguuacuuucccau

SEQ ID NO: 257740 - RNA, 19 nt, Artificial Sequence
  Description of Artificial Sequence: Synthetic oligonucleotide
  Sense strand starting at position 3627 SEQ ID NO: 3315
agucaaugauuggcucauu

SEQ ID NO: 257741 - RNA, 19 nt, Artificial Sequence
  Description of Artificial Sequence: Synthetic oligonucleotide
  Antisense strand to SEQ ID NO: 257740
aaugagccaaucauugacu

SEQ ID NO: 257742 - RNA, 19 nt, Artificial Sequence
  Description of Artificial Sequence: Synthetic oligonucleotide
  Sense strand starting at position 3628 SEQ ID NO: 3315
gucaaugauuggcucauua

SEQ ID NO: 257743 - RNA, 19 nt, Artificial Sequence
  Description of Artificial Sequence: Synthetic oligonucleotide
  Antisense strand to SEQ ID NO: 257742
uaaugagccaaucauugac

SEQ ID NO: 257744 - RNA, 19 nt, Artificial Sequence
  Description of Artificial Sequence: Synthetic oligonucleotide
  Sense strand starting at position 3632 SEQ ID NO: 3315
augauuggcucauuaaauc

SEQ ID NO: 257745 - RNA, 19 nt, Artificial Sequence
  Description of Artificial Sequence: Synthetic oligonucleotide
  Antisense strand to SEQ ID NO: 257744
gauuuaaugagccaaucau

SEQ ID NO: 257746 - RNA, 19 nt, Artificial Sequence
  Description of Artificial Sequence: Synthetic oligonucleotide
  Sense strand starting at position 3691 SEQ ID NO: 3315
cugccaaggagaugagauu

SEQ ID NO: 257747 - RNA, 19 nt, Artificial Sequence
  Description of Artificial Sequence: Synthetic oligonucleotide
  Antisense strand to SEQ ID NO: 257746
aaucucaucuccuuggcag

SEQ ID NO: 257748 - RNA, 19 nt, Artificial Sequence
  Description of Artificial Sequence: Synthetic oligonucleotide
  Sense strand starting at position 3731 SEQ ID NO: 3315
cuacuucucucacuuguga

SEQ ID NO: 257749 - RNA, 19 nt, Artificial Sequence
  Description of Artificial Sequence: Synthetic oligonucleotide
  Antisense strand to SEQ ID NO: 257748
ucacaagugagagaaguag

SEQ ID NO: 257750 - RNA, 19 nt, Artificial Sequence
  Description of Artificial Sequence: Synthetic oligonucleotide
  Sense strand starting at position 3760 SEQ ID NO: 3315
gguguaauacaguaagagu

SEQ ID NO: 257751 - RNA, 19 nt, Artificial Sequence
  Description of Artificial Sequence: Synthetic oligonucleotide
  Antisense strand to SEQ ID NO: 257750
acucuuacuguauuacacc

SEQ ID NO: 257752 - RNA, 19 nt, Artificial Sequence
  Description of Artificial Sequence: Synthetic oligonucleotide
  Sense strand starting at position 3791 SEQ ID NO: 3315
ucacgaccucucuaugcau

SEQ ID NO: 257753 - RNA, 19 nt, Artificial Sequence
  Description of Artificial Sequence: Synthetic oligonucleotide
  Antisense strand to SEQ ID NO: 257752
augcauagagaggucguga

SEQ ID NO: 257754 - RNA, 19 nt, Artificial Sequence
  Description of Artificial Sequence: Synthetic oligonucleotide
  Sense strand starting at position 3881 SEQ ID NO: 3315
caaguagagucuuuagcac

SEQ ID NO: 257755 - RNA, 19 nt, Artificial Sequence
  Description of Artificial Sequence: Synthetic oligonucleotide
  Antisense strand to SEQ ID NO: 257754
gugcuaaagacucuacuug

SEQ ID NO: 257756 - RNA, 19 nt, Artificial Sequence
  Description of Artificial Sequence: Synthetic oligonucleotide
  Sense strand starting at position 3887 SEQ ID NO: 3315
gagucuuuagcacaguauc

SEQ ID NO: 257757 - RNA, 19 nt, Artificial Sequence
  Description of Artificial Sequence: Synthetic oligonucleotide
  Antisense strand to SEQ ID NO: 257756
gauacugugcuaaagacuc

SEQ ID NO: 257758 - RNA, 19 nt, Artificial Sequence
  Description of Artificial Sequence: Synthetic oligonucleotide
  Sense strand starting at position 106 SEQ ID NO: 3316
gucuuaaggcacuaaauuc

SEQ ID NO: 257759 - RNA, 19 nt, Artificial Sequence
  Description of Artificial Sequence: Synthetic oligonucleotide
  Antisense strand to SEQ ID NO: 257758
gaauuuagugccuuaagac

SEQ ID NO: 257760 - RNA, 19 nt, Artificial Sequence
  Description of Artificial Sequence: Synthetic oligonucleotide
  Sense strand starting at position 340 SEQ ID NO: 3316
accacugaguccuuacagu

SEQ ID NO: 257761 - RNA, 19 nt, Artificial Sequence
  Description of Artificial Sequence: Synthetic oligonucleotide
  Antisense strand to SEQ ID NO: 257760
acuguaaggacucaguggu

SEQ ID NO: 257762 - RNA, 19 nt, Artificial Sequence
  Description of Artificial Sequence: Synthetic oligonucleotide
  Sense strand starting at position 354 SEQ ID NO: 3316
acaguccugcuagaaauaa

SEQ ID NO: 257763 - RNA, 19 nt, Artificial Sequence
  Description of Artificial Sequence: Synthetic oligonucleotide
  Antisense strand to SEQ ID NO: 257762
uuauuucuagcaggacugu

SEQ ID NO: 257764 - RNA, 19 nt, Artificial Sequence
  Description of Artificial Sequence: Synthetic oligonucleotide
  Sense strand starting at position 380 SEQ ID NO: 3316
uagcgaagcuuagcaauuu

SEQ ID NO: 257765 - RNA, 19 nt, Artificial Sequence
  Description of Artificial Sequence: Synthetic oligonucleotide
  Antisense strand to SEQ ID NO: 257764
aaauugcuaagcuucgcua

SEQ ID NO: 257766 - RNA, 19 nt, Artificial Sequence
  Description of Artificial Sequence: Synthetic oligonucleotide
  Sense strand starting at position 391 SEQ ID NO: 3316
agcaauuucugguugcuaa

SEQ ID NO: 257767 - RNA, 19 nt, Artificial Sequence
  Description of Artificial Sequence: Synthetic oligonucleotide
  Antisense strand to SEQ ID NO: 257766
uuagcaaccagaaauugcu

SEQ ID NO: 257768 - RNA, 19 nt, Artificial Sequence
  Description of Artificial Sequence: Synthetic oligonucleotide
  Sense strand starting at position 392 SEQ ID NO: 3316
gcaauuucugguugcuaaa

SEQ ID NO: 257769 - RNA, 19 nt, Artificial Sequence
  Description of Artificial Sequence: Synthetic oligonucleotide
  Antisense strand to SEQ ID NO: 257768
uuuagcaaccagaaauugc

SEQ ID NO: 257770 - RNA, 19 nt, Artificial Sequence
  Description of Artificial Sequence: Synthetic oligonucleotide
  Sense strand starting at position 474 SEQ ID NO: 3316
uucggacucuagguaauga

SEQ ID NO: 257771 - RNA, 19 nt, Artificial Sequence
  Description of Artificial Sequence: Synthetic oligonucleotide
  Antisense strand to SEQ ID NO: 257770
ucauuaccuagaguccgaa

SEQ ID NO: 257772 - RNA, 19 nt, Artificial Sequence
  Description of Artificial Sequence: Synthetic oligonucleotide
  Sense strand starting at position 572 SEQ ID NO: 3316
gcaggucaggacuagagua

SEQ ID NO: 257773 - RNA, 19 nt, Artificial Sequence
  Description of Artificial Sequence: Synthetic oligonucleotide
  Antisense strand to SEQ ID NO: 257772
uacucuaguccugaccugc

SEQ ID NO: 257774 - RNA, 19 nt, Artificial Sequence
  Description of Artificial Sequence: Synthetic oligonucleotide
  Sense strand starting at position 755 SEQ ID NO: 3316
gaaagagucccuugagcuc

SEQ ID NO: 257775 - RNA, 19 nt, Artificial Sequence
  Description of Artificial Sequence: Synthetic oligonucleotide
  Antisense strand to SEQ ID NO: 257774
gagcucaagggacucuuuc

SEQ ID NO: 257776 - RNA, 19 nt, Artificial Sequence
  Description of Artificial Sequence: Synthetic oligonucleotide
  Sense strand starting at position 815 SEQ ID NO: 3316
uugaaaucagccugaggca

SEQ ID NO: 257777 - RNA, 19 nt, Artificial Sequence
  Description of Artificial Sequence: Synthetic oligonucleotide
  Antisense strand to SEQ ID NO: 257776
ugccucaggcugauuucaa

SEQ ID NO: 257778 - RNA, 19 nt, Artificial Sequence
  Description of Artificial Sequence: Synthetic oligonucleotide
  Sense strand starting at position 816 SEQ ID NO: 3316
ugaaaucagccugaggcau

SEQ ID NO: 257779 - RNA, 19 nt, Artificial Sequence
  Description of Artificial Sequence: Synthetic oligonucleotide
  Antisense strand to SEQ ID NO: 257778
augccucaggcugauuuca

SEQ ID NO: 257780 - RNA, 19 nt, Artificial Sequence
  Description of Artificial Sequence: Synthetic oligonucleotide
  Sense strand starting at position 866 SEQ ID NO: 3316
ccagaaauggccuggcaca

SEQ ID NO: 257781 - RNA, 19 nt, Artificial Sequence
  Description of Artificial Sequence: Synthetic oligonucleotide
  Antisense strand to SEQ ID NO: 257780
ugugccaggccauuucugg

SEQ ID NO: 257782 - RNA, 19 nt, Artificial Sequence
  Description of Artificial Sequence: Synthetic oligonucleotide
  Sense strand starting at position 980 SEQ ID NO: 3316
aagagaccuugcuugggau

SEQ ID NO: 257783 - RNA, 19 nt, Artificial Sequence
  Description of Artificial Sequence: Synthetic oligonucleotide
  Antisense strand to SEQ ID NO: 257782
aucccaagcaaggucucuu

SEQ ID NO: 257784 - RNA, 19 nt, Artificial Sequence
  Description of Artificial Sequence: Synthetic oligonucleotide
  Sense strand starting at position 981 SEQ ID NO: 3316
agagaccuugcuugggauu

SEQ ID NO: 257785 - RNA, 19 nt, Artificial Sequence
  Description of Artificial Sequence: Synthetic oligonucleotide
  Antisense strand to SEQ ID NO: 257784
aaucccaagcaaggucucu

SEQ ID NO: 257786 - RNA, 19 nt, Artificial Sequence
  Description of Artificial Sequence: Synthetic oligonucleotide
  Sense strand starting at position 1171 SEQ ID NO: 3316
gaaauagaauuguucgcca

SEQ ID NO: 257787 - RNA, 19 nt, Artificial Sequence
  Description of Artificial Sequence: Synthetic oligonucleotide
  Antisense strand to SEQ ID NO: 257786
uggcgaacaauucuauuuc

SEQ ID NO: 257788 - RNA, 19 nt, Artificial Sequence
  Description of Artificial Sequence: Synthetic oligonucleotide
  Sense strand starting at position 1174 SEQ ID NO: 3316
auagaauuguucgccaaag

SEQ ID NO: 257789 - RNA, 19 nt, Artificial Sequence
  Description of Artificial Sequence: Synthetic oligonucleotide
  Antisense strand to SEQ ID NO: 257788
cuuuggcgaacaauucuau

SEQ ID NO: 257790 - RNA, 19 nt, Artificial Sequence
  Description of Artificial Sequence: Synthetic oligonucleotide
  Sense strand starting at position 1175 SEQ ID NO: 3316
uagaauuguucgccaaaga

SEQ ID NO: 257791 - RNA, 19 nt, Artificial Sequence
  Description of Artificial Sequence: Synthetic oligonucleotide
  Antisense strand to SEQ ID NO: 257790
ucuuuggcgaacaauucua

SEQ ID NO: 257792 - RNA, 19 nt, Artificial Sequence
  Description of Artificial Sequence: Synthetic oligonucleotide
  Sense strand starting at position 1176 SEQ ID NO: 3316
agaauuguucgccaaagac

SEQ ID NO: 257793 - RNA, 19 nt, Artificial Sequence
  Description of Artificial Sequence: Synthetic oligonucleotide
  Antisense strand to SEQ ID NO: 257792
gucuuuggcgaacaauucu

SEQ ID NO: 257794 - RNA, 19 nt, Artificial Sequence
  Description of Artificial Sequence: Synthetic oligonucleotide
  Sense strand starting at position 1192 SEQ ID NO: 3316
gacccagagugucuugauc

SEQ ID NO: 257795 - RNA, 19 nt, Artificial Sequence
  Description of Artificial Sequence: Synthetic oligonucleotide
  Antisense strand to SEQ ID NO: 257794
gaucaagacacucuggguc

SEQ ID NO: 257796 - RNA, 19 nt, Artificial Sequence
  Description of Artificial Sequence: Synthetic oligonucleotide
  Sense strand starting at position 1376 SEQ ID NO: 3316
aggguuugcucacugaaug

SEQ ID NO: 257797 - RNA, 19 nt, Artificial Sequence
  Description of Artificial Sequence: Synthetic oligonucleotide
  Antisense strand to SEQ ID NO: 257796
cauucagugagcaaacccu

SEQ ID NO: 257798 - RNA, 19 nt, Artificial Sequence
  Description of Artificial Sequence: Synthetic oligonucleotide
  Sense strand starting at position 1522 SEQ ID NO: 3316
cuggacacaugagugauau

SEQ ID NO: 257799 - RNA, 19 nt, Artificial Sequence
  Description of Artificial Sequence: Synthetic oligonucleotide
  Antisense strand to SEQ ID NO: 257798
auaucacucauguguccag

SEQ ID NO: 257800 - RNA, 19 nt, Artificial Sequence
  Description of Artificial Sequence: Synthetic oligonucleotide
  Sense strand starting at position 1523 SEQ ID NO: 3316
uggacacaugagugauauu

SEQ ID NO: 257801 - RNA, 19 nt, Artificial Sequence
  Description of Artificial Sequence: Synthetic oligonucleotide
  Antisense strand to SEQ ID NO: 257800
aauaucacucaugugucca

SEQ ID NO: 257802 - RNA, 19 nt, Artificial Sequence
  Description of Artificial Sequence: Synthetic oligonucleotide
  Sense strand starting at position 1664 SEQ ID NO: 3316
gggcuucuccucguucgau

SEQ ID NO: 257803 - RNA, 19 nt, Artificial Sequence
  Description of Artificial Sequence: Synthetic oligonucleotide
  Antisense strand to SEQ ID NO: 257802
aucgaacgaggagaagccc

SEQ ID NO: 257804 - RNA, 19 nt, Artificial Sequence
  Description of Artificial Sequence: Synthetic oligonucleotide
  Sense strand starting at position 2446 SEQ ID NO: 3316
ugcugugggcucuuguuua

SEQ ID NO: 257805 - RNA, 19 nt, Artificial Sequence
  Description of Artificial Sequence: Synthetic oligonucleotide
  Antisense strand to SEQ ID NO: 257804
uaaacaagagcccacagca

SEQ ID NO: 257806 - RNA, 19 nt, Artificial Sequence
  Description of Artificial Sequence: Synthetic oligonucleotide
  Sense strand starting at position 2554 SEQ ID NO: 3316
gaacuuauauuaccgggaa

SEQ ID NO: 257807 - RNA, 19 nt, Artificial Sequence
  Description of Artificial Sequence: Synthetic oligonucleotide
  Antisense strand to SEQ ID NO: 257806
uucccgguaauauaaguuc

SEQ ID NO: 257808 - RNA, 19 nt, Artificial Sequence
  Description of Artificial Sequence: Synthetic oligonucleotide
  Sense strand starting at position 2557 SEQ ID NO: 3316
cuuauauuaccgggaauag

SEQ ID NO: 257809 - RNA, 19 nt, Artificial Sequence
  Description of Artificial Sequence: Synthetic oligonucleotide
  Antisense strand to SEQ ID NO: 257808
cuauucccgguaauauaag

SEQ ID NO: 257810 - RNA, 19 nt, Artificial Sequence
  Description of Artificial Sequence: Synthetic oligonucleotide
  Sense strand starting at position 2677 SEQ ID NO: 3316
aagaguuagcaugguacag

SEQ ID NO: 257811 - RNA, 19 nt, Artificial Sequence
  Description of Artificial Sequence: Synthetic oligonucleotide
  Antisense strand to SEQ ID NO: 257810
cuguaccaugcuaacucuu

SEQ ID NO: 257812 - RNA, 19 nt, Artificial Sequence
  Description of Artificial Sequence: Synthetic oligonucleotide
  Sense strand starting at position 2724 SEQ ID NO: 3316
gaacucacugucugugaga

SEQ ID NO: 257813 - RNA, 19 nt, Artificial Sequence
  Description of Artificial Sequence: Synthetic oligonucleotide
  Antisense strand to SEQ ID NO: 257812
ucucacagacagugaguuc

SEQ ID NO: 257814 - RNA, 19 nt, Artificial Sequence
  Description of Artificial Sequence: Synthetic oligonucleotide
  Sense strand starting at position 2725 SEQ ID NO: 3316
aacucacugucugugagaa

SEQ ID NO: 257815 - RNA, 19 nt, Artificial Sequence
  Description of Artificial Sequence: Synthetic oligonucleotide
  Antisense strand to SEQ ID NO: 257814
uucucacagacagugaguu

SEQ ID NO: 257816 - RNA, 19 nt, Artificial Sequence
  Description of Artificial Sequence: Synthetic oligonucleotide
  Sense strand starting at position 2726 SEQ ID NO: 3316
acucacugucugugagaag

SEQ ID NO: 257817 - RNA, 19 nt, Artificial Sequence
  Description of Artificial Sequence: Synthetic oligonucleotide
  Antisense strand to SEQ ID NO: 257816
cuucucacagacagugagu

SEQ ID NO: 257818 - RNA, 19 nt, Artificial Sequence
  Description of Artificial Sequence: Synthetic oligonucleotide
  Sense strand starting at position 2741 SEQ ID NO: 3316
gaaggagauuugcauaaau

SEQ ID NO: 257819 - RNA, 19 nt, Artificial Sequence
  Description of Artificial Sequence: Synthetic oligonucleotide
  Antisense strand to SEQ ID NO: 257818
auuuaugcaaaucuccuuc

SEQ ID NO: 257820 - RNA, 19 nt, Artificial Sequence
  Description of Artificial Sequence: Synthetic oligonucleotide
  Sense strand starting at position 2846 SEQ ID NO: 3316
acauuugagcugcgucuua

SEQ ID NO: 257821 - RNA, 19 nt, Artificial Sequence
  Description of Artificial Sequence: Synthetic oligonucleotide
  Antisense strand to SEQ ID NO: 257820
uaagacgcagcucaaaugu

SEQ ID NO: 257822 - RNA, 19 nt, Artificial Sequence
  Description of Artificial Sequence: Synthetic oligonucleotide
  Sense strand starting at position 3308 SEQ ID NO: 3316
gacauugggcagugauagu

SEQ ID NO: 257823 - RNA, 19 nt, Artificial Sequence
  Description of Artificial Sequence: Synthetic oligonucleotide
  Antisense strand to SEQ ID NO: 257822
acuaucacugcccaauguc

SEQ ID NO: 257824 - RNA, 19 nt, Artificial Sequence
  Description of Artificial Sequence: Synthetic oligonucleotide
  Sense strand starting at position 3392 SEQ ID NO: 3316
aaacgagaaguuuguaaua

SEQ ID NO: 257825 - RNA, 19 nt, Artificial Sequence
  Description of Artificial Sequence: Synthetic oligonucleotide
  Antisense strand to SEQ ID NO: 257824
uauuacaaacuucucguuu

SEQ ID NO: 257826 - RNA, 19 nt, Artificial Sequence
  Description of Artificial Sequence: Synthetic oligonucleotide
  Sense strand starting at position 3401 SEQ ID NO: 3316
guuuguaauaaugggaaga

SEQ ID NO: 257827 - RNA, 19 nt, Artificial Sequence
  Description of Artificial Sequence: Synthetic oligonucleotide
  Antisense strand to SEQ ID NO: 257826
ucuucccauuauuacaaac

SEQ ID NO: 257828 - RNA, 19 nt, Artificial Sequence
  Description of Artificial Sequence: Synthetic oligonucleotide
  Sense strand starting at position 3495 SEQ ID NO: 3316
ggacauuugucuuucgucu

SEQ ID NO: 257829 - RNA, 19 nt, Artificial Sequence
  Description of Artificial Sequence: Synthetic oligonucleotide
  Antisense strand to SEQ ID NO: 257828
agacgaaagacaaaugucc

SEQ ID NO: 257830 - RNA, 19 nt, Artificial Sequence
  Description of Artificial Sequence: Synthetic oligonucleotide
  Sense strand starting at position 3640 SEQ ID NO: 3316
gagggauugguucaugcga

SEQ ID NO: 257831 - RNA, 19 nt, Artificial Sequence
  Description of Artificial Sequence: Synthetic oligonucleotide
  Antisense strand to SEQ ID NO: 257830
ucgcaugaaccaaucccuc

SEQ ID NO: 257832 - RNA, 19 nt, Artificial Sequence
  Description of Artificial Sequence: Synthetic oligonucleotide
  Sense strand starting at position 3648 SEQ ID NO: 3316
gguucaugcgauuaugaag

SEQ ID NO: 257833 - RNA, 19 nt, Artificial Sequence
  Description of Artificial Sequence: Synthetic oligonucleotide
  Antisense strand to SEQ ID NO: 257832
cuucauaaucgcaugaacc

SEQ ID NO: 257834 - RNA, 19 nt, Artificial Sequence
  Description of Artificial Sequence: Synthetic oligonucleotide
  Sense strand starting at position 3775 SEQ ID NO: 3316
ggcccaaucugaguccaga

SEQ ID NO: 257835 - RNA, 19 nt, Artificial Sequence
  Description of Artificial Sequence: Synthetic oligonucleotide
  Antisense strand to SEQ ID NO: 257834
ucuggacucagauugggcc

SEQ ID NO: 257836 - RNA, 19 nt, Artificial Sequence
  Description of Artificial Sequence: Synthetic oligonucleotide
  Sense strand starting at position 3936 SEQ ID NO: 3316
agaugaaggugaucuucuu

SEQ ID NO: 257837 - RNA, 19 nt, Artificial Sequence
  Description of Artificial Sequence: Synthetic oligonucleotide
  Antisense strand to SEQ ID NO: 257836
aagaagaucaccuucaucu

SEQ ID NO: 257838 - RNA, 19 nt, Artificial Sequence
  Description of Artificial Sequence: Synthetic oligonucleotide
  Sense strand starting at position 325 SEQ ID NO: 3317
aagagaaauugagaugaaa

SEQ ID NO: 257839 - RNA, 19 nt, Artificial Sequence
  Description of Artificial Sequence: Synthetic oligonucleotide
  Antisense strand to SEQ ID NO: 257838
uuucaucucaauuucucuu

SEQ ID NO: 257840 - RNA, 19 nt, Artificial Sequence
  Description of Artificial Sequence: Synthetic oligonucleotide
  Sense strand starting at position 582 SEQ ID NO: 3317
agacaauagcaguggcauu

SEQ ID NO: 257841 - RNA, 19 nt, Artificial Sequence
  Description of Artificial Sequence: Synthetic oligonucleotide
  Antisense strand to SEQ ID NO: 257840
aaugccacugcuauugucu

SEQ ID NO: 257842 - RNA, 19 nt, Artificial Sequence
  Description of Artificial Sequence: Synthetic oligonucleotide
  Sense strand starting at position 1464 SEQ ID NO: 3317
gugagaugucuccagccag

SEQ ID NO: 257843 - RNA, 19 nt, Artificial Sequence
  Description of Artificial Sequence: Synthetic oligonucleotide
  Antisense strand to SEQ ID NO: 257842
cuggcuggagacaucucac

SEQ ID NO: 257844 - RNA, 19 nt, Artificial Sequence
  Description of Artificial Sequence: Synthetic oligonucleotide
  Sense strand starting at position 2075 SEQ ID NO: 3317
gacauuguagcgggaggua

SEQ ID NO: 257845 - RNA, 19 nt, Artificial Sequence
  Description of Artificial Sequence: Synthetic oligonucleotide
  Antisense strand to SEQ ID NO: 257844
uaccucccgcuacaauguc

SEQ ID NO: 257846 - RNA, 19 nt, Artificial Sequence
  Description of Artificial Sequence: Synthetic oligonucleotide
  Sense strand starting at position 2299 SEQ ID NO: 3317
gcaggugaagucuagcaga

SEQ ID NO: 257847 - RNA, 19 nt, Artificial Sequence
  Description of Artificial Sequence: Synthetic oligonucleotide
  Antisense strand to SEQ ID NO: 257846
ucugcuagacuucaccugc

SEQ ID NO: 257848 - RNA, 19 nt, Artificial Sequence
  Description of Artificial Sequence: Synthetic oligonucleotide
  Sense strand starting at position 2329 SEQ ID NO: 3317
ggcgauucggugaagcgau

SEQ ID NO: 257849 - RNA, 19 nt, Artificial Sequence
  Description of Artificial Sequence: Synthetic oligonucleotide
  Antisense strand to SEQ ID NO: 257848
aucgcuucaccgaaucgcc

SEQ ID NO: 257850 - RNA, 19 nt, Artificial Sequence
  Description of Artificial Sequence: Synthetic oligonucleotide
  Sense strand starting at position 2367 SEQ ID NO: 3317
ccucuuugaccugguaaau

SEQ ID NO: 257851 - RNA, 19 nt, Artificial Sequence
  Description of Artificial Sequence: Synthetic oligonucleotide
  Antisense strand to SEQ ID NO: 257850
auuuaccaggucaaagagg

SEQ ID NO: 257852 - RNA, 19 nt, Artificial Sequence
  Description of Artificial Sequence: Synthetic oligonucleotide
  Sense strand starting at position 2417 SEQ ID NO: 3317
guaaacuugcugcaaacga

SEQ ID NO: 257853 - RNA, 19 nt, Artificial Sequence
  Description of Artificial Sequence: Synthetic oligonucleotide
  Antisense strand to SEQ ID NO: 257852
ucguuugcagcaaguuuac

SEQ ID NO: 257854 - RNA, 19 nt, Artificial Sequence
  Description of Artificial Sequence: Synthetic oligonucleotide
  Sense strand starting at position 2479 SEQ ID NO: 3317
gauggaaggcuguggagau

SEQ ID NO: 257855 - RNA, 19 nt, Artificial Sequence
  Description of Artificial Sequence: Synthetic oligonucleotide
  Antisense strand to SEQ ID NO: 257854
aucuccacagccuuccauc

SEQ ID NO: 257856 - RNA, 19 nt, Artificial Sequence
  Description of Artificial Sequence: Synthetic oligonucleotide
  Sense strand starting at position 2580 SEQ ID NO: 3317
gugagcuugccgaggaauc

SEQ ID NO: 257857 - RNA, 19 nt, Artificial Sequence
  Description of Artificial Sequence: Synthetic oligonucleotide
  Antisense strand to SEQ ID NO: 257856
gauuccucggcaagcucac

SEQ ID NO: 257858 - RNA, 19 nt, Artificial Sequence
  Description of Artificial Sequence: Synthetic oligonucleotide
  Sense strand starting at position 2655 SEQ ID NO: 3317
cgugacgguccgaguguaa

SEQ ID NO: 257859 - RNA, 19 nt, Artificial Sequence
  Description of Artificial Sequence: Synthetic oligonucleotide
  Antisense strand to SEQ ID NO: 257858
uuacacucggaccgucacg

SEQ ID NO: 257860 - RNA, 19 nt, Artificial Sequence
  Description of Artificial Sequence: Synthetic oligonucleotide
  Sense strand starting at position 2699 SEQ ID NO: 3317
gcaauugacccucaugacu

SEQ ID NO: 257861 - RNA, 19 nt, Artificial Sequence
  Description of Artificial Sequence: Synthetic oligonucleotide
  Antisense strand to SEQ ID NO: 257860
agucaugagggucaauugc

SEQ ID NO: 257862 - RNA, 19 nt, Artificial Sequence
  Description of Artificial Sequence: Synthetic oligonucleotide
  Sense strand starting at position 2746 SEQ ID NO: 3317
agagacaaguccucuguau

SEQ ID NO: 257863 - RNA, 19 nt, Artificial Sequence
  Description of Artificial Sequence: Synthetic oligonucleotide
  Antisense strand to SEQ ID NO: 257862
auacagaggacuugucucu

SEQ ID NO: 257864 - RNA, 19 nt, Artificial Sequence
  Description of Artificial Sequence: Synthetic oligonucleotide
  Sense strand starting at position 2750 SEQ ID NO: 3317
acaaguccucuguaugcau

SEQ ID NO: 257865 - RNA, 19 nt, Artificial Sequence
  Description of Artificial Sequence: Synthetic oligonucleotide
  Antisense strand to SEQ ID NO: 257864
augcauacagaggacuugu

SEQ ID NO: 257866 - RNA, 19 nt, Artificial Sequence
  Description of Artificial Sequence: Synthetic oligonucleotide
  Sense strand starting at position 2877 SEQ ID NO: 3317
agggaagucuugaguggag

SEQ ID NO: 257867 - RNA, 19 nt, Artificial Sequence
  Description of Artificial Sequence: Synthetic oligonucleotide
  Antisense strand to SEQ ID NO: 257866
cuccacucaagacuucccu

SEQ ID NO: 257868 - RNA, 19 nt, Artificial Sequence
  Description of Artificial Sequence: Synthetic oligonucleotide
  Sense strand starting at position 2879 SEQ ID NO: 3317
ggaagucuugaguggagcu

SEQ ID NO: 257869 - RNA, 19 nt, Artificial Sequence
  Description of Artificial Sequence: Synthetic oligonucleotide
  Antisense strand to SEQ ID NO: 257868
agcuccacucaagacuucc

SEQ ID NO: 257870 - RNA, 19 nt, Artificial Sequence
  Description of Artificial Sequence: Synthetic oligonucleotide
  Sense strand starting at position 2880 SEQ ID NO: 3317
gaagucuugaguggagcuu

SEQ ID NO: 257871 - RNA, 19 nt, Artificial Sequence
  Description of Artificial Sequence: Synthetic oligonucleotide
  Antisense strand to SEQ ID NO: 257870
aagcuccacucaagacuuc

SEQ ID NO: 257872 - RNA, 19 nt, Artificial Sequence
  Description of Artificial Sequence: Synthetic oligonucleotide
  Sense strand starting at position 2961 SEQ ID NO: 3317
gggauuguguaguccuuaa

SEQ ID NO: 257873 - RNA, 19 nt, Artificial Sequence
  Description of Artificial Sequence: Synthetic oligonucleotide
  Antisense strand to SEQ ID NO: 257872
uuaaggacuacacaauccc

SEQ ID NO: 257874 - RNA, 19 nt, Artificial Sequence
  Description of Artificial Sequence: Synthetic oligonucleotide
  Sense strand starting at position 2974 SEQ ID NO: 3317
ccuuaauguugaguucuac

SEQ ID NO: 257875 - RNA, 19 nt, Artificial Sequence
  Description of Artificial Sequence: Synthetic oligonucleotide
  Antisense strand to SEQ ID NO: 257874
guagaacucaacauuaagg

SEQ ID NO: 257876 - RNA, 19 nt, Artificial Sequence
  Description of Artificial Sequence: Synthetic oligonucleotide
  Sense strand starting at position 2980 SEQ ID NO: 3317
uguugaguucuacgauuga

SEQ ID NO: 257877 - RNA, 19 nt, Artificial Sequence
  Description of Artificial Sequence: Synthetic oligonucleotide
  Antisense strand to SEQ ID NO: 257876
ucaaucguagaacucaaca

SEQ ID NO: 257878 - RNA, 19 nt, Artificial Sequence
  Description of Artificial Sequence: Synthetic oligonucleotide
  Sense strand starting at position 2984 SEQ ID NO: 3317
gaguucuacgauugaugaa

SEQ ID NO: 257879 - RNA, 19 nt, Artificial Sequence
  Description of Artificial Sequence: Synthetic oligonucleotide
  Antisense strand to SEQ ID NO: 257878
uucaucaaucguagaacuc

SEQ ID NO: 257880 - RNA, 19 nt, Artificial Sequence
  Description of Artificial Sequence: Synthetic oligonucleotide
  Sense strand starting at position 3007 SEQ ID NO: 3317
aagggacgugaucaaaguu

SEQ ID NO: 257881 - RNA, 19 nt, Artificial Sequence
  Description of Artificial Sequence: Synthetic oligonucleotide
  Antisense strand to SEQ ID NO: 257880
aacuuugaucacgucccuu

SEQ ID NO: 257882 - RNA, 19 nt, Artificial Sequence
  Description of Artificial Sequence: Synthetic oligonucleotide
  Sense strand starting at position 3032 SEQ ID NO: 3317
uauaguguagaugagaguu

SEQ ID NO: 257883 - RNA, 19 nt, Artificial Sequence
  Description of Artificial Sequence: Synthetic oligonucleotide
  Antisense strand to SEQ ID NO: 257882
aacucucaucuacacuaua

SEQ ID NO: 257884 - RNA, 19 nt, Artificial Sequence
  Description of Artificial Sequence: Synthetic oligonucleotide
  Sense strand starting at position 3071 SEQ ID NO: 3317
aguuucuuugguuacuauu

SEQ ID NO: 257885 - RNA, 19 nt, Artificial Sequence
  Description of Artificial Sequence: Synthetic oligonucleotide
  Antisense strand to SEQ ID NO: 257884
aauaguaaccaaagaaacu

SEQ ID NO: 257886 - RNA, 19 nt, Artificial Sequence
  Description of Artificial Sequence: Synthetic oligonucleotide
  Sense strand starting at position 3101 SEQ ID NO: 3317
agccuuugguuucccaaau

SEQ ID NO: 257887 - RNA, 19 nt, Artificial Sequence
  Description of Artificial Sequence: Synthetic oligonucleotide
  Antisense strand to SEQ ID NO: 257886
auuugggaaaccaaaggcu

SEQ ID NO: 257888 - RNA, 19 nt, Artificial Sequence
  Description of Artificial Sequence: Synthetic oligonucleotide
  Sense strand starting at position 3309 SEQ ID NO: 3317
gaaggaauaucaucuuugu

SEQ ID NO: 257889 - RNA, 19 nt, Artificial Sequence
  Description of Artificial Sequence: Synthetic oligonucleotide
  Antisense strand to SEQ ID NO: 257888
acaaagaugauauuccuuc

SEQ ID NO: 257890 - RNA, 19 nt, Artificial Sequence
  Description of Artificial Sequence: Synthetic oligonucleotide
  Sense strand starting at position 3312 SEQ ID NO: 3317
ggaauaucaucuuuguaug

SEQ ID NO: 257891 - RNA, 19 nt, Artificial Sequence
  Description of Artificial Sequence: Synthetic oligonucleotide
  Antisense strand to SEQ ID NO: 257890
cauacaaagaugauauucc

SEQ ID NO: 257892 - RNA, 19 nt, Artificial Sequence
  Description of Artificial Sequence: Synthetic oligonucleotide
  Sense strand starting at position 3361 SEQ ID NO: 3317
cguauuuauuauguuggua

SEQ ID NO: 257893 - RNA, 19 nt, Artificial Sequence
  Description of Artificial Sequence: Synthetic oligonucleotide
  Antisense strand to SEQ ID NO: 257892
uaccaacauaauaaauacg

SEQ ID NO: 257894 - RNA, 19 nt, Artificial Sequence
  Description of Artificial Sequence: Synthetic oligonucleotide
  Sense strand starting at position 3437 SEQ ID NO: 3317
cucugucucccagacgagu

SEQ ID NO: 257895 - RNA, 19 nt, Artificial Sequence
  Description of Artificial Sequence: Synthetic oligonucleotide
  Antisense strand to SEQ ID NO: 257894
acucgucugggagacagag

SEQ ID NO: 257896 - RNA, 19 nt, Artificial Sequence
  Description of Artificial Sequence: Synthetic oligonucleotide
  Sense strand starting at position 3712 SEQ ID NO: 3317
guucuuuagguguacacua

SEQ ID NO: 257897 - RNA, 19 nt, Artificial Sequence
  Description of Artificial Sequence: Synthetic oligonucleotide
  Antisense strand to SEQ ID NO: 257896
uaguguacaccuaaagaac

SEQ ID NO: 257898 - RNA, 19 nt, Artificial Sequence
  Description of Artificial Sequence: Synthetic oligonucleotide
  Sense strand starting at position 3717 SEQ ID NO: 3317
uuagguguacacuaucagu

SEQ ID NO: 257899 - RNA, 19 nt, Artificial Sequence
  Description of Artificial Sequence: Synthetic oligonucleotide
  Antisense strand to SEQ ID NO: 257898
acugauaguguacaccuaa

SEQ ID NO: 257900 - RNA, 19 nt, Artificial Sequence
  Description of Artificial Sequence: Synthetic oligonucleotide
  Sense strand starting at position 3722 SEQ ID NO: 3317
uguacacuaucaguuaaag

SEQ ID NO: 257901 - RNA, 19 nt, Artificial Sequence
  Description of Artificial Sequence: Synthetic oligonucleotide
  Antisense strand to SEQ ID NO: 257900
cuuuaacugauaguguaca

SEQ ID NO: 257902 - RNA, 19 nt, Artificial Sequence
  Description of Artificial Sequence: Synthetic oligonucleotide
  Sense strand starting at position 3826 SEQ ID NO: 3317
uauuguguacgguaaucau

SEQ ID NO: 257903 - RNA, 19 nt, Artificial Sequence
  Description of Artificial Sequence: Synthetic oligonucleotide
  Antisense strand to SEQ ID NO: 257902
augauuaccguacacaaua

SEQ ID NO: 257904 - RNA, 19 nt, Artificial Sequence
  Description of Artificial Sequence: Synthetic oligonucleotide
  Sense strand starting at position 3836 SEQ ID NO: 3317
gguaaucauguccgaugga

SEQ ID NO: 257905 - RNA, 19 nt, Artificial Sequence
  Description of Artificial Sequence: Synthetic oligonucleotide
  Antisense strand to SEQ ID NO: 257904
uccaucggacaugauuacc

SEQ ID NO: 257906 - RNA, 19 nt, Artificial Sequence
  Description of Artificial Sequence: Synthetic oligonucleotide
  Sense strand starting at position 3839 SEQ ID NO: 3317
aaucauguccgauggaauc

SEQ ID NO: 257907 - RNA, 19 nt, Artificial Sequence
  Description of Artificial Sequence: Synthetic oligonucleotide
  Antisense strand to SEQ ID NO: 257906
gauuccaucggacaugauu

SEQ ID NO: 257908 - RNA, 19 nt, Artificial Sequence
  Description of Artificial Sequence: Synthetic oligonucleotide
  Sense strand starting at position 3841 SEQ ID NO: 3317
ucauguccgauggaaucaa

SEQ ID NO: 257909 - RNA, 19 nt, Artificial Sequence
  Description of Artificial Sequence: Synthetic oligonucleotide
  Antisense strand to SEQ ID NO: 257908
uugauuccaucggacauga

SEQ ID NO: 257910 - RNA, 19 nt, Artificial Sequence
  Description of Artificial Sequence: Synthetic oligonucleotide
  Sense strand starting at position 3862 SEQ ID NO: 3317
cuagacuccugugcuuuaa

SEQ ID NO: 257911 - RNA, 19 nt, Artificial Sequence
  Description of Artificial Sequence: Synthetic oligonucleotide
  Antisense strand to SEQ ID NO: 257910
uuaaagcacaggagucuag

SEQ ID NO: 257912 - RNA, 19 nt, Artificial Sequence
  Description of Artificial Sequence: Synthetic oligonucleotide
  Sense strand starting at position 3885 SEQ ID NO: 3317
uucuuuguaguguaaccaa

SEQ ID NO: 257913 - RNA, 19 nt, Artificial Sequence
  Description of Artificial Sequence: Synthetic oligonucleotide
  Antisense strand to SEQ ID NO: 257912
uugguuacacuacaaagaa

SEQ ID NO: 257914 - RNA, 19 nt, Artificial Sequence
  Description of Artificial Sequence: Synthetic oligonucleotide
  Sense strand starting at position 3900 SEQ ID NO: 3317
ccaauugucugucuuuaua

SEQ ID NO: 257915 - RNA, 19 nt, Artificial Sequence
  Description of Artificial Sequence: Synthetic oligonucleotide
  Antisense strand to SEQ ID NO: 257914
uauaaagacagacaauugg

SEQ ID NO: 257916 - RNA, 19 nt, Artificial Sequence
  Description of Artificial Sequence: Synthetic oligonucleotide
  Sense strand starting at position 3910 SEQ ID NO: 3317
gucuuuauaguguaaccaa

SEQ ID NO: 257917 - RNA, 19 nt, Artificial Sequence
  Description of Artificial Sequence: Synthetic oligonucleotide
  Antisense strand to SEQ ID NO: 257916
uugguuacacuauaaagac

SEQ ID NO: 257918 - RNA, 19 nt, Artificial Sequence
  Description of Artificial Sequence: Synthetic oligonucleotide
  Sense strand starting at position 31 SEQ ID NO: 3318
uagguauuauuagcauagu

SEQ ID NO: 257919 - RNA, 19 nt, Artificial Sequence
  Description of Artificial Sequence: Synthetic oligonucleotide
  Antisense strand to SEQ ID NO: 257918
acuaugcuaauaauaccua

SEQ ID NO: 257920 - RNA, 19 nt, Artificial Sequence
  Description of Artificial Sequence: Synthetic oligonucleotide
  Sense strand starting at position 34 SEQ ID NO: 3318
guauuauuagcauagucaa

SEQ ID NO: 257921 - RNA, 19 nt, Artificial Sequence
  Description of Artificial Sequence: Synthetic oligonucleotide
  Antisense strand to SEQ ID NO: 257920
uugacuaugcuaauaauac

SEQ ID NO: 257922 - RNA, 19 nt, Artificial Sequence
  Description of Artificial Sequence: Synthetic oligonucleotide
  Sense strand starting at position 37 SEQ ID NO: 3318
uuauuagcauagucaagaa

SEQ ID NO: 257923 - RNA, 19 nt, Artificial Sequence
  Description of Artificial Sequence: Synthetic oligonucleotide
  Antisense strand to SEQ ID NO: 257922
uucuugacuaugcuaauaa

SEQ ID NO: 257924 - RNA, 19 nt, Artificial Sequence
  Description of Artificial Sequence: Synthetic oligonucleotide
  Sense strand starting at position 150 SEQ ID NO: 3318
ugcccaucucucugaaaga

SEQ ID NO: 257925 - RNA, 19 nt, Artificial Sequence
  Description of Artificial Sequence: Synthetic oligonucleotide
  Antisense strand to SEQ ID NO: 257924
ucuuucagagagaugggca

SEQ ID NO: 257926 - RNA, 19 nt, Artificial Sequence
  Description of Artificial Sequence: Synthetic oligonucleotide
  Sense strand starting at position 197 SEQ ID NO: 3318
gcuccucaucagcaaagaa

SEQ ID NO: 257927 - RNA, 19 nt, Artificial Sequence
  Description of Artificial Sequence: Synthetic oligonucleotide
  Antisense strand to SEQ ID NO: 257926
uucuuugcugaugaggagc

SEQ ID NO: 257928 - RNA, 19 nt, Artificial Sequence
  Description of Artificial Sequence: Synthetic oligonucleotide
  Sense strand starting at position 243 SEQ ID NO: 3318
ugcugauauacuggaagua

SEQ ID NO: 257929 - RNA, 19 nt, Artificial Sequence
  Description of Artificial Sequence: Synthetic oligonucleotide
  Antisense strand to SEQ ID NO: 257928
uacuuccaguauaucagca

SEQ ID NO: 257930 - RNA, 19 nt, Artificial Sequence
  Description of Artificial Sequence: Synthetic oligonucleotide
  Sense strand starting at position 275 SEQ ID NO: 3318
aggagugugauaugcuaaa

SEQ ID NO: 257931 - RNA, 19 nt, Artificial Sequence
  Description of Artificial Sequence: Synthetic oligonucleotide
  Antisense strand to SEQ ID NO: 257930
uuuagcauaucacacuccu

SEQ ID NO: 257932 - RNA, 19 nt, Artificial Sequence
  Description of Artificial Sequence: Synthetic oligonucleotide
  Sense strand starting at position 316 SEQ ID NO: 3318
guggaaaugucagcaagaa

SEQ ID NO: 257933 - RNA, 19 nt, Artificial Sequence
  Description of Artificial Sequence: Synthetic oligonucleotide
  Antisense strand to SEQ ID NO: 257932
uucuugcugacauuuccac

SEQ ID NO: 257934 - RNA, 19 nt, Artificial Sequence
  Description of Artificial Sequence: Synthetic oligonucleotide
  Sense strand starting at position 408 SEQ ID NO: 3318
cuucgaauacacgauuaau

SEQ ID NO: 257935 - RNA, 19 nt, Artificial Sequence
  Description of Artificial Sequence: Synthetic oligonucleotide
  Antisense strand to SEQ ID NO: 257934
auuaaucguguauucgaag

SEQ ID NO: 257936 - RNA, 19 nt, Artificial Sequence
  Description of Artificial Sequence: Synthetic oligonucleotide
  Sense strand starting at position 553 SEQ ID NO: 3318
guuuaacacuccuucgaca

SEQ ID NO: 257937 - RNA, 19 nt, Artificial Sequence
  Description of Artificial Sequence: Synthetic oligonucleotide
  Antisense strand to SEQ ID NO: 257936
ugucgaaggaguguuaaac

SEQ ID NO: 257938 - RNA, 19 nt, Artificial Sequence
  Description of Artificial Sequence: Synthetic oligonucleotide
  Sense strand starting at position 650 SEQ ID NO: 3318
uggaaagccgucuggacaa

SEQ ID NO: 257939 - RNA, 19 nt, Artificial Sequence
  Description of Artificial Sequence: Synthetic oligonucleotide
  Antisense strand to SEQ ID NO: 257938
uuguccagacggcuuucca

SEQ ID NO: 257940 - RNA, 19 nt, Artificial Sequence
  Description of Artificial Sequence: Synthetic oligonucleotide
  Sense strand starting at position 677 SEQ ID NO: 3318
cccguauugaagugaaauc

SEQ ID NO: 257941 - RNA, 19 nt, Artificial Sequence
  Description of Artificial Sequence: Synthetic oligonucleotide
  Antisense strand to SEQ ID NO: 257940
gauuucacuucaauacggg

SEQ ID NO: 257942 - RNA, 19 nt, Artificial Sequence
  Description of Artificial Sequence: Synthetic oligonucleotide
  Sense strand starting at position 975 SEQ ID NO: 3318
ugcuguuuauuucucagua

SEQ ID NO: 257943 - RNA, 19 nt, Artificial Sequence
  Description of Artificial Sequence: Synthetic oligonucleotide
  Antisense strand to SEQ ID NO: 257942
uacugagaaauaaacagca

SEQ ID NO: 257944 - RNA, 19 nt, Artificial Sequence
  Description of Artificial Sequence: Synthetic oligonucleotide
  Sense strand starting at position 976 SEQ ID NO: 3318
gcuguuuauuucucaguaa

SEQ ID NO: 257945 - RNA, 19 nt, Artificial Sequence
  Description of Artificial Sequence: Synthetic oligonucleotide
  Antisense strand to SEQ ID NO: 257944
uuacugagaaauaaacagc

SEQ ID NO: 257946 - RNA, 19 nt, Artificial Sequence
  Description of Artificial Sequence: Synthetic oligonucleotide
  Sense strand starting at position 979 SEQ ID NO: 3318
guuuauuucucaguaaucg

SEQ ID NO: 257947 - RNA, 19 nt, Artificial Sequence
  Description of Artificial Sequence: Synthetic oligonucleotide
  Antisense strand to SEQ ID NO: 257946
cgauuacugagaaauaaac

SEQ ID NO: 257948 - RNA, 19 nt, Artificial Sequence
  Description of Artificial Sequence: Synthetic oligonucleotide
  Sense strand starting at position 1103 SEQ ID NO: 3318
ugcaucaaucuacaagguu

SEQ ID NO: 257949 - RNA, 19 nt, Artificial Sequence
  Description of Artificial Sequence: Synthetic oligonucleotide
  Antisense strand to SEQ ID NO: 257948
aaccuuguagauugaugca

SEQ ID NO: 257950 - RNA, 19 nt, Artificial Sequence
  Description of Artificial Sequence: Synthetic oligonucleotide
  Sense strand starting at position 1123 SEQ ID NO: 3318
ccacuuugucagcaagaau

SEQ ID NO: 257951 - RNA, 19 nt, Artificial Sequence
  Description of Artificial Sequence: Synthetic oligonucleotide
  Antisense strand to SEQ ID NO: 257950
auucuugcugacaaagugg

SEQ ID NO: 257952 - RNA, 19 nt, Artificial Sequence
  Description of Artificial Sequence: Synthetic oligonucleotide
  Sense strand starting at position 1134 SEQ ID NO: 3318
gcaagaauccugggauuaa

SEQ ID NO: 257953 - RNA, 19 nt, Artificial Sequence
  Description of Artificial Sequence: Synthetic oligonucleotide
  Antisense strand to SEQ ID NO: 257952
uuaaucccaggauucuugc

SEQ ID NO: 257954 - RNA, 19 nt, Artificial Sequence
  Description of Artificial Sequence: Synthetic oligonucleotide
  Sense strand starting at position 1144 SEQ ID NO: 3318
ugggauuaacuccgacuuu

SEQ ID NO: 257955 - RNA, 19 nt, Artificial Sequence
  Description of Artificial Sequence: Synthetic oligonucleotide
  Antisense strand to SEQ ID NO: 257954
aaagucggaguuaauccca

SEQ ID NO: 257956 - RNA, 19 nt, Artificial Sequence
  Description of Artificial Sequence: Synthetic oligonucleotide
  Sense strand starting at position 2420 SEQ ID NO: 3318
gguuucuccucccuggaau

SEQ ID NO: 257957 - RNA, 19 nt, Artificial Sequence
  Description of Artificial Sequence: Synthetic oligonucleotide
  Antisense strand to SEQ ID NO: 257956
auuccagggaggagaaacc

SEQ ID NO: 257958 - RNA, 19 nt, Artificial Sequence
  Description of Artificial Sequence: Synthetic oligonucleotide
  Sense strand starting at position 2619 SEQ ID NO: 3318
gggagagugccgggugaaa

SEQ ID NO: 257959 - RNA, 19 nt, Artificial Sequence
  Description of Artificial Sequence: Synthetic oligonucleotide
  Antisense strand to SEQ ID NO: 257958
uuucacccggcacucuccc

SEQ ID NO: 257960 - RNA, 19 nt, Artificial Sequence
  Description of Artificial Sequence: Synthetic oligonucleotide
  Sense strand starting at position 2661 SEQ ID NO: 3318
gggucugacgcuuucguca

SEQ ID NO: 257961 - RNA, 19 nt, Artificial Sequence
  Description of Artificial Sequence: Synthetic oligonucleotide
  Antisense strand to SEQ ID NO: 257960
ugacgaaagcgucagaccc

SEQ ID NO: 257962 - RNA, 19 nt, Artificial Sequence
  Description of Artificial Sequence: Synthetic oligonucleotide
  Sense strand starting at position 2696 SEQ ID NO: 3318
gggccuuuggguggugaga

SEQ ID NO: 257963 - RNA, 19 nt, Artificial Sequence
  Description of Artificial Sequence: Synthetic oligonucleotide
  Antisense strand to SEQ ID NO: 257962
ucucaccacccaaaggccc

SEQ ID NO: 257964 - RNA, 19 nt, Artificial Sequence
  Description of Artificial Sequence: Synthetic oligonucleotide
  Sense strand starting at position 2825 SEQ ID NO: 3318
cugagaaaguuucuaagca

SEQ ID NO: 257965 - RNA, 19 nt, Artificial Sequence
  Description of Artificial Sequence: Synthetic oligonucleotide
  Antisense strand to SEQ ID NO: 257964
ugcuuagaaacuuucucag

SEQ ID NO: 257966 - RNA, 19 nt, Artificial Sequence
  Description of Artificial Sequence: Synthetic oligonucleotide
  Sense strand starting at position 2907 SEQ ID NO: 3318
ggcgggucacguguauaua

SEQ ID NO: 257967 - RNA, 19 nt, Artificial Sequence
  Description of Artificial Sequence: Synthetic oligonucleotide
  Antisense strand to SEQ ID NO: 257966
uauauacacgugacccgcc

SEQ ID NO: 257968 - RNA, 19 nt, Artificial Sequence
  Description of Artificial Sequence: Synthetic oligonucleotide
  Sense strand starting at position 3061 SEQ ID NO: 3318
aguuuaacuuugguagaaa

SEQ ID NO: 257969 - RNA, 19 nt, Artificial Sequence
  Description of Artificial Sequence: Synthetic oligonucleotide
  Antisense strand to SEQ ID NO: 257968
uuucuaccaaaguuaaacu

SEQ ID NO: 257970 - RNA, 19 nt, Artificial Sequence
  Description of Artificial Sequence: Synthetic oligonucleotide
  Sense strand starting at position 3096 SEQ ID NO: 3318
agaguuuaaccacagcuuu

SEQ ID NO: 257971 - RNA, 19 nt, Artificial Sequence
  Description of Artificial Sequence: Synthetic oligonucleotide
  Antisense strand to SEQ ID NO: 257970
aaagcugugguuaaacucu

SEQ ID NO: 257972 - RNA, 19 nt, Artificial Sequence
  Description of Artificial Sequence: Synthetic oligonucleotide
  Sense strand starting at position 3136 SEQ ID NO: 3318
ucacaauaaccgugugaaa

SEQ ID NO: 257973 - RNA, 19 nt, Artificial Sequence
  Description of Artificial Sequence: Synthetic oligonucleotide
  Antisense strand to SEQ ID NO: 257972
uuucacacgguuauuguga

SEQ ID NO: 257974 - RNA, 19 nt, Artificial Sequence
  Description of Artificial Sequence: Synthetic oligonucleotide
  Sense strand starting at position 3138 SEQ ID NO: 3318
acaauaaccgugugaaaua

SEQ ID NO: 257975 - RNA, 19 nt, Artificial Sequence
  Description of Artificial Sequence: Synthetic oligonucleotide
  Antisense strand to SEQ ID NO: 257974
uauuucacacgguuauugu

SEQ ID NO: 257976 - RNA, 19 nt, Artificial Sequence
  Description of Artificial Sequence: Synthetic oligonucleotide
  Sense strand starting at position 3335 SEQ ID NO: 3318
caguuauaccauuggguug

SEQ ID NO: 257977 - RNA, 19 nt, Artificial Sequence
  Description of Artificial Sequence: Synthetic oligonucleotide
  Antisense strand to SEQ ID NO: 257976
caacccaaugguauaacug

SEQ ID NO: 257978 - RNA, 19 nt, Artificial Sequence
  Description of Artificial Sequence: Synthetic oligonucleotide
  Sense strand starting at position 3336 SEQ ID NO: 3318
aguuauaccauuggguuga

SEQ ID NO: 257979 - RNA, 19 nt, Artificial Sequence
  Description of Artificial Sequence: Synthetic oligonucleotide
  Antisense strand to SEQ ID NO: 257978
ucaacccaaugguauaacu

SEQ ID NO: 257980 - RNA, 19 nt, Artificial Sequence
  Description of Artificial Sequence: Synthetic oligonucleotide
  Sense strand starting at position 3347 SEQ ID NO: 3318
uggguugaugacuagcuua

SEQ ID NO: 257981 - RNA, 19 nt, Artificial Sequence
  Description of Artificial Sequence: Synthetic oligonucleotide
  Antisense strand to SEQ ID NO: 257980
uaagcuagucaucaaccca

SEQ ID NO: 257982 - RNA, 19 nt, Artificial Sequence
  Description of Artificial Sequence: Synthetic oligonucleotide
  Sense strand starting at position 3458 SEQ ID NO: 3318
uggaacucaucagugcaau

SEQ ID NO: 257983 - RNA, 19 nt, Artificial Sequence
  Description of Artificial Sequence: Synthetic oligonucleotide
  Antisense strand to SEQ ID NO: 257982
auugcacugaugaguucca

SEQ ID NO: 257984 - RNA, 19 nt, Artificial Sequence
  Description of Artificial Sequence: Synthetic oligonucleotide
  Sense strand starting at position 3459 SEQ ID NO: 3318
ggaacucaucagugcaauc

SEQ ID NO: 257985 - RNA, 19 nt, Artificial Sequence
  Description of Artificial Sequence: Synthetic oligonucleotide
  Antisense strand to SEQ ID NO: 257984
gauugcacugaugaguucc

SEQ ID NO: 257986 - RNA, 19 nt, Artificial Sequence
  Description of Artificial Sequence: Synthetic oligonucleotide
  Sense strand starting at position 3523 SEQ ID NO: 3318
gguggauucucagcugaaa

SEQ ID NO: 257987 - RNA, 19 nt, Artificial Sequence
  Description of Artificial Sequence: Synthetic oligonucleotide
  Antisense strand to SEQ ID NO: 257986
uuucagcugagaauccacc

SEQ ID NO: 257988 - RNA, 19 nt, Artificial Sequence
  Description of Artificial Sequence: Synthetic oligonucleotide
  Sense strand starting at position 3525 SEQ ID NO: 3318
uggauucucagcugaaaug

SEQ ID NO: 257989 - RNA, 19 nt, Artificial Sequence
  Description of Artificial Sequence: Synthetic oligonucleotide
  Antisense strand to SEQ ID NO: 257988
cauuucagcugagaaucca

SEQ ID NO: 257990 - RNA, 19 nt, Artificial Sequence
  Description of Artificial Sequence: Synthetic oligonucleotide
  Sense strand starting at position 3625 SEQ ID NO: 3318
uagagagcugcuuauuaca

SEQ ID NO: 257991 - RNA, 19 nt, Artificial Sequence
  Description of Artificial Sequence: Synthetic oligonucleotide
  Antisense strand to SEQ ID NO: 257990
uguaauaagcagcucucua

SEQ ID NO: 257992 - RNA, 19 nt, Artificial Sequence
  Description of Artificial Sequence: Synthetic oligonucleotide
  Sense strand starting at position 3864 SEQ ID NO: 3318
acaaauaaugucugcagaa

SEQ ID NO: 257993 - RNA, 19 nt, Artificial Sequence
  Description of Artificial Sequence: Synthetic oligonucleotide
  Antisense strand to SEQ ID NO: 257992
uucugcagacauuauuugu

SEQ ID NO: 257994 - RNA, 19 nt, Artificial Sequence
  Description of Artificial Sequence: Synthetic oligonucleotide
  Sense strand starting at position 3881 SEQ ID NO: 3318
aaaggaguuuccuuaagcu

SEQ ID NO: 257995 - RNA, 19 nt, Artificial Sequence
  Description of Artificial Sequence: Synthetic oligonucleotide
  Antisense strand to SEQ ID NO: 257994
agcuuaaggaaacuccuuu

SEQ ID NO: 257996 - RNA, 19 nt, Artificial Sequence
  Description of Artificial Sequence: Synthetic oligonucleotide
  Sense strand starting at position 3966 SEQ ID NO: 3318
uaauaucuagaaugguuga

SEQ ID NO: 257997 - RNA, 19 nt, Artificial Sequence
  Description of Artificial Sequence: Synthetic oligonucleotide
  Antisense strand to SEQ ID NO: 257996
ucaaccauucuagauauua

SEQ ID NO: 257998 - RNA, 19 nt, Artificial Sequence
  Description of Artificial Sequence: Synthetic oligonucleotide
  Sense strand starting at position 83 SEQ ID NO: 3319
uuccacuuaugaguauaca

SEQ ID NO: 257999 - RNA, 19 nt, Artificial Sequence
  Description of Artificial Sequence: Synthetic oligonucleotide
  Antisense strand to SEQ ID NO: 257998
uguauacucauaaguggaa

SEQ ID NO: 258000 - RNA, 19 nt, Artificial Sequence
  Description of Artificial Sequence: Synthetic oligonucleotide
  Sense strand starting at position 387 SEQ ID NO: 3319
ucccgaguacccgggauaa

SEQ ID NO: 258001 - RNA, 19 nt, Artificial Sequence
  Description of Artificial Sequence: Synthetic oligonucleotide
  Antisense strand to SEQ ID NO: 258000
uuaucccggguacucggga

SEQ ID NO: 258002 - RNA, 19 nt, Artificial Sequence
  Description of Artificial Sequence: Synthetic oligonucleotide
  Sense strand starting at position 389 SEQ ID NO: 3319
ccgaguacccgggauaaca

SEQ ID NO: 258003 - RNA, 19 nt, Artificial Sequence
  Description of Artificial Sequence: Synthetic oligonucleotide
  Antisense strand to SEQ ID NO: 258002
uguuaucccggguacucgg

SEQ ID NO: 258004 - RNA, 19 nt, Artificial Sequence
  Description of Artificial Sequence: Synthetic oligonucleotide
  Sense strand starting at position 858 SEQ ID NO: 3319
ccuuuaugccaagaugugu

SEQ ID NO: 258005 - RNA, 19 nt, Artificial Sequence
  Description of Artificial Sequence: Synthetic oligonucleotide
  Antisense strand to SEQ ID NO: 258004
acacaucuuggcauaaagg

SEQ ID NO: 258006 - RNA, 19 nt, Artificial Sequence
  Description of Artificial Sequence: Synthetic oligonucleotide
  Sense strand starting at position 864 SEQ ID NO: 3319
ugccaagauguguauguaa

SEQ ID NO: 258007 - RNA, 19 nt, Artificial Sequence
  Description of Artificial Sequence: Synthetic oligonucleotide
  Antisense strand to SEQ ID NO: 258006
uuacauacacaucuuggca

SEQ ID NO: 258008 - RNA, 19 nt, Artificial Sequence
  Description of Artificial Sequence: Synthetic oligonucleotide
  Sense strand starting at position 866 SEQ ID NO: 3319
ccaagauguguauguaagu

SEQ ID NO: 258009 - RNA, 19 nt, Artificial Sequence
  Description of Artificial Sequence: Synthetic oligonucleotide
  Antisense strand to SEQ ID NO: 258008
acuuacauacacaucuugg

SEQ ID NO: 258010 - RNA, 19 nt, Artificial Sequence
  Description of Artificial Sequence: Synthetic oligonucleotide
  Sense strand starting at position 867 SEQ ID NO: 3319
caagauguguauguaagua

SEQ ID NO: 258011 - RNA, 19 nt, Artificial Sequence
  Description of Artificial Sequence: Synthetic oligonucleotide
  Antisense strand to SEQ ID NO: 258010
uacuuacauacacaucuug

SEQ ID NO: 258012 - RNA, 19 nt, Artificial Sequence
  Description of Artificial Sequence: Synthetic oligonucleotide
  Sense strand starting at position 871 SEQ ID NO: 3319
auguguauguaaguacaaa

SEQ ID NO: 258013 - RNA, 19 nt, Artificial Sequence
  Description of Artificial Sequence: Synthetic oligonucleotide
  Antisense strand to SEQ ID NO: 258012
uuuguacuuacauacacau

SEQ ID NO: 258014 - RNA, 19 nt, Artificial Sequence
  Description of Artificial Sequence: Synthetic oligonucleotide
  Sense strand starting at position 898 SEQ ID NO: 3319
gcaccuuuaucuguauuga

SEQ ID NO: 258015 - RNA, 19 nt, Artificial Sequence
  Description of Artificial Sequence: Synthetic oligonucleotide
  Antisense strand to SEQ ID NO: 258014
ucaauacagauaaaggugc

SEQ ID NO: 258016 - RNA, 19 nt, Artificial Sequence
  Description of Artificial Sequence: Synthetic oligonucleotide
  Sense strand starting at position 928 SEQ ID NO: 3319
auguauaugaccuguugga

SEQ ID NO: 258017 - RNA, 19 nt, Artificial Sequence
  Description of Artificial Sequence: Synthetic oligonucleotide
  Antisense strand to SEQ ID NO: 258016
uccaacaggucauauacau

SEQ ID NO: 258018 - RNA, 19 nt, Artificial Sequence
  Description of Artificial Sequence: Synthetic oligonucleotide
  Sense strand starting at position 1054 SEQ ID NO: 3319
ucuuguguaucaccuaaga

SEQ ID NO: 258019 - RNA, 19 nt, Artificial Sequence
  Description of Artificial Sequence: Synthetic oligonucleotide
  Antisense strand to SEQ ID NO: 258018
ucuuaggugauacacaaga

SEQ ID NO: 258020 - RNA, 19 nt, Artificial Sequence
  Description of Artificial Sequence: Synthetic oligonucleotide
  Sense strand starting at position 1056 SEQ ID NO: 3319
uuguguaucaccuaagagg

SEQ ID NO: 258021 - RNA, 19 nt, Artificial Sequence
  Description of Artificial Sequence: Synthetic oligonucleotide
  Antisense strand to SEQ ID NO: 258020
ccucuuaggugauacacaa

SEQ ID NO: 258022 - RNA, 19 nt, Artificial Sequence
  Description of Artificial Sequence: Synthetic oligonucleotide
  Sense strand starting at position 1074 SEQ ID NO: 3319
gaagguaugccuuacgguu

SEQ ID NO: 258023 - RNA, 19 nt, Artificial Sequence
  Description of Artificial Sequence: Synthetic oligonucleotide
  Antisense strand to SEQ ID NO: 258022
aaccguaaggcauaccuuc

SEQ ID NO: 258024 - RNA, 19 nt, Artificial Sequence
  Description of Artificial Sequence: Synthetic oligonucleotide
  Sense strand starting at position 1080 SEQ ID NO: 3319
augccuuacgguuaagaau

SEQ ID NO: 258025 - RNA, 19 nt, Artificial Sequence
  Description of Artificial Sequence: Synthetic oligonucleotide
  Antisense strand to SEQ ID NO: 258024
auucuuaaccguaaggcau

SEQ ID NO: 258026 - RNA, 19 nt, Artificial Sequence
  Description of Artificial Sequence: Synthetic oligonucleotide
  Sense strand starting at position 1126 SEQ ID NO: 3319
cacgaaugucccggaguaa

SEQ ID NO: 258027 - RNA, 19 nt, Artificial Sequence
  Description of Artificial Sequence: Synthetic oligonucleotide
  Antisense strand to SEQ ID NO: 258026
uuacuccgggacauucgug

SEQ ID NO: 258028 - RNA, 19 nt, Artificial Sequence
  Description of Artificial Sequence: Synthetic oligonucleotide
  Sense strand starting at position 1127 SEQ ID NO: 3319
acgaaugucccggaguaac

SEQ ID NO: 258029 - RNA, 19 nt, Artificial Sequence
  Description of Artificial Sequence: Synthetic oligonucleotide
  Antisense strand to SEQ ID NO: 258028
guuacuccgggacauucgu

SEQ ID NO: 258030 - RNA, 19 nt, Artificial Sequence
  Description of Artificial Sequence: Synthetic oligonucleotide
  Sense strand starting at position 1180 SEQ ID NO: 3319
uagggaaucucagauuaag

SEQ ID NO: 258031 - RNA, 19 nt, Artificial Sequence
  Description of Artificial Sequence: Synthetic oligonucleotide
  Antisense strand to SEQ ID NO: 258030
cuuaaucugagauucccua

SEQ ID NO: 258032 - RNA, 19 nt, Artificial Sequence
  Description of Artificial Sequence: Synthetic oligonucleotide
  Sense strand starting at position 1199 SEQ ID NO: 3319
ggaaauacuugcccucuca

SEQ ID NO: 258033 - RNA, 19 nt, Artificial Sequence
  Description of Artificial Sequence: Synthetic oligonucleotide
  Antisense strand to SEQ ID NO: 258032
ugagagggcaaguauuucc

SEQ ID NO: 258034 - RNA, 19 nt, Artificial Sequence
  Description of Artificial Sequence: Synthetic oligonucleotide
  Sense strand starting at position 1274 SEQ ID NO: 3319
acgugacaauuauuacagu

SEQ ID NO: 258035 - RNA, 19 nt, Artificial Sequence
  Description of Artificial Sequence: Synthetic oligonucleotide
  Antisense strand to SEQ ID NO: 258034
acuguaauaauugucacgu

SEQ ID NO: 258036 - RNA, 19 nt, Artificial Sequence
  Description of Artificial Sequence: Synthetic oligonucleotide
  Sense strand starting at position 1299 SEQ ID NO: 3319
ugucauaacugauucuaug

SEQ ID NO: 258037 - RNA, 19 nt, Artificial Sequence
  Description of Artificial Sequence: Synthetic oligonucleotide
  Antisense strand to SEQ ID NO: 258036
cauagaaucaguuaugaca

SEQ ID NO: 258038 - RNA, 19 nt, Artificial Sequence
  Description of Artificial Sequence: Synthetic oligonucleotide
  Sense strand starting at position 1388 SEQ ID NO: 3319
guacgcgauaaauauauua

SEQ ID NO: 258039 - RNA, 19 nt, Artificial Sequence
  Description of Artificial Sequence: Synthetic oligonucleotide
  Antisense strand to SEQ ID NO: 258038
uaauauauuuaucgcguac

SEQ ID NO: 258040 - RNA, 19 nt, Artificial Sequence
  Description of Artificial Sequence: Synthetic oligonucleotide
  Sense strand starting at position 1390 SEQ ID NO: 3319
acgcgauaaauauauuagu

SEQ ID NO: 258041 - RNA, 19 nt, Artificial Sequence
  Description of Artificial Sequence: Synthetic oligonucleotide
  Antisense strand to SEQ ID NO: 258040
acuaauauauuuaucgcgu

SEQ ID NO: 258042 - RNA, 19 nt, Artificial Sequence
  Description of Artificial Sequence: Synthetic oligonucleotide
  Sense strand starting at position 1451 SEQ ID NO: 3319
accuuugaguguucccaac

SEQ ID NO: 258043 - RNA, 19 nt, Artificial Sequence
  Description of Artificial Sequence: Synthetic oligonucleotide
  Antisense strand to SEQ ID NO: 258042
guugggaacacucaaaggu

SEQ ID NO: 258044 - RNA, 19 nt, Artificial Sequence
  Description of Artificial Sequence: Synthetic oligonucleotide
  Sense strand starting at position 1453 SEQ ID NO: 3319
cuuugaguguucccaacag

SEQ ID NO: 258045 - RNA, 19 nt, Artificial Sequence
  Description of Artificial Sequence: Synthetic oligonucleotide
  Antisense strand to SEQ ID NO: 258044
cuguugggaacacucaaag

SEQ ID NO: 258046 - RNA, 19 nt, Artificial Sequence
  Description of Artificial Sequence: Synthetic oligonucleotide
  Sense strand starting at position 1687 SEQ ID NO: 3319
acagcucucggauggaaau

SEQ ID NO: 258047 - RNA, 19 nt, Artificial Sequence
  Description of Artificial Sequence: Synthetic oligonucleotide
  Antisense strand to SEQ ID NO: 258046
auuuccauccgagagcugu

SEQ ID NO: 258048 - RNA, 19 nt, Artificial Sequence
  Description of Artificial Sequence: Synthetic oligonucleotide
  Sense strand starting at position 1811 SEQ ID NO: 3319
acauuagaucaaggugcuu

SEQ ID NO: 258049 - RNA, 19 nt, Artificial Sequence
  Description of Artificial Sequence: Synthetic oligonucleotide
  Antisense strand to SEQ ID NO: 258048
aagcaccuugaucuaaugu

SEQ ID NO: 258050 - RNA, 19 nt, Artificial Sequence
  Description of Artificial Sequence: Synthetic oligonucleotide
  Sense strand starting at position 2628 SEQ ID NO: 3319
gcuuuccuaggcuaucaaa

SEQ ID NO: 258051 - RNA, 19 nt, Artificial Sequence
  Description of Artificial Sequence: Synthetic oligonucleotide
  Antisense strand to SEQ ID NO: 258050
uuugauagccuaggaaagc

SEQ ID NO: 258052 - RNA, 19 nt, Artificial Sequence
  Description of Artificial Sequence: Synthetic oligonucleotide
  Sense strand starting at position 2671 SEQ ID NO: 3319
auagauggaucucucaguu

SEQ ID NO: 258053 - RNA, 19 nt, Artificial Sequence
  Description of Artificial Sequence: Synthetic oligonucleotide
  Antisense strand to SEQ ID NO: 258052
aacugagagauccaucuau

SEQ ID NO: 258054 - RNA, 19 nt, Artificial Sequence
  Description of Artificial Sequence: Synthetic oligonucleotide
  Sense strand starting at position 2675 SEQ ID NO: 3319
auggaucucucaguugagu

SEQ ID NO: 258055 - RNA, 19 nt, Artificial Sequence
  Description of Artificial Sequence: Synthetic oligonucleotide
  Antisense strand to SEQ ID NO: 258054
acucaacugagagauccau

SEQ ID NO: 258056 - RNA, 19 nt, Artificial Sequence
  Description of Artificial Sequence: Synthetic oligonucleotide
  Sense strand starting at position 2686 SEQ ID NO: 3319
aguugaguguuacugaaau

SEQ ID NO: 258057 - RNA, 19 nt, Artificial Sequence
  Description of Artificial Sequence: Synthetic oligonucleotide
  Antisense strand to SEQ ID NO: 258056
auuucaguaacacucaacu

SEQ ID NO: 258058 - RNA, 19 nt, Artificial Sequence
  Description of Artificial Sequence: Synthetic oligonucleotide
  Sense strand starting at position 2720 SEQ ID NO: 3319
uguuaacaccuagaagcuu

SEQ ID NO: 258059 - RNA, 19 nt, Artificial Sequence
  Description of Artificial Sequence: Synthetic oligonucleotide
  Antisense strand to SEQ ID NO: 258058
aagcuucuagguguuaaca

SEQ ID NO: 258060 - RNA, 19 nt, Artificial Sequence
  Description of Artificial Sequence: Synthetic oligonucleotide
  Sense strand starting at position 2812 SEQ ID NO: 3319
agcacuuagcgcuuagcau

SEQ ID NO: 258061 - RNA, 19 nt, Artificial Sequence
  Description of Artificial Sequence: Synthetic oligonucleotide
  Antisense strand to SEQ ID NO: 258060
augcuaagcgcuaagugcu

SEQ ID NO: 258062 - RNA, 19 nt, Artificial Sequence
  Description of Artificial Sequence: Synthetic oligonucleotide
  Sense strand starting at position 3036 SEQ ID NO: 3319
gacugagcuuaguuugaau

SEQ ID NO: 258063 - RNA, 19 nt, Artificial Sequence
  Description of Artificial Sequence: Synthetic oligonucleotide
  Antisense strand to SEQ ID NO: 258062
auucaaacuaagcucaguc

SEQ ID NO: 258064 - RNA, 19 nt, Artificial Sequence
  Description of Artificial Sequence: Synthetic oligonucleotide
  Sense strand starting at position 3047 SEQ ID NO: 3319
guuugaauuccguagcaca

SEQ ID NO: 258065 - RNA, 19 nt, Artificial Sequence
  Description of Artificial Sequence: Synthetic oligonucleotide
  Antisense strand to SEQ ID NO: 258064
ugugcuacggaauucaaac

SEQ ID NO: 258066 - RNA, 19 nt, Artificial Sequence
  Description of Artificial Sequence: Synthetic oligonucleotide
  Sense strand starting at position 3072 SEQ ID NO: 3319
ggauauccacacuguacaa

SEQ ID NO: 258067 - RNA, 19 nt, Artificial Sequence
  Description of Artificial Sequence: Synthetic oligonucleotide
  Antisense strand to SEQ ID NO: 258066
uuguacaguguggauaucc

SEQ ID NO: 258068 - RNA, 19 nt, Artificial Sequence
  Description of Artificial Sequence: Synthetic oligonucleotide
  Sense strand starting at position 3152 SEQ ID NO: 3319
agagcuguugugucuguuu

SEQ ID NO: 258069 - RNA, 19 nt, Artificial Sequence
  Description of Artificial Sequence: Synthetic oligonucleotide
  Antisense strand to SEQ ID NO: 258068
aaacagacacaacagcucu

SEQ ID NO: 258070 - RNA, 19 nt, Artificial Sequence
  Description of Artificial Sequence: Synthetic oligonucleotide
  Sense strand starting at position 3172 SEQ ID NO: 3319
auagaauuguuguuucuac

SEQ ID NO: 258071 - RNA, 19 nt, Artificial Sequence
  Description of Artificial Sequence: Synthetic oligonucleotide
  Antisense strand to SEQ ID NO: 258070
guagaaacaacaauucuau

SEQ ID NO: 258072 - RNA, 19 nt, Artificial Sequence
  Description of Artificial Sequence: Synthetic oligonucleotide
  Sense strand starting at position 3911 SEQ ID NO: 3319
gcuggaaugcugcaucaac

SEQ ID NO: 258073 - RNA, 19 nt, Artificial Sequence
  Description of Artificial Sequence: Synthetic oligonucleotide
  Antisense strand to SEQ ID NO: 258072
guugaugcagcauuccagc

SEQ ID NO: 258074 - RNA, 19 nt, Artificial Sequence
  Description of Artificial Sequence: Synthetic oligonucleotide
  Sense strand starting at position 3973 SEQ ID NO: 3319
ccuuccuucguguaaauca

SEQ ID NO: 258075 - RNA, 19 nt, Artificial Sequence
  Description of Artificial Sequence: Synthetic oligonucleotide
  Antisense strand to SEQ ID NO: 258074
ugauuuacacgaaggaagg

SEQ ID NO: 258076 - RNA, 19 nt, Artificial Sequence
  Description of Artificial Sequence: Synthetic oligonucleotide
  Sense strand starting at position 3980 SEQ ID NO: 3319
ucguguaaaucaucauuuc

SEQ ID NO: 258077 - RNA, 19 nt, Artificial Sequence
  Description of Artificial Sequence: Synthetic oligonucleotide
  Antisense strand to SEQ ID NO: 258076
gaaaugaugauuuacacga

SEQ ID NO: 258078 - RNA, 19 nt, Artificial Sequence
  Description of Artificial Sequence: Synthetic oligonucleotide
  Sense strand starting at position 234 SEQ ID NO: 3320
cgcugaaucagggaaguga

SEQ ID NO: 258079 - RNA, 19 nt, Artificial Sequence
  Description of Artificial Sequence: Synthetic oligonucleotide
  Antisense strand to SEQ ID NO: 258078
ucacuucccugauucagcg

SEQ ID NO: 258080 - RNA, 19 nt, Artificial Sequence
  Description of Artificial Sequence: Synthetic oligonucleotide
  Sense strand starting at position 247 SEQ ID NO: 3320
aagugagucuuggcaccua

SEQ ID NO: 258081 - RNA, 19 nt, Artificial Sequence
  Description of Artificial Sequence: Synthetic oligonucleotide
  Antisense strand to SEQ ID NO: 258080
uaggugccaagacucacuu

SEQ ID NO: 258082 - RNA, 19 nt, Artificial Sequence
  Description of Artificial Sequence: Synthetic oligonucleotide
  Sense strand starting at position 268 SEQ ID NO: 3320
uguauuguucccuauccca

SEQ ID NO: 258083 - RNA, 19 nt, Artificial Sequence
  Description of Artificial Sequence: Synthetic oligonucleotide
  Antisense strand to SEQ ID NO: 258082
ugggauagggaacaauaca

SEQ ID NO: 258084 - RNA, 19 nt, Artificial Sequence
  Description of Artificial Sequence: Synthetic oligonucleotide
  Sense strand starting at position 527 SEQ ID NO: 3320
ugaccaguacuuugucacu

SEQ ID NO: 258085 - RNA, 19 nt, Artificial Sequence
  Description of Artificial Sequence: Synthetic oligonucleotide
  Antisense strand to SEQ ID NO: 258084
agugacaaaguacugguca

SEQ ID NO: 258086 - RNA, 19 nt, Artificial Sequence
  Description of Artificial Sequence: Synthetic oligonucleotide
  Sense strand starting at position 529 SEQ ID NO: 3320
accaguacuuugucacuua

SEQ ID NO: 258087 - RNA, 19 nt, Artificial Sequence
  Description of Artificial Sequence: Synthetic oligonucleotide
  Antisense strand to SEQ ID NO: 258086
uaagugacaaaguacuggu

SEQ ID NO: 258088 - RNA, 19 nt, Artificial Sequence
  Description of Artificial Sequence: Synthetic oligonucleotide
  Sense strand starting at position 552 SEQ ID NO: 3320
ugucaugguccuggaauga

SEQ ID NO: 258089 - RNA, 19 nt, Artificial Sequence
  Description of Artificial Sequence: Synthetic oligonucleotide
  Antisense strand to SEQ ID NO: 258088
ucauuccaggaccaugaca

SEQ ID NO: 258090 - RNA, 19 nt, Artificial Sequence
  Description of Artificial Sequence: Synthetic oligonucleotide
  Sense strand starting at position 615 SEQ ID NO: 3320
cggacugaggguugagaau

SEQ ID NO: 258091 - RNA, 19 nt, Artificial Sequence
  Description of Artificial Sequence: Synthetic oligonucleotide
  Antisense strand to SEQ ID NO: 258090
auucucaacccucaguccg

SEQ ID NO: 258092 - RNA, 19 nt, Artificial Sequence
  Description of Artificial Sequence: Synthetic oligonucleotide
  Sense strand starting at position 624 SEQ ID NO: 3320
gguugagaauugguucuga

SEQ ID NO: 258093 - RNA, 19 nt, Artificial Sequence
  Description of Artificial Sequence: Synthetic oligonucleotide
  Antisense strand to SEQ ID NO: 258092
ucagaaccaauucucaacc

SEQ ID NO: 258094 - RNA, 19 nt, Artificial Sequence
  Description of Artificial Sequence: Synthetic oligonucleotide
  Sense strand starting at position 647 SEQ ID NO: 3320
gcaggcauuuaauauuaau

SEQ ID NO: 258095 - RNA, 19 nt, Artificial Sequence
  Description of Artificial Sequence: Synthetic oligonucleotide
  Antisense strand to SEQ ID NO: 258094
auuaauauuaaaugccugc

SEQ ID NO: 258096 - RNA, 19 nt, Artificial Sequence
  Description of Artificial Sequence: Synthetic oligonucleotide
  Sense strand starting at position 702 SEQ ID NO: 3320
gcacccaugcugcauuuau

SEQ ID NO: 258097 - RNA, 19 nt, Artificial Sequence
  Description of Artificial Sequence: Synthetic oligonucleotide
  Antisense strand to SEQ ID NO: 258096
auaaaugcagcaugggugc

SEQ ID NO: 258098 - RNA, 19 nt, Artificial Sequence
  Description of Artificial Sequence: Synthetic oligonucleotide
  Sense strand starting at position 762 SEQ ID NO: 3320
guacuaugaccucgacaaa

SEQ ID NO: 258099 - RNA, 19 nt, Artificial Sequence
  Description of Artificial Sequence: Synthetic oligonucleotide
  Antisense strand to SEQ ID NO: 258098
uuugucgaggucauaguac

SEQ ID NO: 258100 - RNA, 19 nt, Artificial Sequence
  Description of Artificial Sequence: Synthetic oligonucleotide
  Sense strand starting at position 909 SEQ ID NO: 3320
aggacagugccucagacau

SEQ ID NO: 258101 - RNA, 19 nt, Artificial Sequence
  Description of Artificial Sequence: Synthetic oligonucleotide
  Antisense strand to SEQ ID NO: 258100
augucugaggcacuguccu

SEQ ID NO: 258102 - RNA, 19 nt, Artificial Sequence
  Description of Artificial Sequence: Synthetic oligonucleotide
  Sense strand starting at position 915 SEQ ID NO: 3320
gugccucagacauagcgaa

SEQ ID NO: 258103 - RNA, 19 nt, Artificial Sequence
  Description of Artificial Sequence: Synthetic oligonucleotide
  Antisense strand to SEQ ID NO: 258102
uucgcuaugucugaggcac

SEQ ID NO: 258104 - RNA, 19 nt, Artificial Sequence
  Description of Artificial Sequence: Synthetic oligonucleotide
  Sense strand starting at position 959 SEQ ID NO: 3320
gaaggaacuuguucugauc

SEQ ID NO: 258105 - RNA, 19 nt, Artificial Sequence
  Description of Artificial Sequence: Synthetic oligonucleotide
  Antisense strand to SEQ ID NO: 258104
gaucagaacaaguuccuuc

SEQ ID NO: 258106 - RNA, 19 nt, Artificial Sequence
  Description of Artificial Sequence: Synthetic oligonucleotide
  Sense strand starting at position 1013 SEQ ID NO: 3320
caguacagucgagacaaau

SEQ ID NO: 258107 - RNA, 19 nt, Artificial Sequence
  Description of Artificial Sequence: Synthetic oligonucleotide
  Antisense strand to SEQ ID NO: 258106
auuugucucgacuguacug

SEQ ID NO: 258108 - RNA, 19 nt, Artificial Sequence
  Description of Artificial Sequence: Synthetic oligonucleotide
  Sense strand starting at position 1019 SEQ ID NO: 3320
agucgagacaaaugaaucu

SEQ ID NO: 258109 - RNA, 19 nt, Artificial Sequence
  Description of Artificial Sequence: Synthetic oligonucleotide
  Antisense strand to SEQ ID NO: 258108
agauucauuugucucgacu

SEQ ID NO: 258110 - RNA, 19 nt, Artificial Sequence
  Description of Artificial Sequence: Synthetic oligonucleotide
  Sense strand starting at position 1079 SEQ ID NO: 3320
cguucaagagcuuggaaga

SEQ ID NO: 258111 - RNA, 19 nt, Artificial Sequence
  Description of Artificial Sequence: Synthetic oligonucleotide
  Antisense strand to SEQ ID NO: 258110
ucuuccaagcucuugaacg

SEQ ID NO: 258112 - RNA, 19 nt, Artificial Sequence
  Description of Artificial Sequence: Synthetic oligonucleotide
  Sense strand starting at position 1137 SEQ ID NO: 3320
gacgcuucuggucacauga

SEQ ID NO: 258113 - RNA, 19 nt, Artificial Sequence
  Description of Artificial Sequence: Synthetic oligonucleotide
  Antisense strand to SEQ ID NO: 258112
ucaugugaccagaagcguc

SEQ ID NO: 258114 - RNA, 19 nt, Artificial Sequence
  Description of Artificial Sequence: Synthetic oligonucleotide
  Sense strand starting at position 1144 SEQ ID NO: 3320
cuggucacaugaucagauu

SEQ ID NO: 258115 - RNA, 19 nt, Artificial Sequence
  Description of Artificial Sequence: Synthetic oligonucleotide
  Antisense strand to SEQ ID NO: 258114
aaucugaucaugugaccag

SEQ ID NO: 258116 - RNA, 19 nt, Artificial Sequence
  Description of Artificial Sequence: Synthetic oligonucleotide
  Sense strand starting at position 1147 SEQ ID NO: 3320
gucacaugaucagauuucu

SEQ ID NO: 258117 - RNA, 19 nt, Artificial Sequence
  Description of Artificial Sequence: Synthetic oligonucleotide
  Antisense strand to SEQ ID NO: 258116
agaaaucugaucaugugac

SEQ ID NO: 258118 - RNA, 19 nt, Artificial Sequence
  Description of Artificial Sequence: Synthetic oligonucleotide
  Sense strand starting at position 1179 SEQ ID NO: 3320
ggcuguagccucucuguau

SEQ ID NO: 258119 - RNA, 19 nt, Artificial Sequence
  Description of Artificial Sequence: Synthetic oligonucleotide
  Antisense strand to SEQ ID NO: 258118
auacagagaggcuacagcc

SEQ ID NO: 258120 - RNA, 19 nt, Artificial Sequence
  Description of Artificial Sequence: Synthetic oligonucleotide
  Sense strand starting at position 1183 SEQ ID NO: 3320
guagccucucuguauagaa

SEQ ID NO: 258121 - RNA, 19 nt, Artificial Sequence
  Description of Artificial Sequence: Synthetic oligonucleotide
  Antisense strand to SEQ ID NO: 258120
uucuauacagagaggcuac

SEQ ID NO: 258122 - RNA, 19 nt, Artificial Sequence
  Description of Artificial Sequence: Synthetic oligonucleotide
  Sense strand starting at position 1311 SEQ ID NO: 3320
gaaugaacguauccaagac

SEQ ID NO: 258123 - RNA, 19 nt, Artificial Sequence
  Description of Artificial Sequence: Synthetic oligonucleotide
  Antisense strand to SEQ ID NO: 258122
gucuuggauacguucauuc

SEQ ID NO: 258124 - RNA, 19 nt, Artificial Sequence
  Description of Artificial Sequence: Synthetic oligonucleotide
  Sense strand starting at position 1343 SEQ ID NO: 3320
auucgauguggguggguaa

SEQ ID NO: 258125 - RNA, 19 nt, Artificial Sequence
  Description of Artificial Sequence: Synthetic oligonucleotide
  Antisense strand to SEQ ID NO: 258124
uuacccacccacaucgaau

SEQ ID NO: 258126 - RNA, 19 nt, Artificial Sequence
  Description of Artificial Sequence: Synthetic oligonucleotide
  Sense strand starting at position 1376 SEQ ID NO: 3320
ugagaaugaugcccaauuc

SEQ ID NO: 258127 - RNA, 19 nt, Artificial Sequence
  Description of Artificial Sequence: Synthetic oligonucleotide
  Antisense strand to SEQ ID NO: 258126
gaauugggcaucauucuca

SEQ ID NO: 258128 - RNA, 19 nt, Artificial Sequence
  Description of Artificial Sequence: Synthetic oligonucleotide
  Sense strand starting at position 1713 SEQ ID NO: 3320
ccgguuaagcgucccgaga

SEQ ID NO: 258129 - RNA, 19 nt, Artificial Sequence
  Description of Artificial Sequence: Synthetic oligonucleotide
  Antisense strand to SEQ ID NO: 258128
ucucgggacgcuuaaccgg

SEQ ID NO: 258130 - RNA, 19 nt, Artificial Sequence
  Description of Artificial Sequence: Synthetic oligonucleotide
  Sense strand starting at position 2051 SEQ ID NO: 3320
gcgugaguccacguguaau

SEQ ID NO: 258131 - RNA, 19 nt, Artificial Sequence
  Description of Artificial Sequence: Synthetic oligonucleotide
  Antisense strand to SEQ ID NO: 258130
auuacacguggacucacgc

SEQ ID NO: 258132 - RNA, 19 nt, Artificial Sequence
  Description of Artificial Sequence: Synthetic oligonucleotide
  Sense strand starting at position 2710 SEQ ID NO: 3320
guaaguauccauugaccug

SEQ ID NO: 258133 - RNA, 19 nt, Artificial Sequence
  Description of Artificial Sequence: Synthetic oligonucleotide
  Antisense strand to SEQ ID NO: 258132
caggucaauggauacuuac

SEQ ID NO: 258134 - RNA, 19 nt, Artificial Sequence
  Description of Artificial Sequence: Synthetic oligonucleotide
  Sense strand starting at position 2730 SEQ ID NO: 3320
uggauaaaugaguguagga

SEQ ID NO: 258135 - RNA, 19 nt, Artificial Sequence
  Description of Artificial Sequence: Synthetic oligonucleotide
  Antisense strand to SEQ ID NO: 258134
uccuacacucauuuaucca

SEQ ID NO: 258136 - RNA, 19 nt, Artificial Sequence
  Description of Artificial Sequence: Synthetic oligonucleotide
  Sense strand starting at position 3157 SEQ ID NO: 3320
caaagaaaguggcuaagua

SEQ ID NO: 258137 - RNA, 19 nt, Artificial Sequence
  Description of Artificial Sequence: Synthetic oligonucleotide
  Antisense strand to SEQ ID NO: 258136
uacuuagccacuuucuuug

SEQ ID NO: 258138 - RNA, 19 nt, Artificial Sequence
  Description of Artificial Sequence: Synthetic oligonucleotide
  Sense strand starting at position 3161 SEQ ID NO: 3320
gaaaguggcuaaguaguua

SEQ ID NO: 258139 - RNA, 19 nt, Artificial Sequence
  Description of Artificial Sequence: Synthetic oligonucleotide
  Antisense strand to SEQ ID NO: 258138
uaacuacuuagccacuuuc

SEQ ID NO: 258140 - RNA, 19 nt, Artificial Sequence
  Description of Artificial Sequence: Synthetic oligonucleotide
  Sense strand starting at position 3165 SEQ ID NO: 3320
guggcuaaguaguuagaug

SEQ ID NO: 258141 - RNA, 19 nt, Artificial Sequence
  Description of Artificial Sequence: Synthetic oligonucleotide
  Antisense strand to SEQ ID NO: 258140
caucuaacuacuuagccac

SEQ ID NO: 258142 - RNA, 19 nt, Artificial Sequence
  Description of Artificial Sequence: Synthetic oligonucleotide
  Sense strand starting at position 3173 SEQ ID NO: 3320
guaguuagaugccuugaaa

SEQ ID NO: 258143 - RNA, 19 nt, Artificial Sequence
  Description of Artificial Sequence: Synthetic oligonucleotide
  Antisense strand to SEQ ID NO: 258142
uuucaaggcaucuaacuac

SEQ ID NO: 258144 - RNA, 19 nt, Artificial Sequence
  Description of Artificial Sequence: Synthetic oligonucleotide
  Sense strand starting at position 3176 SEQ ID NO: 3320
guuagaugccuugaaaguu

SEQ ID NO: 258145 - RNA, 19 nt, Artificial Sequence
  Description of Artificial Sequence: Synthetic oligonucleotide
  Antisense strand to SEQ ID NO: 258144
aacuuucaaggcaucuaac

SEQ ID NO: 258146 - RNA, 19 nt, Artificial Sequence
  Description of Artificial Sequence: Synthetic oligonucleotide
  Sense strand starting at position 3497 SEQ ID NO: 3320
uuuggauuaguuugaucua

SEQ ID NO: 258147 - RNA, 19 nt, Artificial Sequence
  Description of Artificial Sequence: Synthetic oligonucleotide
  Antisense strand to SEQ ID NO: 258146
uagaucaaacuaauccaaa

SEQ ID NO: 258148 - RNA, 19 nt, Artificial Sequence
  Description of Artificial Sequence: Synthetic oligonucleotide
  Sense strand starting at position 3500 SEQ ID NO: 3320
ggauuaguuugaucuaguu

SEQ ID NO: 258149 - RNA, 19 nt, Artificial Sequence
  Description of Artificial Sequence: Synthetic oligonucleotide
  Antisense strand to SEQ ID NO: 258148
aacuagaucaaacuaaucc

SEQ ID NO: 258150 - RNA, 19 nt, Artificial Sequence
  Description of Artificial Sequence: Synthetic oligonucleotide
  Sense strand starting at position 3687 SEQ ID NO: 3320
uggugucugguagauggau

SEQ ID NO: 258151 - RNA, 19 nt, Artificial Sequence
  Description of Artificial Sequence: Synthetic oligonucleotide
  Antisense strand to SEQ ID NO: 258150
auccaucuaccagacacca

SEQ ID NO: 258152 - RNA, 19 nt, Artificial Sequence
  Description of Artificial Sequence: Synthetic oligonucleotide
  Sense strand starting at position 3689 SEQ ID NO: 3320
gugucugguagauggauaa

SEQ ID NO: 258153 - RNA, 19 nt, Artificial Sequence
  Description of Artificial Sequence: Synthetic oligonucleotide
  Antisense strand to SEQ ID NO: 258152
uuauccaucuaccagacac

SEQ ID NO: 258154 - RNA, 19 nt, Artificial Sequence
  Description of Artificial Sequence: Synthetic oligonucleotide
  Sense strand starting at position 3701 SEQ ID NO: 3320
uggauaaaguguccucauu

SEQ ID NO: 258155 - RNA, 19 nt, Artificial Sequence
  Description of Artificial Sequence: Synthetic oligonucleotide
  Antisense strand to SEQ ID NO: 258154
aaugaggacacuuuaucca

SEQ ID NO: 258156 - RNA, 19 nt, Artificial Sequence
  Description of Artificial Sequence: Synthetic oligonucleotide
  Sense strand starting at position 3761 SEQ ID NO: 3320
uguuaugucucucuugaau

SEQ ID NO: 258157 - RNA, 19 nt, Artificial Sequence
  Description of Artificial Sequence: Synthetic oligonucleotide
  Antisense strand to SEQ ID NO: 258156
auucaagagagacauaaca

SEQ ID NO: 258158 - RNA, 19 nt, Artificial Sequence
  Description of Artificial Sequence: Synthetic oligonucleotide
  Sense strand starting at position 3 SEQ ID NO: 3321
aagugagucuuggcaccua

SEQ ID NO: 258159 - RNA, 19 nt, Artificial Sequence
  Description of Artificial Sequence: Synthetic oligonucleotide
  Antisense strand to SEQ ID NO: 258158
uaggugccaagacucacuu

SEQ ID NO: 258160 - RNA, 19 nt, Artificial Sequence
  Description of Artificial Sequence: Synthetic oligonucleotide
  Sense strand starting at position 24 SEQ ID NO: 3321
uguauuguucccuauccca

SEQ ID NO: 258161 - RNA, 19 nt, Artificial Sequence
  Description of Artificial Sequence: Synthetic oligonucleotide
  Antisense strand to SEQ ID NO: 258160
ugggauagggaacaauaca

SEQ ID NO: 258162 - RNA, 19 nt, Artificial Sequence
  Description of Artificial Sequence: Synthetic oligonucleotide
  Sense strand starting at position 283 SEQ ID NO: 3321
ugaccaguacuuugucacu

SEQ ID NO: 258163 - RNA, 19 nt, Artificial Sequence
  Description of Artificial Sequence: Synthetic oligonucleotide
  Antisense strand to SEQ ID NO: 258162
agugacaaaguacugguca

SEQ ID NO: 258164 - RNA, 19 nt, Artificial Sequence
  Description of Artificial Sequence: Synthetic oligonucleotide
  Sense strand starting at position 285 SEQ ID NO: 3321
accaguacuuugucacuua

SEQ ID NO: 258165 - RNA, 19 nt, Artificial Sequence
  Description of Artificial Sequence: Synthetic oligonucleotide
  Antisense strand to SEQ ID NO: 258164
uaagugacaaaguacuggu

SEQ ID NO: 258166 - RNA, 19 nt, Artificial Sequence
  Description of Artificial Sequence: Synthetic oligonucleotide
  Sense strand starting at position 308 SEQ ID NO: 3321
ugucaugguccuggaauga

SEQ ID NO: 258167 - RNA, 19 nt, Artificial Sequence
  Description of Artificial Sequence: Synthetic oligonucleotide
  Antisense strand to SEQ ID NO: 258166
ucauuccaggaccaugaca

SEQ ID NO: 258168 - RNA, 19 nt, Artificial Sequence
  Description of Artificial Sequence: Synthetic oligonucleotide
  Sense strand starting at position 371 SEQ ID NO: 3321
cggacugaggguugagaau

SEQ ID NO: 258169 - RNA, 19 nt, Artificial Sequence
  Description of Artificial Sequence: Synthetic oligonucleotide
  Antisense strand to SEQ ID NO: 258168
auucucaacccucaguccg

SEQ ID NO: 258170 - RNA, 19 nt, Artificial Sequence
  Description of Artificial Sequence: Synthetic oligonucleotide
  Sense strand starting at position 380 SEQ ID NO: 3321
gguugagaauugguucuga

SEQ ID NO: 258171 - RNA, 19 nt, Artificial Sequence
  Description of Artificial Sequence: Synthetic oligonucleotide
  Antisense strand to SEQ ID NO: 258170
ucagaaccaauucucaacc

SEQ ID NO: 258172 - RNA, 19 nt, Artificial Sequence
  Description of Artificial Sequence: Synthetic oligonucleotide
  Sense strand starting at position 458 SEQ ID NO: 3321
gcacccaugcugcauuuau

SEQ ID NO: 258173 - RNA, 19 nt, Artificial Sequence
  Description of Artificial Sequence: Synthetic oligonucleotide
  Antisense strand to SEQ ID NO: 258172
auaaaugcagcaugggugc

SEQ ID NO: 258174 - RNA, 19 nt, Artificial Sequence
  Description of Artificial Sequence: Synthetic oligonucleotide
  Sense strand starting at position 518 SEQ ID NO: 3321
guacuaugaccucgacaaa

SEQ ID NO: 258175 - RNA, 19 nt, Artificial Sequence
  Description of Artificial Sequence: Synthetic oligonucleotide
  Antisense strand to SEQ ID NO: 258174
uuugucgaggucauaguac

SEQ ID NO: 258176 - RNA, 19 nt, Artificial Sequence
  Description of Artificial Sequence: Synthetic oligonucleotide
  Sense strand starting at position 665 SEQ ID NO: 3321
aggacagugccucagacau

SEQ ID NO: 258177 - RNA, 19 nt, Artificial Sequence
  Description of Artificial Sequence: Synthetic oligonucleotide
  Antisense strand to SEQ ID NO: 258176
augucugaggcacuguccu

SEQ ID NO: 258178 - RNA, 19 nt, Artificial Sequence
  Description of Artificial Sequence: Synthetic oligonucleotide
  Sense strand starting at position 671 SEQ ID NO: 3321
gugccucagacauagcgaa

SEQ ID NO: 258179 - RNA, 19 nt, Artificial Sequence
  Description of Artificial Sequence: Synthetic oligonucleotide
  Antisense strand to SEQ ID NO: 258178
uucgcuaugucugaggcac

SEQ ID NO: 258180 - RNA, 19 nt, Artificial Sequence
  Description of Artificial Sequence: Synthetic oligonucleotide
  Sense strand starting at position 715 SEQ ID NO: 3321
gaaggaacuuguucugauc

SEQ ID NO: 258181 - RNA, 19 nt, Artificial Sequence
  Description of Artificial Sequence: Synthetic oligonucleotide
  Antisense strand to SEQ ID NO: 258180
gaucagaacaaguuccuuc

SEQ ID NO: 258182 - RNA, 19 nt, Artificial Sequence
  Description of Artificial Sequence: Synthetic oligonucleotide
  Sense strand starting at position 769 SEQ ID NO: 3321
caguacagucgagacaaau

SEQ ID NO: 258183 - RNA, 19 nt, Artificial Sequence
  Description of Artificial Sequence: Synthetic oligonucleotide
  Antisense strand to SEQ ID NO: 258182
auuugucucgacuguacug

SEQ ID NO: 258184 - RNA, 19 nt, Artificial Sequence
  Description of Artificial Sequence: Synthetic oligonucleotide
  Sense strand starting at position 775 SEQ ID NO: 3321
agucgagacaaaugaaucu

SEQ ID NO: 258185 - RNA, 19 nt, Artificial Sequence
  Description of Artificial Sequence: Synthetic oligonucleotide
  Antisense strand to SEQ ID NO: 258184
agauucauuugucucgacu

SEQ ID NO: 258186 - RNA, 19 nt, Artificial Sequence
  Description of Artificial Sequence: Synthetic oligonucleotide
  Sense strand starting at position 835 SEQ ID NO: 3321
cguucaagagcuuggaaga

SEQ ID NO: 258187 - RNA, 19 nt, Artificial Sequence
  Description of Artificial Sequence: Synthetic oligonucleotide
  Antisense strand to SEQ ID NO: 258186
ucuuccaagcucuugaacg

SEQ ID NO: 258188 - RNA, 19 nt, Artificial Sequence
  Description of Artificial Sequence: Synthetic oligonucleotide
  Sense strand starting at position 893 SEQ ID NO: 3321
gacgcuucuggucacauga

SEQ ID NO: 258189 - RNA, 19 nt, Artificial Sequence
  Description of Artificial Sequence: Synthetic oligonucleotide
  Antisense strand to SEQ ID NO: 258188
ucaugugaccagaagcguc

SEQ ID NO: 258190 - RNA, 19 nt, Artificial Sequence
  Description of Artificial Sequence: Synthetic oligonucleotide
  Sense strand starting at position 900 SEQ ID NO: 3321
cuggucacaugaucagauu

SEQ ID NO: 258191 - RNA, 19 nt, Artificial Sequence
  Description of Artificial Sequence: Synthetic oligonucleotide
  Antisense strand to SEQ ID NO: 258190
aaucugaucaugugaccag

SEQ ID NO: 258192 - RNA, 19 nt, Artificial Sequence
  Description of Artificial Sequence: Synthetic oligonucleotide
  Sense strand starting at position 903 SEQ ID NO: 3321
gucacaugaucagauuucu

SEQ ID NO: 258193 - RNA, 19 nt, Artificial Sequence
  Description of Artificial Sequence: Synthetic oligonucleotide
  Antisense strand to SEQ ID NO: 258192
agaaaucugaucaugugac

SEQ ID NO: 258194 - RNA, 19 nt, Artificial Sequence
  Description of Artificial Sequence: Synthetic oligonucleotide
  Sense strand starting at position 935 SEQ ID NO: 3321
ggcuguagccucucuguau

SEQ ID NO: 258195 - RNA, 19 nt, Artificial Sequence
  Description of Artificial Sequence: Synthetic oligonucleotide
  Antisense strand to SEQ ID NO: 258194
auacagagaggcuacagcc

SEQ ID NO: 258196 - RNA, 19 nt, Artificial Sequence
  Description of Artificial Sequence: Synthetic oligonucleotide
  Sense strand starting at position 939 SEQ ID NO: 3321
guagccucucuguauagaa

SEQ ID NO: 258197 - RNA, 19 nt, Artificial Sequence
  Description of Artificial Sequence: Synthetic oligonucleotide
  Antisense strand to SEQ ID NO: 258196
uucuauacagagaggcuac

SEQ ID NO: 258198 - RNA, 19 nt, Artificial Sequence
  Description of Artificial Sequence: Synthetic oligonucleotide
  Sense strand starting at position 1067 SEQ ID NO: 3321
gaaugaacguauccaagac

SEQ ID NO: 258199 - RNA, 19 nt, Artificial Sequence
  Description of Artificial Sequence: Synthetic oligonucleotide
  Antisense strand to SEQ ID NO: 258198
gucuuggauacguucauuc

SEQ ID NO: 258200 - RNA, 19 nt, Artificial Sequence
  Description of Artificial Sequence: Synthetic oligonucleotide
  Sense strand starting at position 1099 SEQ ID NO: 3321
auucgauguggguggguaa

SEQ ID NO: 258201 - RNA, 19 nt, Artificial Sequence
  Description of Artificial Sequence: Synthetic oligonucleotide
  Antisense strand to SEQ ID NO: 258200
uuacccacccacaucgaau

SEQ ID NO: 258202 - RNA, 19 nt, Artificial Sequence
  Description of Artificial Sequence: Synthetic oligonucleotide
  Sense strand starting at position 1132 SEQ ID NO: 3321
ugagaaugaugcccaauuc

SEQ ID NO: 258203 - RNA, 19 nt, Artificial Sequence
  Description of Artificial Sequence: Synthetic oligonucleotide
  Antisense strand to SEQ ID NO: 258202
gaauugggcaucauucuca

SEQ ID NO: 258204 - RNA, 19 nt, Artificial Sequence
  Description of Artificial Sequence: Synthetic oligonucleotide
  Sense strand starting at position 1469 SEQ ID NO: 3321
ccgguuaagcgucccgaga

SEQ ID NO: 258205 - RNA, 19 nt, Artificial Sequence
  Description of Artificial Sequence: Synthetic oligonucleotide
  Antisense strand to SEQ ID NO: 258204
ucucgggacgcuuaaccgg

SEQ ID NO: 258206 - RNA, 19 nt, Artificial Sequence
  Description of Artificial Sequence: Synthetic oligonucleotide
  Sense strand starting at position 1807 SEQ ID NO: 3321
gcgugaguccacguguaau

SEQ ID NO: 258207 - RNA, 19 nt, Artificial Sequence
  Description of Artificial Sequence: Synthetic oligonucleotide
  Antisense strand to SEQ ID NO: 258206
auuacacguggacucacgc

SEQ ID NO: 258208 - RNA, 19 nt, Artificial Sequence
  Description of Artificial Sequence: Synthetic oligonucleotide
  Sense strand starting at position 2466 SEQ ID NO: 3321
guaaguauccauugaccug

SEQ ID NO: 258209 - RNA, 19 nt, Artificial Sequence
  Description of Artificial Sequence: Synthetic oligonucleotide
  Antisense strand to SEQ ID NO: 258208
caggucaauggauacuuac

SEQ ID NO: 258210 - RNA, 19 nt, Artificial Sequence
  Description of Artificial Sequence: Synthetic oligonucleotide
  Sense strand starting at position 2486 SEQ ID NO: 3321
uggauaaaugaguguagga

SEQ ID NO: 258211 - RNA, 19 nt, Artificial Sequence
  Description of Artificial Sequence: Synthetic oligonucleotide
  Antisense strand to SEQ ID NO: 258210
uccuacacucauuuaucca

SEQ ID NO: 258212 - RNA, 19 nt, Artificial Sequence
  Description of Artificial Sequence: Synthetic oligonucleotide
  Sense strand starting at position 2913 SEQ ID NO: 3321
caaagaaaguggcuaagua

SEQ ID NO: 258213 - RNA, 19 nt, Artificial Sequence
  Description of Artificial Sequence: Synthetic oligonucleotide
  Antisense strand to SEQ ID NO: 258212
uacuuagccacuuucuuug

SEQ ID NO: 258214 - RNA, 19 nt, Artificial Sequence
  Description of Artificial Sequence: Synthetic oligonucleotide
  Sense strand starting at position 2917 SEQ ID NO: 3321
gaaaguggcuaaguaguua

SEQ ID NO: 258215 - RNA, 19 nt, Artificial Sequence
  Description of Artificial Sequence: Synthetic oligonucleotide
  Antisense strand to SEQ ID NO: 258214
uaacuacuuagccacuuuc

SEQ ID NO: 258216 - RNA, 19 nt, Artificial Sequence
  Description of Artificial Sequence: Synthetic oligonucleotide
  Sense strand starting at position 2921 SEQ ID NO: 3321
guggcuaaguaguuagaug

SEQ ID NO: 258217 - RNA, 19 nt, Artificial Sequence
  Description of Artificial Sequence: Synthetic oligonucleotide
  Antisense strand to SEQ ID NO: 258216
caucuaacuacuuagccac

SEQ ID NO: 258218 - RNA, 19 nt, Artificial Sequence
  Description of Artificial Sequence: Synthetic oligonucleotide
  Sense strand starting at position 2929 SEQ ID NO: 3321
guaguuagaugccuugaaa

SEQ ID NO: 258219 - RNA, 19 nt, Artificial Sequence
  Description of Artificial Sequence: Synthetic oligonucleotide
  Antisense strand to SEQ ID NO: 258218
uuucaaggcaucuaacuac

SEQ ID NO: 258220 - RNA, 19 nt, Artificial Sequence
  Description of Artificial Sequence: Synthetic oligonucleotide
  Sense strand starting at position 2932 SEQ ID NO: 3321
guuagaugccuugaaaguu

SEQ ID NO: 258221 - RNA, 19 nt, Artificial Sequence
  Description of Artificial Sequence: Synthetic oligonucleotide
  Antisense strand to SEQ ID NO: 258220
aacuuucaaggcaucuaac

SEQ ID NO: 258222 - RNA, 19 nt, Artificial Sequence
  Description of Artificial Sequence: Synthetic oligonucleotide
  Sense strand starting at position 3253 SEQ ID NO: 3321
uuuggauuaguuugaucua

SEQ ID NO: 258223 - RNA, 19 nt, Artificial Sequence
  Description of Artificial Sequence: Synthetic oligonucleotide
  Antisense strand to SEQ ID NO: 258222
uagaucaaacuaauccaaa

SEQ ID NO: 258224 - RNA, 19 nt, Artificial Sequence
  Description of Artificial Sequence: Synthetic oligonucleotide
  Sense strand starting at position 3256 SEQ ID NO: 3321
ggauuaguuugaucuaguu

SEQ ID NO: 258225 - RNA, 19 nt, Artificial Sequence
  Description of Artificial Sequence: Synthetic oligonucleotide
  Antisense strand to SEQ ID NO: 258224
aacuagaucaaacuaaucc

SEQ ID NO: 258226 - RNA, 19 nt, Artificial Sequence
  Description of Artificial Sequence: Synthetic oligonucleotide
  Sense strand starting at position 3443 SEQ ID NO: 3321
uggugucugguagauggau

SEQ ID NO: 258227 - RNA, 19 nt, Artificial Sequence
  Description of Artificial Sequence: Synthetic oligonucleotide
  Antisense strand to SEQ ID NO: 258226
auccaucuaccagacacca

SEQ ID NO: 258228 - RNA, 19 nt, Artificial Sequence
  Description of Artificial Sequence: Synthetic oligonucleotide
  Sense strand starting at position 3445 SEQ ID NO: 3321
gugucugguagauggauaa

SEQ ID NO: 258229 - RNA, 19 nt, Artificial Sequence
  Description of Artificial Sequence: Synthetic oligonucleotide
  Antisense strand to SEQ ID NO: 258228
uuauccaucuaccagacac

SEQ ID NO: 258230 - RNA, 19 nt, Artificial Sequence
  Description of Artificial Sequence: Synthetic oligonucleotide
  Sense strand starting at position 3457 SEQ ID NO: 3321
uggauaaaguguccucauu

SEQ ID NO: 258231 - RNA, 19 nt, Artificial Sequence
  Description of Artificial Sequence: Synthetic oligonucleotide
  Antisense strand to SEQ ID NO: 258230
aaugaggacacuuuaucca

SEQ ID NO: 258232 - RNA, 19 nt, Artificial Sequence
  Description of Artificial Sequence: Synthetic oligonucleotide
  Sense strand starting at position 3889 SEQ ID NO: 3321
aguccugugcuuuagauac

SEQ ID NO: 258233 - RNA, 19 nt, Artificial Sequence
  Description of Artificial Sequence: Synthetic oligonucleotide
  Antisense strand to SEQ ID NO: 258232
guaucuaaagcacaggacu

SEQ ID NO: 258234 - RNA, 19 nt, Artificial Sequence
  Description of Artificial Sequence: Synthetic oligonucleotide
  Sense strand starting at position 3948 SEQ ID NO: 3321
augaccucucuguguaauu

SEQ ID NO: 258235 - RNA, 19 nt, Artificial Sequence
  Description of Artificial Sequence: Synthetic oligonucleotide
  Antisense strand to SEQ ID NO: 258234
aauuacacagagaggucau

SEQ ID NO: 258236 - RNA, 19 nt, Artificial Sequence
  Description of Artificial Sequence: Synthetic oligonucleotide
  Sense strand starting at position 3949 SEQ ID NO: 3321
ugaccucucuguguaauuc

SEQ ID NO: 258237 - RNA, 19 nt, Artificial Sequence
  Description of Artificial Sequence: Synthetic oligonucleotide
  Antisense strand to SEQ ID NO: 258236
gaauuacacagagagguca

SEQ ID NO: 258238 - RNA, 19 nt, Artificial Sequence
  Description of Artificial Sequence: Synthetic oligonucleotide
  Sense strand starting at position 125 SEQ ID NO: 3322
aggaaauccugcccaccaa

SEQ ID NO: 258239 - RNA, 19 nt, Artificial Sequence
  Description of Artificial Sequence: Synthetic oligonucleotide
  Antisense strand to SEQ ID NO: 258238
uuggugggcaggauuuccu

SEQ ID NO: 258240 - RNA, 19 nt, Artificial Sequence
  Description of Artificial Sequence: Synthetic oligonucleotide
  Sense strand starting at position 288 SEQ ID NO: 3322
cuggguucugcuugacaua

SEQ ID NO: 258241 - RNA, 19 nt, Artificial Sequence
  Description of Artificial Sequence: Synthetic oligonucleotide
  Antisense strand to SEQ ID NO: 258240
uaugucaagcagaacccag

SEQ ID NO: 258242 - RNA, 19 nt, Artificial Sequence
  Description of Artificial Sequence: Synthetic oligonucleotide
  Sense strand starting at position 289 SEQ ID NO: 3322
uggguucugcuugacauaa

SEQ ID NO: 258243 - RNA, 19 nt, Artificial Sequence
  Description of Artificial Sequence: Synthetic oligonucleotide
  Antisense strand to SEQ ID NO: 258242
uuaugucaagcagaaccca

SEQ ID NO: 258244 - RNA, 19 nt, Artificial Sequence
  Description of Artificial Sequence: Synthetic oligonucleotide
  Sense strand starting at position 317 SEQ ID NO: 3322
cucgguuacaguuguccaa

SEQ ID NO: 258245 - RNA, 19 nt, Artificial Sequence
  Description of Artificial Sequence: Synthetic oligonucleotide
  Antisense strand to SEQ ID NO: 258244
uuggacaacuguaaccgag

SEQ ID NO: 258246 - RNA, 19 nt, Artificial Sequence
  Description of Artificial Sequence: Synthetic oligonucleotide
  Sense strand starting at position 352 SEQ ID NO: 3322
ggugaagacuccagaggga

SEQ ID NO: 258247 - RNA, 19 nt, Artificial Sequence
  Description of Artificial Sequence: Synthetic oligonucleotide
  Antisense strand to SEQ ID NO: 258246
ucccucuggagucuucacc

SEQ ID NO: 258248 - RNA, 19 nt, Artificial Sequence
  Description of Artificial Sequence: Synthetic oligonucleotide
  Sense strand starting at position 391 SEQ ID NO: 3322
cucuuaggagucugcucaa

SEQ ID NO: 258249 - RNA, 19 nt, Artificial Sequence
  Description of Artificial Sequence: Synthetic oligonucleotide
  Antisense strand to SEQ ID NO: 258248
uugagcagacuccuaagag

SEQ ID NO: 258250 - RNA, 19 nt, Artificial Sequence
  Description of Artificial Sequence: Synthetic oligonucleotide
  Sense strand starting at position 610 SEQ ID NO: 3322
cccguaguccugugaacuu

SEQ ID NO: 258251 - RNA, 19 nt, Artificial Sequence
  Description of Artificial Sequence: Synthetic oligonucleotide
  Antisense strand to SEQ ID NO: 258250
aaguucacaggacuacggg

SEQ ID NO: 258252 - RNA, 19 nt, Artificial Sequence
  Description of Artificial Sequence: Synthetic oligonucleotide
  Sense strand starting at position 669 SEQ ID NO: 3322
uccauagagcuuugaucac

SEQ ID NO: 258253 - RNA, 19 nt, Artificial Sequence
  Description of Artificial Sequence: Synthetic oligonucleotide
  Antisense strand to SEQ ID NO: 258252
gugaucaaagcucuaugga

SEQ ID NO: 258254 - RNA, 19 nt, Artificial Sequence
  Description of Artificial Sequence: Synthetic oligonucleotide
  Sense strand starting at position 689 SEQ ID NO: 3322
gucuuagaccagcaugaag

SEQ ID NO: 258255 - RNA, 19 nt, Artificial Sequence
  Description of Artificial Sequence: Synthetic oligonucleotide
  Antisense strand to SEQ ID NO: 258254
cuucaugcuggucuaagac

SEQ ID NO: 258256 - RNA, 19 nt, Artificial Sequence
  Description of Artificial Sequence: Synthetic oligonucleotide
  Sense strand starting at position 737 SEQ ID NO: 3322
gccuaaagccuuuaagaaa

SEQ ID NO: 258257 - RNA, 19 nt, Artificial Sequence
  Description of Artificial Sequence: Synthetic oligonucleotide
  Antisense strand to SEQ ID NO: 258256
uuucuuaaaggcuuuaggc

SEQ ID NO: 258258 - RNA, 19 nt, Artificial Sequence
  Description of Artificial Sequence: Synthetic oligonucleotide
  Sense strand starting at position 1158 SEQ ID NO: 3322
ggauuaaagugagcuccga

SEQ ID NO: 258259 - RNA, 19 nt, Artificial Sequence
  Description of Artificial Sequence: Synthetic oligonucleotide
  Antisense strand to SEQ ID NO: 258258
ucggagcucacuuuaaucc

SEQ ID NO: 258260 - RNA, 19 nt, Artificial Sequence
  Description of Artificial Sequence: Synthetic oligonucleotide
  Sense strand starting at position 2021 SEQ ID NO: 3322
uccuucugccgcgagagaa

SEQ ID NO: 258261 - RNA, 19 nt, Artificial Sequence
  Description of Artificial Sequence: Synthetic oligonucleotide
  Antisense strand to SEQ ID NO: 258260
uucucucgcggcagaagga

SEQ ID NO: 258262 - RNA, 19 nt, Artificial Sequence
  Description of Artificial Sequence: Synthetic oligonucleotide
  Sense strand starting at position 2085 SEQ ID NO: 3322
ugcucuguguccuuuagga

SEQ ID NO: 258263 - RNA, 19 nt, Artificial Sequence
  Description of Artificial Sequence: Synthetic oligonucleotide
  Antisense strand to SEQ ID NO: 258262
uccuaaaggacacagagca

SEQ ID NO: 258264 - RNA, 19 nt, Artificial Sequence
  Description of Artificial Sequence: Synthetic oligonucleotide
  Sense strand starting at position 2087 SEQ ID NO: 3322
cucuguguccuuuaggaua

SEQ ID NO: 258265 - RNA, 19 nt, Artificial Sequence
  Description of Artificial Sequence: Synthetic oligonucleotide
  Antisense strand to SEQ ID NO: 258264
uauccuaaaggacacagag

SEQ ID NO: 258266 - RNA, 19 nt, Artificial Sequence
  Description of Artificial Sequence: Synthetic oligonucleotide
  Sense strand starting at position 2101 SEQ ID NO: 3322
ggauaauguggcuaacucu

SEQ ID NO: 258267 - RNA, 19 nt, Artificial Sequence
  Description of Artificial Sequence: Synthetic oligonucleotide
  Antisense strand to SEQ ID NO: 258266
agaguuagccacauuaucc

SEQ ID NO: 258268 - RNA, 19 nt, Artificial Sequence
  Description of Artificial Sequence: Synthetic oligonucleotide
  Sense strand starting at position 2116 SEQ ID NO: 3322
cucugucuaccgugaaaug

SEQ ID NO: 258269 - RNA, 19 nt, Artificial Sequence
  Description of Artificial Sequence: Synthetic oligonucleotide
  Antisense strand to SEQ ID NO: 258268
cauuucacgguagacagag

SEQ ID NO: 258270 - RNA, 19 nt, Artificial Sequence
  Description of Artificial Sequence: Synthetic oligonucleotide
  Sense strand starting at position 2125 SEQ ID NO: 3322
ccgugaaauggugguaucu

SEQ ID NO: 258271 - RNA, 19 nt, Artificial Sequence
  Description of Artificial Sequence: Synthetic oligonucleotide
  Antisense strand to SEQ ID NO: 258270
agauaccaccauuucacgg

SEQ ID NO: 258272 - RNA, 19 nt, Artificial Sequence
  Description of Artificial Sequence: Synthetic oligonucleotide
  Sense strand starting at position 2135 SEQ ID NO: 3322
gugguaucugcauaucaug

SEQ ID NO: 258273 - RNA, 19 nt, Artificial Sequence
  Description of Artificial Sequence: Synthetic oligonucleotide
  Antisense strand to SEQ ID NO: 258272
caugauaugcagauaccac

SEQ ID NO: 258274 - RNA, 19 nt, Artificial Sequence
  Description of Artificial Sequence: Synthetic oligonucleotide
  Sense strand starting at position 2141 SEQ ID NO: 3322
ucugcauaucaugagauca

SEQ ID NO: 258275 - RNA, 19 nt, Artificial Sequence
  Description of Artificial Sequence: Synthetic oligonucleotide
  Antisense strand to SEQ ID NO: 258274
ugaucucaugauaugcaga

SEQ ID NO: 258276 - RNA, 19 nt, Artificial Sequence
  Description of Artificial Sequence: Synthetic oligonucleotide
  Sense strand starting at position 2149 SEQ ID NO: 3322
ucaugagaucagugcauug

SEQ ID NO: 258277 - RNA, 19 nt, Artificial Sequence
  Description of Artificial Sequence: Synthetic oligonucleotide
  Antisense strand to SEQ ID NO: 258276
caaugcacugaucucauga

SEQ ID NO: 258278 - RNA, 19 nt, Artificial Sequence
  Description of Artificial Sequence: Synthetic oligonucleotide
  Sense strand starting at position 2241 SEQ ID NO: 3322
cgucuuuguccauaguucu

SEQ ID NO: 258279 - RNA, 19 nt, Artificial Sequence
  Description of Artificial Sequence: Synthetic oligonucleotide
  Antisense strand to SEQ ID NO: 258278
agaacuauggacaaagacg

SEQ ID NO: 258280 - RNA, 19 nt, Artificial Sequence
  Description of Artificial Sequence: Synthetic oligonucleotide
  Sense strand starting at position 2382 SEQ ID NO: 3322
uggcgaucucgggacacau

SEQ ID NO: 258281 - RNA, 19 nt, Artificial Sequence
  Description of Artificial Sequence: Synthetic oligonucleotide
  Antisense strand to SEQ ID NO: 258280
augugucccgagaucgcca

SEQ ID NO: 258282 - RNA, 19 nt, Artificial Sequence
  Description of Artificial Sequence: Synthetic oligonucleotide
  Sense strand starting at position 2645 SEQ ID NO: 3322
gacugcucagccuguugaa

SEQ ID NO: 258283 - RNA, 19 nt, Artificial Sequence
  Description of Artificial Sequence: Synthetic oligonucleotide
  Antisense strand to SEQ ID NO: 258282
uucaacaggcugagcaguc

SEQ ID NO: 258284 - RNA, 19 nt, Artificial Sequence
  Description of Artificial Sequence: Synthetic oligonucleotide
  Sense strand starting at position 2674 SEQ ID NO: 3322
gggacagaucgugauagua

SEQ ID NO: 258285 - RNA, 19 nt, Artificial Sequence
  Description of Artificial Sequence: Synthetic oligonucleotide
  Antisense strand to SEQ ID NO: 258284
uacuaucacgaucuguccc

SEQ ID NO: 258286 - RNA, 19 nt, Artificial Sequence
  Description of Artificial Sequence: Synthetic oligonucleotide
  Sense strand starting at position 2833 SEQ ID NO: 3322
uugaucagcuagccaauaa

SEQ ID NO: 258287 - RNA, 19 nt, Artificial Sequence
  Description of Artificial Sequence: Synthetic oligonucleotide
  Antisense strand to SEQ ID NO: 258286
uuauuggcuagcugaucaa

SEQ ID NO: 258288 - RNA, 19 nt, Artificial Sequence
  Description of Artificial Sequence: Synthetic oligonucleotide
  Sense strand starting at position 2862 SEQ ID NO: 3322
caggauuugugcccagguu

SEQ ID NO: 258289 - RNA, 19 nt, Artificial Sequence
  Description of Artificial Sequence: Synthetic oligonucleotide
  Antisense strand to SEQ ID NO: 258288
aaccugggcacaaauccug

SEQ ID NO: 258290 - RNA, 19 nt, Artificial Sequence
  Description of Artificial Sequence: Synthetic oligonucleotide
  Sense strand starting at position 2870 SEQ ID NO: 3322
gugcccagguuucugagua

SEQ ID NO: 258291 - RNA, 19 nt, Artificial Sequence
  Description of Artificial Sequence: Synthetic oligonucleotide
  Antisense strand to SEQ ID NO: 258290
uacucagaaaccugggcac

SEQ ID NO: 258292 - RNA, 19 nt, Artificial Sequence
  Description of Artificial Sequence: Synthetic oligonucleotide
  Sense strand starting at position 2874 SEQ ID NO: 3322
ccagguuucugaguacauc

SEQ ID NO: 258293 - RNA, 19 nt, Artificial Sequence
  Description of Artificial Sequence: Synthetic oligonucleotide
  Antisense strand to SEQ ID NO: 258292
gauguacucagaaaccugg

SEQ ID NO: 258294 - RNA, 19 nt, Artificial Sequence
  Description of Artificial Sequence: Synthetic oligonucleotide
  Sense strand starting at position 2983 SEQ ID NO: 3322
aagugaucggagggcaauu

SEQ ID NO: 258295 - RNA, 19 nt, Artificial Sequence
  Description of Artificial Sequence: Synthetic oligonucleotide
  Antisense strand to SEQ ID NO: 258294
aauugcccuccgaucacuu

SEQ ID NO: 258296 - RNA, 19 nt, Artificial Sequence
  Description of Artificial Sequence: Synthetic oligonucleotide
  Sense strand starting at position 3443 SEQ ID NO: 3322
ggucauauaauguguaugu

SEQ ID NO: 258297 - RNA, 19 nt, Artificial Sequence
  Description of Artificial Sequence: Synthetic oligonucleotide
  Antisense strand to SEQ ID NO: 258296
acauacacauuauaugacc

SEQ ID NO: 258298 - RNA, 19 nt, Artificial Sequence
  Description of Artificial Sequence: Synthetic oligonucleotide
  Sense strand starting at position 3447 SEQ ID NO: 3322
auauaauguguaugugguu

SEQ ID NO: 258299 - RNA, 19 nt, Artificial Sequence
  Description of Artificial Sequence: Synthetic oligonucleotide
  Antisense strand to SEQ ID NO: 258298
aaccacauacacauuauau

SEQ ID NO: 258300 - RNA, 19 nt, Artificial Sequence
  Description of Artificial Sequence: Synthetic oligonucleotide
  Sense strand starting at position 3448 SEQ ID NO: 3322
uauaauguguaugugguua

SEQ ID NO: 258301 - RNA, 19 nt, Artificial Sequence
  Description of Artificial Sequence: Synthetic oligonucleotide
  Antisense strand to SEQ ID NO: 258300
uaaccacauacacauuaua

SEQ ID NO: 258302 - RNA, 19 nt, Artificial Sequence
  Description of Artificial Sequence: Synthetic oligonucleotide
  Sense strand starting at position 3462 SEQ ID NO: 3322
gguuaaagccuguacucaa

SEQ ID NO: 258303 - RNA, 19 nt, Artificial Sequence
  Description of Artificial Sequence: Synthetic oligonucleotide
  Antisense strand to SEQ ID NO: 258302
uugaguacaggcuuuaacc

SEQ ID NO: 258304 - RNA, 19 nt, Artificial Sequence
  Description of Artificial Sequence: Synthetic oligonucleotide
  Sense strand starting at position 3549 SEQ ID NO: 3322
gugggaacuggccaguaua

SEQ ID NO: 258305 - RNA, 19 nt, Artificial Sequence
  Description of Artificial Sequence: Synthetic oligonucleotide
  Antisense strand to SEQ ID NO: 258304
uauacuggccaguucccac

SEQ ID NO: 258306 - RNA, 19 nt, Artificial Sequence
  Description of Artificial Sequence: Synthetic oligonucleotide
  Sense strand starting at position 3753 SEQ ID NO: 3322
cguagagcauuguuuggau

SEQ ID NO: 258307 - RNA, 19 nt, Artificial Sequence
  Description of Artificial Sequence: Synthetic oligonucleotide
  Antisense strand to SEQ ID NO: 258306
auccaaacaaugcucuacg

SEQ ID NO: 258308 - RNA, 19 nt, Artificial Sequence
  Description of Artificial Sequence: Synthetic oligonucleotide
  Sense strand starting at position 3800 SEQ ID NO: 3322
ggguuccuugaucacucaa

SEQ ID NO: 258309 - RNA, 19 nt, Artificial Sequence
  Description of Artificial Sequence: Synthetic oligonucleotide
  Antisense strand to SEQ ID NO: 258308
uugagugaucaaggaaccc

SEQ ID NO: 258310 - RNA, 19 nt, Artificial Sequence
  Description of Artificial Sequence: Synthetic oligonucleotide
  Sense strand starting at position 3877 SEQ ID NO: 3322
ggagauucuuaacauccca

SEQ ID NO: 258311 - RNA, 19 nt, Artificial Sequence
  Description of Artificial Sequence: Synthetic oligonucleotide
  Antisense strand to SEQ ID NO: 258310
ugggauguuaagaaucucc

SEQ ID NO: 258312 - RNA, 19 nt, Artificial Sequence
  Description of Artificial Sequence: Synthetic oligonucleotide
  Sense strand starting at position 3911 SEQ ID NO: 3322
ucuuacaagucagugaucu

SEQ ID NO: 258313 - RNA, 19 nt, Artificial Sequence
  Description of Artificial Sequence: Synthetic oligonucleotide
  Antisense strand to SEQ ID NO: 258312
agaucacugacuuguaaga

SEQ ID NO: 258314 - RNA, 19 nt, Artificial Sequence
  Description of Artificial Sequence: Synthetic oligonucleotide
  Sense strand starting at position 3912 SEQ ID NO: 3322
cuuacaagucagugaucug

SEQ ID NO: 258315 - RNA, 19 nt, Artificial Sequence
  Description of Artificial Sequence: Synthetic oligonucleotide
  Antisense strand to SEQ ID NO: 258314
cagaucacugacuuguaag

SEQ ID NO: 258316 - RNA, 19 nt, Artificial Sequence
  Description of Artificial Sequence: Synthetic oligonucleotide
  Sense strand starting at position 3915 SEQ ID NO: 3322
acaagucagugaucugaag

SEQ ID NO: 258317 - RNA, 19 nt, Artificial Sequence
  Description of Artificial Sequence: Synthetic oligonucleotide
  Antisense strand to SEQ ID NO: 258316
cuucagaucacugacuugu

SEQ ID NO: 258318 - RNA, 19 nt, Artificial Sequence
  Description of Artificial Sequence: Synthetic oligonucleotide
  Sense strand starting at position 16 SEQ ID NO: 3323
cuaagaaggcagcauuauu

SEQ ID NO: 258319 - RNA, 19 nt, Artificial Sequence
  Description of Artificial Sequence: Synthetic oligonucleotide
  Antisense strand to SEQ ID NO: 258318
aauaaugcugccuucuuag

SEQ ID NO: 258320 - RNA, 19 nt, Artificial Sequence
  Description of Artificial Sequence: Synthetic oligonucleotide
  Sense strand starting at position 88 SEQ ID NO: 3323
gaaugaaccuguguccacu

SEQ ID NO: 258321 - RNA, 19 nt, Artificial Sequence
  Description of Artificial Sequence: Synthetic oligonucleotide
  Antisense strand to SEQ ID NO: 258320
aguggacacagguucauuc

SEQ ID NO: 258322 - RNA, 19 nt, Artificial Sequence
  Description of Artificial Sequence: Synthetic oligonucleotide
  Sense strand starting at position 229 SEQ ID NO: 3323
ucaaauuagggaugcaauu

SEQ ID NO: 258323 - RNA, 19 nt, Artificial Sequence
  Description of Artificial Sequence: Synthetic oligonucleotide
  Antisense strand to SEQ ID NO: 258322
aauugcaucccuaauuuga

SEQ ID NO: 258324 - RNA, 19 nt, Artificial Sequence
  Description of Artificial Sequence: Synthetic oligonucleotide
  Sense strand starting at position 238 SEQ ID NO: 3323
ggaugcaauugguuaagua

SEQ ID NO: 258325 - RNA, 19 nt, Artificial Sequence
  Description of Artificial Sequence: Synthetic oligonucleotide
  Antisense strand to SEQ ID NO: 258324
uacuuaaccaauugcaucc

SEQ ID NO: 258326 - RNA, 19 nt, Artificial Sequence
  Description of Artificial Sequence: Synthetic oligonucleotide
  Sense strand starting at position 239 SEQ ID NO: 3323
gaugcaauugguuaaguau

SEQ ID NO: 258327 - RNA, 19 nt, Artificial Sequence
  Description of Artificial Sequence: Synthetic oligonucleotide
  Antisense strand to SEQ ID NO: 258326
auacuuaaccaauugcauc

SEQ ID NO: 258328 - RNA, 19 nt, Artificial Sequence
  Description of Artificial Sequence: Synthetic oligonucleotide
  Sense strand starting at position 242 SEQ ID NO: 3323
gcaauugguuaaguauaau

SEQ ID NO: 258329 - RNA, 19 nt, Artificial Sequence
  Description of Artificial Sequence: Synthetic oligonucleotide
  Antisense strand to SEQ ID NO: 258328
auuauacuuaaccaauugc

SEQ ID NO: 258330 - RNA, 19 nt, Artificial Sequence
  Description of Artificial Sequence: Synthetic oligonucleotide
  Sense strand starting at position 332 SEQ ID NO: 3323
gauacucaauguguacaga

SEQ ID NO: 258331 - RNA, 19 nt, Artificial Sequence
  Description of Artificial Sequence: Synthetic oligonucleotide
  Antisense strand to SEQ ID NO: 258330
ucuguacacauugaguauc

SEQ ID NO: 258332 - RNA, 19 nt, Artificial Sequence
  Description of Artificial Sequence: Synthetic oligonucleotide
  Sense strand starting at position 342 SEQ ID NO: 3323
guguacagacaauguuauu

SEQ ID NO: 258333 - RNA, 19 nt, Artificial Sequence
  Description of Artificial Sequence: Synthetic oligonucleotide
  Antisense strand to SEQ ID NO: 258332
aauaacauugucuguacac

SEQ ID NO: 258334 - RNA, 19 nt, Artificial Sequence
  Description of Artificial Sequence: Synthetic oligonucleotide
  Sense strand starting at position 480 SEQ ID NO: 3323
uaccuagaguggucaaacu

SEQ ID NO: 258335 - RNA, 19 nt, Artificial Sequence
  Description of Artificial Sequence: Synthetic oligonucleotide
  Antisense strand to SEQ ID NO: 258334
aguuugaccacucuaggua

SEQ ID NO: 258336 - RNA, 19 nt, Artificial Sequence
  Description of Artificial Sequence: Synthetic oligonucleotide
  Sense strand starting at position 552 SEQ ID NO: 3323
ggaggagaguucguguuua

SEQ ID NO: 258337 - RNA, 19 nt, Artificial Sequence
  Description of Artificial Sequence: Synthetic oligonucleotide
  Antisense strand to SEQ ID NO: 258336
uaaacacgaacucuccucc

SEQ ID NO: 258338 - RNA, 19 nt, Artificial Sequence
  Description of Artificial Sequence: Synthetic oligonucleotide
  Sense strand starting at position 556 SEQ ID NO: 3323
gagaguucguguuuaaugg

SEQ ID NO: 258339 - RNA, 19 nt, Artificial Sequence
  Description of Artificial Sequence: Synthetic oligonucleotide
  Antisense strand to SEQ ID NO: 258338
ccauuaaacacgaacucuc

SEQ ID NO: 258340 - RNA, 19 nt, Artificial Sequence
  Description of Artificial Sequence: Synthetic oligonucleotide
  Sense strand starting at position 563 SEQ ID NO: 3323
cguguuuaaugggcacaga

SEQ ID NO: 258341 - RNA, 19 nt, Artificial Sequence
  Description of Artificial Sequence: Synthetic oligonucleotide
  Antisense strand to SEQ ID NO: 258340
ucugugcccauuaaacacg

SEQ ID NO: 258342 - RNA, 19 nt, Artificial Sequence
  Description of Artificial Sequence: Synthetic oligonucleotide
  Sense strand starting at position 576 SEQ ID NO: 3323
cacagaaugucaguuugga

SEQ ID NO: 258343 - RNA, 19 nt, Artificial Sequence
  Description of Artificial Sequence: Synthetic oligonucleotide
  Antisense strand to SEQ ID NO: 258342
uccaaacugacauucugug

SEQ ID NO: 258344 - RNA, 19 nt, Artificial Sequence
  Description of Artificial Sequence: Synthetic oligonucleotide
  Sense strand starting at position 871 SEQ ID NO: 3323
gggcuaaauuacgccucaa

SEQ ID NO: 258345 - RNA, 19 nt, Artificial Sequence
  Description of Artificial Sequence: Synthetic oligonucleotide
  Antisense strand to SEQ ID NO: 258344
uugaggcguaauuuagccc

SEQ ID NO: 258346 - RNA, 19 nt, Artificial Sequence
  Description of Artificial Sequence: Synthetic oligonucleotide
  Sense strand starting at position 1068 SEQ ID NO: 3323
ugguguaucugcuccagga

SEQ ID NO: 258347 - RNA, 19 nt, Artificial Sequence
  Description of Artificial Sequence: Synthetic oligonucleotide
  Antisense strand to SEQ ID NO: 258346
uccuggagcagauacacca

SEQ ID NO: 258348 - RNA, 19 nt, Artificial Sequence
  Description of Artificial Sequence: Synthetic oligonucleotide
  Sense strand starting at position 1070 SEQ ID NO: 3323
guguaucugcuccaggaaa

SEQ ID NO: 258349 - RNA, 19 nt, Artificial Sequence
  Description of Artificial Sequence: Synthetic oligonucleotide
  Antisense strand to SEQ ID NO: 258348
uuuccuggagcagauacac

SEQ ID NO: 258350 - RNA, 19 nt, Artificial Sequence
  Description of Artificial Sequence: Synthetic oligonucleotide
  Sense strand starting at position 1282 SEQ ID NO: 3323
acaguugacgcagaaacuu

SEQ ID NO: 258351 - RNA, 19 nt, Artificial Sequence
  Description of Artificial Sequence: Synthetic oligonucleotide
  Antisense strand to SEQ ID NO: 258350
aaguuucugcgucaacugu

SEQ ID NO: 258352 - RNA, 19 nt, Artificial Sequence
  Description of Artificial Sequence: Synthetic oligonucleotide
  Sense strand starting at position 1514 SEQ ID NO: 3323
gugagcaucaagugacaga

SEQ ID NO: 258353 - RNA, 19 nt, Artificial Sequence
  Description of Artificial Sequence: Synthetic oligonucleotide
  Antisense strand to SEQ ID NO: 258352
ucugucacuugaugcucac

SEQ ID NO: 258354 - RNA, 19 nt, Artificial Sequence
  Description of Artificial Sequence: Synthetic oligonucleotide
  Sense strand starting at position 1773 SEQ ID NO: 3323
ccgacuuacuccuccaaga

SEQ ID NO: 258355 - RNA, 19 nt, Artificial Sequence
  Description of Artificial Sequence: Synthetic oligonucleotide
  Antisense strand to SEQ ID NO: 258354
ucuuggaggaguaagucgg

SEQ ID NO: 258356 - RNA, 19 nt, Artificial Sequence
  Description of Artificial Sequence: Synthetic oligonucleotide
  Sense strand starting at position 1879 SEQ ID NO: 3323
cgagguccauauuugcuua

SEQ ID NO: 258357 - RNA, 19 nt, Artificial Sequence
  Description of Artificial Sequence: Synthetic oligonucleotide
  Antisense strand to SEQ ID NO: 258356
uaagcaaauauggaccucg

SEQ ID NO: 258358 - RNA, 19 nt, Artificial Sequence
  Description of Artificial Sequence: Synthetic oligonucleotide
  Sense strand starting at position 1891 SEQ ID NO: 3323
uugcuuagugccgaggauu

SEQ ID NO: 258359 - RNA, 19 nt, Artificial Sequence
  Description of Artificial Sequence: Synthetic oligonucleotide
  Antisense strand to SEQ ID NO: 258358
aauccucggcacuaagcaa

SEQ ID NO: 258360 - RNA, 19 nt, Artificial Sequence
  Description of Artificial Sequence: Synthetic oligonucleotide
  Sense strand starting at position 2013 SEQ ID NO: 3323
gccggaaccaaucgugaca

SEQ ID NO: 258361 - RNA, 19 nt, Artificial Sequence
  Description of Artificial Sequence: Synthetic oligonucleotide
  Antisense strand to SEQ ID NO: 258360
ugucacgauugguuccggc

SEQ ID NO: 258362 - RNA, 19 nt, Artificial Sequence
  Description of Artificial Sequence: Synthetic oligonucleotide
  Sense strand starting at position 2037 SEQ ID NO: 3323
gcuggagauuucgcgccaa

SEQ ID NO: 258363 - RNA, 19 nt, Artificial Sequence
  Description of Artificial Sequence: Synthetic oligonucleotide
  Antisense strand to SEQ ID NO: 258362
uuggcgcgaaaucuccagc

SEQ ID NO: 258364 - RNA, 19 nt, Artificial Sequence
  Description of Artificial Sequence: Synthetic oligonucleotide
  Sense strand starting at position 2041 SEQ ID NO: 3323
gagauuucgcgccaaaccu

SEQ ID NO: 258365 - RNA, 19 nt, Artificial Sequence
  Description of Artificial Sequence: Synthetic oligonucleotide
  Antisense strand to SEQ ID NO: 258364
agguuuggcgcgaaaucuc

SEQ ID NO: 258366 - RNA, 19 nt, Artificial Sequence
  Description of Artificial Sequence: Synthetic oligonucleotide
  Sense strand starting at position 2271 SEQ ID NO: 3323
aauugaacgaucggaguaa

SEQ ID NO: 258367 - RNA, 19 nt, Artificial Sequence
  Description of Artificial Sequence: Synthetic oligonucleotide
  Antisense strand to SEQ ID NO: 258366
uuacuccgaucguucaauu

SEQ ID NO: 258368 - RNA, 19 nt, Artificial Sequence
  Description of Artificial Sequence: Synthetic oligonucleotide
  Sense strand starting at position 2275 SEQ ID NO: 3323
gaacgaucggaguaagacu

SEQ ID NO: 258369 - RNA, 19 nt, Artificial Sequence
  Description of Artificial Sequence: Synthetic oligonucleotide
  Antisense strand to SEQ ID NO: 258368
agucuuacuccgaucguuc

SEQ ID NO: 258370 - RNA, 19 nt, Artificial Sequence
  Description of Artificial Sequence: Synthetic oligonucleotide
  Sense strand starting at position 2328 SEQ ID NO: 3323
ugucuaguuagaggaaaua

SEQ ID NO: 258371 - RNA, 19 nt, Artificial Sequence
  Description of Artificial Sequence: Synthetic oligonucleotide
  Antisense strand to SEQ ID NO: 258370
uauuuccucuaacuagaca

SEQ ID NO: 258372 - RNA, 19 nt, Artificial Sequence
  Description of Artificial Sequence: Synthetic oligonucleotide
  Sense strand starting at position 2451 SEQ ID NO: 3323
agcgaaauauuugacauug

SEQ ID NO: 258373 - RNA, 19 nt, Artificial Sequence
  Description of Artificial Sequence: Synthetic oligonucleotide
  Antisense strand to SEQ ID NO: 258372
caaugucaaauauuucgcu

SEQ ID NO: 258374 - RNA, 19 nt, Artificial Sequence
  Description of Artificial Sequence: Synthetic oligonucleotide
  Sense strand starting at position 3148 SEQ ID NO: 3323
gcacuauuggcuugaguua

SEQ ID NO: 258375 - RNA, 19 nt, Artificial Sequence
  Description of Artificial Sequence: Synthetic oligonucleotide
  Antisense strand to SEQ ID NO: 258374
uaacucaagccaauagugc

SEQ ID NO: 258376 - RNA, 19 nt, Artificial Sequence
  Description of Artificial Sequence: Synthetic oligonucleotide
  Sense strand starting at position 3149 SEQ ID NO: 3323
cacuauuggcuugaguuau

SEQ ID NO: 258377 - RNA, 19 nt, Artificial Sequence
  Description of Artificial Sequence: Synthetic oligonucleotide
  Antisense strand to SEQ ID NO: 258376
auaacucaagccaauagug

SEQ ID NO: 258378 - RNA, 19 nt, Artificial Sequence
  Description of Artificial Sequence: Synthetic oligonucleotide
  Sense strand starting at position 3155 SEQ ID NO: 3323
uggcuugaguuauccuuau

SEQ ID NO: 258379 - RNA, 19 nt, Artificial Sequence
  Description of Artificial Sequence: Synthetic oligonucleotide
  Antisense strand to SEQ ID NO: 258378
auaaggauaacucaagcca

SEQ ID NO: 258380 - RNA, 19 nt, Artificial Sequence
  Description of Artificial Sequence: Synthetic oligonucleotide
  Sense strand starting at position 3159 SEQ ID NO: 3323
uugaguuauccuuauguuu

SEQ ID NO: 258381 - RNA, 19 nt, Artificial Sequence
  Description of Artificial Sequence: Synthetic oligonucleotide
  Antisense strand to SEQ ID NO: 258380
aaacauaaggauaacucaa

SEQ ID NO: 258382 - RNA, 19 nt, Artificial Sequence
  Description of Artificial Sequence: Synthetic oligonucleotide
  Sense strand starting at position 3230 SEQ ID NO: 3323
ggccauuccugauuagcau

SEQ ID NO: 258383 - RNA, 19 nt, Artificial Sequence
  Description of Artificial Sequence: Synthetic oligonucleotide
  Antisense strand to SEQ ID NO: 258382
augcuaaucaggaauggcc

SEQ ID NO: 258384 - RNA, 19 nt, Artificial Sequence
  Description of Artificial Sequence: Synthetic oligonucleotide
  Sense strand starting at position 3239 SEQ ID NO: 3323
ugauuagcauccuuuguag

SEQ ID NO: 258385 - RNA, 19 nt, Artificial Sequence
  Description of Artificial Sequence: Synthetic oligonucleotide
  Antisense strand to SEQ ID NO: 258384
cuacaaaggaugcuaauca

SEQ ID NO: 258386 - RNA, 19 nt, Artificial Sequence
  Description of Artificial Sequence: Synthetic oligonucleotide
  Sense strand starting at position 3345 SEQ ID NO: 3323
cucccuuggcguuaauuaa

SEQ ID NO: 258387 - RNA, 19 nt, Artificial Sequence
  Description of Artificial Sequence: Synthetic oligonucleotide
  Antisense strand to SEQ ID NO: 258386
uuaauuaacgccaagggag

SEQ ID NO: 258388 - RNA, 19 nt, Artificial Sequence
  Description of Artificial Sequence: Synthetic oligonucleotide
  Sense strand starting at position 3359 SEQ ID NO: 3323
auuaacaucuggguacuga

SEQ ID NO: 258389 - RNA, 19 nt, Artificial Sequence
  Description of Artificial Sequence: Synthetic oligonucleotide
  Antisense strand to SEQ ID NO: 258388
ucaguacccagauguuaau

SEQ ID NO: 258390 - RNA, 19 nt, Artificial Sequence
  Description of Artificial Sequence: Synthetic oligonucleotide
  Sense strand starting at position 3375 SEQ ID NO: 3323
ugaugauaucuauaugugu

SEQ ID NO: 258391 - RNA, 19 nt, Artificial Sequence
  Description of Artificial Sequence: Synthetic oligonucleotide
  Antisense strand to SEQ ID NO: 258390
acacauauagauaucauca

SEQ ID NO: 258392 - RNA, 19 nt, Artificial Sequence
  Description of Artificial Sequence: Synthetic oligonucleotide
  Sense strand starting at position 3416 SEQ ID NO: 3323
uuuggccuccaagacauua

SEQ ID NO: 258393 - RNA, 19 nt, Artificial Sequence
  Description of Artificial Sequence: Synthetic oligonucleotide
  Antisense strand to SEQ ID NO: 258392
uaaugucuuggaggccaaa

SEQ ID NO: 258394 - RNA, 19 nt, Artificial Sequence
  Description of Artificial Sequence: Synthetic oligonucleotide
  Sense strand starting at position 3464 SEQ ID NO: 3323
aggcuuguugcauauuaaa

SEQ ID NO: 258395 - RNA, 19 nt, Artificial Sequence
  Description of Artificial Sequence: Synthetic oligonucleotide
  Antisense strand to SEQ ID NO: 258394
uuuaauaugcaacaagccu

SEQ ID NO: 258396 - RNA, 19 nt, Artificial Sequence
  Description of Artificial Sequence: Synthetic oligonucleotide
  Sense strand starting at position 3548 SEQ ID NO: 3323
acaccuggucuccagcaau

SEQ ID NO: 258397 - RNA, 19 nt, Artificial Sequence
  Description of Artificial Sequence: Synthetic oligonucleotide
  Antisense strand to SEQ ID NO: 258396
auugcuggagaccaggugu

SEQ ID NO: 258398 - RNA, 19 nt, Artificial Sequence
  Description of Artificial Sequence: Synthetic oligonucleotide
  Sense strand starting at position 92 SEQ ID NO: 3325
uuguauaugcaguaugaac

SEQ ID NO: 258399 - RNA, 19 nt, Artificial Sequence
  Description of Artificial Sequence: Synthetic oligonucleotide
  Antisense strand to SEQ ID NO: 258398
guucauacugcauauacaa

SEQ ID NO: 258400 - RNA, 19 nt, Artificial Sequence
  Description of Artificial Sequence: Synthetic oligonucleotide
  Sense strand starting at position 100 SEQ ID NO: 3325
gcaguaugaacugguaacu

SEQ ID NO: 258401 - RNA, 19 nt, Artificial Sequence
  Description of Artificial Sequence: Synthetic oligonucleotide
  Antisense strand to SEQ ID NO: 258400
aguuaccaguucauacugc

SEQ ID NO: 258402 - RNA, 19 nt, Artificial Sequence
  Description of Artificial Sequence: Synthetic oligonucleotide
  Sense strand starting at position 124 SEQ ID NO: 3325
cggaaucucagcuaguaaa

SEQ ID NO: 258403 - RNA, 19 nt, Artificial Sequence
  Description of Artificial Sequence: Synthetic oligonucleotide
  Antisense strand to SEQ ID NO: 258402
uuuacuagcugagauuccg

SEQ ID NO: 258404 - RNA, 19 nt, Artificial Sequence
  Description of Artificial Sequence: Synthetic oligonucleotide
  Sense strand starting at position 230 SEQ ID NO: 3325
agacuugguaaguguaaga

SEQ ID NO: 258405 - RNA, 19 nt, Artificial Sequence
  Description of Artificial Sequence: Synthetic oligonucleotide
  Antisense strand to SEQ ID NO: 258404
ucuuacacuuaccaagucu

SEQ ID NO: 258406 - RNA, 19 nt, Artificial Sequence
  Description of Artificial Sequence: Synthetic oligonucleotide
  Sense strand starting at position 348 SEQ ID NO: 3325
ucgucaagaugaccuuuaa

SEQ ID NO: 258407 - RNA, 19 nt, Artificial Sequence
  Description of Artificial Sequence: Synthetic oligonucleotide
  Antisense strand to SEQ ID NO: 258406
uuaaaggucaucuugacga

SEQ ID NO: 258408 - RNA, 19 nt, Artificial Sequence
  Description of Artificial Sequence: Synthetic oligonucleotide
  Sense strand starting at position 395 SEQ ID NO: 3325
aguccaagguuaucagaua

SEQ ID NO: 258409 - RNA, 19 nt, Artificial Sequence
  Description of Artificial Sequence: Synthetic oligonucleotide
  Antisense strand to SEQ ID NO: 258408
uaucugauaaccuuggacu

SEQ ID NO: 258410 - RNA, 19 nt, Artificial Sequence
  Description of Artificial Sequence: Synthetic oligonucleotide
  Sense strand starting at position 500 SEQ ID NO: 3325
uuaggaaaccuagguuuaa

SEQ ID NO: 258411 - RNA, 19 nt, Artificial Sequence
  Description of Artificial Sequence: Synthetic oligonucleotide
  Antisense strand to SEQ ID NO: 258410
uuaaaccuagguuuccuaa

SEQ ID NO: 258412 - RNA, 19 nt, Artificial Sequence
  Description of Artificial Sequence: Synthetic oligonucleotide
  Sense strand starting at position 501 SEQ ID NO: 3325
uaggaaaccuagguuuaac

SEQ ID NO: 258413 - RNA, 19 nt, Artificial Sequence
  Description of Artificial Sequence: Synthetic oligonucleotide
  Antisense strand to SEQ ID NO: 258412
guuaaaccuagguuuccua

SEQ ID NO: 258414 - RNA, 19 nt, Artificial Sequence
  Description of Artificial Sequence: Synthetic oligonucleotide
  Sense strand starting at position 729 SEQ ID NO: 3325
ugaagcgauuucucugagu

SEQ ID NO: 258415 - RNA, 19 nt, Artificial Sequence
  Description of Artificial Sequence: Synthetic oligonucleotide
  Antisense strand to SEQ ID NO: 258414
acucagagaaaucgcuuca

SEQ ID NO: 258416 - RNA, 19 nt, Artificial Sequence
  Description of Artificial Sequence: Synthetic oligonucleotide
  Sense strand starting at position 731 SEQ ID NO: 3325
aagcgauuucucugaguuu

SEQ ID NO: 258417 - RNA, 19 nt, Artificial Sequence
  Description of Artificial Sequence: Synthetic oligonucleotide
  Antisense strand to SEQ ID NO: 258416
aaacucagagaaaucgcuu

SEQ ID NO: 258418 - RNA, 19 nt, Artificial Sequence
  Description of Artificial Sequence: Synthetic oligonucleotide
  Sense strand starting at position 780 SEQ ID NO: 3325
agauuauuccuacgccaga

SEQ ID NO: 258419 - RNA, 19 nt, Artificial Sequence
  Description of Artificial Sequence: Synthetic oligonucleotide
  Antisense strand to SEQ ID NO: 258418
ucuggcguaggaauaaucu

SEQ ID NO: 258420 - RNA, 19 nt, Artificial Sequence
  Description of Artificial Sequence: Synthetic oligonucleotide
  Sense strand starting at position 781 SEQ ID NO: 3325
gauuauuccuacgccagag

SEQ ID NO: 258421 - RNA, 19 nt, Artificial Sequence
  Description of Artificial Sequence: Synthetic oligonucleotide
  Antisense strand to SEQ ID NO: 258420
cucuggcguaggaauaauc

SEQ ID NO: 258422 - RNA, 19 nt, Artificial Sequence
  Description of Artificial Sequence: Synthetic oligonucleotide
  Sense strand starting at position 783 SEQ ID NO: 3325
uuauuccuacgccagaguu

SEQ ID NO: 258423 - RNA, 19 nt, Artificial Sequence
  Description of Artificial Sequence: Synthetic oligonucleotide
  Antisense strand to SEQ ID NO: 258422
aacucuggcguaggaauaa

SEQ ID NO: 258424 - RNA, 19 nt, Artificial Sequence
  Description of Artificial Sequence: Synthetic oligonucleotide
  Sense strand starting at position 866 SEQ ID NO: 3325
ccaggucuuccaugacaaa

SEQ ID NO: 258425 - RNA, 19 nt, Artificial Sequence
  Description of Artificial Sequence: Synthetic oligonucleotide
  Antisense strand to SEQ ID NO: 258424
uuugucauggaagaccugg

SEQ ID NO: 258426 - RNA, 19 nt, Artificial Sequence
  Description of Artificial Sequence: Synthetic oligonucleotide
  Sense strand starting at position 954 SEQ ID NO: 3325
ugcaguaguuauuuaguua

SEQ ID NO: 258427 - RNA, 19 nt, Artificial Sequence
  Description of Artificial Sequence: Synthetic oligonucleotide
  Antisense strand to SEQ ID NO: 258426
uaacuaaauaacuacugca

SEQ ID NO: 258428 - RNA, 19 nt, Artificial Sequence
  Description of Artificial Sequence: Synthetic oligonucleotide
  Sense strand starting at position 958 SEQ ID NO: 3325
guaguuauuuaguuaguga

SEQ ID NO: 258429 - RNA, 19 nt, Artificial Sequence
  Description of Artificial Sequence: Synthetic oligonucleotide
  Antisense strand to SEQ ID NO: 258428
ucacuaacuaaauaacuac

SEQ ID NO: 258430 - RNA, 19 nt, Artificial Sequence
  Description of Artificial Sequence: Synthetic oligonucleotide
  Sense strand starting at position 1044 SEQ ID NO: 3325
agaaauuagauauggcgga

SEQ ID NO: 258431 - RNA, 19 nt, Artificial Sequence
  Description of Artificial Sequence: Synthetic oligonucleotide
  Antisense strand to SEQ ID NO: 258430
uccgccauaucuaauuucu

SEQ ID NO: 258432 - RNA, 19 nt, Artificial Sequence
  Description of Artificial Sequence: Synthetic oligonucleotide
  Sense strand starting at position 1048 SEQ ID NO: 3325
auuagauauggcggaaaca

SEQ ID NO: 258433 - RNA, 19 nt, Artificial Sequence
  Description of Artificial Sequence: Synthetic oligonucleotide
  Antisense strand to SEQ ID NO: 258432
uguuuccgccauaucuaau

SEQ ID NO: 258434 - RNA, 19 nt, Artificial Sequence
  Description of Artificial Sequence: Synthetic oligonucleotide
  Sense strand starting at position 1092 SEQ ID NO: 3325
ucuggagcaccugguaaau

SEQ ID NO: 258435 - RNA, 19 nt, Artificial Sequence
  Description of Artificial Sequence: Synthetic oligonucleotide
  Antisense strand to SEQ ID NO: 258434
auuuaccaggugcuccaga

SEQ ID NO: 258436 - RNA, 19 nt, Artificial Sequence
  Description of Artificial Sequence: Synthetic oligonucleotide
  Sense strand starting at position 1489 SEQ ID NO: 3325
gucccuaaagugcaagaaa

SEQ ID NO: 258437 - RNA, 19 nt, Artificial Sequence
  Description of Artificial Sequence: Synthetic oligonucleotide
  Antisense strand to SEQ ID NO: 258436
uuucuugcacuuuagggac

SEQ ID NO: 258438 - RNA, 19 nt, Artificial Sequence
  Description of Artificial Sequence: Synthetic oligonucleotide
  Sense strand starting at position 2027 SEQ ID NO: 3325
aggguaaacgugggaggua

SEQ ID NO: 258439 - RNA, 19 nt, Artificial Sequence
  Description of Artificial Sequence: Synthetic oligonucleotide
  Antisense strand to SEQ ID NO: 258438
uaccucccacguuuacccu

SEQ ID NO: 258440 - RNA, 19 nt, Artificial Sequence
  Description of Artificial Sequence: Synthetic oligonucleotide
  Sense strand starting at position 2049 SEQ ID NO: 3325
agaccuuccgcugcguaaa

SEQ ID NO: 258441 - RNA, 19 nt, Artificial Sequence
  Description of Artificial Sequence: Synthetic oligonucleotide
  Antisense strand to SEQ ID NO: 258440
uuuacgcagcggaaggucu

SEQ ID NO: 258442 - RNA, 19 nt, Artificial Sequence
  Description of Artificial Sequence: Synthetic oligonucleotide
  Sense strand starting at position 2334 SEQ ID NO: 3325
uggugaugaggcgagaguu

SEQ ID NO: 258443 - RNA, 19 nt, Artificial Sequence
  Description of Artificial Sequence: Synthetic oligonucleotide
  Antisense strand to SEQ ID NO: 258442
aacucucgccucaucacca

SEQ ID NO: 258444 - RNA, 19 nt, Artificial Sequence
  Description of Artificial Sequence: Synthetic oligonucleotide
  Sense strand starting at position 2546 SEQ ID NO: 3325
guaugagggcugugggaau

SEQ ID NO: 258445 - RNA, 19 nt, Artificial Sequence
  Description of Artificial Sequence: Synthetic oligonucleotide
  Antisense strand to SEQ ID NO: 258444
auucccacagcccucauac

SEQ ID NO: 258446 - RNA, 19 nt, Artificial Sequence
  Description of Artificial Sequence: Synthetic oligonucleotide
  Sense strand starting at position 2620 SEQ ID NO: 3325
ggagcucuuccagaguuau

SEQ ID NO: 258447 - RNA, 19 nt, Artificial Sequence
  Description of Artificial Sequence: Synthetic oligonucleotide
  Antisense strand to SEQ ID NO: 258446
auaacucuggaagagcucc

SEQ ID NO: 258448 - RNA, 19 nt, Artificial Sequence
  Description of Artificial Sequence: Synthetic oligonucleotide
  Sense strand starting at position 2708 SEQ ID NO: 3325
cgguucuaauuugcucuaa

SEQ ID NO: 258449 - RNA, 19 nt, Artificial Sequence
  Description of Artificial Sequence: Synthetic oligonucleotide
  Antisense strand to SEQ ID NO: 258448
uuagagcaaauuagaaccg

SEQ ID NO: 258450 - RNA, 19 nt, Artificial Sequence
  Description of Artificial Sequence: Synthetic oligonucleotide
  Sense strand starting at position 2817 SEQ ID NO: 3325
aggcauuucuaaggaaaga

SEQ ID NO: 258451 - RNA, 19 nt, Artificial Sequence
  Description of Artificial Sequence: Synthetic oligonucleotide
  Antisense strand to SEQ ID NO: 258450
ucuuuccuuagaaaugccu

SEQ ID NO: 258452 - RNA, 19 nt, Artificial Sequence
  Description of Artificial Sequence: Synthetic oligonucleotide
  Sense strand starting at position 2849 SEQ ID NO: 3325
gggagacacugguuguuua

SEQ ID NO: 258453 - RNA, 19 nt, Artificial Sequence
  Description of Artificial Sequence: Synthetic oligonucleotide
  Antisense strand to SEQ ID NO: 258452
uaaacaaccagugucuccc

SEQ ID NO: 258454 - RNA, 19 nt, Artificial Sequence
  Description of Artificial Sequence: Synthetic oligonucleotide
  Sense strand starting at position 2896 SEQ ID NO: 3325
uuaagagguucucuuuaaa

SEQ ID NO: 258455 - RNA, 19 nt, Artificial Sequence
  Description of Artificial Sequence: Synthetic oligonucleotide
  Antisense strand to SEQ ID NO: 258454
uuuaaagagaaccucuuaa

SEQ ID NO: 258456 - RNA, 19 nt, Artificial Sequence
  Description of Artificial Sequence: Synthetic oligonucleotide
  Sense strand starting at position 2979 SEQ ID NO: 3325
agauaugaugcucgggagu

SEQ ID NO: 258457 - RNA, 19 nt, Artificial Sequence
  Description of Artificial Sequence: Synthetic oligonucleotide
  Antisense strand to SEQ ID NO: 258456
acucccgagcaucauaucu

SEQ ID NO: 258458 - RNA, 19 nt, Artificial Sequence
  Description of Artificial Sequence: Synthetic oligonucleotide
  Sense strand starting at position 3197 SEQ ID NO: 3325
cugaaugacucuccuugua

SEQ ID NO: 258459 - RNA, 19 nt, Artificial Sequence
  Description of Artificial Sequence: Synthetic oligonucleotide
  Antisense strand to SEQ ID NO: 258458
uacaaggagagucauucag

SEQ ID NO: 258460 - RNA, 19 nt, Artificial Sequence
  Description of Artificial Sequence: Synthetic oligonucleotide
  Sense strand starting at position 3339 SEQ ID NO: 3325
guauucucugucuauacua

SEQ ID NO: 258461 - RNA, 19 nt, Artificial Sequence
  Description of Artificial Sequence: Synthetic oligonucleotide
  Antisense strand to SEQ ID NO: 258460
uaguauagacagagaauac

SEQ ID NO: 258462 - RNA, 19 nt, Artificial Sequence
  Description of Artificial Sequence: Synthetic oligonucleotide
  Sense strand starting at position 3359 SEQ ID NO: 3325
aucccucagugagcuaauu

SEQ ID NO: 258463 - RNA, 19 nt, Artificial Sequence
  Description of Artificial Sequence: Synthetic oligonucleotide
  Antisense strand to SEQ ID NO: 258462
aauuagcucacugagggau

SEQ ID NO: 258464 - RNA, 19 nt, Artificial Sequence
  Description of Artificial Sequence: Synthetic oligonucleotide
  Sense strand starting at position 3423 SEQ ID NO: 3325
ucaaauuuaugugucuagu

SEQ ID NO: 258465 - RNA, 19 nt, Artificial Sequence
  Description of Artificial Sequence: Synthetic oligonucleotide
  Antisense strand to SEQ ID NO: 258464
acuagacacauaaauuuga

SEQ ID NO: 258466 - RNA, 19 nt, Artificial Sequence
  Description of Artificial Sequence: Synthetic oligonucleotide
  Sense strand starting at position 3433 SEQ ID NO: 3325
gugucuaguccugaauuag

SEQ ID NO: 258467 - RNA, 19 nt, Artificial Sequence
  Description of Artificial Sequence: Synthetic oligonucleotide
  Antisense strand to SEQ ID NO: 258466
cuaauucaggacuagacac

SEQ ID NO: 258468 - RNA, 19 nt, Artificial Sequence
  Description of Artificial Sequence: Synthetic oligonucleotide
  Sense strand starting at position 3471 SEQ ID NO: 3325
aaccuagguucucugaguu

SEQ ID NO: 258469 - RNA, 19 nt, Artificial Sequence
  Description of Artificial Sequence: Synthetic oligonucleotide
  Antisense strand to SEQ ID NO: 258468
aacucagagaaccuagguu

SEQ ID NO: 258470 - RNA, 19 nt, Artificial Sequence
  Description of Artificial Sequence: Synthetic oligonucleotide
  Sense strand starting at position 3658 SEQ ID NO: 3325
uguauacguacauauguaa

SEQ ID NO: 258471 - RNA, 19 nt, Artificial Sequence
  Description of Artificial Sequence: Synthetic oligonucleotide
  Antisense strand to SEQ ID NO: 258470
uuacauauguacguauaca

SEQ ID NO: 258472 - RNA, 19 nt, Artificial Sequence
  Description of Artificial Sequence: Synthetic oligonucleotide
  Sense strand starting at position 3661 SEQ ID NO: 3325
auacguacauauguaacaa

SEQ ID NO: 258473 - RNA, 19 nt, Artificial Sequence
  Description of Artificial Sequence: Synthetic oligonucleotide
  Antisense strand to SEQ ID NO: 258472
uuguuacauauguacguau

SEQ ID NO: 258474 - RNA, 19 nt, Artificial Sequence
  Description of Artificial Sequence: Synthetic oligonucleotide
  Sense strand starting at position 3786 SEQ ID NO: 3325
ccagaauucucacugcagu

SEQ ID NO: 258475 - RNA, 19 nt, Artificial Sequence
  Description of Artificial Sequence: Synthetic oligonucleotide
  Antisense strand to SEQ ID NO: 258474
acugcagugagaauucugg

SEQ ID NO: 258476 - RNA, 19 nt, Artificial Sequence
  Description of Artificial Sequence: Synthetic oligonucleotide
  Sense strand starting at position 3935 SEQ ID NO: 3325
uugcuaguugcccuuguaa

SEQ ID NO: 258477 - RNA, 19 nt, Artificial Sequence
  Description of Artificial Sequence: Synthetic oligonucleotide
  Antisense strand to SEQ ID NO: 258476
uuacaagggcaacuagcaa

SEQ ID NO: 258478 - RNA, 19 nt, Artificial Sequence
  Description of Artificial Sequence: Synthetic oligonucleotide
  Sense strand starting at position 36 SEQ ID NO: 3324
gcaggcucugugcuaacuu

SEQ ID NO: 258479 - RNA, 19 nt, Artificial Sequence
  Description of Artificial Sequence: Synthetic oligonucleotide
  Antisense strand to SEQ ID NO: 258478
aaguuagcacagagccugc

SEQ ID NO: 258480 - RNA, 19 nt, Artificial Sequence
  Description of Artificial Sequence: Synthetic oligonucleotide
  Sense strand starting at position 73 SEQ ID NO: 3324
auuuaagugucuguuauuc

SEQ ID NO: 258481 - RNA, 19 nt, Artificial Sequence
  Description of Artificial Sequence: Synthetic oligonucleotide
  Antisense strand to SEQ ID NO: 258480
gaauaacagacacuuaaau

SEQ ID NO: 258482 - RNA, 19 nt, Artificial Sequence
  Description of Artificial Sequence: Synthetic oligonucleotide
  Sense strand starting at position 82 SEQ ID NO: 3324
ucuguuauuccacagacag

SEQ ID NO: 258483 - RNA, 19 nt, Artificial Sequence
  Description of Artificial Sequence: Synthetic oligonucleotide
  Antisense strand to SEQ ID NO: 258482
cugucuguggaauaacaga

SEQ ID NO: 258484 - RNA, 19 nt, Artificial Sequence
  Description of Artificial Sequence: Synthetic oligonucleotide
  Sense strand starting at position 320 SEQ ID NO: 3324
cagggaaauugagucaugu

SEQ ID NO: 258485 - RNA, 19 nt, Artificial Sequence
  Description of Artificial Sequence: Synthetic oligonucleotide
  Antisense strand to SEQ ID NO: 258484
acaugacucaauuucccug

SEQ ID NO: 258486 - RNA, 19 nt, Artificial Sequence
  Description of Artificial Sequence: Synthetic oligonucleotide
  Sense strand starting at position 322 SEQ ID NO: 3324
gggaaauugagucaugugu

SEQ ID NO: 258487 - RNA, 19 nt, Artificial Sequence
  Description of Artificial Sequence: Synthetic oligonucleotide
  Antisense strand to SEQ ID NO: 258486
acacaugacucaauuuccc

SEQ ID NO: 258488 - RNA, 19 nt, Artificial Sequence
  Description of Artificial Sequence: Synthetic oligonucleotide
  Sense strand starting at position 339 SEQ ID NO: 3324
gugaguuugcugucaguuc

SEQ ID NO: 258489 - RNA, 19 nt, Artificial Sequence
  Description of Artificial Sequence: Synthetic oligonucleotide
  Antisense strand to SEQ ID NO: 258488
gaacugacagcaaacucac

SEQ ID NO: 258490 - RNA, 19 nt, Artificial Sequence
  Description of Artificial Sequence: Synthetic oligonucleotide
  Sense strand starting at position 435 SEQ ID NO: 3324
ggccuugcuagggaaacua

SEQ ID NO: 258491 - RNA, 19 nt, Artificial Sequence
  Description of Artificial Sequence: Synthetic oligonucleotide
  Antisense strand to SEQ ID NO: 258490
uaguuucccuagcaaggcc

SEQ ID NO: 258492 - RNA, 19 nt, Artificial Sequence
  Description of Artificial Sequence: Synthetic oligonucleotide
  Sense strand starting at position 634 SEQ ID NO: 3324
uuguauaugcaguaugaac

SEQ ID NO: 258493 - RNA, 19 nt, Artificial Sequence
  Description of Artificial Sequence: Synthetic oligonucleotide
  Antisense strand to SEQ ID NO: 258492
guucauacugcauauacaa

SEQ ID NO: 258494 - RNA, 19 nt, Artificial Sequence
  Description of Artificial Sequence: Synthetic oligonucleotide
  Sense strand starting at position 642 SEQ ID NO: 3324
gcaguaugaacugguaacu

SEQ ID NO: 258495 - RNA, 19 nt, Artificial Sequence
  Description of Artificial Sequence: Synthetic oligonucleotide
  Antisense strand to SEQ ID NO: 258494
aguuaccaguucauacugc

SEQ ID NO: 258496 - RNA, 19 nt, Artificial Sequence
  Description of Artificial Sequence: Synthetic oligonucleotide
  Sense strand starting at position 666 SEQ ID NO: 3324
cggaaucucagcuaguaaa

SEQ ID NO: 258497 - RNA, 19 nt, Artificial Sequence
  Description of Artificial Sequence: Synthetic oligonucleotide
  Antisense strand to SEQ ID NO: 258496
uuuacuagcugagauuccg

SEQ ID NO: 258498 - RNA, 19 nt, Artificial Sequence
  Description of Artificial Sequence: Synthetic oligonucleotide
  Sense strand starting at position 772 SEQ ID NO: 3324
agacuugguaaguguaaga

SEQ ID NO: 258499 - RNA, 19 nt, Artificial Sequence
  Description of Artificial Sequence: Synthetic oligonucleotide
  Antisense strand to SEQ ID NO: 258498
ucuuacacuuaccaagucu

SEQ ID NO: 258500 - RNA, 19 nt, Artificial Sequence
  Description of Artificial Sequence: Synthetic oligonucleotide
  Sense strand starting at position 890 SEQ ID NO: 3324
ucgucaagaugaccuuuaa

SEQ ID NO: 258501 - RNA, 19 nt, Artificial Sequence
  Description of Artificial Sequence: Synthetic oligonucleotide
  Antisense strand to SEQ ID NO: 258500
uuaaaggucaucuugacga

SEQ ID NO: 258502 - RNA, 19 nt, Artificial Sequence
  Description of Artificial Sequence: Synthetic oligonucleotide
  Sense strand starting at position 937 SEQ ID NO: 3324
aguccaagguuaucagaua

SEQ ID NO: 258503 - RNA, 19 nt, Artificial Sequence
  Description of Artificial Sequence: Synthetic oligonucleotide
  Antisense strand to SEQ ID NO: 258502
uaucugauaaccuuggacu

SEQ ID NO: 258504 - RNA, 19 nt, Artificial Sequence
  Description of Artificial Sequence: Synthetic oligonucleotide
  Sense strand starting at position 1042 SEQ ID NO: 3324
uuaggaaaccuagguuuaa

SEQ ID NO: 258505 - RNA, 19 nt, Artificial Sequence
  Description of Artificial Sequence: Synthetic oligonucleotide
  Antisense strand to SEQ ID NO: 258504
uuaaaccuagguuuccuaa

SEQ ID NO: 258506 - RNA, 19 nt, Artificial Sequence
  Description of Artificial Sequence: Synthetic oligonucleotide
  Sense strand starting at position 1043 SEQ ID NO: 3324
uaggaaaccuagguuuaac

SEQ ID NO: 258507 - RNA, 19 nt, Artificial Sequence
  Description of Artificial Sequence: Synthetic oligonucleotide
  Antisense strand to SEQ ID NO: 258506
guuaaaccuagguuuccua

SEQ ID NO: 258508 - RNA, 19 nt, Artificial Sequence
  Description of Artificial Sequence: Synthetic oligonucleotide
  Sense strand starting at position 1271 SEQ ID NO: 3324
ugaagcgauuucucugagu

SEQ ID NO: 258509 - RNA, 19 nt, Artificial Sequence
  Description of Artificial Sequence: Synthetic oligonucleotide
  Antisense strand to SEQ ID NO: 258508
acucagagaaaucgcuuca

SEQ ID NO: 258510 - RNA, 19 nt, Artificial Sequence
  Description of Artificial Sequence: Synthetic oligonucleotide
  Sense strand starting at position 1273 SEQ ID NO: 3324
aagcgauuucucugaguuu

SEQ ID NO: 258511 - RNA, 19 nt, Artificial Sequence
  Description of Artificial Sequence: Synthetic oligonucleotide
  Antisense strand to SEQ ID NO: 258510
aaacucagagaaaucgcuu

SEQ ID NO: 258512 - RNA, 19 nt, Artificial Sequence
  Description of Artificial Sequence: Synthetic oligonucleotide
  Sense strand starting at position 1322 SEQ ID NO: 3324
agauuauuccuacgccaga

SEQ ID NO: 258513 - RNA, 19 nt, Artificial Sequence
  Description of Artificial Sequence: Synthetic oligonucleotide
  Antisense strand to SEQ ID NO: 258512
ucuggcguaggaauaaucu

SEQ ID NO: 258514 - RNA, 19 nt, Artificial Sequence
  Description of Artificial Sequence: Synthetic oligonucleotide
  Sense strand starting at position 1323 SEQ ID NO: 3324
gauuauuccuacgccagag

SEQ ID NO: 258515 - RNA, 19 nt, Artificial Sequence
  Description of Artificial Sequence: Synthetic oligonucleotide
  Antisense strand to SEQ ID NO: 258514
cucuggcguaggaauaauc

SEQ ID NO: 258516 - RNA, 19 nt, Artificial Sequence
  Description of Artificial Sequence: Synthetic oligonucleotide
  Sense strand starting at position 1408 SEQ ID NO: 3324
ccaggucuuccaugacaaa

SEQ ID NO: 258517 - RNA, 19 nt, Artificial Sequence
  Description of Artificial Sequence: Synthetic oligonucleotide
  Antisense strand to SEQ ID NO: 258516
uuugucauggaagaccugg

SEQ ID NO: 258518 - RNA, 19 nt, Artificial Sequence
  Description of Artificial Sequence: Synthetic oligonucleotide
  Sense strand starting at position 1496 SEQ ID NO: 3324
ugcaguaguuauuuaguua

SEQ ID NO: 258519 - RNA, 19 nt, Artificial Sequence
  Description of Artificial Sequence: Synthetic oligonucleotide
  Antisense strand to SEQ ID NO: 258518
uaacuaaauaacuacugca

SEQ ID NO: 258520 - RNA, 19 nt, Artificial Sequence
  Description of Artificial Sequence: Synthetic oligonucleotide
  Sense strand starting at position 1500 SEQ ID NO: 3324
guaguuauuuaguuaguga

SEQ ID NO: 258521 - RNA, 19 nt, Artificial Sequence
  Description of Artificial Sequence: Synthetic oligonucleotide
  Antisense strand to SEQ ID NO: 258520
ucacuaacuaaauaacuac

SEQ ID NO: 258522 - RNA, 19 nt, Artificial Sequence
  Description of Artificial Sequence: Synthetic oligonucleotide
  Sense strand starting at position 1586 SEQ ID NO: 3324
agaaauuagauauggcgga

SEQ ID NO: 258523 - RNA, 19 nt, Artificial Sequence
  Description of Artificial Sequence: Synthetic oligonucleotide
  Antisense strand to SEQ ID NO: 258522
uccgccauaucuaauuucu

SEQ ID NO: 258524 - RNA, 19 nt, Artificial Sequence
  Description of Artificial Sequence: Synthetic oligonucleotide
  Sense strand starting at position 1590 SEQ ID NO: 3324
auuagauauggcggaaaca

SEQ ID NO: 258525 - RNA, 19 nt, Artificial Sequence
  Description of Artificial Sequence: Synthetic oligonucleotide
  Antisense strand to SEQ ID NO: 258524
uguuuccgccauaucuaau

SEQ ID NO: 258526 - RNA, 19 nt, Artificial Sequence
  Description of Artificial Sequence: Synthetic oligonucleotide
  Sense strand starting at position 1634 SEQ ID NO: 3324
ucuggagcaccugguaaau

SEQ ID NO: 258527 - RNA, 19 nt, Artificial Sequence
  Description of Artificial Sequence: Synthetic oligonucleotide
  Antisense strand to SEQ ID NO: 258526
auuuaccaggugcuccaga

SEQ ID NO: 258528 - RNA, 19 nt, Artificial Sequence
  Description of Artificial Sequence: Synthetic oligonucleotide
  Sense strand starting at position 2031 SEQ ID NO: 3324
gucccuaaagugcaagaaa

SEQ ID NO: 258529 - RNA, 19 nt, Artificial Sequence
  Description of Artificial Sequence: Synthetic oligonucleotide
  Antisense strand to SEQ ID NO: 258528
uuucuugcacuuuagggac

SEQ ID NO: 258530 - RNA, 19 nt, Artificial Sequence
  Description of Artificial Sequence: Synthetic oligonucleotide
  Sense strand starting at position 2569 SEQ ID NO: 3324
aggguaaacgugggaggua

SEQ ID NO: 258531 - RNA, 19 nt, Artificial Sequence
  Description of Artificial Sequence: Synthetic oligonucleotide
  Antisense strand to SEQ ID NO: 258530
uaccucccacguuuacccu

SEQ ID NO: 258532 - RNA, 19 nt, Artificial Sequence
  Description of Artificial Sequence: Synthetic oligonucleotide
  Sense strand starting at position 2591 SEQ ID NO: 3324
agaccuuccgcugcguaaa

SEQ ID NO: 258533 - RNA, 19 nt, Artificial Sequence
  Description of Artificial Sequence: Synthetic oligonucleotide
  Antisense strand to SEQ ID NO: 258532
uuuacgcagcggaaggucu

SEQ ID NO: 258534 - RNA, 19 nt, Artificial Sequence
  Description of Artificial Sequence: Synthetic oligonucleotide
  Sense strand starting at position 2876 SEQ ID NO: 3324
uggugaugaggcgagaguu

SEQ ID NO: 258535 - RNA, 19 nt, Artificial Sequence
  Description of Artificial Sequence: Synthetic oligonucleotide
  Antisense strand to SEQ ID NO: 258534
aacucucgccucaucacca

SEQ ID NO: 258536 - RNA, 19 nt, Artificial Sequence
  Description of Artificial Sequence: Synthetic oligonucleotide
  Sense strand starting at position 3088 SEQ ID NO: 3324
guaugagggcugugggaau

SEQ ID NO: 258537 - RNA, 19 nt, Artificial Sequence
  Description of Artificial Sequence: Synthetic oligonucleotide
  Antisense strand to SEQ ID NO: 258536
auucccacagcccucauac

SEQ ID NO: 258538 - RNA, 19 nt, Artificial Sequence
  Description of Artificial Sequence: Synthetic oligonucleotide
  Sense strand starting at position 3162 SEQ ID NO: 3324
ggagcucuuccagaguuau

SEQ ID NO: 258539 - RNA, 19 nt, Artificial Sequence
  Description of Artificial Sequence: Synthetic oligonucleotide
  Antisense strand to SEQ ID NO: 258538
auaacucuggaagagcucc

SEQ ID NO: 258540 - RNA, 19 nt, Artificial Sequence
  Description of Artificial Sequence: Synthetic oligonucleotide
  Sense strand starting at position 3250 SEQ ID NO: 3324
cgguucuaauuugcucuaa

SEQ ID NO: 258541 - RNA, 19 nt, Artificial Sequence
  Description of Artificial Sequence: Synthetic oligonucleotide
  Antisense strand to SEQ ID NO: 258540
uuagagcaaauuagaaccg

SEQ ID NO: 258542 - RNA, 19 nt, Artificial Sequence
  Description of Artificial Sequence: Synthetic oligonucleotide
  Sense strand starting at position 3359 SEQ ID NO: 3324
aggcauuucuaaggaaaga

SEQ ID NO: 258543 - RNA, 19 nt, Artificial Sequence
  Description of Artificial Sequence: Synthetic oligonucleotide
  Antisense strand to SEQ ID NO: 258542
ucuuuccuuagaaaugccu

SEQ ID NO: 258544 - RNA, 19 nt, Artificial Sequence
  Description of Artificial Sequence: Synthetic oligonucleotide
  Sense strand starting at position 3391 SEQ ID NO: 3324
gggagacacugguuguuua

SEQ ID NO: 258545 - RNA, 19 nt, Artificial Sequence
  Description of Artificial Sequence: Synthetic oligonucleotide
  Antisense strand to SEQ ID NO: 258544
uaaacaaccagugucuccc

SEQ ID NO: 258546 - RNA, 19 nt, Artificial Sequence
  Description of Artificial Sequence: Synthetic oligonucleotide
  Sense strand starting at position 3438 SEQ ID NO: 3324
uuaagagguucucuuuaaa

SEQ ID NO: 258547 - RNA, 19 nt, Artificial Sequence
  Description of Artificial Sequence: Synthetic oligonucleotide
  Antisense strand to SEQ ID NO: 258546
uuuaaagagaaccucuuaa

SEQ ID NO: 258548 - RNA, 19 nt, Artificial Sequence
  Description of Artificial Sequence: Synthetic oligonucleotide
  Sense strand starting at position 3521 SEQ ID NO: 3324
agauaugaugcucgggagu

SEQ ID NO: 258549 - RNA, 19 nt, Artificial Sequence
  Description of Artificial Sequence: Synthetic oligonucleotide
  Antisense strand to SEQ ID NO: 258548
acucccgagcaucauaucu

SEQ ID NO: 258550 - RNA, 19 nt, Artificial Sequence
  Description of Artificial Sequence: Synthetic oligonucleotide
  Sense strand starting at position 3739 SEQ ID NO: 3324
cugaaugacucuccuugua

SEQ ID NO: 258551 - RNA, 19 nt, Artificial Sequence
  Description of Artificial Sequence: Synthetic oligonucleotide
  Antisense strand to SEQ ID NO: 258550
uacaaggagagucauucag

SEQ ID NO: 258552 - RNA, 19 nt, Artificial Sequence
  Description of Artificial Sequence: Synthetic oligonucleotide
  Sense strand starting at position 3881 SEQ ID NO: 3324
guauucucugucuauacua

SEQ ID NO: 258553 - RNA, 19 nt, Artificial Sequence
  Description of Artificial Sequence: Synthetic oligonucleotide
  Antisense strand to SEQ ID NO: 258552
uaguauagacagagaauac

SEQ ID NO: 258554 - RNA, 19 nt, Artificial Sequence
  Description of Artificial Sequence: Synthetic oligonucleotide
  Sense strand starting at position 3965 SEQ ID NO: 3324
ucaaauuuaugugucuagu

SEQ ID NO: 258555 - RNA, 19 nt, Artificial Sequence
  Description of Artificial Sequence: Synthetic oligonucleotide
  Antisense strand to SEQ ID NO: 258554
acuagacacauaaauuuga

SEQ ID NO: 258556 - RNA, 19 nt, Artificial Sequence
  Description of Artificial Sequence: Synthetic oligonucleotide
  Sense strand starting at position 3975 SEQ ID NO: 3324
gugucuaguccugaauuag

SEQ ID NO: 258557 - RNA, 19 nt, Artificial Sequence
  Description of Artificial Sequence: Synthetic oligonucleotide
  Antisense strand to SEQ ID NO: 258556
cuaauucaggacuagacac

SEQ ID NO: 258558 - RNA, 19 nt, Artificial Sequence
  Description of Artificial Sequence: Synthetic oligonucleotide
  Sense strand starting at position 196 SEQ ID NO: 3326
acuaguucuccuugcucua

SEQ ID NO: 258559 - RNA, 19 nt, Artificial Sequence
  Description of Artificial Sequence: Synthetic oligonucleotide
  Antisense strand to SEQ ID NO: 258558
uagagcaaggagaacuagu

SEQ ID NO: 258560 - RNA, 19 nt, Artificial Sequence
  Description of Artificial Sequence: Synthetic oligonucleotide
  Sense strand starting at position 323 SEQ ID NO: 3326
gggaaacccuuaccugauu

SEQ ID NO: 258561 - RNA, 19 nt, Artificial Sequence
  Description of Artificial Sequence: Synthetic oligonucleotide
  Antisense strand to SEQ ID NO: 258560
aaucagguaaggguuuccc

SEQ ID NO: 258562 - RNA, 19 nt, Artificial Sequence
  Description of Artificial Sequence: Synthetic oligonucleotide
  Sense strand starting at position 341 SEQ ID NO: 3326
uaaguaaggucccugcuau

SEQ ID NO: 258563 - RNA, 19 nt, Artificial Sequence
  Description of Artificial Sequence: Synthetic oligonucleotide
  Antisense strand to SEQ ID NO: 258562
auagcagggaccuuacuua

SEQ ID NO: 258564 - RNA, 19 nt, Artificial Sequence
  Description of Artificial Sequence: Synthetic oligonucleotide
  Sense strand starting at position 342 SEQ ID NO: 3326
aaguaaggucccugcuauc

SEQ ID NO: 258565 - RNA, 19 nt, Artificial Sequence
  Description of Artificial Sequence: Synthetic oligonucleotide
  Antisense strand to SEQ ID NO: 258564
gauagcagggaccuuacuu

SEQ ID NO: 258566 - RNA, 19 nt, Artificial Sequence
  Description of Artificial Sequence: Synthetic oligonucleotide
  Sense strand starting at position 353 SEQ ID NO: 3326
cugcuaucguuccuauaga

SEQ ID NO: 258567 - RNA, 19 nt, Artificial Sequence
  Description of Artificial Sequence: Synthetic oligonucleotide
  Antisense strand to SEQ ID NO: 258566
ucuauaggaacgauagcag

SEQ ID NO: 258568 - RNA, 19 nt, Artificial Sequence
  Description of Artificial Sequence: Synthetic oligonucleotide
  Sense strand starting at position 382 SEQ ID NO: 3326
gucagugucauacaugcaa

SEQ ID NO: 258569 - RNA, 19 nt, Artificial Sequence
  Description of Artificial Sequence: Synthetic oligonucleotide
  Antisense strand to SEQ ID NO: 258568
uugcauguaugacacugac

SEQ ID NO: 258570 - RNA, 19 nt, Artificial Sequence
  Description of Artificial Sequence: Synthetic oligonucleotide
  Sense strand starting at position 436 SEQ ID NO: 3326
gugguuagucaguguucaa

SEQ ID NO: 258571 - RNA, 19 nt, Artificial Sequence
  Description of Artificial Sequence: Synthetic oligonucleotide
  Antisense strand to SEQ ID NO: 258570
uugaacacugacuaaccac

SEQ ID NO: 258572 - RNA, 19 nt, Artificial Sequence
  Description of Artificial Sequence: Synthetic oligonucleotide
  Sense strand starting at position 521 SEQ ID NO: 3326
gggcaaaucacuugagcgu

SEQ ID NO: 258573 - RNA, 19 nt, Artificial Sequence
  Description of Artificial Sequence: Synthetic oligonucleotide
  Antisense strand to SEQ ID NO: 258572
acgcucaagugauuugccc

SEQ ID NO: 258574 - RNA, 19 nt, Artificial Sequence
  Description of Artificial Sequence: Synthetic oligonucleotide
  Sense strand starting at position 522 SEQ ID NO: 3326
ggcaaaucacuugagcgua

SEQ ID NO: 258575 - RNA, 19 nt, Artificial Sequence
  Description of Artificial Sequence: Synthetic oligonucleotide
  Antisense strand to SEQ ID NO: 258574
uacgcucaagugauuugcc

SEQ ID NO: 258576 - RNA, 19 nt, Artificial Sequence
  Description of Artificial Sequence: Synthetic oligonucleotide
  Sense strand starting at position 770 SEQ ID NO: 3326
guggaugguagaugucaau

SEQ ID NO: 258577 - RNA, 19 nt, Artificial Sequence
  Description of Artificial Sequence: Synthetic oligonucleotide
  Antisense strand to SEQ ID NO: 258576
auugacaucuaccauccac

SEQ ID NO: 258578 - RNA, 19 nt, Artificial Sequence
  Description of Artificial Sequence: Synthetic oligonucleotide
  Sense strand starting at position 777 SEQ ID NO: 3326
guagaugucaauuguguuc

SEQ ID NO: 258579 - RNA, 19 nt, Artificial Sequence
  Description of Artificial Sequence: Synthetic oligonucleotide
  Antisense strand to SEQ ID NO: 258578
gaacacaauugacaucuac

SEQ ID NO: 258580 - RNA, 19 nt, Artificial Sequence
  Description of Artificial Sequence: Synthetic oligonucleotide
  Sense strand starting at position 891 SEQ ID NO: 3326
guagaagccuucuuccaag

SEQ ID NO: 258581 - RNA, 19 nt, Artificial Sequence
  Description of Artificial Sequence: Synthetic oligonucleotide
  Antisense strand to SEQ ID NO: 258580
cuuggaagaaggcuucuac

SEQ ID NO: 258582 - RNA, 19 nt, Artificial Sequence
  Description of Artificial Sequence: Synthetic oligonucleotide
  Sense strand starting at position 897 SEQ ID NO: 3326
gccuucuuccaagacugau

SEQ ID NO: 258583 - RNA, 19 nt, Artificial Sequence
  Description of Artificial Sequence: Synthetic oligonucleotide
  Antisense strand to SEQ ID NO: 258582
aucagucuuggaagaaggc

SEQ ID NO: 258584 - RNA, 19 nt, Artificial Sequence
  Description of Artificial Sequence: Synthetic oligonucleotide
  Sense strand starting at position 936 SEQ ID NO: 3326
ggaagagcagucuacucuu

SEQ ID NO: 258585 - RNA, 19 nt, Artificial Sequence
  Description of Artificial Sequence: Synthetic oligonucleotide
  Antisense strand to SEQ ID NO: 258584
aagaguagacugcucuucc

SEQ ID NO: 258586 - RNA, 19 nt, Artificial Sequence
  Description of Artificial Sequence: Synthetic oligonucleotide
  Sense strand starting at position 957 SEQ ID NO: 3326
aagaaacuuuacgaggaga

SEQ ID NO: 258587 - RNA, 19 nt, Artificial Sequence
  Description of Artificial Sequence: Synthetic oligonucleotide
  Antisense strand to SEQ ID NO: 258586
ucuccucguaaaguuucuu

SEQ ID NO: 258588 - RNA, 19 nt, Artificial Sequence
  Description of Artificial Sequence: Synthetic oligonucleotide
  Sense strand starting at position 980 SEQ ID NO: 3326
guagguaccauggauuguu

SEQ ID NO: 258589 - RNA, 19 nt, Artificial Sequence
  Description of Artificial Sequence: Synthetic oligonucleotide
  Antisense strand to SEQ ID NO: 258588
aacaauccaugguaccuac

SEQ ID NO: 258590 - RNA, 19 nt, Artificial Sequence
  Description of Artificial Sequence: Synthetic oligonucleotide
  Sense strand starting at position 983 SEQ ID NO: 3326
gguaccauggauuguugua

SEQ ID NO: 258591 - RNA, 19 nt, Artificial Sequence
  Description of Artificial Sequence: Synthetic oligonucleotide
  Antisense strand to SEQ ID NO: 258590
uacaacaauccaugguacc

SEQ ID NO: 258592 - RNA, 19 nt, Artificial Sequence
  Description of Artificial Sequence: Synthetic oligonucleotide
  Sense strand starting at position 985 SEQ ID NO: 3326
uaccauggauuguuguaau

SEQ ID NO: 258593 - RNA, 19 nt, Artificial Sequence
  Description of Artificial Sequence: Synthetic oligonucleotide
  Antisense strand to SEQ ID NO: 258592
auuacaacaauccauggua

SEQ ID NO: 258594 - RNA, 19 nt, Artificial Sequence
  Description of Artificial Sequence: Synthetic oligonucleotide
  Sense strand starting at position 1005 SEQ ID NO: 3326
aaagccuucucaguugagu

SEQ ID NO: 258595 - RNA, 19 nt, Artificial Sequence
  Description of Artificial Sequence: Synthetic oligonucleotide
  Antisense strand to SEQ ID NO: 258594
acucaacugagaaggcuuu

SEQ ID NO: 258596 - RNA, 19 nt, Artificial Sequence
  Description of Artificial Sequence: Synthetic oligonucleotide
  Sense strand starting at position 1167 SEQ ID NO: 3326
uugcuugaccuacaugaaa

SEQ ID NO: 258597 - RNA, 19 nt, Artificial Sequence
  Description of Artificial Sequence: Synthetic oligonucleotide
  Antisense strand to SEQ ID NO: 258596
uuucauguaggucaagcaa

SEQ ID NO: 258598 - RNA, 19 nt, Artificial Sequence
  Description of Artificial Sequence: Synthetic oligonucleotide
  Sense strand starting at position 1240 SEQ ID NO: 3326
auauccagaucuucuguua

SEQ ID NO: 258599 - RNA, 19 nt, Artificial Sequence
  Description of Artificial Sequence: Synthetic oligonucleotide
  Antisense strand to SEQ ID NO: 258598
uaacagaagaucuggauau

SEQ ID NO: 258600 - RNA, 19 nt, Artificial Sequence
  Description of Artificial Sequence: Synthetic oligonucleotide
  Sense strand starting at position 1438 SEQ ID NO: 3326
cguuaaucacaccguauca

SEQ ID NO: 258601 - RNA, 19 nt, Artificial Sequence
  Description of Artificial Sequence: Synthetic oligonucleotide
  Antisense strand to SEQ ID NO: 258600
ugauacggugugauuaacg

SEQ ID NO: 258602 - RNA, 19 nt, Artificial Sequence
  Description of Artificial Sequence: Synthetic oligonucleotide
  Sense strand starting at position 1492 SEQ ID NO: 3326
uccucuaaggcagggauau

SEQ ID NO: 258603 - RNA, 19 nt, Artificial Sequence
  Description of Artificial Sequence: Synthetic oligonucleotide
  Antisense strand to SEQ ID NO: 258602
auaucccugccuuagagga

SEQ ID NO: 258604 - RNA, 19 nt, Artificial Sequence
  Description of Artificial Sequence: Synthetic oligonucleotide
  Sense strand starting at position 1503 SEQ ID NO: 3326
agggauauguuucccucca

SEQ ID NO: 258605 - RNA, 19 nt, Artificial Sequence
  Description of Artificial Sequence: Synthetic oligonucleotide
  Antisense strand to SEQ ID NO: 258604
uggagggaaacauaucccu

SEQ ID NO: 258606 - RNA, 19 nt, Artificial Sequence
  Description of Artificial Sequence: Synthetic oligonucleotide
  Sense strand starting at position 1504 SEQ ID NO: 3326
gggauauguuucccuccau

SEQ ID NO: 258607 - RNA, 19 nt, Artificial Sequence
  Description of Artificial Sequence: Synthetic oligonucleotide
  Antisense strand to SEQ ID NO: 258606
auggagggaaacauauccc

SEQ ID NO: 258608 - RNA, 19 nt, Artificial Sequence
  Description of Artificial Sequence: Synthetic oligonucleotide
  Sense strand starting at position 1598 SEQ ID NO: 3326
gcauggagcgguccguaua

SEQ ID NO: 258609 - RNA, 19 nt, Artificial Sequence
  Description of Artificial Sequence: Synthetic oligonucleotide
  Antisense strand to SEQ ID NO: 258608
uauacggaccgcuccaugc

SEQ ID NO: 258610 - RNA, 19 nt, Artificial Sequence
  Description of Artificial Sequence: Synthetic oligonucleotide
  Sense strand starting at position 1710 SEQ ID NO: 3326
cgaauuuggccauggucga

SEQ ID NO: 258611 - RNA, 19 nt, Artificial Sequence
  Description of Artificial Sequence: Synthetic oligonucleotide
  Antisense strand to SEQ ID NO: 258610
ucgaccauggccaaauucg

SEQ ID NO: 258612 - RNA, 19 nt, Artificial Sequence
  Description of Artificial Sequence: Synthetic oligonucleotide
  Sense strand starting at position 1822 SEQ ID NO: 3326
agcagagguuagguguuua

SEQ ID NO: 258613 - RNA, 19 nt, Artificial Sequence
  Description of Artificial Sequence: Synthetic oligonucleotide
  Antisense strand to SEQ ID NO: 258612
uaaacaccuaaccucugcu

SEQ ID NO: 258614 - RNA, 19 nt, Artificial Sequence
  Description of Artificial Sequence: Synthetic oligonucleotide
  Sense strand starting at position 1826 SEQ ID NO: 3326
gagguuagguguuuaaagu

SEQ ID NO: 258615 - RNA, 19 nt, Artificial Sequence
  Description of Artificial Sequence: Synthetic oligonucleotide
  Antisense strand to SEQ ID NO: 258614
acuuuaaacaccuaaccuc

SEQ ID NO: 258616 - RNA, 19 nt, Artificial Sequence
  Description of Artificial Sequence: Synthetic oligonucleotide
  Sense strand starting at position 1827 SEQ ID NO: 3326
agguuagguguuuaaaguu

SEQ ID NO: 258617 - RNA, 19 nt, Artificial Sequence
  Description of Artificial Sequence: Synthetic oligonucleotide
  Antisense strand to SEQ ID NO: 258616
aacuuuaaacaccuaaccu

SEQ ID NO: 258618 - RNA, 19 nt, Artificial Sequence
  Description of Artificial Sequence: Synthetic oligonucleotide
  Sense strand starting at position 2203 SEQ ID NO: 3326
guuuaaaggagguggguua

SEQ ID NO: 258619 - RNA, 19 nt, Artificial Sequence
  Description of Artificial Sequence: Synthetic oligonucleotide
  Antisense strand to SEQ ID NO: 258618
uaacccaccuccuuuaaac

SEQ ID NO: 258620 - RNA, 19 nt, Artificial Sequence
  Description of Artificial Sequence: Synthetic oligonucleotide
  Sense strand starting at position 2280 SEQ ID NO: 3326
gaggcuggcugguuguaua

SEQ ID NO: 258621 - RNA, 19 nt, Artificial Sequence
  Description of Artificial Sequence: Synthetic oligonucleotide
  Antisense strand to SEQ ID NO: 258620
uauacaaccagccagccuc

SEQ ID NO: 258622 - RNA, 19 nt, Artificial Sequence
  Description of Artificial Sequence: Synthetic oligonucleotide
  Sense strand starting at position 2326 SEQ ID NO: 3326
ugcagacaucgcuuucguu

SEQ ID NO: 258623 - RNA, 19 nt, Artificial Sequence
  Description of Artificial Sequence: Synthetic oligonucleotide
  Antisense strand to SEQ ID NO: 258622
aacgaaagcgaugucugca

SEQ ID NO: 258624 - RNA, 19 nt, Artificial Sequence
  Description of Artificial Sequence: Synthetic oligonucleotide
  Sense strand starting at position 2327 SEQ ID NO: 3326
gcagacaucgcuuucguuu

SEQ ID NO: 258625 - RNA, 19 nt, Artificial Sequence
  Description of Artificial Sequence: Synthetic oligonucleotide
  Antisense strand to SEQ ID NO: 258624
aaacgaaagcgaugucugc

SEQ ID NO: 258626 - RNA, 19 nt, Artificial Sequence
  Description of Artificial Sequence: Synthetic oligonucleotide
  Sense strand starting at position 2377 SEQ ID NO: 3326
ccaggucccuauucuugau

SEQ ID NO: 258627 - RNA, 19 nt, Artificial Sequence
  Description of Artificial Sequence: Synthetic oligonucleotide
  Antisense strand to SEQ ID NO: 258626
aucaagaauagggaccugg

SEQ ID NO: 258628 - RNA, 19 nt, Artificial Sequence
  Description of Artificial Sequence: Synthetic oligonucleotide
  Sense strand starting at position 2412 SEQ ID NO: 3326
uugcuaaaucgucauguug

SEQ ID NO: 258629 - RNA, 19 nt, Artificial Sequence
  Description of Artificial Sequence: Synthetic oligonucleotide
  Antisense strand to SEQ ID NO: 258628
caacaugacgauuuagcaa

SEQ ID NO: 258630 - RNA, 19 nt, Artificial Sequence
  Description of Artificial Sequence: Synthetic oligonucleotide
  Sense strand starting at position 2788 SEQ ID NO: 3326
cgaggacauuuccauaaca

SEQ ID NO: 258631 - RNA, 19 nt, Artificial Sequence
  Description of Artificial Sequence: Synthetic oligonucleotide
  Antisense strand to SEQ ID NO: 258630
uguuauggaaauguccucg

SEQ ID NO: 258632 - RNA, 19 nt, Artificial Sequence
  Description of Artificial Sequence: Synthetic oligonucleotide
  Sense strand starting at position 2896 SEQ ID NO: 3326
ugaccuggcuucuuugaaa

SEQ ID NO: 258633 - RNA, 19 nt, Artificial Sequence
  Description of Artificial Sequence: Synthetic oligonucleotide
  Antisense strand to SEQ ID NO: 258632
uuucaaagaagccagguca

SEQ ID NO: 258634 - RNA, 19 nt, Artificial Sequence
  Description of Artificial Sequence: Synthetic oligonucleotide
  Sense strand starting at position 2939 SEQ ID NO: 3326
gggagcccacauugguaaa

SEQ ID NO: 258635 - RNA, 19 nt, Artificial Sequence
  Description of Artificial Sequence: Synthetic oligonucleotide
  Antisense strand to SEQ ID NO: 258634
uuuaccaaugugggcuccc

SEQ ID NO: 258636 - RNA, 19 nt, Artificial Sequence
  Description of Artificial Sequence: Synthetic oligonucleotide
  Sense strand starting at position 2984 SEQ ID NO: 3326
guuuaauggcuccauaggu

SEQ ID NO: 258637 - RNA, 19 nt, Artificial Sequence
  Description of Artificial Sequence: Synthetic oligonucleotide
  Antisense strand to SEQ ID NO: 258636
accuauggagccauuaaac

SEQ ID NO: 258638 - RNA, 19 nt, Artificial Sequence
  Description of Artificial Sequence: Synthetic oligonucleotide
  Sense strand starting at position 137 SEQ ID NO: 3327
acgcaaagcacgugaauuu

SEQ ID NO: 258639 - RNA, 19 nt, Artificial Sequence
  Description of Artificial Sequence: Synthetic oligonucleotide
  Antisense strand to SEQ ID NO: 258638
aaauucacgugcuuugcgu

SEQ ID NO: 258640 - RNA, 19 nt, Artificial Sequence
  Description of Artificial Sequence: Synthetic oligonucleotide
  Sense strand starting at position 138 SEQ ID NO: 3327
cgcaaagcacgugaauuua

SEQ ID NO: 258641 - RNA, 19 nt, Artificial Sequence
  Description of Artificial Sequence: Synthetic oligonucleotide
  Antisense strand to SEQ ID NO: 258640
uaaauucacgugcuuugcg

SEQ ID NO: 258642 - RNA, 19 nt, Artificial Sequence
  Description of Artificial Sequence: Synthetic oligonucleotide
  Sense strand starting at position 195 SEQ ID NO: 3327
uaggcaguccuacaagaca

SEQ ID NO: 258643 - RNA, 19 nt, Artificial Sequence
  Description of Artificial Sequence: Synthetic oligonucleotide
  Antisense strand to SEQ ID NO: 258642
ugucuuguaggacugccua

SEQ ID NO: 258644 - RNA, 19 nt, Artificial Sequence
  Description of Artificial Sequence: Synthetic oligonucleotide
  Sense strand starting at position 411 SEQ ID NO: 3327
ugaacuuuguuuccagacu

SEQ ID NO: 258645 - RNA, 19 nt, Artificial Sequence
  Description of Artificial Sequence: Synthetic oligonucleotide
  Antisense strand to SEQ ID NO: 258644
agucuggaaacaaaguuca

SEQ ID NO: 258646 - RNA, 19 nt, Artificial Sequence
  Description of Artificial Sequence: Synthetic oligonucleotide
  Sense strand starting at position 417 SEQ ID NO: 3327
uuguuuccagacuagaagu

SEQ ID NO: 258647 - RNA, 19 nt, Artificial Sequence
  Description of Artificial Sequence: Synthetic oligonucleotide
  Antisense strand to SEQ ID NO: 258646
acuucuagucuggaaacaa

SEQ ID NO: 258648 - RNA, 19 nt, Artificial Sequence
  Description of Artificial Sequence: Synthetic oligonucleotide
  Sense strand starting at position 448 SEQ ID NO: 3327
uguuacucaccagguuuaa

SEQ ID NO: 258649 - RNA, 19 nt, Artificial Sequence
  Description of Artificial Sequence: Synthetic oligonucleotide
  Antisense strand to SEQ ID NO: 258648
uuaaaccuggugaguaaca

SEQ ID NO: 258650 - RNA, 19 nt, Artificial Sequence
  Description of Artificial Sequence: Synthetic oligonucleotide
  Sense strand starting at position 710 SEQ ID NO: 3327
uuggaagaacgcugacauu

SEQ ID NO: 258651 - RNA, 19 nt, Artificial Sequence
  Description of Artificial Sequence: Synthetic oligonucleotide
  Antisense strand to SEQ ID NO: 258650
aaugucagcguucuuccaa

SEQ ID NO: 258652 - RNA, 19 nt, Artificial Sequence
  Description of Artificial Sequence: Synthetic oligonucleotide
  Sense strand starting at position 730 SEQ ID NO: 3327
gccugaaccaaaggaguaa

SEQ ID NO: 258653 - RNA, 19 nt, Artificial Sequence
  Description of Artificial Sequence: Synthetic oligonucleotide
  Antisense strand to SEQ ID NO: 258652
uuacuccuuugguucaggc

SEQ ID NO: 258654 - RNA, 19 nt, Artificial Sequence
  Description of Artificial Sequence: Synthetic oligonucleotide
  Sense strand starting at position 865 SEQ ID NO: 3327
uuggguugucauugucuca

SEQ ID NO: 258655 - RNA, 19 nt, Artificial Sequence
  Description of Artificial Sequence: Synthetic oligonucleotide
  Antisense strand to SEQ ID NO: 258654
ugagacaaugacaacccaa

SEQ ID NO: 258656 - RNA, 19 nt, Artificial Sequence
  Description of Artificial Sequence: Synthetic oligonucleotide
  Sense strand starting at position 872 SEQ ID NO: 3327
gucauugucucacuuuacu

SEQ ID NO: 258657 - RNA, 19 nt, Artificial Sequence
  Description of Artificial Sequence: Synthetic oligonucleotide
  Antisense strand to SEQ ID NO: 258656
aguaaagugagacaaugac

SEQ ID NO: 258658 - RNA, 19 nt, Artificial Sequence
  Description of Artificial Sequence: Synthetic oligonucleotide
  Sense strand starting at position 970 SEQ ID NO: 3327
ucaauuaguagagggcuua

SEQ ID NO: 258659 - RNA, 19 nt, Artificial Sequence
  Description of Artificial Sequence: Synthetic oligonucleotide
  Antisense strand to SEQ ID NO: 258658
uaagcccucuacuaauuga

SEQ ID NO: 258660 - RNA, 19 nt, Artificial Sequence
  Description of Artificial Sequence: Synthetic oligonucleotide
  Sense strand starting at position 971 SEQ ID NO: 3327
caauuaguagagggcuuau

SEQ ID NO: 258661 - RNA, 19 nt, Artificial Sequence
  Description of Artificial Sequence: Synthetic oligonucleotide
  Antisense strand to SEQ ID NO: 258660
auaagcccucuacuaauug

SEQ ID NO: 258662 - RNA, 19 nt, Artificial Sequence
  Description of Artificial Sequence: Synthetic oligonucleotide
  Sense strand starting at position 1079 SEQ ID NO: 3327
uuggcuauacuaugacaaa

SEQ ID NO: 258663 - RNA, 19 nt, Artificial Sequence
  Description of Artificial Sequence: Synthetic oligonucleotide
  Antisense strand to SEQ ID NO: 258662
uuugucauaguauagccaa

SEQ ID NO: 258664 - RNA, 19 nt, Artificial Sequence
  Description of Artificial Sequence: Synthetic oligonucleotide
  Sense strand starting at position 1206 SEQ ID NO: 3327
acuucugaucucugaaugu

SEQ ID NO: 258665 - RNA, 19 nt, Artificial Sequence
  Description of Artificial Sequence: Synthetic oligonucleotide
  Antisense strand to SEQ ID NO: 258664
acauucagagaucagaagu

SEQ ID NO: 258666 - RNA, 19 nt, Artificial Sequence
  Description of Artificial Sequence: Synthetic oligonucleotide
  Sense strand starting at position 1264 SEQ ID NO: 3327
aacccagaugauuguuuga

SEQ ID NO: 258667 - RNA, 19 nt, Artificial Sequence
  Description of Artificial Sequence: Synthetic oligonucleotide
  Antisense strand to SEQ ID NO: 258666
ucaaacaaucaucuggguu

SEQ ID NO: 258668 - RNA, 19 nt, Artificial Sequence
  Description of Artificial Sequence: Synthetic oligonucleotide
  Sense strand starting at position 1267 SEQ ID NO: 3327
ccagaugauuguuugagcu

SEQ ID NO: 258669 - RNA, 19 nt, Artificial Sequence
  Description of Artificial Sequence: Synthetic oligonucleotide
  Antisense strand to SEQ ID NO: 258668
agcucaaacaaucaucugg

SEQ ID NO: 258670 - RNA, 19 nt, Artificial Sequence
  Description of Artificial Sequence: Synthetic oligonucleotide
  Sense strand starting at position 1271 SEQ ID NO: 3327
augauuguuugagcuugca

SEQ ID NO: 258671 - RNA, 19 nt, Artificial Sequence
  Description of Artificial Sequence: Synthetic oligonucleotide
  Antisense strand to SEQ ID NO: 258670
ugcaagcucaaacaaucau

SEQ ID NO: 258672 - RNA, 19 nt, Artificial Sequence
  Description of Artificial Sequence: Synthetic oligonucleotide
  Sense strand starting at position 1274 SEQ ID NO: 3327
auuguuugagcuugcauuu

SEQ ID NO: 258673 - RNA, 19 nt, Artificial Sequence
  Description of Artificial Sequence: Synthetic oligonucleotide
  Antisense strand to SEQ ID NO: 258672
aaaugcaagcucaaacaau

SEQ ID NO: 258674 - RNA, 19 nt, Artificial Sequence
  Description of Artificial Sequence: Synthetic oligonucleotide
  Sense strand starting at position 1383 SEQ ID NO: 3327
uugaauaaauccucucgcu

SEQ ID NO: 258675 - RNA, 19 nt, Artificial Sequence
  Description of Artificial Sequence: Synthetic oligonucleotide
  Antisense strand to SEQ ID NO: 258674
agcgagaggauuuauucaa

SEQ ID NO: 258676 - RNA, 19 nt, Artificial Sequence
  Description of Artificial Sequence: Synthetic oligonucleotide
  Sense strand starting at position 1985 SEQ ID NO: 3327
gucagaacaccucaaaugu

SEQ ID NO: 258677 - RNA, 19 nt, Artificial Sequence
  Description of Artificial Sequence: Synthetic oligonucleotide
  Antisense strand to SEQ ID NO: 258676
acauuugagguguucugac

SEQ ID NO: 258678 - RNA, 19 nt, Artificial Sequence
  Description of Artificial Sequence: Synthetic oligonucleotide
  Sense strand starting at position 2168 SEQ ID NO: 3327
cugucugaguuugucuuaa

SEQ ID NO: 258679 - RNA, 19 nt, Artificial Sequence
  Description of Artificial Sequence: Synthetic oligonucleotide
  Antisense strand to SEQ ID NO: 258678
uuaagacaaacucagacag

SEQ ID NO: 258680 - RNA, 19 nt, Artificial Sequence
  Description of Artificial Sequence: Synthetic oligonucleotide
  Sense strand starting at position 2170 SEQ ID NO: 3327
gucugaguuugucuuaaag

SEQ ID NO: 258681 - RNA, 19 nt, Artificial Sequence
  Description of Artificial Sequence: Synthetic oligonucleotide
  Antisense strand to SEQ ID NO: 258680
cuuuaagacaaacucagac

SEQ ID NO: 258682 - RNA, 19 nt, Artificial Sequence
  Description of Artificial Sequence: Synthetic oligonucleotide
  Sense strand starting at position 2259 SEQ ID NO: 3327
guggauuccgaccagaaug

SEQ ID NO: 258683 - RNA, 19 nt, Artificial Sequence
  Description of Artificial Sequence: Synthetic oligonucleotide
  Antisense strand to SEQ ID NO: 258682
cauucuggucggaauccac

SEQ ID NO: 258684 - RNA, 19 nt, Artificial Sequence
  Description of Artificial Sequence: Synthetic oligonucleotide
  Sense strand starting at position 2290 SEQ ID NO: 3327
aguagugguggccauaaca

SEQ ID NO: 258685 - RNA, 19 nt, Artificial Sequence
  Description of Artificial Sequence: Synthetic oligonucleotide
  Antisense strand to SEQ ID NO: 258684
uguuauggccaccacuacu

SEQ ID NO: 258686 - RNA, 19 nt, Artificial Sequence
  Description of Artificial Sequence: Synthetic oligonucleotide
  Sense strand starting at position 2548 SEQ ID NO: 3327
gccgacucucuugaaauaa

SEQ ID NO: 258687 - RNA, 19 nt, Artificial Sequence
  Description of Artificial Sequence: Synthetic oligonucleotide
  Antisense strand to SEQ ID NO: 258686
uuauuucaagagagucggc

SEQ ID NO: 258688 - RNA, 19 nt, Artificial Sequence
  Description of Artificial Sequence: Synthetic oligonucleotide
  Sense strand starting at position 2559 SEQ ID NO: 3327
ugaaauaaauugggaauca

SEQ ID NO: 258689 - RNA, 19 nt, Artificial Sequence
  Description of Artificial Sequence: Synthetic oligonucleotide
  Antisense strand to SEQ ID NO: 258688
ugauucccaauuuauuuca

SEQ ID NO: 258690 - RNA, 19 nt, Artificial Sequence
  Description of Artificial Sequence: Synthetic oligonucleotide
  Sense strand starting at position 2588 SEQ ID NO: 3327
ggcagcagcgggaguuauu

SEQ ID NO: 258691 - RNA, 19 nt, Artificial Sequence
  Description of Artificial Sequence: Synthetic oligonucleotide
  Antisense strand to SEQ ID NO: 258690
aauaacucccgcugcugcc

SEQ ID NO: 258692 - RNA, 19 nt, Artificial Sequence
  Description of Artificial Sequence: Synthetic oligonucleotide
  Sense strand starting at position 2632 SEQ ID NO: 3327
ucaugacuuuccucgaaau

SEQ ID NO: 258693 - RNA, 19 nt, Artificial Sequence
  Description of Artificial Sequence: Synthetic oligonucleotide
  Antisense strand to SEQ ID NO: 258692
auuucgaggaaagucauga

SEQ ID NO: 258694 - RNA, 19 nt, Artificial Sequence
  Description of Artificial Sequence: Synthetic oligonucleotide
  Sense strand starting at position 2690 SEQ ID NO: 3327
gcgcaaaguacugaauucu

SEQ ID NO: 258695 - RNA, 19 nt, Artificial Sequence
  Description of Artificial Sequence: Synthetic oligonucleotide
  Antisense strand to SEQ ID NO: 258694
agaauucaguacuuugcgc

SEQ ID NO: 258696 - RNA, 19 nt, Artificial Sequence
  Description of Artificial Sequence: Synthetic oligonucleotide
  Sense strand starting at position 2696 SEQ ID NO: 3327
aguacugaauucucagaac

SEQ ID NO: 258697 - RNA, 19 nt, Artificial Sequence
  Description of Artificial Sequence: Synthetic oligonucleotide
  Antisense strand to SEQ ID NO: 258696
guucugagaauucaguacu

SEQ ID NO: 258698 - RNA, 19 nt, Artificial Sequence
  Description of Artificial Sequence: Synthetic oligonucleotide
  Sense strand starting at position 2740 SEQ ID NO: 3327
agcgggaucguggaggaaa

SEQ ID NO: 258699 - RNA, 19 nt, Artificial Sequence
  Description of Artificial Sequence: Synthetic oligonucleotide
  Antisense strand to SEQ ID NO: 258698
uuuccuccacgaucccgcu

SEQ ID NO: 258700 - RNA, 19 nt, Artificial Sequence
  Description of Artificial Sequence: Synthetic oligonucleotide
  Sense strand starting at position 2777 SEQ ID NO: 3327
ugggaaagccucugcuaag

SEQ ID NO: 258701 - RNA, 19 nt, Artificial Sequence
  Description of Artificial Sequence: Synthetic oligonucleotide
  Antisense strand to SEQ ID NO: 258700
cuuagcagaggcuuuccca

SEQ ID NO: 258702 - RNA, 19 nt, Artificial Sequence
  Description of Artificial Sequence: Synthetic oligonucleotide
  Sense strand starting at position 2849 SEQ ID NO: 3327
agagguuucuuugcuguua

SEQ ID NO: 258703 - RNA, 19 nt, Artificial Sequence
  Description of Artificial Sequence: Synthetic oligonucleotide
  Antisense strand to SEQ ID NO: 258702
uaacagcaaagaaaccucu

SEQ ID NO: 258704 - RNA, 19 nt, Artificial Sequence
  Description of Artificial Sequence: Synthetic oligonucleotide
  Sense strand starting at position 3056 SEQ ID NO: 3327
gcuauuuaugaucgucgga

SEQ ID NO: 258705 - RNA, 19 nt, Artificial Sequence
  Description of Artificial Sequence: Synthetic oligonucleotide
  Antisense strand to SEQ ID NO: 258704
uccgacgaucauaaauagc

SEQ ID NO: 258706 - RNA, 19 nt, Artificial Sequence
  Description of Artificial Sequence: Synthetic oligonucleotide
  Sense strand starting at position 3547 SEQ ID NO: 3327
ccuauugccugggcuuuaa

SEQ ID NO: 258707 - RNA, 19 nt, Artificial Sequence
  Description of Artificial Sequence: Synthetic oligonucleotide
  Antisense strand to SEQ ID NO: 258706
uuaaagcccaggcaauagg

SEQ ID NO: 258708 - RNA, 19 nt, Artificial Sequence
  Description of Artificial Sequence: Synthetic oligonucleotide
  Sense strand starting at position 3599 SEQ ID NO: 3327
cuaagcuucucccuuguga

SEQ ID NO: 258709 - RNA, 19 nt, Artificial Sequence
  Description of Artificial Sequence: Synthetic oligonucleotide
  Antisense strand to SEQ ID NO: 258708
ucacaagggagaagcuuag

SEQ ID NO: 258710 - RNA, 19 nt, Artificial Sequence
  Description of Artificial Sequence: Synthetic oligonucleotide
  Sense strand starting at position 3606 SEQ ID NO: 3327
ucucccuugugauuauauu

SEQ ID NO: 258711 - RNA, 19 nt, Artificial Sequence
  Description of Artificial Sequence: Synthetic oligonucleotide
  Antisense strand to SEQ ID NO: 258710
aauauaaucacaagggaga

SEQ ID NO: 258712 - RNA, 19 nt, Artificial Sequence
  Description of Artificial Sequence: Synthetic oligonucleotide
  Sense strand starting at position 3617 SEQ ID NO: 3327
auuauauuuaguggcguua

SEQ ID NO: 258713 - RNA, 19 nt, Artificial Sequence
  Description of Artificial Sequence: Synthetic oligonucleotide
  Antisense strand to SEQ ID NO: 258712
uaacgccacuaaauauaau

SEQ ID NO: 258714 - RNA, 19 nt, Artificial Sequence
  Description of Artificial Sequence: Synthetic oligonucleotide
  Sense strand starting at position 3832 SEQ ID NO: 3327
acccaaaucucgguaggca

SEQ ID NO: 258715 - RNA, 19 nt, Artificial Sequence
  Description of Artificial Sequence: Synthetic oligonucleotide
  Antisense strand to SEQ ID NO: 258714
ugccuaccgagauuugggu

SEQ ID NO: 258716 - RNA, 19 nt, Artificial Sequence
  Description of Artificial Sequence: Synthetic oligonucleotide
  Sense strand starting at position 3856 SEQ ID NO: 3327
ggaggagugcucggccaau

SEQ ID NO: 258717 - RNA, 19 nt, Artificial Sequence
  Description of Artificial Sequence: Synthetic oligonucleotide
  Antisense strand to SEQ ID NO: 258716
auuggccgagcacuccucc

SEQ ID NO: 258718 - RNA, 19 nt, Artificial Sequence
  Description of Artificial Sequence: Synthetic oligonucleotide
  Sense strand starting at position 192 SEQ ID NO: 3328
uguauuuaaugagcuaguu

SEQ ID NO: 258719 - RNA, 19 nt, Artificial Sequence
  Description of Artificial Sequence: Synthetic oligonucleotide
  Antisense strand to SEQ ID NO: 258718
aacuagcucauuaaauaca

SEQ ID NO: 258720 - RNA, 19 nt, Artificial Sequence
  Description of Artificial Sequence: Synthetic oligonucleotide
  Sense strand starting at position 306 SEQ ID NO: 3328
ccgauucaccucgagaagu

SEQ ID NO: 258721 - RNA, 19 nt, Artificial Sequence
  Description of Artificial Sequence: Synthetic oligonucleotide
  Antisense strand to SEQ ID NO: 258720
acuucucgaggugaaucgg

SEQ ID NO: 258722 - RNA, 19 nt, Artificial Sequence
  Description of Artificial Sequence: Synthetic oligonucleotide
  Sense strand starting at position 316 SEQ ID NO: 3328
ucgagaaguuaggucuagu

SEQ ID NO: 258723 - RNA, 19 nt, Artificial Sequence
  Description of Artificial Sequence: Synthetic oligonucleotide
  Antisense strand to SEQ ID NO: 258722
acuagaccuaacuucucga

SEQ ID NO: 258724 - RNA, 19 nt, Artificial Sequence
  Description of Artificial Sequence: Synthetic oligonucleotide
  Sense strand starting at position 319 SEQ ID NO: 3328
agaaguuaggucuaguuau

SEQ ID NO: 258725 - RNA, 19 nt, Artificial Sequence
  Description of Artificial Sequence: Synthetic oligonucleotide
  Antisense strand to SEQ ID NO: 258724
auaacuagaccuaacuucu

SEQ ID NO: 258726 - RNA, 19 nt, Artificial Sequence
  Description of Artificial Sequence: Synthetic oligonucleotide
  Sense strand starting at position 325 SEQ ID NO: 3328
uaggucuaguuauugacaa

SEQ ID NO: 258727 - RNA, 19 nt, Artificial Sequence
  Description of Artificial Sequence: Synthetic oligonucleotide
  Antisense strand to SEQ ID NO: 258726
uugucaauaacuagaccua

SEQ ID NO: 258728 - RNA, 19 nt, Artificial Sequence
  Description of Artificial Sequence: Synthetic oligonucleotide
  Sense strand starting at position 358 SEQ ID NO: 3328
acugaagacuaugaggaau

SEQ ID NO: 258729 - RNA, 19 nt, Artificial Sequence
  Description of Artificial Sequence: Synthetic oligonucleotide
  Antisense strand to SEQ ID NO: 258728
auuccucauagucuucagu

SEQ ID NO: 258730 - RNA, 19 nt, Artificial Sequence
  Description of Artificial Sequence: Synthetic oligonucleotide
  Sense strand starting at position 381 SEQ ID NO: 3328
guagaacugucuuuguuaa

SEQ ID NO: 258731 - RNA, 19 nt, Artificial Sequence
  Description of Artificial Sequence: Synthetic oligonucleotide
  Antisense strand to SEQ ID NO: 258730
uuaacaaagacaguucuac

SEQ ID NO: 258732 - RNA, 19 nt, Artificial Sequence
  Description of Artificial Sequence: Synthetic oligonucleotide
  Sense strand starting at position 383 SEQ ID NO: 3328
agaacugucuuuguuaaca

SEQ ID NO: 258733 - RNA, 19 nt, Artificial Sequence
  Description of Artificial Sequence: Synthetic oligonucleotide
  Antisense strand to SEQ ID NO: 258732
uguuaacaaagacaguucu

SEQ ID NO: 258734 - RNA, 19 nt, Artificial Sequence
  Description of Artificial Sequence: Synthetic oligonucleotide
  Sense strand starting at position 404 SEQ ID NO: 3328
ccagaaaugugacuccuga

SEQ ID NO: 258735 - RNA, 19 nt, Artificial Sequence
  Description of Artificial Sequence: Synthetic oligonucleotide
  Antisense strand to SEQ ID NO: 258734
ucaggagucacauuucugg

SEQ ID NO: 258736 - RNA, 19 nt, Artificial Sequence
  Description of Artificial Sequence: Synthetic oligonucleotide
  Sense strand starting at position 465 SEQ ID NO: 3328
aagggaaagucccuacacu

SEQ ID NO: 258737 - RNA, 19 nt, Artificial Sequence
  Description of Artificial Sequence: Synthetic oligonucleotide
  Antisense strand to SEQ ID NO: 258736
aguguagggacuuucccuu

SEQ ID NO: 258738 - RNA, 19 nt, Artificial Sequence
  Description of Artificial Sequence: Synthetic oligonucleotide
  Sense strand starting at position 546 SEQ ID NO: 3328
gcuuaaacuuaauucguua

SEQ ID NO: 258739 - RNA, 19 nt, Artificial Sequence
  Description of Artificial Sequence: Synthetic oligonucleotide
  Antisense strand to SEQ ID NO: 258738
uaacgaauuaaguuuaagc

SEQ ID NO: 258740 - RNA, 19 nt, Artificial Sequence
  Description of Artificial Sequence: Synthetic oligonucleotide
  Sense strand starting at position 549 SEQ ID NO: 3328
uaaacuuaauucguuaggu

SEQ ID NO: 258741 - RNA, 19 nt, Artificial Sequence
  Description of Artificial Sequence: Synthetic oligonucleotide
  Antisense strand to SEQ ID NO: 258740
accuaacgaauuaaguuua

SEQ ID NO: 258742 - RNA, 19 nt, Artificial Sequence
  Description of Artificial Sequence: Synthetic oligonucleotide
  Sense strand starting at position 550 SEQ ID NO: 3328
aaacuuaauucguuaggua

SEQ ID NO: 258743 - RNA, 19 nt, Artificial Sequence
  Description of Artificial Sequence: Synthetic oligonucleotide
  Antisense strand to SEQ ID NO: 258742
uaccuaacgaauuaaguuu

SEQ ID NO: 258744 - RNA, 19 nt, Artificial Sequence
  Description of Artificial Sequence: Synthetic oligonucleotide
  Sense strand starting at position 551 SEQ ID NO: 3328
aacuuaauucguuagguag

SEQ ID NO: 258745 - RNA, 19 nt, Artificial Sequence
  Description of Artificial Sequence: Synthetic oligonucleotide
  Antisense strand to SEQ ID NO: 258744
cuaccuaacgaauuaaguu

SEQ ID NO: 258746 - RNA, 19 nt, Artificial Sequence
  Description of Artificial Sequence: Synthetic oligonucleotide
  Sense strand starting at position 649 SEQ ID NO: 3328
cccuuucgugaaugacagu

SEQ ID NO: 258747 - RNA, 19 nt, Artificial Sequence
  Description of Artificial Sequence: Synthetic oligonucleotide
  Antisense strand to SEQ ID NO: 258746
acugucauucacgaaaggg

SEQ ID NO: 258748 - RNA, 19 nt, Artificial Sequence
  Description of Artificial Sequence: Synthetic oligonucleotide
  Sense strand starting at position 650 SEQ ID NO: 3328
ccuuucgugaaugacagua

SEQ ID NO: 258749 - RNA, 19 nt, Artificial Sequence
  Description of Artificial Sequence: Synthetic oligonucleotide
  Antisense strand to SEQ ID NO: 258748
uacugucauucacgaaagg

SEQ ID NO: 258750 - RNA, 19 nt, Artificial Sequence
  Description of Artificial Sequence: Synthetic oligonucleotide
  Sense strand starting at position 655 SEQ ID NO: 3328
cgugaaugacaguaacaau

SEQ ID NO: 258751 - RNA, 19 nt, Artificial Sequence
  Description of Artificial Sequence: Synthetic oligonucleotide
  Antisense strand to SEQ ID NO: 258750
auuguuacugucauucacg

SEQ ID NO: 258752 - RNA, 19 nt, Artificial Sequence
  Description of Artificial Sequence: Synthetic oligonucleotide
  Sense strand starting at position 813 SEQ ID NO: 3328
gucuguagucugguaacgu

SEQ ID NO: 258753 - RNA, 19 nt, Artificial Sequence
  Description of Artificial Sequence: Synthetic oligonucleotide
  Antisense strand to SEQ ID NO: 258752
acguuaccagacuacagac

SEQ ID NO: 258754 - RNA, 19 nt, Artificial Sequence
  Description of Artificial Sequence: Synthetic oligonucleotide
  Sense strand starting at position 1565 SEQ ID NO: 3328
agaccacucgguuggacau

SEQ ID NO: 258755 - RNA, 19 nt, Artificial Sequence
  Description of Artificial Sequence: Synthetic oligonucleotide
  Antisense strand to SEQ ID NO: 258754
auguccaaccgaguggucu

SEQ ID NO: 258756 - RNA, 19 nt, Artificial Sequence
  Description of Artificial Sequence: Synthetic oligonucleotide
  Sense strand starting at position 2489 SEQ ID NO: 3328
gcggcuuuccacgaggaca

SEQ ID NO: 258757 - RNA, 19 nt, Artificial Sequence
  Description of Artificial Sequence: Synthetic oligonucleotide
  Antisense strand to SEQ ID NO: 258756
uguccucguggaaagccgc

SEQ ID NO: 258758 - RNA, 19 nt, Artificial Sequence
  Description of Artificial Sequence: Synthetic oligonucleotide
  Sense strand starting at position 2513 SEQ ID NO: 3328
gcggguauccaucauauac

SEQ ID NO: 258759 - RNA, 19 nt, Artificial Sequence
  Description of Artificial Sequence: Synthetic oligonucleotide
  Antisense strand to SEQ ID NO: 258758
guauaugauggauacccgc

SEQ ID NO: 258760 - RNA, 19 nt, Artificial Sequence
  Description of Artificial Sequence: Synthetic oligonucleotide
  Sense strand starting at position 2532 SEQ ID NO: 3328
aggcaucucucaucgauuu

SEQ ID NO: 258761 - RNA, 19 nt, Artificial Sequence
  Description of Artificial Sequence: Synthetic oligonucleotide
  Antisense strand to SEQ ID NO: 258760
aaaucgaugagagaugccu

SEQ ID NO: 258762 - RNA, 19 nt, Artificial Sequence
  Description of Artificial Sequence: Synthetic oligonucleotide
  Sense strand starting at position 2584 SEQ ID NO: 3328
ccgggaaguucaucuguag

SEQ ID NO: 258763 - RNA, 19 nt, Artificial Sequence
  Description of Artificial Sequence: Synthetic oligonucleotide
  Antisense strand to SEQ ID NO: 258762
cuacagaugaacuucccgg

SEQ ID NO: 258764 - RNA, 19 nt, Artificial Sequence
  Description of Artificial Sequence: Synthetic oligonucleotide
  Sense strand starting at position 2587 SEQ ID NO: 3328
ggaaguucaucuguagaag

SEQ ID NO: 258765 - RNA, 19 nt, Artificial Sequence
  Description of Artificial Sequence: Synthetic oligonucleotide
  Antisense strand to SEQ ID NO: 258764
cuucuacagaugaacuucc

SEQ ID NO: 258766 - RNA, 19 nt, Artificial Sequence
  Description of Artificial Sequence: Synthetic oligonucleotide
  Sense strand starting at position 2661 SEQ ID NO: 3328
gggucacucuuaccaccua

SEQ ID NO: 258767 - RNA, 19 nt, Artificial Sequence
  Description of Artificial Sequence: Synthetic oligonucleotide
  Antisense strand to SEQ ID NO: 258766
uaggugguaagagugaccc

SEQ ID NO: 258768 - RNA, 19 nt, Artificial Sequence
  Description of Artificial Sequence: Synthetic oligonucleotide
  Sense strand starting at position 2719 SEQ ID NO: 3328
guuguauuuauguaggugu

SEQ ID NO: 258769 - RNA, 19 nt, Artificial Sequence
  Description of Artificial Sequence: Synthetic oligonucleotide
  Antisense strand to SEQ ID NO: 258768
acaccuacauaaauacaac

SEQ ID NO: 258770 - RNA, 19 nt, Artificial Sequence
  Description of Artificial Sequence: Synthetic oligonucleotide
  Sense strand starting at position 2722 SEQ ID NO: 3328
guauuuauguagguguaug

SEQ ID NO: 258771 - RNA, 19 nt, Artificial Sequence
  Description of Artificial Sequence: Synthetic oligonucleotide
  Antisense strand to SEQ ID NO: 258770
cauacaccuacauaaauac

SEQ ID NO: 258772 - RNA, 19 nt, Artificial Sequence
  Description of Artificial Sequence: Synthetic oligonucleotide
  Sense strand starting at position 2727 SEQ ID NO: 3328
uauguagguguaugucaua

SEQ ID NO: 258773 - RNA, 19 nt, Artificial Sequence
  Description of Artificial Sequence: Synthetic oligonucleotide
  Antisense strand to SEQ ID NO: 258772
uaugacauacaccuacaua

SEQ ID NO: 258774 - RNA, 19 nt, Artificial Sequence
  Description of Artificial Sequence: Synthetic oligonucleotide
  Sense strand starting at position 2752 SEQ ID NO: 3328
uaacuaagguguuugauau

SEQ ID NO: 258775 - RNA, 19 nt, Artificial Sequence
  Description of Artificial Sequence: Synthetic oligonucleotide
  Antisense strand to SEQ ID NO: 258774
auaucaaacaccuuaguua

SEQ ID NO: 258776 - RNA, 19 nt, Artificial Sequence
  Description of Artificial Sequence: Synthetic oligonucleotide
  Sense strand starting at position 2753 SEQ ID NO: 3328
aacuaagguguuugauaua

SEQ ID NO: 258777 - RNA, 19 nt, Artificial Sequence
  Description of Artificial Sequence: Synthetic oligonucleotide
  Antisense strand to SEQ ID NO: 258776
uauaucaaacaccuuaguu

SEQ ID NO: 258778 - RNA, 19 nt, Artificial Sequence
  Description of Artificial Sequence: Synthetic oligonucleotide
  Sense strand starting at position 2765 SEQ ID NO: 3328
ugauauaacuagccucguu

SEQ ID NO: 258779 - RNA, 19 nt, Artificial Sequence
  Description of Artificial Sequence: Synthetic oligonucleotide
  Antisense strand to SEQ ID NO: 258778
aacgaggcuaguuauauca

SEQ ID NO: 258780 - RNA, 19 nt, Artificial Sequence
  Description of Artificial Sequence: Synthetic oligonucleotide
  Sense strand starting at position 2810 SEQ ID NO: 3328
caaggaguguaccuacgau

SEQ ID NO: 258781 - RNA, 19 nt, Artificial Sequence
  Description of Artificial Sequence: Synthetic oligonucleotide
  Antisense strand to SEQ ID NO: 258780
aucguagguacacuccuug

SEQ ID NO: 258782 - RNA, 19 nt, Artificial Sequence
  Description of Artificial Sequence: Synthetic oligonucleotide
  Sense strand starting at position 2817 SEQ ID NO: 3328
uguaccuacgauuauaaga

SEQ ID NO: 258783 - RNA, 19 nt, Artificial Sequence
  Description of Artificial Sequence: Synthetic oligonucleotide
  Antisense strand to SEQ ID NO: 258782
ucuuauaaucguagguaca

SEQ ID NO: 258784 - RNA, 19 nt, Artificial Sequence
  Description of Artificial Sequence: Synthetic oligonucleotide
  Sense strand starting at position 2833 SEQ ID NO: 3328
agagcuguugaaugugaac

SEQ ID NO: 258785 - RNA, 19 nt, Artificial Sequence
  Description of Artificial Sequence: Synthetic oligonucleotide
  Antisense strand to SEQ ID NO: 258784
guucacauucaacagcucu

SEQ ID NO: 258786 - RNA, 19 nt, Artificial Sequence
  Description of Artificial Sequence: Synthetic oligonucleotide
  Sense strand starting at position 2995 SEQ ID NO: 3328
gaggaaguguuauuguuac

SEQ ID NO: 258787 - RNA, 19 nt, Artificial Sequence
  Description of Artificial Sequence: Synthetic oligonucleotide
  Antisense strand to SEQ ID NO: 258786
guaacaauaacacuuccuc

SEQ ID NO: 258788 - RNA, 19 nt, Artificial Sequence
  Description of Artificial Sequence: Synthetic oligonucleotide
  Sense strand starting at position 3057 SEQ ID NO: 3328
gcauacauccaaugaaagu

SEQ ID NO: 258789 - RNA, 19 nt, Artificial Sequence
  Description of Artificial Sequence: Synthetic oligonucleotide
  Antisense strand to SEQ ID NO: 258788
acuuucauuggauguaugc

SEQ ID NO: 258790 - RNA, 19 nt, Artificial Sequence
  Description of Artificial Sequence: Synthetic oligonucleotide
  Sense strand starting at position 3118 SEQ ID NO: 3328
gguaccuccugccuauaau

SEQ ID NO: 258791 - RNA, 19 nt, Artificial Sequence
  Description of Artificial Sequence: Synthetic oligonucleotide
  Antisense strand to SEQ ID NO: 258790
auuauaggcaggagguacc

SEQ ID NO: 258792 - RNA, 19 nt, Artificial Sequence
  Description of Artificial Sequence: Synthetic oligonucleotide
  Sense strand starting at position 3461 SEQ ID NO: 3328
guagaugacuggcugucua

SEQ ID NO: 258793 - RNA, 19 nt, Artificial Sequence
  Description of Artificial Sequence: Synthetic oligonucleotide
  Antisense strand to SEQ ID NO: 258792
uagacagccagucaucuac

SEQ ID NO: 258794 - RNA, 19 nt, Artificial Sequence
  Description of Artificial Sequence: Synthetic oligonucleotide
  Sense strand starting at position 3465 SEQ ID NO: 3328
augacuggcugucuaguau

SEQ ID NO: 258795 - RNA, 19 nt, Artificial Sequence
  Description of Artificial Sequence: Synthetic oligonucleotide
  Antisense strand to SEQ ID NO: 258794
auacuagacagccagucau

SEQ ID NO: 258796 - RNA, 19 nt, Artificial Sequence
  Description of Artificial Sequence: Synthetic oligonucleotide
  Sense strand starting at position 3573 SEQ ID NO: 3328
uguccuaaagccuagucaa

SEQ ID NO: 258797 - RNA, 19 nt, Artificial Sequence
  Description of Artificial Sequence: Synthetic oligonucleotide
  Antisense strand to SEQ ID NO: 258796
uugacuaggcuuuaggaca

SEQ ID NO: 258798 - RNA, 19 nt, Artificial Sequence
  Description of Artificial Sequence: Synthetic oligonucleotide
  Sense strand starting at position 16 SEQ ID NO: 3329
ccagaaaugugacuccuga

SEQ ID NO: 258799 - RNA, 19 nt, Artificial Sequence
  Description of Artificial Sequence: Synthetic oligonucleotide
  Antisense strand to SEQ ID NO: 258798
ucaggagucacauuucugg

SEQ ID NO: 258800 - RNA, 19 nt, Artificial Sequence
  Description of Artificial Sequence: Synthetic oligonucleotide
  Sense strand starting at position 77 SEQ ID NO: 3329
aagggaaagucccuacacu

SEQ ID NO: 258801 - RNA, 19 nt, Artificial Sequence
  Description of Artificial Sequence: Synthetic oligonucleotide
  Antisense strand to SEQ ID NO: 258800
aguguagggacuuucccuu

SEQ ID NO: 258802 - RNA, 19 nt, Artificial Sequence
  Description of Artificial Sequence: Synthetic oligonucleotide
  Sense strand starting at position 158 SEQ ID NO: 3329
gcuuaaacuuaauucguua

SEQ ID NO: 258803 - RNA, 19 nt, Artificial Sequence
  Description of Artificial Sequence: Synthetic oligonucleotide
  Antisense strand to SEQ ID NO: 258802
uaacgaauuaaguuuaagc

SEQ ID NO: 258804 - RNA, 19 nt, Artificial Sequence
  Description of Artificial Sequence: Synthetic oligonucleotide
  Sense strand starting at position 161 SEQ ID NO: 3329
uaaacuuaauucguuaggu

SEQ ID NO: 258805 - RNA, 19 nt, Artificial Sequence
  Description of Artificial Sequence: Synthetic oligonucleotide
  Antisense strand to SEQ ID NO: 258804
accuaacgaauuaaguuua

SEQ ID NO: 258806 - RNA, 19 nt, Artificial Sequence
  Description of Artificial Sequence: Synthetic oligonucleotide
  Sense strand starting at position 162 SEQ ID NO: 3329
aaacuuaauucguuaggua

SEQ ID NO: 258807 - RNA, 19 nt, Artificial Sequence
  Description of Artificial Sequence: Synthetic oligonucleotide
  Antisense strand to SEQ ID NO: 258806
uaccuaacgaauuaaguuu

SEQ ID NO: 258808 - RNA, 19 nt, Artificial Sequence
  Description of Artificial Sequence: Synthetic oligonucleotide
  Sense strand starting at position 163 SEQ ID NO: 3329
aacuuaauucguuagguag

SEQ ID NO: 258809 - RNA, 19 nt, Artificial Sequence
  Description of Artificial Sequence: Synthetic oligonucleotide
  Antisense strand to SEQ ID NO: 258808
cuaccuaacgaauuaaguu

SEQ ID NO: 258810 - RNA, 19 nt, Artificial Sequence
  Description of Artificial Sequence: Synthetic oligonucleotide
  Sense strand starting at position 261 SEQ ID NO: 3329
cccuuucgugaaugacagu

SEQ ID NO: 258811 - RNA, 19 nt, Artificial Sequence
  Description of Artificial Sequence: Synthetic oligonucleotide
  Antisense strand to SEQ ID NO: 258810
acugucauucacgaaaggg

SEQ ID NO: 258812 - RNA, 19 nt, Artificial Sequence
  Description of Artificial Sequence: Synthetic oligonucleotide
  Sense strand starting at position 262 SEQ ID NO: 3329
ccuuucgugaaugacagua

SEQ ID NO: 258813 - RNA, 19 nt, Artificial Sequence
  Description of Artificial Sequence: Synthetic oligonucleotide
  Antisense strand to SEQ ID NO: 258812
uacugucauucacgaaagg

SEQ ID NO: 258814 - RNA, 19 nt, Artificial Sequence
  Description of Artificial Sequence: Synthetic oligonucleotide
  Sense strand starting at position 267 SEQ ID NO: 3329
cgugaaugacaguaacaau

SEQ ID NO: 258815 - RNA, 19 nt, Artificial Sequence
  Description of Artificial Sequence: Synthetic oligonucleotide
  Antisense strand to SEQ ID NO: 258814
auuguuacugucauucacg

SEQ ID NO: 258816 - RNA, 19 nt, Artificial Sequence
  Description of Artificial Sequence: Synthetic oligonucleotide
  Sense strand starting at position 425 SEQ ID NO: 3329
gucuguagucugguaacgu

SEQ ID NO: 258817 - RNA, 19 nt, Artificial Sequence
  Description of Artificial Sequence: Synthetic oligonucleotide
  Antisense strand to SEQ ID NO: 258816
acguuaccagacuacagac

SEQ ID NO: 258818 - RNA, 19 nt, Artificial Sequence
  Description of Artificial Sequence: Synthetic oligonucleotide
  Sense strand starting at position 1177 SEQ ID NO: 3329
agaccacucgguuggacau

SEQ ID NO: 258819 - RNA, 19 nt, Artificial Sequence
  Description of Artificial Sequence: Synthetic oligonucleotide
  Antisense strand to SEQ ID NO: 258818
auguccaaccgaguggucu

SEQ ID NO: 258820 - RNA, 19 nt, Artificial Sequence
  Description of Artificial Sequence: Synthetic oligonucleotide
  Sense strand starting at position 2101 SEQ ID NO: 3329
gcggcuuuccacgaggaca

SEQ ID NO: 258821 - RNA, 19 nt, Artificial Sequence
  Description of Artificial Sequence: Synthetic oligonucleotide
  Antisense strand to SEQ ID NO: 258820
uguccucguggaaagccgc

SEQ ID NO: 258822 - RNA, 19 nt, Artificial Sequence
  Description of Artificial Sequence: Synthetic oligonucleotide
  Sense strand starting at position 2125 SEQ ID NO: 3329
gcggguauccaucauauac

SEQ ID NO: 258823 - RNA, 19 nt, Artificial Sequence
  Description of Artificial Sequence: Synthetic oligonucleotide
  Antisense strand to SEQ ID NO: 258822
guauaugauggauacccgc

SEQ ID NO: 258824 - RNA, 19 nt, Artificial Sequence
  Description of Artificial Sequence: Synthetic oligonucleotide
  Sense strand starting at position 2144 SEQ ID NO: 3329
aggcaucucucaucgauuu

SEQ ID NO: 258825 - RNA, 19 nt, Artificial Sequence
  Description of Artificial Sequence: Synthetic oligonucleotide
  Antisense strand to SEQ ID NO: 258824
aaaucgaugagagaugccu

SEQ ID NO: 258826 - RNA, 19 nt, Artificial Sequence
  Description of Artificial Sequence: Synthetic oligonucleotide
  Sense strand starting at position 2196 SEQ ID NO: 3329
ccgggaaguucaucuguag

SEQ ID NO: 258827 - RNA, 19 nt, Artificial Sequence
  Description of Artificial Sequence: Synthetic oligonucleotide
  Antisense strand to SEQ ID NO: 258826
cuacagaugaacuucccgg

SEQ ID NO: 258828 - RNA, 19 nt, Artificial Sequence
  Description of Artificial Sequence: Synthetic oligonucleotide
  Sense strand starting at position 2199 SEQ ID NO: 3329
ggaaguucaucuguagaag

SEQ ID NO: 258829 - RNA, 19 nt, Artificial Sequence
  Description of Artificial Sequence: Synthetic oligonucleotide
  Antisense strand to SEQ ID NO: 258828
cuucuacagaugaacuucc

SEQ ID NO: 258830 - RNA, 19 nt, Artificial Sequence
  Description of Artificial Sequence: Synthetic oligonucleotide
  Sense strand starting at position 2273 SEQ ID NO: 3329
gggucacucuuaccaccua

SEQ ID NO: 258831 - RNA, 19 nt, Artificial Sequence
  Description of Artificial Sequence: Synthetic oligonucleotide
  Antisense strand to SEQ ID NO: 258830
uaggugguaagagugaccc

SEQ ID NO: 258832 - RNA, 19 nt, Artificial Sequence
  Description of Artificial Sequence: Synthetic oligonucleotide
  Sense strand starting at position 2331 SEQ ID NO: 3329
guuguauuuauguaggugu

SEQ ID NO: 258833 - RNA, 19 nt, Artificial Sequence
  Description of Artificial Sequence: Synthetic oligonucleotide
  Antisense strand to SEQ ID NO: 258832
acaccuacauaaauacaac

SEQ ID NO: 258834 - RNA, 19 nt, Artificial Sequence
  Description of Artificial Sequence: Synthetic oligonucleotide
  Sense strand starting at position 2334 SEQ ID NO: 3329
guauuuauguagguguaug

SEQ ID NO: 258835 - RNA, 19 nt, Artificial Sequence
  Description of Artificial Sequence: Synthetic oligonucleotide
  Antisense strand to SEQ ID NO: 258834
cauacaccuacauaaauac

SEQ ID NO: 258836 - RNA, 19 nt, Artificial Sequence
  Description of Artificial Sequence: Synthetic oligonucleotide
  Sense strand starting at position 2364 SEQ ID NO: 3329
uaacuaagguguuugauau

SEQ ID NO: 258837 - RNA, 19 nt, Artificial Sequence
  Description of Artificial Sequence: Synthetic oligonucleotide
  Antisense strand to SEQ ID NO: 258836
auaucaaacaccuuaguua

SEQ ID NO: 258838 - RNA, 19 nt, Artificial Sequence
  Description of Artificial Sequence: Synthetic oligonucleotide
  Sense strand starting at position 2365 SEQ ID NO: 3329
aacuaagguguuugauaua

SEQ ID NO: 258839 - RNA, 19 nt, Artificial Sequence
  Description of Artificial Sequence: Synthetic oligonucleotide
  Antisense strand to SEQ ID NO: 258838
uauaucaaacaccuuaguu

SEQ ID NO: 258840 - RNA, 19 nt, Artificial Sequence
  Description of Artificial Sequence: Synthetic oligonucleotide
  Sense strand starting at position 2377 SEQ ID NO: 3329
ugauauaacuagccucguu

SEQ ID NO: 258841 - RNA, 19 nt, Artificial Sequence
  Description of Artificial Sequence: Synthetic oligonucleotide
  Antisense strand to SEQ ID NO: 258840
aacgaggcuaguuauauca

SEQ ID NO: 258842 - RNA, 19 nt, Artificial Sequence
  Description of Artificial Sequence: Synthetic oligonucleotide
  Sense strand starting at position 2422 SEQ ID NO: 3329
caaggaguguaccuacgau

SEQ ID NO: 258843 - RNA, 19 nt, Artificial Sequence
  Description of Artificial Sequence: Synthetic oligonucleotide
  Antisense strand to SEQ ID NO: 258842
aucguagguacacuccuug

SEQ ID NO: 258844 - RNA, 19 nt, Artificial Sequence
  Description of Artificial Sequence: Synthetic oligonucleotide
  Sense strand starting at position 2429 SEQ ID NO: 3329
uguaccuacgauuauaaga

SEQ ID NO: 258845 - RNA, 19 nt, Artificial Sequence
  Description of Artificial Sequence: Synthetic oligonucleotide
  Antisense strand to SEQ ID NO: 258844
ucuuauaaucguagguaca

SEQ ID NO: 258846 - RNA, 19 nt, Artificial Sequence
  Description of Artificial Sequence: Synthetic oligonucleotide
  Sense strand starting at position 2445 SEQ ID NO: 3329
agagcuguugaaugugaac

SEQ ID NO: 258847 - RNA, 19 nt, Artificial Sequence
  Description of Artificial Sequence: Synthetic oligonucleotide
  Antisense strand to SEQ ID NO: 258846
guucacauucaacagcucu

SEQ ID NO: 258848 - RNA, 19 nt, Artificial Sequence
  Description of Artificial Sequence: Synthetic oligonucleotide
  Sense strand starting at position 2607 SEQ ID NO: 3329
gaggaaguguuauuguuac

SEQ ID NO: 258849 - RNA, 19 nt, Artificial Sequence
  Description of Artificial Sequence: Synthetic oligonucleotide
  Antisense strand to SEQ ID NO: 258848
guaacaauaacacuuccuc

SEQ ID NO: 258850 - RNA, 19 nt, Artificial Sequence
  Description of Artificial Sequence: Synthetic oligonucleotide
  Sense strand starting at position 2669 SEQ ID NO: 3329
gcauacauccaaugaaagu

SEQ ID NO: 258851 - RNA, 19 nt, Artificial Sequence
  Description of Artificial Sequence: Synthetic oligonucleotide
  Antisense strand to SEQ ID NO: 258850
acuuucauuggauguaugc

SEQ ID NO: 258852 - RNA, 19 nt, Artificial Sequence
  Description of Artificial Sequence: Synthetic oligonucleotide
  Sense strand starting at position 2730 SEQ ID NO: 3329
gguaccuccugccuauaau

SEQ ID NO: 258853 - RNA, 19 nt, Artificial Sequence
  Description of Artificial Sequence: Synthetic oligonucleotide
  Antisense strand to SEQ ID NO: 258852
auuauaggcaggagguacc

SEQ ID NO: 258854 - RNA, 19 nt, Artificial Sequence
  Description of Artificial Sequence: Synthetic oligonucleotide
  Sense strand starting at position 3073 SEQ ID NO: 3329
guagaugacuggcugucua

SEQ ID NO: 258855 - RNA, 19 nt, Artificial Sequence
  Description of Artificial Sequence: Synthetic oligonucleotide
  Antisense strand to SEQ ID NO: 258854
uagacagccagucaucuac

SEQ ID NO: 258856 - RNA, 19 nt, Artificial Sequence
  Description of Artificial Sequence: Synthetic oligonucleotide
  Sense strand starting at position 3077 SEQ ID NO: 3329
augacuggcugucuaguau

SEQ ID NO: 258857 - RNA, 19 nt, Artificial Sequence
  Description of Artificial Sequence: Synthetic oligonucleotide
  Antisense strand to SEQ ID NO: 258856
auacuagacagccagucau

SEQ ID NO: 258858 - RNA, 19 nt, Artificial Sequence
  Description of Artificial Sequence: Synthetic oligonucleotide
  Sense strand starting at position 3185 SEQ ID NO: 3329
uguccuaaagccuagucaa

SEQ ID NO: 258859 - RNA, 19 nt, Artificial Sequence
  Description of Artificial Sequence: Synthetic oligonucleotide
  Antisense strand to SEQ ID NO: 258858
uugacuaggcuuuaggaca

SEQ ID NO: 258860 - RNA, 19 nt, Artificial Sequence
  Description of Artificial Sequence: Synthetic oligonucleotide
  Sense strand starting at position 3717 SEQ ID NO: 3329
aggcuugagcucugauuac

SEQ ID NO: 258861 - RNA, 19 nt, Artificial Sequence
  Description of Artificial Sequence: Synthetic oligonucleotide
  Antisense strand to SEQ ID NO: 258860
guaaucagagcucaagccu

SEQ ID NO: 258862 - RNA, 19 nt, Artificial Sequence
  Description of Artificial Sequence: Synthetic oligonucleotide
  Sense strand starting at position 3742 SEQ ID NO: 3329
cuguucugacaguaccaaa

SEQ ID NO: 258863 - RNA, 19 nt, Artificial Sequence
  Description of Artificial Sequence: Synthetic oligonucleotide
  Antisense strand to SEQ ID NO: 258862
uuugguacugucagaacag

SEQ ID NO: 258864 - RNA, 19 nt, Artificial Sequence
  Description of Artificial Sequence: Synthetic oligonucleotide
  Sense strand starting at position 3762 SEQ ID NO: 3329
cucagugaucauugauaaa

SEQ ID NO: 258865 - RNA, 19 nt, Artificial Sequence
  Description of Artificial Sequence: Synthetic oligonucleotide
  Antisense strand to SEQ ID NO: 258864
uuuaucaaugaucacugag

SEQ ID NO: 258866 - RNA, 19 nt, Artificial Sequence
  Description of Artificial Sequence: Synthetic oligonucleotide
  Sense strand starting at position 3812 SEQ ID NO: 3329
aggaaacugcccuaagugu

SEQ ID NO: 258867 - RNA, 19 nt, Artificial Sequence
  Description of Artificial Sequence: Synthetic oligonucleotide
  Antisense strand to SEQ ID NO: 258866
acacuuagggcaguuuccu

SEQ ID NO: 258868 - RNA, 19 nt, Artificial Sequence
  Description of Artificial Sequence: Synthetic oligonucleotide
  Sense strand starting at position 3820 SEQ ID NO: 3329
gcccuaaguguuuauauga

SEQ ID NO: 258869 - RNA, 19 nt, Artificial Sequence
  Description of Artificial Sequence: Synthetic oligonucleotide
  Antisense strand to SEQ ID NO: 258868
ucauauaaacacuuagggc

SEQ ID NO: 258870 - RNA, 19 nt, Artificial Sequence
  Description of Artificial Sequence: Synthetic oligonucleotide
  Sense strand starting at position 3828 SEQ ID NO: 3329
uguuuauaugaugaugguu

SEQ ID NO: 258871 - RNA, 19 nt, Artificial Sequence
  Description of Artificial Sequence: Synthetic oligonucleotide
  Antisense strand to SEQ ID NO: 258870
aaccaucaucauauaaaca

SEQ ID NO: 258872 - RNA, 19 nt, Artificial Sequence
  Description of Artificial Sequence: Synthetic oligonucleotide
  Sense strand starting at position 3833 SEQ ID NO: 3329
auaugaugaugguucuuau

SEQ ID NO: 258873 - RNA, 19 nt, Artificial Sequence
  Description of Artificial Sequence: Synthetic oligonucleotide
  Antisense strand to SEQ ID NO: 258872
auaagaaccaucaucauau

SEQ ID NO: 258874 - RNA, 19 nt, Artificial Sequence
  Description of Artificial Sequence: Synthetic oligonucleotide
  Sense strand starting at position 3836 SEQ ID NO: 3329
ugaugaugguucuuauggu

SEQ ID NO: 258875 - RNA, 19 nt, Artificial Sequence
  Description of Artificial Sequence: Synthetic oligonucleotide
  Antisense strand to SEQ ID NO: 258874
accauaagaaccaucauca

SEQ ID NO: 258876 - RNA, 19 nt, Artificial Sequence
  Description of Artificial Sequence: Synthetic oligonucleotide
  Sense strand starting at position 3967 SEQ ID NO: 3329
auuagaaagucagauuuga

SEQ ID NO: 258877 - RNA, 19 nt, Artificial Sequence
  Description of Artificial Sequence: Synthetic oligonucleotide
  Antisense strand to SEQ ID NO: 258876
ucaaaucugacuuucuaau

SEQ ID NO: 258878 - RNA, 19 nt, Artificial Sequence
  Description of Artificial Sequence: Synthetic oligonucleotide
  Sense strand starting at position 177 SEQ ID NO: 3330
uuugcagcagauuaugaaa

SEQ ID NO: 258879 - RNA, 19 nt, Artificial Sequence
  Description of Artificial Sequence: Synthetic oligonucleotide
  Antisense strand to SEQ ID NO: 258878
uuucauaaucugcugcaaa

SEQ ID NO: 258880 - RNA, 19 nt, Artificial Sequence
  Description of Artificial Sequence: Synthetic oligonucleotide
  Sense strand starting at position 207 SEQ ID NO: 3330
cagaaaugcugaggaauuu

SEQ ID NO: 258881 - RNA, 19 nt, Artificial Sequence
  Description of Artificial Sequence: Synthetic oligonucleotide
  Antisense strand to SEQ ID NO: 258880
aaauuccucagcauuucug

SEQ ID NO: 258882 - RNA, 19 nt, Artificial Sequence
  Description of Artificial Sequence: Synthetic oligonucleotide
  Sense strand starting at position 273 SEQ ID NO: 3330
guucuuugccuggcucuua

SEQ ID NO: 258883 - RNA, 19 nt, Artificial Sequence
  Description of Artificial Sequence: Synthetic oligonucleotide
  Antisense strand to SEQ ID NO: 258882
uaagagccaggcaaagaac

SEQ ID NO: 258884 - RNA, 19 nt, Artificial Sequence
  Description of Artificial Sequence: Synthetic oligonucleotide
  Sense strand starting at position 360 SEQ ID NO: 3330
gggugcacuguuuaagaau

SEQ ID NO: 258885 - RNA, 19 nt, Artificial Sequence
  Description of Artificial Sequence: Synthetic oligonucleotide
  Antisense strand to SEQ ID NO: 258884
auucuuaaacagugcaccc

SEQ ID NO: 258886 - RNA, 19 nt, Artificial Sequence
  Description of Artificial Sequence: Synthetic oligonucleotide
  Sense strand starting at position 454 SEQ ID NO: 3330
cugagcuuuccagguauuc

SEQ ID NO: 258887 - RNA, 19 nt, Artificial Sequence
  Description of Artificial Sequence: Synthetic oligonucleotide
  Antisense strand to SEQ ID NO: 258886
gaauaccuggaaagcucag

SEQ ID NO: 258888 - RNA, 19 nt, Artificial Sequence
  Description of Artificial Sequence: Synthetic oligonucleotide
  Sense strand starting at position 495 SEQ ID NO: 3330
auaggugaaggcuagucaa

SEQ ID NO: 258889 - RNA, 19 nt, Artificial Sequence
  Description of Artificial Sequence: Synthetic oligonucleotide
  Antisense strand to SEQ ID NO: 258888
uugacuagccuucaccuau

SEQ ID NO: 258890 - RNA, 19 nt, Artificial Sequence
  Description of Artificial Sequence: Synthetic oligonucleotide
  Sense strand starting at position 498 SEQ ID NO: 3330
ggugaaggcuagucaagug

SEQ ID NO: 258891 - RNA, 19 nt, Artificial Sequence
  Description of Artificial Sequence: Synthetic oligonucleotide
  Antisense strand to SEQ ID NO: 258890
cacuugacuagccuucacc

SEQ ID NO: 258892 - RNA, 19 nt, Artificial Sequence
  Description of Artificial Sequence: Synthetic oligonucleotide
  Sense strand starting at position 510 SEQ ID NO: 3330
ucaagugcauucucgauca

SEQ ID NO: 258893 - RNA, 19 nt, Artificial Sequence
  Description of Artificial Sequence: Synthetic oligonucleotide
  Antisense strand to SEQ ID NO: 258892
ugaucgagaaugcacuuga

SEQ ID NO: 258894 - RNA, 19 nt, Artificial Sequence
  Description of Artificial Sequence: Synthetic oligonucleotide
  Sense strand starting at position 512 SEQ ID NO: 3330
aagugcauucucgaucaaa

SEQ ID NO: 258895 - RNA, 19 nt, Artificial Sequence
  Description of Artificial Sequence: Synthetic oligonucleotide
  Antisense strand to SEQ ID NO: 258894
uuugaucgagaaugcacuu

SEQ ID NO: 258896 - RNA, 19 nt, Artificial Sequence
  Description of Artificial Sequence: Synthetic oligonucleotide
  Sense strand starting at position 542 SEQ ID NO: 3330
cuacaugcugaauggaaau

SEQ ID NO: 258897 - RNA, 19 nt, Artificial Sequence
  Description of Artificial Sequence: Synthetic oligonucleotide
  Antisense strand to SEQ ID NO: 258896
auuuccauucagcauguag

SEQ ID NO: 258898 - RNA, 19 nt, Artificial Sequence
  Description of Artificial Sequence: Synthetic oligonucleotide
  Sense strand starting at position 582 SEQ ID NO: 3330
aaauacuuggaauguguuu

SEQ ID NO: 258899 - RNA, 19 nt, Artificial Sequence
  Description of Artificial Sequence: Synthetic oligonucleotide
  Antisense strand to SEQ ID NO: 258898
aaacacauuccaaguauuu

SEQ ID NO: 258900 - RNA, 19 nt, Artificial Sequence
  Description of Artificial Sequence: Synthetic oligonucleotide
  Sense strand starting at position 591 SEQ ID NO: 3330
gaauguguuuauuuagcau

SEQ ID NO: 258901 - RNA, 19 nt, Artificial Sequence
  Description of Artificial Sequence: Synthetic oligonucleotide
  Antisense strand to SEQ ID NO: 258900
augcuaaauaaacacauuc

SEQ ID NO: 258902 - RNA, 19 nt, Artificial Sequence
  Description of Artificial Sequence: Synthetic oligonucleotide
  Sense strand starting at position 631 SEQ ID NO: 3330
uggguaaagccugguaagu

SEQ ID NO: 258903 - RNA, 19 nt, Artificial Sequence
  Description of Artificial Sequence: Synthetic oligonucleotide
  Antisense strand to SEQ ID NO: 258902
acuuaccaggcuuuaccca

SEQ ID NO: 258904 - RNA, 19 nt, Artificial Sequence
  Description of Artificial Sequence: Synthetic oligonucleotide
  Sense strand starting at position 665 SEQ ID NO: 3330
caagaagugcaucagcgau

SEQ ID NO: 258905 - RNA, 19 nt, Artificial Sequence
  Description of Artificial Sequence: Synthetic oligonucleotide
  Antisense strand to SEQ ID NO: 258904
aucgcugaugcacuucuug

SEQ ID NO: 258906 - RNA, 19 nt, Artificial Sequence
  Description of Artificial Sequence: Synthetic oligonucleotide
  Sense strand starting at position 672 SEQ ID NO: 3330
ugcaucagcgaucaaacuu

SEQ ID NO: 258907 - RNA, 19 nt, Artificial Sequence
  Description of Artificial Sequence: Synthetic oligonucleotide
  Antisense strand to SEQ ID NO: 258906
aaguuugaucgcugaugca

SEQ ID NO: 258908 - RNA, 19 nt, Artificial Sequence
  Description of Artificial Sequence: Synthetic oligonucleotide
  Sense strand starting at position 679 SEQ ID NO: 3330
gcgaucaaacuugaaaucu

SEQ ID NO: 258909 - RNA, 19 nt, Artificial Sequence
  Description of Artificial Sequence: Synthetic oligonucleotide
  Antisense strand to SEQ ID NO: 258908
agauuucaaguuugaucgc

SEQ ID NO: 258910 - RNA, 19 nt, Artificial Sequence
  Description of Artificial Sequence: Synthetic oligonucleotide
  Sense strand starting at position 1114 SEQ ID NO: 3330
gcugaauccagauaaacgu

SEQ ID NO: 258911 - RNA, 19 nt, Artificial Sequence
  Description of Artificial Sequence: Synthetic oligonucleotide
  Antisense strand to SEQ ID NO: 258910
acguuuaucuggauucagc

SEQ ID NO: 258912 - RNA, 19 nt, Artificial Sequence
  Description of Artificial Sequence: Synthetic oligonucleotide
  Sense strand starting at position 1425 SEQ ID NO: 3330
ugcaacucuaguggaaagu

SEQ ID NO: 258913 - RNA, 19 nt, Artificial Sequence
  Description of Artificial Sequence: Synthetic oligonucleotide
  Antisense strand to SEQ ID NO: 258912
acuuuccacuagaguugca

SEQ ID NO: 258914 - RNA, 19 nt, Artificial Sequence
  Description of Artificial Sequence: Synthetic oligonucleotide
  Sense strand starting at position 1426 SEQ ID NO: 3330
gcaacucuaguggaaaguu

SEQ ID NO: 258915 - RNA, 19 nt, Artificial Sequence
  Description of Artificial Sequence: Synthetic oligonucleotide
  Antisense strand to SEQ ID NO: 258914
aacuuuccacuagaguugc

SEQ ID NO: 258916 - RNA, 19 nt, Artificial Sequence
  Description of Artificial Sequence: Synthetic oligonucleotide
  Sense strand starting at position 1690 SEQ ID NO: 3330
gguggaggguguuugcaaa

SEQ ID NO: 258917 - RNA, 19 nt, Artificial Sequence
  Description of Artificial Sequence: Synthetic oligonucleotide
  Antisense strand to SEQ ID NO: 258916
uuugcaaacacccuccacc

SEQ ID NO: 258918 - RNA, 19 nt, Artificial Sequence
  Description of Artificial Sequence: Synthetic oligonucleotide
  Sense strand starting at position 2837 SEQ ID NO: 3330
cagagagugagucguaaga

SEQ ID NO: 258919 - RNA, 19 nt, Artificial Sequence
  Description of Artificial Sequence: Synthetic oligonucleotide
  Antisense strand to SEQ ID NO: 258918
ucuuacgacucacucucug

SEQ ID NO: 258920 - RNA, 19 nt, Artificial Sequence
  Description of Artificial Sequence: Synthetic oligonucleotide
  Sense strand starting at position 2848 SEQ ID NO: 3330
ucguaagagaaauguaacu

SEQ ID NO: 258921 - RNA, 19 nt, Artificial Sequence
  Description of Artificial Sequence: Synthetic oligonucleotide
  Antisense strand to SEQ ID NO: 258920
aguuacauuucucuuacga

SEQ ID NO: 258922 - RNA, 19 nt, Artificial Sequence
  Description of Artificial Sequence: Synthetic oligonucleotide
  Sense strand starting at position 2861 SEQ ID NO: 3330
guaacuacuuacgcuaaua

SEQ ID NO: 258923 - RNA, 19 nt, Artificial Sequence
  Description of Artificial Sequence: Synthetic oligonucleotide
  Antisense strand to SEQ ID NO: 258922
uauuagcguaaguaguuac

SEQ ID NO: 258924 - RNA, 19 nt, Artificial Sequence
  Description of Artificial Sequence: Synthetic oligonucleotide
  Sense strand starting at position 2881 SEQ ID NO: 3330
uggcaacaguaacuuaauu

SEQ ID NO: 258925 - RNA, 19 nt, Artificial Sequence
  Description of Artificial Sequence: Synthetic oligonucleotide
  Antisense strand to SEQ ID NO: 258924
aauuaaguuacuguugcca

SEQ ID NO: 258926 - RNA, 19 nt, Artificial Sequence
  Description of Artificial Sequence: Synthetic oligonucleotide
  Sense strand starting at position 3223 SEQ ID NO: 3330
uggguuuagacagguuauu

SEQ ID NO: 258927 - RNA, 19 nt, Artificial Sequence
  Description of Artificial Sequence: Synthetic oligonucleotide
  Antisense strand to SEQ ID NO: 258926
aauaaccugucuaaaccca

SEQ ID NO: 258928 - RNA, 19 nt, Artificial Sequence
  Description of Artificial Sequence: Synthetic oligonucleotide
  Sense strand starting at position 3228 SEQ ID NO: 3330
uuagacagguuauuacuua

SEQ ID NO: 258929 - RNA, 19 nt, Artificial Sequence
  Description of Artificial Sequence: Synthetic oligonucleotide
  Antisense strand to SEQ ID NO: 258928
uaaguaauaaccugucuaa

SEQ ID NO: 258930 - RNA, 19 nt, Artificial Sequence
  Description of Artificial Sequence: Synthetic oligonucleotide
  Sense strand starting at position 3291 SEQ ID NO: 3330
uccuuaggccuacaagaua

SEQ ID NO: 258931 - RNA, 19 nt, Artificial Sequence
  Description of Artificial Sequence: Synthetic oligonucleotide
  Antisense strand to SEQ ID NO: 258930
uaucuuguaggccuaagga

SEQ ID NO: 258932 - RNA, 19 nt, Artificial Sequence
  Description of Artificial Sequence: Synthetic oligonucleotide
  Sense strand starting at position 3318 SEQ ID NO: 3330
cuggaagggucaguguuau

SEQ ID NO: 258933 - RNA, 19 nt, Artificial Sequence
  Description of Artificial Sequence: Synthetic oligonucleotide
  Antisense strand to SEQ ID NO: 258932
auaacacugacccuuccag

SEQ ID NO: 258934 - RNA, 19 nt, Artificial Sequence
  Description of Artificial Sequence: Synthetic oligonucleotide
  Sense strand starting at position 3324 SEQ ID NO: 3330
gggucaguguuauccuaug

SEQ ID NO: 258935 - RNA, 19 nt, Artificial Sequence
  Description of Artificial Sequence: Synthetic oligonucleotide
  Antisense strand to SEQ ID NO: 258934
cauaggauaacacugaccc

SEQ ID NO: 258936 - RNA, 19 nt, Artificial Sequence
  Description of Artificial Sequence: Synthetic oligonucleotide
  Sense strand starting at position 3329 SEQ ID NO: 3330
aguguuauccuaugggucu

SEQ ID NO: 258937 - RNA, 19 nt, Artificial Sequence
  Description of Artificial Sequence: Synthetic oligonucleotide
  Antisense strand to SEQ ID NO: 258936
agacccauaggauaacacu

SEQ ID NO: 258938 - RNA, 19 nt, Artificial Sequence
  Description of Artificial Sequence: Synthetic oligonucleotide
  Sense strand starting at position 3414 SEQ ID NO: 3330
aguagccaagucuaaauua

SEQ ID NO: 258939 - RNA, 19 nt, Artificial Sequence
  Description of Artificial Sequence: Synthetic oligonucleotide
  Antisense strand to SEQ ID NO: 258938
uaauuuagacuuggcuacu

SEQ ID NO: 258940 - RNA, 19 nt, Artificial Sequence
  Description of Artificial Sequence: Synthetic oligonucleotide
  Sense strand starting at position 3515 SEQ ID NO: 3330
uggaaaguccugcagucaa

SEQ ID NO: 258941 - RNA, 19 nt, Artificial Sequence
  Description of Artificial Sequence: Synthetic oligonucleotide
  Antisense strand to SEQ ID NO: 258940
uugacugcaggacuuucca

SEQ ID NO: 258942 - RNA, 19 nt, Artificial Sequence
  Description of Artificial Sequence: Synthetic oligonucleotide
  Sense strand starting at position 3675 SEQ ID NO: 3330
gggucagaccguggucaua

SEQ ID NO: 258943 - RNA, 19 nt, Artificial Sequence
  Description of Artificial Sequence: Synthetic oligonucleotide
  Antisense strand to SEQ ID NO: 258942
uaugaccacggucugaccc

SEQ ID NO: 258944 - RNA, 19 nt, Artificial Sequence
  Description of Artificial Sequence: Synthetic oligonucleotide
  Sense strand starting at position 3687 SEQ ID NO: 3330
ggucauaccuugccuacau

SEQ ID NO: 258945 - RNA, 19 nt, Artificial Sequence
  Description of Artificial Sequence: Synthetic oligonucleotide
  Antisense strand to SEQ ID NO: 258944
auguaggcaagguaugacc

SEQ ID NO: 258946 - RNA, 19 nt, Artificial Sequence
  Description of Artificial Sequence: Synthetic oligonucleotide
  Sense strand starting at position 3699 SEQ ID NO: 3330
ccuacauggccucgagaga

SEQ ID NO: 258947 - RNA, 19 nt, Artificial Sequence
  Description of Artificial Sequence: Synthetic oligonucleotide
  Antisense strand to SEQ ID NO: 258946
ucucucgaggccauguagg

SEQ ID NO: 258948 - RNA, 19 nt, Artificial Sequence
  Description of Artificial Sequence: Synthetic oligonucleotide
  Sense strand starting at position 3700 SEQ ID NO: 3330
cuacauggccucgagagau

SEQ ID NO: 258949 - RNA, 19 nt, Artificial Sequence
  Description of Artificial Sequence: Synthetic oligonucleotide
  Antisense strand to SEQ ID NO: 258948
aucucucgaggccauguag

SEQ ID NO: 258950 - RNA, 19 nt, Artificial Sequence
  Description of Artificial Sequence: Synthetic oligonucleotide
  Sense strand starting at position 3708 SEQ ID NO: 3330
ccucgagagaugugcaaga

SEQ ID NO: 258951 - RNA, 19 nt, Artificial Sequence
  Description of Artificial Sequence: Synthetic oligonucleotide
  Antisense strand to SEQ ID NO: 258950
ucuugcacaucucucgagg

SEQ ID NO: 258952 - RNA, 19 nt, Artificial Sequence
  Description of Artificial Sequence: Synthetic oligonucleotide
  Sense strand starting at position 3710 SEQ ID NO: 3330
ucgagagaugugcaagauu

SEQ ID NO: 258953 - RNA, 19 nt, Artificial Sequence
  Description of Artificial Sequence: Synthetic oligonucleotide
  Antisense strand to SEQ ID NO: 258952
aaucuugcacaucucucga

SEQ ID NO: 258954 - RNA, 19 nt, Artificial Sequence
  Description of Artificial Sequence: Synthetic oligonucleotide
  Sense strand starting at position 3823 SEQ ID NO: 3330
guucucucugccugaaaug

SEQ ID NO: 258955 - RNA, 19 nt, Artificial Sequence
  Description of Artificial Sequence: Synthetic oligonucleotide
  Antisense strand to SEQ ID NO: 258954
cauuucaggcagagagaac

SEQ ID NO: 258956 - RNA, 19 nt, Artificial Sequence
  Description of Artificial Sequence: Synthetic oligonucleotide
  Sense strand starting at position 3942 SEQ ID NO: 3330
ucuaccgguguuugauaua

SEQ ID NO: 258957 - RNA, 19 nt, Artificial Sequence
  Description of Artificial Sequence: Synthetic oligonucleotide
  Antisense strand to SEQ ID NO: 258956
uauaucaaacaccgguaga

SEQ ID NO: 258958 - RNA, 19 nt, Artificial Sequence
  Description of Artificial Sequence: Synthetic oligonucleotide
  Sense strand starting at position 266 SEQ ID NO: 3331
acugaagucuauucgauua

SEQ ID NO: 258959 - RNA, 19 nt, Artificial Sequence
  Description of Artificial Sequence: Synthetic oligonucleotide
  Antisense strand to SEQ ID NO: 258958
uaaucgaauagacuucagu

SEQ ID NO: 258960 - RNA, 19 nt, Artificial Sequence
  Description of Artificial Sequence: Synthetic oligonucleotide
  Sense strand starting at position 271 SEQ ID NO: 3331
agucuauucgauuaccaac

SEQ ID NO: 258961 - RNA, 19 nt, Artificial Sequence
  Description of Artificial Sequence: Synthetic oligonucleotide
  Antisense strand to SEQ ID NO: 258960
guugguaaucgaauagacu

SEQ ID NO: 258962 - RNA, 19 nt, Artificial Sequence
  Description of Artificial Sequence: Synthetic oligonucleotide
  Sense strand starting at position 719 SEQ ID NO: 3331
ucaugcaguaccgagaaau

SEQ ID NO: 258963 - RNA, 19 nt, Artificial Sequence
  Description of Artificial Sequence: Synthetic oligonucleotide
  Antisense strand to SEQ ID NO: 258962
auuucucgguacugcauga

SEQ ID NO: 258964 - RNA, 19 nt, Artificial Sequence
  Description of Artificial Sequence: Synthetic oligonucleotide
  Sense strand starting at position 1123 SEQ ID NO: 3331
cacaguaucguguacuuaa

SEQ ID NO: 258965 - RNA, 19 nt, Artificial Sequence
  Description of Artificial Sequence: Synthetic oligonucleotide
  Antisense strand to SEQ ID NO: 258964
uuaaguacacgauacugug

SEQ ID NO: 258966 - RNA, 19 nt, Artificial Sequence
  Description of Artificial Sequence: Synthetic oligonucleotide
  Sense strand starting at position 1432 SEQ ID NO: 3331
acuuuaagucacuggaaga

SEQ ID NO: 258967 - RNA, 19 nt, Artificial Sequence
  Description of Artificial Sequence: Synthetic oligonucleotide
  Antisense strand to SEQ ID NO: 258966
ucuuccagugacuuaaagu

SEQ ID NO: 258968 - RNA, 19 nt, Artificial Sequence
  Description of Artificial Sequence: Synthetic oligonucleotide
  Sense strand starting at position 1566 SEQ ID NO: 3331
agaauaaauguugguuaca

SEQ ID NO: 258969 - RNA, 19 nt, Artificial Sequence
  Description of Artificial Sequence: Synthetic oligonucleotide
  Antisense strand to SEQ ID NO: 258968
uguaaccaacauuuauucu

SEQ ID NO: 258970 - RNA, 19 nt, Artificial Sequence
  Description of Artificial Sequence: Synthetic oligonucleotide
  Sense strand starting at position 1567 SEQ ID NO: 3331
gaauaaauguugguuacac

SEQ ID NO: 258971 - RNA, 19 nt, Artificial Sequence
  Description of Artificial Sequence: Synthetic oligonucleotide
  Antisense strand to SEQ ID NO: 258970
guguaaccaacauuuauuc

SEQ ID NO: 258972 - RNA, 19 nt, Artificial Sequence
  Description of Artificial Sequence: Synthetic oligonucleotide
  Sense strand starting at position 1631 SEQ ID NO: 3331
cgcaaaucucaaggaguaa

SEQ ID NO: 258973 - RNA, 19 nt, Artificial Sequence
  Description of Artificial Sequence: Synthetic oligonucleotide
  Antisense strand to SEQ ID NO: 258972
uuacuccuugagauuugcg

SEQ ID NO: 258974 - RNA, 19 nt, Artificial Sequence
  Description of Artificial Sequence: Synthetic oligonucleotide
  Sense strand starting at position 1752 SEQ ID NO: 3331
gcguguguucguaaacacu

SEQ ID NO: 258975 - RNA, 19 nt, Artificial Sequence
  Description of Artificial Sequence: Synthetic oligonucleotide
  Antisense strand to SEQ ID NO: 258974
aguguuuacgaacacacgc

SEQ ID NO: 258976 - RNA, 19 nt, Artificial Sequence
  Description of Artificial Sequence: Synthetic oligonucleotide
  Sense strand starting at position 1755 SEQ ID NO: 3331
uguguucguaaacacugaa

SEQ ID NO: 258977 - RNA, 19 nt, Artificial Sequence
  Description of Artificial Sequence: Synthetic oligonucleotide
  Antisense strand to SEQ ID NO: 258976
uucaguguuuacgaacaca

SEQ ID NO: 258978 - RNA, 19 nt, Artificial Sequence
  Description of Artificial Sequence: Synthetic oligonucleotide
  Sense strand starting at position 2357 SEQ ID NO: 3331
cuggauucaguugaaaggu

SEQ ID NO: 258979 - RNA, 19 nt, Artificial Sequence
  Description of Artificial Sequence: Synthetic oligonucleotide
  Antisense strand to SEQ ID NO: 258978
accuuucaacugaauccag

SEQ ID NO: 258980 - RNA, 19 nt, Artificial Sequence
  Description of Artificial Sequence: Synthetic oligonucleotide
  Sense strand starting at position 2406 SEQ ID NO: 3331
uuugcugucccagaaucua

SEQ ID NO: 258981 - RNA, 19 nt, Artificial Sequence
  Description of Artificial Sequence: Synthetic oligonucleotide
  Antisense strand to SEQ ID NO: 258980
uagauucugggacagcaaa

SEQ ID NO: 258982 - RNA, 19 nt, Artificial Sequence
  Description of Artificial Sequence: Synthetic oligonucleotide
  Sense strand starting at position 2422 SEQ ID NO: 3331
cuacauuacucagcagaga

SEQ ID NO: 258983 - RNA, 19 nt, Artificial Sequence
  Description of Artificial Sequence: Synthetic oligonucleotide
  Antisense strand to SEQ ID NO: 258982
ucucugcugaguaauguag

SEQ ID NO: 258984 - RNA, 19 nt, Artificial Sequence
  Description of Artificial Sequence: Synthetic oligonucleotide
  Sense strand starting at position 2497 SEQ ID NO: 3331
ggguauguucaggagacuu

SEQ ID NO: 258985 - RNA, 19 nt, Artificial Sequence
  Description of Artificial Sequence: Synthetic oligonucleotide
  Antisense strand to SEQ ID NO: 258984
aagucuccugaacauaccc

SEQ ID NO: 258986 - RNA, 19 nt, Artificial Sequence
  Description of Artificial Sequence: Synthetic oligonucleotide
  Sense strand starting at position 2508 SEQ ID NO: 3331
ggagacuucucuuucucca

SEQ ID NO: 258987 - RNA, 19 nt, Artificial Sequence
  Description of Artificial Sequence: Synthetic oligonucleotide
  Antisense strand to SEQ ID NO: 258986
uggagaaagagaagucucc

SEQ ID NO: 258988 - RNA, 19 nt, Artificial Sequence
  Description of Artificial Sequence: Synthetic oligonucleotide
  Sense strand starting at position 2545 SEQ ID NO: 3331
caguauuaacuggagucuu

SEQ ID NO: 258989 - RNA, 19 nt, Artificial Sequence
  Description of Artificial Sequence: Synthetic oligonucleotide
  Antisense strand to SEQ ID NO: 258988
aagacuccaguuaauacug

SEQ ID NO: 258990 - RNA, 19 nt, Artificial Sequence
  Description of Artificial Sequence: Synthetic oligonucleotide
  Sense strand starting at position 2565 SEQ ID NO: 3331
auccuaaauuuggaguuua

SEQ ID NO: 258991 - RNA, 19 nt, Artificial Sequence
  Description of Artificial Sequence: Synthetic oligonucleotide
  Antisense strand to SEQ ID NO: 258990
uaaacuccaaauuuaggau

SEQ ID NO: 258992 - RNA, 19 nt, Artificial Sequence
  Description of Artificial Sequence: Synthetic oligonucleotide
  Sense strand starting at position 2609 SEQ ID NO: 3331
uugcauugccaagagaaga

SEQ ID NO: 258993 - RNA, 19 nt, Artificial Sequence
  Description of Artificial Sequence: Synthetic oligonucleotide
  Antisense strand to SEQ ID NO: 258992
ucuucucuuggcaaugcaa

SEQ ID NO: 258994 - RNA, 19 nt, Artificial Sequence
  Description of Artificial Sequence: Synthetic oligonucleotide
  Sense strand starting at position 2654 SEQ ID NO: 3331
agaugagggagcugaugua

SEQ ID NO: 258995 - RNA, 19 nt, Artificial Sequence
  Description of Artificial Sequence: Synthetic oligonucleotide
  Antisense strand to SEQ ID NO: 258994
uacaucagcucccucaucu

SEQ ID NO: 258996 - RNA, 19 nt, Artificial Sequence
  Description of Artificial Sequence: Synthetic oligonucleotide
  Sense strand starting at position 2811 SEQ ID NO: 3331
aggaaugucaggugaagca

SEQ ID NO: 258997 - RNA, 19 nt, Artificial Sequence
  Description of Artificial Sequence: Synthetic oligonucleotide
  Antisense strand to SEQ ID NO: 258996
ugcuucaccugacauuccu

SEQ ID NO: 258998 - RNA, 19 nt, Artificial Sequence
  Description of Artificial Sequence: Synthetic oligonucleotide
  Sense strand starting at position 2827 SEQ ID NO: 3331
gcaauugaacacugcauga

SEQ ID NO: 258999 - RNA, 19 nt, Artificial Sequence
  Description of Artificial Sequence: Synthetic oligonucleotide
  Antisense strand to SEQ ID NO: 258998
ucaugcaguguucaauugc

SEQ ID NO: 259000 - RNA, 19 nt, Artificial Sequence
  Description of Artificial Sequence: Synthetic oligonucleotide
  Sense strand starting at position 2880 SEQ ID NO: 3331
cuuuaaaugcagugaagau

SEQ ID NO: 259001 - RNA, 19 nt, Artificial Sequence
  Description of Artificial Sequence: Synthetic oligonucleotide
  Antisense strand to SEQ ID NO: 259000
aucuucacugcauuuaaag

SEQ ID NO: 259002 - RNA, 19 nt, Artificial Sequence
  Description of Artificial Sequence: Synthetic oligonucleotide
  Sense strand starting at position 2899 SEQ ID NO: 3331
ugauuaggauucucaguga

SEQ ID NO: 259003 - RNA, 19 nt, Artificial Sequence
  Description of Artificial Sequence: Synthetic oligonucleotide
  Antisense strand to SEQ ID NO: 259002
ucacugagaauccuaauca

SEQ ID NO: 259004 - RNA, 19 nt, Artificial Sequence
  Description of Artificial Sequence: Synthetic oligonucleotide
  Sense strand starting at position 2902 SEQ ID NO: 3331
uuaggauucucagugaaug

SEQ ID NO: 259005 - RNA, 19 nt, Artificial Sequence
  Description of Artificial Sequence: Synthetic oligonucleotide
  Antisense strand to SEQ ID NO: 259004
cauucacugagaauccuaa

SEQ ID NO: 259006 - RNA, 19 nt, Artificial Sequence
  Description of Artificial Sequence: Synthetic oligonucleotide
  Sense strand starting at position 2903 SEQ ID NO: 3331
uaggauucucagugaaugu

SEQ ID NO: 259007 - RNA, 19 nt, Artificial Sequence
  Description of Artificial Sequence: Synthetic oligonucleotide
  Antisense strand to SEQ ID NO: 259006
acauucacugagaauccua

SEQ ID NO: 259008 - RNA, 19 nt, Artificial Sequence
  Description of Artificial Sequence: Synthetic oligonucleotide
  Sense strand starting at position 2904 SEQ ID NO: 3331
aggauucucagugaaugug

SEQ ID NO: 259009 - RNA, 19 nt, Artificial Sequence
  Description of Artificial Sequence: Synthetic oligonucleotide
  Antisense strand to SEQ ID NO: 259008
cacauucacugagaauccu

SEQ ID NO: 259010 - RNA, 19 nt, Artificial Sequence
  Description of Artificial Sequence: Synthetic oligonucleotide
  Sense strand starting at position 3067 SEQ ID NO: 3331
gugugcucaauugagaucu

SEQ ID NO: 259011 - RNA, 19 nt, Artificial Sequence
  Description of Artificial Sequence: Synthetic oligonucleotide
  Antisense strand to SEQ ID NO: 259010
agaucucaauugagcacac

SEQ ID NO: 259012 - RNA, 19 nt, Artificial Sequence
  Description of Artificial Sequence: Synthetic oligonucleotide
  Sense strand starting at position 3267 SEQ ID NO: 3331
ggacacaugcuauaauucu

SEQ ID NO: 259013 - RNA, 19 nt, Artificial Sequence
  Description of Artificial Sequence: Synthetic oligonucleotide
  Antisense strand to SEQ ID NO: 259012
agaauuauagcaugugucc

SEQ ID NO: 259014 - RNA, 19 nt, Artificial Sequence
  Description of Artificial Sequence: Synthetic oligonucleotide
  Sense strand starting at position 3338 SEQ ID NO: 3331
aaugcuuuccaucagggua

SEQ ID NO: 259015 - RNA, 19 nt, Artificial Sequence
  Description of Artificial Sequence: Synthetic oligonucleotide
  Antisense strand to SEQ ID NO: 259014
uacccugauggaaagcauu

SEQ ID NO: 259016 - RNA, 19 nt, Artificial Sequence
  Description of Artificial Sequence: Synthetic oligonucleotide
  Sense strand starting at position 3341 SEQ ID NO: 3331
gcuuuccaucaggguaaau

SEQ ID NO: 259017 - RNA, 19 nt, Artificial Sequence
  Description of Artificial Sequence: Synthetic oligonucleotide
  Antisense strand to SEQ ID NO: 259016
auuuacccugauggaaagc

SEQ ID NO: 259018 - RNA, 19 nt, Artificial Sequence
  Description of Artificial Sequence: Synthetic oligonucleotide
  Sense strand starting at position 3352 SEQ ID NO: 3331
ggguaaauaagaugcacaa

SEQ ID NO: 259019 - RNA, 19 nt, Artificial Sequence
  Description of Artificial Sequence: Synthetic oligonucleotide
  Antisense strand to SEQ ID NO: 259018
uugugcaucuuauuuaccc

SEQ ID NO: 259020 - RNA, 19 nt, Artificial Sequence
  Description of Artificial Sequence: Synthetic oligonucleotide
  Sense strand starting at position 3718 SEQ ID NO: 3331
aguggaauccagugaggaa

SEQ ID NO: 259021 - RNA, 19 nt, Artificial Sequence
  Description of Artificial Sequence: Synthetic oligonucleotide
  Antisense strand to SEQ ID NO: 259020
uuccucacuggauuccacu

SEQ ID NO: 259022 - RNA, 19 nt, Artificial Sequence
  Description of Artificial Sequence: Synthetic oligonucleotide
  Sense strand starting at position 3741 SEQ ID NO: 3331
ucaauaaguucggcaugga

SEQ ID NO: 259023 - RNA, 19 nt, Artificial Sequence
  Description of Artificial Sequence: Synthetic oligonucleotide
  Antisense strand to SEQ ID NO: 259022
uccaugccgaacuuauuga

SEQ ID NO: 259024 - RNA, 19 nt, Artificial Sequence
  Description of Artificial Sequence: Synthetic oligonucleotide
  Sense strand starting at position 3742 SEQ ID NO: 3331
caauaaguucggcauggaa

SEQ ID NO: 259025 - RNA, 19 nt, Artificial Sequence
  Description of Artificial Sequence: Synthetic oligonucleotide
  Antisense strand to SEQ ID NO: 259024
uuccaugccgaacuuauug

SEQ ID NO: 259026 - RNA, 19 nt, Artificial Sequence
  Description of Artificial Sequence: Synthetic oligonucleotide
  Sense strand starting at position 3744 SEQ ID NO: 3331
auaaguucggcauggaaug

SEQ ID NO: 259027 - RNA, 19 nt, Artificial Sequence
  Description of Artificial Sequence: Synthetic oligonucleotide
  Antisense strand to SEQ ID NO: 259026
cauuccaugccgaacuuau

SEQ ID NO: 259028 - RNA, 19 nt, Artificial Sequence
  Description of Artificial Sequence: Synthetic oligonucleotide
  Sense strand starting at position 3751 SEQ ID NO: 3331
cggcauggaauguagauau

SEQ ID NO: 259029 - RNA, 19 nt, Artificial Sequence
  Description of Artificial Sequence: Synthetic oligonucleotide
  Antisense strand to SEQ ID NO: 259028
auaucuacauuccaugccg

SEQ ID NO: 259030 - RNA, 19 nt, Artificial Sequence
  Description of Artificial Sequence: Synthetic oligonucleotide
  Sense strand starting at position 3761 SEQ ID NO: 3331
uguagauaucugggaugag

SEQ ID NO: 259031 - RNA, 19 nt, Artificial Sequence
  Description of Artificial Sequence: Synthetic oligonucleotide
  Antisense strand to SEQ ID NO: 259030
cucaucccagauaucuaca

SEQ ID NO: 259032 - RNA, 19 nt, Artificial Sequence
  Description of Artificial Sequence: Synthetic oligonucleotide
  Sense strand starting at position 3764 SEQ ID NO: 3331
agauaucugggaugagcua

SEQ ID NO: 259033 - RNA, 19 nt, Artificial Sequence
  Description of Artificial Sequence: Synthetic oligonucleotide
  Antisense strand to SEQ ID NO: 259032
uagcucaucccagauaucu

SEQ ID NO: 259034 - RNA, 19 nt, Artificial Sequence
  Description of Artificial Sequence: Synthetic oligonucleotide
  Sense strand starting at position 3798 SEQ ID NO: 3331
ugaacuugcacaggugaua

SEQ ID NO: 259035 - RNA, 19 nt, Artificial Sequence
  Description of Artificial Sequence: Synthetic oligonucleotide
  Antisense strand to SEQ ID NO: 259034
uaucaccugugcaaguuca

SEQ ID NO: 259036 - RNA, 19 nt, Artificial Sequence
  Description of Artificial Sequence: Synthetic oligonucleotide
  Sense strand starting at position 3834 SEQ ID NO: 3331
ggaucuggcuucucucaua

SEQ ID NO: 259037 - RNA, 19 nt, Artificial Sequence
  Description of Artificial Sequence: Synthetic oligonucleotide
  Antisense strand to SEQ ID NO: 259036
uaugagagaagccagaucc

SEQ ID NO: 259038 - RNA, 19 nt, Artificial Sequence
  Description of Artificial Sequence: Synthetic oligonucleotide
  Sense strand starting at position 249 SEQ ID NO: 3333
cagaguaacuuccauguag

SEQ ID NO: 259039 - RNA, 19 nt, Artificial Sequence
  Description of Artificial Sequence: Synthetic oligonucleotide
  Antisense strand to SEQ ID NO: 259038
cuacauggaaguuacucug

SEQ ID NO: 259040 - RNA, 19 nt, Artificial Sequence
  Description of Artificial Sequence: Synthetic oligonucleotide
  Sense strand starting at position 251 SEQ ID NO: 3333
gaguaacuuccauguaguu

SEQ ID NO: 259041 - RNA, 19 nt, Artificial Sequence
  Description of Artificial Sequence: Synthetic oligonucleotide
  Antisense strand to SEQ ID NO: 259040
aacuacauggaaguuacuc

SEQ ID NO: 259042 - RNA, 19 nt, Artificial Sequence
  Description of Artificial Sequence: Synthetic oligonucleotide
  Sense strand starting at position 263 SEQ ID NO: 3333
uguaguuaccuggacugga

SEQ ID NO: 259043 - RNA, 19 nt, Artificial Sequence
  Description of Artificial Sequence: Synthetic oligonucleotide
  Antisense strand to SEQ ID NO: 259042
uccaguccagguaacuaca

SEQ ID NO: 259044 - RNA, 19 nt, Artificial Sequence
  Description of Artificial Sequence: Synthetic oligonucleotide
  Sense strand starting at position 291 SEQ ID NO: 3333
gugguauuacuacauuaga

SEQ ID NO: 259045 - RNA, 19 nt, Artificial Sequence
  Description of Artificial Sequence: Synthetic oligonucleotide
  Antisense strand to SEQ ID NO: 259044
ucuaauguaguaauaccac

SEQ ID NO: 259046 - RNA, 19 nt, Artificial Sequence
  Description of Artificial Sequence: Synthetic oligonucleotide
  Sense strand starting at position 326 SEQ ID NO: 3333
auuccuacguguuuaacau

SEQ ID NO: 259047 - RNA, 19 nt, Artificial Sequence
  Description of Artificial Sequence: Synthetic oligonucleotide
  Antisense strand to SEQ ID NO: 259046
auguuaaacacguaggaau

SEQ ID NO: 259048 - RNA, 19 nt, Artificial Sequence
  Description of Artificial Sequence: Synthetic oligonucleotide
  Sense strand starting at position 399 SEQ ID NO: 3333
uuaauugaguucccacuga

SEQ ID NO: 259049 - RNA, 19 nt, Artificial Sequence
  Description of Artificial Sequence: Synthetic oligonucleotide
  Antisense strand to SEQ ID NO: 259048
ucagugggaacucaauuaa

SEQ ID NO: 259050 - RNA, 19 nt, Artificial Sequence
  Description of Artificial Sequence: Synthetic oligonucleotide
  Sense strand starting at position 939 SEQ ID NO: 3333
uccgacaagucauuaacuu

SEQ ID NO: 259051 - RNA, 19 nt, Artificial Sequence
  Description of Artificial Sequence: Synthetic oligonucleotide
  Antisense strand to SEQ ID NO: 259050
aaguuaaugacuugucgga

SEQ ID NO: 259052 - RNA, 19 nt, Artificial Sequence
  Description of Artificial Sequence: Synthetic oligonucleotide
  Sense strand starting at position 940 SEQ ID NO: 3333
ccgacaagucauuaacuuu

SEQ ID NO: 259053 - RNA, 19 nt, Artificial Sequence
  Description of Artificial Sequence: Synthetic oligonucleotide
  Antisense strand to SEQ ID NO: 259052
aaaguuaaugacuugucgg

SEQ ID NO: 259054 - RNA, 19 nt, Artificial Sequence
  Description of Artificial Sequence: Synthetic oligonucleotide
  Sense strand starting at position 983 SEQ ID NO: 3333
aaauguaaucuauguggag

SEQ ID NO: 259055 - RNA, 19 nt, Artificial Sequence
  Description of Artificial Sequence: Synthetic oligonucleotide
  Antisense strand to SEQ ID NO: 259054
cuccacauagauuacauuu

SEQ ID NO: 259056 - RNA, 19 nt, Artificial Sequence
  Description of Artificial Sequence: Synthetic oligonucleotide
  Sense strand starting at position 1021 SEQ ID NO: 3333
gggauacggguuugagagu

SEQ ID NO: 259057 - RNA, 19 nt, Artificial Sequence
  Description of Artificial Sequence: Synthetic oligonucleotide
  Antisense strand to SEQ ID NO: 259056
acucucaaacccguauccc

SEQ ID NO: 259058 - RNA, 19 nt, Artificial Sequence
  Description of Artificial Sequence: Synthetic oligonucleotide
  Sense strand starting at position 1069 SEQ ID NO: 3333
agcgguaauaguugcacua

SEQ ID NO: 259059 - RNA, 19 nt, Artificial Sequence
  Description of Artificial Sequence: Synthetic oligonucleotide
  Antisense strand to SEQ ID NO: 259058
uagugcaacuauuaccgcu

SEQ ID NO: 259060 - RNA, 19 nt, Artificial Sequence
  Description of Artificial Sequence: Synthetic oligonucleotide
  Sense strand starting at position 1090 SEQ ID NO: 3333
cugugaauauacuguauuu

SEQ ID NO: 259061 - RNA, 19 nt, Artificial Sequence
  Description of Artificial Sequence: Synthetic oligonucleotide
  Antisense strand to SEQ ID NO: 259060
aaauacaguauauucacag

SEQ ID NO: 259062 - RNA, 19 nt, Artificial Sequence
  Description of Artificial Sequence: Synthetic oligonucleotide
  Sense strand starting at position 1138 SEQ ID NO: 3333
auagguaaaguguaugcua

SEQ ID NO: 259063 - RNA, 19 nt, Artificial Sequence
  Description of Artificial Sequence: Synthetic oligonucleotide
  Antisense strand to SEQ ID NO: 259062
uagcauacacuuuaccuau

SEQ ID NO: 259064 - RNA, 19 nt, Artificial Sequence
  Description of Artificial Sequence: Synthetic oligonucleotide
  Sense strand starting at position 1141 SEQ ID NO: 3333
gguaaaguguaugcuaugu

SEQ ID NO: 259065 - RNA, 19 nt, Artificial Sequence
  Description of Artificial Sequence: Synthetic oligonucleotide
  Antisense strand to SEQ ID NO: 259064
acauagcauacacuuuacc

SEQ ID NO: 259066 - RNA, 19 nt, Artificial Sequence
  Description of Artificial Sequence: Synthetic oligonucleotide
  Sense strand starting at position 1309 SEQ ID NO: 3333
uggaucgugugguuugcaa

SEQ ID NO: 259067 - RNA, 19 nt, Artificial Sequence
  Description of Artificial Sequence: Synthetic oligonucleotide
  Antisense strand to SEQ ID NO: 259066
uugcaaaccacacgaucca

SEQ ID NO: 259068 - RNA, 19 nt, Artificial Sequence
  Description of Artificial Sequence: Synthetic oligonucleotide
  Sense strand starting at position 1311 SEQ ID NO: 3333
gaucgugugguuugcaaag

SEQ ID NO: 259069 - RNA, 19 nt, Artificial Sequence
  Description of Artificial Sequence: Synthetic oligonucleotide
  Antisense strand to SEQ ID NO: 259068
cuuugcaaaccacacgauc

SEQ ID NO: 259070 - RNA, 19 nt, Artificial Sequence
  Description of Artificial Sequence: Synthetic oligonucleotide
  Sense strand starting at position 1337 SEQ ID NO: 3333
uugcaagaggcuuguggaa

SEQ ID NO: 259071 - RNA, 19 nt, Artificial Sequence
  Description of Artificial Sequence: Synthetic oligonucleotide
  Antisense strand to SEQ ID NO: 259070
uuccacaagccucuugcaa

SEQ ID NO: 259072 - RNA, 19 nt, Artificial Sequence
  Description of Artificial Sequence: Synthetic oligonucleotide
  Sense strand starting at position 1550 SEQ ID NO: 3333
ggaggaagccuuuguccaa

SEQ ID NO: 259073 - RNA, 19 nt, Artificial Sequence
  Description of Artificial Sequence: Synthetic oligonucleotide
  Antisense strand to SEQ ID NO: 259072
uuggacaaaggcuuccucc

SEQ ID NO: 259074 - RNA, 19 nt, Artificial Sequence
  Description of Artificial Sequence: Synthetic oligonucleotide
  Sense strand starting at position 1551 SEQ ID NO: 3333
gaggaagccuuuguccaau

SEQ ID NO: 259075 - RNA, 19 nt, Artificial Sequence
  Description of Artificial Sequence: Synthetic oligonucleotide
  Antisense strand to SEQ ID NO: 259074
auuggacaaaggcuuccuc

SEQ ID NO: 259076 - RNA, 19 nt, Artificial Sequence
  Description of Artificial Sequence: Synthetic oligonucleotide
  Sense strand starting at position 1575 SEQ ID NO: 3333
uugcauggcucuuccgaau

SEQ ID NO: 259077 - RNA, 19 nt, Artificial Sequence
  Description of Artificial Sequence: Synthetic oligonucleotide
  Antisense strand to SEQ ID NO: 259076
auucggaagagccaugcaa

SEQ ID NO: 259078 - RNA, 19 nt, Artificial Sequence
  Description of Artificial Sequence: Synthetic oligonucleotide
  Sense strand starting at position 1586 SEQ ID NO: 3333
uuccgaaucugagugagau

SEQ ID NO: 259079 - RNA, 19 nt, Artificial Sequence
  Description of Artificial Sequence: Synthetic oligonucleotide
  Antisense strand to SEQ ID NO: 259078
aucucacucagauucggaa

SEQ ID NO: 259080 - RNA, 19 nt, Artificial Sequence
  Description of Artificial Sequence: Synthetic oligonucleotide
  Sense strand starting at position 1587 SEQ ID NO: 3333
uccgaaucugagugagauu

SEQ ID NO: 259081 - RNA, 19 nt, Artificial Sequence
  Description of Artificial Sequence: Synthetic oligonucleotide
  Antisense strand to SEQ ID NO: 259080
aaucucacucagauucgga

SEQ ID NO: 259082 - RNA, 19 nt, Artificial Sequence
  Description of Artificial Sequence: Synthetic oligonucleotide
  Sense strand starting at position 1601 SEQ ID NO: 3333
agauuuggcucggaauuug

SEQ ID NO: 259083 - RNA, 19 nt, Artificial Sequence
  Description of Artificial Sequence: Synthetic oligonucleotide
  Antisense strand to SEQ ID NO: 259082
caaauuccgagccaaaucu

SEQ ID NO: 259084 - RNA, 19 nt, Artificial Sequence
  Description of Artificial Sequence: Synthetic oligonucleotide
  Sense strand starting at position 1611 SEQ ID NO: 3333
cggaauuugugucaacgga

SEQ ID NO: 259085 - RNA, 19 nt, Artificial Sequence
  Description of Artificial Sequence: Synthetic oligonucleotide
  Antisense strand to SEQ ID NO: 259084
uccguugacacaaauuccg

SEQ ID NO: 259086 - RNA, 19 nt, Artificial Sequence
  Description of Artificial Sequence: Synthetic oligonucleotide
  Sense strand starting at position 1618 SEQ ID NO: 3333
ugugucaacggauguguuu

SEQ ID NO: 259087 - RNA, 19 nt, Artificial Sequence
  Description of Artificial Sequence: Synthetic oligonucleotide
  Antisense strand to SEQ ID NO: 259086
aaacacauccguugacaca

SEQ ID NO: 259088 - RNA, 19 nt, Artificial Sequence
  Description of Artificial Sequence: Synthetic oligonucleotide
  Sense strand starting at position 1665 SEQ ID NO: 3333
auuccaacuuccgcagaau

SEQ ID NO: 259089 - RNA, 19 nt, Artificial Sequence
  Description of Artificial Sequence: Synthetic oligonucleotide
  Antisense strand to SEQ ID NO: 259088
auucugcggaaguuggaau

SEQ ID NO: 259090 - RNA, 19 nt, Artificial Sequence
  Description of Artificial Sequence: Synthetic oligonucleotide
  Sense strand starting at position 1666 SEQ ID NO: 3333
uuccaacuuccgcagaaua

SEQ ID NO: 259091 - RNA, 19 nt, Artificial Sequence
  Description of Artificial Sequence: Synthetic oligonucleotide
  Antisense strand to SEQ ID NO: 259090
uauucugcggaaguuggaa

SEQ ID NO: 259092 - RNA, 19 nt, Artificial Sequence
  Description of Artificial Sequence: Synthetic oligonucleotide
  Sense strand starting at position 1699 SEQ ID NO: 3333
cugcuaccacuccgugaau

SEQ ID NO: 259093 - RNA, 19 nt, Artificial Sequence
  Description of Artificial Sequence: Synthetic oligonucleotide
  Antisense strand to SEQ ID NO: 259092
auucacggagugguagcag

SEQ ID NO: 259094 - RNA, 19 nt, Artificial Sequence
  Description of Artificial Sequence: Synthetic oligonucleotide
  Sense strand starting at position 1700 SEQ ID NO: 3333
ugcuaccacuccgugaauu

SEQ ID NO: 259095 - RNA, 19 nt, Artificial Sequence
  Description of Artificial Sequence: Synthetic oligonucleotide
  Antisense strand to SEQ ID NO: 259094
aauucacggagugguagca

SEQ ID NO: 259096 - RNA, 19 nt, Artificial Sequence
  Description of Artificial Sequence: Synthetic oligonucleotide
  Sense strand starting at position 1701 SEQ ID NO: 3333
gcuaccacuccgugaauuc

SEQ ID NO: 259097 - RNA, 19 nt, Artificial Sequence
  Description of Artificial Sequence: Synthetic oligonucleotide
  Antisense strand to SEQ ID NO: 259096
gaauucacggagugguagc

SEQ ID NO: 259098 - RNA, 19 nt, Artificial Sequence
  Description of Artificial Sequence: Synthetic oligonucleotide
  Sense strand starting at position 1840 SEQ ID NO: 3333
ggguucuuucgcuacgguu

SEQ ID NO: 259099 - RNA, 19 nt, Artificial Sequence
  Description of Artificial Sequence: Synthetic oligonucleotide
  Antisense strand to SEQ ID NO: 259098
aaccguagcgaaagaaccc

SEQ ID NO: 259100 - RNA, 19 nt, Artificial Sequence
  Description of Artificial Sequence: Synthetic oligonucleotide
  Sense strand starting at position 1883 SEQ ID NO: 3333
ucggcugcuucgauaguga

SEQ ID NO: 259101 - RNA, 19 nt, Artificial Sequence
  Description of Artificial Sequence: Synthetic oligonucleotide
  Antisense strand to SEQ ID NO: 259100
ucacuaucgaagcagccga

SEQ ID NO: 259102 - RNA, 19 nt, Artificial Sequence
  Description of Artificial Sequence: Synthetic oligonucleotide
  Sense strand starting at position 1888 SEQ ID NO: 3333
ugcuucgauagugauaaca

SEQ ID NO: 259103 - RNA, 19 nt, Artificial Sequence
  Description of Artificial Sequence: Synthetic oligonucleotide
  Antisense strand to SEQ ID NO: 259102
uguuaucacuaucgaagca

SEQ ID NO: 259104 - RNA, 19 nt, Artificial Sequence
  Description of Artificial Sequence: Synthetic oligonucleotide
  Sense strand starting at position 1890 SEQ ID NO: 3333
cuucgauagugauaacaau

SEQ ID NO: 259105 - RNA, 19 nt, Artificial Sequence
  Description of Artificial Sequence: Synthetic oligonucleotide
  Antisense strand to SEQ ID NO: 259104
auuguuaucacuaucgaag

SEQ ID NO: 259106 - RNA, 19 nt, Artificial Sequence
  Description of Artificial Sequence: Synthetic oligonucleotide
  Sense strand starting at position 1921 SEQ ID NO: 3333
gcccuuagacuggguguua

SEQ ID NO: 259107 - RNA, 19 nt, Artificial Sequence
  Description of Artificial Sequence: Synthetic oligonucleotide
  Antisense strand to SEQ ID NO: 259106
uaacacccagucuaagggc

SEQ ID NO: 259108 - RNA, 19 nt, Artificial Sequence
  Description of Artificial Sequence: Synthetic oligonucleotide
  Sense strand starting at position 1934 SEQ ID NO: 3333
guguuagcgguuugauaaa

SEQ ID NO: 259109 - RNA, 19 nt, Artificial Sequence
  Description of Artificial Sequence: Synthetic oligonucleotide
  Antisense strand to SEQ ID NO: 259108
uuuaucaaaccgcuaacac

SEQ ID NO: 259110 - RNA, 19 nt, Artificial Sequence
  Description of Artificial Sequence: Synthetic oligonucleotide
  Sense strand starting at position 2824 SEQ ID NO: 3333
gacagcucgcuccgaagaa

SEQ ID NO: 259111 - RNA, 19 nt, Artificial Sequence
  Description of Artificial Sequence: Synthetic oligonucleotide
  Antisense strand to SEQ ID NO: 259110
uucuucggagcgagcuguc

SEQ ID NO: 259112 - RNA, 19 nt, Artificial Sequence
  Description of Artificial Sequence: Synthetic oligonucleotide
  Sense strand starting at position 2841 SEQ ID NO: 3333
aaggcauggucacucuagu

SEQ ID NO: 259113 - RNA, 19 nt, Artificial Sequence
  Description of Artificial Sequence: Synthetic oligonucleotide
  Antisense strand to SEQ ID NO: 259112
acuagagugaccaugccuu

SEQ ID NO: 259114 - RNA, 19 nt, Artificial Sequence
  Description of Artificial Sequence: Synthetic oligonucleotide
  Sense strand starting at position 3348 SEQ ID NO: 3333
ggguaaaccucccuuacca

SEQ ID NO: 259115 - RNA, 19 nt, Artificial Sequence
  Description of Artificial Sequence: Synthetic oligonucleotide
  Antisense strand to SEQ ID NO: 259114
ugguaagggagguuuaccc

SEQ ID NO: 259116 - RNA, 19 nt, Artificial Sequence
  Description of Artificial Sequence: Synthetic oligonucleotide
  Sense strand starting at position 3850 SEQ ID NO: 3333
cggugauccgcucaucuca

SEQ ID NO: 259117 - RNA, 19 nt, Artificial Sequence
  Description of Artificial Sequence: Synthetic oligonucleotide
  Antisense strand to SEQ ID NO: 259116
ugagaugagcggaucaccg

SEQ ID NO: 259118 - RNA, 19 nt, Artificial Sequence
  Description of Artificial Sequence: Synthetic oligonucleotide
  Sense strand starting at position 14 SEQ ID NO: 3332
gugguauuacuacauuaga

SEQ ID NO: 259119 - RNA, 19 nt, Artificial Sequence
  Description of Artificial Sequence: Synthetic oligonucleotide
  Antisense strand to SEQ ID NO: 259118
ucuaauguaguaauaccac

SEQ ID NO: 259120 - RNA, 19 nt, Artificial Sequence
  Description of Artificial Sequence: Synthetic oligonucleotide
  Sense strand starting at position 49 SEQ ID NO: 3332
auuccuacguguuuaacau

SEQ ID NO: 259121 - RNA, 19 nt, Artificial Sequence
  Description of Artificial Sequence: Synthetic oligonucleotide
  Antisense strand to SEQ ID NO: 259120
auguuaaacacguaggaau

SEQ ID NO: 259122 - RNA, 19 nt, Artificial Sequence
  Description of Artificial Sequence: Synthetic oligonucleotide
  Sense strand starting at position 122 SEQ ID NO: 3332
uuaauugaguucccacuga

SEQ ID NO: 259123 - RNA, 19 nt, Artificial Sequence
  Description of Artificial Sequence: Synthetic oligonucleotide
  Antisense strand to SEQ ID NO: 259122
ucagugggaacucaauuaa

SEQ ID NO: 259124 - RNA, 19 nt, Artificial Sequence
  Description of Artificial Sequence: Synthetic oligonucleotide
  Sense strand starting at position 662 SEQ ID NO: 3332
uccgacaagucauuaacuu

SEQ ID NO: 259125 - RNA, 19 nt, Artificial Sequence
  Description of Artificial Sequence: Synthetic oligonucleotide
  Antisense strand to SEQ ID NO: 259124
aaguuaaugacuugucgga

SEQ ID NO: 259126 - RNA, 19 nt, Artificial Sequence
  Description of Artificial Sequence: Synthetic oligonucleotide
  Sense strand starting at position 663 SEQ ID NO: 3332
ccgacaagucauuaacuuu

SEQ ID NO: 259127 - RNA, 19 nt, Artificial Sequence
  Description of Artificial Sequence: Synthetic oligonucleotide
  Antisense strand to SEQ ID NO: 259126
aaaguuaaugacuugucgg

SEQ ID NO: 259128 - RNA, 19 nt, Artificial Sequence
  Description of Artificial Sequence: Synthetic oligonucleotide
  Sense strand starting at position 706 SEQ ID NO: 3332
aaauguaaucuauguggag

SEQ ID NO: 259129 - RNA, 19 nt, Artificial Sequence
  Description of Artificial Sequence: Synthetic oligonucleotide
  Antisense strand to SEQ ID NO: 259128
cuccacauagauuacauuu

SEQ ID NO: 259130 - RNA, 19 nt, Artificial Sequence
  Description of Artificial Sequence: Synthetic oligonucleotide
  Sense strand starting at position 744 SEQ ID NO: 3332
gggauacggguuugagagu

SEQ ID NO: 259131 - RNA, 19 nt, Artificial Sequence
  Description of Artificial Sequence: Synthetic oligonucleotide
  Antisense strand to SEQ ID NO: 259130
acucucaaacccguauccc

SEQ ID NO: 259132 - RNA, 19 nt, Artificial Sequence
  Description of Artificial Sequence: Synthetic oligonucleotide
  Sense strand starting at position 792 SEQ ID NO: 3332
agcgguaauaguugcacua

SEQ ID NO: 259133 - RNA, 19 nt, Artificial Sequence
  Description of Artificial Sequence: Synthetic oligonucleotide
  Antisense strand to SEQ ID NO: 259132
uagugcaacuauuaccgcu

SEQ ID NO: 259134 - RNA, 19 nt, Artificial Sequence
  Description of Artificial Sequence: Synthetic oligonucleotide
  Sense strand starting at position 813 SEQ ID NO: 3332
cugugaauauacuguauuu

SEQ ID NO: 259135 - RNA, 19 nt, Artificial Sequence
  Description of Artificial Sequence: Synthetic oligonucleotide
  Antisense strand to SEQ ID NO: 259134
aaauacaguauauucacag

SEQ ID NO: 259136 - RNA, 19 nt, Artificial Sequence
  Description of Artificial Sequence: Synthetic oligonucleotide
  Sense strand starting at position 861 SEQ ID NO: 3332
auagguaaaguguaugcua

SEQ ID NO: 259137 - RNA, 19 nt, Artificial Sequence
  Description of Artificial Sequence: Synthetic oligonucleotide
  Antisense strand to SEQ ID NO: 259136
uagcauacacuuuaccuau

SEQ ID NO: 259138 - RNA, 19 nt, Artificial Sequence
  Description of Artificial Sequence: Synthetic oligonucleotide
  Sense strand starting at position 864 SEQ ID NO: 3332
gguaaaguguaugcuaugu

SEQ ID NO: 259139 - RNA, 19 nt, Artificial Sequence
  Description of Artificial Sequence: Synthetic oligonucleotide
  Antisense strand to SEQ ID NO: 259138
acauagcauacacuuuacc

SEQ ID NO: 259140 - RNA, 19 nt, Artificial Sequence
  Description of Artificial Sequence: Synthetic oligonucleotide
  Sense strand starting at position 1032 SEQ ID NO: 3332
uggaucgugugguuugcaa

SEQ ID NO: 259141 - RNA, 19 nt, Artificial Sequence
  Description of Artificial Sequence: Synthetic oligonucleotide
  Antisense strand to SEQ ID NO: 259140
uugcaaaccacacgaucca

SEQ ID NO: 259142 - RNA, 19 nt, Artificial Sequence
  Description of Artificial Sequence: Synthetic oligonucleotide
  Sense strand starting at position 1034 SEQ ID NO: 3332
gaucgugugguuugcaaag

SEQ ID NO: 259143 - RNA, 19 nt, Artificial Sequence
  Description of Artificial Sequence: Synthetic oligonucleotide
  Antisense strand to SEQ ID NO: 259142
cuuugcaaaccacacgauc

SEQ ID NO: 259144 - RNA, 19 nt, Artificial Sequence
  Description of Artificial Sequence: Synthetic oligonucleotide
  Sense strand starting at position 1060 SEQ ID NO: 3332
uugcaagaggcuuguggaa

SEQ ID NO: 259145 - RNA, 19 nt, Artificial Sequence
  Description of Artificial Sequence: Synthetic oligonucleotide
  Antisense strand to SEQ ID NO: 259144
uuccacaagccucuugcaa

SEQ ID NO: 259146 - RNA, 19 nt, Artificial Sequence
  Description of Artificial Sequence: Synthetic oligonucleotide
  Sense strand starting at position 1273 SEQ ID NO: 3332
ggaggaagccuuuguccaa

SEQ ID NO: 259147 - RNA, 19 nt, Artificial Sequence
  Description of Artificial Sequence: Synthetic oligonucleotide
  Antisense strand to SEQ ID NO: 259146
uuggacaaaggcuuccucc

SEQ ID NO: 259148 - RNA, 19 nt, Artificial Sequence
  Description of Artificial Sequence: Synthetic oligonucleotide
  Sense strand starting at position 1274 SEQ ID NO: 3332
gaggaagccuuuguccaau

SEQ ID NO: 259149 - RNA, 19 nt, Artificial Sequence
  Description of Artificial Sequence: Synthetic oligonucleotide
  Antisense strand to SEQ ID NO: 259148
auuggacaaaggcuuccuc

SEQ ID NO: 259150 - RNA, 19 nt, Artificial Sequence
  Description of Artificial Sequence: Synthetic oligonucleotide
  Sense strand starting at position 1298 SEQ ID NO: 3332
uugcauggcucuuccgaau

SEQ ID NO: 259151 - RNA, 19 nt, Artificial Sequence
  Description of Artificial Sequence: Synthetic oligonucleotide
  Antisense strand to SEQ ID NO: 259150
auucggaagagccaugcaa

SEQ ID NO: 259152 - RNA, 19 nt, Artificial Sequence
  Description of Artificial Sequence: Synthetic oligonucleotide
  Sense strand starting at position 1309 SEQ ID NO: 3332
uuccgaaucugagugagau

SEQ ID NO: 259153 - RNA, 19 nt, Artificial Sequence
  Description of Artificial Sequence: Synthetic oligonucleotide
  Antisense strand to SEQ ID NO: 259152
aucucacucagauucggaa

SEQ ID NO: 259154 - RNA, 19 nt, Artificial Sequence
  Description of Artificial Sequence: Synthetic oligonucleotide
  Sense strand starting at position 1310 SEQ ID NO: 3332
uccgaaucugagugagauu

SEQ ID NO: 259155 - RNA, 19 nt, Artificial Sequence
  Description of Artificial Sequence: Synthetic oligonucleotide
  Antisense strand to SEQ ID NO: 259154
aaucucacucagauucgga

SEQ ID NO: 259156 - RNA, 19 nt, Artificial Sequence
  Description of Artificial Sequence: Synthetic oligonucleotide
  Sense strand starting at position 1324 SEQ ID NO: 3332
agauuuggcucggaauuug

SEQ ID NO: 259157 - RNA, 19 nt, Artificial Sequence
  Description of Artificial Sequence: Synthetic oligonucleotide
  Antisense strand to SEQ ID NO: 259156
caaauuccgagccaaaucu

SEQ ID NO: 259158 - RNA, 19 nt, Artificial Sequence
  Description of Artificial Sequence: Synthetic oligonucleotide
  Sense strand starting at position 1334 SEQ ID NO: 3332
cggaauuugugucaacgga

SEQ ID NO: 259159 - RNA, 19 nt, Artificial Sequence
  Description of Artificial Sequence: Synthetic oligonucleotide
  Antisense strand to SEQ ID NO: 259158
uccguugacacaaauuccg

SEQ ID NO: 259160 - RNA, 19 nt, Artificial Sequence
  Description of Artificial Sequence: Synthetic oligonucleotide
  Sense strand starting at position 1341 SEQ ID NO: 3332
ugugucaacggauguguuu

SEQ ID NO: 259161 - RNA, 19 nt, Artificial Sequence
  Description of Artificial Sequence: Synthetic oligonucleotide
  Antisense strand to SEQ ID NO: 259160
aaacacauccguugacaca

SEQ ID NO: 259162 - RNA, 19 nt, Artificial Sequence
  Description of Artificial Sequence: Synthetic oligonucleotide
  Sense strand starting at position 1388 SEQ ID NO: 3332
auuccaacuuccgcagaau

SEQ ID NO: 259163 - RNA, 19 nt, Artificial Sequence
  Description of Artificial Sequence: Synthetic oligonucleotide
  Antisense strand to SEQ ID NO: 259162
auucugcggaaguuggaau

SEQ ID NO: 259164 - RNA, 19 nt, Artificial Sequence
  Description of Artificial Sequence: Synthetic oligonucleotide
  Sense strand starting at position 1389 SEQ ID NO: 3332
uuccaacuuccgcagaaua

SEQ ID NO: 259165 - RNA, 19 nt, Artificial Sequence
  Description of Artificial Sequence: Synthetic oligonucleotide
  Antisense strand to SEQ ID NO: 259164
uauucugcggaaguuggaa

SEQ ID NO: 259166 - RNA, 19 nt, Artificial Sequence
  Description of Artificial Sequence: Synthetic oligonucleotide
  Sense strand starting at position 1422 SEQ ID NO: 3332
cugcuaccacuccgugaau

SEQ ID NO: 259167 - RNA, 19 nt, Artificial Sequence
  Description of Artificial Sequence: Synthetic oligonucleotide
  Antisense strand to SEQ ID NO: 259166
auucacggagugguagcag

SEQ ID NO: 259168 - RNA, 19 nt, Artificial Sequence
  Description of Artificial Sequence: Synthetic oligonucleotide
  Sense strand starting at position 1423 SEQ ID NO: 3332
ugcuaccacuccgugaauu

SEQ ID NO: 259169 - RNA, 19 nt, Artificial Sequence
  Description of Artificial Sequence: Synthetic oligonucleotide
  Antisense strand to SEQ ID NO: 259168
aauucacggagugguagca

SEQ ID NO: 259170 - RNA, 19 nt, Artificial Sequence
  Description of Artificial Sequence: Synthetic oligonucleotide
  Sense strand starting at position 1424 SEQ ID NO: 3332
gcuaccacuccgugaauuc

SEQ ID NO: 259171 - RNA, 19 nt, Artificial Sequence
  Description of Artificial Sequence: Synthetic oligonucleotide
  Antisense strand to SEQ ID NO: 259170
gaauucacggagugguagc

SEQ ID NO: 259172 - RNA, 19 nt, Artificial Sequence
  Description of Artificial Sequence: Synthetic oligonucleotide
  Sense strand starting at position 1563 SEQ ID NO: 3332
ggguucuuucgcuacgguu

SEQ ID NO: 259173 - RNA, 19 nt, Artificial Sequence
  Description of Artificial Sequence: Synthetic oligonucleotide
  Antisense strand to SEQ ID NO: 259172
aaccguagcgaaagaaccc

SEQ ID NO: 259174 - RNA, 19 nt, Artificial Sequence
  Description of Artificial Sequence: Synthetic oligonucleotide
  Sense strand starting at position 1606 SEQ ID NO: 3332
ucggcugcuucgauaguga

SEQ ID NO: 259175 - RNA, 19 nt, Artificial Sequence
  Description of Artificial Sequence: Synthetic oligonucleotide
  Antisense strand to SEQ ID NO: 259174
ucacuaucgaagcagccga

SEQ ID NO: 259176 - RNA, 19 nt, Artificial Sequence
  Description of Artificial Sequence: Synthetic oligonucleotide
  Sense strand starting at position 1611 SEQ ID NO: 3332
ugcuucgauagugauaaca

SEQ ID NO: 259177 - RNA, 19 nt, Artificial Sequence
  Description of Artificial Sequence: Synthetic oligonucleotide
  Antisense strand to SEQ ID NO: 259176
uguuaucacuaucgaagca

SEQ ID NO: 259178 - RNA, 19 nt, Artificial Sequence
  Description of Artificial Sequence: Synthetic oligonucleotide
  Sense strand starting at position 1613 SEQ ID NO: 3332
cuucgauagugauaacaau

SEQ ID NO: 259179 - RNA, 19 nt, Artificial Sequence
  Description of Artificial Sequence: Synthetic oligonucleotide
  Antisense strand to SEQ ID NO: 259178
auuguuaucacuaucgaag

SEQ ID NO: 259180 - RNA, 19 nt, Artificial Sequence
  Description of Artificial Sequence: Synthetic oligonucleotide
  Sense strand starting at position 1644 SEQ ID NO: 3332
gcccuuagacuggguguua

SEQ ID NO: 259181 - RNA, 19 nt, Artificial Sequence
  Description of Artificial Sequence: Synthetic oligonucleotide
  Antisense strand to SEQ ID NO: 259180
uaacacccagucuaagggc

SEQ ID NO: 259182 - RNA, 19 nt, Artificial Sequence
  Description of Artificial Sequence: Synthetic oligonucleotide
  Sense strand starting at position 1657 SEQ ID NO: 3332
guguuagcgguuugauaaa

SEQ ID NO: 259183 - RNA, 19 nt, Artificial Sequence
  Description of Artificial Sequence: Synthetic oligonucleotide
  Antisense strand to SEQ ID NO: 259182
uuuaucaaaccgcuaacac

SEQ ID NO: 259184 - RNA, 19 nt, Artificial Sequence
  Description of Artificial Sequence: Synthetic oligonucleotide
  Sense strand starting at position 2547 SEQ ID NO: 3332
gacagcucgcuccgaagaa

SEQ ID NO: 259185 - RNA, 19 nt, Artificial Sequence
  Description of Artificial Sequence: Synthetic oligonucleotide
  Antisense strand to SEQ ID NO: 259184
uucuucggagcgagcuguc

SEQ ID NO: 259186 - RNA, 19 nt, Artificial Sequence
  Description of Artificial Sequence: Synthetic oligonucleotide
  Sense strand starting at position 2564 SEQ ID NO: 3332
aaggcauggucacucuagu

SEQ ID NO: 259187 - RNA, 19 nt, Artificial Sequence
  Description of Artificial Sequence: Synthetic oligonucleotide
  Antisense strand to SEQ ID NO: 259186
acuagagugaccaugccuu

SEQ ID NO: 259188 - RNA, 19 nt, Artificial Sequence
  Description of Artificial Sequence: Synthetic oligonucleotide
  Sense strand starting at position 3071 SEQ ID NO: 3332
ggguaaaccucccuuacca

SEQ ID NO: 259189 - RNA, 19 nt, Artificial Sequence
  Description of Artificial Sequence: Synthetic oligonucleotide
  Antisense strand to SEQ ID NO: 259188
ugguaagggagguuuaccc

SEQ ID NO: 259190 - RNA, 19 nt, Artificial Sequence
  Description of Artificial Sequence: Synthetic oligonucleotide
  Sense strand starting at position 3573 SEQ ID NO: 3332
cggugauccgcucaucuca

SEQ ID NO: 259191 - RNA, 19 nt, Artificial Sequence
  Description of Artificial Sequence: Synthetic oligonucleotide
  Antisense strand to SEQ ID NO: 259190
ugagaugagcggaucaccg

SEQ ID NO: 259192 - RNA, 19 nt, Artificial Sequence
  Description of Artificial Sequence: Synthetic oligonucleotide
  Sense strand starting at position 3787 SEQ ID NO: 3332
ccaaguagcuuagauuaag

SEQ ID NO: 259193 - RNA, 19 nt, Artificial Sequence
  Description of Artificial Sequence: Synthetic oligonucleotide
  Antisense strand to SEQ ID NO: 259192
cuuaaucuaagcuacuugg

SEQ ID NO: 259194 - RNA, 19 nt, Artificial Sequence
  Description of Artificial Sequence: Synthetic oligonucleotide
  Sense strand starting at position 3957 SEQ ID NO: 3332
cccggcaagcgcugauauu

SEQ ID NO: 259195 - RNA, 19 nt, Artificial Sequence
  Description of Artificial Sequence: Synthetic oligonucleotide
  Antisense strand to SEQ ID NO: 259194
aauaucagcgcuugccggg

SEQ ID NO: 259196 - RNA, 19 nt, Artificial Sequence
  Description of Artificial Sequence: Synthetic oligonucleotide
  Sense strand starting at position 3958 SEQ ID NO: 3332
ccggcaagcgcugauauuu

SEQ ID NO: 259197 - RNA, 19 nt, Artificial Sequence
  Description of Artificial Sequence: Synthetic oligonucleotide
  Antisense strand to SEQ ID NO: 259196
aaauaucagcgcuugccgg

SEQ ID NO: 259198 - RNA, 19 nt, Artificial Sequence
  Description of Artificial Sequence: Synthetic oligonucleotide
  Sense strand starting at position 135 SEQ ID NO: 3334
ccugaaauuccagggcuca

SEQ ID NO: 259199 - RNA, 19 nt, Artificial Sequence
  Description of Artificial Sequence: Synthetic oligonucleotide
  Antisense strand to SEQ ID NO: 259198
ugagcccuggaauuucagg

SEQ ID NO: 259200 - RNA, 19 nt, Artificial Sequence
  Description of Artificial Sequence: Synthetic oligonucleotide
  Sense strand starting at position 332 SEQ ID NO: 3334
cacuguacuuggccagauu

SEQ ID NO: 259201 - RNA, 19 nt, Artificial Sequence
  Description of Artificial Sequence: Synthetic oligonucleotide
  Antisense strand to SEQ ID NO: 259200
aaucuggccaaguacagug

SEQ ID NO: 259202 - RNA, 19 nt, Artificial Sequence
  Description of Artificial Sequence: Synthetic oligonucleotide
  Sense strand starting at position 335 SEQ ID NO: 3334
uguacuuggccagauuguu

SEQ ID NO: 259203 - RNA, 19 nt, Artificial Sequence
  Description of Artificial Sequence: Synthetic oligonucleotide
  Antisense strand to SEQ ID NO: 259202
aacaaucuggccaaguaca

SEQ ID NO: 259204 - RNA, 19 nt, Artificial Sequence
  Description of Artificial Sequence: Synthetic oligonucleotide
  Sense strand starting at position 396 SEQ ID NO: 3334
gaagacuaguaagucauua

SEQ ID NO: 259205 - RNA, 19 nt, Artificial Sequence
  Description of Artificial Sequence: Synthetic oligonucleotide
  Antisense strand to SEQ ID NO: 259204
uaaugacuuacuagucuuc

SEQ ID NO: 259206 - RNA, 19 nt, Artificial Sequence
  Description of Artificial Sequence: Synthetic oligonucleotide
  Sense strand starting at position 481 SEQ ID NO: 3334
guaucuuggaguuaagugu

SEQ ID NO: 259207 - RNA, 19 nt, Artificial Sequence
  Description of Artificial Sequence: Synthetic oligonucleotide
  Antisense strand to SEQ ID NO: 259206
acacuuaacuccaagauac

SEQ ID NO: 259208 - RNA, 19 nt, Artificial Sequence
  Description of Artificial Sequence: Synthetic oligonucleotide
  Sense strand starting at position 485 SEQ ID NO: 3334
cuuggaguuaaguguaaau

SEQ ID NO: 259209 - RNA, 19 nt, Artificial Sequence
  Description of Artificial Sequence: Synthetic oligonucleotide
  Antisense strand to SEQ ID NO: 259208
auuuacacuuaacuccaag

SEQ ID NO: 259210 - RNA, 19 nt, Artificial Sequence
  Description of Artificial Sequence: Synthetic oligonucleotide
  Sense strand starting at position 487 SEQ ID NO: 3334
uggaguuaaguguaaauac

SEQ ID NO: 259211 - RNA, 19 nt, Artificial Sequence
  Description of Artificial Sequence: Synthetic oligonucleotide
  Antisense strand to SEQ ID NO: 259210
guauuuacacuuaacucca

SEQ ID NO: 259212 - RNA, 19 nt, Artificial Sequence
  Description of Artificial Sequence: Synthetic oligonucleotide
  Sense strand starting at position 504 SEQ ID NO: 3334
acacauguauucuccuuga

SEQ ID NO: 259213 - RNA, 19 nt, Artificial Sequence
  Description of Artificial Sequence: Synthetic oligonucleotide
  Antisense strand to SEQ ID NO: 259212
ucaaggagaauacaugugu

SEQ ID NO: 259214 - RNA, 19 nt, Artificial Sequence
  Description of Artificial Sequence: Synthetic oligonucleotide
  Sense strand starting at position 508 SEQ ID NO: 3334
auguauucuccuugacuuu

SEQ ID NO: 259215 - RNA, 19 nt, Artificial Sequence
  Description of Artificial Sequence: Synthetic oligonucleotide
  Antisense strand to SEQ ID NO: 259214
aaagucaaggagaauacau

SEQ ID NO: 259216 - RNA, 19 nt, Artificial Sequence
  Description of Artificial Sequence: Synthetic oligonucleotide
  Sense strand starting at position 826 SEQ ID NO: 3334
gcugcaguugccgugauca

SEQ ID NO: 259217 - RNA, 19 nt, Artificial Sequence
  Description of Artificial Sequence: Synthetic oligonucleotide
  Antisense strand to SEQ ID NO: 259216
ugaucacggcaacugcagc

SEQ ID NO: 259218 - RNA, 19 nt, Artificial Sequence
  Description of Artificial Sequence: Synthetic oligonucleotide
  Sense strand starting at position 918 SEQ ID NO: 3334
cccuaagguuucccaauga

SEQ ID NO: 259219 - RNA, 19 nt, Artificial Sequence
  Description of Artificial Sequence: Synthetic oligonucleotide
  Antisense strand to SEQ ID NO: 259218
ucauugggaaaccuuaggg

SEQ ID NO: 259220 - RNA, 19 nt, Artificial Sequence
  Description of Artificial Sequence: Synthetic oligonucleotide
  Sense strand starting at position 931 SEQ ID NO: 3334
caaugacuucgguaacaua

SEQ ID NO: 259221 - RNA, 19 nt, Artificial Sequence
  Description of Artificial Sequence: Synthetic oligonucleotide
  Antisense strand to SEQ ID NO: 259220
uauguuaccgaagucauug

SEQ ID NO: 259222 - RNA, 19 nt, Artificial Sequence
  Description of Artificial Sequence: Synthetic oligonucleotide
  Sense strand starting at position 975 SEQ ID NO: 3334
uuguacucccaguaucaau

SEQ ID NO: 259223 - RNA, 19 nt, Artificial Sequence
  Description of Artificial Sequence: Synthetic oligonucleotide
  Antisense strand to SEQ ID NO: 259222
auugauacugggaguacaa

SEQ ID NO: 259224 - RNA, 19 nt, Artificial Sequence
  Description of Artificial Sequence: Synthetic oligonucleotide
  Sense strand starting at position 1140 SEQ ID NO: 3334
agaauccuugcguaggcaa

SEQ ID NO: 259225 - RNA, 19 nt, Artificial Sequence
  Description of Artificial Sequence: Synthetic oligonucleotide
  Antisense strand to SEQ ID NO: 259224
uugccuacgcaaggauucu

SEQ ID NO: 259226 - RNA, 19 nt, Artificial Sequence
  Description of Artificial Sequence: Synthetic oligonucleotide
  Sense strand starting at position 1269 SEQ ID NO: 3334
auuccuuguccucagagau

SEQ ID NO: 259227 - RNA, 19 nt, Artificial Sequence
  Description of Artificial Sequence: Synthetic oligonucleotide
  Antisense strand to SEQ ID NO: 259226
aucucugaggacaaggaau

SEQ ID NO: 259228 - RNA, 19 nt, Artificial Sequence
  Description of Artificial Sequence: Synthetic oligonucleotide
  Sense strand starting at position 1276 SEQ ID NO: 3334
guccucagagauuguaaug

SEQ ID NO: 259229 - RNA, 19 nt, Artificial Sequence
  Description of Artificial Sequence: Synthetic oligonucleotide
  Antisense strand to SEQ ID NO: 259228
cauuacaaucucugaggac

SEQ ID NO: 259230 - RNA, 19 nt, Artificial Sequence
  Description of Artificial Sequence: Synthetic oligonucleotide
  Sense strand starting at position 1283 SEQ ID NO: 3334
gagauuguaaugugagaag

SEQ ID NO: 259231 - RNA, 19 nt, Artificial Sequence
  Description of Artificial Sequence: Synthetic oligonucleotide
  Antisense strand to SEQ ID NO: 259230
cuucucacauuacaaucuc

SEQ ID NO: 259232 - RNA, 19 nt, Artificial Sequence
  Description of Artificial Sequence: Synthetic oligonucleotide
  Sense strand starting at position 1329 SEQ ID NO: 3334
ggcaguguuaagggauaug

SEQ ID NO: 259233 - RNA, 19 nt, Artificial Sequence
  Description of Artificial Sequence: Synthetic oligonucleotide
  Antisense strand to SEQ ID NO: 259232
cauaucccuuaacacugcc

SEQ ID NO: 259234 - RNA, 19 nt, Artificial Sequence
  Description of Artificial Sequence: Synthetic oligonucleotide
  Sense strand starting at position 1334 SEQ ID NO: 3334
uguuaagggauaugcagaa

SEQ ID NO: 259235 - RNA, 19 nt, Artificial Sequence
  Description of Artificial Sequence: Synthetic oligonucleotide
  Antisense strand to SEQ ID NO: 259234
uucugcauaucccuuaaca

SEQ ID NO: 259236 - RNA, 19 nt, Artificial Sequence
  Description of Artificial Sequence: Synthetic oligonucleotide
  Sense strand starting at position 1439 SEQ ID NO: 3334
gugaucuuagggcagaauu

SEQ ID NO: 259237 - RNA, 19 nt, Artificial Sequence
  Description of Artificial Sequence: Synthetic oligonucleotide
  Antisense strand to SEQ ID NO: 259236
aauucugcccuaagaucac

SEQ ID NO: 259238 - RNA, 19 nt, Artificial Sequence
  Description of Artificial Sequence: Synthetic oligonucleotide
  Sense strand starting at position 1575 SEQ ID NO: 3334
guaggauacuguuccagaa

SEQ ID NO: 259239 - RNA, 19 nt, Artificial Sequence
  Description of Artificial Sequence: Synthetic oligonucleotide
  Antisense strand to SEQ ID NO: 259238
uucuggaacaguauccuac

SEQ ID NO: 259240 - RNA, 19 nt, Artificial Sequence
  Description of Artificial Sequence: Synthetic oligonucleotide
  Sense strand starting at position 1721 SEQ ID NO: 3334
ucuauugaacugggaucuu

SEQ ID NO: 259241 - RNA, 19 nt, Artificial Sequence
  Description of Artificial Sequence: Synthetic oligonucleotide
  Antisense strand to SEQ ID NO: 259240
aagaucccaguucaauaga

SEQ ID NO: 259242 - RNA, 19 nt, Artificial Sequence
  Description of Artificial Sequence: Synthetic oligonucleotide
  Sense strand starting at position 1733 SEQ ID NO: 3334
ggaucuuguuuccucccua

SEQ ID NO: 259243 - RNA, 19 nt, Artificial Sequence
  Description of Artificial Sequence: Synthetic oligonucleotide
  Antisense strand to SEQ ID NO: 259242
uagggaggaaacaagaucc

SEQ ID NO: 259244 - RNA, 19 nt, Artificial Sequence
  Description of Artificial Sequence: Synthetic oligonucleotide
  Sense strand starting at position 2378 SEQ ID NO: 3334
ucauuugugucacuugcaa

SEQ ID NO: 259245 - RNA, 19 nt, Artificial Sequence
  Description of Artificial Sequence: Synthetic oligonucleotide
  Antisense strand to SEQ ID NO: 259244
uugcaagugacacaaauga

SEQ ID NO: 259246 - RNA, 19 nt, Artificial Sequence
  Description of Artificial Sequence: Synthetic oligonucleotide
  Sense strand starting at position 2771 SEQ ID NO: 3334
aguggugucaaauacugga

SEQ ID NO: 259247 - RNA, 19 nt, Artificial Sequence
  Description of Artificial Sequence: Synthetic oligonucleotide
  Antisense strand to SEQ ID NO: 259246
uccaguauuugacaccacu

SEQ ID NO: 259248 - RNA, 19 nt, Artificial Sequence
  Description of Artificial Sequence: Synthetic oligonucleotide
  Sense strand starting at position 2775 SEQ ID NO: 3334
gugucaaauacuggaaaga

SEQ ID NO: 259249 - RNA, 19 nt, Artificial Sequence
  Description of Artificial Sequence: Synthetic oligonucleotide
  Antisense strand to SEQ ID NO: 259248
ucuuuccaguauuugacac

SEQ ID NO: 259250 - RNA, 19 nt, Artificial Sequence
  Description of Artificial Sequence: Synthetic oligonucleotide
  Sense strand starting at position 3109 SEQ ID NO: 3334
caaagcuuccagugaucug

SEQ ID NO: 259251 - RNA, 19 nt, Artificial Sequence
  Description of Artificial Sequence: Synthetic oligonucleotide
  Antisense strand to SEQ ID NO: 259250
cagaucacuggaagcuuug

SEQ ID NO: 259252 - RNA, 19 nt, Artificial Sequence
  Description of Artificial Sequence: Synthetic oligonucleotide
  Sense strand starting at position 3112 SEQ ID NO: 3334
agcuuccagugaucugaaa

SEQ ID NO: 259253 - RNA, 19 nt, Artificial Sequence
  Description of Artificial Sequence: Synthetic oligonucleotide
  Antisense strand to SEQ ID NO: 259252
uuucagaucacuggaagcu

SEQ ID NO: 259254 - RNA, 19 nt, Artificial Sequence
  Description of Artificial Sequence: Synthetic oligonucleotide
  Sense strand starting at position 3241 SEQ ID NO: 3334
augguuggaugcuuaguaa

SEQ ID NO: 259255 - RNA, 19 nt, Artificial Sequence
  Description of Artificial Sequence: Synthetic oligonucleotide
  Antisense strand to SEQ ID NO: 259254
uuacuaagcauccaaccau

SEQ ID NO: 259256 - RNA, 19 nt, Artificial Sequence
  Description of Artificial Sequence: Synthetic oligonucleotide
  Sense strand starting at position 3392 SEQ ID NO: 3334
gcaggauccagugguuaag

SEQ ID NO: 259257 - RNA, 19 nt, Artificial Sequence
  Description of Artificial Sequence: Synthetic oligonucleotide
  Antisense strand to SEQ ID NO: 259256
cuuaaccacuggauccugc

SEQ ID NO: 259258 - RNA, 19 nt, Artificial Sequence
  Description of Artificial Sequence: Synthetic oligonucleotide
  Sense strand starting at position 3394 SEQ ID NO: 3334
aggauccagugguuaagua

SEQ ID NO: 259259 - RNA, 19 nt, Artificial Sequence
  Description of Artificial Sequence: Synthetic oligonucleotide
  Antisense strand to SEQ ID NO: 259258
uacuuaaccacuggauccu

SEQ ID NO: 259260 - RNA, 19 nt, Artificial Sequence
  Description of Artificial Sequence: Synthetic oligonucleotide
  Sense strand starting at position 3395 SEQ ID NO: 3334
ggauccagugguuaaguaa

SEQ ID NO: 259261 - RNA, 19 nt, Artificial Sequence
  Description of Artificial Sequence: Synthetic oligonucleotide
  Antisense strand to SEQ ID NO: 259260
uuacuuaaccacuggaucc

SEQ ID NO: 259262 - RNA, 19 nt, Artificial Sequence
  Description of Artificial Sequence: Synthetic oligonucleotide
  Sense strand starting at position 3446 SEQ ID NO: 3334
uggacaccucuuugcauua

SEQ ID NO: 259263 - RNA, 19 nt, Artificial Sequence
  Description of Artificial Sequence: Synthetic oligonucleotide
  Antisense strand to SEQ ID NO: 259262
uaaugcaaagaggugucca

SEQ ID NO: 259264 - RNA, 19 nt, Artificial Sequence
  Description of Artificial Sequence: Synthetic oligonucleotide
  Sense strand starting at position 3447 SEQ ID NO: 3334
ggacaccucuuugcauuau

SEQ ID NO: 259265 - RNA, 19 nt, Artificial Sequence
  Description of Artificial Sequence: Synthetic oligonucleotide
  Antisense strand to SEQ ID NO: 259264
auaaugcaaagaggugucc

SEQ ID NO: 259266 - RNA, 19 nt, Artificial Sequence
  Description of Artificial Sequence: Synthetic oligonucleotide
  Sense strand starting at position 3485 SEQ ID NO: 3334
gugaauggacgaugacgaa

SEQ ID NO: 259267 - RNA, 19 nt, Artificial Sequence
  Description of Artificial Sequence: Synthetic oligonucleotide
  Antisense strand to SEQ ID NO: 259266
uucgucaucguccauucac

SEQ ID NO: 259268 - RNA, 19 nt, Artificial Sequence
  Description of Artificial Sequence: Synthetic oligonucleotide
  Sense strand starting at position 3505 SEQ ID NO: 3334
uagagaagugucugaggcu

SEQ ID NO: 259269 - RNA, 19 nt, Artificial Sequence
  Description of Artificial Sequence: Synthetic oligonucleotide
  Antisense strand to SEQ ID NO: 259268
agccucagacacuucucua

SEQ ID NO: 259270 - RNA, 19 nt, Artificial Sequence
  Description of Artificial Sequence: Synthetic oligonucleotide
  Sense strand starting at position 3522 SEQ ID NO: 3334
cugcuacuucuaggaauag

SEQ ID NO: 259271 - RNA, 19 nt, Artificial Sequence
  Description of Artificial Sequence: Synthetic oligonucleotide
  Antisense strand to SEQ ID NO: 259270
cuauuccuagaaguagcag

SEQ ID NO: 259272 - RNA, 19 nt, Artificial Sequence
  Description of Artificial Sequence: Synthetic oligonucleotide
  Sense strand starting at position 3681 SEQ ID NO: 3334
guuauaugaugaucgugac

SEQ ID NO: 259273 - RNA, 19 nt, Artificial Sequence
  Description of Artificial Sequence: Synthetic oligonucleotide
  Antisense strand to SEQ ID NO: 259272
gucacgaucaucauauaac

SEQ ID NO: 259274 - RNA, 19 nt, Artificial Sequence
  Description of Artificial Sequence: Synthetic oligonucleotide
  Sense strand starting at position 3682 SEQ ID NO: 3334
uuauaugaugaucgugaca

SEQ ID NO: 259275 - RNA, 19 nt, Artificial Sequence
  Description of Artificial Sequence: Synthetic oligonucleotide
  Antisense strand to SEQ ID NO: 259274
ugucacgaucaucauauaa

SEQ ID NO: 259276 - RNA, 19 nt, Artificial Sequence
  Description of Artificial Sequence: Synthetic oligonucleotide
  Sense strand starting at position 3685 SEQ ID NO: 3334
uaugaugaucgugacauac

SEQ ID NO: 259277 - RNA, 19 nt, Artificial Sequence
  Description of Artificial Sequence: Synthetic oligonucleotide
  Antisense strand to SEQ ID NO: 259276
guaugucacgaucaucaua

SEQ ID NO: 259278 - RNA, 19 nt, Artificial Sequence
  Description of Artificial Sequence: Synthetic oligonucleotide
  Sense strand starting at position 476 SEQ ID NO: 3335
ccgguaggaaauuauuauu

SEQ ID NO: 259279 - RNA, 19 nt, Artificial Sequence
  Description of Artificial Sequence: Synthetic oligonucleotide
  Antisense strand to SEQ ID NO: 259278
aauaauaauuuccuaccgg

SEQ ID NO: 259280 - RNA, 19 nt, Artificial Sequence
  Description of Artificial Sequence: Synthetic oligonucleotide
  Sense strand starting at position 595 SEQ ID NO: 3335
gcuuucuuugagcaccuau

SEQ ID NO: 259281 - RNA, 19 nt, Artificial Sequence
  Description of Artificial Sequence: Synthetic oligonucleotide
  Antisense strand to SEQ ID NO: 259280
auaggugcucaaagaaagc

SEQ ID NO: 259282 - RNA, 19 nt, Artificial Sequence
  Description of Artificial Sequence: Synthetic oligonucleotide
  Sense strand starting at position 785 SEQ ID NO: 3335
agacaucgacgaggaauau

SEQ ID NO: 259283 - RNA, 19 nt, Artificial Sequence
  Description of Artificial Sequence: Synthetic oligonucleotide
  Antisense strand to SEQ ID NO: 259282
auauuccucgucgaugucu

SEQ ID NO: 259284 - RNA, 19 nt, Artificial Sequence
  Description of Artificial Sequence: Synthetic oligonucleotide
  Sense strand starting at position 806 SEQ ID NO: 3335
uaggccguccaauaagaau

SEQ ID NO: 259285 - RNA, 19 nt, Artificial Sequence
  Description of Artificial Sequence: Synthetic oligonucleotide
  Antisense strand to SEQ ID NO: 259284
auucuuauuggacggccua

SEQ ID NO: 259286 - RNA, 19 nt, Artificial Sequence
  Description of Artificial Sequence: Synthetic oligonucleotide
  Sense strand starting at position 932 SEQ ID NO: 3335
aggacaagccuccgggaaa

SEQ ID NO: 259287 - RNA, 19 nt, Artificial Sequence
  Description of Artificial Sequence: Synthetic oligonucleotide
  Antisense strand to SEQ ID NO: 259286
uuucccggaggcuuguccu

SEQ ID NO: 259288 - RNA, 19 nt, Artificial Sequence
  Description of Artificial Sequence: Synthetic oligonucleotide
  Sense strand starting at position 963 SEQ ID NO: 3335
cccaguuuggagggugaaa

SEQ ID NO: 259289 - RNA, 19 nt, Artificial Sequence
  Description of Artificial Sequence: Synthetic oligonucleotide
  Antisense strand to SEQ ID NO: 259288
uuucacccuccaaacuggg

SEQ ID NO: 259290 - RNA, 19 nt, Artificial Sequence
  Description of Artificial Sequence: Synthetic oligonucleotide
  Sense strand starting at position 1410 SEQ ID NO: 3335
auuguaguuccugggagaa

SEQ ID NO: 259291 - RNA, 19 nt, Artificial Sequence
  Description of Artificial Sequence: Synthetic oligonucleotide
  Antisense strand to SEQ ID NO: 259290
uucucccaggaacuacaau

SEQ ID NO: 259292 - RNA, 19 nt, Artificial Sequence
  Description of Artificial Sequence: Synthetic oligonucleotide
  Sense strand starting at position 2089 SEQ ID NO: 3335
ucuuaugucuuaccuggaa

SEQ ID NO: 259293 - RNA, 19 nt, Artificial Sequence
  Description of Artificial Sequence: Synthetic oligonucleotide
  Antisense strand to SEQ ID NO: 259292
uuccagguaagacauaaga

SEQ ID NO: 259294 - RNA, 19 nt, Artificial Sequence
  Description of Artificial Sequence: Synthetic oligonucleotide
  Sense strand starting at position 2198 SEQ ID NO: 3335
gacauuauguugcuuugaa

SEQ ID NO: 259295 - RNA, 19 nt, Artificial Sequence
  Description of Artificial Sequence: Synthetic oligonucleotide
  Antisense strand to SEQ ID NO: 259294
uucaaagcaacauaauguc

SEQ ID NO: 259296 - RNA, 19 nt, Artificial Sequence
  Description of Artificial Sequence: Synthetic oligonucleotide
  Sense strand starting at position 2199 SEQ ID NO: 3335
acauuauguugcuuugaaa

SEQ ID NO: 259297 - RNA, 19 nt, Artificial Sequence
  Description of Artificial Sequence: Synthetic oligonucleotide
  Antisense strand to SEQ ID NO: 259296
uuucaaagcaacauaaugu

SEQ ID NO: 259298 - RNA, 19 nt, Artificial Sequence
  Description of Artificial Sequence: Synthetic oligonucleotide
  Sense strand starting at position 2237 SEQ ID NO: 3335
gccuaagaguucuuuccug

SEQ ID NO: 259299 - RNA, 19 nt, Artificial Sequence
  Description of Artificial Sequence: Synthetic oligonucleotide
  Antisense strand to SEQ ID NO: 259298
caggaaagaacucuuaggc

SEQ ID NO: 259300 - RNA, 19 nt, Artificial Sequence
  Description of Artificial Sequence: Synthetic oligonucleotide
  Sense strand starting at position 2243 SEQ ID NO: 3335
gaguucuuuccugaacgga

SEQ ID NO: 259301 - RNA, 19 nt, Artificial Sequence
  Description of Artificial Sequence: Synthetic oligonucleotide
  Antisense strand to SEQ ID NO: 259300
uccguucaggaaagaacuc

SEQ ID NO: 259302 - RNA, 19 nt, Artificial Sequence
  Description of Artificial Sequence: Synthetic oligonucleotide
  Sense strand starting at position 2246 SEQ ID NO: 3335
uucuuuccugaacggaaau

SEQ ID NO: 259303 - RNA, 19 nt, Artificial Sequence
  Description of Artificial Sequence: Synthetic oligonucleotide
  Antisense strand to SEQ ID NO: 259302
auuuccguucaggaaagaa

SEQ ID NO: 259304 - RNA, 19 nt, Artificial Sequence
  Description of Artificial Sequence: Synthetic oligonucleotide
  Sense strand starting at position 2256 SEQ ID NO: 3335
aacggaaauucuuuauguc

SEQ ID NO: 259305 - RNA, 19 nt, Artificial Sequence
  Description of Artificial Sequence: Synthetic oligonucleotide
  Antisense strand to SEQ ID NO: 259304
gacauaaagaauuuccguu

SEQ ID NO: 259306 - RNA, 19 nt, Artificial Sequence
  Description of Artificial Sequence: Synthetic oligonucleotide
  Sense strand starting at position 2257 SEQ ID NO: 3335
acggaaauucuuuaugucu

SEQ ID NO: 259307 - RNA, 19 nt, Artificial Sequence
  Description of Artificial Sequence: Synthetic oligonucleotide
  Antisense strand to SEQ ID NO: 259306
agacauaaagaauuuccgu

SEQ ID NO: 259308 - RNA, 19 nt, Artificial Sequence
  Description of Artificial Sequence: Synthetic oligonucleotide
  Sense strand starting at position 2461 SEQ ID NO: 3335
cuacauuagugccuaguga

SEQ ID NO: 259309 - RNA, 19 nt, Artificial Sequence
  Description of Artificial Sequence: Synthetic oligonucleotide
  Antisense strand to SEQ ID NO: 259308
ucacuaggcacuaauguag

SEQ ID NO: 259310 - RNA, 19 nt, Artificial Sequence
  Description of Artificial Sequence: Synthetic oligonucleotide
  Sense strand starting at position 2462 SEQ ID NO: 3335
uacauuagugccuagugaa

SEQ ID NO: 259311 - RNA, 19 nt, Artificial Sequence
  Description of Artificial Sequence: Synthetic oligonucleotide
  Antisense strand to SEQ ID NO: 259310
uucacuaggcacuaaugua

SEQ ID NO: 259312 - RNA, 19 nt, Artificial Sequence
  Description of Artificial Sequence: Synthetic oligonucleotide
  Sense strand starting at position 2503 SEQ ID NO: 3335
gaaauaagacuaggcagua

SEQ ID NO: 259313 - RNA, 19 nt, Artificial Sequence
  Description of Artificial Sequence: Synthetic oligonucleotide
  Antisense strand to SEQ ID NO: 259312
uacugccuagucuuauuuc

SEQ ID NO: 259314 - RNA, 19 nt, Artificial Sequence
  Description of Artificial Sequence: Synthetic oligonucleotide
  Sense strand starting at position 2630 SEQ ID NO: 3335
cagaguacuguuuaguguu

SEQ ID NO: 259315 - RNA, 19 nt, Artificial Sequence
  Description of Artificial Sequence: Synthetic oligonucleotide
  Antisense strand to SEQ ID NO: 259314
aacacuaaacaguacucug

SEQ ID NO: 259316 - RNA, 19 nt, Artificial Sequence
  Description of Artificial Sequence: Synthetic oligonucleotide
  Sense strand starting at position 2637 SEQ ID NO: 3335
cuguuuaguguuuagucua

SEQ ID NO: 259317 - RNA, 19 nt, Artificial Sequence
  Description of Artificial Sequence: Synthetic oligonucleotide
  Antisense strand to SEQ ID NO: 259316
uagacuaaacacuaaacag

SEQ ID NO: 259318 - RNA, 19 nt, Artificial Sequence
  Description of Artificial Sequence: Synthetic oligonucleotide
  Sense strand starting at position 2642 SEQ ID NO: 3335
uaguguuuagucuacuuau

SEQ ID NO: 259319 - RNA, 19 nt, Artificial Sequence
  Description of Artificial Sequence: Synthetic oligonucleotide
  Antisense strand to SEQ ID NO: 259318
auaaguagacuaaacacua

SEQ ID NO: 259320 - RNA, 19 nt, Artificial Sequence
  Description of Artificial Sequence: Synthetic oligonucleotide
  Sense strand starting at position 2701 SEQ ID NO: 3335
ugcugcuuuggagaauuga

SEQ ID NO: 259321 - RNA, 19 nt, Artificial Sequence
  Description of Artificial Sequence: Synthetic oligonucleotide
  Antisense strand to SEQ ID NO: 259320
ucaauucuccaaagcagca

SEQ ID NO: 259322 - RNA, 19 nt, Artificial Sequence
  Description of Artificial Sequence: Synthetic oligonucleotide
  Sense strand starting at position 2709 SEQ ID NO: 3335
uggagaauugauggauugu

SEQ ID NO: 259323 - RNA, 19 nt, Artificial Sequence
  Description of Artificial Sequence: Synthetic oligonucleotide
  Antisense strand to SEQ ID NO: 259322
acaauccaucaauucucca

SEQ ID NO: 259324 - RNA, 19 nt, Artificial Sequence
  Description of Artificial Sequence: Synthetic oligonucleotide
  Sense strand starting at position 2808 SEQ ID NO: 3335
guuuaacagucagccucau

SEQ ID NO: 259325 - RNA, 19 nt, Artificial Sequence
  Description of Artificial Sequence: Synthetic oligonucleotide
  Antisense strand to SEQ ID NO: 259324
augaggcugacuguuaaac

SEQ ID NO: 259326 - RNA, 19 nt, Artificial Sequence
  Description of Artificial Sequence: Synthetic oligonucleotide
  Sense strand starting at position 3339 SEQ ID NO: 3335
ugucacaugcaucagaauu

SEQ ID NO: 259327 - RNA, 19 nt, Artificial Sequence
  Description of Artificial Sequence: Synthetic oligonucleotide
  Antisense strand to SEQ ID NO: 259326
aauucugaugcaugugaca

SEQ ID NO: 259328 - RNA, 19 nt, Artificial Sequence
  Description of Artificial Sequence: Synthetic oligonucleotide
  Sense strand starting at position 3413 SEQ ID NO: 3335
guuuaucaguuguuagaca

SEQ ID NO: 259329 - RNA, 19 nt, Artificial Sequence
  Description of Artificial Sequence: Synthetic oligonucleotide
  Antisense strand to SEQ ID NO: 259328
ugucuaacaacugauaaac

SEQ ID NO: 259330 - RNA, 19 nt, Artificial Sequence
  Description of Artificial Sequence: Synthetic oligonucleotide
  Sense strand starting at position 3524 SEQ ID NO: 3335
gauuauaccuaggaaugga

SEQ ID NO: 259331 - RNA, 19 nt, Artificial Sequence
  Description of Artificial Sequence: Synthetic oligonucleotide
  Antisense strand to SEQ ID NO: 259330
uccauuccuagguauaauc

SEQ ID NO: 259332 - RNA, 19 nt, Artificial Sequence
  Description of Artificial Sequence: Synthetic oligonucleotide
  Sense strand starting at position 3538 SEQ ID NO: 3335
auggaauugguaggucaua

SEQ ID NO: 259333 - RNA, 19 nt, Artificial Sequence
  Description of Artificial Sequence: Synthetic oligonucleotide
  Antisense strand to SEQ ID NO: 259332
uaugaccuaccaauuccau

SEQ ID NO: 259334 - RNA, 19 nt, Artificial Sequence
  Description of Artificial Sequence: Synthetic oligonucleotide
  Sense strand starting at position 3539 SEQ ID NO: 3335
uggaauugguaggucauaa

SEQ ID NO: 259335 - RNA, 19 nt, Artificial Sequence
  Description of Artificial Sequence: Synthetic oligonucleotide
  Antisense strand to SEQ ID NO: 259334
uuaugaccuaccaauucca

SEQ ID NO: 259336 - RNA, 19 nt, Artificial Sequence
  Description of Artificial Sequence: Synthetic oligonucleotide
  Sense strand starting at position 3572 SEQ ID NO: 3335
ugcguuuaauaguuagaag

SEQ ID NO: 259337 - RNA, 19 nt, Artificial Sequence
  Description of Artificial Sequence: Synthetic oligonucleotide
  Antisense strand to SEQ ID NO: 259336
cuucuaacuauuaaacgca

SEQ ID NO: 259338 - RNA, 19 nt, Artificial Sequence
  Description of Artificial Sequence: Synthetic oligonucleotide
  Sense strand starting at position 3573 SEQ ID NO: 3335
gcguuuaauaguuagaaga

SEQ ID NO: 259339 - RNA, 19 nt, Artificial Sequence
  Description of Artificial Sequence: Synthetic oligonucleotide
  Antisense strand to SEQ ID NO: 259338
ucuucuaacuauuaaacgc

SEQ ID NO: 259340 - RNA, 19 nt, Artificial Sequence
  Description of Artificial Sequence: Synthetic oligonucleotide
  Sense strand starting at position 3680 SEQ ID NO: 3335
acacuugaugugugacuca

SEQ ID NO: 259341 - RNA, 19 nt, Artificial Sequence
  Description of Artificial Sequence: Synthetic oligonucleotide
  Antisense strand to SEQ ID NO: 259340
ugagucacacaucaagugu

SEQ ID NO: 259342 - RNA, 19 nt, Artificial Sequence
  Description of Artificial Sequence: Synthetic oligonucleotide
  Sense strand starting at position 3685 SEQ ID NO: 3335
ugaugugugacucacagca

SEQ ID NO: 259343 - RNA, 19 nt, Artificial Sequence
  Description of Artificial Sequence: Synthetic oligonucleotide
  Antisense strand to SEQ ID NO: 259342
ugcugugagucacacauca

SEQ ID NO: 259344 - RNA, 19 nt, Artificial Sequence
  Description of Artificial Sequence: Synthetic oligonucleotide
  Sense strand starting at position 3780 SEQ ID NO: 3335
guauguuauucuuuggaga

SEQ ID NO: 259345 - RNA, 19 nt, Artificial Sequence
  Description of Artificial Sequence: Synthetic oligonucleotide
  Antisense strand to SEQ ID NO: 259344
ucuccaaagaauaacauac

SEQ ID NO: 259346 - RNA, 19 nt, Artificial Sequence
  Description of Artificial Sequence: Synthetic oligonucleotide
  Sense strand starting at position 3781 SEQ ID NO: 3335
uauguuauucuuuggagaa

SEQ ID NO: 259347 - RNA, 19 nt, Artificial Sequence
  Description of Artificial Sequence: Synthetic oligonucleotide
  Antisense strand to SEQ ID NO: 259346
uucuccaaagaauaacaua

SEQ ID NO: 259348 - RNA, 19 nt, Artificial Sequence
  Description of Artificial Sequence: Synthetic oligonucleotide
  Sense strand starting at position 3793 SEQ ID NO: 3335
uggagaaauguuugguuag

SEQ ID NO: 259349 - RNA, 19 nt, Artificial Sequence
  Description of Artificial Sequence: Synthetic oligonucleotide
  Antisense strand to SEQ ID NO: 259348
cuaaccaaacauuucucca

SEQ ID NO: 259350 - RNA, 19 nt, Artificial Sequence
  Description of Artificial Sequence: Synthetic oligonucleotide
  Sense strand starting at position 3795 SEQ ID NO: 3335
gagaaauguuugguuagau

SEQ ID NO: 259351 - RNA, 19 nt, Artificial Sequence
  Description of Artificial Sequence: Synthetic oligonucleotide
  Antisense strand to SEQ ID NO: 259350
aucuaaccaaacauuucuc

SEQ ID NO: 259352 - RNA, 19 nt, Artificial Sequence
  Description of Artificial Sequence: Synthetic oligonucleotide
  Sense strand starting at position 3796 SEQ ID NO: 3335
agaaauguuugguuagaua

SEQ ID NO: 259353 - RNA, 19 nt, Artificial Sequence
  Description of Artificial Sequence: Synthetic oligonucleotide
  Antisense strand to SEQ ID NO: 259352
uaucuaaccaaacauuucu

SEQ ID NO: 259354 - RNA, 19 nt, Artificial Sequence
  Description of Artificial Sequence: Synthetic oligonucleotide
  Sense strand starting at position 3943 SEQ ID NO: 3335
ugauguuauuguuugaaac

SEQ ID NO: 259355 - RNA, 19 nt, Artificial Sequence
  Description of Artificial Sequence: Synthetic oligonucleotide
  Antisense strand to SEQ ID NO: 259354
guuucaaacaauaacauca

SEQ ID NO: 259356 - RNA, 19 nt, Artificial Sequence
  Description of Artificial Sequence: Synthetic oligonucleotide
  Sense strand starting at position 3944 SEQ ID NO: 3335
gauguuauuguuugaaaca

SEQ ID NO: 259357 - RNA, 19 nt, Artificial Sequence
  Description of Artificial Sequence: Synthetic oligonucleotide
  Antisense strand to SEQ ID NO: 259356
uguuucaaacaauaacauc

SEQ ID NO: 259358 - RNA, 19 nt, Artificial Sequence
  Description of Artificial Sequence: Synthetic oligonucleotide
  Sense strand starting at position 253 SEQ ID NO: 3336
cccagaaagccucggaagu

SEQ ID NO: 259359 - RNA, 19 nt, Artificial Sequence
  Description of Artificial Sequence: Synthetic oligonucleotide
  Antisense strand to SEQ ID NO: 259358
acuuccgaggcuuucuggg

SEQ ID NO: 259360 - RNA, 19 nt, Artificial Sequence
  Description of Artificial Sequence: Synthetic oligonucleotide
  Sense strand starting at position 263 SEQ ID NO: 3336
cucggaagucaccgaaaca

SEQ ID NO: 259361 - RNA, 19 nt, Artificial Sequence
  Description of Artificial Sequence: Synthetic oligonucleotide
  Antisense strand to SEQ ID NO: 259360
uguuucggugacuuccgag

SEQ ID NO: 259362 - RNA, 19 nt, Artificial Sequence
  Description of Artificial Sequence: Synthetic oligonucleotide
  Sense strand starting at position 264 SEQ ID NO: 3336
ucggaagucaccgaaacaa

SEQ ID NO: 259363 - RNA, 19 nt, Artificial Sequence
  Description of Artificial Sequence: Synthetic oligonucleotide
  Antisense strand to SEQ ID NO: 259362
uuguuucggugacuuccga

SEQ ID NO: 259364 - RNA, 19 nt, Artificial Sequence
  Description of Artificial Sequence: Synthetic oligonucleotide
  Sense strand starting at position 292 SEQ ID NO: 3336
aacugacugugguugcaaa

SEQ ID NO: 259365 - RNA, 19 nt, Artificial Sequence
  Description of Artificial Sequence: Synthetic oligonucleotide
  Antisense strand to SEQ ID NO: 259364
uuugcaaccacagucaguu

SEQ ID NO: 259366 - RNA, 19 nt, Artificial Sequence
  Description of Artificial Sequence: Synthetic oligonucleotide
  Sense strand starting at position 773 SEQ ID NO: 3336
cucauuagccaacggaauu

SEQ ID NO: 259367 - RNA, 19 nt, Artificial Sequence
  Description of Artificial Sequence: Synthetic oligonucleotide
  Antisense strand to SEQ ID NO: 259366
aauuccguuggcuaaugag

SEQ ID NO: 259368 - RNA, 19 nt, Artificial Sequence
  Description of Artificial Sequence: Synthetic oligonucleotide
  Sense strand starting at position 844 SEQ ID NO: 3336
uaagucucucgguggauga

SEQ ID NO: 259369 - RNA, 19 nt, Artificial Sequence
  Description of Artificial Sequence: Synthetic oligonucleotide
  Antisense strand to SEQ ID NO: 259368
ucauccaccgagagacuua

SEQ ID NO: 259370 - RNA, 19 nt, Artificial Sequence
  Description of Artificial Sequence: Synthetic oligonucleotide
  Sense strand starting at position 857 SEQ ID NO: 3336
ggaugagaggccugaauac

SEQ ID NO: 259371 - RNA, 19 nt, Artificial Sequence
  Description of Artificial Sequence: Synthetic oligonucleotide
  Antisense strand to SEQ ID NO: 259370
guauucaggccucucaucc

SEQ ID NO: 259372 - RNA, 19 nt, Artificial Sequence
  Description of Artificial Sequence: Synthetic oligonucleotide
  Sense strand starting at position 970 SEQ ID NO: 3336
ugcucuucccucgagaaug

SEQ ID NO: 259373 - RNA, 19 nt, Artificial Sequence
  Description of Artificial Sequence: Synthetic oligonucleotide
  Antisense strand to SEQ ID NO: 259372
cauucucgagggaagagca

SEQ ID NO: 259374 - RNA, 19 nt, Artificial Sequence
  Description of Artificial Sequence: Synthetic oligonucleotide
  Sense strand starting at position 998 SEQ ID NO: 3336
ucuaacuuugugggaggua

SEQ ID NO: 259375 - RNA, 19 nt, Artificial Sequence
  Description of Artificial Sequence: Synthetic oligonucleotide
  Antisense strand to SEQ ID NO: 259374
uaccucccacaaaguuaga

SEQ ID NO: 259376 - RNA, 19 nt, Artificial Sequence
  Description of Artificial Sequence: Synthetic oligonucleotide
  Sense strand starting at position 2039 SEQ ID NO: 3336
cuccucuugcgguuaaguu

SEQ ID NO: 259377 - RNA, 19 nt, Artificial Sequence
  Description of Artificial Sequence: Synthetic oligonucleotide
  Antisense strand to SEQ ID NO: 259376
aacuuaaccgcaagaggag

SEQ ID NO: 259378 - RNA, 19 nt, Artificial Sequence
  Description of Artificial Sequence: Synthetic oligonucleotide
  Sense strand starting at position 2064 SEQ ID NO: 3336
acacuucggcuuuauuaga

SEQ ID NO: 259379 - RNA, 19 nt, Artificial Sequence
  Description of Artificial Sequence: Synthetic oligonucleotide
  Antisense strand to SEQ ID NO: 259378
ucuaauaaagccgaagugu

SEQ ID NO: 259380 - RNA, 19 nt, Artificial Sequence
  Description of Artificial Sequence: Synthetic oligonucleotide
  Sense strand starting at position 2092 SEQ ID NO: 3336
cuuuaagaacuugguguuu

SEQ ID NO: 259381 - RNA, 19 nt, Artificial Sequence
  Description of Artificial Sequence: Synthetic oligonucleotide
  Antisense strand to SEQ ID NO: 259380
aaacaccaaguucuuaaag

SEQ ID NO: 259382 - RNA, 19 nt, Artificial Sequence
  Description of Artificial Sequence: Synthetic oligonucleotide
  Sense strand starting at position 2105 SEQ ID NO: 3336
guguuugcaagguaaaccu

SEQ ID NO: 259383 - RNA, 19 nt, Artificial Sequence
  Description of Artificial Sequence: Synthetic oligonucleotide
  Antisense strand to SEQ ID NO: 259382
agguuuaccuugcaaacac

SEQ ID NO: 259384 - RNA, 19 nt, Artificial Sequence
  Description of Artificial Sequence: Synthetic oligonucleotide
  Sense strand starting at position 2177 SEQ ID NO: 3336
ugcugugaggcuuaggaau

SEQ ID NO: 259385 - RNA, 19 nt, Artificial Sequence
  Description of Artificial Sequence: Synthetic oligonucleotide
  Antisense strand to SEQ ID NO: 259384
auuccuaagccucacagca

SEQ ID NO: 259386 - RNA, 19 nt, Artificial Sequence
  Description of Artificial Sequence: Synthetic oligonucleotide
  Sense strand starting at position 2221 SEQ ID NO: 3336
gugauuccaugaguuccaa

SEQ ID NO: 259387 - RNA, 19 nt, Artificial Sequence
  Description of Artificial Sequence: Synthetic oligonucleotide
  Antisense strand to SEQ ID NO: 259386
uuggaacucauggaaucac

SEQ ID NO: 259388 - RNA, 19 nt, Artificial Sequence
  Description of Artificial Sequence: Synthetic oligonucleotide
  Sense strand starting at position 2272 SEQ ID NO: 3336
ccuugucuuccaugagaau

SEQ ID NO: 259389 - RNA, 19 nt, Artificial Sequence
  Description of Artificial Sequence: Synthetic oligonucleotide
  Antisense strand to SEQ ID NO: 259388
auucucauggaagacaagg

SEQ ID NO: 259390 - RNA, 19 nt, Artificial Sequence
  Description of Artificial Sequence: Synthetic oligonucleotide
  Sense strand starting at position 2273 SEQ ID NO: 3336
cuugucuuccaugagaauu

SEQ ID NO: 259391 - RNA, 19 nt, Artificial Sequence
  Description of Artificial Sequence: Synthetic oligonucleotide
  Antisense strand to SEQ ID NO: 259390
aauucucauggaagacaag

SEQ ID NO: 259392 - RNA, 19 nt, Artificial Sequence
  Description of Artificial Sequence: Synthetic oligonucleotide
  Sense strand starting at position 2429 SEQ ID NO: 3336
agugcuugucaguauggga

SEQ ID NO: 259393 - RNA, 19 nt, Artificial Sequence
  Description of Artificial Sequence: Synthetic oligonucleotide
  Antisense strand to SEQ ID NO: 259392
ucccauacugacaagcacu

SEQ ID NO: 259394 - RNA, 19 nt, Artificial Sequence
  Description of Artificial Sequence: Synthetic oligonucleotide
  Sense strand starting at position 2458 SEQ ID NO: 3336
gccaaauaaugugauauuu

SEQ ID NO: 259395 - RNA, 19 nt, Artificial Sequence
  Description of Artificial Sequence: Synthetic oligonucleotide
  Antisense strand to SEQ ID NO: 259394
aaauaucacauuauuuggc

SEQ ID NO: 259396 - RNA, 19 nt, Artificial Sequence
  Description of Artificial Sequence: Synthetic oligonucleotide
  Sense strand starting at position 2506 SEQ ID NO: 3336
agguguacacaugacuuau

SEQ ID NO: 259397 - RNA, 19 nt, Artificial Sequence
  Description of Artificial Sequence: Synthetic oligonucleotide
  Antisense strand to SEQ ID NO: 259396
auaagucauguguacaccu

SEQ ID NO: 259398 - RNA, 19 nt, Artificial Sequence
  Description of Artificial Sequence: Synthetic oligonucleotide
  Sense strand starting at position 2582 SEQ ID NO: 3336
ugggaagcccucugaauug

SEQ ID NO: 259399 - RNA, 19 nt, Artificial Sequence
  Description of Artificial Sequence: Synthetic oligonucleotide
  Antisense strand to SEQ ID NO: 259398
caauucagagggcuuccca

SEQ ID NO: 259400 - RNA, 19 nt, Artificial Sequence
  Description of Artificial Sequence: Synthetic oligonucleotide
  Sense strand starting at position 2600 SEQ ID NO: 3336
gcguucuugggcuucuuaa

SEQ ID NO: 259401 - RNA, 19 nt, Artificial Sequence
  Description of Artificial Sequence: Synthetic oligonucleotide
  Antisense strand to SEQ ID NO: 259400
uuaagaagcccaagaacgc

SEQ ID NO: 259402 - RNA, 19 nt, Artificial Sequence
  Description of Artificial Sequence: Synthetic oligonucleotide
  Sense strand starting at position 2665 SEQ ID NO: 3336
cuuggcugggccuaagaau

SEQ ID NO: 259403 - RNA, 19 nt, Artificial Sequence
  Description of Artificial Sequence: Synthetic oligonucleotide
  Antisense strand to SEQ ID NO: 259402
auucuuaggcccagccaag

SEQ ID NO: 259404 - RNA, 19 nt, Artificial Sequence
  Description of Artificial Sequence: Synthetic oligonucleotide
  Sense strand starting at position 2752 SEQ ID NO: 3336
gaccauggcccgugacaga

SEQ ID NO: 259405 - RNA, 19 nt, Artificial Sequence
  Description of Artificial Sequence: Synthetic oligonucleotide
  Antisense strand to SEQ ID NO: 259404
ucugucacgggccaugguc

SEQ ID NO: 259406 - RNA, 19 nt, Artificial Sequence
  Description of Artificial Sequence: Synthetic oligonucleotide
  Sense strand starting at position 2951 SEQ ID NO: 3336
cugguugacaguugaagac

SEQ ID NO: 259407 - RNA, 19 nt, Artificial Sequence
  Description of Artificial Sequence: Synthetic oligonucleotide
  Antisense strand to SEQ ID NO: 259406
gucuucaacugucaaccag

SEQ ID NO: 259408 - RNA, 19 nt, Artificial Sequence
  Description of Artificial Sequence: Synthetic oligonucleotide
  Sense strand starting at position 3104 SEQ ID NO: 3336
cuagauucuuacguaaucu

SEQ ID NO: 259409 - RNA, 19 nt, Artificial Sequence
  Description of Artificial Sequence: Synthetic oligonucleotide
  Antisense strand to SEQ ID NO: 259408
agauuacguaagaaucuag

SEQ ID NO: 259410 - RNA, 19 nt, Artificial Sequence
  Description of Artificial Sequence: Synthetic oligonucleotide
  Sense strand starting at position 3113 SEQ ID NO: 3336
uacguaaucucuuuaggau

SEQ ID NO: 259411 - RNA, 19 nt, Artificial Sequence
  Description of Artificial Sequence: Synthetic oligonucleotide
  Antisense strand to SEQ ID NO: 259410
auccuaaagagauuacgua

SEQ ID NO: 259412 - RNA, 19 nt, Artificial Sequence
  Description of Artificial Sequence: Synthetic oligonucleotide
  Sense strand starting at position 3114 SEQ ID NO: 3336
acguaaucucuuuaggauu

SEQ ID NO: 259413 - RNA, 19 nt, Artificial Sequence
  Description of Artificial Sequence: Synthetic oligonucleotide
  Antisense strand to SEQ ID NO: 259412
aauccuaaagagauuacgu

SEQ ID NO: 259414 - RNA, 19 nt, Artificial Sequence
  Description of Artificial Sequence: Synthetic oligonucleotide
  Sense strand starting at position 3169 SEQ ID NO: 3336
uagaaauucuauguagaug

SEQ ID NO: 259415 - RNA, 19 nt, Artificial Sequence
  Description of Artificial Sequence: Synthetic oligonucleotide
  Antisense strand to SEQ ID NO: 259414
caucuacauagaauuucua

SEQ ID NO: 259416 - RNA, 19 nt, Artificial Sequence
  Description of Artificial Sequence: Synthetic oligonucleotide
  Sense strand starting at position 3280 SEQ ID NO: 3336
uuguuucuugucucguuau

SEQ ID NO: 259417 - RNA, 19 nt, Artificial Sequence
  Description of Artificial Sequence: Synthetic oligonucleotide
  Antisense strand to SEQ ID NO: 259416
auaacgagacaagaaacaa

SEQ ID NO: 259418 - RNA, 19 nt, Artificial Sequence
  Description of Artificial Sequence: Synthetic oligonucleotide
  Sense strand starting at position 3301 SEQ ID NO: 3336
cagugucagauuggaaagu

SEQ ID NO: 259419 - RNA, 19 nt, Artificial Sequence
  Description of Artificial Sequence: Synthetic oligonucleotide
  Antisense strand to SEQ ID NO: 259418
acuuuccaaucugacacug

SEQ ID NO: 259420 - RNA, 19 nt, Artificial Sequence
  Description of Artificial Sequence: Synthetic oligonucleotide
  Sense strand starting at position 3367 SEQ ID NO: 3336
uggauuguagggcaugaau

SEQ ID NO: 259421 - RNA, 19 nt, Artificial Sequence
  Description of Artificial Sequence: Synthetic oligonucleotide
  Antisense strand to SEQ ID NO: 259420
auucaugcccuacaaucca

SEQ ID NO: 259422 - RNA, 19 nt, Artificial Sequence
  Description of Artificial Sequence: Synthetic oligonucleotide
  Sense strand starting at position 3433 SEQ ID NO: 3336
agagcuuagucuccacuga

SEQ ID NO: 259423 - RNA, 19 nt, Artificial Sequence
  Description of Artificial Sequence: Synthetic oligonucleotide
  Antisense strand to SEQ ID NO: 259422
ucaguggagacuaagcucu

SEQ ID NO: 259424 - RNA, 19 nt, Artificial Sequence
  Description of Artificial Sequence: Synthetic oligonucleotide
  Sense strand starting at position 3522 SEQ ID NO: 3336
auuggagccuucccuagaa

SEQ ID NO: 259425 - RNA, 19 nt, Artificial Sequence
  Description of Artificial Sequence: Synthetic oligonucleotide
  Antisense strand to SEQ ID NO: 259424
uucuagggaaggcuccaau

SEQ ID NO: 259426 - RNA, 19 nt, Artificial Sequence
  Description of Artificial Sequence: Synthetic oligonucleotide
  Sense strand starting at position 3661 SEQ ID NO: 3336
gcaguuaaugcagaaguga

SEQ ID NO: 259427 - RNA, 19 nt, Artificial Sequence
  Description of Artificial Sequence: Synthetic oligonucleotide
  Antisense strand to SEQ ID NO: 259426
ucacuucugcauuaacugc

SEQ ID NO: 259428 - RNA, 19 nt, Artificial Sequence
  Description of Artificial Sequence: Synthetic oligonucleotide
  Sense strand starting at position 3684 SEQ ID NO: 3336
gaagauaaagguuguugua

SEQ ID NO: 259429 - RNA, 19 nt, Artificial Sequence
  Description of Artificial Sequence: Synthetic oligonucleotide
  Antisense strand to SEQ ID NO: 259428
uacaacaaccuuuaucuuc

SEQ ID NO: 259430 - RNA, 19 nt, Artificial Sequence
  Description of Artificial Sequence: Synthetic oligonucleotide
  Sense strand starting at position 3686 SEQ ID NO: 3336
agauaaagguuguuguaac

SEQ ID NO: 259431 - RNA, 19 nt, Artificial Sequence
  Description of Artificial Sequence: Synthetic oligonucleotide
  Antisense strand to SEQ ID NO: 259430
guuacaacaaccuuuaucu

SEQ ID NO: 259432 - RNA, 19 nt, Artificial Sequence
  Description of Artificial Sequence: Synthetic oligonucleotide
  Sense strand starting at position 3697 SEQ ID NO: 3336
guuguaacaaaguggaaau

SEQ ID NO: 259433 - RNA, 19 nt, Artificial Sequence
  Description of Artificial Sequence: Synthetic oligonucleotide
  Antisense strand to SEQ ID NO: 259432
auuuccacuuuguuacaac

SEQ ID NO: 259434 - RNA, 19 nt, Artificial Sequence
  Description of Artificial Sequence: Synthetic oligonucleotide
  Sense strand starting at position 3761 SEQ ID NO: 3336
gucucugguguugagaaca

SEQ ID NO: 259435 - RNA, 19 nt, Artificial Sequence
  Description of Artificial Sequence: Synthetic oligonucleotide
  Antisense strand to SEQ ID NO: 259434
uguucucaacaccagagac

SEQ ID NO: 259436 - RNA, 19 nt, Artificial Sequence
  Description of Artificial Sequence: Synthetic oligonucleotide
  Sense strand starting at position 3888 SEQ ID NO: 3336
aagugccuuugacucgaaa

SEQ ID NO: 259437 - RNA, 19 nt, Artificial Sequence
  Description of Artificial Sequence: Synthetic oligonucleotide
  Antisense strand to SEQ ID NO: 259436
uuucgagucaaaggcacuu

SEQ ID NO: 259438 - RNA, 19 nt, Artificial Sequence
  Description of Artificial Sequence: Synthetic oligonucleotide
  Sense strand starting at position 18 SEQ ID NO: 3338
agggcuugauuugagaaac

SEQ ID NO: 259439 - RNA, 19 nt, Artificial Sequence
  Description of Artificial Sequence: Synthetic oligonucleotide
  Antisense strand to SEQ ID NO: 259438
guuucucaaaucaagcccu

SEQ ID NO: 259440 - RNA, 19 nt, Artificial Sequence
  Description of Artificial Sequence: Synthetic oligonucleotide
  Sense strand starting at position 169 SEQ ID NO: 3338
ugaagucagauucgaagaa

SEQ ID NO: 259441 - RNA, 19 nt, Artificial Sequence
  Description of Artificial Sequence: Synthetic oligonucleotide
  Antisense strand to SEQ ID NO: 259440
uucuucgaaucugacuuca

SEQ ID NO: 259442 - RNA, 19 nt, Artificial Sequence
  Description of Artificial Sequence: Synthetic oligonucleotide
  Sense strand starting at position 331 SEQ ID NO: 3338
gucuaaugguuucuuuaaa

SEQ ID NO: 259443 - RNA, 19 nt, Artificial Sequence
  Description of Artificial Sequence: Synthetic oligonucleotide
  Antisense strand to SEQ ID NO: 259442
uuuaaagaaaccauuagac

SEQ ID NO: 259444 - RNA, 19 nt, Artificial Sequence
  Description of Artificial Sequence: Synthetic oligonucleotide
  Sense strand starting at position 459 SEQ ID NO: 3338
augacuuuaccauggcuaa

SEQ ID NO: 259445 - RNA, 19 nt, Artificial Sequence
  Description of Artificial Sequence: Synthetic oligonucleotide
  Antisense strand to SEQ ID NO: 259444
uuagccaugguaaagucau

SEQ ID NO: 259446 - RNA, 19 nt, Artificial Sequence
  Description of Artificial Sequence: Synthetic oligonucleotide
  Sense strand starting at position 460 SEQ ID NO: 3338
ugacuuuaccauggcuaag

SEQ ID NO: 259447 - RNA, 19 nt, Artificial Sequence
  Description of Artificial Sequence: Synthetic oligonucleotide
  Antisense strand to SEQ ID NO: 259446
cuuagccaugguaaaguca

SEQ ID NO: 259448 - RNA, 19 nt, Artificial Sequence
  Description of Artificial Sequence: Synthetic oligonucleotide
  Sense strand starting at position 581 SEQ ID NO: 3338
cagcaacugguuugacuau

SEQ ID NO: 259449 - RNA, 19 nt, Artificial Sequence
  Description of Artificial Sequence: Synthetic oligonucleotide
  Antisense strand to SEQ ID NO: 259448
auagucaaaccaguugcug

SEQ ID NO: 259450 - RNA, 19 nt, Artificial Sequence
  Description of Artificial Sequence: Synthetic oligonucleotide
  Sense strand starting at position 590 SEQ ID NO: 3338
guuugacuaugacugcuaa

SEQ ID NO: 259451 - RNA, 19 nt, Artificial Sequence
  Description of Artificial Sequence: Synthetic oligonucleotide
  Antisense strand to SEQ ID NO: 259450
uuagcagucauagucaaac

SEQ ID NO: 259452 - RNA, 19 nt, Artificial Sequence
  Description of Artificial Sequence: Synthetic oligonucleotide
  Sense strand starting at position 664 SEQ ID NO: 3338
uuggcaugcagacgauuua

SEQ ID NO: 259453 - RNA, 19 nt, Artificial Sequence
  Description of Artificial Sequence: Synthetic oligonucleotide
  Antisense strand to SEQ ID NO: 259452
uaaaucgucugcaugccaa

SEQ ID NO: 259454 - RNA, 19 nt, Artificial Sequence
  Description of Artificial Sequence: Synthetic oligonucleotide
  Sense strand starting at position 1051 SEQ ID NO: 3338
aagacuagcucugucauug

SEQ ID NO: 259455 - RNA, 19 nt, Artificial Sequence
  Description of Artificial Sequence: Synthetic oligonucleotide
  Antisense strand to SEQ ID NO: 259454
caaugacagagcuagucuu

SEQ ID NO: 259456 - RNA, 19 nt, Artificial Sequence
  Description of Artificial Sequence: Synthetic oligonucleotide
  Sense strand starting at position 1061 SEQ ID NO: 3338
cugucauuguuucugauuu

SEQ ID NO: 259457 - RNA, 19 nt, Artificial Sequence
  Description of Artificial Sequence: Synthetic oligonucleotide
  Antisense strand to SEQ ID NO: 259456
aaaucagaaacaaugacag

SEQ ID NO: 259458 - RNA, 19 nt, Artificial Sequence
  Description of Artificial Sequence: Synthetic oligonucleotide
  Sense strand starting at position 1069 SEQ ID NO: 3338
guuucugauuuguauuuag

SEQ ID NO: 259459 - RNA, 19 nt, Artificial Sequence
  Description of Artificial Sequence: Synthetic oligonucleotide
  Antisense strand to SEQ ID NO: 259458
cuaaauacaaaucagaaac

SEQ ID NO: 259460 - RNA, 19 nt, Artificial Sequence
  Description of Artificial Sequence: Synthetic oligonucleotide
  Sense strand starting at position 1123 SEQ ID NO: 3338
ugaaucuaauacuuacgua

SEQ ID NO: 259461 - RNA, 19 nt, Artificial Sequence
  Description of Artificial Sequence: Synthetic oligonucleotide
  Antisense strand to SEQ ID NO: 259460
uacguaaguauuagauuca

SEQ ID NO: 259462 - RNA, 19 nt, Artificial Sequence
  Description of Artificial Sequence: Synthetic oligonucleotide
  Sense strand starting at position 1415 SEQ ID NO: 3338
gugcccggccuguuuaaau

SEQ ID NO: 259463 - RNA, 19 nt, Artificial Sequence
  Description of Artificial Sequence: Synthetic oligonucleotide
  Antisense strand to SEQ ID NO: 259462
auuuaaacaggccgggcac

SEQ ID NO: 259464 - RNA, 19 nt, Artificial Sequence
  Description of Artificial Sequence: Synthetic oligonucleotide
  Sense strand starting at position 1473 SEQ ID NO: 3338
gcauguacucgguacaaag

SEQ ID NO: 259465 - RNA, 19 nt, Artificial Sequence
  Description of Artificial Sequence: Synthetic oligonucleotide
  Antisense strand to SEQ ID NO: 259464
cuuuguaccgaguacaugc

SEQ ID NO: 259466 - RNA, 19 nt, Artificial Sequence
  Description of Artificial Sequence: Synthetic oligonucleotide
  Sense strand starting at position 1599 SEQ ID NO: 3338
augagaugcucuucuaaua

SEQ ID NO: 259467 - RNA, 19 nt, Artificial Sequence
  Description of Artificial Sequence: Synthetic oligonucleotide
  Antisense strand to SEQ ID NO: 259466
uauuagaagagcaucucau

SEQ ID NO: 259468 - RNA, 19 nt, Artificial Sequence
  Description of Artificial Sequence: Synthetic oligonucleotide
  Sense strand starting at position 1625 SEQ ID NO: 3338
guaucucaagcauagcaaa

SEQ ID NO: 259469 - RNA, 19 nt, Artificial Sequence
  Description of Artificial Sequence: Synthetic oligonucleotide
  Antisense strand to SEQ ID NO: 259468
uuugcuaugcuugagauac

SEQ ID NO: 259470 - RNA, 19 nt, Artificial Sequence
  Description of Artificial Sequence: Synthetic oligonucleotide
  Sense strand starting at position 1691 SEQ ID NO: 3338
auagccuuuggccauuaua

SEQ ID NO: 259471 - RNA, 19 nt, Artificial Sequence
  Description of Artificial Sequence: Synthetic oligonucleotide
  Antisense strand to SEQ ID NO: 259470
uauaauggccaaaggcuau

SEQ ID NO: 259472 - RNA, 19 nt, Artificial Sequence
  Description of Artificial Sequence: Synthetic oligonucleotide
  Sense strand starting at position 1694 SEQ ID NO: 3338
gccuuuggccauuauaaau

SEQ ID NO: 259473 - RNA, 19 nt, Artificial Sequence
  Description of Artificial Sequence: Synthetic oligonucleotide
  Antisense strand to SEQ ID NO: 259472
auuuauaauggccaaaggc

SEQ ID NO: 259474 - RNA, 19 nt, Artificial Sequence
  Description of Artificial Sequence: Synthetic oligonucleotide
  Sense strand starting at position 1755 SEQ ID NO: 3338
ucaguaucuccuugaaaug

SEQ ID NO: 259475 - RNA, 19 nt, Artificial Sequence
  Description of Artificial Sequence: Synthetic oligonucleotide
  Antisense strand to SEQ ID NO: 259474
cauuucaaggagauacuga

SEQ ID NO: 259476 - RNA, 19 nt, Artificial Sequence
  Description of Artificial Sequence: Synthetic oligonucleotide
  Sense strand starting at position 1878 SEQ ID NO: 3338
uuacgagaauaucugaguu

SEQ ID NO: 259477 - RNA, 19 nt, Artificial Sequence
  Description of Artificial Sequence: Synthetic oligonucleotide
  Antisense strand to SEQ ID NO: 259476
aacucagauauucucguaa

SEQ ID NO: 259478 - RNA, 19 nt, Artificial Sequence
  Description of Artificial Sequence: Synthetic oligonucleotide
  Sense strand starting at position 1882 SEQ ID NO: 3338
gagaauaucugaguuugua

SEQ ID NO: 259479 - RNA, 19 nt, Artificial Sequence
  Description of Artificial Sequence: Synthetic oligonucleotide
  Antisense strand to SEQ ID NO: 259478
uacaaacucagauauucuc

SEQ ID NO: 259480 - RNA, 19 nt, Artificial Sequence
  Description of Artificial Sequence: Synthetic oligonucleotide
  Sense strand starting at position 1960 SEQ ID NO: 3338
caaguucuccuguagcuga

SEQ ID NO: 259481 - RNA, 19 nt, Artificial Sequence
  Description of Artificial Sequence: Synthetic oligonucleotide
  Antisense strand to SEQ ID NO: 259480
ucagcuacaggagaacuug

SEQ ID NO: 259482 - RNA, 19 nt, Artificial Sequence
  Description of Artificial Sequence: Synthetic oligonucleotide
  Sense strand starting at position 2001 SEQ ID NO: 3338
cuggauuucuacuaagauu

SEQ ID NO: 259483 - RNA, 19 nt, Artificial Sequence
  Description of Artificial Sequence: Synthetic oligonucleotide
  Antisense strand to SEQ ID NO: 259482
aaucuuaguagaaauccag

SEQ ID NO: 259484 - RNA, 19 nt, Artificial Sequence
  Description of Artificial Sequence: Synthetic oligonucleotide
  Sense strand starting at position 2100 SEQ ID NO: 3338
uggcauuucugauaauauc

SEQ ID NO: 259485 - RNA, 19 nt, Artificial Sequence
  Description of Artificial Sequence: Synthetic oligonucleotide
  Antisense strand to SEQ ID NO: 259484
gauauuaucagaaaugcca

SEQ ID NO: 259486 - RNA, 19 nt, Artificial Sequence
  Description of Artificial Sequence: Synthetic oligonucleotide
  Sense strand starting at position 2145 SEQ ID NO: 3338
ugguguugauauguuaauu

SEQ ID NO: 259487 - RNA, 19 nt, Artificial Sequence
  Description of Artificial Sequence: Synthetic oligonucleotide
  Antisense strand to SEQ ID NO: 259486
aauuaacauaucaacacca

SEQ ID NO: 259488 - RNA, 19 nt, Artificial Sequence
  Description of Artificial Sequence: Synthetic oligonucleotide
  Sense strand starting at position 2150 SEQ ID NO: 3338
uugauauguuaauuccaga

SEQ ID NO: 259489 - RNA, 19 nt, Artificial Sequence
  Description of Artificial Sequence: Synthetic oligonucleotide
  Antisense strand to SEQ ID NO: 259488
ucuggaauuaacauaucaa

SEQ ID NO: 259490 - RNA, 19 nt, Artificial Sequence
  Description of Artificial Sequence: Synthetic oligonucleotide
  Sense strand starting at position 2155 SEQ ID NO: 3338
auguuaauuccagaaguuu

SEQ ID NO: 259491 - RNA, 19 nt, Artificial Sequence
  Description of Artificial Sequence: Synthetic oligonucleotide
  Antisense strand to SEQ ID NO: 259490
aaacuucuggaauuaacau

SEQ ID NO: 259492 - RNA, 19 nt, Artificial Sequence
  Description of Artificial Sequence: Synthetic oligonucleotide
  Sense strand starting at position 2179 SEQ ID NO: 3338
cuuagaauccaguaggcaa

SEQ ID NO: 259493 - RNA, 19 nt, Artificial Sequence
  Description of Artificial Sequence: Synthetic oligonucleotide
  Antisense strand to SEQ ID NO: 259492
uugccuacuggauucuaag

SEQ ID NO: 259494 - RNA, 19 nt, Artificial Sequence
  Description of Artificial Sequence: Synthetic oligonucleotide
  Sense strand starting at position 2614 SEQ ID NO: 3338
cccagaaagccucggaagu

SEQ ID NO: 259495 - RNA, 19 nt, Artificial Sequence
  Description of Artificial Sequence: Synthetic oligonucleotide
  Antisense strand to SEQ ID NO: 259494
acuuccgaggcuuucuggg

SEQ ID NO: 259496 - RNA, 19 nt, Artificial Sequence
  Description of Artificial Sequence: Synthetic oligonucleotide
  Sense strand starting at position 2624 SEQ ID NO: 3338
cucggaagucaccgaaaca

SEQ ID NO: 259497 - RNA, 19 nt, Artificial Sequence
  Description of Artificial Sequence: Synthetic oligonucleotide
  Antisense strand to SEQ ID NO: 259496
uguuucggugacuuccgag

SEQ ID NO: 259498 - RNA, 19 nt, Artificial Sequence
  Description of Artificial Sequence: Synthetic oligonucleotide
  Sense strand starting at position 2625 SEQ ID NO: 3338
ucggaagucaccgaaacaa

SEQ ID NO: 259499 - RNA, 19 nt, Artificial Sequence
  Description of Artificial Sequence: Synthetic oligonucleotide
  Antisense strand to SEQ ID NO: 259498
uuguuucggugacuuccga

SEQ ID NO: 259500 - RNA, 19 nt, Artificial Sequence
  Description of Artificial Sequence: Synthetic oligonucleotide
  Sense strand starting at position 2653 SEQ ID NO: 3338
aacugacugugguugcaaa

SEQ ID NO: 259501 - RNA, 19 nt, Artificial Sequence
  Description of Artificial Sequence: Synthetic oligonucleotide
  Antisense strand to SEQ ID NO: 259500
uuugcaaccacagucaguu

SEQ ID NO: 259502 - RNA, 19 nt, Artificial Sequence
  Description of Artificial Sequence: Synthetic oligonucleotide
  Sense strand starting at position 2654 SEQ ID NO: 3338
acugacugugguugcaaau

SEQ ID NO: 259503 - RNA, 19 nt, Artificial Sequence
  Description of Artificial Sequence: Synthetic oligonucleotide
  Antisense strand to SEQ ID NO: 259502
auuugcaaccacagucagu

SEQ ID NO: 259504 - RNA, 19 nt, Artificial Sequence
  Description of Artificial Sequence: Synthetic oligonucleotide
  Sense strand starting at position 2728 SEQ ID NO: 3338
acccuccaguuguuuauua

SEQ ID NO: 259505 - RNA, 19 nt, Artificial Sequence
  Description of Artificial Sequence: Synthetic oligonucleotide
  Antisense strand to SEQ ID NO: 259504
uaauaaacaacuggagggu

SEQ ID NO: 259506 - RNA, 19 nt, Artificial Sequence
  Description of Artificial Sequence: Synthetic oligonucleotide
  Sense strand starting at position 2732 SEQ ID NO: 3338
uccaguuguuuauuaccua

SEQ ID NO: 259507 - RNA, 19 nt, Artificial Sequence
  Description of Artificial Sequence: Synthetic oligonucleotide
  Antisense strand to SEQ ID NO: 259506
uagguaauaaacaacugga

SEQ ID NO: 259508 - RNA, 19 nt, Artificial Sequence
  Description of Artificial Sequence: Synthetic oligonucleotide
  Sense strand starting at position 3134 SEQ ID NO: 3338
cucauuagccaacggaauu

SEQ ID NO: 259509 - RNA, 19 nt, Artificial Sequence
  Description of Artificial Sequence: Synthetic oligonucleotide
  Antisense strand to SEQ ID NO: 259508
aauuccguuggcuaaugag

SEQ ID NO: 259510 - RNA, 19 nt, Artificial Sequence
  Description of Artificial Sequence: Synthetic oligonucleotide
  Sense strand starting at position 3205 SEQ ID NO: 3338
uaagucucucgguggauga

SEQ ID NO: 259511 - RNA, 19 nt, Artificial Sequence
  Description of Artificial Sequence: Synthetic oligonucleotide
  Antisense strand to SEQ ID NO: 259510
ucauccaccgagagacuua

SEQ ID NO: 259512 - RNA, 19 nt, Artificial Sequence
  Description of Artificial Sequence: Synthetic oligonucleotide
  Sense strand starting at position 3218 SEQ ID NO: 3338
ggaugagaggccugaauac

SEQ ID NO: 259513 - RNA, 19 nt, Artificial Sequence
  Description of Artificial Sequence: Synthetic oligonucleotide
  Antisense strand to SEQ ID NO: 259512
guauucaggccucucaucc

SEQ ID NO: 259514 - RNA, 19 nt, Artificial Sequence
  Description of Artificial Sequence: Synthetic oligonucleotide
  Sense strand starting at position 3331 SEQ ID NO: 3338
ugcucuucccucgagaaug

SEQ ID NO: 259515 - RNA, 19 nt, Artificial Sequence
  Description of Artificial Sequence: Synthetic oligonucleotide
  Antisense strand to SEQ ID NO: 259514
cauucucgagggaagagca

SEQ ID NO: 259516 - RNA, 19 nt, Artificial Sequence
  Description of Artificial Sequence: Synthetic oligonucleotide
  Sense strand starting at position 3359 SEQ ID NO: 3338
ucuaacuuugugggaggua

SEQ ID NO: 259517 - RNA, 19 nt, Artificial Sequence
  Description of Artificial Sequence: Synthetic oligonucleotide
  Antisense strand to SEQ ID NO: 259516
uaccucccacaaaguuaga

SEQ ID NO: 259518 - RNA, 19 nt, Artificial Sequence
  Description of Artificial Sequence: Synthetic oligonucleotide
  Sense strand starting at position 103 SEQ ID NO: 3337
ccucuacgcagugaaguua

SEQ ID NO: 259519 - RNA, 19 nt, Artificial Sequence
  Description of Artificial Sequence: Synthetic oligonucleotide
  Antisense strand to SEQ ID NO: 259518
uaacuucacugcguagagg

SEQ ID NO: 259520 - RNA, 19 nt, Artificial Sequence
  Description of Artificial Sequence: Synthetic oligonucleotide
  Sense strand starting at position 249 SEQ ID NO: 3337
gaaauuguaccuugaggau

SEQ ID NO: 259521 - RNA, 19 nt, Artificial Sequence
  Description of Artificial Sequence: Synthetic oligonucleotide
  Antisense strand to SEQ ID NO: 259520
auccucaagguacaauuuc

SEQ ID NO: 259522 - RNA, 19 nt, Artificial Sequence
  Description of Artificial Sequence: Synthetic oligonucleotide
  Sense strand starting at position 261 SEQ ID NO: 3337
ugaggauauugcuuaggag

SEQ ID NO: 259523 - RNA, 19 nt, Artificial Sequence
  Description of Artificial Sequence: Synthetic oligonucleotide
  Antisense strand to SEQ ID NO: 259522
cuccuaagcaauauccuca

SEQ ID NO: 259524 - RNA, 19 nt, Artificial Sequence
  Description of Artificial Sequence: Synthetic oligonucleotide
  Sense strand starting at position 337 SEQ ID NO: 3337
auacucucugcguaaacau

SEQ ID NO: 259525 - RNA, 19 nt, Artificial Sequence
  Description of Artificial Sequence: Synthetic oligonucleotide
  Antisense strand to SEQ ID NO: 259524
auguuuacgcagagaguau

SEQ ID NO: 259526 - RNA, 19 nt, Artificial Sequence
  Description of Artificial Sequence: Synthetic oligonucleotide
  Sense strand starting at position 410 SEQ ID NO: 3337
ccucaucaauuugagggaa

SEQ ID NO: 259527 - RNA, 19 nt, Artificial Sequence
  Description of Artificial Sequence: Synthetic oligonucleotide
  Antisense strand to SEQ ID NO: 259526
uucccucaaauugaugagg

SEQ ID NO: 259528 - RNA, 19 nt, Artificial Sequence
  Description of Artificial Sequence: Synthetic oligonucleotide
  Sense strand starting at position 412 SEQ ID NO: 3337
ucaucaauuugagggaaag

SEQ ID NO: 259529 - RNA, 19 nt, Artificial Sequence
  Description of Artificial Sequence: Synthetic oligonucleotide
  Antisense strand to SEQ ID NO: 259528
cuuucccucaaauugauga

SEQ ID NO: 259530 - RNA, 19 nt, Artificial Sequence
  Description of Artificial Sequence: Synthetic oligonucleotide
  Sense strand starting at position 424 SEQ ID NO: 3337
gggaaagcugcuuggacuu

SEQ ID NO: 259531 - RNA, 19 nt, Artificial Sequence
  Description of Artificial Sequence: Synthetic oligonucleotide
  Antisense strand to SEQ ID NO: 259530
aaguccaagcagcuuuccc

SEQ ID NO: 259532 - RNA, 19 nt, Artificial Sequence
  Description of Artificial Sequence: Synthetic oligonucleotide
  Sense strand starting at position 612 SEQ ID NO: 3337
ucuccuaaugacugagaug

SEQ ID NO: 259533 - RNA, 19 nt, Artificial Sequence
  Description of Artificial Sequence: Synthetic oligonucleotide
  Antisense strand to SEQ ID NO: 259532
caucucagucauuaggaga

SEQ ID NO: 259534 - RNA, 19 nt, Artificial Sequence
  Description of Artificial Sequence: Synthetic oligonucleotide
  Sense strand starting at position 769 SEQ ID NO: 3337
gaauguugccgccaauaca

SEQ ID NO: 259535 - RNA, 19 nt, Artificial Sequence
  Description of Artificial Sequence: Synthetic oligonucleotide
  Antisense strand to SEQ ID NO: 259534
uguauuggcggcaacauuc

SEQ ID NO: 259536 - RNA, 19 nt, Artificial Sequence
  Description of Artificial Sequence: Synthetic oligonucleotide
  Sense strand starting at position 1184 SEQ ID NO: 3337
agggcuugauuugagaaac

SEQ ID NO: 259537 - RNA, 19 nt, Artificial Sequence
  Description of Artificial Sequence: Synthetic oligonucleotide
  Antisense strand to SEQ ID NO: 259536
guuucucaaaucaagcccu

SEQ ID NO: 259538 - RNA, 19 nt, Artificial Sequence
  Description of Artificial Sequence: Synthetic oligonucleotide
  Sense strand starting at position 1335 SEQ ID NO: 3337
ugaagucagauucgaagaa

SEQ ID NO: 259539 - RNA, 19 nt, Artificial Sequence
  Description of Artificial Sequence: Synthetic oligonucleotide
  Antisense strand to SEQ ID NO: 259538
uucuucgaaucugacuuca

SEQ ID NO: 259540 - RNA, 19 nt, Artificial Sequence
  Description of Artificial Sequence: Synthetic oligonucleotide
  Sense strand starting at position 1497 SEQ ID NO: 3337
gucuaaugguuucuuuaaa

SEQ ID NO: 259541 - RNA, 19 nt, Artificial Sequence
  Description of Artificial Sequence: Synthetic oligonucleotide
  Antisense strand to SEQ ID NO: 259540
uuuaaagaaaccauuagac

SEQ ID NO: 259542 - RNA, 19 nt, Artificial Sequence
  Description of Artificial Sequence: Synthetic oligonucleotide
  Sense strand starting at position 1625 SEQ ID NO: 3337
augacuuuaccauggcuaa

SEQ ID NO: 259543 - RNA, 19 nt, Artificial Sequence
  Description of Artificial Sequence: Synthetic oligonucleotide
  Antisense strand to SEQ ID NO: 259542
uuagccaugguaaagucau

SEQ ID NO: 259544 - RNA, 19 nt, Artificial Sequence
  Description of Artificial Sequence: Synthetic oligonucleotide
  Sense strand starting at position 1626 SEQ ID NO: 3337
ugacuuuaccauggcuaag

SEQ ID NO: 259545 - RNA, 19 nt, Artificial Sequence
  Description of Artificial Sequence: Synthetic oligonucleotide
  Antisense strand to SEQ ID NO: 259544
cuuagccaugguaaaguca

SEQ ID NO: 259546 - RNA, 19 nt, Artificial Sequence
  Description of Artificial Sequence: Synthetic oligonucleotide
  Sense strand starting at position 1747 SEQ ID NO: 3337
cagcaacugguuugacuau

SEQ ID NO: 259547 - RNA, 19 nt, Artificial Sequence
  Description of Artificial Sequence: Synthetic oligonucleotide
  Antisense strand to SEQ ID NO: 259546
auagucaaaccaguugcug

SEQ ID NO: 259548 - RNA, 19 nt, Artificial Sequence
  Description of Artificial Sequence: Synthetic oligonucleotide
  Sense strand starting at position 1756 SEQ ID NO: 3337
guuugacuaugacugcuaa

SEQ ID NO: 259549 - RNA, 19 nt, Artificial Sequence
  Description of Artificial Sequence: Synthetic oligonucleotide
  Antisense strand to SEQ ID NO: 259548
uuagcagucauagucaaac

SEQ ID NO: 259550 - RNA, 19 nt, Artificial Sequence
  Description of Artificial Sequence: Synthetic oligonucleotide
  Sense strand starting at position 1830 SEQ ID NO: 3337
uuggcaugcagacgauuua

SEQ ID NO: 259551 - RNA, 19 nt, Artificial Sequence
  Description of Artificial Sequence: Synthetic oligonucleotide
  Antisense strand to SEQ ID NO: 259550
uaaaucgucugcaugccaa

SEQ ID NO: 259552 - RNA, 19 nt, Artificial Sequence
  Description of Artificial Sequence: Synthetic oligonucleotide
  Sense strand starting at position 2217 SEQ ID NO: 3337
aagacuagcucugucauug

SEQ ID NO: 259553 - RNA, 19 nt, Artificial Sequence
  Description of Artificial Sequence: Synthetic oligonucleotide
  Antisense strand to SEQ ID NO: 259552
caaugacagagcuagucuu

SEQ ID NO: 259554 - RNA, 19 nt, Artificial Sequence
  Description of Artificial Sequence: Synthetic oligonucleotide
  Sense strand starting at position 2227 SEQ ID NO: 3337
cugucauuguuucugauuu

SEQ ID NO: 259555 - RNA, 19 nt, Artificial Sequence
  Description of Artificial Sequence: Synthetic oligonucleotide
  Antisense strand to SEQ ID NO: 259554
aaaucagaaacaaugacag

SEQ ID NO: 259556 - RNA, 19 nt, Artificial Sequence
  Description of Artificial Sequence: Synthetic oligonucleotide
  Sense strand starting at position 2235 SEQ ID NO: 3337
guuucugauuuguauuuag

SEQ ID NO: 259557 - RNA, 19 nt, Artificial Sequence
  Description of Artificial Sequence: Synthetic oligonucleotide
  Antisense strand to SEQ ID NO: 259556
cuaaauacaaaucagaaac

SEQ ID NO: 259558 - RNA, 19 nt, Artificial Sequence
  Description of Artificial Sequence: Synthetic oligonucleotide
  Sense strand starting at position 2289 SEQ ID NO: 3337
ugaaucuaauacuuacgua

SEQ ID NO: 259559 - RNA, 19 nt, Artificial Sequence
  Description of Artificial Sequence: Synthetic oligonucleotide
  Antisense strand to SEQ ID NO: 259558
uacguaaguauuagauuca

SEQ ID NO: 259560 - RNA, 19 nt, Artificial Sequence
  Description of Artificial Sequence: Synthetic oligonucleotide
  Sense strand starting at position 2581 SEQ ID NO: 3337
gugcccggccuguuuaaau

SEQ ID NO: 259561 - RNA, 19 nt, Artificial Sequence
  Description of Artificial Sequence: Synthetic oligonucleotide
  Antisense strand to SEQ ID NO: 259560
auuuaaacaggccgggcac

SEQ ID NO: 259562 - RNA, 19 nt, Artificial Sequence
  Description of Artificial Sequence: Synthetic oligonucleotide
  Sense strand starting at position 2639 SEQ ID NO: 3337
gcauguacucgguacaaag

SEQ ID NO: 259563 - RNA, 19 nt, Artificial Sequence
  Description of Artificial Sequence: Synthetic oligonucleotide
  Antisense strand to SEQ ID NO: 259562
cuuuguaccgaguacaugc

SEQ ID NO: 259564 - RNA, 19 nt, Artificial Sequence
  Description of Artificial Sequence: Synthetic oligonucleotide
  Sense strand starting at position 2765 SEQ ID NO: 3337
augagaugcucuucuaaua

SEQ ID NO: 259565 - RNA, 19 nt, Artificial Sequence
  Description of Artificial Sequence: Synthetic oligonucleotide
  Antisense strand to SEQ ID NO: 259564
uauuagaagagcaucucau

SEQ ID NO: 259566 - RNA, 19 nt, Artificial Sequence
  Description of Artificial Sequence: Synthetic oligonucleotide
  Sense strand starting at position 2791 SEQ ID NO: 3337
guaucucaagcauagcaaa

SEQ ID NO: 259567 - RNA, 19 nt, Artificial Sequence
  Description of Artificial Sequence: Synthetic oligonucleotide
  Antisense strand to SEQ ID NO: 259566
uuugcuaugcuugagauac

SEQ ID NO: 259568 - RNA, 19 nt, Artificial Sequence
  Description of Artificial Sequence: Synthetic oligonucleotide
  Sense strand starting at position 2857 SEQ ID NO: 3337
auagccuuuggccauuaua

SEQ ID NO: 259569 - RNA, 19 nt, Artificial Sequence
  Description of Artificial Sequence: Synthetic oligonucleotide
  Antisense strand to SEQ ID NO: 259568
uauaauggccaaaggcuau

SEQ ID NO: 259570 - RNA, 19 nt, Artificial Sequence
  Description of Artificial Sequence: Synthetic oligonucleotide
  Sense strand starting at position 2860 SEQ ID NO: 3337
gccuuuggccauuauaaau

SEQ ID NO: 259571 - RNA, 19 nt, Artificial Sequence
  Description of Artificial Sequence: Synthetic oligonucleotide
  Antisense strand to SEQ ID NO: 259570
auuuauaauggccaaaggc

SEQ ID NO: 259572 - RNA, 19 nt, Artificial Sequence
  Description of Artificial Sequence: Synthetic oligonucleotide
  Sense strand starting at position 2921 SEQ ID NO: 3337
ucaguaucuccuugaaaug

SEQ ID NO: 259573 - RNA, 19 nt, Artificial Sequence
  Description of Artificial Sequence: Synthetic oligonucleotide
  Antisense strand to SEQ ID NO: 259572
cauuucaaggagauacuga

SEQ ID NO: 259574 - RNA, 19 nt, Artificial Sequence
  Description of Artificial Sequence: Synthetic oligonucleotide
  Sense strand starting at position 3044 SEQ ID NO: 3337
uuacgagaauaucugaguu

SEQ ID NO: 259575 - RNA, 19 nt, Artificial Sequence
  Description of Artificial Sequence: Synthetic oligonucleotide
  Antisense strand to SEQ ID NO: 259574
aacucagauauucucguaa

SEQ ID NO: 259576 - RNA, 19 nt, Artificial Sequence
  Description of Artificial Sequence: Synthetic oligonucleotide
  Sense strand starting at position 3048 SEQ ID NO: 3337
gagaauaucugaguuugua

SEQ ID NO: 259577 - RNA, 19 nt, Artificial Sequence
  Description of Artificial Sequence: Synthetic oligonucleotide
  Antisense strand to SEQ ID NO: 259576
uacaaacucagauauucuc

SEQ ID NO: 259578 - RNA, 19 nt, Artificial Sequence
  Description of Artificial Sequence: Synthetic oligonucleotide
  Sense strand starting at position 3126 SEQ ID NO: 3337
caaguucuccuguagcuga

SEQ ID NO: 259579 - RNA, 19 nt, Artificial Sequence
  Description of Artificial Sequence: Synthetic oligonucleotide
  Antisense strand to SEQ ID NO: 259578
ucagcuacaggagaacuug

SEQ ID NO: 259580 - RNA, 19 nt, Artificial Sequence
  Description of Artificial Sequence: Synthetic oligonucleotide
  Sense strand starting at position 3167 SEQ ID NO: 3337
cuggauuucuacuaagauu

SEQ ID NO: 259581 - RNA, 19 nt, Artificial Sequence
  Description of Artificial Sequence: Synthetic oligonucleotide
  Antisense strand to SEQ ID NO: 259580
aaucuuaguagaaauccag

SEQ ID NO: 259582 - RNA, 19 nt, Artificial Sequence
  Description of Artificial Sequence: Synthetic oligonucleotide
  Sense strand starting at position 3266 SEQ ID NO: 3337
uggcauuucugauaauauc

SEQ ID NO: 259583 - RNA, 19 nt, Artificial Sequence
  Description of Artificial Sequence: Synthetic oligonucleotide
  Antisense strand to SEQ ID NO: 259582
gauauuaucagaaaugcca

SEQ ID NO: 259584 - RNA, 19 nt, Artificial Sequence
  Description of Artificial Sequence: Synthetic oligonucleotide
  Sense strand starting at position 3316 SEQ ID NO: 3337
uugauauguuaauuccaga

SEQ ID NO: 259585 - RNA, 19 nt, Artificial Sequence
  Description of Artificial Sequence: Synthetic oligonucleotide
  Antisense strand to SEQ ID NO: 259584
ucuggaauuaacauaucaa

SEQ ID NO: 259586 - RNA, 19 nt, Artificial Sequence
  Description of Artificial Sequence: Synthetic oligonucleotide
  Sense strand starting at position 3321 SEQ ID NO: 3337
auguuaauuccagaaguuu

SEQ ID NO: 259587 - RNA, 19 nt, Artificial Sequence
  Description of Artificial Sequence: Synthetic oligonucleotide
  Antisense strand to SEQ ID NO: 259586
aaacuucuggaauuaacau

SEQ ID NO: 259588 - RNA, 19 nt, Artificial Sequence
  Description of Artificial Sequence: Synthetic oligonucleotide
  Sense strand starting at position 3345 SEQ ID NO: 3337
cuuagaauccaguaggcaa

SEQ ID NO: 259589 - RNA, 19 nt, Artificial Sequence
  Description of Artificial Sequence: Synthetic oligonucleotide
  Antisense strand to SEQ ID NO: 259588
uugccuacuggauucuaag

SEQ ID NO: 259590 - RNA, 19 nt, Artificial Sequence
  Description of Artificial Sequence: Synthetic oligonucleotide
  Sense strand starting at position 3780 SEQ ID NO: 3337
cccagaaagccucggaagu

SEQ ID NO: 259591 - RNA, 19 nt, Artificial Sequence
  Description of Artificial Sequence: Synthetic oligonucleotide
  Antisense strand to SEQ ID NO: 259590
acuuccgaggcuuucuggg

SEQ ID NO: 259592 - RNA, 19 nt, Artificial Sequence
  Description of Artificial Sequence: Synthetic oligonucleotide
  Sense strand starting at position 3790 SEQ ID NO: 3337
cucggaagucaccgaaaca

SEQ ID NO: 259593 - RNA, 19 nt, Artificial Sequence
  Description of Artificial Sequence: Synthetic oligonucleotide
  Antisense strand to SEQ ID NO: 259592
uguuucggugacuuccgag

SEQ ID NO: 259594 - RNA, 19 nt, Artificial Sequence
  Description of Artificial Sequence: Synthetic oligonucleotide
  Sense strand starting at position 3791 SEQ ID NO: 3337
ucggaagucaccgaaacaa

SEQ ID NO: 259595 - RNA, 19 nt, Artificial Sequence
  Description of Artificial Sequence: Synthetic oligonucleotide
  Antisense strand to SEQ ID NO: 259594
uuguuucggugacuuccga

SEQ ID NO: 259596 - RNA, 19 nt, Artificial Sequence
  Description of Artificial Sequence: Synthetic oligonucleotide
  Sense strand starting at position 3819 SEQ ID NO: 3337
aacugacugugguugcaaa

SEQ ID NO: 259597 - RNA, 19 nt, Artificial Sequence
  Description of Artificial Sequence: Synthetic oligonucleotide
  Antisense strand to SEQ ID NO: 259596
uuugcaaccacagucaguu

SEQ ID NO: 259598 - RNA, 19 nt, Artificial Sequence
  Description of Artificial Sequence: Synthetic oligonucleotide
  Sense strand starting at position 161 SEQ ID NO: 3339
gaaggugacuccuugucau

SEQ ID NO: 259599 - RNA, 19 nt, Artificial Sequence
  Description of Artificial Sequence: Synthetic oligonucleotide
  Antisense strand to SEQ ID NO: 259598
augacaaggagucaccuuc

SEQ ID NO: 259600 - RNA, 19 nt, Artificial Sequence
  Description of Artificial Sequence: Synthetic oligonucleotide
  Sense strand starting at position 184 SEQ ID NO: 3339
guuugaugucaccagcuua

SEQ ID NO: 259601 - RNA, 19 nt, Artificial Sequence
  Description of Artificial Sequence: Synthetic oligonucleotide
  Antisense strand to SEQ ID NO: 259600
uaagcuggugacaucaaac

SEQ ID NO: 259602 - RNA, 19 nt, Artificial Sequence
  Description of Artificial Sequence: Synthetic oligonucleotide
  Sense strand starting at position 303 SEQ ID NO: 3339
aauguaagcucucugagag

SEQ ID NO: 259603 - RNA, 19 nt, Artificial Sequence
  Description of Artificial Sequence: Synthetic oligonucleotide
  Antisense strand to SEQ ID NO: 259602
cucucagagagcuuacauu

SEQ ID NO: 259604 - RNA, 19 nt, Artificial Sequence
  Description of Artificial Sequence: Synthetic oligonucleotide
  Sense strand starting at position 363 SEQ ID NO: 3339
uagaacaaagcuugguaua

SEQ ID NO: 259605 - RNA, 19 nt, Artificial Sequence
  Description of Artificial Sequence: Synthetic oligonucleotide
  Antisense strand to SEQ ID NO: 259604
uauaccaagcuuuguucua

SEQ ID NO: 259606 - RNA, 19 nt, Artificial Sequence
  Description of Artificial Sequence: Synthetic oligonucleotide
  Sense strand starting at position 365 SEQ ID NO: 3339
gaacaaagcuugguauaca

SEQ ID NO: 259607 - RNA, 19 nt, Artificial Sequence
  Description of Artificial Sequence: Synthetic oligonucleotide
  Antisense strand to SEQ ID NO: 259606
uguauaccaagcuuuguuc

SEQ ID NO: 259608 - RNA, 19 nt, Artificial Sequence
  Description of Artificial Sequence: Synthetic oligonucleotide
  Sense strand starting at position 368 SEQ ID NO: 3339
caaagcuugguauacagua

SEQ ID NO: 259609 - RNA, 19 nt, Artificial Sequence
  Description of Artificial Sequence: Synthetic oligonucleotide
  Antisense strand to SEQ ID NO: 259608
uacuguauaccaagcuuug

SEQ ID NO: 259610 - RNA, 19 nt, Artificial Sequence
  Description of Artificial Sequence: Synthetic oligonucleotide
  Sense strand starting at position 393 SEQ ID NO: 3339
uaguauauauccguugaag

SEQ ID NO: 259611 - RNA, 19 nt, Artificial Sequence
  Description of Artificial Sequence: Synthetic oligonucleotide
  Antisense strand to SEQ ID NO: 259610
cuucaacggauauauacua

SEQ ID NO: 259612 - RNA, 19 nt, Artificial Sequence
  Description of Artificial Sequence: Synthetic oligonucleotide
  Sense strand starting at position 396 SEQ ID NO: 3339
uauauauccguugaagcaa

SEQ ID NO: 259613 - RNA, 19 nt, Artificial Sequence
  Description of Artificial Sequence: Synthetic oligonucleotide
  Antisense strand to SEQ ID NO: 259612
uugcuucaacggauauaua

SEQ ID NO: 259614 - RNA, 19 nt, Artificial Sequence
  Description of Artificial Sequence: Synthetic oligonucleotide
  Sense strand starting at position 410 SEQ ID NO: 3339
agcaauaaauggccaugaa

SEQ ID NO: 259615 - RNA, 19 nt, Artificial Sequence
  Description of Artificial Sequence: Synthetic oligonucleotide
  Antisense strand to SEQ ID NO: 259614
uucauggccauuuauugcu

SEQ ID NO: 259616 - RNA, 19 nt, Artificial Sequence
  Description of Artificial Sequence: Synthetic oligonucleotide
  Sense strand starting at position 422 SEQ ID NO: 3339
ccaugaagacccuguguaa

SEQ ID NO: 259617 - RNA, 19 nt, Artificial Sequence
  Description of Artificial Sequence: Synthetic oligonucleotide
  Antisense strand to SEQ ID NO: 259616
uuacacagggucuucaugg

SEQ ID NO: 259618 - RNA, 19 nt, Artificial Sequence
  Description of Artificial Sequence: Synthetic oligonucleotide
  Sense strand starting at position 425 SEQ ID NO: 3339
ugaagacccuguguaaagu

SEQ ID NO: 259619 - RNA, 19 nt, Artificial Sequence
  Description of Artificial Sequence: Synthetic oligonucleotide
  Antisense strand to SEQ ID NO: 259618
acuuuacacagggucuuca

SEQ ID NO: 259620 - RNA, 19 nt, Artificial Sequence
  Description of Artificial Sequence: Synthetic oligonucleotide
  Sense strand starting at position 435 SEQ ID NO: 3339
guguaaagugcuguuucuu

SEQ ID NO: 259621 - RNA, 19 nt, Artificial Sequence
  Description of Artificial Sequence: Synthetic oligonucleotide
  Antisense strand to SEQ ID NO: 259620
aagaaacagcacuuuacac

SEQ ID NO: 259622 - RNA, 19 nt, Artificial Sequence
  Description of Artificial Sequence: Synthetic oligonucleotide
  Sense strand starting at position 806 SEQ ID NO: 3339
aagugaagccagggauaug

SEQ ID NO: 259623 - RNA, 19 nt, Artificial Sequence
  Description of Artificial Sequence: Synthetic oligonucleotide
  Antisense strand to SEQ ID NO: 259622
cauaucccuggcuucacuu

SEQ ID NO: 259624 - RNA, 19 nt, Artificial Sequence
  Description of Artificial Sequence: Synthetic oligonucleotide
  Sense strand starting at position 834 SEQ ID NO: 3339
ugccgucuugaggaugaca

SEQ ID NO: 259625 - RNA, 19 nt, Artificial Sequence
  Description of Artificial Sequence: Synthetic oligonucleotide
  Antisense strand to SEQ ID NO: 259624
ugucauccucaagacggca

SEQ ID NO: 259626 - RNA, 19 nt, Artificial Sequence
  Description of Artificial Sequence: Synthetic oligonucleotide
  Sense strand starting at position 836 SEQ ID NO: 3339
ccgucuugaggaugacagu

SEQ ID NO: 259627 - RNA, 19 nt, Artificial Sequence
  Description of Artificial Sequence: Synthetic oligonucleotide
  Antisense strand to SEQ ID NO: 259626
acugucauccucaagacgg

SEQ ID NO: 259628 - RNA, 19 nt, Artificial Sequence
  Description of Artificial Sequence: Synthetic oligonucleotide
  Sense strand starting at position 837 SEQ ID NO: 3339
cgucuugaggaugacaguu

SEQ ID NO: 259629 - RNA, 19 nt, Artificial Sequence
  Description of Artificial Sequence: Synthetic oligonucleotide
  Antisense strand to SEQ ID NO: 259628
aacugucauccucaagacg

SEQ ID NO: 259630 - RNA, 19 nt, Artificial Sequence
  Description of Artificial Sequence: Synthetic oligonucleotide
  Sense strand starting at position 1104 SEQ ID NO: 3339
uucuaaguuucccugggaa

SEQ ID NO: 259631 - RNA, 19 nt, Artificial Sequence
  Description of Artificial Sequence: Synthetic oligonucleotide
  Antisense strand to SEQ ID NO: 259630
uucccagggaaacuuagaa

SEQ ID NO: 259632 - RNA, 19 nt, Artificial Sequence
  Description of Artificial Sequence: Synthetic oligonucleotide
  Sense strand starting at position 1106 SEQ ID NO: 3339
cuaaguuucccugggaagu

SEQ ID NO: 259633 - RNA, 19 nt, Artificial Sequence
  Description of Artificial Sequence: Synthetic oligonucleotide
  Antisense strand to SEQ ID NO: 259632
acuucccagggaaacuuag

SEQ ID NO: 259634 - RNA, 19 nt, Artificial Sequence
  Description of Artificial Sequence: Synthetic oligonucleotide
  Sense strand starting at position 1107 SEQ ID NO: 3339
uaaguuucccugggaagug

SEQ ID NO: 259635 - RNA, 19 nt, Artificial Sequence
  Description of Artificial Sequence: Synthetic oligonucleotide
  Antisense strand to SEQ ID NO: 259634
cacuucccagggaaacuua

SEQ ID NO: 259636 - RNA, 19 nt, Artificial Sequence
  Description of Artificial Sequence: Synthetic oligonucleotide
  Sense strand starting at position 2366 SEQ ID NO: 3339
ugcccaacgccugaaauau

SEQ ID NO: 259637 - RNA, 19 nt, Artificial Sequence
  Description of Artificial Sequence: Synthetic oligonucleotide
  Antisense strand to SEQ ID NO: 259636
auauuucaggcguugggca

SEQ ID NO: 259638 - RNA, 19 nt, Artificial Sequence
  Description of Artificial Sequence: Synthetic oligonucleotide
  Sense strand starting at position 2377 SEQ ID NO: 3339
ugaaauauacauugucgag

SEQ ID NO: 259639 - RNA, 19 nt, Artificial Sequence
  Description of Artificial Sequence: Synthetic oligonucleotide
  Antisense strand to SEQ ID NO: 259638
cucgacaauguauauuuca

SEQ ID NO: 259640 - RNA, 19 nt, Artificial Sequence
  Description of Artificial Sequence: Synthetic oligonucleotide
  Sense strand starting at position 2686 SEQ ID NO: 3339
ucagcuucucgguaagauc

SEQ ID NO: 259641 - RNA, 19 nt, Artificial Sequence
  Description of Artificial Sequence: Synthetic oligonucleotide
  Antisense strand to SEQ ID NO: 259640
gaucuuaccgagaagcuga

SEQ ID NO: 259642 - RNA, 19 nt, Artificial Sequence
  Description of Artificial Sequence: Synthetic oligonucleotide
  Sense strand starting at position 2728 SEQ ID NO: 3339
acacaaauugcggaguuua

SEQ ID NO: 259643 - RNA, 19 nt, Artificial Sequence
  Description of Artificial Sequence: Synthetic oligonucleotide
  Antisense strand to SEQ ID NO: 259642
uaaacuccgcaauuugugu

SEQ ID NO: 259644 - RNA, 19 nt, Artificial Sequence
  Description of Artificial Sequence: Synthetic oligonucleotide
  Sense strand starting at position 2736 SEQ ID NO: 3339
ugcggaguuuaacugacau

SEQ ID NO: 259645 - RNA, 19 nt, Artificial Sequence
  Description of Artificial Sequence: Synthetic oligonucleotide
  Antisense strand to SEQ ID NO: 259644
augucaguuaaacuccgca

SEQ ID NO: 259646 - RNA, 19 nt, Artificial Sequence
  Description of Artificial Sequence: Synthetic oligonucleotide
  Sense strand starting at position 2738 SEQ ID NO: 3339
cggaguuuaacugacaugu

SEQ ID NO: 259647 - RNA, 19 nt, Artificial Sequence
  Description of Artificial Sequence: Synthetic oligonucleotide
  Antisense strand to SEQ ID NO: 259646
acaugucaguuaaacuccg

SEQ ID NO: 259648 - RNA, 19 nt, Artificial Sequence
  Description of Artificial Sequence: Synthetic oligonucleotide
  Sense strand starting at position 2751 SEQ ID NO: 3339
acaugugacccucgaagga

SEQ ID NO: 259649 - RNA, 19 nt, Artificial Sequence
  Description of Artificial Sequence: Synthetic oligonucleotide
  Antisense strand to SEQ ID NO: 259648
uccuucgagggucacaugu

SEQ ID NO: 259650 - RNA, 19 nt, Artificial Sequence
  Description of Artificial Sequence: Synthetic oligonucleotide
  Sense strand starting at position 2807 SEQ ID NO: 3339
uggguacaacuccaguaua

SEQ ID NO: 259651 - RNA, 19 nt, Artificial Sequence
  Description of Artificial Sequence: Synthetic oligonucleotide
  Antisense strand to SEQ ID NO: 259650
uauacuggaguuguaccca

SEQ ID NO: 259652 - RNA, 19 nt, Artificial Sequence
  Description of Artificial Sequence: Synthetic oligonucleotide
  Sense strand starting at position 2810 SEQ ID NO: 3339
guacaacuccaguauacac

SEQ ID NO: 259653 - RNA, 19 nt, Artificial Sequence
  Description of Artificial Sequence: Synthetic oligonucleotide
  Antisense strand to SEQ ID NO: 259652
guguauacuggaguuguac

SEQ ID NO: 259654 - RNA, 19 nt, Artificial Sequence
  Description of Artificial Sequence: Synthetic oligonucleotide
  Sense strand starting at position 3026 SEQ ID NO: 3339
ccauuucugcuguagagcu

SEQ ID NO: 259655 - RNA, 19 nt, Artificial Sequence
  Description of Artificial Sequence: Synthetic oligonucleotide
  Antisense strand to SEQ ID NO: 259654
agcucuacagcagaaaugg

SEQ ID NO: 259656 - RNA, 19 nt, Artificial Sequence
  Description of Artificial Sequence: Synthetic oligonucleotide
  Sense strand starting at position 3499 SEQ ID NO: 3339
cauauugggccaggcaauu

SEQ ID NO: 259657 - RNA, 19 nt, Artificial Sequence
  Description of Artificial Sequence: Synthetic oligonucleotide
  Antisense strand to SEQ ID NO: 259656
aauugccuggcccaauaug

SEQ ID NO: 259658 - RNA, 19 nt, Artificial Sequence
  Description of Artificial Sequence: Synthetic oligonucleotide
  Sense strand starting at position 3510 SEQ ID NO: 3339
aggcaauuguuucuuagga

SEQ ID NO: 259659 - RNA, 19 nt, Artificial Sequence
  Description of Artificial Sequence: Synthetic oligonucleotide
  Antisense strand to SEQ ID NO: 259658
uccuaagaaacaauugccu

SEQ ID NO: 259660 - RNA, 19 nt, Artificial Sequence
  Description of Artificial Sequence: Synthetic oligonucleotide
  Sense strand starting at position 3511 SEQ ID NO: 3339
ggcaauuguuucuuaggac

SEQ ID NO: 259661 - RNA, 19 nt, Artificial Sequence
  Description of Artificial Sequence: Synthetic oligonucleotide
  Antisense strand to SEQ ID NO: 259660
guccuaagaaacaauugcc

SEQ ID NO: 259662 - RNA, 19 nt, Artificial Sequence
  Description of Artificial Sequence: Synthetic oligonucleotide
  Sense strand starting at position 3576 SEQ ID NO: 3339
accuuugugcuguaaacga

SEQ ID NO: 259663 - RNA, 19 nt, Artificial Sequence
  Description of Artificial Sequence: Synthetic oligonucleotide
  Antisense strand to SEQ ID NO: 259662
ucguuuacagcacaaaggu

SEQ ID NO: 259664 - RNA, 19 nt, Artificial Sequence
  Description of Artificial Sequence: Synthetic oligonucleotide
  Sense strand starting at position 3638 SEQ ID NO: 3339
agggauuuguauuggaauc

SEQ ID NO: 259665 - RNA, 19 nt, Artificial Sequence
  Description of Artificial Sequence: Synthetic oligonucleotide
  Antisense strand to SEQ ID NO: 259664
gauuccaauacaaaucccu

SEQ ID NO: 259666 - RNA, 19 nt, Artificial Sequence
  Description of Artificial Sequence: Synthetic oligonucleotide
  Sense strand starting at position 3640 SEQ ID NO: 3339
ggauuuguauuggaaucaa

SEQ ID NO: 259667 - RNA, 19 nt, Artificial Sequence
  Description of Artificial Sequence: Synthetic oligonucleotide
  Antisense strand to SEQ ID NO: 259666
uugauuccaauacaaaucc

SEQ ID NO: 259668 - RNA, 19 nt, Artificial Sequence
  Description of Artificial Sequence: Synthetic oligonucleotide
  Sense strand starting at position 3702 SEQ ID NO: 3339
ggcaaagaauuuggauauu

SEQ ID NO: 259669 - RNA, 19 nt, Artificial Sequence
  Description of Artificial Sequence: Synthetic oligonucleotide
  Antisense strand to SEQ ID NO: 259668
aauauccaaauucuuugcc

SEQ ID NO: 259670 - RNA, 19 nt, Artificial Sequence
  Description of Artificial Sequence: Synthetic oligonucleotide
  Sense strand starting at position 3743 SEQ ID NO: 3339
caguaagcacauggaaaua

SEQ ID NO: 259671 - RNA, 19 nt, Artificial Sequence
  Description of Artificial Sequence: Synthetic oligonucleotide
  Antisense strand to SEQ ID NO: 259670
uauuuccaugugcuuacug

SEQ ID NO: 259672 - RNA, 19 nt, Artificial Sequence
  Description of Artificial Sequence: Synthetic oligonucleotide
  Sense strand starting at position 3886 SEQ ID NO: 3339
uagugacaguccuuuggaa

SEQ ID NO: 259673 - RNA, 19 nt, Artificial Sequence
  Description of Artificial Sequence: Synthetic oligonucleotide
  Antisense strand to SEQ ID NO: 259672
uuccaaaggacugucacua

SEQ ID NO: 259674 - RNA, 19 nt, Artificial Sequence
  Description of Artificial Sequence: Synthetic oligonucleotide
  Sense strand starting at position 3956 SEQ ID NO: 3339
uuccacucuuagguguaua

SEQ ID NO: 259675 - RNA, 19 nt, Artificial Sequence
  Description of Artificial Sequence: Synthetic oligonucleotide
  Antisense strand to SEQ ID NO: 259674
uauacaccuaagaguggaa

SEQ ID NO: 259676 - RNA, 19 nt, Artificial Sequence
  Description of Artificial Sequence: Synthetic oligonucleotide
  Sense strand starting at position 3968 SEQ ID NO: 3339
guguauacacccuacagaa

SEQ ID NO: 259677 - RNA, 19 nt, Artificial Sequence
  Description of Artificial Sequence: Synthetic oligonucleotide
  Antisense strand to SEQ ID NO: 259676
uucuguaggguguauacac

SEQ ID NO: 259678 - RNA, 19 nt, Artificial Sequence
  Description of Artificial Sequence: Synthetic oligonucleotide
  Sense strand starting at position 88 SEQ ID NO: 3340
agauuuaucuuacagagau

SEQ ID NO: 259679 - RNA, 19 nt, Artificial Sequence
  Description of Artificial Sequence: Synthetic oligonucleotide
  Antisense strand to SEQ ID NO: 259678
aucucuguaagauaaaucu

SEQ ID NO: 259680 - RNA, 19 nt, Artificial Sequence
  Description of Artificial Sequence: Synthetic oligonucleotide
  Sense strand starting at position 122 SEQ ID NO: 3340
uuacaauggugucuugaac

SEQ ID NO: 259681 - RNA, 19 nt, Artificial Sequence
  Description of Artificial Sequence: Synthetic oligonucleotide
  Antisense strand to SEQ ID NO: 259680
guucaagacaccauuguaa

SEQ ID NO: 259682 - RNA, 19 nt, Artificial Sequence
  Description of Artificial Sequence: Synthetic oligonucleotide
  Sense strand starting at position 128 SEQ ID NO: 3340
uggugucuugaacauaaua

SEQ ID NO: 259683 - RNA, 19 nt, Artificial Sequence
  Description of Artificial Sequence: Synthetic oligonucleotide
  Antisense strand to SEQ ID NO: 259682
uauuauguucaagacacca

SEQ ID NO: 259684 - RNA, 19 nt, Artificial Sequence
  Description of Artificial Sequence: Synthetic oligonucleotide
  Sense strand starting at position 173 SEQ ID NO: 3340
guuaauaguccagacacua

SEQ ID NO: 259685 - RNA, 19 nt, Artificial Sequence
  Description of Artificial Sequence: Synthetic oligonucleotide
  Antisense strand to SEQ ID NO: 259684
uagugucuggacuauuaac

SEQ ID NO: 259686 - RNA, 19 nt, Artificial Sequence
  Description of Artificial Sequence: Synthetic oligonucleotide
  Sense strand starting at position 199 SEQ ID NO: 3340
uggaauuggugauccaaua

SEQ ID NO: 259687 - RNA, 19 nt, Artificial Sequence
  Description of Artificial Sequence: Synthetic oligonucleotide
  Antisense strand to SEQ ID NO: 259686
uauuggaucaccaauucca

SEQ ID NO: 259688 - RNA, 19 nt, Artificial Sequence
  Description of Artificial Sequence: Synthetic oligonucleotide
  Sense strand starting at position 292 SEQ ID NO: 3340
uuguauagagauggaaagu

SEQ ID NO: 259689 - RNA, 19 nt, Artificial Sequence
  Description of Artificial Sequence: Synthetic oligonucleotide
  Antisense strand to SEQ ID NO: 259688
acuuuccaucucuauacaa

SEQ ID NO: 259690 - RNA, 19 nt, Artificial Sequence
  Description of Artificial Sequence: Synthetic oligonucleotide
  Sense strand starting at position 301 SEQ ID NO: 3340
gauggaaagugccuuagaa

SEQ ID NO: 259691 - RNA, 19 nt, Artificial Sequence
  Description of Artificial Sequence: Synthetic oligonucleotide
  Antisense strand to SEQ ID NO: 259690
uucuaaggcacuuuccauc

SEQ ID NO: 259692 - RNA, 19 nt, Artificial Sequence
  Description of Artificial Sequence: Synthetic oligonucleotide
  Sense strand starting at position 361 SEQ ID NO: 3340
gcuuuaaugcauuauugaa

SEQ ID NO: 259693 - RNA, 19 nt, Artificial Sequence
  Description of Artificial Sequence: Synthetic oligonucleotide
  Antisense strand to SEQ ID NO: 259692
uucaauaaugcauuaaagc

SEQ ID NO: 259694 - RNA, 19 nt, Artificial Sequence
  Description of Artificial Sequence: Synthetic oligonucleotide
  Sense strand starting at position 467 SEQ ID NO: 3340
uuacuuacaccucgugaua

SEQ ID NO: 259695 - RNA, 19 nt, Artificial Sequence
  Description of Artificial Sequence: Synthetic oligonucleotide
  Antisense strand to SEQ ID NO: 259694
uaucacgagguguaaguaa

SEQ ID NO: 259696 - RNA, 19 nt, Artificial Sequence
  Description of Artificial Sequence: Synthetic oligonucleotide
  Sense strand starting at position 470 SEQ ID NO: 3340
cuuacaccucgugauaaau

SEQ ID NO: 259697 - RNA, 19 nt, Artificial Sequence
  Description of Artificial Sequence: Synthetic oligonucleotide
  Antisense strand to SEQ ID NO: 259696
auuuaucacgagguguaag

SEQ ID NO: 259698 - RNA, 19 nt, Artificial Sequence
  Description of Artificial Sequence: Synthetic oligonucleotide
  Sense strand starting at position 883 SEQ ID NO: 3340
uaaauaccaguugggauua

SEQ ID NO: 259699 - RNA, 19 nt, Artificial Sequence
  Description of Artificial Sequence: Synthetic oligonucleotide
  Antisense strand to SEQ ID NO: 259698
uaaucccaacugguauuua

SEQ ID NO: 259700 - RNA, 19 nt, Artificial Sequence
  Description of Artificial Sequence: Synthetic oligonucleotide
  Sense strand starting at position 930 SEQ ID NO: 3340
acuaauaagcaagguauua

SEQ ID NO: 259701 - RNA, 19 nt, Artificial Sequence
  Description of Artificial Sequence: Synthetic oligonucleotide
  Antisense strand to SEQ ID NO: 259700
uaauaccuugcuuauuagu

SEQ ID NO: 259702 - RNA, 19 nt, Artificial Sequence
  Description of Artificial Sequence: Synthetic oligonucleotide
  Sense strand starting at position 942 SEQ ID NO: 3340
gguauuauauguuccagua

SEQ ID NO: 259703 - RNA, 19 nt, Artificial Sequence
  Description of Artificial Sequence: Synthetic oligonucleotide
  Antisense strand to SEQ ID NO: 259702
uacuggaacauauaauacc

SEQ ID NO: 259704 - RNA, 19 nt, Artificial Sequence
  Description of Artificial Sequence: Synthetic oligonucleotide
  Sense strand starting at position 957 SEQ ID NO: 3340
aguaguucugugaggugcu

SEQ ID NO: 259705 - RNA, 19 nt, Artificial Sequence
  Description of Artificial Sequence: Synthetic oligonucleotide
  Antisense strand to SEQ ID NO: 259704
agcaccucacagaacuacu

SEQ ID NO: 259706 - RNA, 19 nt, Artificial Sequence
  Description of Artificial Sequence: Synthetic oligonucleotide
  Sense strand starting at position 1077 SEQ ID NO: 3340
gaaaguugcguuuguauuu

SEQ ID NO: 259707 - RNA, 19 nt, Artificial Sequence
  Description of Artificial Sequence: Synthetic oligonucleotide
  Antisense strand to SEQ ID NO: 259706
aaauacaaacgcaacuuuc

SEQ ID NO: 259708 - RNA, 19 nt, Artificial Sequence
  Description of Artificial Sequence: Synthetic oligonucleotide
  Sense strand starting at position 1126 SEQ ID NO: 3340
auugcucuaugggcaauaa

SEQ ID NO: 259709 - RNA, 19 nt, Artificial Sequence
  Description of Artificial Sequence: Synthetic oligonucleotide
  Antisense strand to SEQ ID NO: 259708
uuauugcccauagagcaau

SEQ ID NO: 259710 - RNA, 19 nt, Artificial Sequence
  Description of Artificial Sequence: Synthetic oligonucleotide
  Sense strand starting at position 1127 SEQ ID NO: 3340
uugcucuaugggcaauaaa

SEQ ID NO: 259711 - RNA, 19 nt, Artificial Sequence
  Description of Artificial Sequence: Synthetic oligonucleotide
  Antisense strand to SEQ ID NO: 259710
uuuauugcccauagagcaa

SEQ ID NO: 259712 - RNA, 19 nt, Artificial Sequence
  Description of Artificial Sequence: Synthetic oligonucleotide
  Sense strand starting at position 1188 SEQ ID NO: 3340
gggcuccagagacauguua

SEQ ID NO: 259713 - RNA, 19 nt, Artificial Sequence
  Description of Artificial Sequence: Synthetic oligonucleotide
  Antisense strand to SEQ ID NO: 259712
uaacaugucucuggagccc

SEQ ID NO: 259714 - RNA, 19 nt, Artificial Sequence
  Description of Artificial Sequence: Synthetic oligonucleotide
  Sense strand starting at position 1190 SEQ ID NO: 3340
gcuccagagacauguuaga

SEQ ID NO: 259715 - RNA, 19 nt, Artificial Sequence
  Description of Artificial Sequence: Synthetic oligonucleotide
  Antisense strand to SEQ ID NO: 259714
ucuaacaugucucuggagc

SEQ ID NO: 259716 - RNA, 19 nt, Artificial Sequence
  Description of Artificial Sequence: Synthetic oligonucleotide
  Sense strand starting at position 2504 SEQ ID NO: 3340
aaugcugucagugcguuau

SEQ ID NO: 259717 - RNA, 19 nt, Artificial Sequence
  Description of Artificial Sequence: Synthetic oligonucleotide
  Antisense strand to SEQ ID NO: 259716
auaacgcacugacagcauu

SEQ ID NO: 259718 - RNA, 19 nt, Artificial Sequence
  Description of Artificial Sequence: Synthetic oligonucleotide
  Sense strand starting at position 2575 SEQ ID NO: 3340
agacaaacgaucugugagu

SEQ ID NO: 259719 - RNA, 19 nt, Artificial Sequence
  Description of Artificial Sequence: Synthetic oligonucleotide
  Antisense strand to SEQ ID NO: 259718
acucacagaucguuugucu

SEQ ID NO: 259720 - RNA, 19 nt, Artificial Sequence
  Description of Artificial Sequence: Synthetic oligonucleotide
  Sense strand starting at position 2576 SEQ ID NO: 3340
gacaaacgaucugugaguu

SEQ ID NO: 259721 - RNA, 19 nt, Artificial Sequence
  Description of Artificial Sequence: Synthetic oligonucleotide
  Antisense strand to SEQ ID NO: 259720
aacucacagaucguuuguc

SEQ ID NO: 259722 - RNA, 19 nt, Artificial Sequence
  Description of Artificial Sequence: Synthetic oligonucleotide
  Sense strand starting at position 2577 SEQ ID NO: 3340
acaaacgaucugugaguuu

SEQ ID NO: 259723 - RNA, 19 nt, Artificial Sequence
  Description of Artificial Sequence: Synthetic oligonucleotide
  Antisense strand to SEQ ID NO: 259722
aaacucacagaucguuugu

SEQ ID NO: 259724 - RNA, 19 nt, Artificial Sequence
  Description of Artificial Sequence: Synthetic oligonucleotide
  Sense strand starting at position 2688 SEQ ID NO: 3340
ucgcacuaagaauauaauu

SEQ ID NO: 259725 - RNA, 19 nt, Artificial Sequence
  Description of Artificial Sequence: Synthetic oligonucleotide
  Antisense strand to SEQ ID NO: 259724
aauuauauucuuagugcga

SEQ ID NO: 259726 - RNA, 19 nt, Artificial Sequence
  Description of Artificial Sequence: Synthetic oligonucleotide
  Sense strand starting at position 2722 SEQ ID NO: 3340
guuaaacacgcagagaguu

SEQ ID NO: 259727 - RNA, 19 nt, Artificial Sequence
  Description of Artificial Sequence: Synthetic oligonucleotide
  Antisense strand to SEQ ID NO: 259726
aacucucugcguguuuaac

SEQ ID NO: 259728 - RNA, 19 nt, Artificial Sequence
  Description of Artificial Sequence: Synthetic oligonucleotide
  Sense strand starting at position 2847 SEQ ID NO: 3340
caacgacaagagugacaau

SEQ ID NO: 259729 - RNA, 19 nt, Artificial Sequence
  Description of Artificial Sequence: Synthetic oligonucleotide
  Antisense strand to SEQ ID NO: 259728
auugucacucuugucguug

SEQ ID NO: 259730 - RNA, 19 nt, Artificial Sequence
  Description of Artificial Sequence: Synthetic oligonucleotide
  Sense strand starting at position 2901 SEQ ID NO: 3340
guagcuaacgcuuauaaac

SEQ ID NO: 259731 - RNA, 19 nt, Artificial Sequence
  Description of Artificial Sequence: Synthetic oligonucleotide
  Antisense strand to SEQ ID NO: 259730
guuuauaagcguuagcuac

SEQ ID NO: 259732 - RNA, 19 nt, Artificial Sequence
  Description of Artificial Sequence: Synthetic oligonucleotide
  Sense strand starting at position 2910 SEQ ID NO: 3340
gcuuauaaacaucgauuau

SEQ ID NO: 259733 - RNA, 19 nt, Artificial Sequence
  Description of Artificial Sequence: Synthetic oligonucleotide
  Antisense strand to SEQ ID NO: 259732
auaaucgauguuuauaagc

SEQ ID NO: 259734 - RNA, 19 nt, Artificial Sequence
  Description of Artificial Sequence: Synthetic oligonucleotide
  Sense strand starting at position 2958 SEQ ID NO: 3340
gccuuauaacccuauaggu

SEQ ID NO: 259735 - RNA, 19 nt, Artificial Sequence
  Description of Artificial Sequence: Synthetic oligonucleotide
  Antisense strand to SEQ ID NO: 259734
accuauaggguuauaaggc

SEQ ID NO: 259736 - RNA, 19 nt, Artificial Sequence
  Description of Artificial Sequence: Synthetic oligonucleotide
  Sense strand starting at position 2960 SEQ ID NO: 3340
cuuauaacccuauaggugu

SEQ ID NO: 259737 - RNA, 19 nt, Artificial Sequence
  Description of Artificial Sequence: Synthetic oligonucleotide
  Antisense strand to SEQ ID NO: 259736
acaccuauaggguuauaag

SEQ ID NO: 259738 - RNA, 19 nt, Artificial Sequence
  Description of Artificial Sequence: Synthetic oligonucleotide
  Sense strand starting at position 2973 SEQ ID NO: 3340
agguguaggaaacguuauu

SEQ ID NO: 259739 - RNA, 19 nt, Artificial Sequence
  Description of Artificial Sequence: Synthetic oligonucleotide
  Antisense strand to SEQ ID NO: 259738
aauaacguuuccuacaccu

SEQ ID NO: 259740 - RNA, 19 nt, Artificial Sequence
  Description of Artificial Sequence: Synthetic oligonucleotide
  Sense strand starting at position 2978 SEQ ID NO: 3340
uaggaaacguuauucccau

SEQ ID NO: 259741 - RNA, 19 nt, Artificial Sequence
  Description of Artificial Sequence: Synthetic oligonucleotide
  Antisense strand to SEQ ID NO: 259740
augggaauaacguuuccua

SEQ ID NO: 259742 - RNA, 19 nt, Artificial Sequence
  Description of Artificial Sequence: Synthetic oligonucleotide
  Sense strand starting at position 2979 SEQ ID NO: 3340
aggaaacguuauucccauu

SEQ ID NO: 259743 - RNA, 19 nt, Artificial Sequence
  Description of Artificial Sequence: Synthetic oligonucleotide
  Antisense strand to SEQ ID NO: 259742
aaugggaauaacguuuccu

SEQ ID NO: 259744 - RNA, 19 nt, Artificial Sequence
  Description of Artificial Sequence: Synthetic oligonucleotide
  Sense strand starting at position 3097 SEQ ID NO: 3340
gcucuuaaccgugaaauca

SEQ ID NO: 259745 - RNA, 19 nt, Artificial Sequence
  Description of Artificial Sequence: Synthetic oligonucleotide
  Antisense strand to SEQ ID NO: 259744
ugauuucacgguuaagagc

SEQ ID NO: 259746 - RNA, 19 nt, Artificial Sequence
  Description of Artificial Sequence: Synthetic oligonucleotide
  Sense strand starting at position 3128 SEQ ID NO: 3340
uuugauaggcccugaaguu

SEQ ID NO: 259747 - RNA, 19 nt, Artificial Sequence
  Description of Artificial Sequence: Synthetic oligonucleotide
  Antisense strand to SEQ ID NO: 259746
aacuucagggccuaucaaa

SEQ ID NO: 259748 - RNA, 19 nt, Artificial Sequence
  Description of Artificial Sequence: Synthetic oligonucleotide
  Sense strand starting at position 3129 SEQ ID NO: 3340
uugauaggcccugaaguuu

SEQ ID NO: 259749 - RNA, 19 nt, Artificial Sequence
  Description of Artificial Sequence: Synthetic oligonucleotide
  Antisense strand to SEQ ID NO: 259748
aaacuucagggccuaucaa

SEQ ID NO: 259750 - RNA, 19 nt, Artificial Sequence
  Description of Artificial Sequence: Synthetic oligonucleotide
  Sense strand starting at position 3155 SEQ ID NO: 3340
uugagucccucuuuaggaa

SEQ ID NO: 259751 - RNA, 19 nt, Artificial Sequence
  Description of Artificial Sequence: Synthetic oligonucleotide
  Antisense strand to SEQ ID NO: 259750
uuccuaaagagggacucaa

SEQ ID NO: 259752 - RNA, 19 nt, Artificial Sequence
  Description of Artificial Sequence: Synthetic oligonucleotide
  Sense strand starting at position 3230 SEQ ID NO: 3340
gucucugaagcuuaaacua

SEQ ID NO: 259753 - RNA, 19 nt, Artificial Sequence
  Description of Artificial Sequence: Synthetic oligonucleotide
  Antisense strand to SEQ ID NO: 259752
uaguuuaagcuucagagac

SEQ ID NO: 259754 - RNA, 19 nt, Artificial Sequence
  Description of Artificial Sequence: Synthetic oligonucleotide
  Sense strand starting at position 3313 SEQ ID NO: 3340
gcauuucuuucuccuguca

SEQ ID NO: 259755 - RNA, 19 nt, Artificial Sequence
  Description of Artificial Sequence: Synthetic oligonucleotide
  Antisense strand to SEQ ID NO: 259754
ugacaggagaaagaaaugc

SEQ ID NO: 259756 - RNA, 19 nt, Artificial Sequence
  Description of Artificial Sequence: Synthetic oligonucleotide
  Sense strand starting at position 3669 SEQ ID NO: 3340
uccagugggaugugucaca

SEQ ID NO: 259757 - RNA, 19 nt, Artificial Sequence
  Description of Artificial Sequence: Synthetic oligonucleotide
  Antisense strand to SEQ ID NO: 259756
ugugacacaucccacugga

SEQ ID NO: 259758 - RNA, 19 nt, Artificial Sequence
  Description of Artificial Sequence: Synthetic oligonucleotide
  Sense strand starting at position 83 SEQ ID NO: 3341
cagguaagggcucaaaugu

SEQ ID NO: 259759 - RNA, 19 nt, Artificial Sequence
  Description of Artificial Sequence: Synthetic oligonucleotide
  Antisense strand to SEQ ID NO: 259758
acauuugagcccuuaccug

SEQ ID NO: 259760 - RNA, 19 nt, Artificial Sequence
  Description of Artificial Sequence: Synthetic oligonucleotide
  Sense strand starting at position 210 SEQ ID NO: 3341
cauacucacugguugugaa

SEQ ID NO: 259761 - RNA, 19 nt, Artificial Sequence
  Description of Artificial Sequence: Synthetic oligonucleotide
  Antisense strand to SEQ ID NO: 259760
uucacaaccagugaguaug

SEQ ID NO: 259762 - RNA, 19 nt, Artificial Sequence
  Description of Artificial Sequence: Synthetic oligonucleotide
  Sense strand starting at position 211 SEQ ID NO: 3341
auacucacugguugugaau

SEQ ID NO: 259763 - RNA, 19 nt, Artificial Sequence
  Description of Artificial Sequence: Synthetic oligonucleotide
  Antisense strand to SEQ ID NO: 259762
auucacaaccagugaguau

SEQ ID NO: 259764 - RNA, 19 nt, Artificial Sequence
  Description of Artificial Sequence: Synthetic oligonucleotide
  Sense strand starting at position 266 SEQ ID NO: 3341
ccaugcugagaaugaacua

SEQ ID NO: 259765 - RNA, 19 nt, Artificial Sequence
  Description of Artificial Sequence: Synthetic oligonucleotide
  Antisense strand to SEQ ID NO: 259764
uaguucauucucagcaugg

SEQ ID NO: 259766 - RNA, 19 nt, Artificial Sequence
  Description of Artificial Sequence: Synthetic oligonucleotide
  Sense strand starting at position 457 SEQ ID NO: 3341
uggugaucuuaacuauuaa

SEQ ID NO: 259767 - RNA, 19 nt, Artificial Sequence
  Description of Artificial Sequence: Synthetic oligonucleotide
  Antisense strand to SEQ ID NO: 259766
uuaauaguuaagaucacca

SEQ ID NO: 259768 - RNA, 19 nt, Artificial Sequence
  Description of Artificial Sequence: Synthetic oligonucleotide
  Sense strand starting at position 563 SEQ ID NO: 3341
aucugcaucugggcagaaa

SEQ ID NO: 259769 - RNA, 19 nt, Artificial Sequence
  Description of Artificial Sequence: Synthetic oligonucleotide
  Antisense strand to SEQ ID NO: 259768
uuucugcccagaugcagau

SEQ ID NO: 259770 - RNA, 19 nt, Artificial Sequence
  Description of Artificial Sequence: Synthetic oligonucleotide
  Sense strand starting at position 757 SEQ ID NO: 3341
aggguucuugcagauaaug

SEQ ID NO: 259771 - RNA, 19 nt, Artificial Sequence
  Description of Artificial Sequence: Synthetic oligonucleotide
  Antisense strand to SEQ ID NO: 259770
cauuaucugcaagaacccu

SEQ ID NO: 259772 - RNA, 19 nt, Artificial Sequence
  Description of Artificial Sequence: Synthetic oligonucleotide
  Sense strand starting at position 871 SEQ ID NO: 3341
auggcagguguucagaaau

SEQ ID NO: 259773 - RNA, 19 nt, Artificial Sequence
  Description of Artificial Sequence: Synthetic oligonucleotide
  Antisense strand to SEQ ID NO: 259772
auuucugaacaccugccau

SEQ ID NO: 259774 - RNA, 19 nt, Artificial Sequence
  Description of Artificial Sequence: Synthetic oligonucleotide
  Sense strand starting at position 882 SEQ ID NO: 3341
ucagaaaugccaugaauca

SEQ ID NO: 259775 - RNA, 19 nt, Artificial Sequence
  Description of Artificial Sequence: Synthetic oligonucleotide
  Antisense strand to SEQ ID NO: 259774
ugauucauggcauuucuga

SEQ ID NO: 259776 - RNA, 19 nt, Artificial Sequence
  Description of Artificial Sequence: Synthetic oligonucleotide
  Sense strand starting at position 913 SEQ ID NO: 3341
uuccauucuacgugggaaa

SEQ ID NO: 259777 - RNA, 19 nt, Artificial Sequence
  Description of Artificial Sequence: Synthetic oligonucleotide
  Antisense strand to SEQ ID NO: 259776
uuucccacguagaauggaa

SEQ ID NO: 259778 - RNA, 19 nt, Artificial Sequence
  Description of Artificial Sequence: Synthetic oligonucleotide
  Sense strand starting at position 914 SEQ ID NO: 3341
uccauucuacgugggaaau

SEQ ID NO: 259779 - RNA, 19 nt, Artificial Sequence
  Description of Artificial Sequence: Synthetic oligonucleotide
  Antisense strand to SEQ ID NO: 259778
auuucccacguagaaugga

SEQ ID NO: 259780 - RNA, 19 nt, Artificial Sequence
  Description of Artificial Sequence: Synthetic oligonucleotide
  Sense strand starting at position 915 SEQ ID NO: 3341
ccauucuacgugggaaauu

SEQ ID NO: 259781 - RNA, 19 nt, Artificial Sequence
  Description of Artificial Sequence: Synthetic oligonucleotide
  Antisense strand to SEQ ID NO: 259780
aauuucccacguagaaugg

SEQ ID NO: 259782 - RNA, 19 nt, Artificial Sequence
  Description of Artificial Sequence: Synthetic oligonucleotide
  Sense strand starting at position 1086 SEQ ID NO: 3341
aaccgagagcucuagugaa

SEQ ID NO: 259783 - RNA, 19 nt, Artificial Sequence
  Description of Artificial Sequence: Synthetic oligonucleotide
  Antisense strand to SEQ ID NO: 259782
uucacuagagcucucgguu

SEQ ID NO: 259784 - RNA, 19 nt, Artificial Sequence
  Description of Artificial Sequence: Synthetic oligonucleotide
  Sense strand starting at position 1435 SEQ ID NO: 3341
cuguucuccgcccugcaaa

SEQ ID NO: 259785 - RNA, 19 nt, Artificial Sequence
  Description of Artificial Sequence: Synthetic oligonucleotide
  Antisense strand to SEQ ID NO: 259784
uuugcagggcggagaacag

SEQ ID NO: 259786 - RNA, 19 nt, Artificial Sequence
  Description of Artificial Sequence: Synthetic oligonucleotide
  Sense strand starting at position 1595 SEQ ID NO: 3341
cagacugaagugggugaua

SEQ ID NO: 259787 - RNA, 19 nt, Artificial Sequence
  Description of Artificial Sequence: Synthetic oligonucleotide
  Antisense strand to SEQ ID NO: 259786
uaucacccacuucagucug

SEQ ID NO: 259788 - RNA, 19 nt, Artificial Sequence
  Description of Artificial Sequence: Synthetic oligonucleotide
  Sense strand starting at position 1624 SEQ ID NO: 3341
agagcuugauagguaguga

SEQ ID NO: 259789 - RNA, 19 nt, Artificial Sequence
  Description of Artificial Sequence: Synthetic oligonucleotide
  Antisense strand to SEQ ID NO: 259788
ucacuaccuaucaagcucu

SEQ ID NO: 259790 - RNA, 19 nt, Artificial Sequence
  Description of Artificial Sequence: Synthetic oligonucleotide
  Sense strand starting at position 2120 SEQ ID NO: 3341
gcacaucaucaauacggua

SEQ ID NO: 259791 - RNA, 19 nt, Artificial Sequence
  Description of Artificial Sequence: Synthetic oligonucleotide
  Antisense strand to SEQ ID NO: 259790
uaccguauugaugaugugc

SEQ ID NO: 259792 - RNA, 19 nt, Artificial Sequence
  Description of Artificial Sequence: Synthetic oligonucleotide
  Sense strand starting at position 2147 SEQ ID NO: 3341
ccaguuugugaugauaaug

SEQ ID NO: 259793 - RNA, 19 nt, Artificial Sequence
  Description of Artificial Sequence: Synthetic oligonucleotide
  Antisense strand to SEQ ID NO: 259792
cauuaucaucacaaacugg

SEQ ID NO: 259794 - RNA, 19 nt, Artificial Sequence
  Description of Artificial Sequence: Synthetic oligonucleotide
  Sense strand starting at position 2277 SEQ ID NO: 3341
ccaacuccagcuugaagau

SEQ ID NO: 259795 - RNA, 19 nt, Artificial Sequence
  Description of Artificial Sequence: Synthetic oligonucleotide
  Antisense strand to SEQ ID NO: 259794
aucuucaagcuggaguugg

SEQ ID NO: 259796 - RNA, 19 nt, Artificial Sequence
  Description of Artificial Sequence: Synthetic oligonucleotide
  Sense strand starting at position 2354 SEQ ID NO: 3341
ccaagcuuucguuugccua

SEQ ID NO: 259797 - RNA, 19 nt, Artificial Sequence
  Description of Artificial Sequence: Synthetic oligonucleotide
  Antisense strand to SEQ ID NO: 259796
uaggcaaacgaaagcuugg

SEQ ID NO: 259798 - RNA, 19 nt, Artificial Sequence
  Description of Artificial Sequence: Synthetic oligonucleotide
  Sense strand starting at position 2401 SEQ ID NO: 3341
ccaacuucuagagguguga

SEQ ID NO: 259799 - RNA, 19 nt, Artificial Sequence
  Description of Artificial Sequence: Synthetic oligonucleotide
  Antisense strand to SEQ ID NO: 259798
ucacaccucuagaaguugg

SEQ ID NO: 259800 - RNA, 19 nt, Artificial Sequence
  Description of Artificial Sequence: Synthetic oligonucleotide
  Sense strand starting at position 2403 SEQ ID NO: 3341
aacuucuagaggugugaga

SEQ ID NO: 259801 - RNA, 19 nt, Artificial Sequence
  Description of Artificial Sequence: Synthetic oligonucleotide
  Antisense strand to SEQ ID NO: 259800
ucucacaccucuagaaguu

SEQ ID NO: 259802 - RNA, 19 nt, Artificial Sequence
  Description of Artificial Sequence: Synthetic oligonucleotide
  Sense strand starting at position 2405 SEQ ID NO: 3341
cuucuagaggugugagaau

SEQ ID NO: 259803 - RNA, 19 nt, Artificial Sequence
  Description of Artificial Sequence: Synthetic oligonucleotide
  Antisense strand to SEQ ID NO: 259802
auucucacaccucuagaag

SEQ ID NO: 259804 - RNA, 19 nt, Artificial Sequence
  Description of Artificial Sequence: Synthetic oligonucleotide
  Sense strand starting at position 2416 SEQ ID NO: 3341
gugagaauucuacacaugc

SEQ ID NO: 259805 - RNA, 19 nt, Artificial Sequence
  Description of Artificial Sequence: Synthetic oligonucleotide
  Antisense strand to SEQ ID NO: 259804
gcauguguagaauucucac

SEQ ID NO: 259806 - RNA, 19 nt, Artificial Sequence
  Description of Artificial Sequence: Synthetic oligonucleotide
  Sense strand starting at position 2486 SEQ ID NO: 3341
uaugccugaguugagauua

SEQ ID NO: 259807 - RNA, 19 nt, Artificial Sequence
  Description of Artificial Sequence: Synthetic oligonucleotide
  Antisense strand to SEQ ID NO: 259806
uaaucucaacucaggcaua

SEQ ID NO: 259808 - RNA, 19 nt, Artificial Sequence
  Description of Artificial Sequence: Synthetic oligonucleotide
  Sense strand starting at position 2621 SEQ ID NO: 3341
acggucuugauguggaaag

SEQ ID NO: 259809 - RNA, 19 nt, Artificial Sequence
  Description of Artificial Sequence: Synthetic oligonucleotide
  Antisense strand to SEQ ID NO: 259808
cuuuccacaucaagaccgu

SEQ ID NO: 259810 - RNA, 19 nt, Artificial Sequence
  Description of Artificial Sequence: Synthetic oligonucleotide
  Sense strand starting at position 2623 SEQ ID NO: 3341
ggucuugauguggaaagua

SEQ ID NO: 259811 - RNA, 19 nt, Artificial Sequence
  Description of Artificial Sequence: Synthetic oligonucleotide
  Antisense strand to SEQ ID NO: 259810
uacuuuccacaucaagacc

SEQ ID NO: 259812 - RNA, 19 nt, Artificial Sequence
  Description of Artificial Sequence: Synthetic oligonucleotide
  Sense strand starting at position 2687 SEQ ID NO: 3341
ugacauguaagcugagaag

SEQ ID NO: 259813 - RNA, 19 nt, Artificial Sequence
  Description of Artificial Sequence: Synthetic oligonucleotide
  Antisense strand to SEQ ID NO: 259812
cuucucagcuuacauguca

SEQ ID NO: 259814 - RNA, 19 nt, Artificial Sequence
  Description of Artificial Sequence: Synthetic oligonucleotide
  Sense strand starting at position 2713 SEQ ID NO: 3341
agaagauauguguggcuga

SEQ ID NO: 259815 - RNA, 19 nt, Artificial Sequence
  Description of Artificial Sequence: Synthetic oligonucleotide
  Antisense strand to SEQ ID NO: 259814
ucagccacacauaucuucu

SEQ ID NO: 259816 - RNA, 19 nt, Artificial Sequence
  Description of Artificial Sequence: Synthetic oligonucleotide
  Sense strand starting at position 2718 SEQ ID NO: 3341
auauguguggcugaaacuu

SEQ ID NO: 259817 - RNA, 19 nt, Artificial Sequence
  Description of Artificial Sequence: Synthetic oligonucleotide
  Antisense strand to SEQ ID NO: 259816
aaguuucagccacacauau

SEQ ID NO: 259818 - RNA, 19 nt, Artificial Sequence
  Description of Artificial Sequence: Synthetic oligonucleotide
  Sense strand starting at position 2726 SEQ ID NO: 3341
ggcugaaacuuccucauca

SEQ ID NO: 259819 - RNA, 19 nt, Artificial Sequence
  Description of Artificial Sequence: Synthetic oligonucleotide
  Antisense strand to SEQ ID NO: 259818
ugaugaggaaguuucagcc

SEQ ID NO: 259820 - RNA, 19 nt, Artificial Sequence
  Description of Artificial Sequence: Synthetic oligonucleotide
  Sense strand starting at position 2818 SEQ ID NO: 3341
agugcagugaaaggaauua

SEQ ID NO: 259821 - RNA, 19 nt, Artificial Sequence
  Description of Artificial Sequence: Synthetic oligonucleotide
  Antisense strand to SEQ ID NO: 259820
uaauuccuuucacugcacu

SEQ ID NO: 259822 - RNA, 19 nt, Artificial Sequence
  Description of Artificial Sequence: Synthetic oligonucleotide
  Sense strand starting at position 2831 SEQ ID NO: 3341
gaauuaagugagugcauga

SEQ ID NO: 259823 - RNA, 19 nt, Artificial Sequence
  Description of Artificial Sequence: Synthetic oligonucleotide
  Antisense strand to SEQ ID NO: 259822
ucaugcacucacuuaauuc

SEQ ID NO: 259824 - RNA, 19 nt, Artificial Sequence
  Description of Artificial Sequence: Synthetic oligonucleotide
  Sense strand starting at position 3018 SEQ ID NO: 3341
caauuuacuuguguagguu

SEQ ID NO: 259825 - RNA, 19 nt, Artificial Sequence
  Description of Artificial Sequence: Synthetic oligonucleotide
  Antisense strand to SEQ ID NO: 259824
aaccuacacaaguaaauug

SEQ ID NO: 259826 - RNA, 19 nt, Artificial Sequence
  Description of Artificial Sequence: Synthetic oligonucleotide
  Sense strand starting at position 3070 SEQ ID NO: 3341
aaaguuucucaugggaggu

SEQ ID NO: 259827 - RNA, 19 nt, Artificial Sequence
  Description of Artificial Sequence: Synthetic oligonucleotide
  Antisense strand to SEQ ID NO: 259826
accucccaugagaaacuuu

SEQ ID NO: 259828 - RNA, 19 nt, Artificial Sequence
  Description of Artificial Sequence: Synthetic oligonucleotide
  Sense strand starting at position 3189 SEQ ID NO: 3341
acuccuuugcaggagaacu

SEQ ID NO: 259829 - RNA, 19 nt, Artificial Sequence
  Description of Artificial Sequence: Synthetic oligonucleotide
  Antisense strand to SEQ ID NO: 259828
aguucuccugcaaaggagu

SEQ ID NO: 259830 - RNA, 19 nt, Artificial Sequence
  Description of Artificial Sequence: Synthetic oligonucleotide
  Sense strand starting at position 3259 SEQ ID NO: 3341
gugaguaacucaucuggga

SEQ ID NO: 259831 - RNA, 19 nt, Artificial Sequence
  Description of Artificial Sequence: Synthetic oligonucleotide
  Antisense strand to SEQ ID NO: 259830
ucccagaugaguuacucac

SEQ ID NO: 259832 - RNA, 19 nt, Artificial Sequence
  Description of Artificial Sequence: Synthetic oligonucleotide
  Sense strand starting at position 3782 SEQ ID NO: 3341
gggagagauuucuaagggu

SEQ ID NO: 259833 - RNA, 19 nt, Artificial Sequence
  Description of Artificial Sequence: Synthetic oligonucleotide
  Antisense strand to SEQ ID NO: 259832
acccuuagaaaucucuccc

SEQ ID NO: 259834 - RNA, 19 nt, Artificial Sequence
  Description of Artificial Sequence: Synthetic oligonucleotide
  Sense strand starting at position 3932 SEQ ID NO: 3341
gguugaaauuuagacucaa

SEQ ID NO: 259835 - RNA, 19 nt, Artificial Sequence
  Description of Artificial Sequence: Synthetic oligonucleotide
  Antisense strand to SEQ ID NO: 259834
uugagucuaaauuucaacc

SEQ ID NO: 259836 - RNA, 19 nt, Artificial Sequence
  Description of Artificial Sequence: Synthetic oligonucleotide
  Sense strand starting at position 3945 SEQ ID NO: 3341
acucaaagauggccuauau

SEQ ID NO: 259837 - RNA, 19 nt, Artificial Sequence
  Description of Artificial Sequence: Synthetic oligonucleotide
  Antisense strand to SEQ ID NO: 259836
auauaggccaucuuugagu

SEQ ID NO: 259838 - RNA, 19 nt, Artificial Sequence
  Description of Artificial Sequence: Synthetic oligonucleotide
  Sense strand starting at position 188 SEQ ID NO: 3342
auuggagcuuuguccuuaa

SEQ ID NO: 259839 - RNA, 19 nt, Artificial Sequence
  Description of Artificial Sequence: Synthetic oligonucleotide
  Antisense strand to SEQ ID NO: 259838
uuaaggacaaagcuccaau

SEQ ID NO: 259840 - RNA, 19 nt, Artificial Sequence
  Description of Artificial Sequence: Synthetic oligonucleotide
  Sense strand starting at position 191 SEQ ID NO: 3342
ggagcuuuguccuuaauag

SEQ ID NO: 259841 - RNA, 19 nt, Artificial Sequence
  Description of Artificial Sequence: Synthetic oligonucleotide
  Antisense strand to SEQ ID NO: 259840
cuauuaaggacaaagcucc

SEQ ID NO: 259842 - RNA, 19 nt, Artificial Sequence
  Description of Artificial Sequence: Synthetic oligonucleotide
  Sense strand starting at position 200 SEQ ID NO: 3342
uccuuaauagcauguugau

SEQ ID NO: 259843 - RNA, 19 nt, Artificial Sequence
  Description of Artificial Sequence: Synthetic oligonucleotide
  Antisense strand to SEQ ID NO: 259842
aucaacaugcuauuaagga

SEQ ID NO: 259844 - RNA, 19 nt, Artificial Sequence
  Description of Artificial Sequence: Synthetic oligonucleotide
  Sense strand starting at position 665 SEQ ID NO: 3342
uguaguuugguugaguauu

SEQ ID NO: 259845 - RNA, 19 nt, Artificial Sequence
  Description of Artificial Sequence: Synthetic oligonucleotide
  Antisense strand to SEQ ID NO: 259844
aauacucaaccaaacuaca

SEQ ID NO: 259846 - RNA, 19 nt, Artificial Sequence
  Description of Artificial Sequence: Synthetic oligonucleotide
  Sense strand starting at position 716 SEQ ID NO: 3342
auaauauggcuacauaugu

SEQ ID NO: 259847 - RNA, 19 nt, Artificial Sequence
  Description of Artificial Sequence: Synthetic oligonucleotide
  Antisense strand to SEQ ID NO: 259846
acauauguagccauauuau

SEQ ID NO: 259848 - RNA, 19 nt, Artificial Sequence
  Description of Artificial Sequence: Synthetic oligonucleotide
  Sense strand starting at position 725 SEQ ID NO: 3342
cuacauauguuguuaacau

SEQ ID NO: 259849 - RNA, 19 nt, Artificial Sequence
  Description of Artificial Sequence: Synthetic oligonucleotide
  Antisense strand to SEQ ID NO: 259848
auguuaacaacauauguag

SEQ ID NO: 259850 - RNA, 19 nt, Artificial Sequence
  Description of Artificial Sequence: Synthetic oligonucleotide
  Sense strand starting at position 732 SEQ ID NO: 3342
uguuguuaacaucagagca

SEQ ID NO: 259851 - RNA, 19 nt, Artificial Sequence
  Description of Artificial Sequence: Synthetic oligonucleotide
  Antisense strand to SEQ ID NO: 259850
ugcucugauguuaacaaca

SEQ ID NO: 259852 - RNA, 19 nt, Artificial Sequence
  Description of Artificial Sequence: Synthetic oligonucleotide
  Sense strand starting at position 915 SEQ ID NO: 3342
gcauuuguuuacuucucua

SEQ ID NO: 259853 - RNA, 19 nt, Artificial Sequence
  Description of Artificial Sequence: Synthetic oligonucleotide
  Antisense strand to SEQ ID NO: 259852
uagagaaguaaacaaaugc

SEQ ID NO: 259854 - RNA, 19 nt, Artificial Sequence
  Description of Artificial Sequence: Synthetic oligonucleotide
  Sense strand starting at position 991 SEQ ID NO: 3342
uaggaauuagugggccaga

SEQ ID NO: 259855 - RNA, 19 nt, Artificial Sequence
  Description of Artificial Sequence: Synthetic oligonucleotide
  Antisense strand to SEQ ID NO: 259854
ucuggcccacuaauuccua

SEQ ID NO: 259856 - RNA, 19 nt, Artificial Sequence
  Description of Artificial Sequence: Synthetic oligonucleotide
  Sense strand starting at position 992 SEQ ID NO: 3342
aggaauuagugggccagaa

SEQ ID NO: 259857 - RNA, 19 nt, Artificial Sequence
  Description of Artificial Sequence: Synthetic oligonucleotide
  Antisense strand to SEQ ID NO: 259856
uucuggcccacuaauuccu

SEQ ID NO: 259858 - RNA, 19 nt, Artificial Sequence
  Description of Artificial Sequence: Synthetic oligonucleotide
  Sense strand starting at position 1007 SEQ ID NO: 3342
agaacuagaccauguccua

SEQ ID NO: 259859 - RNA, 19 nt, Artificial Sequence
  Description of Artificial Sequence: Synthetic oligonucleotide
  Antisense strand to SEQ ID NO: 259858
uaggacauggucuaguucu

SEQ ID NO: 259860 - RNA, 19 nt, Artificial Sequence
  Description of Artificial Sequence: Synthetic oligonucleotide
  Sense strand starting at position 1078 SEQ ID NO: 3342
agggucuuauuccucauga

SEQ ID NO: 259861 - RNA, 19 nt, Artificial Sequence
  Description of Artificial Sequence: Synthetic oligonucleotide
  Antisense strand to SEQ ID NO: 259860
ucaugaggaauaagacccu

SEQ ID NO: 259862 - RNA, 19 nt, Artificial Sequence
  Description of Artificial Sequence: Synthetic oligonucleotide
  Sense strand starting at position 1079 SEQ ID NO: 3342
gggucuuauuccucaugau

SEQ ID NO: 259863 - RNA, 19 nt, Artificial Sequence
  Description of Artificial Sequence: Synthetic oligonucleotide
  Antisense strand to SEQ ID NO: 259862
aucaugaggaauaagaccc

SEQ ID NO: 259864 - RNA, 19 nt, Artificial Sequence
  Description of Artificial Sequence: Synthetic oligonucleotide
  Sense strand starting at position 1080 SEQ ID NO: 3342
ggucuuauuccucaugauu

SEQ ID NO: 259865 - RNA, 19 nt, Artificial Sequence
  Description of Artificial Sequence: Synthetic oligonucleotide
  Antisense strand to SEQ ID NO: 259864
aaucaugaggaauaagacc

SEQ ID NO: 259866 - RNA, 19 nt, Artificial Sequence
  Description of Artificial Sequence: Synthetic oligonucleotide
  Sense strand starting at position 1154 SEQ ID NO: 3342
auacaagaagugugguauu

SEQ ID NO: 259867 - RNA, 19 nt, Artificial Sequence
  Description of Artificial Sequence: Synthetic oligonucleotide
  Antisense strand to SEQ ID NO: 259866
aauaccacacuucuuguau

SEQ ID NO: 259868 - RNA, 19 nt, Artificial Sequence
  Description of Artificial Sequence: Synthetic oligonucleotide
  Sense strand starting at position 1183 SEQ ID NO: 3342
augauuucuuaggaguaca

SEQ ID NO: 259869 - RNA, 19 nt, Artificial Sequence
  Description of Artificial Sequence: Synthetic oligonucleotide
  Antisense strand to SEQ ID NO: 259868
uguacuccuaagaaaucau

SEQ ID NO: 259870 - RNA, 19 nt, Artificial Sequence
  Description of Artificial Sequence: Synthetic oligonucleotide
  Sense strand starting at position 1279 SEQ ID NO: 3342
agaucaucagugcaaaucu

SEQ ID NO: 259871 - RNA, 19 nt, Artificial Sequence
  Description of Artificial Sequence: Synthetic oligonucleotide
  Antisense strand to SEQ ID NO: 259870
agauuugcacugaugaucu

SEQ ID NO: 259872 - RNA, 19 nt, Artificial Sequence
  Description of Artificial Sequence: Synthetic oligonucleotide
  Sense strand starting at position 1325 SEQ ID NO: 3342
aggcacacguucuuaaaga

SEQ ID NO: 259873 - RNA, 19 nt, Artificial Sequence
  Description of Artificial Sequence: Synthetic oligonucleotide
  Antisense strand to SEQ ID NO: 259872
ucuuuaagaacgugugccu

SEQ ID NO: 259874 - RNA, 19 nt, Artificial Sequence
  Description of Artificial Sequence: Synthetic oligonucleotide
  Sense strand starting at position 1340 SEQ ID NO: 3342
aagaucuacggguguaaca

SEQ ID NO: 259875 - RNA, 19 nt, Artificial Sequence
  Description of Artificial Sequence: Synthetic oligonucleotide
  Antisense strand to SEQ ID NO: 259874
uguuacacccguagaucuu

SEQ ID NO: 259876 - RNA, 19 nt, Artificial Sequence
  Description of Artificial Sequence: Synthetic oligonucleotide
  Sense strand starting at position 1374 SEQ ID NO: 3342
auauuacuauuccugguuu

SEQ ID NO: 259877 - RNA, 19 nt, Artificial Sequence
  Description of Artificial Sequence: Synthetic oligonucleotide
  Antisense strand to SEQ ID NO: 259876
aaaccaggaauaguaauau

SEQ ID NO: 259878 - RNA, 19 nt, Artificial Sequence
  Description of Artificial Sequence: Synthetic oligonucleotide
  Sense strand starting at position 1390 SEQ ID NO: 3342
uuuguaauugcaggacaga

SEQ ID NO: 259879 - RNA, 19 nt, Artificial Sequence
  Description of Artificial Sequence: Synthetic oligonucleotide
  Antisense strand to SEQ ID NO: 259878
ucuguccugcaauuacaaa

SEQ ID NO: 259880 - RNA, 19 nt, Artificial Sequence
  Description of Artificial Sequence: Synthetic oligonucleotide
  Sense strand starting at position 1646 SEQ ID NO: 3342
guuucuaugagguaagauu

SEQ ID NO: 259881 - RNA, 19 nt, Artificial Sequence
  Description of Artificial Sequence: Synthetic oligonucleotide
  Antisense strand to SEQ ID NO: 259880
aaucuuaccucauagaaac

SEQ ID NO: 259882 - RNA, 19 nt, Artificial Sequence
  Description of Artificial Sequence: Synthetic oligonucleotide
  Sense strand starting at position 1683 SEQ ID NO: 3342
ugggaaugcccaugacuau

SEQ ID NO: 259883 - RNA, 19 nt, Artificial Sequence
  Description of Artificial Sequence: Synthetic oligonucleotide
  Antisense strand to SEQ ID NO: 259882
auagucaugggcauuccca

SEQ ID NO: 259884 - RNA, 19 nt, Artificial Sequence
  Description of Artificial Sequence: Synthetic oligonucleotide
  Sense strand starting at position 1792 SEQ ID NO: 3342
ucaaauugauaggaauaac

SEQ ID NO: 259885 - RNA, 19 nt, Artificial Sequence
  Description of Artificial Sequence: Synthetic oligonucleotide
  Antisense strand to SEQ ID NO: 259884
guuauuccuaucaauuuga

SEQ ID NO: 259886 - RNA, 19 nt, Artificial Sequence
  Description of Artificial Sequence: Synthetic oligonucleotide
  Sense strand starting at position 1859 SEQ ID NO: 3342
agggcauaccuguaauacu

SEQ ID NO: 259887 - RNA, 19 nt, Artificial Sequence
  Description of Artificial Sequence: Synthetic oligonucleotide
  Antisense strand to SEQ ID NO: 259886
aguauuacagguaugcccu

SEQ ID NO: 259888 - RNA, 19 nt, Artificial Sequence
  Description of Artificial Sequence: Synthetic oligonucleotide
  Sense strand starting at position 2060 SEQ ID NO: 3342
augugacaugccgagaaga

SEQ ID NO: 259889 - RNA, 19 nt, Artificial Sequence
  Description of Artificial Sequence: Synthetic oligonucleotide
  Antisense strand to SEQ ID NO: 259888
ucuucucggcaugucacau

SEQ ID NO: 259890 - RNA, 19 nt, Artificial Sequence
  Description of Artificial Sequence: Synthetic oligonucleotide
  Sense strand starting at position 2287 SEQ ID NO: 3342
ugauuuggauccugaaaga

SEQ ID NO: 259891 - RNA, 19 nt, Artificial Sequence
  Description of Artificial Sequence: Synthetic oligonucleotide
  Antisense strand to SEQ ID NO: 259890
ucuuucaggauccaaauca

SEQ ID NO: 259892 - RNA, 19 nt, Artificial Sequence
  Description of Artificial Sequence: Synthetic oligonucleotide
  Sense strand starting at position 2339 SEQ ID NO: 3342
cggaguaagagcuaagguu

SEQ ID NO: 259893 - RNA, 19 nt, Artificial Sequence
  Description of Artificial Sequence: Synthetic oligonucleotide
  Antisense strand to SEQ ID NO: 259892
aaccuuagcucuuacuccg

SEQ ID NO: 259894 - RNA, 19 nt, Artificial Sequence
  Description of Artificial Sequence: Synthetic oligonucleotide
  Sense strand starting at position 2347 SEQ ID NO: 3342
gagcuaagguuagugaaca

SEQ ID NO: 259895 - RNA, 19 nt, Artificial Sequence
  Description of Artificial Sequence: Synthetic oligonucleotide
  Antisense strand to SEQ ID NO: 259894
uguucacuaaccuuagcuc

SEQ ID NO: 259896 - RNA, 19 nt, Artificial Sequence
  Description of Artificial Sequence: Synthetic oligonucleotide
  Sense strand starting at position 2352 SEQ ID NO: 3342
aagguuagugaacagugua

SEQ ID NO: 259897 - RNA, 19 nt, Artificial Sequence
  Description of Artificial Sequence: Synthetic oligonucleotide
  Antisense strand to SEQ ID NO: 259896
uacacuguucacuaaccuu

SEQ ID NO: 259898 - RNA, 19 nt, Artificial Sequence
  Description of Artificial Sequence: Synthetic oligonucleotide
  Sense strand starting at position 2768 SEQ ID NO: 3342
uuguguacuauuugugcaa

SEQ ID NO: 259899 - RNA, 19 nt, Artificial Sequence
  Description of Artificial Sequence: Synthetic oligonucleotide
  Antisense strand to SEQ ID NO: 259898
uugcacaaauaguacacaa

SEQ ID NO: 259900 - RNA, 19 nt, Artificial Sequence
  Description of Artificial Sequence: Synthetic oligonucleotide
  Sense strand starting at position 2771 SEQ ID NO: 3342
uguacuauuugugcaacau

SEQ ID NO: 259901 - RNA, 19 nt, Artificial Sequence
  Description of Artificial Sequence: Synthetic oligonucleotide
  Antisense strand to SEQ ID NO: 259900
auguugcacaaauaguaca

SEQ ID NO: 259902 - RNA, 19 nt, Artificial Sequence
  Description of Artificial Sequence: Synthetic oligonucleotide
  Sense strand starting at position 2913 SEQ ID NO: 3342
cgugcaauuuguccucuga

SEQ ID NO: 259903 - RNA, 19 nt, Artificial Sequence
  Description of Artificial Sequence: Synthetic oligonucleotide
  Antisense strand to SEQ ID NO: 259902
ucagaggacaaauugcacg

SEQ ID NO: 259904 - RNA, 19 nt, Artificial Sequence
  Description of Artificial Sequence: Synthetic oligonucleotide
  Sense strand starting at position 3219 SEQ ID NO: 3342
ccacauuuauguguuucuu

SEQ ID NO: 259905 - RNA, 19 nt, Artificial Sequence
  Description of Artificial Sequence: Synthetic oligonucleotide
  Antisense strand to SEQ ID NO: 259904
aagaaacacauaaaugugg

SEQ ID NO: 259906 - RNA, 19 nt, Artificial Sequence
  Description of Artificial Sequence: Synthetic oligonucleotide
  Sense strand starting at position 3293 SEQ ID NO: 3342
uuuauaguguaacugacaa

SEQ ID NO: 259907 - RNA, 19 nt, Artificial Sequence
  Description of Artificial Sequence: Synthetic oligonucleotide
  Antisense strand to SEQ ID NO: 259906
uugucaguuacacuauaaa

SEQ ID NO: 259908 - RNA, 19 nt, Artificial Sequence
  Description of Artificial Sequence: Synthetic oligonucleotide
  Sense strand starting at position 3392 SEQ ID NO: 3342
cuuauacugcauuauagag

SEQ ID NO: 259909 - RNA, 19 nt, Artificial Sequence
  Description of Artificial Sequence: Synthetic oligonucleotide
  Antisense strand to SEQ ID NO: 259908
cucuauaaugcaguauaag

SEQ ID NO: 259910 - RNA, 19 nt, Artificial Sequence
  Description of Artificial Sequence: Synthetic oligonucleotide
  Sense strand starting at position 3899 SEQ ID NO: 3342
gcguaaagaccauggaucu

SEQ ID NO: 259911 - RNA, 19 nt, Artificial Sequence
  Description of Artificial Sequence: Synthetic oligonucleotide
  Antisense strand to SEQ ID NO: 259910
agauccauggucuuuacgc

SEQ ID NO: 259912 - RNA, 19 nt, Artificial Sequence
  Description of Artificial Sequence: Synthetic oligonucleotide
  Sense strand starting at position 3900 SEQ ID NO: 3342
cguaaagaccauggaucua

SEQ ID NO: 259913 - RNA, 19 nt, Artificial Sequence
  Description of Artificial Sequence: Synthetic oligonucleotide
  Antisense strand to SEQ ID NO: 259912
uagauccauggucuuuacg

SEQ ID NO: 259914 - RNA, 19 nt, Artificial Sequence
  Description of Artificial Sequence: Synthetic oligonucleotide
  Sense strand starting at position 3919 SEQ ID NO: 3342
ccaccaugauucuugaggu

SEQ ID NO: 259915 - RNA, 19 nt, Artificial Sequence
  Description of Artificial Sequence: Synthetic oligonucleotide
  Antisense strand to SEQ ID NO: 259914
accucaagaaucauggugg

SEQ ID NO: 259916 - RNA, 19 nt, Artificial Sequence
  Description of Artificial Sequence: Synthetic oligonucleotide
  Sense strand starting at position 3950 SEQ ID NO: 3342
augcgaaagguuuaaggga

SEQ ID NO: 259917 - RNA, 19 nt, Artificial Sequence
  Description of Artificial Sequence: Synthetic oligonucleotide
  Antisense strand to SEQ ID NO: 259916
ucccuuaaaccuuucgcau

SEQ ID NO: 259918 - RNA, 19 nt, Artificial Sequence
  Description of Artificial Sequence: Synthetic oligonucleotide
  Sense strand starting at position 70 SEQ ID NO: 3343
uuaugaaacucugaagaua

SEQ ID NO: 259919 - RNA, 19 nt, Artificial Sequence
  Description of Artificial Sequence: Synthetic oligonucleotide
  Antisense strand to SEQ ID NO: 259918
uaucuucagaguuucauaa

SEQ ID NO: 259920 - RNA, 19 nt, Artificial Sequence
  Description of Artificial Sequence: Synthetic oligonucleotide
  Sense strand starting at position 108 SEQ ID NO: 3343
gcaaauaagcccugaaauu

SEQ ID NO: 259921 - RNA, 19 nt, Artificial Sequence
  Description of Artificial Sequence: Synthetic oligonucleotide
  Antisense strand to SEQ ID NO: 259920
aauuucagggcuuauuugc

SEQ ID NO: 259922 - RNA, 19 nt, Artificial Sequence
  Description of Artificial Sequence: Synthetic oligonucleotide
  Sense strand starting at position 156 SEQ ID NO: 3343
guaagaauguagucauaca

SEQ ID NO: 259923 - RNA, 19 nt, Artificial Sequence
  Description of Artificial Sequence: Synthetic oligonucleotide
  Antisense strand to SEQ ID NO: 259922
uguaugacuacauucuuac

SEQ ID NO: 259924 - RNA, 19 nt, Artificial Sequence
  Description of Artificial Sequence: Synthetic oligonucleotide
  Sense strand starting at position 185 SEQ ID NO: 3343
ggguuucccagcuaauaag

SEQ ID NO: 259925 - RNA, 19 nt, Artificial Sequence
  Description of Artificial Sequence: Synthetic oligonucleotide
  Antisense strand to SEQ ID NO: 259924
cuuauuagcugggaaaccc

SEQ ID NO: 259926 - RNA, 19 nt, Artificial Sequence
  Description of Artificial Sequence: Synthetic oligonucleotide
  Sense strand starting at position 223 SEQ ID NO: 3343
ugaagaaacucuucggaca

SEQ ID NO: 259927 - RNA, 19 nt, Artificial Sequence
  Description of Artificial Sequence: Synthetic oligonucleotide
  Antisense strand to SEQ ID NO: 259926
uguccgaagaguuucuuca

SEQ ID NO: 259928 - RNA, 19 nt, Artificial Sequence
  Description of Artificial Sequence: Synthetic oligonucleotide
  Sense strand starting at position 298 SEQ ID NO: 3343
gcuuguaagacacagguga

SEQ ID NO: 259929 - RNA, 19 nt, Artificial Sequence
  Description of Artificial Sequence: Synthetic oligonucleotide
  Antisense strand to SEQ ID NO: 259928
ucaccugugucuuacaagc

SEQ ID NO: 259930 - RNA, 19 nt, Artificial Sequence
  Description of Artificial Sequence: Synthetic oligonucleotide
  Sense strand starting at position 363 SEQ ID NO: 3343
cccuuaauauucucggaga

SEQ ID NO: 259931 - RNA, 19 nt, Artificial Sequence
  Description of Artificial Sequence: Synthetic oligonucleotide
  Antisense strand to SEQ ID NO: 259930
ucuccgagaauauuaaggg

SEQ ID NO: 259932 - RNA, 19 nt, Artificial Sequence
  Description of Artificial Sequence: Synthetic oligonucleotide
  Sense strand starting at position 365 SEQ ID NO: 3343
cuuaauauucucggagacu

SEQ ID NO: 259933 - RNA, 19 nt, Artificial Sequence
  Description of Artificial Sequence: Synthetic oligonucleotide
  Antisense strand to SEQ ID NO: 259932
agucuccgagaauauuaag

SEQ ID NO: 259934 - RNA, 19 nt, Artificial Sequence
  Description of Artificial Sequence: Synthetic oligonucleotide
  Sense strand starting at position 387 SEQ ID NO: 3343
aucuaacacguuugaaucu

SEQ ID NO: 259935 - RNA, 19 nt, Artificial Sequence
  Description of Artificial Sequence: Synthetic oligonucleotide
  Antisense strand to SEQ ID NO: 259934
agauucaaacguguuagau

SEQ ID NO: 259936 - RNA, 19 nt, Artificial Sequence
  Description of Artificial Sequence: Synthetic oligonucleotide
  Sense strand starting at position 394 SEQ ID NO: 3343
acguuugaaucuuuaacaa

SEQ ID NO: 259937 - RNA, 19 nt, Artificial Sequence
  Description of Artificial Sequence: Synthetic oligonucleotide
  Antisense strand to SEQ ID NO: 259936
uuguuaaagauucaaacgu

SEQ ID NO: 259938 - RNA, 19 nt, Artificial Sequence
  Description of Artificial Sequence: Synthetic oligonucleotide
  Sense strand starting at position 567 SEQ ID NO: 3343
uuuaaaguguucucugaaa

SEQ ID NO: 259939 - RNA, 19 nt, Artificial Sequence
  Description of Artificial Sequence: Synthetic oligonucleotide
  Antisense strand to SEQ ID NO: 259938
uuucagagaacacuuuaaa

SEQ ID NO: 259940 - RNA, 19 nt, Artificial Sequence
  Description of Artificial Sequence: Synthetic oligonucleotide
  Sense strand starting at position 605 SEQ ID NO: 3343
cugagaacacuuugccgaa

SEQ ID NO: 259941 - RNA, 19 nt, Artificial Sequence
  Description of Artificial Sequence: Synthetic oligonucleotide
  Antisense strand to SEQ ID NO: 259940
uucggcaaaguguucucag

SEQ ID NO: 259942 - RNA, 19 nt, Artificial Sequence
  Description of Artificial Sequence: Synthetic oligonucleotide
  Sense strand starting at position 609 SEQ ID NO: 3343
gaacacuuugccgaacguu

SEQ ID NO: 259943 - RNA, 19 nt, Artificial Sequence
  Description of Artificial Sequence: Synthetic oligonucleotide
  Antisense strand to SEQ ID NO: 259942
aacguucggcaaaguguuc

SEQ ID NO: 259944 - RNA, 19 nt, Artificial Sequence
  Description of Artificial Sequence: Synthetic oligonucleotide
  Sense strand starting at position 725 SEQ ID NO: 3343
gacguaagccuauauaacu

SEQ ID NO: 259945 - RNA, 19 nt, Artificial Sequence
  Description of Artificial Sequence: Synthetic oligonucleotide
  Antisense strand to SEQ ID NO: 259944
aguuauauaggcuuacguc

SEQ ID NO: 259946 - RNA, 19 nt, Artificial Sequence
  Description of Artificial Sequence: Synthetic oligonucleotide
  Sense strand starting at position 784 SEQ ID NO: 3343
uuauaaacgggucaguagu

SEQ ID NO: 259947 - RNA, 19 nt, Artificial Sequence
  Description of Artificial Sequence: Synthetic oligonucleotide
  Antisense strand to SEQ ID NO: 259946
acuacugacccguuuauaa

SEQ ID NO: 259948 - RNA, 19 nt, Artificial Sequence
  Description of Artificial Sequence: Synthetic oligonucleotide
  Sense strand starting at position 807 SEQ ID NO: 3343
uuuaauacagcuuacguaa

SEQ ID NO: 259949 - RNA, 19 nt, Artificial Sequence
  Description of Artificial Sequence: Synthetic oligonucleotide
  Antisense strand to SEQ ID NO: 259948
uuacguaagcuguauuaaa

SEQ ID NO: 259950 - RNA, 19 nt, Artificial Sequence
  Description of Artificial Sequence: Synthetic oligonucleotide
  Sense strand starting at position 821 SEQ ID NO: 3343
cguaaugucaucgcccagu

SEQ ID NO: 259951 - RNA, 19 nt, Artificial Sequence
  Description of Artificial Sequence: Synthetic oligonucleotide
  Antisense strand to SEQ ID NO: 259950
acugggcgaugacauuacg

SEQ ID NO: 259952 - RNA, 19 nt, Artificial Sequence
  Description of Artificial Sequence: Synthetic oligonucleotide
  Sense strand starting at position 851 SEQ ID NO: 3343
uuuacacguguggguuaaa

SEQ ID NO: 259953 - RNA, 19 nt, Artificial Sequence
  Description of Artificial Sequence: Synthetic oligonucleotide
  Antisense strand to SEQ ID NO: 259952
uuuaacccacacguguaaa

SEQ ID NO: 259954 - RNA, 19 nt, Artificial Sequence
  Description of Artificial Sequence: Synthetic oligonucleotide
  Sense strand starting at position 854 SEQ ID NO: 3343
acacguguggguuaaagaa

SEQ ID NO: 259955 - RNA, 19 nt, Artificial Sequence
  Description of Artificial Sequence: Synthetic oligonucleotide
  Antisense strand to SEQ ID NO: 259954
uucuuuaacccacacgugu

SEQ ID NO: 259956 - RNA, 19 nt, Artificial Sequence
  Description of Artificial Sequence: Synthetic oligonucleotide
  Sense strand starting at position 983 SEQ ID NO: 3343
gaacgacugucauuaucuu

SEQ ID NO: 259957 - RNA, 19 nt, Artificial Sequence
  Description of Artificial Sequence: Synthetic oligonucleotide
  Antisense strand to SEQ ID NO: 259956
aagauaaugacagucguuc

SEQ ID NO: 259958 - RNA, 19 nt, Artificial Sequence
  Description of Artificial Sequence: Synthetic oligonucleotide
  Sense strand starting at position 1094 SEQ ID NO: 3343
gcggaauguaggcaaugaa

SEQ ID NO: 259959 - RNA, 19 nt, Artificial Sequence
  Description of Artificial Sequence: Synthetic oligonucleotide
  Antisense strand to SEQ ID NO: 259958
uucauugccuacauuccgc

SEQ ID NO: 259960 - RNA, 19 nt, Artificial Sequence
  Description of Artificial Sequence: Synthetic oligonucleotide
  Sense strand starting at position 1130 SEQ ID NO: 3343
cacuguugcgaggaauaaa

SEQ ID NO: 259961 - RNA, 19 nt, Artificial Sequence
  Description of Artificial Sequence: Synthetic oligonucleotide
  Antisense strand to SEQ ID NO: 259960
uuuauuccucgcaacagug

SEQ ID NO: 259962 - RNA, 19 nt, Artificial Sequence
  Description of Artificial Sequence: Synthetic oligonucleotide
  Sense strand starting at position 1196 SEQ ID NO: 3343
cgagaugucaccuggcaca

SEQ ID NO: 259963 - RNA, 19 nt, Artificial Sequence
  Description of Artificial Sequence: Synthetic oligonucleotide
  Antisense strand to SEQ ID NO: 259962
ugugccaggugacaucucg

SEQ ID NO: 259964 - RNA, 19 nt, Artificial Sequence
  Description of Artificial Sequence: Synthetic oligonucleotide
  Sense strand starting at position 2291 SEQ ID NO: 3343
ugccacaucuggcugagau

SEQ ID NO: 259965 - RNA, 19 nt, Artificial Sequence
  Description of Artificial Sequence: Synthetic oligonucleotide
  Antisense strand to SEQ ID NO: 259964
aucucagccagauguggca

SEQ ID NO: 259966 - RNA, 19 nt, Artificial Sequence
  Description of Artificial Sequence: Synthetic oligonucleotide
  Sense strand starting at position 2292 SEQ ID NO: 3343
gccacaucuggcugagauc

SEQ ID NO: 259967 - RNA, 19 nt, Artificial Sequence
  Description of Artificial Sequence: Synthetic oligonucleotide
  Antisense strand to SEQ ID NO: 259966
gaucucagccagauguggc

SEQ ID NO: 259968 - RNA, 19 nt, Artificial Sequence
  Description of Artificial Sequence: Synthetic oligonucleotide
  Sense strand starting at position 2559 SEQ ID NO: 3343
ccaacuucccggugagaac

SEQ ID NO: 259969 - RNA, 19 nt, Artificial Sequence
  Description of Artificial Sequence: Synthetic oligonucleotide
  Antisense strand to SEQ ID NO: 259968
guucucaccgggaaguugg

SEQ ID NO: 259970 - RNA, 19 nt, Artificial Sequence
  Description of Artificial Sequence: Synthetic oligonucleotide
  Sense strand starting at position 2757 SEQ ID NO: 3343
aacugacucguuuguagaa

SEQ ID NO: 259971 - RNA, 19 nt, Artificial Sequence
  Description of Artificial Sequence: Synthetic oligonucleotide
  Antisense strand to SEQ ID NO: 259970
uucuacaaacgagucaguu

SEQ ID NO: 259972 - RNA, 19 nt, Artificial Sequence
  Description of Artificial Sequence: Synthetic oligonucleotide
  Sense strand starting at position 2758 SEQ ID NO: 3343
acugacucguuuguagaaa

SEQ ID NO: 259973 - RNA, 19 nt, Artificial Sequence
  Description of Artificial Sequence: Synthetic oligonucleotide
  Antisense strand to SEQ ID NO: 259972
uuucuacaaacgagucagu

SEQ ID NO: 259974 - RNA, 19 nt, Artificial Sequence
  Description of Artificial Sequence: Synthetic oligonucleotide
  Sense strand starting at position 2900 SEQ ID NO: 3343
guguuagaucguuuauugc

SEQ ID NO: 259975 - RNA, 19 nt, Artificial Sequence
  Description of Artificial Sequence: Synthetic oligonucleotide
  Antisense strand to SEQ ID NO: 259974
gcaauaaacgaucuaacac

SEQ ID NO: 259976 - RNA, 19 nt, Artificial Sequence
  Description of Artificial Sequence: Synthetic oligonucleotide
  Sense strand starting at position 2903 SEQ ID NO: 3343
uuagaucguuuauugcaua

SEQ ID NO: 259977 - RNA, 19 nt, Artificial Sequence
  Description of Artificial Sequence: Synthetic oligonucleotide
  Antisense strand to SEQ ID NO: 259976
uaugcaauaaacgaucuaa

SEQ ID NO: 259978 - RNA, 19 nt, Artificial Sequence
  Description of Artificial Sequence: Synthetic oligonucleotide
  Sense strand starting at position 2908 SEQ ID NO: 3343
ucguuuauugcauaucuca

SEQ ID NO: 259979 - RNA, 19 nt, Artificial Sequence
  Description of Artificial Sequence: Synthetic oligonucleotide
  Antisense strand to SEQ ID NO: 259978
ugagauaugcaauaaacga

SEQ ID NO: 259980 - RNA, 19 nt, Artificial Sequence
  Description of Artificial Sequence: Synthetic oligonucleotide
  Sense strand starting at position 3035 SEQ ID NO: 3343
acuuuauugccgcaauaau

SEQ ID NO: 259981 - RNA, 19 nt, Artificial Sequence
  Description of Artificial Sequence: Synthetic oligonucleotide
  Antisense strand to SEQ ID NO: 259980
auuauugcggcaauaaagu

SEQ ID NO: 259982 - RNA, 19 nt, Artificial Sequence
  Description of Artificial Sequence: Synthetic oligonucleotide
  Sense strand starting at position 3045 SEQ ID NO: 3343
cgcaauaauccuuacagca

SEQ ID NO: 259983 - RNA, 19 nt, Artificial Sequence
  Description of Artificial Sequence: Synthetic oligonucleotide
  Antisense strand to SEQ ID NO: 259982
ugcuguaaggauuauugcg

SEQ ID NO: 259984 - RNA, 19 nt, Artificial Sequence
  Description of Artificial Sequence: Synthetic oligonucleotide
  Sense strand starting at position 3070 SEQ ID NO: 3343
ccgaguaaccuguaaggga

SEQ ID NO: 259985 - RNA, 19 nt, Artificial Sequence
  Description of Artificial Sequence: Synthetic oligonucleotide
  Antisense strand to SEQ ID NO: 259984
ucccuuacagguuacucgg

SEQ ID NO: 259986 - RNA, 19 nt, Artificial Sequence
  Description of Artificial Sequence: Synthetic oligonucleotide
  Sense strand starting at position 3281 SEQ ID NO: 3343
cuagaacaugcauggaguu

SEQ ID NO: 259987 - RNA, 19 nt, Artificial Sequence
  Description of Artificial Sequence: Synthetic oligonucleotide
  Antisense strand to SEQ ID NO: 259986
aacuccaugcauguucuag

SEQ ID NO: 259988 - RNA, 19 nt, Artificial Sequence
  Description of Artificial Sequence: Synthetic oligonucleotide
  Sense strand starting at position 3282 SEQ ID NO: 3343
uagaacaugcauggaguua

SEQ ID NO: 259989 - RNA, 19 nt, Artificial Sequence
  Description of Artificial Sequence: Synthetic oligonucleotide
  Antisense strand to SEQ ID NO: 259988
uaacuccaugcauguucua

SEQ ID NO: 259990 - RNA, 19 nt, Artificial Sequence
  Description of Artificial Sequence: Synthetic oligonucleotide
  Sense strand starting at position 3313 SEQ ID NO: 3343
uguugagguuucuccauga

SEQ ID NO: 259991 - RNA, 19 nt, Artificial Sequence
  Description of Artificial Sequence: Synthetic oligonucleotide
  Antisense strand to SEQ ID NO: 259990
ucauggagaaaccucaaca

SEQ ID NO: 259992 - RNA, 19 nt, Artificial Sequence
  Description of Artificial Sequence: Synthetic oligonucleotide
  Sense strand starting at position 3453 SEQ ID NO: 3343
ggaucacagccaugauauc

SEQ ID NO: 259993 - RNA, 19 nt, Artificial Sequence
  Description of Artificial Sequence: Synthetic oligonucleotide
  Antisense strand to SEQ ID NO: 259992
gauaucauggcugugaucc

SEQ ID NO: 259994 - RNA, 19 nt, Artificial Sequence
  Description of Artificial Sequence: Synthetic oligonucleotide
  Sense strand starting at position 3890 SEQ ID NO: 3343
ccagguuuccuguauucua

SEQ ID NO: 259995 - RNA, 19 nt, Artificial Sequence
  Description of Artificial Sequence: Synthetic oligonucleotide
  Antisense strand to SEQ ID NO: 259994
uagaauacaggaaaccugg

SEQ ID NO: 259996 - RNA, 19 nt, Artificial Sequence
  Description of Artificial Sequence: Synthetic oligonucleotide
  Sense strand starting at position 3893 SEQ ID NO: 3343
gguuuccuguauucuauga

SEQ ID NO: 259997 - RNA, 19 nt, Artificial Sequence
  Description of Artificial Sequence: Synthetic oligonucleotide
  Antisense strand to SEQ ID NO: 259996
ucauagaauacaggaaacc

SEQ ID NO: 259998 - RNA, 19 nt, Artificial Sequence
  Description of Artificial Sequence: Synthetic oligonucleotide
  Sense strand starting at position 7 SEQ ID NO: 3344
auguuacacaaaugugagu

SEQ ID NO: 259999 - RNA, 19 nt, Artificial Sequence
  Description of Artificial Sequence: Synthetic oligonucleotide
  Antisense strand to SEQ ID NO: 259998
acucacauuuguguaacau

SEQ ID NO: 260000 - RNA, 19 nt, Artificial Sequence
  Description of Artificial Sequence: Synthetic oligonucleotide
  Sense strand starting at position 12 SEQ ID NO: 3344
acacaaaugugagucaaug

SEQ ID NO: 260001 - RNA, 19 nt, Artificial Sequence
  Description of Artificial Sequence: Synthetic oligonucleotide
  Antisense strand to SEQ ID NO: 260000
cauugacucacauuugugu

SEQ ID NO: 260002 - RNA, 19 nt, Artificial Sequence
  Description of Artificial Sequence: Synthetic oligonucleotide
  Sense strand starting at position 18 SEQ ID NO: 3344
augugagucaaugagcaau

SEQ ID NO: 260003 - RNA, 19 nt, Artificial Sequence
  Description of Artificial Sequence: Synthetic oligonucleotide
  Antisense strand to SEQ ID NO: 260002
auugcucauugacucacau

SEQ ID NO: 260004 - RNA, 19 nt, Artificial Sequence
  Description of Artificial Sequence: Synthetic oligonucleotide
  Sense strand starting at position 369 SEQ ID NO: 3344
auguauaacugaguaugau

SEQ ID NO: 260005 - RNA, 19 nt, Artificial Sequence
  Description of Artificial Sequence: Synthetic oligonucleotide
  Antisense strand to SEQ ID NO: 260004
aucauacucaguuauacau

SEQ ID NO: 260006 - RNA, 19 nt, Artificial Sequence
  Description of Artificial Sequence: Synthetic oligonucleotide
  Sense strand starting at position 370 SEQ ID NO: 3344
uguauaacugaguaugauu

SEQ ID NO: 260007 - RNA, 19 nt, Artificial Sequence
  Description of Artificial Sequence: Synthetic oligonucleotide
  Antisense strand to SEQ ID NO: 260006
aaucauacucaguuauaca

SEQ ID NO: 260008 - RNA, 19 nt, Artificial Sequence
  Description of Artificial Sequence: Synthetic oligonucleotide
  Sense strand starting at position 378 SEQ ID NO: 3344
ugaguaugauuuccugugu

SEQ ID NO: 260009 - RNA, 19 nt, Artificial Sequence
  Description of Artificial Sequence: Synthetic oligonucleotide
  Antisense strand to SEQ ID NO: 260008
acacaggaaaucauacuca

SEQ ID NO: 260010 - RNA, 19 nt, Artificial Sequence
  Description of Artificial Sequence: Synthetic oligonucleotide
  Sense strand starting at position 379 SEQ ID NO: 3344
gaguaugauuuccuguguc

SEQ ID NO: 260011 - RNA, 19 nt, Artificial Sequence
  Description of Artificial Sequence: Synthetic oligonucleotide
  Antisense strand to SEQ ID NO: 260010
gacacaggaaaucauacuc

SEQ ID NO: 260012 - RNA, 19 nt, Artificial Sequence
  Description of Artificial Sequence: Synthetic oligonucleotide
  Sense strand starting at position 601 SEQ ID NO: 3344
aucagacucuugucacuca

SEQ ID NO: 260013 - RNA, 19 nt, Artificial Sequence
  Description of Artificial Sequence: Synthetic oligonucleotide
  Antisense strand to SEQ ID NO: 260012
ugagugacaagagucugau

SEQ ID NO: 260014 - RNA, 19 nt, Artificial Sequence
  Description of Artificial Sequence: Synthetic oligonucleotide
  Sense strand starting at position 626 SEQ ID NO: 3344
ggucaucuucuacagacca

SEQ ID NO: 260015 - RNA, 19 nt, Artificial Sequence
  Description of Artificial Sequence: Synthetic oligonucleotide
  Antisense strand to SEQ ID NO: 260014
uggucuguagaagaugacc

SEQ ID NO: 260016 - RNA, 19 nt, Artificial Sequence
  Description of Artificial Sequence: Synthetic oligonucleotide
  Sense strand starting at position 810 SEQ ID NO: 3344
guguaugcaaaguaucaga

SEQ ID NO: 260017 - RNA, 19 nt, Artificial Sequence
  Description of Artificial Sequence: Synthetic oligonucleotide
  Antisense strand to SEQ ID NO: 260016
ucugauacuuugcauacac

SEQ ID NO: 260018 - RNA, 19 nt, Artificial Sequence
  Description of Artificial Sequence: Synthetic oligonucleotide
  Sense strand starting at position 863 SEQ ID NO: 3344
ccuggaguaguagacuuau

SEQ ID NO: 260019 - RNA, 19 nt, Artificial Sequence
  Description of Artificial Sequence: Synthetic oligonucleotide
  Antisense strand to SEQ ID NO: 260018
auaagucuacuacuccagg

SEQ ID NO: 260020 - RNA, 19 nt, Artificial Sequence
  Description of Artificial Sequence: Synthetic oligonucleotide
  Sense strand starting at position 953 SEQ ID NO: 3344
aguuacaucccauaugugu

SEQ ID NO: 260021 - RNA, 19 nt, Artificial Sequence
  Description of Artificial Sequence: Synthetic oligonucleotide
  Antisense strand to SEQ ID NO: 260020
acacauaugggauguaacu

SEQ ID NO: 260022 - RNA, 19 nt, Artificial Sequence
  Description of Artificial Sequence: Synthetic oligonucleotide
  Sense strand starting at position 1314 SEQ ID NO: 3344
gagaucacaugguuccuga

SEQ ID NO: 260023 - RNA, 19 nt, Artificial Sequence
  Description of Artificial Sequence: Synthetic oligonucleotide
  Antisense strand to SEQ ID NO: 260022
ucaggaaccaugugaucuc

SEQ ID NO: 260024 - RNA, 19 nt, Artificial Sequence
  Description of Artificial Sequence: Synthetic oligonucleotide
  Sense strand starting at position 1317 SEQ ID NO: 3344
aucacaugguuccugaaau

SEQ ID NO: 260025 - RNA, 19 nt, Artificial Sequence
  Description of Artificial Sequence: Synthetic oligonucleotide
  Antisense strand to SEQ ID NO: 260024
auuucaggaaccaugugau

SEQ ID NO: 260026 - RNA, 19 nt, Artificial Sequence
  Description of Artificial Sequence: Synthetic oligonucleotide
  Sense strand starting at position 1328 SEQ ID NO: 3344
ccugaaauguguucaggga

SEQ ID NO: 260027 - RNA, 19 nt, Artificial Sequence
  Description of Artificial Sequence: Synthetic oligonucleotide
  Antisense strand to SEQ ID NO: 260026
ucccugaacacauuucagg

SEQ ID NO: 260028 - RNA, 19 nt, Artificial Sequence
  Description of Artificial Sequence: Synthetic oligonucleotide
  Sense strand starting at position 1537 SEQ ID NO: 3344
agaccauaucugggagcuu

SEQ ID NO: 260029 - RNA, 19 nt, Artificial Sequence
  Description of Artificial Sequence: Synthetic oligonucleotide
  Antisense strand to SEQ ID NO: 260028
aagcucccagauauggucu

SEQ ID NO: 260030 - RNA, 19 nt, Artificial Sequence
  Description of Artificial Sequence: Synthetic oligonucleotide
  Sense strand starting at position 2009 SEQ ID NO: 3344
ggagaagaauuagccaagu

SEQ ID NO: 260031 - RNA, 19 nt, Artificial Sequence
  Description of Artificial Sequence: Synthetic oligonucleotide
  Antisense strand to SEQ ID NO: 260030
acuuggcuaauucuucucc

SEQ ID NO: 260032 - RNA, 19 nt, Artificial Sequence
  Description of Artificial Sequence: Synthetic oligonucleotide
  Sense strand starting at position 2151 SEQ ID NO: 3344
gggaaaucuggcuaggcaa

SEQ ID NO: 260033 - RNA, 19 nt, Artificial Sequence
  Description of Artificial Sequence: Synthetic oligonucleotide
  Antisense strand to SEQ ID NO: 260032
uugccuagccagauuuccc

SEQ ID NO: 260034 - RNA, 19 nt, Artificial Sequence
  Description of Artificial Sequence: Synthetic oligonucleotide
  Sense strand starting at position 2153 SEQ ID NO: 3344
gaaaucuggcuaggcaaca

SEQ ID NO: 260035 - RNA, 19 nt, Artificial Sequence
  Description of Artificial Sequence: Synthetic oligonucleotide
  Antisense strand to SEQ ID NO: 260034
uguugccuagccagauuuc

SEQ ID NO: 260036 - RNA, 19 nt, Artificial Sequence
  Description of Artificial Sequence: Synthetic oligonucleotide
  Sense strand starting at position 2169 SEQ ID NO: 3344
acaagaagcuaagcaauua

SEQ ID NO: 260037 - RNA, 19 nt, Artificial Sequence
  Description of Artificial Sequence: Synthetic oligonucleotide
  Antisense strand to SEQ ID NO: 260036
uaauugcuuagcuucuugu

SEQ ID NO: 260038 - RNA, 19 nt, Artificial Sequence
  Description of Artificial Sequence: Synthetic oligonucleotide
  Sense strand starting at position 2335 SEQ ID NO: 3344
ggagucauaucaccaucag

SEQ ID NO: 260039 - RNA, 19 nt, Artificial Sequence
  Description of Artificial Sequence: Synthetic oligonucleotide
  Antisense strand to SEQ ID NO: 260038
cugauggugauaugacucc

SEQ ID NO: 260040 - RNA, 19 nt, Artificial Sequence
  Description of Artificial Sequence: Synthetic oligonucleotide
  Sense strand starting at position 2484 SEQ ID NO: 3344
gguagauugcuacaucuua

SEQ ID NO: 260041 - RNA, 19 nt, Artificial Sequence
  Description of Artificial Sequence: Synthetic oligonucleotide
  Antisense strand to SEQ ID NO: 260040
uaagauguagcaaucuacc

SEQ ID NO: 260042 - RNA, 19 nt, Artificial Sequence
  Description of Artificial Sequence: Synthetic oligonucleotide
  Sense strand starting at position 2523 SEQ ID NO: 3344
accaucaguguuuagugau

SEQ ID NO: 260043 - RNA, 19 nt, Artificial Sequence
  Description of Artificial Sequence: Synthetic oligonucleotide
  Antisense strand to SEQ ID NO: 260042
aucacuaaacacugauggu

SEQ ID NO: 260044 - RNA, 19 nt, Artificial Sequence
  Description of Artificial Sequence: Synthetic oligonucleotide
  Sense strand starting at position 2597 SEQ ID NO: 3344
agauaugccagagguacaa

SEQ ID NO: 260045 - RNA, 19 nt, Artificial Sequence
  Description of Artificial Sequence: Synthetic oligonucleotide
  Antisense strand to SEQ ID NO: 260044
uuguaccucuggcauaucu

SEQ ID NO: 260046 - RNA, 19 nt, Artificial Sequence
  Description of Artificial Sequence: Synthetic oligonucleotide
  Sense strand starting at position 2682 SEQ ID NO: 3344
gcacaagaaauguggaaca

SEQ ID NO: 260047 - RNA, 19 nt, Artificial Sequence
  Description of Artificial Sequence: Synthetic oligonucleotide
  Antisense strand to SEQ ID NO: 260046
uguuccacauuucuugugc

SEQ ID NO: 260048 - RNA, 19 nt, Artificial Sequence
  Description of Artificial Sequence: Synthetic oligonucleotide
  Sense strand starting at position 2987 SEQ ID NO: 3344
augauccgaucccuuauaa

SEQ ID NO: 260049 - RNA, 19 nt, Artificial Sequence
  Description of Artificial Sequence: Synthetic oligonucleotide
  Antisense strand to SEQ ID NO: 260048
uuauaagggaucggaucau

SEQ ID NO: 260050 - RNA, 19 nt, Artificial Sequence
  Description of Artificial Sequence: Synthetic oligonucleotide
  Sense strand starting at position 3161 SEQ ID NO: 3344
auugccuaucaacagagua

SEQ ID NO: 260051 - RNA, 19 nt, Artificial Sequence
  Description of Artificial Sequence: Synthetic oligonucleotide
  Antisense strand to SEQ ID NO: 260050
uacucuguugauaggcaau

SEQ ID NO: 260052 - RNA, 19 nt, Artificial Sequence
  Description of Artificial Sequence: Synthetic oligonucleotide
  Sense strand starting at position 3199 SEQ ID NO: 3344
agcuauaucccagauauug

SEQ ID NO: 260053 - RNA, 19 nt, Artificial Sequence
  Description of Artificial Sequence: Synthetic oligonucleotide
  Antisense strand to SEQ ID NO: 260052
caauaucugggauauagcu

SEQ ID NO: 260054 - RNA, 19 nt, Artificial Sequence
  Description of Artificial Sequence: Synthetic oligonucleotide
  Sense strand starting at position 3255 SEQ ID NO: 3344
ucagaaguucuauauggua

SEQ ID NO: 260055 - RNA, 19 nt, Artificial Sequence
  Description of Artificial Sequence: Synthetic oligonucleotide
  Antisense strand to SEQ ID NO: 260054
uaccauauagaacuucuga

SEQ ID NO: 260056 - RNA, 19 nt, Artificial Sequence
  Description of Artificial Sequence: Synthetic oligonucleotide
  Sense strand starting at position 3257 SEQ ID NO: 3344
agaaguucuauaugguaag

SEQ ID NO: 260057 - RNA, 19 nt, Artificial Sequence
  Description of Artificial Sequence: Synthetic oligonucleotide
  Antisense strand to SEQ ID NO: 260056
cuuaccauauagaacuucu

SEQ ID NO: 260058 - RNA, 19 nt, Artificial Sequence
  Description of Artificial Sequence: Synthetic oligonucleotide
  Sense strand starting at position 3269 SEQ ID NO: 3344
ugguaagaaguaugaauau

SEQ ID NO: 260059 - RNA, 19 nt, Artificial Sequence
  Description of Artificial Sequence: Synthetic oligonucleotide
  Antisense strand to SEQ ID NO: 260058
auauucauacuucuuacca

SEQ ID NO: 260060 - RNA, 19 nt, Artificial Sequence
  Description of Artificial Sequence: Synthetic oligonucleotide
  Sense strand starting at position 3331 SEQ ID NO: 3344
aggugauuaacuuggcaaa

SEQ ID NO: 260061 - RNA, 19 nt, Artificial Sequence
  Description of Artificial Sequence: Synthetic oligonucleotide
  Antisense strand to SEQ ID NO: 260060
uuugccaaguuaaucaccu

SEQ ID NO: 260062 - RNA, 19 nt, Artificial Sequence
  Description of Artificial Sequence: Synthetic oligonucleotide
  Sense strand starting at position 3332 SEQ ID NO: 3344
ggugauuaacuuggcaaag

SEQ ID NO: 260063 - RNA, 19 nt, Artificial Sequence
  Description of Artificial Sequence: Synthetic oligonucleotide
  Antisense strand to SEQ ID NO: 260062
cuuugccaaguuaaucacc

SEQ ID NO: 260064 - RNA, 19 nt, Artificial Sequence
  Description of Artificial Sequence: Synthetic oligonucleotide
  Sense strand starting at position 3364 SEQ ID NO: 3344
guggcagaggacugaucau

SEQ ID NO: 260065 - RNA, 19 nt, Artificial Sequence
  Description of Artificial Sequence: Synthetic oligonucleotide
  Antisense strand to SEQ ID NO: 260064
augaucaguccucugccac

SEQ ID NO: 260066 - RNA, 19 nt, Artificial Sequence
  Description of Artificial Sequence: Synthetic oligonucleotide
  Sense strand starting at position 3484 SEQ ID NO: 3344
ugcuuaaugggucaugaaa

SEQ ID NO: 260067 - RNA, 19 nt, Artificial Sequence
  Description of Artificial Sequence: Synthetic oligonucleotide
  Antisense strand to SEQ ID NO: 260066
uuucaugacccauuaagca

SEQ ID NO: 260068 - RNA, 19 nt, Artificial Sequence
  Description of Artificial Sequence: Synthetic oligonucleotide
  Sense strand starting at position 3616 SEQ ID NO: 3344
cuccaaauguggucccaaa

SEQ ID NO: 260069 - RNA, 19 nt, Artificial Sequence
  Description of Artificial Sequence: Synthetic oligonucleotide
  Antisense strand to SEQ ID NO: 260068
uuugggaccacauuuggag

SEQ ID NO: 260070 - RNA, 19 nt, Artificial Sequence
  Description of Artificial Sequence: Synthetic oligonucleotide
  Sense strand starting at position 3646 SEQ ID NO: 3344
cagcaucaccagugagaaa

SEQ ID NO: 260071 - RNA, 19 nt, Artificial Sequence
  Description of Artificial Sequence: Synthetic oligonucleotide
  Antisense strand to SEQ ID NO: 260070
uuucucacuggugaugcug

SEQ ID NO: 260072 - RNA, 19 nt, Artificial Sequence
  Description of Artificial Sequence: Synthetic oligonucleotide
  Sense strand starting at position 3653 SEQ ID NO: 3344
accagugagaaaugugaau

SEQ ID NO: 260073 - RNA, 19 nt, Artificial Sequence
  Description of Artificial Sequence: Synthetic oligonucleotide
  Antisense strand to SEQ ID NO: 260072
auucacauuucucacuggu

SEQ ID NO: 260074 - RNA, 19 nt, Artificial Sequence
  Description of Artificial Sequence: Synthetic oligonucleotide
  Sense strand starting at position 3712 SEQ ID NO: 3344
agaugugguccacagccua

SEQ ID NO: 260075 - RNA, 19 nt, Artificial Sequence
  Description of Artificial Sequence: Synthetic oligonucleotide
  Antisense strand to SEQ ID NO: 260074
uaggcuguggaccacaucu

SEQ ID NO: 260076 - RNA, 19 nt, Artificial Sequence
  Description of Artificial Sequence: Synthetic oligonucleotide
  Sense strand starting at position 3934 SEQ ID NO: 3344
uggucugcucauuaccaua

SEQ ID NO: 260077 - RNA, 19 nt, Artificial Sequence
  Description of Artificial Sequence: Synthetic oligonucleotide
  Antisense strand to SEQ ID NO: 260076
uaugguaaugagcagacca

SEQ ID NO: 260078 - RNA, 19 nt, Artificial Sequence
  Description of Artificial Sequence: Synthetic oligonucleotide
  Sense strand starting at position 29 SEQ ID NO: 3345
ugcguuuaucuauagauau

SEQ ID NO: 260079 - RNA, 19 nt, Artificial Sequence
  Description of Artificial Sequence: Synthetic oligonucleotide
  Antisense strand to SEQ ID NO: 260078
auaucuauagauaaacgca

SEQ ID NO: 260080 - RNA, 19 nt, Artificial Sequence
  Description of Artificial Sequence: Synthetic oligonucleotide
  Sense strand starting at position 108 SEQ ID NO: 3345
augugacaucauugucucu

SEQ ID NO: 260081 - RNA, 19 nt, Artificial Sequence
  Description of Artificial Sequence: Synthetic oligonucleotide
  Antisense strand to SEQ ID NO: 260080
agagacaaugaugucacau

SEQ ID NO: 260082 - RNA, 19 nt, Artificial Sequence
  Description of Artificial Sequence: Synthetic oligonucleotide
  Sense strand starting at position 111 SEQ ID NO: 3345
ugacaucauugucucugua

SEQ ID NO: 260083 - RNA, 19 nt, Artificial Sequence
  Description of Artificial Sequence: Synthetic oligonucleotide
  Antisense strand to SEQ ID NO: 260082
uacagagacaaugauguca

SEQ ID NO: 260084 - RNA, 19 nt, Artificial Sequence
  Description of Artificial Sequence: Synthetic oligonucleotide
  Sense strand starting at position 113 SEQ ID NO: 3345
acaucauugucucuguaac

SEQ ID NO: 260085 - RNA, 19 nt, Artificial Sequence
  Description of Artificial Sequence: Synthetic oligonucleotide
  Antisense strand to SEQ ID NO: 260084
guuacagagacaaugaugu

SEQ ID NO: 260086 - RNA, 19 nt, Artificial Sequence
  Description of Artificial Sequence: Synthetic oligonucleotide
  Sense strand starting at position 123 SEQ ID NO: 3345
cucuguaaccucuacggga

SEQ ID NO: 260087 - RNA, 19 nt, Artificial Sequence
  Description of Artificial Sequence: Synthetic oligonucleotide
  Antisense strand to SEQ ID NO: 260086
ucccguagagguuacagag

SEQ ID NO: 260088 - RNA, 19 nt, Artificial Sequence
  Description of Artificial Sequence: Synthetic oligonucleotide
  Sense strand starting at position 157 SEQ ID NO: 3345
agagcagaacugugauucu

SEQ ID NO: 260089 - RNA, 19 nt, Artificial Sequence
  Description of Artificial Sequence: Synthetic oligonucleotide
  Antisense strand to SEQ ID NO: 260088
agaaucacaguucugcucu

SEQ ID NO: 260090 - RNA, 19 nt, Artificial Sequence
  Description of Artificial Sequence: Synthetic oligonucleotide
  Sense strand starting at position 160 SEQ ID NO: 3345
gcagaacugugauucuccu

SEQ ID NO: 260091 - RNA, 19 nt, Artificial Sequence
  Description of Artificial Sequence: Synthetic oligonucleotide
  Antisense strand to SEQ ID NO: 260090
aggagaaucacaguucugc

SEQ ID NO: 260092 - RNA, 19 nt, Artificial Sequence
  Description of Artificial Sequence: Synthetic oligonucleotide
  Sense strand starting at position 202 SEQ ID NO: 3345
aaacuugagcaguguucca

SEQ ID NO: 260093 - RNA, 19 nt, Artificial Sequence
  Description of Artificial Sequence: Synthetic oligonucleotide
  Antisense strand to SEQ ID NO: 260092
uggaacacugcucaaguuu

SEQ ID NO: 260094 - RNA, 19 nt, Artificial Sequence
  Description of Artificial Sequence: Synthetic oligonucleotide
  Sense strand starting at position 385 SEQ ID NO: 3345
gggcaauugguacggauga

SEQ ID NO: 260095 - RNA, 19 nt, Artificial Sequence
  Description of Artificial Sequence: Synthetic oligonucleotide
  Antisense strand to SEQ ID NO: 260094
ucauccguaccaauugccc

SEQ ID NO: 260096 - RNA, 19 nt, Artificial Sequence
  Description of Artificial Sequence: Synthetic oligonucleotide
  Sense strand starting at position 387 SEQ ID NO: 3345
gcaauugguacggaugaaa

SEQ ID NO: 260097 - RNA, 19 nt, Artificial Sequence
  Description of Artificial Sequence: Synthetic oligonucleotide
  Antisense strand to SEQ ID NO: 260096
uuucauccguaccaauugc

SEQ ID NO: 260098 - RNA, 19 nt, Artificial Sequence
  Description of Artificial Sequence: Synthetic oligonucleotide
  Sense strand starting at position 445 SEQ ID NO: 3345
ucagcacugaaacgugaua

SEQ ID NO: 260099 - RNA, 19 nt, Artificial Sequence
  Description of Artificial Sequence: Synthetic oligonucleotide
  Antisense strand to SEQ ID NO: 260098
uaucacguuucagugcuga

SEQ ID NO: 260100 - RNA, 19 nt, Artificial Sequence
  Description of Artificial Sequence: Synthetic oligonucleotide
  Sense strand starting at position 447 SEQ ID NO: 3345
agcacugaaacgugauauc

SEQ ID NO: 260101 - RNA, 19 nt, Artificial Sequence
  Description of Artificial Sequence: Synthetic oligonucleotide
  Antisense strand to SEQ ID NO: 260100
gauaucacguuucagugcu

SEQ ID NO: 260102 - RNA, 19 nt, Artificial Sequence
  Description of Artificial Sequence: Synthetic oligonucleotide
  Sense strand starting at position 467 SEQ ID NO: 3345
augcuuauugcuguuguca

SEQ ID NO: 260103 - RNA, 19 nt, Artificial Sequence
  Description of Artificial Sequence: Synthetic oligonucleotide
  Antisense strand to SEQ ID NO: 260102
ugacaacagcaauaagcau

SEQ ID NO: 260104 - RNA, 19 nt, Artificial Sequence
  Description of Artificial Sequence: Synthetic oligonucleotide
  Sense strand starting at position 518 SEQ ID NO: 3345
caagguagaguuuacaguu

SEQ ID NO: 260105 - RNA, 19 nt, Artificial Sequence
  Description of Artificial Sequence: Synthetic oligonucleotide
  Antisense strand to SEQ ID NO: 260104
aacuguaaacucuaccuug

SEQ ID NO: 260106 - RNA, 19 nt, Artificial Sequence
  Description of Artificial Sequence: Synthetic oligonucleotide
  Sense strand starting at position 566 SEQ ID NO: 3345
guucuauuggcagacugga

SEQ ID NO: 260107 - RNA, 19 nt, Artificial Sequence
  Description of Artificial Sequence: Synthetic oligonucleotide
  Antisense strand to SEQ ID NO: 260106
uccagucugccaauagaac

SEQ ID NO: 260108 - RNA, 19 nt, Artificial Sequence
  Description of Artificial Sequence: Synthetic oligonucleotide
  Sense strand starting at position 844 SEQ ID NO: 3345
uguaguucugaccaaagca

SEQ ID NO: 260109 - RNA, 19 nt, Artificial Sequence
  Description of Artificial Sequence: Synthetic oligonucleotide
  Antisense strand to SEQ ID NO: 260108
ugcuuuggucagaacuaca

SEQ ID NO: 260110 - RNA, 19 nt, Artificial Sequence
  Description of Artificial Sequence: Synthetic oligonucleotide
  Sense strand starting at position 1013 SEQ ID NO: 3345
auaaauauugagugucuac

SEQ ID NO: 260111 - RNA, 19 nt, Artificial Sequence
  Description of Artificial Sequence: Synthetic oligonucleotide
  Antisense strand to SEQ ID NO: 260110
guagacacucaauauuuau

SEQ ID NO: 260112 - RNA, 19 nt, Artificial Sequence
  Description of Artificial Sequence: Synthetic oligonucleotide
  Sense strand starting at position 1049 SEQ ID NO: 3345
cuggguguuaaggaauauu

SEQ ID NO: 260113 - RNA, 19 nt, Artificial Sequence
  Description of Artificial Sequence: Synthetic oligonucleotide
  Antisense strand to SEQ ID NO: 260112
aauauuccuuaacacccag

SEQ ID NO: 260114 - RNA, 19 nt, Artificial Sequence
  Description of Artificial Sequence: Synthetic oligonucleotide
  Sense strand starting at position 1057 SEQ ID NO: 3345
uaaggaauauuuggguauu

SEQ ID NO: 260115 - RNA, 19 nt, Artificial Sequence
  Description of Artificial Sequence: Synthetic oligonucleotide
  Antisense strand to SEQ ID NO: 260114
aauacccaaauauuccuua

SEQ ID NO: 260116 - RNA, 19 nt, Artificial Sequence
  Description of Artificial Sequence: Synthetic oligonucleotide
  Sense strand starting at position 1144 SEQ ID NO: 3345
accucauccguuuaagaaa

SEQ ID NO: 260117 - RNA, 19 nt, Artificial Sequence
  Description of Artificial Sequence: Synthetic oligonucleotide
  Antisense strand to SEQ ID NO: 260116
uuucuuaaacggaugaggu

SEQ ID NO: 260118 - RNA, 19 nt, Artificial Sequence
  Description of Artificial Sequence: Synthetic oligonucleotide
  Sense strand starting at position 1543 SEQ ID NO: 3345
auuacauugcguuauaucu

SEQ ID NO: 260119 - RNA, 19 nt, Artificial Sequence
  Description of Artificial Sequence: Synthetic oligonucleotide
  Antisense strand to SEQ ID NO: 260118
agauauaacgcaauguaau

SEQ ID NO: 260120 - RNA, 19 nt, Artificial Sequence
  Description of Artificial Sequence: Synthetic oligonucleotide
  Sense strand starting at position 1653 SEQ ID NO: 3345
ccaguuguccuauagaaua

SEQ ID NO: 260121 - RNA, 19 nt, Artificial Sequence
  Description of Artificial Sequence: Synthetic oligonucleotide
  Antisense strand to SEQ ID NO: 260120
uauucuauaggacaacugg

SEQ ID NO: 260122 - RNA, 19 nt, Artificial Sequence
  Description of Artificial Sequence: Synthetic oligonucleotide
  Sense strand starting at position 1938 SEQ ID NO: 3345
cccggacuucgccauaauu

SEQ ID NO: 260123 - RNA, 19 nt, Artificial Sequence
  Description of Artificial Sequence: Synthetic oligonucleotide
  Antisense strand to SEQ ID NO: 260122
aauuauggcgaaguccggg

SEQ ID NO: 260124 - RNA, 19 nt, Artificial Sequence
  Description of Artificial Sequence: Synthetic oligonucleotide
  Sense strand starting at position 1940 SEQ ID NO: 3345
cggacuucgccauaauucu

SEQ ID NO: 260125 - RNA, 19 nt, Artificial Sequence
  Description of Artificial Sequence: Synthetic oligonucleotide
  Antisense strand to SEQ ID NO: 260124
agaauuauggcgaaguccg

SEQ ID NO: 260126 - RNA, 19 nt, Artificial Sequence
  Description of Artificial Sequence: Synthetic oligonucleotide
  Sense strand starting at position 1948 SEQ ID NO: 3345
gccauaauucuggaaguuc

SEQ ID NO: 260127 - RNA, 19 nt, Artificial Sequence
  Description of Artificial Sequence: Synthetic oligonucleotide
  Antisense strand to SEQ ID NO: 260126
gaacuuccagaauuauggc

SEQ ID NO: 260128 - RNA, 19 nt, Artificial Sequence
  Description of Artificial Sequence: Synthetic oligonucleotide
  Sense strand starting at position 2013 SEQ ID NO: 3345
ccgggaaguggucauguga

SEQ ID NO: 260129 - RNA, 19 nt, Artificial Sequence
  Description of Artificial Sequence: Synthetic oligonucleotide
  Antisense strand to SEQ ID NO: 260128
ucacaugaccacuucccgg

SEQ ID NO: 260130 - RNA, 19 nt, Artificial Sequence
  Description of Artificial Sequence: Synthetic oligonucleotide
  Sense strand starting at position 2271 SEQ ID NO: 3345
ccgggaacccucugcagau

SEQ ID NO: 260131 - RNA, 19 nt, Artificial Sequence
  Description of Artificial Sequence: Synthetic oligonucleotide
  Antisense strand to SEQ ID NO: 260130
aucugcagaggguucccgg

SEQ ID NO: 260132 - RNA, 19 nt, Artificial Sequence
  Description of Artificial Sequence: Synthetic oligonucleotide
  Sense strand starting at position 2301 SEQ ID NO: 3345
uucccuauugcguacugaa

SEQ ID NO: 260133 - RNA, 19 nt, Artificial Sequence
  Description of Artificial Sequence: Synthetic oligonucleotide
  Antisense strand to SEQ ID NO: 260132
uucaguacgcaauagggaa

SEQ ID NO: 260134 - RNA, 19 nt, Artificial Sequence
  Description of Artificial Sequence: Synthetic oligonucleotide
  Sense strand starting at position 2644 SEQ ID NO: 3345
auccaagaguuggcaguua

SEQ ID NO: 260135 - RNA, 19 nt, Artificial Sequence
  Description of Artificial Sequence: Synthetic oligonucleotide
  Antisense strand to SEQ ID NO: 260134
uaacugccaacucuuggau

SEQ ID NO: 260136 - RNA, 19 nt, Artificial Sequence
  Description of Artificial Sequence: Synthetic oligonucleotide
  Sense strand starting at position 2649 SEQ ID NO: 3345
agaguuggcaguuagaaua

SEQ ID NO: 260137 - RNA, 19 nt, Artificial Sequence
  Description of Artificial Sequence: Synthetic oligonucleotide
  Antisense strand to SEQ ID NO: 260136
uauucuaacugccaacucu

SEQ ID NO: 260138 - RNA, 19 nt, Artificial Sequence
  Description of Artificial Sequence: Synthetic oligonucleotide
  Sense strand starting at position 2830 SEQ ID NO: 3345
ucugguaucucugcaagag

SEQ ID NO: 260139 - RNA, 19 nt, Artificial Sequence
  Description of Artificial Sequence: Synthetic oligonucleotide
  Antisense strand to SEQ ID NO: 260138
cucuugcagagauaccaga

SEQ ID NO: 260140 - RNA, 19 nt, Artificial Sequence
  Description of Artificial Sequence: Synthetic oligonucleotide
  Sense strand starting at position 2831 SEQ ID NO: 3345
cugguaucucugcaagagu

SEQ ID NO: 260141 - RNA, 19 nt, Artificial Sequence
  Description of Artificial Sequence: Synthetic oligonucleotide
  Antisense strand to SEQ ID NO: 260140
acucuugcagagauaccag

SEQ ID NO: 260142 - RNA, 19 nt, Artificial Sequence
  Description of Artificial Sequence: Synthetic oligonucleotide
  Sense strand starting at position 2834 SEQ ID NO: 3345
guaucucugcaagagugau

SEQ ID NO: 260143 - RNA, 19 nt, Artificial Sequence
  Description of Artificial Sequence: Synthetic oligonucleotide
  Antisense strand to SEQ ID NO: 260142
aucacucuugcagagauac

SEQ ID NO: 260144 - RNA, 19 nt, Artificial Sequence
  Description of Artificial Sequence: Synthetic oligonucleotide
  Sense strand starting at position 2840 SEQ ID NO: 3345
cugcaagagugauuccaug

SEQ ID NO: 260145 - RNA, 19 nt, Artificial Sequence
  Description of Artificial Sequence: Synthetic oligonucleotide
  Antisense strand to SEQ ID NO: 260144
cauggaaucacucuugcag

SEQ ID NO: 260146 - RNA, 19 nt, Artificial Sequence
  Description of Artificial Sequence: Synthetic oligonucleotide
  Sense strand starting at position 2898 SEQ ID NO: 3345
uauacauugucgguuuaga

SEQ ID NO: 260147 - RNA, 19 nt, Artificial Sequence
  Description of Artificial Sequence: Synthetic oligonucleotide
  Antisense strand to SEQ ID NO: 260146
ucuaaaccgacaauguaua

SEQ ID NO: 260148 - RNA, 19 nt, Artificial Sequence
  Description of Artificial Sequence: Synthetic oligonucleotide
  Sense strand starting at position 3158 SEQ ID NO: 3345
uacagaagacagcguaauu

SEQ ID NO: 260149 - RNA, 19 nt, Artificial Sequence
  Description of Artificial Sequence: Synthetic oligonucleotide
  Antisense strand to SEQ ID NO: 260148
aauuacgcugucuucugua

SEQ ID NO: 260150 - RNA, 19 nt, Artificial Sequence
  Description of Artificial Sequence: Synthetic oligonucleotide
  Sense strand starting at position 3546 SEQ ID NO: 3345
auaaacguauucuuugagu

SEQ ID NO: 260151 - RNA, 19 nt, Artificial Sequence
  Description of Artificial Sequence: Synthetic oligonucleotide
  Antisense strand to SEQ ID NO: 260150
acucaaagaauacguuuau

SEQ ID NO: 260152 - RNA, 19 nt, Artificial Sequence
  Description of Artificial Sequence: Synthetic oligonucleotide
  Sense strand starting at position 3548 SEQ ID NO: 3345
aaacguauucuuugaguca

SEQ ID NO: 260153 - RNA, 19 nt, Artificial Sequence
  Description of Artificial Sequence: Synthetic oligonucleotide
  Antisense strand to SEQ ID NO: 260152
ugacucaaagaauacguuu

SEQ ID NO: 260154 - RNA, 19 nt, Artificial Sequence
  Description of Artificial Sequence: Synthetic oligonucleotide
  Sense strand starting at position 3770 SEQ ID NO: 3345
uacacagauguuugggaua

SEQ ID NO: 260155 - RNA, 19 nt, Artificial Sequence
  Description of Artificial Sequence: Synthetic oligonucleotide
  Antisense strand to SEQ ID NO: 260154
uaucccaaacaucugugua

SEQ ID NO: 260156 - RNA, 19 nt, Artificial Sequence
  Description of Artificial Sequence: Synthetic oligonucleotide
  Sense strand starting at position 3979 SEQ ID NO: 3345
uguuaaaugaugugaucug

SEQ ID NO: 260157 - RNA, 19 nt, Artificial Sequence
  Description of Artificial Sequence: Synthetic oligonucleotide
  Antisense strand to SEQ ID NO: 260156
cagaucacaucauuuaaca

SEQ ID NO: 260158 - RNA, 19 nt, Artificial Sequence
  Description of Artificial Sequence: Synthetic oligonucleotide
  Sense strand starting at position 29 SEQ ID NO: 3347
auggguuuccuaggacaga

SEQ ID NO: 260159 - RNA, 19 nt, Artificial Sequence
  Description of Artificial Sequence: Synthetic oligonucleotide
  Antisense strand to SEQ ID NO: 260158
ucuguccuaggaaacccau

SEQ ID NO: 260160 - RNA, 19 nt, Artificial Sequence
  Description of Artificial Sequence: Synthetic oligonucleotide
  Sense strand starting at position 295 SEQ ID NO: 3347
caguuaaugucagugggac

SEQ ID NO: 260161 - RNA, 19 nt, Artificial Sequence
  Description of Artificial Sequence: Synthetic oligonucleotide
  Antisense strand to SEQ ID NO: 260160
gucccacugacauuaacug

SEQ ID NO: 260162 - RNA, 19 nt, Artificial Sequence
  Description of Artificial Sequence: Synthetic oligonucleotide
  Sense strand starting at position 457 SEQ ID NO: 3347
cagggagucugucugcaaa

SEQ ID NO: 260163 - RNA, 19 nt, Artificial Sequence
  Description of Artificial Sequence: Synthetic oligonucleotide
  Antisense strand to SEQ ID NO: 260162
uuugcagacagacucccug

SEQ ID NO: 260164 - RNA, 19 nt, Artificial Sequence
  Description of Artificial Sequence: Synthetic oligonucleotide
  Sense strand starting at position 459 SEQ ID NO: 3347
gggagucugucugcaaaca

SEQ ID NO: 260165 - RNA, 19 nt, Artificial Sequence
  Description of Artificial Sequence: Synthetic oligonucleotide
  Antisense strand to SEQ ID NO: 260164
uguuugcagacagacuccc

SEQ ID NO: 260166 - RNA, 19 nt, Artificial Sequence
  Description of Artificial Sequence: Synthetic oligonucleotide
  Sense strand starting at position 460 SEQ ID NO: 3347
ggagucugucugcaaacaa

SEQ ID NO: 260167 - RNA, 19 nt, Artificial Sequence
  Description of Artificial Sequence: Synthetic oligonucleotide
  Antisense strand to SEQ ID NO: 260166
uuguuugcagacagacucc

SEQ ID NO: 260168 - RNA, 19 nt, Artificial Sequence
  Description of Artificial Sequence: Synthetic oligonucleotide
  Sense strand starting at position 752 SEQ ID NO: 3347
agagcagucugcucaaaga

SEQ ID NO: 260169 - RNA, 19 nt, Artificial Sequence
  Description of Artificial Sequence: Synthetic oligonucleotide
  Antisense strand to SEQ ID NO: 260168
ucuuugagcagacugcucu

SEQ ID NO: 260170 - RNA, 19 nt, Artificial Sequence
  Description of Artificial Sequence: Synthetic oligonucleotide
  Sense strand starting at position 1413 SEQ ID NO: 3347
gacuuugcauaggugacau

SEQ ID NO: 260171 - RNA, 19 nt, Artificial Sequence
  Description of Artificial Sequence: Synthetic oligonucleotide
  Antisense strand to SEQ ID NO: 260170
augucaccuaugcaaaguc

SEQ ID NO: 260172 - RNA, 19 nt, Artificial Sequence
  Description of Artificial Sequence: Synthetic oligonucleotide
  Sense strand starting at position 1493 SEQ ID NO: 3347
cggcacaucgucgaaauuu

SEQ ID NO: 260173 - RNA, 19 nt, Artificial Sequence
  Description of Artificial Sequence: Synthetic oligonucleotide
  Antisense strand to SEQ ID NO: 260172
aaauuucgacgaugugccg

SEQ ID NO: 260174 - RNA, 19 nt, Artificial Sequence
  Description of Artificial Sequence: Synthetic oligonucleotide
  Sense strand starting at position 1509 SEQ ID NO: 3347
uuucuaacucugcagggaa

SEQ ID NO: 260175 - RNA, 19 nt, Artificial Sequence
  Description of Artificial Sequence: Synthetic oligonucleotide
  Antisense strand to SEQ ID NO: 260174
uucccugcagaguuagaaa

SEQ ID NO: 260176 - RNA, 19 nt, Artificial Sequence
  Description of Artificial Sequence: Synthetic oligonucleotide
  Sense strand starting at position 1536 SEQ ID NO: 3347
guacuucggcuuuacaaau

SEQ ID NO: 260177 - RNA, 19 nt, Artificial Sequence
  Description of Artificial Sequence: Synthetic oligonucleotide
  Antisense strand to SEQ ID NO: 260176
auuuguaaagccgaaguac

SEQ ID NO: 260178 - RNA, 19 nt, Artificial Sequence
  Description of Artificial Sequence: Synthetic oligonucleotide
  Sense strand starting at position 1989 SEQ ID NO: 3347
uccgaauuccaauggacau

SEQ ID NO: 260179 - RNA, 19 nt, Artificial Sequence
  Description of Artificial Sequence: Synthetic oligonucleotide
  Antisense strand to SEQ ID NO: 260178
auguccauuggaauucgga

SEQ ID NO: 260180 - RNA, 19 nt, Artificial Sequence
  Description of Artificial Sequence: Synthetic oligonucleotide
  Sense strand starting at position 2100 SEQ ID NO: 3347
acauucuguucuccaggaa

SEQ ID NO: 260181 - RNA, 19 nt, Artificial Sequence
  Description of Artificial Sequence: Synthetic oligonucleotide
  Antisense strand to SEQ ID NO: 260180
uuccuggagaacagaaugu

SEQ ID NO: 260182 - RNA, 19 nt, Artificial Sequence
  Description of Artificial Sequence: Synthetic oligonucleotide
  Sense strand starting at position 2184 SEQ ID NO: 3347
agauacuaguaucuccauu

SEQ ID NO: 260183 - RNA, 19 nt, Artificial Sequence
  Description of Artificial Sequence: Synthetic oligonucleotide
  Antisense strand to SEQ ID NO: 260182
aauggagauacuaguaucu

SEQ ID NO: 260184 - RNA, 19 nt, Artificial Sequence
  Description of Artificial Sequence: Synthetic oligonucleotide
  Sense strand starting at position 2224 SEQ ID NO: 3347
cuuauaggauuguugugau

SEQ ID NO: 260185 - RNA, 19 nt, Artificial Sequence
  Description of Artificial Sequence: Synthetic oligonucleotide
  Antisense strand to SEQ ID NO: 260184
aucacaacaauccuauaag

SEQ ID NO: 260186 - RNA, 19 nt, Artificial Sequence
  Description of Artificial Sequence: Synthetic oligonucleotide
  Sense strand starting at position 2322 SEQ ID NO: 3347
gggaacacuguaggugaau

SEQ ID NO: 260187 - RNA, 19 nt, Artificial Sequence
  Description of Artificial Sequence: Synthetic oligonucleotide
  Antisense strand to SEQ ID NO: 260186
auucaccuacaguguuccc

SEQ ID NO: 260188 - RNA, 19 nt, Artificial Sequence
  Description of Artificial Sequence: Synthetic oligonucleotide
  Sense strand starting at position 2395 SEQ ID NO: 3347
aucaauuguugagugugaa

SEQ ID NO: 260189 - RNA, 19 nt, Artificial Sequence
  Description of Artificial Sequence: Synthetic oligonucleotide
  Antisense strand to SEQ ID NO: 260188
uucacacucaacaauugau

SEQ ID NO: 260190 - RNA, 19 nt, Artificial Sequence
  Description of Artificial Sequence: Synthetic oligonucleotide
  Sense strand starting at position 2396 SEQ ID NO: 3347
ucaauuguugagugugaac

SEQ ID NO: 260191 - RNA, 19 nt, Artificial Sequence
  Description of Artificial Sequence: Synthetic oligonucleotide
  Antisense strand to SEQ ID NO: 260190
guucacacucaacaauuga

SEQ ID NO: 260192 - RNA, 19 nt, Artificial Sequence
  Description of Artificial Sequence: Synthetic oligonucleotide
  Sense strand starting at position 2405 SEQ ID NO: 3347
gagugugaacccuggaaua

SEQ ID NO: 260193 - RNA, 19 nt, Artificial Sequence
  Description of Artificial Sequence: Synthetic oligonucleotide
  Antisense strand to SEQ ID NO: 260192
uauuccaggguucacacuc

SEQ ID NO: 260194 - RNA, 19 nt, Artificial Sequence
  Description of Artificial Sequence: Synthetic oligonucleotide
  Sense strand starting at position 2541 SEQ ID NO: 3347
cccuuaagaguugauguag

SEQ ID NO: 260195 - RNA, 19 nt, Artificial Sequence
  Description of Artificial Sequence: Synthetic oligonucleotide
  Antisense strand to SEQ ID NO: 260194
cuacaucaacucuuaaggg

SEQ ID NO: 260196 - RNA, 19 nt, Artificial Sequence
  Description of Artificial Sequence: Synthetic oligonucleotide
  Sense strand starting at position 2547 SEQ ID NO: 3347
agaguugauguagggacuu

SEQ ID NO: 260197 - RNA, 19 nt, Artificial Sequence
  Description of Artificial Sequence: Synthetic oligonucleotide
  Antisense strand to SEQ ID NO: 260196
aagucccuacaucaacucu

SEQ ID NO: 260198 - RNA, 19 nt, Artificial Sequence
  Description of Artificial Sequence: Synthetic oligonucleotide
  Sense strand starting at position 2553 SEQ ID NO: 3347
gauguagggacuuaaguuc

SEQ ID NO: 260199 - RNA, 19 nt, Artificial Sequence
  Description of Artificial Sequence: Synthetic oligonucleotide
  Antisense strand to SEQ ID NO: 260198
gaacuuaagucccuacauc

SEQ ID NO: 260200 - RNA, 19 nt, Artificial Sequence
  Description of Artificial Sequence: Synthetic oligonucleotide
  Sense strand starting at position 2570 SEQ ID NO: 3347
uccuuaagggcagaaguuu

SEQ ID NO: 260201 - RNA, 19 nt, Artificial Sequence
  Description of Artificial Sequence: Synthetic oligonucleotide
  Antisense strand to SEQ ID NO: 260200
aaacuucugcccuuaagga

SEQ ID NO: 260202 - RNA, 19 nt, Artificial Sequence
  Description of Artificial Sequence: Synthetic oligonucleotide
  Sense strand starting at position 2614 SEQ ID NO: 3347
gcuuauuuauuugaaguag

SEQ ID NO: 260203 - RNA, 19 nt, Artificial Sequence
  Description of Artificial Sequence: Synthetic oligonucleotide
  Antisense strand to SEQ ID NO: 260202
cuacuucaaauaaauaagc

SEQ ID NO: 260204 - RNA, 19 nt, Artificial Sequence
  Description of Artificial Sequence: Synthetic oligonucleotide
  Sense strand starting at position 2652 SEQ ID NO: 3347
acugacacacgcugauaua

SEQ ID NO: 260205 - RNA, 19 nt, Artificial Sequence
  Description of Artificial Sequence: Synthetic oligonucleotide
  Antisense strand to SEQ ID NO: 260204
uauaucagcgugugucagu

SEQ ID NO: 260206 - RNA, 19 nt, Artificial Sequence
  Description of Artificial Sequence: Synthetic oligonucleotide
  Sense strand starting at position 2653 SEQ ID NO: 3347
cugacacacgcugauauau

SEQ ID NO: 260207 - RNA, 19 nt, Artificial Sequence
  Description of Artificial Sequence: Synthetic oligonucleotide
  Antisense strand to SEQ ID NO: 260206
auauaucagcgugugucag

SEQ ID NO: 260208 - RNA, 19 nt, Artificial Sequence
  Description of Artificial Sequence: Synthetic oligonucleotide
  Sense strand starting at position 2770 SEQ ID NO: 3347
uggugucuucuauauucuu

SEQ ID NO: 260209 - RNA, 19 nt, Artificial Sequence
  Description of Artificial Sequence: Synthetic oligonucleotide
  Antisense strand to SEQ ID NO: 260208
aagaauauagaagacacca

SEQ ID NO: 260210 - RNA, 19 nt, Artificial Sequence
  Description of Artificial Sequence: Synthetic oligonucleotide
  Sense strand starting at position 2924 SEQ ID NO: 3347
cucucuucuccaugaugag

SEQ ID NO: 260211 - RNA, 19 nt, Artificial Sequence
  Description of Artificial Sequence: Synthetic oligonucleotide
  Antisense strand to SEQ ID NO: 260210
cucaucauggagaagagag

SEQ ID NO: 260212 - RNA, 19 nt, Artificial Sequence
  Description of Artificial Sequence: Synthetic oligonucleotide
  Sense strand starting at position 2940 SEQ ID NO: 3347
gagaauaguaaugggaguu

SEQ ID NO: 260213 - RNA, 19 nt, Artificial Sequence
  Description of Artificial Sequence: Synthetic oligonucleotide
  Antisense strand to SEQ ID NO: 260212
aacucccauuacuauucuc

SEQ ID NO: 260214 - RNA, 19 nt, Artificial Sequence
  Description of Artificial Sequence: Synthetic oligonucleotide
  Sense strand starting at position 2968 SEQ ID NO: 3347
gguguugugaaucaauauc

SEQ ID NO: 260215 - RNA, 19 nt, Artificial Sequence
  Description of Artificial Sequence: Synthetic oligonucleotide
  Antisense strand to SEQ ID NO: 260214
gauauugauucacaacacc

SEQ ID NO: 260216 - RNA, 19 nt, Artificial Sequence
  Description of Artificial Sequence: Synthetic oligonucleotide
  Sense strand starting at position 3075 SEQ ID NO: 3347
cagaguauccaauguguga

SEQ ID NO: 260217 - RNA, 19 nt, Artificial Sequence
  Description of Artificial Sequence: Synthetic oligonucleotide
  Antisense strand to SEQ ID NO: 260216
ucacacauuggauacucug

SEQ ID NO: 260218 - RNA, 19 nt, Artificial Sequence
  Description of Artificial Sequence: Synthetic oligonucleotide
  Sense strand starting at position 3086 SEQ ID NO: 3347
augugugaguuaccauaau

SEQ ID NO: 260219 - RNA, 19 nt, Artificial Sequence
  Description of Artificial Sequence: Synthetic oligonucleotide
  Antisense strand to SEQ ID NO: 260218
auuaugguaacucacacau

SEQ ID NO: 260220 - RNA, 19 nt, Artificial Sequence
  Description of Artificial Sequence: Synthetic oligonucleotide
  Sense strand starting at position 3246 SEQ ID NO: 3347
acugauauaucuguagacu

SEQ ID NO: 260221 - RNA, 19 nt, Artificial Sequence
  Description of Artificial Sequence: Synthetic oligonucleotide
  Antisense strand to SEQ ID NO: 260220
agucuacagauauaucagu

SEQ ID NO: 260222 - RNA, 19 nt, Artificial Sequence
  Description of Artificial Sequence: Synthetic oligonucleotide
  Sense strand starting at position 3286 SEQ ID NO: 3347
uucugagucaaaggaugua

SEQ ID NO: 260223 - RNA, 19 nt, Artificial Sequence
  Description of Artificial Sequence: Synthetic oligonucleotide
  Antisense strand to SEQ ID NO: 260222
uacauccuuugacucagaa

SEQ ID NO: 260224 - RNA, 19 nt, Artificial Sequence
  Description of Artificial Sequence: Synthetic oligonucleotide
  Sense strand starting at position 3718 SEQ ID NO: 3347
gccauuugugauggaguuu

SEQ ID NO: 260225 - RNA, 19 nt, Artificial Sequence
  Description of Artificial Sequence: Synthetic oligonucleotide
  Antisense strand to SEQ ID NO: 260224
aaacuccaucacaaauggc

SEQ ID NO: 260226 - RNA, 19 nt, Artificial Sequence
  Description of Artificial Sequence: Synthetic oligonucleotide
  Sense strand starting at position 3731 SEQ ID NO: 3347
gaguuucugacaugagggu

SEQ ID NO: 260227 - RNA, 19 nt, Artificial Sequence
  Description of Artificial Sequence: Synthetic oligonucleotide
  Antisense strand to SEQ ID NO: 260226
acccucaugucagaaacuc

SEQ ID NO: 260228 - RNA, 19 nt, Artificial Sequence
  Description of Artificial Sequence: Synthetic oligonucleotide
  Sense strand starting at position 3807 SEQ ID NO: 3347
acaucuguacaugauaugu

SEQ ID NO: 260229 - RNA, 19 nt, Artificial Sequence
  Description of Artificial Sequence: Synthetic oligonucleotide
  Antisense strand to SEQ ID NO: 260228
acauaucauguacagaugu

SEQ ID NO: 260230 - RNA, 19 nt, Artificial Sequence
  Description of Artificial Sequence: Synthetic oligonucleotide
  Sense strand starting at position 3830 SEQ ID NO: 3347
aucaucuaaucaucggagu

SEQ ID NO: 260231 - RNA, 19 nt, Artificial Sequence
  Description of Artificial Sequence: Synthetic oligonucleotide
  Antisense strand to SEQ ID NO: 260230
acuccgaugauuagaugau

SEQ ID NO: 260232 - RNA, 19 nt, Artificial Sequence
  Description of Artificial Sequence: Synthetic oligonucleotide
  Sense strand starting at position 3860 SEQ ID NO: 3347
uugccaguugucuccguaa

SEQ ID NO: 260233 - RNA, 19 nt, Artificial Sequence
  Description of Artificial Sequence: Synthetic oligonucleotide
  Antisense strand to SEQ ID NO: 260232
uuacggagacaacuggcaa

SEQ ID NO: 260234 - RNA, 19 nt, Artificial Sequence
  Description of Artificial Sequence: Synthetic oligonucleotide
  Sense strand starting at position 3863 SEQ ID NO: 3347
ccaguugucuccguaauuu

SEQ ID NO: 260235 - RNA, 19 nt, Artificial Sequence
  Description of Artificial Sequence: Synthetic oligonucleotide
  Antisense strand to SEQ ID NO: 260234
aaauuacggagacaacugg

SEQ ID NO: 260236 - RNA, 19 nt, Artificial Sequence
  Description of Artificial Sequence: Synthetic oligonucleotide
  Sense strand starting at position 3917 SEQ ID NO: 3347
ucuguuuaguugucauuuc

SEQ ID NO: 260237 - RNA, 19 nt, Artificial Sequence
  Description of Artificial Sequence: Synthetic oligonucleotide
  Antisense strand to SEQ ID NO: 260236
gaaaugacaacuaaacaga

SEQ ID NO: 260238 - RNA, 19 nt, Artificial Sequence
  Description of Artificial Sequence: Synthetic oligonucleotide
  Sense strand starting at position 6 SEQ ID NO: 3346
uagucucuaccgcaaggau

SEQ ID NO: 260239 - RNA, 19 nt, Artificial Sequence
  Description of Artificial Sequence: Synthetic oligonucleotide
  Antisense strand to SEQ ID NO: 260238
auccuugcgguagagacua

SEQ ID NO: 260240 - RNA, 19 nt, Artificial Sequence
  Description of Artificial Sequence: Synthetic oligonucleotide
  Sense strand starting at position 149 SEQ ID NO: 3346
ccaucuguaccauggacaa

SEQ ID NO: 260241 - RNA, 19 nt, Artificial Sequence
  Description of Artificial Sequence: Synthetic oligonucleotide
  Antisense strand to SEQ ID NO: 260240
uuguccaugguacagaugg

SEQ ID NO: 260242 - RNA, 19 nt, Artificial Sequence
  Description of Artificial Sequence: Synthetic oligonucleotide
  Sense strand starting at position 288 SEQ ID NO: 3346
uccagagguugcuucugaa

SEQ ID NO: 260243 - RNA, 19 nt, Artificial Sequence
  Description of Artificial Sequence: Synthetic oligonucleotide
  Antisense strand to SEQ ID NO: 260242
uucagaagcaaccucugga

SEQ ID NO: 260244 - RNA, 19 nt, Artificial Sequence
  Description of Artificial Sequence: Synthetic oligonucleotide
  Sense strand starting at position 355 SEQ ID NO: 3346
gggcuuauuugagccguua

SEQ ID NO: 260245 - RNA, 19 nt, Artificial Sequence
  Description of Artificial Sequence: Synthetic oligonucleotide
  Antisense strand to SEQ ID NO: 260244
uaacggcucaaauaagccc

SEQ ID NO: 260246 - RNA, 19 nt, Artificial Sequence
  Description of Artificial Sequence: Synthetic oligonucleotide
  Sense strand starting at position 357 SEQ ID NO: 3346
gcuuauuugagccguuauu

SEQ ID NO: 260247 - RNA, 19 nt, Artificial Sequence
  Description of Artificial Sequence: Synthetic oligonucleotide
  Antisense strand to SEQ ID NO: 260246
aauaacggcucaaauaagc

SEQ ID NO: 260248 - RNA, 19 nt, Artificial Sequence
  Description of Artificial Sequence: Synthetic oligonucleotide
  Sense strand starting at position 373 SEQ ID NO: 3346
auugcauugugguugaaag

SEQ ID NO: 260249 - RNA, 19 nt, Artificial Sequence
  Description of Artificial Sequence: Synthetic oligonucleotide
  Antisense strand to SEQ ID NO: 260248
cuuucaaccacaaugcaau

SEQ ID NO: 260250 - RNA, 19 nt, Artificial Sequence
  Description of Artificial Sequence: Synthetic oligonucleotide
  Sense strand starting at position 558 SEQ ID NO: 3346
ucccauguucucuaaaugu

SEQ ID NO: 260251 - RNA, 19 nt, Artificial Sequence
  Description of Artificial Sequence: Synthetic oligonucleotide
  Antisense strand to SEQ ID NO: 260250
acauuuagagaacauggga

SEQ ID NO: 260252 - RNA, 19 nt, Artificial Sequence
  Description of Artificial Sequence: Synthetic oligonucleotide
  Sense strand starting at position 582 SEQ ID NO: 3346
cagucaauccucugaggca

SEQ ID NO: 260253 - RNA, 19 nt, Artificial Sequence
  Description of Artificial Sequence: Synthetic oligonucleotide
  Antisense strand to SEQ ID NO: 260252
ugccucagaggauugacug

SEQ ID NO: 260254 - RNA, 19 nt, Artificial Sequence
  Description of Artificial Sequence: Synthetic oligonucleotide
  Sense strand starting at position 649 SEQ ID NO: 3346
caugccugguacuuagaua

SEQ ID NO: 260255 - RNA, 19 nt, Artificial Sequence
  Description of Artificial Sequence: Synthetic oligonucleotide
  Antisense strand to SEQ ID NO: 260254
uaucuaaguaccaggcaug

SEQ ID NO: 260256 - RNA, 19 nt, Artificial Sequence
  Description of Artificial Sequence: Synthetic oligonucleotide
  Sense strand starting at position 760 SEQ ID NO: 3346
agggauguguuuccuagga

SEQ ID NO: 260257 - RNA, 19 nt, Artificial Sequence
  Description of Artificial Sequence: Synthetic oligonucleotide
  Antisense strand to SEQ ID NO: 260256
uccuaggaaacacaucccu

SEQ ID NO: 260258 - RNA, 19 nt, Artificial Sequence
  Description of Artificial Sequence: Synthetic oligonucleotide
  Sense strand starting at position 764 SEQ ID NO: 3346
auguguuuccuaggacaga

SEQ ID NO: 260259 - RNA, 19 nt, Artificial Sequence
  Description of Artificial Sequence: Synthetic oligonucleotide
  Antisense strand to SEQ ID NO: 260258
ucuguccuaggaaacacau

SEQ ID NO: 260260 - RNA, 19 nt, Artificial Sequence
  Description of Artificial Sequence: Synthetic oligonucleotide
  Sense strand starting at position 838 SEQ ID NO: 3346
auggguuuccuaggacaga

SEQ ID NO: 260261 - RNA, 19 nt, Artificial Sequence
  Description of Artificial Sequence: Synthetic oligonucleotide
  Antisense strand to SEQ ID NO: 260260
ucuguccuaggaaacccau

SEQ ID NO: 260262 - RNA, 19 nt, Artificial Sequence
  Description of Artificial Sequence: Synthetic oligonucleotide
  Sense strand starting at position 1104 SEQ ID NO: 3346
caguuaaugucagugggac

SEQ ID NO: 260263 - RNA, 19 nt, Artificial Sequence
  Description of Artificial Sequence: Synthetic oligonucleotide
  Antisense strand to SEQ ID NO: 260262
gucccacugacauuaacug

SEQ ID NO: 260264 - RNA, 19 nt, Artificial Sequence
  Description of Artificial Sequence: Synthetic oligonucleotide
  Sense strand starting at position 1266 SEQ ID NO: 3346
cagggagucugucugcaaa

SEQ ID NO: 260265 - RNA, 19 nt, Artificial Sequence
  Description of Artificial Sequence: Synthetic oligonucleotide
  Antisense strand to SEQ ID NO: 260264
uuugcagacagacucccug

SEQ ID NO: 260266 - RNA, 19 nt, Artificial Sequence
  Description of Artificial Sequence: Synthetic oligonucleotide
  Sense strand starting at position 1269 SEQ ID NO: 3346
ggagucugucugcaaacaa

SEQ ID NO: 260267 - RNA, 19 nt, Artificial Sequence
  Description of Artificial Sequence: Synthetic oligonucleotide
  Antisense strand to SEQ ID NO: 260266
uuguuugcagacagacucc

SEQ ID NO: 260268 - RNA, 19 nt, Artificial Sequence
  Description of Artificial Sequence: Synthetic oligonucleotide
  Sense strand starting at position 1561 SEQ ID NO: 3346
agagcagucugcucaaaga

SEQ ID NO: 260269 - RNA, 19 nt, Artificial Sequence
  Description of Artificial Sequence: Synthetic oligonucleotide
  Antisense strand to SEQ ID NO: 260268
ucuuugagcagacugcucu

SEQ ID NO: 260270 - RNA, 19 nt, Artificial Sequence
  Description of Artificial Sequence: Synthetic oligonucleotide
  Sense strand starting at position 2222 SEQ ID NO: 3346
gacuuugcauaggugacau

SEQ ID NO: 260271 - RNA, 19 nt, Artificial Sequence
  Description of Artificial Sequence: Synthetic oligonucleotide
  Antisense strand to SEQ ID NO: 260270
augucaccuaugcaaaguc

SEQ ID NO: 260272 - RNA, 19 nt, Artificial Sequence
  Description of Artificial Sequence: Synthetic oligonucleotide
  Sense strand starting at position 2302 SEQ ID NO: 3346
cggcacaucgucgaaauuu

SEQ ID NO: 260273 - RNA, 19 nt, Artificial Sequence
  Description of Artificial Sequence: Synthetic oligonucleotide
  Antisense strand to SEQ ID NO: 260272
aaauuucgacgaugugccg

SEQ ID NO: 260274 - RNA, 19 nt, Artificial Sequence
  Description of Artificial Sequence: Synthetic oligonucleotide
  Sense strand starting at position 2318 SEQ ID NO: 3346
uuucuaacucugcagggaa

SEQ ID NO: 260275 - RNA, 19 nt, Artificial Sequence
  Description of Artificial Sequence: Synthetic oligonucleotide
  Antisense strand to SEQ ID NO: 260274
uucccugcagaguuagaaa

SEQ ID NO: 260276 - RNA, 19 nt, Artificial Sequence
  Description of Artificial Sequence: Synthetic oligonucleotide
  Sense strand starting at position 2345 SEQ ID NO: 3346
guacuucggcuuuacaaau

SEQ ID NO: 260277 - RNA, 19 nt, Artificial Sequence
  Description of Artificial Sequence: Synthetic oligonucleotide
  Antisense strand to SEQ ID NO: 260276
auuuguaaagccgaaguac

SEQ ID NO: 260278 - RNA, 19 nt, Artificial Sequence
  Description of Artificial Sequence: Synthetic oligonucleotide
  Sense strand starting at position 2798 SEQ ID NO: 3346
uccgaauuccaauggacau

SEQ ID NO: 260279 - RNA, 19 nt, Artificial Sequence
  Description of Artificial Sequence: Synthetic oligonucleotide
  Antisense strand to SEQ ID NO: 260278
auguccauuggaauucgga

SEQ ID NO: 260280 - RNA, 19 nt, Artificial Sequence
  Description of Artificial Sequence: Synthetic oligonucleotide
  Sense strand starting at position 2909 SEQ ID NO: 3346
acauucuguucuccaggaa

SEQ ID NO: 260281 - RNA, 19 nt, Artificial Sequence
  Description of Artificial Sequence: Synthetic oligonucleotide
  Antisense strand to SEQ ID NO: 260280
uuccuggagaacagaaugu

SEQ ID NO: 260282 - RNA, 19 nt, Artificial Sequence
  Description of Artificial Sequence: Synthetic oligonucleotide
  Sense strand starting at position 2993 SEQ ID NO: 3346
agauacuaguaucuccauu

SEQ ID NO: 260283 - RNA, 19 nt, Artificial Sequence
  Description of Artificial Sequence: Synthetic oligonucleotide
  Antisense strand to SEQ ID NO: 260282
aauggagauacuaguaucu

SEQ ID NO: 260284 - RNA, 19 nt, Artificial Sequence
  Description of Artificial Sequence: Synthetic oligonucleotide
  Sense strand starting at position 3033 SEQ ID NO: 3346
cuuauaggauuguugugau

SEQ ID NO: 260285 - RNA, 19 nt, Artificial Sequence
  Description of Artificial Sequence: Synthetic oligonucleotide
  Antisense strand to SEQ ID NO: 260284
aucacaacaauccuauaag

SEQ ID NO: 260286 - RNA, 19 nt, Artificial Sequence
  Description of Artificial Sequence: Synthetic oligonucleotide
  Sense strand starting at position 3131 SEQ ID NO: 3346
gggaacacuguaggugaau

SEQ ID NO: 260287 - RNA, 19 nt, Artificial Sequence
  Description of Artificial Sequence: Synthetic oligonucleotide
  Antisense strand to SEQ ID NO: 260286
auucaccuacaguguuccc

SEQ ID NO: 260288 - RNA, 19 nt, Artificial Sequence
  Description of Artificial Sequence: Synthetic oligonucleotide
  Sense strand starting at position 3204 SEQ ID NO: 3346
aucaauuguugagugugaa

SEQ ID NO: 260289 - RNA, 19 nt, Artificial Sequence
  Description of Artificial Sequence: Synthetic oligonucleotide
  Antisense strand to SEQ ID NO: 260288
uucacacucaacaauugau

SEQ ID NO: 260290 - RNA, 19 nt, Artificial Sequence
  Description of Artificial Sequence: Synthetic oligonucleotide
  Sense strand starting at position 3214 SEQ ID NO: 3346
gagugugaacccuggaaua

SEQ ID NO: 260291 - RNA, 19 nt, Artificial Sequence
  Description of Artificial Sequence: Synthetic oligonucleotide
  Antisense strand to SEQ ID NO: 260290
uauuccaggguucacacuc

SEQ ID NO: 260292 - RNA, 19 nt, Artificial Sequence
  Description of Artificial Sequence: Synthetic oligonucleotide
  Sense strand starting at position 3350 SEQ ID NO: 3346
cccuuaagaguugauguag

SEQ ID NO: 260293 - RNA, 19 nt, Artificial Sequence
  Description of Artificial Sequence: Synthetic oligonucleotide
  Antisense strand to SEQ ID NO: 260292
cuacaucaacucuuaaggg

SEQ ID NO: 260294 - RNA, 19 nt, Artificial Sequence
  Description of Artificial Sequence: Synthetic oligonucleotide
  Sense strand starting at position 3356 SEQ ID NO: 3346
agaguugauguagggacuu

SEQ ID NO: 260295 - RNA, 19 nt, Artificial Sequence
  Description of Artificial Sequence: Synthetic oligonucleotide
  Antisense strand to SEQ ID NO: 260294
aagucccuacaucaacucu

SEQ ID NO: 260296 - RNA, 19 nt, Artificial Sequence
  Description of Artificial Sequence: Synthetic oligonucleotide
  Sense strand starting at position 3362 SEQ ID NO: 3346
gauguagggacuuaaguuc

SEQ ID NO: 260297 - RNA, 19 nt, Artificial Sequence
  Description of Artificial Sequence: Synthetic oligonucleotide
  Antisense strand to SEQ ID NO: 260296
gaacuuaagucccuacauc

SEQ ID NO: 260298 - RNA, 19 nt, Artificial Sequence
  Description of Artificial Sequence: Synthetic oligonucleotide
  Sense strand starting at position 3379 SEQ ID NO: 3346
uccuuaagggcagaaguuu

SEQ ID NO: 260299 - RNA, 19 nt, Artificial Sequence
  Description of Artificial Sequence: Synthetic oligonucleotide
  Antisense strand to SEQ ID NO: 260298
aaacuucugcccuuaagga

SEQ ID NO: 260300 - RNA, 19 nt, Artificial Sequence
  Description of Artificial Sequence: Synthetic oligonucleotide
  Sense strand starting at position 3423 SEQ ID NO: 3346
gcuuauuuauuugaaguag

SEQ ID NO: 260301 - RNA, 19 nt, Artificial Sequence
  Description of Artificial Sequence: Synthetic oligonucleotide
  Antisense strand to SEQ ID NO: 260300
cuacuucaaauaaauaagc

SEQ ID NO: 260302 - RNA, 19 nt, Artificial Sequence
  Description of Artificial Sequence: Synthetic oligonucleotide
  Sense strand starting at position 3461 SEQ ID NO: 3346
acugacacacgcugauaua

SEQ ID NO: 260303 - RNA, 19 nt, Artificial Sequence
  Description of Artificial Sequence: Synthetic oligonucleotide
  Antisense strand to SEQ ID NO: 260302
uauaucagcgugugucagu

SEQ ID NO: 260304 - RNA, 19 nt, Artificial Sequence
  Description of Artificial Sequence: Synthetic oligonucleotide
  Sense strand starting at position 3462 SEQ ID NO: 3346
cugacacacgcugauauau

SEQ ID NO: 260305 - RNA, 19 nt, Artificial Sequence
  Description of Artificial Sequence: Synthetic oligonucleotide
  Antisense strand to SEQ ID NO: 260304
auauaucagcgugugucag

SEQ ID NO: 260306 - RNA, 19 nt, Artificial Sequence
  Description of Artificial Sequence: Synthetic oligonucleotide
  Sense strand starting at position 3579 SEQ ID NO: 3346
uggugucuucuauauucuu

SEQ ID NO: 260307 - RNA, 19 nt, Artificial Sequence
  Description of Artificial Sequence: Synthetic oligonucleotide
  Antisense strand to SEQ ID NO: 260306
aagaauauagaagacacca

SEQ ID NO: 260308 - RNA, 19 nt, Artificial Sequence
  Description of Artificial Sequence: Synthetic oligonucleotide
  Sense strand starting at position 3733 SEQ ID NO: 3346
cucucuucuccaugaugag

SEQ ID NO: 260309 - RNA, 19 nt, Artificial Sequence
  Description of Artificial Sequence: Synthetic oligonucleotide
  Antisense strand to SEQ ID NO: 260308
cucaucauggagaagagag

SEQ ID NO: 260310 - RNA, 19 nt, Artificial Sequence
  Description of Artificial Sequence: Synthetic oligonucleotide
  Sense strand starting at position 3749 SEQ ID NO: 3346
gagaauaguaaugggaguu

SEQ ID NO: 260311 - RNA, 19 nt, Artificial Sequence
  Description of Artificial Sequence: Synthetic oligonucleotide
  Antisense strand to SEQ ID NO: 260310
aacucccauuacuauucuc

SEQ ID NO: 260312 - RNA, 19 nt, Artificial Sequence
  Description of Artificial Sequence: Synthetic oligonucleotide
  Sense strand starting at position 3777 SEQ ID NO: 3346
gguguugugaaucaauauc

SEQ ID NO: 260313 - RNA, 19 nt, Artificial Sequence
  Description of Artificial Sequence: Synthetic oligonucleotide
  Antisense strand to SEQ ID NO: 260312
gauauugauucacaacacc

SEQ ID NO: 260314 - RNA, 19 nt, Artificial Sequence
  Description of Artificial Sequence: Synthetic oligonucleotide
  Sense strand starting at position 3884 SEQ ID NO: 3346
cagaguauccaauguguga

SEQ ID NO: 260315 - RNA, 19 nt, Artificial Sequence
  Description of Artificial Sequence: Synthetic oligonucleotide
  Antisense strand to SEQ ID NO: 260314
ucacacauuggauacucug

SEQ ID NO: 260316 - RNA, 19 nt, Artificial Sequence
  Description of Artificial Sequence: Synthetic oligonucleotide
  Sense strand starting at position 3895 SEQ ID NO: 3346
augugugaguuaccauaau

SEQ ID NO: 260317 - RNA, 19 nt, Artificial Sequence
  Description of Artificial Sequence: Synthetic oligonucleotide
  Antisense strand to SEQ ID NO: 260316
auuaugguaacucacacau

SEQ ID NO: 260318 - RNA, 19 nt, Artificial Sequence
  Description of Artificial Sequence: Synthetic oligonucleotide
  Sense strand starting at position 237 SEQ ID NO: 3348
gaacuuggccaagacuagu

SEQ ID NO: 260319 - RNA, 19 nt, Artificial Sequence
  Description of Artificial Sequence: Synthetic oligonucleotide
  Antisense strand to SEQ ID NO: 260318
acuagucuuggccaaguuc

SEQ ID NO: 260320 - RNA, 19 nt, Artificial Sequence
  Description of Artificial Sequence: Synthetic oligonucleotide
  Sense strand starting at position 267 SEQ ID NO: 3348
augacuugucucuauaguc

SEQ ID NO: 260321 - RNA, 19 nt, Artificial Sequence
  Description of Artificial Sequence: Synthetic oligonucleotide
  Antisense strand to SEQ ID NO: 260320
gacuauagagacaagucau

SEQ ID NO: 260322 - RNA, 19 nt, Artificial Sequence
  Description of Artificial Sequence: Synthetic oligonucleotide
  Sense strand starting at position 323 SEQ ID NO: 3348
auagcauccuggcuaaaug

SEQ ID NO: 260323 - RNA, 19 nt, Artificial Sequence
  Description of Artificial Sequence: Synthetic oligonucleotide
  Antisense strand to SEQ ID NO: 260322
cauuuagccaggaugcuau

SEQ ID NO: 260324 - RNA, 19 nt, Artificial Sequence
  Description of Artificial Sequence: Synthetic oligonucleotide
  Sense strand starting at position 369 SEQ ID NO: 3348
gcucuaagugaauaaucac

SEQ ID NO: 260325 - RNA, 19 nt, Artificial Sequence
  Description of Artificial Sequence: Synthetic oligonucleotide
  Antisense strand to SEQ ID NO: 260324
gugauuauucacuuagagc

SEQ ID NO: 260326 - RNA, 19 nt, Artificial Sequence
  Description of Artificial Sequence: Synthetic oligonucleotide
  Sense strand starting at position 430 SEQ ID NO: 3348
ggcucucauuuacuuggua

SEQ ID NO: 260327 - RNA, 19 nt, Artificial Sequence
  Description of Artificial Sequence: Synthetic oligonucleotide
  Antisense strand to SEQ ID NO: 260326
uaccaaguaaaugagagcc

SEQ ID NO: 260328 - RNA, 19 nt, Artificial Sequence
  Description of Artificial Sequence: Synthetic oligonucleotide
  Sense strand starting at position 582 SEQ ID NO: 3348
guccuucccgcucauauuu

SEQ ID NO: 260329 - RNA, 19 nt, Artificial Sequence
  Description of Artificial Sequence: Synthetic oligonucleotide
  Antisense strand to SEQ ID NO: 260328
aaauaugagcgggaaggac

SEQ ID NO: 260330 - RNA, 19 nt, Artificial Sequence
  Description of Artificial Sequence: Synthetic oligonucleotide
  Sense strand starting at position 694 SEQ ID NO: 3348
ugcauugcaccuucgugua

SEQ ID NO: 260331 - RNA, 19 nt, Artificial Sequence
  Description of Artificial Sequence: Synthetic oligonucleotide
  Antisense strand to SEQ ID NO: 260330
uacacgaaggugcaaugca

SEQ ID NO: 260332 - RNA, 19 nt, Artificial Sequence
  Description of Artificial Sequence: Synthetic oligonucleotide
  Sense strand starting at position 767 SEQ ID NO: 3348
ucuuaugaccgcuacauau

SEQ ID NO: 260333 - RNA, 19 nt, Artificial Sequence
  Description of Artificial Sequence: Synthetic oligonucleotide
  Antisense strand to SEQ ID NO: 260332
auauguagcggucauaaga

SEQ ID NO: 260334 - RNA, 19 nt, Artificial Sequence
  Description of Artificial Sequence: Synthetic oligonucleotide
  Sense strand starting at position 769 SEQ ID NO: 3348
uuaugaccgcuacauauga

SEQ ID NO: 260335 - RNA, 19 nt, Artificial Sequence
  Description of Artificial Sequence: Synthetic oligonucleotide
  Antisense strand to SEQ ID NO: 260334
ucauauguagcggucauaa

SEQ ID NO: 260336 - RNA, 19 nt, Artificial Sequence
  Description of Artificial Sequence: Synthetic oligonucleotide
  Sense strand starting at position 793 SEQ ID NO: 3348
auagauaggaugugucuaa

SEQ ID NO: 260337 - RNA, 19 nt, Artificial Sequence
  Description of Artificial Sequence: Synthetic oligonucleotide
  Antisense strand to SEQ ID NO: 260336
uuagacacauccuaucuau

SEQ ID NO: 260338 - RNA, 19 nt, Artificial Sequence
  Description of Artificial Sequence: Synthetic oligonucleotide
  Sense strand starting at position 794 SEQ ID NO: 3348
uagauaggaugugucuaau

SEQ ID NO: 260339 - RNA, 19 nt, Artificial Sequence
  Description of Artificial Sequence: Synthetic oligonucleotide
  Antisense strand to SEQ ID NO: 260338
auuagacacauccuaucua

SEQ ID NO: 260340 - RNA, 19 nt, Artificial Sequence
  Description of Artificial Sequence: Synthetic oligonucleotide
  Sense strand starting at position 797 SEQ ID NO: 3348
auaggaugugucuaaucac

SEQ ID NO: 260341 - RNA, 19 nt, Artificial Sequence
  Description of Artificial Sequence: Synthetic oligonucleotide
  Antisense strand to SEQ ID NO: 260340
gugauuagacacauccuau

SEQ ID NO: 260342 - RNA, 19 nt, Artificial Sequence
  Description of Artificial Sequence: Synthetic oligonucleotide
  Sense strand starting at position 806 SEQ ID NO: 3348
gucuaaucacugcaaaguu

SEQ ID NO: 260343 - RNA, 19 nt, Artificial Sequence
  Description of Artificial Sequence: Synthetic oligonucleotide
  Antisense strand to SEQ ID NO: 260342
aacuuugcagugauuagac

SEQ ID NO: 260344 - RNA, 19 nt, Artificial Sequence
  Description of Artificial Sequence: Synthetic oligonucleotide
  Sense strand starting at position 881 SEQ ID NO: 3348
uuuagaaggucacuuccaa

SEQ ID NO: 260345 - RNA, 19 nt, Artificial Sequence
  Description of Artificial Sequence: Synthetic oligonucleotide
  Antisense strand to SEQ ID NO: 260344
uuggaagugaccuucuaaa

SEQ ID NO: 260346 - RNA, 19 nt, Artificial Sequence
  Description of Artificial Sequence: Synthetic oligonucleotide
  Sense strand starting at position 1072 SEQ ID NO: 3348
aaauaaguguauuugcagu

SEQ ID NO: 260347 - RNA, 19 nt, Artificial Sequence
  Description of Artificial Sequence: Synthetic oligonucleotide
  Antisense strand to SEQ ID NO: 260346
acugcaaauacacuuauuu

SEQ ID NO: 260348 - RNA, 19 nt, Artificial Sequence
  Description of Artificial Sequence: Synthetic oligonucleotide
  Sense strand starting at position 1078 SEQ ID NO: 3348
guguauuugcagugcaaag

SEQ ID NO: 260349 - RNA, 19 nt, Artificial Sequence
  Description of Artificial Sequence: Synthetic oligonucleotide
  Antisense strand to SEQ ID NO: 260348
cuuugcacugcaaauacac

SEQ ID NO: 260350 - RNA, 19 nt, Artificial Sequence
  Description of Artificial Sequence: Synthetic oligonucleotide
  Sense strand starting at position 1288 SEQ ID NO: 3348
uggagaagauaguucgcaa

SEQ ID NO: 260351 - RNA, 19 nt, Artificial Sequence
  Description of Artificial Sequence: Synthetic oligonucleotide
  Antisense strand to SEQ ID NO: 260350
uugcgaacuaucuucucca

SEQ ID NO: 260352 - RNA, 19 nt, Artificial Sequence
  Description of Artificial Sequence: Synthetic oligonucleotide
  Sense strand starting at position 1324 SEQ ID NO: 3348
aaaguuauuucugggaaag

SEQ ID NO: 260353 - RNA, 19 nt, Artificial Sequence
  Description of Artificial Sequence: Synthetic oligonucleotide
  Antisense strand to SEQ ID NO: 260352
cuuucccagaaauaacuuu

SEQ ID NO: 260354 - RNA, 19 nt, Artificial Sequence
  Description of Artificial Sequence: Synthetic oligonucleotide
  Sense strand starting at position 1326 SEQ ID NO: 3348
aguuauuucugggaaagaa

SEQ ID NO: 260355 - RNA, 19 nt, Artificial Sequence
  Description of Artificial Sequence: Synthetic oligonucleotide
  Antisense strand to SEQ ID NO: 260354
uucuuucccagaaauaacu

SEQ ID NO: 260356 - RNA, 19 nt, Artificial Sequence
  Description of Artificial Sequence: Synthetic oligonucleotide
  Sense strand starting at position 1354 SEQ ID NO: 3348
acagacgagugaucgauua

SEQ ID NO: 260357 - RNA, 19 nt, Artificial Sequence
  Description of Artificial Sequence: Synthetic oligonucleotide
  Antisense strand to SEQ ID NO: 260356
uaaucgaucacucgucugu

SEQ ID NO: 260358 - RNA, 19 nt, Artificial Sequence
  Description of Artificial Sequence: Synthetic oligonucleotide
  Sense strand starting at position 2105 SEQ ID NO: 3348
gcguuaggcgggucaguua

SEQ ID NO: 260359 - RNA, 19 nt, Artificial Sequence
  Description of Artificial Sequence: Synthetic oligonucleotide
  Antisense strand to SEQ ID NO: 260358
uaacugacccgccuaacgc

SEQ ID NO: 260360 - RNA, 19 nt, Artificial Sequence
  Description of Artificial Sequence: Synthetic oligonucleotide
  Sense strand starting at position 2303 SEQ ID NO: 3348
ucucaauaugcucgauaaa

SEQ ID NO: 260361 - RNA, 19 nt, Artificial Sequence
  Description of Artificial Sequence: Synthetic oligonucleotide
  Antisense strand to SEQ ID NO: 260360
uuuaucgagcauauugaga

SEQ ID NO: 260362 - RNA, 19 nt, Artificial Sequence
  Description of Artificial Sequence: Synthetic oligonucleotide
  Sense strand starting at position 2304 SEQ ID NO: 3348
cucaauaugcucgauaaau

SEQ ID NO: 260363 - RNA, 19 nt, Artificial Sequence
  Description of Artificial Sequence: Synthetic oligonucleotide
  Antisense strand to SEQ ID NO: 260362
auuuaucgagcauauugag

SEQ ID NO: 260364 - RNA, 19 nt, Artificial Sequence
  Description of Artificial Sequence: Synthetic oligonucleotide
  Sense strand starting at position 2317 SEQ ID NO: 3348
auaaauauuaggcgauuga

SEQ ID NO: 260365 - RNA, 19 nt, Artificial Sequence
  Description of Artificial Sequence: Synthetic oligonucleotide
  Antisense strand to SEQ ID NO: 260364
ucaaucgccuaauauuuau

SEQ ID NO: 260366 - RNA, 19 nt, Artificial Sequence
  Description of Artificial Sequence: Synthetic oligonucleotide
  Sense strand starting at position 2318 SEQ ID NO: 3348
uaaauauuaggcgauugau

SEQ ID NO: 260367 - RNA, 19 nt, Artificial Sequence
  Description of Artificial Sequence: Synthetic oligonucleotide
  Antisense strand to SEQ ID NO: 260366
aucaaucgccuaauauuua

SEQ ID NO: 260368 - RNA, 19 nt, Artificial Sequence
  Description of Artificial Sequence: Synthetic oligonucleotide
  Sense strand starting at position 2333 SEQ ID NO: 3348
ugauuuguaaaucguguau

SEQ ID NO: 260369 - RNA, 19 nt, Artificial Sequence
  Description of Artificial Sequence: Synthetic oligonucleotide
  Antisense strand to SEQ ID NO: 260368
auacacgauuuacaaauca

SEQ ID NO: 260370 - RNA, 19 nt, Artificial Sequence
  Description of Artificial Sequence: Synthetic oligonucleotide
  Sense strand starting at position 2457 SEQ ID NO: 3348
ggauccuguccggaguaca

SEQ ID NO: 260371 - RNA, 19 nt, Artificial Sequence
  Description of Artificial Sequence: Synthetic oligonucleotide
  Antisense strand to SEQ ID NO: 260370
uguacuccggacaggaucc

SEQ ID NO: 260372 - RNA, 19 nt, Artificial Sequence
  Description of Artificial Sequence: Synthetic oligonucleotide
  Sense strand starting at position 2555 SEQ ID NO: 3348
agcgacuuauuggucauuu

SEQ ID NO: 260373 - RNA, 19 nt, Artificial Sequence
  Description of Artificial Sequence: Synthetic oligonucleotide
  Antisense strand to SEQ ID NO: 260372
aaaugaccaauaagucgcu

SEQ ID NO: 260374 - RNA, 19 nt, Artificial Sequence
  Description of Artificial Sequence: Synthetic oligonucleotide
  Sense strand starting at position 2556 SEQ ID NO: 3348
gcgacuuauuggucauuug

SEQ ID NO: 260375 - RNA, 19 nt, Artificial Sequence
  Description of Artificial Sequence: Synthetic oligonucleotide
  Antisense strand to SEQ ID NO: 260374
caaaugaccaauaagucgc

SEQ ID NO: 260376 - RNA, 19 nt, Artificial Sequence
  Description of Artificial Sequence: Synthetic oligonucleotide
  Sense strand starting at position 2665 SEQ ID NO: 3348
gugaucuucucaucacauc

SEQ ID NO: 260377 - RNA, 19 nt, Artificial Sequence
  Description of Artificial Sequence: Synthetic oligonucleotide
  Antisense strand to SEQ ID NO: 260376
gaugugaugagaagaucac

SEQ ID NO: 260378 - RNA, 19 nt, Artificial Sequence
  Description of Artificial Sequence: Synthetic oligonucleotide
  Sense strand starting at position 2741 SEQ ID NO: 3348
ccauuauuacagugucaua

SEQ ID NO: 260379 - RNA, 19 nt, Artificial Sequence
  Description of Artificial Sequence: Synthetic oligonucleotide
  Antisense strand to SEQ ID NO: 260378
uaugacacuguaauaaugg

SEQ ID NO: 260380 - RNA, 19 nt, Artificial Sequence
  Description of Artificial Sequence: Synthetic oligonucleotide
  Sense strand starting at position 3003 SEQ ID NO: 3348
ggagauuugucuguacugc

SEQ ID NO: 260381 - RNA, 19 nt, Artificial Sequence
  Description of Artificial Sequence: Synthetic oligonucleotide
  Antisense strand to SEQ ID NO: 260380
gcaguacagacaaaucucc

SEQ ID NO: 260382 - RNA, 19 nt, Artificial Sequence
  Description of Artificial Sequence: Synthetic oligonucleotide
  Sense strand starting at position 3009 SEQ ID NO: 3348
uugucuguacugcauuuau

SEQ ID NO: 260383 - RNA, 19 nt, Artificial Sequence
  Description of Artificial Sequence: Synthetic oligonucleotide
  Antisense strand to SEQ ID NO: 260382
auaaaugcaguacagacaa

SEQ ID NO: 260384 - RNA, 19 nt, Artificial Sequence
  Description of Artificial Sequence: Synthetic oligonucleotide
  Sense strand starting at position 3397 SEQ ID NO: 3348
aggaaauauuuguggauau

SEQ ID NO: 260385 - RNA, 19 nt, Artificial Sequence
  Description of Artificial Sequence: Synthetic oligonucleotide
  Antisense strand to SEQ ID NO: 260384
auauccacaaauauuuccu

SEQ ID NO: 260386 - RNA, 19 nt, Artificial Sequence
  Description of Artificial Sequence: Synthetic oligonucleotide
  Sense strand starting at position 3409 SEQ ID NO: 3348
uggauaugcuaaccugacu

SEQ ID NO: 260387 - RNA, 19 nt, Artificial Sequence
  Description of Artificial Sequence: Synthetic oligonucleotide
  Antisense strand to SEQ ID NO: 260386
agucagguuagcauaucca

SEQ ID NO: 260388 - RNA, 19 nt, Artificial Sequence
  Description of Artificial Sequence: Synthetic oligonucleotide
  Sense strand starting at position 3649 SEQ ID NO: 3348
agguuacguguauaaugga

SEQ ID NO: 260389 - RNA, 19 nt, Artificial Sequence
  Description of Artificial Sequence: Synthetic oligonucleotide
  Antisense strand to SEQ ID NO: 260388
uccauuauacacguaaccu

SEQ ID NO: 260390 - RNA, 19 nt, Artificial Sequence
  Description of Artificial Sequence: Synthetic oligonucleotide
  Sense strand starting at position 3711 SEQ ID NO: 3348
ucugaacuguuaucaggua

SEQ ID NO: 260391 - RNA, 19 nt, Artificial Sequence
  Description of Artificial Sequence: Synthetic oligonucleotide
  Antisense strand to SEQ ID NO: 260390
uaccugauaacaguucaga

SEQ ID NO: 260392 - RNA, 19 nt, Artificial Sequence
  Description of Artificial Sequence: Synthetic oligonucleotide
  Sense strand starting at position 3724 SEQ ID NO: 3348
cagguauaccugugagaaa

SEQ ID NO: 260393 - RNA, 19 nt, Artificial Sequence
  Description of Artificial Sequence: Synthetic oligonucleotide
  Antisense strand to SEQ ID NO: 260392
uuucucacagguauaccug

SEQ ID NO: 260394 - RNA, 19 nt, Artificial Sequence
  Description of Artificial Sequence: Synthetic oligonucleotide
  Sense strand starting at position 3928 SEQ ID NO: 3348
gggauucuuugaguuccua

SEQ ID NO: 260395 - RNA, 19 nt, Artificial Sequence
  Description of Artificial Sequence: Synthetic oligonucleotide
  Antisense strand to SEQ ID NO: 260394
uaggaacucaaagaauccc

SEQ ID NO: 260396 - RNA, 19 nt, Artificial Sequence
  Description of Artificial Sequence: Synthetic oligonucleotide
  Sense strand starting at position 3932 SEQ ID NO: 3348
uucuuugaguuccuaagau

SEQ ID NO: 260397 - RNA, 19 nt, Artificial Sequence
  Description of Artificial Sequence: Synthetic oligonucleotide
  Antisense strand to SEQ ID NO: 260396
aucuuaggaacucaaagaa

SEQ ID NO: 260398 - RNA, 19 nt, Artificial Sequence
  Description of Artificial Sequence: Synthetic oligonucleotide
  Sense strand starting at position 193 SEQ ID NO: 3349
aagaaagucucggccgagu

SEQ ID NO: 260399 - RNA, 19 nt, Artificial Sequence
  Description of Artificial Sequence: Synthetic oligonucleotide
  Antisense strand to SEQ ID NO: 260398
acucggccgagacuuucuu

SEQ ID NO: 260400 - RNA, 19 nt, Artificial Sequence
  Description of Artificial Sequence: Synthetic oligonucleotide
  Sense strand starting at position 633 SEQ ID NO: 3349
uugacaagguaaucguauu

SEQ ID NO: 260401 - RNA, 19 nt, Artificial Sequence
  Description of Artificial Sequence: Synthetic oligonucleotide
  Antisense strand to SEQ ID NO: 260400
aauacgauuaccuugucaa

SEQ ID NO: 260402 - RNA, 19 nt, Artificial Sequence
  Description of Artificial Sequence: Synthetic oligonucleotide
  Sense strand starting at position 709 SEQ ID NO: 3349
acauauucugaguagugcu

SEQ ID NO: 260403 - RNA, 19 nt, Artificial Sequence
  Description of Artificial Sequence: Synthetic oligonucleotide
  Antisense strand to SEQ ID NO: 260402
agcacuacucagaauaugu

SEQ ID NO: 260404 - RNA, 19 nt, Artificial Sequence
  Description of Artificial Sequence: Synthetic oligonucleotide
  Sense strand starting at position 776 SEQ ID NO: 3349
guggguaaacucugguuau

SEQ ID NO: 260405 - RNA, 19 nt, Artificial Sequence
  Description of Artificial Sequence: Synthetic oligonucleotide
  Antisense strand to SEQ ID NO: 260404
auaaccagaguuuacccac

SEQ ID NO: 260406 - RNA, 19 nt, Artificial Sequence
  Description of Artificial Sequence: Synthetic oligonucleotide
  Sense strand starting at position 779 SEQ ID NO: 3349
gguaaacucugguuauaaa

SEQ ID NO: 260407 - RNA, 19 nt, Artificial Sequence
  Description of Artificial Sequence: Synthetic oligonucleotide
  Antisense strand to SEQ ID NO: 260406
uuuauaaccagaguuuacc

SEQ ID NO: 260408 - RNA, 19 nt, Artificial Sequence
  Description of Artificial Sequence: Synthetic oligonucleotide
  Sense strand starting at position 843 SEQ ID NO: 3349
aaaugucaagcauguggau

SEQ ID NO: 260409 - RNA, 19 nt, Artificial Sequence
  Description of Artificial Sequence: Synthetic oligonucleotide
  Antisense strand to SEQ ID NO: 260408
auccacaugcuugacauuu

SEQ ID NO: 260410 - RNA, 19 nt, Artificial Sequence
  Description of Artificial Sequence: Synthetic oligonucleotide
  Sense strand starting at position 845 SEQ ID NO: 3349
augucaagcauguggauua

SEQ ID NO: 260411 - RNA, 19 nt, Artificial Sequence
  Description of Artificial Sequence: Synthetic oligonucleotide
  Antisense strand to SEQ ID NO: 260410
uaauccacaugcuugacau

SEQ ID NO: 260412 - RNA, 19 nt, Artificial Sequence
  Description of Artificial Sequence: Synthetic oligonucleotide
  Sense strand starting at position 932 SEQ ID NO: 3349
agagacaccugagaauaaa

SEQ ID NO: 260413 - RNA, 19 nt, Artificial Sequence
  Description of Artificial Sequence: Synthetic oligonucleotide
  Antisense strand to SEQ ID NO: 260412
uuuauucucaggugucucu

SEQ ID NO: 260414 - RNA, 19 nt, Artificial Sequence
  Description of Artificial Sequence: Synthetic oligonucleotide
  Sense strand starting at position 952 SEQ ID NO: 3349
aauacugugccagagcaau

SEQ ID NO: 260415 - RNA, 19 nt, Artificial Sequence
  Description of Artificial Sequence: Synthetic oligonucleotide
  Antisense strand to SEQ ID NO: 260414
auugcucuggcacaguauu

SEQ ID NO: 260416 - RNA, 19 nt, Artificial Sequence
  Description of Artificial Sequence: Synthetic oligonucleotide
  Sense strand starting at position 1070 SEQ ID NO: 3349
gauucuaagguaugccuau

SEQ ID NO: 260417 - RNA, 19 nt, Artificial Sequence
  Description of Artificial Sequence: Synthetic oligonucleotide
  Antisense strand to SEQ ID NO: 260416
auaggcauaccuuagaauc

SEQ ID NO: 260418 - RNA, 19 nt, Artificial Sequence
  Description of Artificial Sequence: Synthetic oligonucleotide
  Sense strand starting at position 1077 SEQ ID NO: 3349
agguaugccuaucaaguua

SEQ ID NO: 260419 - RNA, 19 nt, Artificial Sequence
  Description of Artificial Sequence: Synthetic oligonucleotide
  Antisense strand to SEQ ID NO: 260418
uaacuugauaggcauaccu

SEQ ID NO: 260420 - RNA, 19 nt, Artificial Sequence
  Description of Artificial Sequence: Synthetic oligonucleotide
  Sense strand starting at position 1088 SEQ ID NO: 3349
ucaaguuaauugcuguagu

SEQ ID NO: 260421 - RNA, 19 nt, Artificial Sequence
  Description of Artificial Sequence: Synthetic oligonucleotide
  Antisense strand to SEQ ID NO: 260420
acuacagcaauuaacuuga

SEQ ID NO: 260422 - RNA, 19 nt, Artificial Sequence
  Description of Artificial Sequence: Synthetic oligonucleotide
  Sense strand starting at position 1091 SEQ ID NO: 3349
aguuaauugcuguagugca

SEQ ID NO: 260423 - RNA, 19 nt, Artificial Sequence
  Description of Artificial Sequence: Synthetic oligonucleotide
  Antisense strand to SEQ ID NO: 260422
ugcacuacagcaauuaacu

SEQ ID NO: 260424 - RNA, 19 nt, Artificial Sequence
  Description of Artificial Sequence: Synthetic oligonucleotide
  Sense strand starting at position 1118 SEQ ID NO: 3349
gcaauacuguguuucugca

SEQ ID NO: 260425 - RNA, 19 nt, Artificial Sequence
  Description of Artificial Sequence: Synthetic oligonucleotide
  Antisense strand to SEQ ID NO: 260424
ugcagaaacacaguauugc

SEQ ID NO: 260426 - RNA, 19 nt, Artificial Sequence
  Description of Artificial Sequence: Synthetic oligonucleotide
  Sense strand starting at position 1126 SEQ ID NO: 3349
guguuucugcaaugggacu

SEQ ID NO: 260427 - RNA, 19 nt, Artificial Sequence
  Description of Artificial Sequence: Synthetic oligonucleotide
  Antisense strand to SEQ ID NO: 260426
agucccauugcagaaacac

SEQ ID NO: 260428 - RNA, 19 nt, Artificial Sequence
  Description of Artificial Sequence: Synthetic oligonucleotide
  Sense strand starting at position 1195 SEQ ID NO: 3349
auaauaaugcuguauggua

SEQ ID NO: 260429 - RNA, 19 nt, Artificial Sequence
  Description of Artificial Sequence: Synthetic oligonucleotide
  Antisense strand to SEQ ID NO: 260428
uaccauacagcauuauuau

SEQ ID NO: 260430 - RNA, 19 nt, Artificial Sequence
  Description of Artificial Sequence: Synthetic oligonucleotide
  Sense strand starting at position 1197 SEQ ID NO: 3349
aauaaugcuguaugguaua

SEQ ID NO: 260431 - RNA, 19 nt, Artificial Sequence
  Description of Artificial Sequence: Synthetic oligonucleotide
  Antisense strand to SEQ ID NO: 260430
uauaccauacagcauuauu

SEQ ID NO: 260432 - RNA, 19 nt, Artificial Sequence
  Description of Artificial Sequence: Synthetic oligonucleotide
  Sense strand starting at position 1202 SEQ ID NO: 3349
ugcuguaugguauauuaca

SEQ ID NO: 260433 - RNA, 19 nt, Artificial Sequence
  Description of Artificial Sequence: Synthetic oligonucleotide
  Antisense strand to SEQ ID NO: 260432
uguaauauaccauacagca

SEQ ID NO: 260434 - RNA, 19 nt, Artificial Sequence
  Description of Artificial Sequence: Synthetic oligonucleotide
  Sense strand starting at position 1235 SEQ ID NO: 3349
acaggauucuaccgaggac

SEQ ID NO: 260435 - RNA, 19 nt, Artificial Sequence
  Description of Artificial Sequence: Synthetic oligonucleotide
  Antisense strand to SEQ ID NO: 260434
guccucgguagaauccugu

SEQ ID NO: 260436 - RNA, 19 nt, Artificial Sequence
  Description of Artificial Sequence: Synthetic oligonucleotide
  Sense strand starting at position 1277 SEQ ID NO: 3349
gccaguaagugggcagaau

SEQ ID NO: 260437 - RNA, 19 nt, Artificial Sequence
  Description of Artificial Sequence: Synthetic oligonucleotide
  Antisense strand to SEQ ID NO: 260436
auucugcccacuuacuggc

SEQ ID NO: 260438 - RNA, 19 nt, Artificial Sequence
  Description of Artificial Sequence: Synthetic oligonucleotide
  Sense strand starting at position 1428 SEQ ID NO: 3349
cgaguuaagucggcaagga

SEQ ID NO: 260439 - RNA, 19 nt, Artificial Sequence
  Description of Artificial Sequence: Synthetic oligonucleotide
  Antisense strand to SEQ ID NO: 260438
uccuugccgacuuaacucg

SEQ ID NO: 260440 - RNA, 19 nt, Artificial Sequence
  Description of Artificial Sequence: Synthetic oligonucleotide
  Sense strand starting at position 1429 SEQ ID NO: 3349
gaguuaagucggcaaggac

SEQ ID NO: 260441 - RNA, 19 nt, Artificial Sequence
  Description of Artificial Sequence: Synthetic oligonucleotide
  Antisense strand to SEQ ID NO: 260440
guccuugccgacuuaacuc

SEQ ID NO: 260442 - RNA, 19 nt, Artificial Sequence
  Description of Artificial Sequence: Synthetic oligonucleotide
  Sense strand starting at position 1946 SEQ ID NO: 3349
cgcugcgagccuuugcaaa

SEQ ID NO: 260443 - RNA, 19 nt, Artificial Sequence
  Description of Artificial Sequence: Synthetic oligonucleotide
  Antisense strand to SEQ ID NO: 260442
uuugcaaaggcucgcagcg

SEQ ID NO: 260444 - RNA, 19 nt, Artificial Sequence
  Description of Artificial Sequence: Synthetic oligonucleotide
  Sense strand starting at position 2090 SEQ ID NO: 3349
guccuagaacucggccaau

SEQ ID NO: 260445 - RNA, 19 nt, Artificial Sequence
  Description of Artificial Sequence: Synthetic oligonucleotide
  Antisense strand to SEQ ID NO: 260444
auuggccgaguucuaggac

SEQ ID NO: 260446 - RNA, 19 nt, Artificial Sequence
  Description of Artificial Sequence: Synthetic oligonucleotide
  Sense strand starting at position 2093 SEQ ID NO: 3349
cuagaacucggccaaucau

SEQ ID NO: 260447 - RNA, 19 nt, Artificial Sequence
  Description of Artificial Sequence: Synthetic oligonucleotide
  Antisense strand to SEQ ID NO: 260446
augauuggccgaguucuag

SEQ ID NO: 260448 - RNA, 19 nt, Artificial Sequence
  Description of Artificial Sequence: Synthetic oligonucleotide
  Sense strand starting at position 2605 SEQ ID NO: 3349
aagggauccuccugguuug

SEQ ID NO: 260449 - RNA, 19 nt, Artificial Sequence
  Description of Artificial Sequence: Synthetic oligonucleotide
  Antisense strand to SEQ ID NO: 260448
caaaccaggaggaucccuu

SEQ ID NO: 260450 - RNA, 19 nt, Artificial Sequence
  Description of Artificial Sequence: Synthetic oligonucleotide
  Sense strand starting at position 2606 SEQ ID NO: 3349
agggauccuccugguuuga

SEQ ID NO: 260451 - RNA, 19 nt, Artificial Sequence
  Description of Artificial Sequence: Synthetic oligonucleotide
  Antisense strand to SEQ ID NO: 260450
ucaaaccaggaggaucccu

SEQ ID NO: 260452 - RNA, 19 nt, Artificial Sequence
  Description of Artificial Sequence: Synthetic oligonucleotide
  Sense strand starting at position 3080 SEQ ID NO: 3349
agcaguuacucuuuauuac

SEQ ID NO: 260453 - RNA, 19 nt, Artificial Sequence
  Description of Artificial Sequence: Synthetic oligonucleotide
  Antisense strand to SEQ ID NO: 260452
guaauaaagaguaacugcu

SEQ ID NO: 260454 - RNA, 19 nt, Artificial Sequence
  Description of Artificial Sequence: Synthetic oligonucleotide
  Sense strand starting at position 3440 SEQ ID NO: 3349
uggugugugccagugguca

SEQ ID NO: 260455 - RNA, 19 nt, Artificial Sequence
  Description of Artificial Sequence: Synthetic oligonucleotide
  Antisense strand to SEQ ID NO: 260454
ugaccacuggcacacacca

SEQ ID NO: 260456 - RNA, 19 nt, Artificial Sequence
  Description of Artificial Sequence: Synthetic oligonucleotide
  Sense strand starting at position 3442 SEQ ID NO: 3349
gugugugccaguggucaca

SEQ ID NO: 260457 - RNA, 19 nt, Artificial Sequence
  Description of Artificial Sequence: Synthetic oligonucleotide
  Antisense strand to SEQ ID NO: 260456
ugugaccacuggcacacac

SEQ ID NO: 260458 - RNA, 19 nt, Artificial Sequence
  Description of Artificial Sequence: Synthetic oligonucleotide
  Sense strand starting at position 3617 SEQ ID NO: 3349
ucuuucuauggaugaguaa

SEQ ID NO: 260459 - RNA, 19 nt, Artificial Sequence
  Description of Artificial Sequence: Synthetic oligonucleotide
  Antisense strand to SEQ ID NO: 260458
uuacucauccauagaaaga

SEQ ID NO: 260460 - RNA, 19 nt, Artificial Sequence
  Description of Artificial Sequence: Synthetic oligonucleotide
  Sense strand starting at position 3620 SEQ ID NO: 3349
uucuauggaugaguaauau

SEQ ID NO: 260461 - RNA, 19 nt, Artificial Sequence
  Description of Artificial Sequence: Synthetic oligonucleotide
  Antisense strand to SEQ ID NO: 260460
auauuacucauccauagaa

SEQ ID NO: 260462 - RNA, 19 nt, Artificial Sequence
  Description of Artificial Sequence: Synthetic oligonucleotide
  Sense strand starting at position 3725 SEQ ID NO: 3349
uaaugcugucgugaacauu

SEQ ID NO: 260463 - RNA, 19 nt, Artificial Sequence
  Description of Artificial Sequence: Synthetic oligonucleotide
  Antisense strand to SEQ ID NO: 260462
aauguucacgacagcauua

SEQ ID NO: 260464 - RNA, 19 nt, Artificial Sequence
  Description of Artificial Sequence: Synthetic oligonucleotide
  Sense strand starting at position 3762 SEQ ID NO: 3349
ugguauuaaugccaaguga

SEQ ID NO: 260465 - RNA, 19 nt, Artificial Sequence
  Description of Artificial Sequence: Synthetic oligonucleotide
  Antisense strand to SEQ ID NO: 260464
ucacuuggcauuaauacca

SEQ ID NO: 260466 - RNA, 19 nt, Artificial Sequence
  Description of Artificial Sequence: Synthetic oligonucleotide
  Sense strand starting at position 3848 SEQ ID NO: 3349
ucagucauagcucagcaaa

SEQ ID NO: 260467 - RNA, 19 nt, Artificial Sequence
  Description of Artificial Sequence: Synthetic oligonucleotide
  Antisense strand to SEQ ID NO: 260466
uuugcugagcuaugacuga

SEQ ID NO: 260468 - RNA, 19 nt, Artificial Sequence
  Description of Artificial Sequence: Synthetic oligonucleotide
  Sense strand starting at position 3850 SEQ ID NO: 3349
agucauagcucagcaaaug

SEQ ID NO: 260469 - RNA, 19 nt, Artificial Sequence
  Description of Artificial Sequence: Synthetic oligonucleotide
  Antisense strand to SEQ ID NO: 260468
cauuugcugagcuaugacu

SEQ ID NO: 260470 - RNA, 19 nt, Artificial Sequence
  Description of Artificial Sequence: Synthetic oligonucleotide
  Sense strand starting at position 3875 SEQ ID NO: 3349
cagggugcucaauguaaag

SEQ ID NO: 260471 - RNA, 19 nt, Artificial Sequence
  Description of Artificial Sequence: Synthetic oligonucleotide
  Antisense strand to SEQ ID NO: 260470
cuuuacauugagcacccug

SEQ ID NO: 260472 - RNA, 19 nt, Artificial Sequence
  Description of Artificial Sequence: Synthetic oligonucleotide
  Sense strand starting at position 3877 SEQ ID NO: 3349
gggugcucaauguaaagga

SEQ ID NO: 260473 - RNA, 19 nt, Artificial Sequence
  Description of Artificial Sequence: Synthetic oligonucleotide
  Antisense strand to SEQ ID NO: 260472
uccuuuacauugagcaccc

SEQ ID NO: 260474 - RNA, 19 nt, Artificial Sequence
  Description of Artificial Sequence: Synthetic oligonucleotide
  Sense strand starting at position 3881 SEQ ID NO: 3349
gcucaauguaaaggaguuu

SEQ ID NO: 260475 - RNA, 19 nt, Artificial Sequence
  Description of Artificial Sequence: Synthetic oligonucleotide
  Antisense strand to SEQ ID NO: 260474
aaacuccuuuacauugagc

SEQ ID NO: 260476 - RNA, 19 nt, Artificial Sequence
  Description of Artificial Sequence: Synthetic oligonucleotide
  Sense strand starting at position 3892 SEQ ID NO: 3349
aggaguuugcccuguaccu

SEQ ID NO: 260477 - RNA, 19 nt, Artificial Sequence
  Description of Artificial Sequence: Synthetic oligonucleotide
  Antisense strand to SEQ ID NO: 260476
agguacagggcaaacuccu

SEQ ID NO: 260478 - RNA, 19 nt, Artificial Sequence
  Description of Artificial Sequence: Synthetic oligonucleotide
  Sense strand starting at position 118 SEQ ID NO: 3352
auguaaagguaucugagaa

SEQ ID NO: 260479 - RNA, 19 nt, Artificial Sequence
  Description of Artificial Sequence: Synthetic oligonucleotide
  Antisense strand to SEQ ID NO: 260478
uucucagauaccuuuacau

SEQ ID NO: 260480 - RNA, 19 nt, Artificial Sequence
  Description of Artificial Sequence: Synthetic oligonucleotide
  Sense strand starting at position 177 SEQ ID NO: 3352
agcauauguaacggauaaa

SEQ ID NO: 260481 - RNA, 19 nt, Artificial Sequence
  Description of Artificial Sequence: Synthetic oligonucleotide
  Antisense strand to SEQ ID NO: 260480
uuuauccguuacauaugcu

SEQ ID NO: 260482 - RNA, 19 nt, Artificial Sequence
  Description of Artificial Sequence: Synthetic oligonucleotide
  Sense strand starting at position 178 SEQ ID NO: 3352
gcauauguaacggauaaau

SEQ ID NO: 260483 - RNA, 19 nt, Artificial Sequence
  Description of Artificial Sequence: Synthetic oligonucleotide
  Antisense strand to SEQ ID NO: 260482
auuuauccguuacauaugc

SEQ ID NO: 260484 - RNA, 19 nt, Artificial Sequence
  Description of Artificial Sequence: Synthetic oligonucleotide
  Sense strand starting at position 240 SEQ ID NO: 3352
agcuuaaugugacuccaaa

SEQ ID NO: 260485 - RNA, 19 nt, Artificial Sequence
  Description of Artificial Sequence: Synthetic oligonucleotide
  Antisense strand to SEQ ID NO: 260484
uuuggagucacauuaagcu

SEQ ID NO: 260486 - RNA, 19 nt, Artificial Sequence
  Description of Artificial Sequence: Synthetic oligonucleotide
  Sense strand starting at position 315 SEQ ID NO: 3352
acaggucaccagugaauua

SEQ ID NO: 260487 - RNA, 19 nt, Artificial Sequence
  Description of Artificial Sequence: Synthetic oligonucleotide
  Antisense strand to SEQ ID NO: 260486
uaauucacuggugaccugu

SEQ ID NO: 260488 - RNA, 19 nt, Artificial Sequence
  Description of Artificial Sequence: Synthetic oligonucleotide
  Sense strand starting at position 605 SEQ ID NO: 3352
agccauuucggcuagcaau

SEQ ID NO: 260489 - RNA, 19 nt, Artificial Sequence
  Description of Artificial Sequence: Synthetic oligonucleotide
  Antisense strand to SEQ ID NO: 260488
auugcuagccgaaauggcu

SEQ ID NO: 260490 - RNA, 19 nt, Artificial Sequence
  Description of Artificial Sequence: Synthetic oligonucleotide
  Sense strand starting at position 796 SEQ ID NO: 3352
gcauauuagcaaggaauga

SEQ ID NO: 260491 - RNA, 19 nt, Artificial Sequence
  Description of Artificial Sequence: Synthetic oligonucleotide
  Antisense strand to SEQ ID NO: 260490
ucauuccuugcuaauaugc

SEQ ID NO: 260492 - RNA, 19 nt, Artificial Sequence
  Description of Artificial Sequence: Synthetic oligonucleotide
  Sense strand starting at position 1391 SEQ ID NO: 3352
cuaguugcccgacaagaaa

SEQ ID NO: 260493 - RNA, 19 nt, Artificial Sequence
  Description of Artificial Sequence: Synthetic oligonucleotide
  Antisense strand to SEQ ID NO: 260492
uuucuugucgggcaacuag

SEQ ID NO: 260494 - RNA, 19 nt, Artificial Sequence
  Description of Artificial Sequence: Synthetic oligonucleotide
  Sense strand starting at position 1831 SEQ ID NO: 3352
guuaguuacacgggaagaa

SEQ ID NO: 260495 - RNA, 19 nt, Artificial Sequence
  Description of Artificial Sequence: Synthetic oligonucleotide
  Antisense strand to SEQ ID NO: 260494
uucuucccguguaacuaac

SEQ ID NO: 260496 - RNA, 19 nt, Artificial Sequence
  Description of Artificial Sequence: Synthetic oligonucleotide
  Sense strand starting at position 1991 SEQ ID NO: 3352
gugaaaucgacccaaucug

SEQ ID NO: 260497 - RNA, 19 nt, Artificial Sequence
  Description of Artificial Sequence: Synthetic oligonucleotide
  Antisense strand to SEQ ID NO: 260496
cagauugggucgauuucac

SEQ ID NO: 260498 - RNA, 19 nt, Artificial Sequence
  Description of Artificial Sequence: Synthetic oligonucleotide
  Sense strand starting at position 2024 SEQ ID NO: 3352
auuugagugucaguguuau

SEQ ID NO: 260499 - RNA, 19 nt, Artificial Sequence
  Description of Artificial Sequence: Synthetic oligonucleotide
  Antisense strand to SEQ ID NO: 260498
auaacacugacacucaaau

SEQ ID NO: 260500 - RNA, 19 nt, Artificial Sequence
  Description of Artificial Sequence: Synthetic oligonucleotide
  Sense strand starting at position 2032 SEQ ID NO: 3352
gucaguguuauuuacgcca

SEQ ID NO: 260501 - RNA, 19 nt, Artificial Sequence
  Description of Artificial Sequence: Synthetic oligonucleotide
  Antisense strand to SEQ ID NO: 260500
uggcguaaauaacacugac

SEQ ID NO: 260502 - RNA, 19 nt, Artificial Sequence
  Description of Artificial Sequence: Synthetic oligonucleotide
  Sense strand starting at position 2112 SEQ ID NO: 3352
gcagaugucaauuauguga

SEQ ID NO: 260503 - RNA, 19 nt, Artificial Sequence
  Description of Artificial Sequence: Synthetic oligonucleotide
  Antisense strand to SEQ ID NO: 260502
ucacauaauugacaucugc

SEQ ID NO: 260504 - RNA, 19 nt, Artificial Sequence
  Description of Artificial Sequence: Synthetic oligonucleotide
  Sense strand starting at position 2115 SEQ ID NO: 3352
gaugucaauuaugugagau

SEQ ID NO: 260505 - RNA, 19 nt, Artificial Sequence
  Description of Artificial Sequence: Synthetic oligonucleotide
  Antisense strand to SEQ ID NO: 260504
aucucacauaauugacauc

SEQ ID NO: 260506 - RNA, 19 nt, Artificial Sequence
  Description of Artificial Sequence: Synthetic oligonucleotide
  Sense strand starting at position 2116 SEQ ID NO: 3352
augucaauuaugugagaug

SEQ ID NO: 260507 - RNA, 19 nt, Artificial Sequence
  Description of Artificial Sequence: Synthetic oligonucleotide
  Antisense strand to SEQ ID NO: 260506
caucucacauaauugacau

SEQ ID NO: 260508 - RNA, 19 nt, Artificial Sequence
  Description of Artificial Sequence: Synthetic oligonucleotide
  Sense strand starting at position 2168 SEQ ID NO: 3352
acagauuuagcucguguuu

SEQ ID NO: 260509 - RNA, 19 nt, Artificial Sequence
  Description of Artificial Sequence: Synthetic oligonucleotide
  Antisense strand to SEQ ID NO: 260508
aaacacgagcuaaaucugu

SEQ ID NO: 260510 - RNA, 19 nt, Artificial Sequence
  Description of Artificial Sequence: Synthetic oligonucleotide
  Sense strand starting at position 2208 SEQ ID NO: 3352
ggaaauuaguaguccuuga

SEQ ID NO: 260511 - RNA, 19 nt, Artificial Sequence
  Description of Artificial Sequence: Synthetic oligonucleotide
  Antisense strand to SEQ ID NO: 260510
ucaaggacuacuaauuucc

SEQ ID NO: 260512 - RNA, 19 nt, Artificial Sequence
  Description of Artificial Sequence: Synthetic oligonucleotide
  Sense strand starting at position 2562 SEQ ID NO: 3352
guaauugucagugacuuag

SEQ ID NO: 260513 - RNA, 19 nt, Artificial Sequence
  Description of Artificial Sequence: Synthetic oligonucleotide
  Antisense strand to SEQ ID NO: 260512
cuaagucacugacaauuac

SEQ ID NO: 260514 - RNA, 19 nt, Artificial Sequence
  Description of Artificial Sequence: Synthetic oligonucleotide
  Sense strand starting at position 2572 SEQ ID NO: 3352
gugacuuagaacuaggcau

SEQ ID NO: 260515 - RNA, 19 nt, Artificial Sequence
  Description of Artificial Sequence: Synthetic oligonucleotide
  Antisense strand to SEQ ID NO: 260514
augccuaguucuaagucac

SEQ ID NO: 260516 - RNA, 19 nt, Artificial Sequence
  Description of Artificial Sequence: Synthetic oligonucleotide
  Sense strand starting at position 2596 SEQ ID NO: 3352
gguuuaacaacaggaaguu

SEQ ID NO: 260517 - RNA, 19 nt, Artificial Sequence
  Description of Artificial Sequence: Synthetic oligonucleotide
  Antisense strand to SEQ ID NO: 260516
aacuuccuguuguuaaacc

SEQ ID NO: 260518 - RNA, 19 nt, Artificial Sequence
  Description of Artificial Sequence: Synthetic oligonucleotide
  Sense strand starting at position 2614 SEQ ID NO: 3352
ugguucucucuggaagaug

SEQ ID NO: 260519 - RNA, 19 nt, Artificial Sequence
  Description of Artificial Sequence: Synthetic oligonucleotide
  Antisense strand to SEQ ID NO: 260518
caucuuccagagagaacca

SEQ ID NO: 260520 - RNA, 19 nt, Artificial Sequence
  Description of Artificial Sequence: Synthetic oligonucleotide
  Sense strand starting at position 2617 SEQ ID NO: 3352
uucucucuggaagauguau

SEQ ID NO: 260521 - RNA, 19 nt, Artificial Sequence
  Description of Artificial Sequence: Synthetic oligonucleotide
  Antisense strand to SEQ ID NO: 260520
auacaucuuccagagagaa

SEQ ID NO: 260522 - RNA, 19 nt, Artificial Sequence
  Description of Artificial Sequence: Synthetic oligonucleotide
  Sense strand starting at position 2628 SEQ ID NO: 3352
agauguauugacugguaac

SEQ ID NO: 260523 - RNA, 19 nt, Artificial Sequence
  Description of Artificial Sequence: Synthetic oligonucleotide
  Antisense strand to SEQ ID NO: 260522
guuaccagucaauacaucu

SEQ ID NO: 260524 - RNA, 19 nt, Artificial Sequence
  Description of Artificial Sequence: Synthetic oligonucleotide
  Sense strand starting at position 2680 SEQ ID NO: 3352
agaaccagcgucuacauau

SEQ ID NO: 260525 - RNA, 19 nt, Artificial Sequence
  Description of Artificial Sequence: Synthetic oligonucleotide
  Antisense strand to SEQ ID NO: 260524
auauguagacgcugguucu

SEQ ID NO: 260526 - RNA, 19 nt, Artificial Sequence
  Description of Artificial Sequence: Synthetic oligonucleotide
  Sense strand starting at position 2741 SEQ ID NO: 3352
uaugguaggcacuaaugua

SEQ ID NO: 260527 - RNA, 19 nt, Artificial Sequence
  Description of Artificial Sequence: Synthetic oligonucleotide
  Antisense strand to SEQ ID NO: 260526
uacauuagugccuaccaua

SEQ ID NO: 260528 - RNA, 19 nt, Artificial Sequence
  Description of Artificial Sequence: Synthetic oligonucleotide
  Sense strand starting at position 2748 SEQ ID NO: 3352
ggcacuaauguacaaguau

SEQ ID NO: 260529 - RNA, 19 nt, Artificial Sequence
  Description of Artificial Sequence: Synthetic oligonucleotide
  Antisense strand to SEQ ID NO: 260528
auacuuguacauuagugcc

SEQ ID NO: 260530 - RNA, 19 nt, Artificial Sequence
  Description of Artificial Sequence: Synthetic oligonucleotide
  Sense strand starting at position 2971 SEQ ID NO: 3352
ugcauuuguuuccuauaca

SEQ ID NO: 260531 - RNA, 19 nt, Artificial Sequence
  Description of Artificial Sequence: Synthetic oligonucleotide
  Antisense strand to SEQ ID NO: 260530
uguauaggaaacaaaugca

SEQ ID NO: 260532 - RNA, 19 nt, Artificial Sequence
  Description of Artificial Sequence: Synthetic oligonucleotide
  Sense strand starting at position 2994 SEQ ID NO: 3352
acacacauagccugaaguu

SEQ ID NO: 260533 - RNA, 19 nt, Artificial Sequence
  Description of Artificial Sequence: Synthetic oligonucleotide
  Antisense strand to SEQ ID NO: 260532
aacuucaggcuaugugugu

SEQ ID NO: 260534 - RNA, 19 nt, Artificial Sequence
  Description of Artificial Sequence: Synthetic oligonucleotide
  Sense strand starting at position 3251 SEQ ID NO: 3352
gaaggucagguauggaauu

SEQ ID NO: 260535 - RNA, 19 nt, Artificial Sequence
  Description of Artificial Sequence: Synthetic oligonucleotide
  Antisense strand to SEQ ID NO: 260534
aauuccauaccugaccuuc

SEQ ID NO: 260536 - RNA, 19 nt, Artificial Sequence
  Description of Artificial Sequence: Synthetic oligonucleotide
  Sense strand starting at position 3382 SEQ ID NO: 3352
ggacaagugacacguaaau

SEQ ID NO: 260537 - RNA, 19 nt, Artificial Sequence
  Description of Artificial Sequence: Synthetic oligonucleotide
  Antisense strand to SEQ ID NO: 260536
auuuacgugucacuugucc

SEQ ID NO: 260538 - RNA, 19 nt, Artificial Sequence
  Description of Artificial Sequence: Synthetic oligonucleotide
  Sense strand starting at position 3384 SEQ ID NO: 3352
acaagugacacguaaaugu

SEQ ID NO: 260539 - RNA, 19 nt, Artificial Sequence
  Description of Artificial Sequence: Synthetic oligonucleotide
  Antisense strand to SEQ ID NO: 260538
acauuuacgugucacuugu

SEQ ID NO: 260540 - RNA, 19 nt, Artificial Sequence
  Description of Artificial Sequence: Synthetic oligonucleotide
  Sense strand starting at position 3414 SEQ ID NO: 3352
gagagauggguugggucua

SEQ ID NO: 260541 - RNA, 19 nt, Artificial Sequence
  Description of Artificial Sequence: Synthetic oligonucleotide
  Antisense strand to SEQ ID NO: 260540
uagacccaacccaucucuc

SEQ ID NO: 260542 - RNA, 19 nt, Artificial Sequence
  Description of Artificial Sequence: Synthetic oligonucleotide
  Sense strand starting at position 3455 SEQ ID NO: 3352
ggccucuuggucuauagau

SEQ ID NO: 260543 - RNA, 19 nt, Artificial Sequence
  Description of Artificial Sequence: Synthetic oligonucleotide
  Antisense strand to SEQ ID NO: 260542
aucuauagaccaagaggcc

SEQ ID NO: 260544 - RNA, 19 nt, Artificial Sequence
  Description of Artificial Sequence: Synthetic oligonucleotide
  Sense strand starting at position 3520 SEQ ID NO: 3352
gugugauauuucccugagc

SEQ ID NO: 260545 - RNA, 19 nt, Artificial Sequence
  Description of Artificial Sequence: Synthetic oligonucleotide
  Antisense strand to SEQ ID NO: 260544
gcucagggaaauaucacac

SEQ ID NO: 260546 - RNA, 19 nt, Artificial Sequence
  Description of Artificial Sequence: Synthetic oligonucleotide
  Sense strand starting at position 3529 SEQ ID NO: 3352
uucccugagcuguaaauag

SEQ ID NO: 260547 - RNA, 19 nt, Artificial Sequence
  Description of Artificial Sequence: Synthetic oligonucleotide
  Antisense strand to SEQ ID NO: 260546
cuauuuacagcucagggaa

SEQ ID NO: 260548 - RNA, 19 nt, Artificial Sequence
  Description of Artificial Sequence: Synthetic oligonucleotide
  Sense strand starting at position 3539 SEQ ID NO: 3352
uguaaauagucaccuauag

SEQ ID NO: 260549 - RNA, 19 nt, Artificial Sequence
  Description of Artificial Sequence: Synthetic oligonucleotide
  Antisense strand to SEQ ID NO: 260548
cuauaggugacuauuuaca

SEQ ID NO: 260550 - RNA, 19 nt, Artificial Sequence
  Description of Artificial Sequence: Synthetic oligonucleotide
  Sense strand starting at position 3551 SEQ ID NO: 3352
ccuauaguugaauggaauc

SEQ ID NO: 260551 - RNA, 19 nt, Artificial Sequence
  Description of Artificial Sequence: Synthetic oligonucleotide
  Antisense strand to SEQ ID NO: 260550
gauuccauucaacuauagg

SEQ ID NO: 260552 - RNA, 19 nt, Artificial Sequence
  Description of Artificial Sequence: Synthetic oligonucleotide
  Sense strand starting at position 3741 SEQ ID NO: 3352
ggaccuuguucuuuaggga

SEQ ID NO: 260553 - RNA, 19 nt, Artificial Sequence
  Description of Artificial Sequence: Synthetic oligonucleotide
  Antisense strand to SEQ ID NO: 260552
ucccuaaagaacaaggucc

SEQ ID NO: 260554 - RNA, 19 nt, Artificial Sequence
  Description of Artificial Sequence: Synthetic oligonucleotide
  Sense strand starting at position 3742 SEQ ID NO: 3352
gaccuuguucuuuagggau

SEQ ID NO: 260555 - RNA, 19 nt, Artificial Sequence
  Description of Artificial Sequence: Synthetic oligonucleotide
  Antisense strand to SEQ ID NO: 260554
aucccuaaagaacaagguc

SEQ ID NO: 260556 - RNA, 19 nt, Artificial Sequence
  Description of Artificial Sequence: Synthetic oligonucleotide
  Sense strand starting at position 3956 SEQ ID NO: 3352
gagugaucuguuuaaaggc

SEQ ID NO: 260557 - RNA, 19 nt, Artificial Sequence
  Description of Artificial Sequence: Synthetic oligonucleotide
  Antisense strand to SEQ ID NO: 260556
gccuuuaaacagaucacuc

SEQ ID NO: 260558 - RNA, 19 nt, Artificial Sequence
  Description of Artificial Sequence: Synthetic oligonucleotide
  Sense strand starting at position 422 SEQ ID NO: 3350
ugugacuuacagcaacaua

SEQ ID NO: 260559 - RNA, 19 nt, Artificial Sequence
  Description of Artificial Sequence: Synthetic oligonucleotide
  Antisense strand to SEQ ID NO: 260558
uauguugcuguaagucaca

SEQ ID NO: 260560 - RNA, 19 nt, Artificial Sequence
  Description of Artificial Sequence: Synthetic oligonucleotide
  Sense strand starting at position 590 SEQ ID NO: 3350
auguaaagguaucugagaa

SEQ ID NO: 260561 - RNA, 19 nt, Artificial Sequence
  Description of Artificial Sequence: Synthetic oligonucleotide
  Antisense strand to SEQ ID NO: 260560
uucucagauaccuuuacau

SEQ ID NO: 260562 - RNA, 19 nt, Artificial Sequence
  Description of Artificial Sequence: Synthetic oligonucleotide
  Sense strand starting at position 649 SEQ ID NO: 3350
agcauauguaacggauaaa

SEQ ID NO: 260563 - RNA, 19 nt, Artificial Sequence
  Description of Artificial Sequence: Synthetic oligonucleotide
  Antisense strand to SEQ ID NO: 260562
uuuauccguuacauaugcu

SEQ ID NO: 260564 - RNA, 19 nt, Artificial Sequence
  Description of Artificial Sequence: Synthetic oligonucleotide
  Sense strand starting at position 650 SEQ ID NO: 3350
gcauauguaacggauaaau

SEQ ID NO: 260565 - RNA, 19 nt, Artificial Sequence
  Description of Artificial Sequence: Synthetic oligonucleotide
  Antisense strand to SEQ ID NO: 260564
auuuauccguuacauaugc

SEQ ID NO: 260566 - RNA, 19 nt, Artificial Sequence
  Description of Artificial Sequence: Synthetic oligonucleotide
  Sense strand starting at position 712 SEQ ID NO: 3350
agcuuaaugugacuccaaa

SEQ ID NO: 260567 - RNA, 19 nt, Artificial Sequence
  Description of Artificial Sequence: Synthetic oligonucleotide
  Antisense strand to SEQ ID NO: 260566
uuuggagucacauuaagcu

SEQ ID NO: 260568 - RNA, 19 nt, Artificial Sequence
  Description of Artificial Sequence: Synthetic oligonucleotide
  Sense strand starting at position 766 SEQ ID NO: 3350
agaagcagcuuguuaaaga

SEQ ID NO: 260569 - RNA, 19 nt, Artificial Sequence
  Description of Artificial Sequence: Synthetic oligonucleotide
  Antisense strand to SEQ ID NO: 260568
ucuuuaacaagcugcuucu

SEQ ID NO: 260570 - RNA, 19 nt, Artificial Sequence
  Description of Artificial Sequence: Synthetic oligonucleotide
  Sense strand starting at position 787 SEQ ID NO: 3350
acaggucaccagugaauua

SEQ ID NO: 260571 - RNA, 19 nt, Artificial Sequence
  Description of Artificial Sequence: Synthetic oligonucleotide
  Antisense strand to SEQ ID NO: 260570
uaauucacuggugaccugu

SEQ ID NO: 260572 - RNA, 19 nt, Artificial Sequence
  Description of Artificial Sequence: Synthetic oligonucleotide
  Sense strand starting at position 820 SEQ ID NO: 3350
auguauccuugggcaaauc

SEQ ID NO: 260573 - RNA, 19 nt, Artificial Sequence
  Description of Artificial Sequence: Synthetic oligonucleotide
  Antisense strand to SEQ ID NO: 260572
gauuugcccaaggauacau

SEQ ID NO: 260574 - RNA, 19 nt, Artificial Sequence
  Description of Artificial Sequence: Synthetic oligonucleotide
  Sense strand starting at position 923 SEQ ID NO: 3350
guguucuuuccauaauucu

SEQ ID NO: 260575 - RNA, 19 nt, Artificial Sequence
  Description of Artificial Sequence: Synthetic oligonucleotide
  Antisense strand to SEQ ID NO: 260574
agaauuauggaaagaacac

SEQ ID NO: 260576 - RNA, 19 nt, Artificial Sequence
  Description of Artificial Sequence: Synthetic oligonucleotide
  Sense strand starting at position 1077 SEQ ID NO: 3350
agccauuucggcuagcaau

SEQ ID NO: 260577 - RNA, 19 nt, Artificial Sequence
  Description of Artificial Sequence: Synthetic oligonucleotide
  Antisense strand to SEQ ID NO: 260576
auugcuagccgaaauggcu

SEQ ID NO: 260578 - RNA, 19 nt, Artificial Sequence
  Description of Artificial Sequence: Synthetic oligonucleotide
  Sense strand starting at position 1268 SEQ ID NO: 3350
gcauauuagcaaggaauga

SEQ ID NO: 260579 - RNA, 19 nt, Artificial Sequence
  Description of Artificial Sequence: Synthetic oligonucleotide
  Antisense strand to SEQ ID NO: 260578
ucauuccuugcuaauaugc

SEQ ID NO: 260580 - RNA, 19 nt, Artificial Sequence
  Description of Artificial Sequence: Synthetic oligonucleotide
  Sense strand starting at position 1863 SEQ ID NO: 3350
cuaguugcccgacaagaaa

SEQ ID NO: 260581 - RNA, 19 nt, Artificial Sequence
  Description of Artificial Sequence: Synthetic oligonucleotide
  Antisense strand to SEQ ID NO: 260580
uuucuugucgggcaacuag

SEQ ID NO: 260582 - RNA, 19 nt, Artificial Sequence
  Description of Artificial Sequence: Synthetic oligonucleotide
  Sense strand starting at position 2303 SEQ ID NO: 3350
guuaguuacacgggaagaa

SEQ ID NO: 260583 - RNA, 19 nt, Artificial Sequence
  Description of Artificial Sequence: Synthetic oligonucleotide
  Antisense strand to SEQ ID NO: 260582
uucuucccguguaacuaac

SEQ ID NO: 260584 - RNA, 19 nt, Artificial Sequence
  Description of Artificial Sequence: Synthetic oligonucleotide
  Sense strand starting at position 2463 SEQ ID NO: 3350
gugaaaucgacccaaucug

SEQ ID NO: 260585 - RNA, 19 nt, Artificial Sequence
  Description of Artificial Sequence: Synthetic oligonucleotide
  Antisense strand to SEQ ID NO: 260584
cagauugggucgauuucac

SEQ ID NO: 260586 - RNA, 19 nt, Artificial Sequence
  Description of Artificial Sequence: Synthetic oligonucleotide
  Sense strand starting at position 2496 SEQ ID NO: 3350
auuugagugucaguguuau

SEQ ID NO: 260587 - RNA, 19 nt, Artificial Sequence
  Description of Artificial Sequence: Synthetic oligonucleotide
  Antisense strand to SEQ ID NO: 260586
auaacacugacacucaaau

SEQ ID NO: 260588 - RNA, 19 nt, Artificial Sequence
  Description of Artificial Sequence: Synthetic oligonucleotide
  Sense strand starting at position 2504 SEQ ID NO: 3350
gucaguguuauuuacgcca

SEQ ID NO: 260589 - RNA, 19 nt, Artificial Sequence
  Description of Artificial Sequence: Synthetic oligonucleotide
  Antisense strand to SEQ ID NO: 260588
uggcguaaauaacacugac

SEQ ID NO: 260590 - RNA, 19 nt, Artificial Sequence
  Description of Artificial Sequence: Synthetic oligonucleotide
  Sense strand starting at position 2584 SEQ ID NO: 3350
gcagaugucaauuauguga

SEQ ID NO: 260591 - RNA, 19 nt, Artificial Sequence
  Description of Artificial Sequence: Synthetic oligonucleotide
  Antisense strand to SEQ ID NO: 260590
ucacauaauugacaucugc

SEQ ID NO: 260592 - RNA, 19 nt, Artificial Sequence
  Description of Artificial Sequence: Synthetic oligonucleotide
  Sense strand starting at position 2587 SEQ ID NO: 3350
gaugucaauuaugugagau

SEQ ID NO: 260593 - RNA, 19 nt, Artificial Sequence
  Description of Artificial Sequence: Synthetic oligonucleotide
  Antisense strand to SEQ ID NO: 260592
aucucacauaauugacauc

SEQ ID NO: 260594 - RNA, 19 nt, Artificial Sequence
  Description of Artificial Sequence: Synthetic oligonucleotide
  Sense strand starting at position 2588 SEQ ID NO: 3350
augucaauuaugugagaug

SEQ ID NO: 260595 - RNA, 19 nt, Artificial Sequence
  Description of Artificial Sequence: Synthetic oligonucleotide
  Antisense strand to SEQ ID NO: 260594
caucucacauaauugacau

SEQ ID NO: 260596 - RNA, 19 nt, Artificial Sequence
  Description of Artificial Sequence: Synthetic oligonucleotide
  Sense strand starting at position 2640 SEQ ID NO: 3350
acagauuuagcucguguuu

SEQ ID NO: 260597 - RNA, 19 nt, Artificial Sequence
  Description of Artificial Sequence: Synthetic oligonucleotide
  Antisense strand to SEQ ID NO: 260596
aaacacgagcuaaaucugu

SEQ ID NO: 260598 - RNA, 19 nt, Artificial Sequence
  Description of Artificial Sequence: Synthetic oligonucleotide
  Sense strand starting at position 2680 SEQ ID NO: 3350
ggaaauuaguaguccuuga

SEQ ID NO: 260599 - RNA, 19 nt, Artificial Sequence
  Description of Artificial Sequence: Synthetic oligonucleotide
  Antisense strand to SEQ ID NO: 260598
ucaaggacuacuaauuucc

SEQ ID NO: 260600 - RNA, 19 nt, Artificial Sequence
  Description of Artificial Sequence: Synthetic oligonucleotide
  Sense strand starting at position 2685 SEQ ID NO: 3350
uuaguaguccuugacaggu

SEQ ID NO: 260601 - RNA, 19 nt, Artificial Sequence
  Description of Artificial Sequence: Synthetic oligonucleotide
  Antisense strand to SEQ ID NO: 260600
accugucaaggacuacuaa

SEQ ID NO: 260602 - RNA, 19 nt, Artificial Sequence
  Description of Artificial Sequence: Synthetic oligonucleotide
  Sense strand starting at position 3020 SEQ ID NO: 3350
gggucucuagcugaguaau

SEQ ID NO: 260603 - RNA, 19 nt, Artificial Sequence
  Description of Artificial Sequence: Synthetic oligonucleotide
  Antisense strand to SEQ ID NO: 260602
auuacucagcuagagaccc

SEQ ID NO: 260604 - RNA, 19 nt, Artificial Sequence
  Description of Artificial Sequence: Synthetic oligonucleotide
  Sense strand starting at position 3034 SEQ ID NO: 3350
guaauugucagugacuuag

SEQ ID NO: 260605 - RNA, 19 nt, Artificial Sequence
  Description of Artificial Sequence: Synthetic oligonucleotide
  Antisense strand to SEQ ID NO: 260604
cuaagucacugacaauuac

SEQ ID NO: 260606 - RNA, 19 nt, Artificial Sequence
  Description of Artificial Sequence: Synthetic oligonucleotide
  Sense strand starting at position 3044 SEQ ID NO: 3350
gugacuuagaacuaggcau

SEQ ID NO: 260607 - RNA, 19 nt, Artificial Sequence
  Description of Artificial Sequence: Synthetic oligonucleotide
  Antisense strand to SEQ ID NO: 260606
augccuaguucuaagucac

SEQ ID NO: 260608 - RNA, 19 nt, Artificial Sequence
  Description of Artificial Sequence: Synthetic oligonucleotide
  Sense strand starting at position 3068 SEQ ID NO: 3350
gguuuaacaacaggaaguu

SEQ ID NO: 260609 - RNA, 19 nt, Artificial Sequence
  Description of Artificial Sequence: Synthetic oligonucleotide
  Antisense strand to SEQ ID NO: 260608
aacuuccuguuguuaaacc

SEQ ID NO: 260610 - RNA, 19 nt, Artificial Sequence
  Description of Artificial Sequence: Synthetic oligonucleotide
  Sense strand starting at position 3084 SEQ ID NO: 3350
guugguucucucuggaaga

SEQ ID NO: 260611 - RNA, 19 nt, Artificial Sequence
  Description of Artificial Sequence: Synthetic oligonucleotide
  Antisense strand to SEQ ID NO: 260610
ucuuccagagagaaccaac

SEQ ID NO: 260612 - RNA, 19 nt, Artificial Sequence
  Description of Artificial Sequence: Synthetic oligonucleotide
  Sense strand starting at position 3086 SEQ ID NO: 3350
ugguucucucuggaagaug

SEQ ID NO: 260613 - RNA, 19 nt, Artificial Sequence
  Description of Artificial Sequence: Synthetic oligonucleotide
  Antisense strand to SEQ ID NO: 260612
caucuuccagagagaacca

SEQ ID NO: 260614 - RNA, 19 nt, Artificial Sequence
  Description of Artificial Sequence: Synthetic oligonucleotide
  Sense strand starting at position 3089 SEQ ID NO: 3350
uucucucuggaagauguau

SEQ ID NO: 260615 - RNA, 19 nt, Artificial Sequence
  Description of Artificial Sequence: Synthetic oligonucleotide
  Antisense strand to SEQ ID NO: 260614
auacaucuuccagagagaa

SEQ ID NO: 260616 - RNA, 19 nt, Artificial Sequence
  Description of Artificial Sequence: Synthetic oligonucleotide
  Sense strand starting at position 3100 SEQ ID NO: 3350
agauguauugacugguaac

SEQ ID NO: 260617 - RNA, 19 nt, Artificial Sequence
  Description of Artificial Sequence: Synthetic oligonucleotide
  Antisense strand to SEQ ID NO: 260616
guuaccagucaauacaucu

SEQ ID NO: 260618 - RNA, 19 nt, Artificial Sequence
  Description of Artificial Sequence: Synthetic oligonucleotide
  Sense strand starting at position 3152 SEQ ID NO: 3350
agaaccagcgucuacauau

SEQ ID NO: 260619 - RNA, 19 nt, Artificial Sequence
  Description of Artificial Sequence: Synthetic oligonucleotide
  Antisense strand to SEQ ID NO: 260618
auauguagacgcugguucu

SEQ ID NO: 260620 - RNA, 19 nt, Artificial Sequence
  Description of Artificial Sequence: Synthetic oligonucleotide
  Sense strand starting at position 3213 SEQ ID NO: 3350
uaugguaggcacuaaugua

SEQ ID NO: 260621 - RNA, 19 nt, Artificial Sequence
  Description of Artificial Sequence: Synthetic oligonucleotide
  Antisense strand to SEQ ID NO: 260620
uacauuagugccuaccaua

SEQ ID NO: 260622 - RNA, 19 nt, Artificial Sequence
  Description of Artificial Sequence: Synthetic oligonucleotide
  Sense strand starting at position 3220 SEQ ID NO: 3350
ggcacuaauguacaaguau

SEQ ID NO: 260623 - RNA, 19 nt, Artificial Sequence
  Description of Artificial Sequence: Synthetic oligonucleotide
  Antisense strand to SEQ ID NO: 260622
auacuuguacauuagugcc

SEQ ID NO: 260624 - RNA, 19 nt, Artificial Sequence
  Description of Artificial Sequence: Synthetic oligonucleotide
  Sense strand starting at position 3443 SEQ ID NO: 3350
ugcauuuguuuccuauaca

SEQ ID NO: 260625 - RNA, 19 nt, Artificial Sequence
  Description of Artificial Sequence: Synthetic oligonucleotide
  Antisense strand to SEQ ID NO: 260624
uguauaggaaacaaaugca

SEQ ID NO: 260626 - RNA, 19 nt, Artificial Sequence
  Description of Artificial Sequence: Synthetic oligonucleotide
  Sense strand starting at position 3466 SEQ ID NO: 3350
acacacauagccugaaguu

SEQ ID NO: 260627 - RNA, 19 nt, Artificial Sequence
  Description of Artificial Sequence: Synthetic oligonucleotide
  Antisense strand to SEQ ID NO: 260626
aacuucaggcuaugugugu

SEQ ID NO: 260628 - RNA, 19 nt, Artificial Sequence
  Description of Artificial Sequence: Synthetic oligonucleotide
  Sense strand starting at position 3723 SEQ ID NO: 3350
gaaggucagguauggaauu

SEQ ID NO: 260629 - RNA, 19 nt, Artificial Sequence
  Description of Artificial Sequence: Synthetic oligonucleotide
  Antisense strand to SEQ ID NO: 260628
aauuccauaccugaccuuc

SEQ ID NO: 260630 - RNA, 19 nt, Artificial Sequence
  Description of Artificial Sequence: Synthetic oligonucleotide
  Sense strand starting at position 3854 SEQ ID NO: 3350
ggacaagugacacguaaau

SEQ ID NO: 260631 - RNA, 19 nt, Artificial Sequence
  Description of Artificial Sequence: Synthetic oligonucleotide
  Antisense strand to SEQ ID NO: 260630
auuuacgugucacuugucc

SEQ ID NO: 260632 - RNA, 19 nt, Artificial Sequence
  Description of Artificial Sequence: Synthetic oligonucleotide
  Sense strand starting at position 3856 SEQ ID NO: 3350
acaagugacacguaaaugu

SEQ ID NO: 260633 - RNA, 19 nt, Artificial Sequence
  Description of Artificial Sequence: Synthetic oligonucleotide
  Antisense strand to SEQ ID NO: 260632
acauuuacgugucacuugu

SEQ ID NO: 260634 - RNA, 19 nt, Artificial Sequence
  Description of Artificial Sequence: Synthetic oligonucleotide
  Sense strand starting at position 3886 SEQ ID NO: 3350
gagagauggguugggucua

SEQ ID NO: 260635 - RNA, 19 nt, Artificial Sequence
  Description of Artificial Sequence: Synthetic oligonucleotide
  Antisense strand to SEQ ID NO: 260634
uagacccaacccaucucuc

SEQ ID NO: 260636 - RNA, 19 nt, Artificial Sequence
  Description of Artificial Sequence: Synthetic oligonucleotide
  Sense strand starting at position 3927 SEQ ID NO: 3350
ggccucuuggucuauagau

SEQ ID NO: 260637 - RNA, 19 nt, Artificial Sequence
  Description of Artificial Sequence: Synthetic oligonucleotide
  Antisense strand to SEQ ID NO: 260636
aucuauagaccaagaggcc

SEQ ID NO: 260638 - RNA, 19 nt, Artificial Sequence
  Description of Artificial Sequence: Synthetic oligonucleotide
  Sense strand starting at position 677 SEQ ID NO: 3351
ugugacuuacagcaacaua

SEQ ID NO: 260639 - RNA, 19 nt, Artificial Sequence
  Description of Artificial Sequence: Synthetic oligonucleotide
  Antisense strand to SEQ ID NO: 260638
uauguugcuguaagucaca

SEQ ID NO: 260640 - RNA, 19 nt, Artificial Sequence
  Description of Artificial Sequence: Synthetic oligonucleotide
  Sense strand starting at position 753 SEQ ID NO: 3351
augaauaaaugagaugacu

SEQ ID NO: 260641 - RNA, 19 nt, Artificial Sequence
  Description of Artificial Sequence: Synthetic oligonucleotide
  Antisense strand to SEQ ID NO: 260640
agucaucucauuuauucau

SEQ ID NO: 260642 - RNA, 19 nt, Artificial Sequence
  Description of Artificial Sequence: Synthetic oligonucleotide
  Sense strand starting at position 845 SEQ ID NO: 3351
auguaaagguaucugagaa

SEQ ID NO: 260643 - RNA, 19 nt, Artificial Sequence
  Description of Artificial Sequence: Synthetic oligonucleotide
  Antisense strand to SEQ ID NO: 260642
uucucagauaccuuuacau

SEQ ID NO: 260644 - RNA, 19 nt, Artificial Sequence
  Description of Artificial Sequence: Synthetic oligonucleotide
  Sense strand starting at position 904 SEQ ID NO: 3351
agcauauguaacggauaaa

SEQ ID NO: 260645 - RNA, 19 nt, Artificial Sequence
  Description of Artificial Sequence: Synthetic oligonucleotide
  Antisense strand to SEQ ID NO: 260644
uuuauccguuacauaugcu

SEQ ID NO: 260646 - RNA, 19 nt, Artificial Sequence
  Description of Artificial Sequence: Synthetic oligonucleotide
  Sense strand starting at position 905 SEQ ID NO: 3351
gcauauguaacggauaaau

SEQ ID NO: 260647 - RNA, 19 nt, Artificial Sequence
  Description of Artificial Sequence: Synthetic oligonucleotide
  Antisense strand to SEQ ID NO: 260646
auuuauccguuacauaugc

SEQ ID NO: 260648 - RNA, 19 nt, Artificial Sequence
  Description of Artificial Sequence: Synthetic oligonucleotide
  Sense strand starting at position 967 SEQ ID NO: 3351
agcuuaaugugacuccaaa

SEQ ID NO: 260649 - RNA, 19 nt, Artificial Sequence
  Description of Artificial Sequence: Synthetic oligonucleotide
  Antisense strand to SEQ ID NO: 260648
uuuggagucacauuaagcu

SEQ ID NO: 260650 - RNA, 19 nt, Artificial Sequence
  Description of Artificial Sequence: Synthetic oligonucleotide
  Sense strand starting at position 1021 SEQ ID NO: 3351
agaagcagcuuguuaaaga

SEQ ID NO: 260651 - RNA, 19 nt, Artificial Sequence
  Description of Artificial Sequence: Synthetic oligonucleotide
  Antisense strand to SEQ ID NO: 260650
ucuuuaacaagcugcuucu

SEQ ID NO: 260652 - RNA, 19 nt, Artificial Sequence
  Description of Artificial Sequence: Synthetic oligonucleotide
  Sense strand starting at position 1042 SEQ ID NO: 3351
acaggucaccagugaauua

SEQ ID NO: 260653 - RNA, 19 nt, Artificial Sequence
  Description of Artificial Sequence: Synthetic oligonucleotide
  Antisense strand to SEQ ID NO: 260652
uaauucacuggugaccugu

SEQ ID NO: 260654 - RNA, 19 nt, Artificial Sequence
  Description of Artificial Sequence: Synthetic oligonucleotide
  Sense strand starting at position 1071 SEQ ID NO: 3351
gacuauguauccuugggca

SEQ ID NO: 260655 - RNA, 19 nt, Artificial Sequence
  Description of Artificial Sequence: Synthetic oligonucleotide
  Antisense strand to SEQ ID NO: 260654
ugcccaaggauacauaguc

SEQ ID NO: 260656 - RNA, 19 nt, Artificial Sequence
  Description of Artificial Sequence: Synthetic oligonucleotide
  Sense strand starting at position 1073 SEQ ID NO: 3351
cuauguauccuugggcaaa

SEQ ID NO: 260657 - RNA, 19 nt, Artificial Sequence
  Description of Artificial Sequence: Synthetic oligonucleotide
  Antisense strand to SEQ ID NO: 260656
uuugcccaaggauacauag

SEQ ID NO: 260658 - RNA, 19 nt, Artificial Sequence
  Description of Artificial Sequence: Synthetic oligonucleotide
  Sense strand starting at position 1075 SEQ ID NO: 3351
auguauccuugggcaaauc

SEQ ID NO: 260659 - RNA, 19 nt, Artificial Sequence
  Description of Artificial Sequence: Synthetic oligonucleotide
  Antisense strand to SEQ ID NO: 260658
gauuugcccaaggauacau

SEQ ID NO: 260660 - RNA, 19 nt, Artificial Sequence
  Description of Artificial Sequence: Synthetic oligonucleotide
  Sense strand starting at position 1178 SEQ ID NO: 3351
guguucuuuccauaauucu

SEQ ID NO: 260661 - RNA, 19 nt, Artificial Sequence
  Description of Artificial Sequence: Synthetic oligonucleotide
  Antisense strand to SEQ ID NO: 260660
agaauuauggaaagaacac

SEQ ID NO: 260662 - RNA, 19 nt, Artificial Sequence
  Description of Artificial Sequence: Synthetic oligonucleotide
  Sense strand starting at position 1332 SEQ ID NO: 3351
agccauuucggcuagcaau

SEQ ID NO: 260663 - RNA, 19 nt, Artificial Sequence
  Description of Artificial Sequence: Synthetic oligonucleotide
  Antisense strand to SEQ ID NO: 260662
auugcuagccgaaauggcu

SEQ ID NO: 260664 - RNA, 19 nt, Artificial Sequence
  Description of Artificial Sequence: Synthetic oligonucleotide
  Sense strand starting at position 1523 SEQ ID NO: 3351
gcauauuagcaaggaauga

SEQ ID NO: 260665 - RNA, 19 nt, Artificial Sequence
  Description of Artificial Sequence: Synthetic oligonucleotide
  Antisense strand to SEQ ID NO: 260664
ucauuccuugcuaauaugc

SEQ ID NO: 260666 - RNA, 19 nt, Artificial Sequence
  Description of Artificial Sequence: Synthetic oligonucleotide
  Sense strand starting at position 2118 SEQ ID NO: 3351
cuaguugcccgacaagaaa

SEQ ID NO: 260667 - RNA, 19 nt, Artificial Sequence
  Description of Artificial Sequence: Synthetic oligonucleotide
  Antisense strand to SEQ ID NO: 260666
uuucuugucgggcaacuag

SEQ ID NO: 260668 - RNA, 19 nt, Artificial Sequence
  Description of Artificial Sequence: Synthetic oligonucleotide
  Sense strand starting at position 2558 SEQ ID NO: 3351
guuaguuacacgggaagaa

SEQ ID NO: 260669 - RNA, 19 nt, Artificial Sequence
  Description of Artificial Sequence: Synthetic oligonucleotide
  Antisense strand to SEQ ID NO: 260668
uucuucccguguaacuaac

SEQ ID NO: 260670 - RNA, 19 nt, Artificial Sequence
  Description of Artificial Sequence: Synthetic oligonucleotide
  Sense strand starting at position 2718 SEQ ID NO: 3351
gugaaaucgacccaaucug

SEQ ID NO: 260671 - RNA, 19 nt, Artificial Sequence
  Description of Artificial Sequence: Synthetic oligonucleotide
  Antisense strand to SEQ ID NO: 260670
cagauugggucgauuucac

SEQ ID NO: 260672 - RNA, 19 nt, Artificial Sequence
  Description of Artificial Sequence: Synthetic oligonucleotide
  Sense strand starting at position 2751 SEQ ID NO: 3351
auuugagugucaguguuau

SEQ ID NO: 260673 - RNA, 19 nt, Artificial Sequence
  Description of Artificial Sequence: Synthetic oligonucleotide
  Antisense strand to SEQ ID NO: 260672
auaacacugacacucaaau

SEQ ID NO: 260674 - RNA, 19 nt, Artificial Sequence
  Description of Artificial Sequence: Synthetic oligonucleotide
  Sense strand starting at position 2759 SEQ ID NO: 3351
gucaguguuauuuacgcca

SEQ ID NO: 260675 - RNA, 19 nt, Artificial Sequence
  Description of Artificial Sequence: Synthetic oligonucleotide
  Antisense strand to SEQ ID NO: 260674
uggcguaaauaacacugac

SEQ ID NO: 260676 - RNA, 19 nt, Artificial Sequence
  Description of Artificial Sequence: Synthetic oligonucleotide
  Sense strand starting at position 2839 SEQ ID NO: 3351
gcagaugucaauuauguga

SEQ ID NO: 260677 - RNA, 19 nt, Artificial Sequence
  Description of Artificial Sequence: Synthetic oligonucleotide
  Antisense strand to SEQ ID NO: 260676
ucacauaauugacaucugc

SEQ ID NO: 260678 - RNA, 19 nt, Artificial Sequence
  Description of Artificial Sequence: Synthetic oligonucleotide
  Sense strand starting at position 2842 SEQ ID NO: 3351
gaugucaauuaugugagau

SEQ ID NO: 260679 - RNA, 19 nt, Artificial Sequence
  Description of Artificial Sequence: Synthetic oligonucleotide
  Antisense strand to SEQ ID NO: 260678
aucucacauaauugacauc

SEQ ID NO: 260680 - RNA, 19 nt, Artificial Sequence
  Description of Artificial Sequence: Synthetic oligonucleotide
  Sense strand starting at position 2843 SEQ ID NO: 3351
augucaauuaugugagaug

SEQ ID NO: 260681 - RNA, 19 nt, Artificial Sequence
  Description of Artificial Sequence: Synthetic oligonucleotide
  Antisense strand to SEQ ID NO: 260680
caucucacauaauugacau

SEQ ID NO: 260682 - RNA, 19 nt, Artificial Sequence
  Description of Artificial Sequence: Synthetic oligonucleotide
  Sense strand starting at position 2895 SEQ ID NO: 3351
acagauuuagcucguguuu

SEQ ID NO: 260683 - RNA, 19 nt, Artificial Sequence
  Description of Artificial Sequence: Synthetic oligonucleotide
  Antisense strand to SEQ ID NO: 260682
aaacacgagcuaaaucugu

SEQ ID NO: 260684 - RNA, 19 nt, Artificial Sequence
  Description of Artificial Sequence: Synthetic oligonucleotide
  Sense strand starting at position 2935 SEQ ID NO: 3351
ggaaauuaguaguccuuga

SEQ ID NO: 260685 - RNA, 19 nt, Artificial Sequence
  Description of Artificial Sequence: Synthetic oligonucleotide
  Antisense strand to SEQ ID NO: 260684
ucaaggacuacuaauuucc

SEQ ID NO: 260686 - RNA, 19 nt, Artificial Sequence
  Description of Artificial Sequence: Synthetic oligonucleotide
  Sense strand starting at position 2940 SEQ ID NO: 3351
uuaguaguccuugacaggu

SEQ ID NO: 260687 - RNA, 19 nt, Artificial Sequence
  Description of Artificial Sequence: Synthetic oligonucleotide
  Antisense strand to SEQ ID NO: 260686
accugucaaggacuacuaa

SEQ ID NO: 260688 - RNA, 19 nt, Artificial Sequence
  Description of Artificial Sequence: Synthetic oligonucleotide
  Sense strand starting at position 3275 SEQ ID NO: 3351
gggucucuagcugaguaau

SEQ ID NO: 260689 - RNA, 19 nt, Artificial Sequence
  Description of Artificial Sequence: Synthetic oligonucleotide
  Antisense strand to SEQ ID NO: 260688
auuacucagcuagagaccc

SEQ ID NO: 260690 - RNA, 19 nt, Artificial Sequence
  Description of Artificial Sequence: Synthetic oligonucleotide
  Sense strand starting at position 3288 SEQ ID NO: 3351
aguaauugucagugacuua

SEQ ID NO: 260691 - RNA, 19 nt, Artificial Sequence
  Description of Artificial Sequence: Synthetic oligonucleotide
  Antisense strand to SEQ ID NO: 260690
uaagucacugacaauuacu

SEQ ID NO: 260692 - RNA, 19 nt, Artificial Sequence
  Description of Artificial Sequence: Synthetic oligonucleotide
  Sense strand starting at position 3289 SEQ ID NO: 3351
guaauugucagugacuuag

SEQ ID NO: 260693 - RNA, 19 nt, Artificial Sequence
  Description of Artificial Sequence: Synthetic oligonucleotide
  Antisense strand to SEQ ID NO: 260692
cuaagucacugacaauuac

SEQ ID NO: 260694 - RNA, 19 nt, Artificial Sequence
  Description of Artificial Sequence: Synthetic oligonucleotide
  Sense strand starting at position 3299 SEQ ID NO: 3351
gugacuuagaacuaggcau

SEQ ID NO: 260695 - RNA, 19 nt, Artificial Sequence
  Description of Artificial Sequence: Synthetic oligonucleotide
  Antisense strand to SEQ ID NO: 260694
augccuaguucuaagucac

SEQ ID NO: 260696 - RNA, 19 nt, Artificial Sequence
  Description of Artificial Sequence: Synthetic oligonucleotide
  Sense strand starting at position 3323 SEQ ID NO: 3351
gguuuaacaacaggaaguu

SEQ ID NO: 260697 - RNA, 19 nt, Artificial Sequence
  Description of Artificial Sequence: Synthetic oligonucleotide
  Antisense strand to SEQ ID NO: 260696
aacuuccuguuguuaaacc

SEQ ID NO: 260698 - RNA, 19 nt, Artificial Sequence
  Description of Artificial Sequence: Synthetic oligonucleotide
  Sense strand starting at position 3339 SEQ ID NO: 3351
guugguucucucuggaaga

SEQ ID NO: 260699 - RNA, 19 nt, Artificial Sequence
  Description of Artificial Sequence: Synthetic oligonucleotide
  Antisense strand to SEQ ID NO: 260698
ucuuccagagagaaccaac

SEQ ID NO: 260700 - RNA, 19 nt, Artificial Sequence
  Description of Artificial Sequence: Synthetic oligonucleotide
  Sense strand starting at position 3341 SEQ ID NO: 3351
ugguucucucuggaagaug

SEQ ID NO: 260701 - RNA, 19 nt, Artificial Sequence
  Description of Artificial Sequence: Synthetic oligonucleotide
  Antisense strand to SEQ ID NO: 260700
caucuuccagagagaacca

SEQ ID NO: 260702 - RNA, 19 nt, Artificial Sequence
  Description of Artificial Sequence: Synthetic oligonucleotide
  Sense strand starting at position 3344 SEQ ID NO: 3351
uucucucuggaagauguau

SEQ ID NO: 260703 - RNA, 19 nt, Artificial Sequence
  Description of Artificial Sequence: Synthetic oligonucleotide
  Antisense strand to SEQ ID NO: 260702
auacaucuuccagagagaa

SEQ ID NO: 260704 - RNA, 19 nt, Artificial Sequence
  Description of Artificial Sequence: Synthetic oligonucleotide
  Sense strand starting at position 3355 SEQ ID NO: 3351
agauguauugacugguaac

SEQ ID NO: 260705 - RNA, 19 nt, Artificial Sequence
  Description of Artificial Sequence: Synthetic oligonucleotide
  Antisense strand to SEQ ID NO: 260704
guuaccagucaauacaucu

SEQ ID NO: 260706 - RNA, 19 nt, Artificial Sequence
  Description of Artificial Sequence: Synthetic oligonucleotide
  Sense strand starting at position 3407 SEQ ID NO: 3351
agaaccagcgucuacauau

SEQ ID NO: 260707 - RNA, 19 nt, Artificial Sequence
  Description of Artificial Sequence: Synthetic oligonucleotide
  Antisense strand to SEQ ID NO: 260706
auauguagacgcugguucu

SEQ ID NO: 260708 - RNA, 19 nt, Artificial Sequence
  Description of Artificial Sequence: Synthetic oligonucleotide
  Sense strand starting at position 3468 SEQ ID NO: 3351
uaugguaggcacuaaugua

SEQ ID NO: 260709 - RNA, 19 nt, Artificial Sequence
  Description of Artificial Sequence: Synthetic oligonucleotide
  Antisense strand to SEQ ID NO: 260708
uacauuagugccuaccaua

SEQ ID NO: 260710 - RNA, 19 nt, Artificial Sequence
  Description of Artificial Sequence: Synthetic oligonucleotide
  Sense strand starting at position 3475 SEQ ID NO: 3351
ggcacuaauguacaaguau

SEQ ID NO: 260711 - RNA, 19 nt, Artificial Sequence
  Description of Artificial Sequence: Synthetic oligonucleotide
  Antisense strand to SEQ ID NO: 260710
auacuuguacauuagugcc

SEQ ID NO: 260712 - RNA, 19 nt, Artificial Sequence
  Description of Artificial Sequence: Synthetic oligonucleotide
  Sense strand starting at position 3698 SEQ ID NO: 3351
ugcauuuguuuccuauaca

SEQ ID NO: 260713 - RNA, 19 nt, Artificial Sequence
  Description of Artificial Sequence: Synthetic oligonucleotide
  Antisense strand to SEQ ID NO: 260712
uguauaggaaacaaaugca

SEQ ID NO: 260714 - RNA, 19 nt, Artificial Sequence
  Description of Artificial Sequence: Synthetic oligonucleotide
  Sense strand starting at position 3721 SEQ ID NO: 3351
acacacauagccugaaguu

SEQ ID NO: 260715 - RNA, 19 nt, Artificial Sequence
  Description of Artificial Sequence: Synthetic oligonucleotide
  Antisense strand to SEQ ID NO: 260714
aacuucaggcuaugugugu

SEQ ID NO: 260716 - RNA, 19 nt, Artificial Sequence
  Description of Artificial Sequence: Synthetic oligonucleotide
  Sense strand starting at position 3978 SEQ ID NO: 3351
gaaggucagguauggaauu

SEQ ID NO: 260717 - RNA, 19 nt, Artificial Sequence
  Description of Artificial Sequence: Synthetic oligonucleotide
  Antisense strand to SEQ ID NO: 260716
aauuccauaccugaccuuc

SEQ ID NO: 260718 - RNA, 19 nt, Artificial Sequence
  Description of Artificial Sequence: Synthetic oligonucleotide
  Sense strand starting at position 2 SEQ ID NO: 3353
cuaucagagauguguugaa

SEQ ID NO: 260719 - RNA, 19 nt, Artificial Sequence
  Description of Artificial Sequence: Synthetic oligonucleotide
  Antisense strand to SEQ ID NO: 260718
uucaacacaucucugauag

SEQ ID NO: 260720 - RNA, 19 nt, Artificial Sequence
  Description of Artificial Sequence: Synthetic oligonucleotide
  Sense strand starting at position 15 SEQ ID NO: 3353
guugaaugaucgguuagga

SEQ ID NO: 260721 - RNA, 19 nt, Artificial Sequence
  Description of Artificial Sequence: Synthetic oligonucleotide
  Antisense strand to SEQ ID NO: 260720
uccuaaccgaucauucaac

SEQ ID NO: 260722 - RNA, 19 nt, Artificial Sequence
  Description of Artificial Sequence: Synthetic oligonucleotide
  Sense strand starting at position 67 SEQ ID NO: 3353
caguuuagugguuaaagca

SEQ ID NO: 260723 - RNA, 19 nt, Artificial Sequence
  Description of Artificial Sequence: Synthetic oligonucleotide
  Antisense strand to SEQ ID NO: 260722
ugcuuuaaccacuaaacug

SEQ ID NO: 260724 - RNA, 19 nt, Artificial Sequence
  Description of Artificial Sequence: Synthetic oligonucleotide
  Sense strand starting at position 84 SEQ ID NO: 3353
cagacacuuugggcagaau

SEQ ID NO: 260725 - RNA, 19 nt, Artificial Sequence
  Description of Artificial Sequence: Synthetic oligonucleotide
  Antisense strand to SEQ ID NO: 260724
auucugcccaaagugucug

SEQ ID NO: 260726 - RNA, 19 nt, Artificial Sequence
  Description of Artificial Sequence: Synthetic oligonucleotide
  Sense strand starting at position 186 SEQ ID NO: 3353
guaccaggaguguaggaau

SEQ ID NO: 260727 - RNA, 19 nt, Artificial Sequence
  Description of Artificial Sequence: Synthetic oligonucleotide
  Antisense strand to SEQ ID NO: 260726
auuccuacacuccugguac

SEQ ID NO: 260728 - RNA, 19 nt, Artificial Sequence
  Description of Artificial Sequence: Synthetic oligonucleotide
  Sense strand starting at position 221 SEQ ID NO: 3353
ggauguugugaagauugcu

SEQ ID NO: 260729 - RNA, 19 nt, Artificial Sequence
  Description of Artificial Sequence: Synthetic oligonucleotide
  Antisense strand to SEQ ID NO: 260728
agcaaucuucacaacaucc

SEQ ID NO: 260730 - RNA, 19 nt, Artificial Sequence
  Description of Artificial Sequence: Synthetic oligonucleotide
  Sense strand starting at position 230 SEQ ID NO: 3353
gaagauugcuaguuaaucg

SEQ ID NO: 260731 - RNA, 19 nt, Artificial Sequence
  Description of Artificial Sequence: Synthetic oligonucleotide
  Antisense strand to SEQ ID NO: 260730
cgauuaacuagcaaucuuc

SEQ ID NO: 260732 - RNA, 19 nt, Artificial Sequence
  Description of Artificial Sequence: Synthetic oligonucleotide
  Sense strand starting at position 239 SEQ ID NO: 3353
uaguuaaucguggauguug

SEQ ID NO: 260733 - RNA, 19 nt, Artificial Sequence
  Description of Artificial Sequence: Synthetic oligonucleotide
  Antisense strand to SEQ ID NO: 260732
caacauccacgauuaacua

SEQ ID NO: 260734 - RNA, 19 nt, Artificial Sequence
  Description of Artificial Sequence: Synthetic oligonucleotide
  Sense strand starting at position 248 SEQ ID NO: 3353
guggauguugcuuagaaca

SEQ ID NO: 260735 - RNA, 19 nt, Artificial Sequence
  Description of Artificial Sequence: Synthetic oligonucleotide
  Antisense strand to SEQ ID NO: 260734
uguucuaagcaacauccac

SEQ ID NO: 260736 - RNA, 19 nt, Artificial Sequence
  Description of Artificial Sequence: Synthetic oligonucleotide
  Sense strand starting at position 293 SEQ ID NO: 3353
uaaggucguguguuguuau

SEQ ID NO: 260737 - RNA, 19 nt, Artificial Sequence
  Description of Artificial Sequence: Synthetic oligonucleotide
  Antisense strand to SEQ ID NO: 260736
auaacaacacacgaccuua

SEQ ID NO: 260738 - RNA, 19 nt, Artificial Sequence
  Description of Artificial Sequence: Synthetic oligonucleotide
  Sense strand starting at position 318 SEQ ID NO: 3353
ggugcuuugauccagagca

SEQ ID NO: 260739 - RNA, 19 nt, Artificial Sequence
  Description of Artificial Sequence: Synthetic oligonucleotide
  Antisense strand to SEQ ID NO: 260738
ugcucuggaucaaagcacc

SEQ ID NO: 260740 - RNA, 19 nt, Artificial Sequence
  Description of Artificial Sequence: Synthetic oligonucleotide
  Sense strand starting at position 320 SEQ ID NO: 3353
ugcuuugauccagagcaac

SEQ ID NO: 260741 - RNA, 19 nt, Artificial Sequence
  Description of Artificial Sequence: Synthetic oligonucleotide
  Antisense strand to SEQ ID NO: 260740
guugcucuggaucaaagca

SEQ ID NO: 260742 - RNA, 19 nt, Artificial Sequence
  Description of Artificial Sequence: Synthetic oligonucleotide
  Sense strand starting at position 352 SEQ ID NO: 3353
guagucugugaggacuuaa

SEQ ID NO: 260743 - RNA, 19 nt, Artificial Sequence
  Description of Artificial Sequence: Synthetic oligonucleotide
  Antisense strand to SEQ ID NO: 260742
uuaaguccucacagacuac

SEQ ID NO: 260744 - RNA, 19 nt, Artificial Sequence
  Description of Artificial Sequence: Synthetic oligonucleotide
  Sense strand starting at position 408 SEQ ID NO: 3353
gguaaauucuaccuagcag

SEQ ID NO: 260745 - RNA, 19 nt, Artificial Sequence
  Description of Artificial Sequence: Synthetic oligonucleotide
  Antisense strand to SEQ ID NO: 260744
cugcuagguagaauuuacc

SEQ ID NO: 260746 - RNA, 19 nt, Artificial Sequence
  Description of Artificial Sequence: Synthetic oligonucleotide
  Sense strand starting at position 431 SEQ ID NO: 3353
ggagagucacucggagagu

SEQ ID NO: 260747 - RNA, 19 nt, Artificial Sequence
  Description of Artificial Sequence: Synthetic oligonucleotide
  Antisense strand to SEQ ID NO: 260746
acucuccgagugacucucc

SEQ ID NO: 260748 - RNA, 19 nt, Artificial Sequence
  Description of Artificial Sequence: Synthetic oligonucleotide
  Sense strand starting at position 440 SEQ ID NO: 3353
cucggagaguucuuaagag

SEQ ID NO: 260749 - RNA, 19 nt, Artificial Sequence
  Description of Artificial Sequence: Synthetic oligonucleotide
  Antisense strand to SEQ ID NO: 260748
cucuuaagaacucuccgag

SEQ ID NO: 260750 - RNA, 19 nt, Artificial Sequence
  Description of Artificial Sequence: Synthetic oligonucleotide
  Sense strand starting at position 886 SEQ ID NO: 3353
uuagaagcuucuccaguga

SEQ ID NO: 260751 - RNA, 19 nt, Artificial Sequence
  Description of Artificial Sequence: Synthetic oligonucleotide
  Antisense strand to SEQ ID NO: 260750
ucacuggagaagcuucuaa

SEQ ID NO: 260752 - RNA, 19 nt, Artificial Sequence
  Description of Artificial Sequence: Synthetic oligonucleotide
  Sense strand starting at position 899 SEQ ID NO: 3353
cagugauucucaucuagag

SEQ ID NO: 260753 - RNA, 19 nt, Artificial Sequence
  Description of Artificial Sequence: Synthetic oligonucleotide
  Antisense strand to SEQ ID NO: 260752
cucuagaugagaaucacug

SEQ ID NO: 260754 - RNA, 19 nt, Artificial Sequence
  Description of Artificial Sequence: Synthetic oligonucleotide
  Sense strand starting at position 987 SEQ ID NO: 3353
augcaaugggcuuauuacu

SEQ ID NO: 260755 - RNA, 19 nt, Artificial Sequence
  Description of Artificial Sequence: Synthetic oligonucleotide
  Antisense strand to SEQ ID NO: 260754
aguaauaagcccauugcau

SEQ ID NO: 260756 - RNA, 19 nt, Artificial Sequence
  Description of Artificial Sequence: Synthetic oligonucleotide
  Sense strand starting at position 1046 SEQ ID NO: 3353
gcauacacaugaucuuagu

SEQ ID NO: 260757 - RNA, 19 nt, Artificial Sequence
  Description of Artificial Sequence: Synthetic oligonucleotide
  Antisense strand to SEQ ID NO: 260756
acuaagaucauguguaugc

SEQ ID NO: 260758 - RNA, 19 nt, Artificial Sequence
  Description of Artificial Sequence: Synthetic oligonucleotide
  Sense strand starting at position 1327 SEQ ID NO: 3353
ugcagccuucuuuacagaa

SEQ ID NO: 260759 - RNA, 19 nt, Artificial Sequence
  Description of Artificial Sequence: Synthetic oligonucleotide
  Antisense strand to SEQ ID NO: 260758
uucuguaaagaaggcugca

SEQ ID NO: 260760 - RNA, 19 nt, Artificial Sequence
  Description of Artificial Sequence: Synthetic oligonucleotide
  Sense strand starting at position 1354 SEQ ID NO: 3353
cuaugcauccaggaaaucu

SEQ ID NO: 260761 - RNA, 19 nt, Artificial Sequence
  Description of Artificial Sequence: Synthetic oligonucleotide
  Antisense strand to SEQ ID NO: 260760
agauuuccuggaugcauag

SEQ ID NO: 260762 - RNA, 19 nt, Artificial Sequence
  Description of Artificial Sequence: Synthetic oligonucleotide
  Sense strand starting at position 1475 SEQ ID NO: 3353
gaaucaacaguucgagaaa

SEQ ID NO: 260763 - RNA, 19 nt, Artificial Sequence
  Description of Artificial Sequence: Synthetic oligonucleotide
  Antisense strand to SEQ ID NO: 260762
uuucucgaacuguugauuc

SEQ ID NO: 260764 - RNA, 19 nt, Artificial Sequence
  Description of Artificial Sequence: Synthetic oligonucleotide
  Sense strand starting at position 1478 SEQ ID NO: 3353
ucaacaguucgagaaacga

SEQ ID NO: 260765 - RNA, 19 nt, Artificial Sequence
  Description of Artificial Sequence: Synthetic oligonucleotide
  Antisense strand to SEQ ID NO: 260764
ucguuucucgaacuguuga

SEQ ID NO: 260766 - RNA, 19 nt, Artificial Sequence
  Description of Artificial Sequence: Synthetic oligonucleotide
  Sense strand starting at position 1580 SEQ ID NO: 3353
caucgagcuguauccguau

SEQ ID NO: 260767 - RNA, 19 nt, Artificial Sequence
  Description of Artificial Sequence: Synthetic oligonucleotide
  Antisense strand to SEQ ID NO: 260766
auacggauacagcucgaug

SEQ ID NO: 260768 - RNA, 19 nt, Artificial Sequence
  Description of Artificial Sequence: Synthetic oligonucleotide
  Sense strand starting at position 1683 SEQ ID NO: 3353
ugagguucucgugaggaaa

SEQ ID NO: 260769 - RNA, 19 nt, Artificial Sequence
  Description of Artificial Sequence: Synthetic oligonucleotide
  Antisense strand to SEQ ID NO: 260768
uuuccucacgagaaccuca

SEQ ID NO: 260770 - RNA, 19 nt, Artificial Sequence
  Description of Artificial Sequence: Synthetic oligonucleotide
  Sense strand starting at position 2361 SEQ ID NO: 3353
ccaggaucugaccauuguu

SEQ ID NO: 260771 - RNA, 19 nt, Artificial Sequence
  Description of Artificial Sequence: Synthetic oligonucleotide
  Antisense strand to SEQ ID NO: 260770
aacaauggucagauccugg

SEQ ID NO: 260772 - RNA, 19 nt, Artificial Sequence
  Description of Artificial Sequence: Synthetic oligonucleotide
  Sense strand starting at position 2826 SEQ ID NO: 3353
cuuuauaggaguugucuag

SEQ ID NO: 260773 - RNA, 19 nt, Artificial Sequence
  Description of Artificial Sequence: Synthetic oligonucleotide
  Antisense strand to SEQ ID NO: 260772
cuagacaacuccuauaaag

SEQ ID NO: 260774 - RNA, 19 nt, Artificial Sequence
  Description of Artificial Sequence: Synthetic oligonucleotide
  Sense strand starting at position 2830 SEQ ID NO: 3353
auaggaguugucuagguaa

SEQ ID NO: 260775 - RNA, 19 nt, Artificial Sequence
  Description of Artificial Sequence: Synthetic oligonucleotide
  Antisense strand to SEQ ID NO: 260774
uuaccuagacaacuccuau

SEQ ID NO: 260776 - RNA, 19 nt, Artificial Sequence
  Description of Artificial Sequence: Synthetic oligonucleotide
  Sense strand starting at position 2832 SEQ ID NO: 3353
aggaguugucuagguaaug

SEQ ID NO: 260777 - RNA, 19 nt, Artificial Sequence
  Description of Artificial Sequence: Synthetic oligonucleotide
  Antisense strand to SEQ ID NO: 260776
cauuaccuagacaacuccu

SEQ ID NO: 260778 - RNA, 19 nt, Artificial Sequence
  Description of Artificial Sequence: Synthetic oligonucleotide
  Sense strand starting at position 2833 SEQ ID NO: 3353
ggaguugucuagguaaugg

SEQ ID NO: 260779 - RNA, 19 nt, Artificial Sequence
  Description of Artificial Sequence: Synthetic oligonucleotide
  Antisense strand to SEQ ID NO: 260778
ccauuaccuagacaacucc

SEQ ID NO: 260780 - RNA, 19 nt, Artificial Sequence
  Description of Artificial Sequence: Synthetic oligonucleotide
  Sense strand starting at position 2860 SEQ ID NO: 3353
aguagaaggugguuaucua

SEQ ID NO: 260781 - RNA, 19 nt, Artificial Sequence
  Description of Artificial Sequence: Synthetic oligonucleotide
  Antisense strand to SEQ ID NO: 260780
uagauaaccaccuucuacu

SEQ ID NO: 260782 - RNA, 19 nt, Artificial Sequence
  Description of Artificial Sequence: Synthetic oligonucleotide
  Sense strand starting at position 2861 SEQ ID NO: 3353
guagaaggugguuaucuau

SEQ ID NO: 260783 - RNA, 19 nt, Artificial Sequence
  Description of Artificial Sequence: Synthetic oligonucleotide
  Antisense strand to SEQ ID NO: 260782
auagauaaccaccuucuac

SEQ ID NO: 260784 - RNA, 19 nt, Artificial Sequence
  Description of Artificial Sequence: Synthetic oligonucleotide
  Sense strand starting at position 3306 SEQ ID NO: 3353
cagggaagugucugaagaa

SEQ ID NO: 260785 - RNA, 19 nt, Artificial Sequence
  Description of Artificial Sequence: Synthetic oligonucleotide
  Antisense strand to SEQ ID NO: 260784
uucuucagacacuucccug

SEQ ID NO: 260786 - RNA, 19 nt, Artificial Sequence
  Description of Artificial Sequence: Synthetic oligonucleotide
  Sense strand starting at position 3331 SEQ ID NO: 3353
uuacuugagcuguagccaa

SEQ ID NO: 260787 - RNA, 19 nt, Artificial Sequence
  Description of Artificial Sequence: Synthetic oligonucleotide
  Antisense strand to SEQ ID NO: 260786
uuggcuacagcucaaguaa

SEQ ID NO: 260788 - RNA, 19 nt, Artificial Sequence
  Description of Artificial Sequence: Synthetic oligonucleotide
  Sense strand starting at position 3352 SEQ ID NO: 3353
cuaguuaacccaggaguca

SEQ ID NO: 260789 - RNA, 19 nt, Artificial Sequence
  Description of Artificial Sequence: Synthetic oligonucleotide
  Antisense strand to SEQ ID NO: 260788
ugacuccuggguuaacuag

SEQ ID NO: 260790 - RNA, 19 nt, Artificial Sequence
  Description of Artificial Sequence: Synthetic oligonucleotide
  Sense strand starting at position 3353 SEQ ID NO: 3353
uaguuaacccaggagucau

SEQ ID NO: 260791 - RNA, 19 nt, Artificial Sequence
  Description of Artificial Sequence: Synthetic oligonucleotide
  Antisense strand to SEQ ID NO: 260790
augacuccuggguuaacua

SEQ ID NO: 260792 - RNA, 19 nt, Artificial Sequence
  Description of Artificial Sequence: Synthetic oligonucleotide
  Sense strand starting at position 3363 SEQ ID NO: 3353
aggagucauccgggcaaag

SEQ ID NO: 260793 - RNA, 19 nt, Artificial Sequence
  Description of Artificial Sequence: Synthetic oligonucleotide
  Antisense strand to SEQ ID NO: 260792
cuuugcccggaugacuccu

SEQ ID NO: 260794 - RNA, 19 nt, Artificial Sequence
  Description of Artificial Sequence: Synthetic oligonucleotide
  Sense strand starting at position 3512 SEQ ID NO: 3353
ugaguuaggguucaaguuu

SEQ ID NO: 260795 - RNA, 19 nt, Artificial Sequence
  Description of Artificial Sequence: Synthetic oligonucleotide
  Antisense strand to SEQ ID NO: 260794
aaacuugaacccuaacuca

SEQ ID NO: 260796 - RNA, 19 nt, Artificial Sequence
  Description of Artificial Sequence: Synthetic oligonucleotide
  Sense strand starting at position 3579 SEQ ID NO: 3353
cuaaauggauggcuagauu

SEQ ID NO: 260797 - RNA, 19 nt, Artificial Sequence
  Description of Artificial Sequence: Synthetic oligonucleotide
  Antisense strand to SEQ ID NO: 260796
aaucuagccauccauuuag

SEQ ID NO: 260798 - RNA, 19 nt, Artificial Sequence
  Description of Artificial Sequence: Synthetic oligonucleotide
  Sense strand starting at position 6 SEQ ID NO: 3354
aguguuagauuggcauucu

SEQ ID NO: 260799 - RNA, 19 nt, Artificial Sequence
  Description of Artificial Sequence: Synthetic oligonucleotide
  Antisense strand to SEQ ID NO: 260798
agaaugccaaucuaacacu

SEQ ID NO: 260800 - RNA, 19 nt, Artificial Sequence
  Description of Artificial Sequence: Synthetic oligonucleotide
  Sense strand starting at position 7 SEQ ID NO: 3354
guguuagauuggcauucuc

SEQ ID NO: 260801 - RNA, 19 nt, Artificial Sequence
  Description of Artificial Sequence: Synthetic oligonucleotide
  Antisense strand to SEQ ID NO: 260800
gagaaugccaaucuaacac

SEQ ID NO: 260802 - RNA, 19 nt, Artificial Sequence
  Description of Artificial Sequence: Synthetic oligonucleotide
  Sense strand starting at position 15 SEQ ID NO: 3354
uuggcauucucucuugaau

SEQ ID NO: 260803 - RNA, 19 nt, Artificial Sequence
  Description of Artificial Sequence: Synthetic oligonucleotide
  Antisense strand to SEQ ID NO: 260802
auucaagagagaaugccaa

SEQ ID NO: 260804 - RNA, 19 nt, Artificial Sequence
  Description of Artificial Sequence: Synthetic oligonucleotide
  Sense strand starting at position 17 SEQ ID NO: 3354
ggcauucucucuugaauuc

SEQ ID NO: 260805 - RNA, 19 nt, Artificial Sequence
  Description of Artificial Sequence: Synthetic oligonucleotide
  Antisense strand to SEQ ID NO: 260804
gaauucaagagagaaugcc

SEQ ID NO: 260806 - RNA, 19 nt, Artificial Sequence
  Description of Artificial Sequence: Synthetic oligonucleotide
  Sense strand starting at position 29 SEQ ID NO: 3354
ugaauucccucuugagaau

SEQ ID NO: 260807 - RNA, 19 nt, Artificial Sequence
  Description of Artificial Sequence: Synthetic oligonucleotide
  Antisense strand to SEQ ID NO: 260806
auucucaagagggaauuca

SEQ ID NO: 260808 - RNA, 19 nt, Artificial Sequence
  Description of Artificial Sequence: Synthetic oligonucleotide
  Sense strand starting at position 91 SEQ ID NO: 3354
acaacauacgucuggcagu

SEQ ID NO: 260809 - RNA, 19 nt, Artificial Sequence
  Description of Artificial Sequence: Synthetic oligonucleotide
  Antisense strand to SEQ ID NO: 260808
acugccagacguauguugu

SEQ ID NO: 260810 - RNA, 19 nt, Artificial Sequence
  Description of Artificial Sequence: Synthetic oligonucleotide
  Sense strand starting at position 92 SEQ ID NO: 3354
caacauacgucuggcagua

SEQ ID NO: 260811 - RNA, 19 nt, Artificial Sequence
  Description of Artificial Sequence: Synthetic oligonucleotide
  Antisense strand to SEQ ID NO: 260810
uacugccagacguauguug

SEQ ID NO: 260812 - RNA, 19 nt, Artificial Sequence
  Description of Artificial Sequence: Synthetic oligonucleotide
  Sense strand starting at position 94 SEQ ID NO: 3354
acauacgucuggcaguaau

SEQ ID NO: 260813 - RNA, 19 nt, Artificial Sequence
  Description of Artificial Sequence: Synthetic oligonucleotide
  Antisense strand to SEQ ID NO: 260812
auuacugccagacguaugu

SEQ ID NO: 260814 - RNA, 19 nt, Artificial Sequence
  Description of Artificial Sequence: Synthetic oligonucleotide
  Sense strand starting at position 104 SEQ ID NO: 3354
ggcaguaaugagggucacu

SEQ ID NO: 260815 - RNA, 19 nt, Artificial Sequence
  Description of Artificial Sequence: Synthetic oligonucleotide
  Antisense strand to SEQ ID NO: 260814
agugacccucauuacugcc

SEQ ID NO: 260816 - RNA, 19 nt, Artificial Sequence
  Description of Artificial Sequence: Synthetic oligonucleotide
  Sense strand starting at position 139 SEQ ID NO: 3354
acccaagcgggaugagaua

SEQ ID NO: 260817 - RNA, 19 nt, Artificial Sequence
  Description of Artificial Sequence: Synthetic oligonucleotide
  Antisense strand to SEQ ID NO: 260816
uaucucaucccgcuugggu

SEQ ID NO: 260818 - RNA, 19 nt, Artificial Sequence
  Description of Artificial Sequence: Synthetic oligonucleotide
  Sense strand starting at position 170 SEQ ID NO: 3354
cugggugcccugggagaua

SEQ ID NO: 260819 - RNA, 19 nt, Artificial Sequence
  Description of Artificial Sequence: Synthetic oligonucleotide
  Antisense strand to SEQ ID NO: 260818
uaucucccagggcacccag

SEQ ID NO: 260820 - RNA, 19 nt, Artificial Sequence
  Description of Artificial Sequence: Synthetic oligonucleotide
  Sense strand starting at position 201 SEQ ID NO: 3354
uguacuauguccuacacua

SEQ ID NO: 260821 - RNA, 19 nt, Artificial Sequence
  Description of Artificial Sequence: Synthetic oligonucleotide
  Antisense strand to SEQ ID NO: 260820
uaguguaggacauaguaca

SEQ ID NO: 260822 - RNA, 19 nt, Artificial Sequence
  Description of Artificial Sequence: Synthetic oligonucleotide
  Sense strand starting at position 377 SEQ ID NO: 3354
ccgaguagcugcgacaaua

SEQ ID NO: 260823 - RNA, 19 nt, Artificial Sequence
  Description of Artificial Sequence: Synthetic oligonucleotide
  Antisense strand to SEQ ID NO: 260822
uauugucgcagcuacucgg

SEQ ID NO: 260824 - RNA, 19 nt, Artificial Sequence
  Description of Artificial Sequence: Synthetic oligonucleotide
  Sense strand starting at position 863 SEQ ID NO: 3354
uucuuacaguccugugagu

SEQ ID NO: 260825 - RNA, 19 nt, Artificial Sequence
  Description of Artificial Sequence: Synthetic oligonucleotide
  Antisense strand to SEQ ID NO: 260824
acucacaggacuguaagaa

SEQ ID NO: 260826 - RNA, 19 nt, Artificial Sequence
  Description of Artificial Sequence: Synthetic oligonucleotide
  Sense strand starting at position 865 SEQ ID NO: 3354
cuuacaguccugugaguua

SEQ ID NO: 260827 - RNA, 19 nt, Artificial Sequence
  Description of Artificial Sequence: Synthetic oligonucleotide
  Antisense strand to SEQ ID NO: 260826
uaacucacaggacuguaag

SEQ ID NO: 260828 - RNA, 19 nt, Artificial Sequence
  Description of Artificial Sequence: Synthetic oligonucleotide
  Sense strand starting at position 868 SEQ ID NO: 3354
acaguccugugaguuaagu

SEQ ID NO: 260829 - RNA, 19 nt, Artificial Sequence
  Description of Artificial Sequence: Synthetic oligonucleotide
  Antisense strand to SEQ ID NO: 260828
acuuaacucacaggacugu

SEQ ID NO: 260830 - RNA, 19 nt, Artificial Sequence
  Description of Artificial Sequence: Synthetic oligonucleotide
  Sense strand starting at position 874 SEQ ID NO: 3354
cugugaguuaagugcuauu

SEQ ID NO: 260831 - RNA, 19 nt, Artificial Sequence
  Description of Artificial Sequence: Synthetic oligonucleotide
  Antisense strand to SEQ ID NO: 260830
aauagcacuuaacucacag

SEQ ID NO: 260832 - RNA, 19 nt, Artificial Sequence
  Description of Artificial Sequence: Synthetic oligonucleotide
  Sense strand starting at position 877 SEQ ID NO: 3354
ugaguuaagugcuauuauu

SEQ ID NO: 260833 - RNA, 19 nt, Artificial Sequence
  Description of Artificial Sequence: Synthetic oligonucleotide
  Antisense strand to SEQ ID NO: 260832
aauaauagcacuuaacuca

SEQ ID NO: 260834 - RNA, 19 nt, Artificial Sequence
  Description of Artificial Sequence: Synthetic oligonucleotide
  Sense strand starting at position 885 SEQ ID NO: 3354
gugcuauuauuaucuacau

SEQ ID NO: 260835 - RNA, 19 nt, Artificial Sequence
  Description of Artificial Sequence: Synthetic oligonucleotide
  Antisense strand to SEQ ID NO: 260834
auguagauaauaauagcac

SEQ ID NO: 260836 - RNA, 19 nt, Artificial Sequence
  Description of Artificial Sequence: Synthetic oligonucleotide
  Sense strand starting at position 942 SEQ ID NO: 3354
gguaaauagaaaugguuau

SEQ ID NO: 260837 - RNA, 19 nt, Artificial Sequence
  Description of Artificial Sequence: Synthetic oligonucleotide
  Antisense strand to SEQ ID NO: 260836
auaaccauuucuauuuacc

SEQ ID NO: 260838 - RNA, 19 nt, Artificial Sequence
  Description of Artificial Sequence: Synthetic oligonucleotide
  Sense strand starting at position 967 SEQ ID NO: 3354
aguuguuuaaggcaggauu

SEQ ID NO: 260839 - RNA, 19 nt, Artificial Sequence
  Description of Artificial Sequence: Synthetic oligonucleotide
  Antisense strand to SEQ ID NO: 260838
aauccugccuuaaacaacu

SEQ ID NO: 260840 - RNA, 19 nt, Artificial Sequence
  Description of Artificial Sequence: Synthetic oligonucleotide
  Sense strand starting at position 1181 SEQ ID NO: 3354
ggauguguuggcgcccgaa

SEQ ID NO: 260841 - RNA, 19 nt, Artificial Sequence
  Description of Artificial Sequence: Synthetic oligonucleotide
  Antisense strand to SEQ ID NO: 260840
uucgggcgccaacacaucc

SEQ ID NO: 260842 - RNA, 19 nt, Artificial Sequence
  Description of Artificial Sequence: Synthetic oligonucleotide
  Sense strand starting at position 1254 SEQ ID NO: 3354
acacgugugccugagcuua

SEQ ID NO: 260843 - RNA, 19 nt, Artificial Sequence
  Description of Artificial Sequence: Synthetic oligonucleotide
  Antisense strand to SEQ ID NO: 260842
uaagcucaggcacacgugu

SEQ ID NO: 260844 - RNA, 19 nt, Artificial Sequence
  Description of Artificial Sequence: Synthetic oligonucleotide
  Sense strand starting at position 1319 SEQ ID NO: 3354
guagaauggccacguaagu

SEQ ID NO: 260845 - RNA, 19 nt, Artificial Sequence
  Description of Artificial Sequence: Synthetic oligonucleotide
  Antisense strand to SEQ ID NO: 260844
acuuacguggccauucuac

SEQ ID NO: 260846 - RNA, 19 nt, Artificial Sequence
  Description of Artificial Sequence: Synthetic oligonucleotide
  Sense strand starting at position 1510 SEQ ID NO: 3354
gggucuucaugccgaagua

SEQ ID NO: 260847 - RNA, 19 nt, Artificial Sequence
  Description of Artificial Sequence: Synthetic oligonucleotide
  Antisense strand to SEQ ID NO: 260846
uacuucggcaugaagaccc

SEQ ID NO: 260848 - RNA, 19 nt, Artificial Sequence
  Description of Artificial Sequence: Synthetic oligonucleotide
  Sense strand starting at position 2653 SEQ ID NO: 3354
acugaugcuuuaugcaaca

SEQ ID NO: 260849 - RNA, 19 nt, Artificial Sequence
  Description of Artificial Sequence: Synthetic oligonucleotide
  Antisense strand to SEQ ID NO: 260848
uguugcauaaagcaucagu

SEQ ID NO: 260850 - RNA, 19 nt, Artificial Sequence
  Description of Artificial Sequence: Synthetic oligonucleotide
  Sense strand starting at position 2798 SEQ ID NO: 3354
ugcauuugucgacauccuu

SEQ ID NO: 260851 - RNA, 19 nt, Artificial Sequence
  Description of Artificial Sequence: Synthetic oligonucleotide
  Antisense strand to SEQ ID NO: 260850
aaggaugucgacaaaugca

SEQ ID NO: 260852 - RNA, 19 nt, Artificial Sequence
  Description of Artificial Sequence: Synthetic oligonucleotide
  Sense strand starting at position 2804 SEQ ID NO: 3354
ugucgacauccuuauugua

SEQ ID NO: 260853 - RNA, 19 nt, Artificial Sequence
  Description of Artificial Sequence: Synthetic oligonucleotide
  Antisense strand to SEQ ID NO: 260852
uacaauaaggaugucgaca

SEQ ID NO: 260854 - RNA, 19 nt, Artificial Sequence
  Description of Artificial Sequence: Synthetic oligonucleotide
  Sense strand starting at position 2812 SEQ ID NO: 3354
uccuuauuguagcacuuau

SEQ ID NO: 260855 - RNA, 19 nt, Artificial Sequence
  Description of Artificial Sequence: Synthetic oligonucleotide
  Antisense strand to SEQ ID NO: 260854
auaagugcuacaauaagga

SEQ ID NO: 260856 - RNA, 19 nt, Artificial Sequence
  Description of Artificial Sequence: Synthetic oligonucleotide
  Sense strand starting at position 2850 SEQ ID NO: 3354
ucaucuuuguaucacagua

SEQ ID NO: 260857 - RNA, 19 nt, Artificial Sequence
  Description of Artificial Sequence: Synthetic oligonucleotide
  Antisense strand to SEQ ID NO: 260856
uacugugauacaaagauga

SEQ ID NO: 260858 - RNA, 19 nt, Artificial Sequence
  Description of Artificial Sequence: Synthetic oligonucleotide
  Sense strand starting at position 2855 SEQ ID NO: 3354
uuuguaucacaguacuaau

SEQ ID NO: 260859 - RNA, 19 nt, Artificial Sequence
  Description of Artificial Sequence: Synthetic oligonucleotide
  Antisense strand to SEQ ID NO: 260858
auuaguacugugauacaaa

SEQ ID NO: 260860 - RNA, 19 nt, Artificial Sequence
  Description of Artificial Sequence: Synthetic oligonucleotide
  Sense strand starting at position 2858 SEQ ID NO: 3354
guaucacaguacuaaucaa

SEQ ID NO: 260861 - RNA, 19 nt, Artificial Sequence
  Description of Artificial Sequence: Synthetic oligonucleotide
  Antisense strand to SEQ ID NO: 260860
uugauuaguacugugauac

SEQ ID NO: 260862 - RNA, 19 nt, Artificial Sequence
  Description of Artificial Sequence: Synthetic oligonucleotide
  Sense strand starting at position 2913 SEQ ID NO: 3354
ucaacacauguuuauugua

SEQ ID NO: 260863 - RNA, 19 nt, Artificial Sequence
  Description of Artificial Sequence: Synthetic oligonucleotide
  Antisense strand to SEQ ID NO: 260862
uacaauaaacauguguuga

SEQ ID NO: 260864 - RNA, 19 nt, Artificial Sequence
  Description of Artificial Sequence: Synthetic oligonucleotide
  Sense strand starting at position 2935 SEQ ID NO: 3354
ccuauaucgcauuaugcaa

SEQ ID NO: 260865 - RNA, 19 nt, Artificial Sequence
  Description of Artificial Sequence: Synthetic oligonucleotide
  Antisense strand to SEQ ID NO: 260864
uugcauaaugcgauauagg

SEQ ID NO: 260866 - RNA, 19 nt, Artificial Sequence
  Description of Artificial Sequence: Synthetic oligonucleotide
  Sense strand starting at position 3377 SEQ ID NO: 3354
aguaguuaagacugaccca

SEQ ID NO: 260867 - RNA, 19 nt, Artificial Sequence
  Description of Artificial Sequence: Synthetic oligonucleotide
  Antisense strand to SEQ ID NO: 260866
ugggucagucuuaacuacu

SEQ ID NO: 260868 - RNA, 19 nt, Artificial Sequence
  Description of Artificial Sequence: Synthetic oligonucleotide
  Sense strand starting at position 3833 SEQ ID NO: 3354
uuagguacuuuacagauau

SEQ ID NO: 260869 - RNA, 19 nt, Artificial Sequence
  Description of Artificial Sequence: Synthetic oligonucleotide
  Antisense strand to SEQ ID NO: 260868
auaucuguaaaguaccuaa

SEQ ID NO: 260870 - RNA, 19 nt, Artificial Sequence
  Description of Artificial Sequence: Synthetic oligonucleotide
  Sense strand starting at position 3867 SEQ ID NO: 3354
ccuuaacaguccuaugaga

SEQ ID NO: 260871 - RNA, 19 nt, Artificial Sequence
  Description of Artificial Sequence: Synthetic oligonucleotide
  Antisense strand to SEQ ID NO: 260870
ucucauaggacuguuaagg

SEQ ID NO: 260872 - RNA, 19 nt, Artificial Sequence
  Description of Artificial Sequence: Synthetic oligonucleotide
  Sense strand starting at position 386 SEQ ID NO: 3355
agagcaaucuugcuagaau

SEQ ID NO: 260873 - RNA, 19 nt, Artificial Sequence
  Description of Artificial Sequence: Synthetic oligonucleotide
  Antisense strand to SEQ ID NO: 260872
auucuagcaagauugcucu

SEQ ID NO: 260874 - RNA, 19 nt, Artificial Sequence
  Description of Artificial Sequence: Synthetic oligonucleotide
  Sense strand starting at position 389 SEQ ID NO: 3355
gcaaucuugcuagaauucu

SEQ ID NO: 260875 - RNA, 19 nt, Artificial Sequence
  Description of Artificial Sequence: Synthetic oligonucleotide
  Antisense strand to SEQ ID NO: 260874
agaauucuagcaagauugc

SEQ ID NO: 260876 - RNA, 19 nt, Artificial Sequence
  Description of Artificial Sequence: Synthetic oligonucleotide
  Sense strand starting at position 465 SEQ ID NO: 3355
gaauuuaguuauguuugcu

SEQ ID NO: 260877 - RNA, 19 nt, Artificial Sequence
  Description of Artificial Sequence: Synthetic oligonucleotide
  Antisense strand to SEQ ID NO: 260876
agcaaacauaacuaaauuc

SEQ ID NO: 260878 - RNA, 19 nt, Artificial Sequence
  Description of Artificial Sequence: Synthetic oligonucleotide
  Sense strand starting at position 516 SEQ ID NO: 3355
guggauaaagggugaagua

SEQ ID NO: 260879 - RNA, 19 nt, Artificial Sequence
  Description of Artificial Sequence: Synthetic oligonucleotide
  Antisense strand to SEQ ID NO: 260878
uacuucacccuuuauccac

SEQ ID NO: 260880 - RNA, 19 nt, Artificial Sequence
  Description of Artificial Sequence: Synthetic oligonucleotide
  Sense strand starting at position 551 SEQ ID NO: 3355
uugccaugugugcucauua

SEQ ID NO: 260881 - RNA, 19 nt, Artificial Sequence
  Description of Artificial Sequence: Synthetic oligonucleotide
  Antisense strand to SEQ ID NO: 260880
uaaugagcacacauggcaa

SEQ ID NO: 260882 - RNA, 19 nt, Artificial Sequence
  Description of Artificial Sequence: Synthetic oligonucleotide
  Sense strand starting at position 556 SEQ ID NO: 3355
augugugcucauuaauuag

SEQ ID NO: 260883 - RNA, 19 nt, Artificial Sequence
  Description of Artificial Sequence: Synthetic oligonucleotide
  Antisense strand to SEQ ID NO: 260882
cuaauuaaugagcacacau

SEQ ID NO: 260884 - RNA, 19 nt, Artificial Sequence
  Description of Artificial Sequence: Synthetic oligonucleotide
  Sense strand starting at position 578 SEQ ID NO: 3355
uuuacaugucugcaagaug

SEQ ID NO: 260885 - RNA, 19 nt, Artificial Sequence
  Description of Artificial Sequence: Synthetic oligonucleotide
  Antisense strand to SEQ ID NO: 260884
caucuugcagacauguaaa

SEQ ID NO: 260886 - RNA, 19 nt, Artificial Sequence
  Description of Artificial Sequence: Synthetic oligonucleotide
  Sense strand starting at position 581 SEQ ID NO: 3355
acaugucugcaagauguga

SEQ ID NO: 260887 - RNA, 19 nt, Artificial Sequence
  Description of Artificial Sequence: Synthetic oligonucleotide
  Antisense strand to SEQ ID NO: 260886
ucacaucuugcagacaugu

SEQ ID NO: 260888 - RNA, 19 nt, Artificial Sequence
  Description of Artificial Sequence: Synthetic oligonucleotide
  Sense strand starting at position 583 SEQ ID NO: 3355
augucugcaagaugugaaa

SEQ ID NO: 260889 - RNA, 19 nt, Artificial Sequence
  Description of Artificial Sequence: Synthetic oligonucleotide
  Antisense strand to SEQ ID NO: 260888
uuucacaucuugcagacau

SEQ ID NO: 260890 - RNA, 19 nt, Artificial Sequence
  Description of Artificial Sequence: Synthetic oligonucleotide
  Sense strand starting at position 839 SEQ ID NO: 3355
cuaaguguuuaacuaauga

SEQ ID NO: 260891 - RNA, 19 nt, Artificial Sequence
  Description of Artificial Sequence: Synthetic oligonucleotide
  Antisense strand to SEQ ID NO: 260890
ucauuaguuaaacacuuag

SEQ ID NO: 260892 - RNA, 19 nt, Artificial Sequence
  Description of Artificial Sequence: Synthetic oligonucleotide
  Sense strand starting at position 1048 SEQ ID NO: 3355
uuucucugaccuuggacaa

SEQ ID NO: 260893 - RNA, 19 nt, Artificial Sequence
  Description of Artificial Sequence: Synthetic oligonucleotide
  Antisense strand to SEQ ID NO: 260892
uuguccaaggucagagaaa

SEQ ID NO: 260894 - RNA, 19 nt, Artificial Sequence
  Description of Artificial Sequence: Synthetic oligonucleotide
  Sense strand starting at position 1152 SEQ ID NO: 3355
ugucuaaacucuguaaaua

SEQ ID NO: 260895 - RNA, 19 nt, Artificial Sequence
  Description of Artificial Sequence: Synthetic oligonucleotide
  Antisense strand to SEQ ID NO: 260894
uauuuacagaguuuagaca

SEQ ID NO: 260896 - RNA, 19 nt, Artificial Sequence
  Description of Artificial Sequence: Synthetic oligonucleotide
  Sense strand starting at position 1153 SEQ ID NO: 3355
gucuaaacucuguaaauau

SEQ ID NO: 260897 - RNA, 19 nt, Artificial Sequence
  Description of Artificial Sequence: Synthetic oligonucleotide
  Antisense strand to SEQ ID NO: 260896
auauuuacagaguuuagac

SEQ ID NO: 260898 - RNA, 19 nt, Artificial Sequence
  Description of Artificial Sequence: Synthetic oligonucleotide
  Sense strand starting at position 1370 SEQ ID NO: 3355
gauggcagauuagucaaau

SEQ ID NO: 260899 - RNA, 19 nt, Artificial Sequence
  Description of Artificial Sequence: Synthetic oligonucleotide
  Antisense strand to SEQ ID NO: 260898
auuugacuaaucugccauc

SEQ ID NO: 260900 - RNA, 19 nt, Artificial Sequence
  Description of Artificial Sequence: Synthetic oligonucleotide
  Sense strand starting at position 1371 SEQ ID NO: 3355
auggcagauuagucaaauc

SEQ ID NO: 260901 - RNA, 19 nt, Artificial Sequence
  Description of Artificial Sequence: Synthetic oligonucleotide
  Antisense strand to SEQ ID NO: 260900
gauuugacuaaucugccau

SEQ ID NO: 260902 - RNA, 19 nt, Artificial Sequence
  Description of Artificial Sequence: Synthetic oligonucleotide
  Sense strand starting at position 1405 SEQ ID NO: 3355
guccgacuccguguuuagu

SEQ ID NO: 260903 - RNA, 19 nt, Artificial Sequence
  Description of Artificial Sequence: Synthetic oligonucleotide
  Antisense strand to SEQ ID NO: 260902
acuaaacacggagucggac

SEQ ID NO: 260904 - RNA, 19 nt, Artificial Sequence
  Description of Artificial Sequence: Synthetic oligonucleotide
  Sense strand starting at position 1406 SEQ ID NO: 3355
uccgacuccguguuuagua

SEQ ID NO: 260905 - RNA, 19 nt, Artificial Sequence
  Description of Artificial Sequence: Synthetic oligonucleotide
  Antisense strand to SEQ ID NO: 260904
uacuaaacacggagucgga

SEQ ID NO: 260906 - RNA, 19 nt, Artificial Sequence
  Description of Artificial Sequence: Synthetic oligonucleotide
  Sense strand starting at position 1481 SEQ ID NO: 3355
gccuaugaagcagagcauu

SEQ ID NO: 260907 - RNA, 19 nt, Artificial Sequence
  Description of Artificial Sequence: Synthetic oligonucleotide
  Antisense strand to SEQ ID NO: 260906
aaugcucugcuucauaggc

SEQ ID NO: 260908 - RNA, 19 nt, Artificial Sequence
  Description of Artificial Sequence: Synthetic oligonucleotide
  Sense strand starting at position 1487 SEQ ID NO: 3355
gaagcagagcauuaaacgu

SEQ ID NO: 260909 - RNA, 19 nt, Artificial Sequence
  Description of Artificial Sequence: Synthetic oligonucleotide
  Antisense strand to SEQ ID NO: 260908
acguuuaaugcucugcuuc

SEQ ID NO: 260910 - RNA, 19 nt, Artificial Sequence
  Description of Artificial Sequence: Synthetic oligonucleotide
  Sense strand starting at position 1559 SEQ ID NO: 3355
gaaacuugggaacgucaga

SEQ ID NO: 260911 - RNA, 19 nt, Artificial Sequence
  Description of Artificial Sequence: Synthetic oligonucleotide
  Antisense strand to SEQ ID NO: 260910
ucugacguucccaaguuuc

SEQ ID NO: 260912 - RNA, 19 nt, Artificial Sequence
  Description of Artificial Sequence: Synthetic oligonucleotide
  Sense strand starting at position 1758 SEQ ID NO: 3355
aggaguuaccgggagccaa

SEQ ID NO: 260913 - RNA, 19 nt, Artificial Sequence
  Description of Artificial Sequence: Synthetic oligonucleotide
  Antisense strand to SEQ ID NO: 260912
uuggcucccgguaacuccu

SEQ ID NO: 260914 - RNA, 19 nt, Artificial Sequence
  Description of Artificial Sequence: Synthetic oligonucleotide
  Sense strand starting at position 1794 SEQ ID NO: 3355
gcuaguucgacuuaaagga

SEQ ID NO: 260915 - RNA, 19 nt, Artificial Sequence
  Description of Artificial Sequence: Synthetic oligonucleotide
  Antisense strand to SEQ ID NO: 260914
uccuuuaagucgaacuagc

SEQ ID NO: 260916 - RNA, 19 nt, Artificial Sequence
  Description of Artificial Sequence: Synthetic oligonucleotide
  Sense strand starting at position 2270 SEQ ID NO: 3355
aggaguggucgggaucuga

SEQ ID NO: 260917 - RNA, 19 nt, Artificial Sequence
  Description of Artificial Sequence: Synthetic oligonucleotide
  Antisense strand to SEQ ID NO: 260916
ucagaucccgaccacuccu

SEQ ID NO: 260918 - RNA, 19 nt, Artificial Sequence
  Description of Artificial Sequence: Synthetic oligonucleotide
  Sense strand starting at position 2572 SEQ ID NO: 3355
uggauaucuggauggagcu

SEQ ID NO: 260919 - RNA, 19 nt, Artificial Sequence
  Description of Artificial Sequence: Synthetic oligonucleotide
  Antisense strand to SEQ ID NO: 260918
agcuccauccagauaucca

SEQ ID NO: 260920 - RNA, 19 nt, Artificial Sequence
  Description of Artificial Sequence: Synthetic oligonucleotide
  Sense strand starting at position 2579 SEQ ID NO: 3355
cuggauggagcuggauaua

SEQ ID NO: 260921 - RNA, 19 nt, Artificial Sequence
  Description of Artificial Sequence: Synthetic oligonucleotide
  Antisense strand to SEQ ID NO: 260920
uauauccagcuccauccag

SEQ ID NO: 260922 - RNA, 19 nt, Artificial Sequence
  Description of Artificial Sequence: Synthetic oligonucleotide
  Sense strand starting at position 2592 SEQ ID NO: 3355
gauauauugugaucaguca

SEQ ID NO: 260923 - RNA, 19 nt, Artificial Sequence
  Description of Artificial Sequence: Synthetic oligonucleotide
  Antisense strand to SEQ ID NO: 260922
ugacugaucacaauauauc

SEQ ID NO: 260924 - RNA, 19 nt, Artificial Sequence
  Description of Artificial Sequence: Synthetic oligonucleotide
  Sense strand starting at position 2610 SEQ ID NO: 3355
agagaucugccugggagga

SEQ ID NO: 260925 - RNA, 19 nt, Artificial Sequence
  Description of Artificial Sequence: Synthetic oligonucleotide
  Antisense strand to SEQ ID NO: 260924
uccucccaggcagaucucu

SEQ ID NO: 260926 - RNA, 19 nt, Artificial Sequence
  Description of Artificial Sequence: Synthetic oligonucleotide
  Sense strand starting at position 2699 SEQ ID NO: 3355
cccuguauccauggugaag

SEQ ID NO: 260927 - RNA, 19 nt, Artificial Sequence
  Description of Artificial Sequence: Synthetic oligonucleotide
  Antisense strand to SEQ ID NO: 260926
cuucaccauggauacaggg

SEQ ID NO: 260928 - RNA, 19 nt, Artificial Sequence
  Description of Artificial Sequence: Synthetic oligonucleotide
  Sense strand starting at position 2760 SEQ ID NO: 3355
ggaaucuaaccacguggau

SEQ ID NO: 260929 - RNA, 19 nt, Artificial Sequence
  Description of Artificial Sequence: Synthetic oligonucleotide
  Antisense strand to SEQ ID NO: 260928
auccacgugguuagauucc

SEQ ID NO: 260930 - RNA, 19 nt, Artificial Sequence
  Description of Artificial Sequence: Synthetic oligonucleotide
  Sense strand starting at position 2764 SEQ ID NO: 3355
ucuaaccacguggauuaua

SEQ ID NO: 260931 - RNA, 19 nt, Artificial Sequence
  Description of Artificial Sequence: Synthetic oligonucleotide
  Antisense strand to SEQ ID NO: 260930
uauaauccacgugguuaga

SEQ ID NO: 260932 - RNA, 19 nt, Artificial Sequence
  Description of Artificial Sequence: Synthetic oligonucleotide
  Sense strand starting at position 2818 SEQ ID NO: 3355
agugguauuggacaccauu

SEQ ID NO: 260933 - RNA, 19 nt, Artificial Sequence
  Description of Artificial Sequence: Synthetic oligonucleotide
  Antisense strand to SEQ ID NO: 260932
aaugguguccaauaccacu

SEQ ID NO: 260934 - RNA, 19 nt, Artificial Sequence
  Description of Artificial Sequence: Synthetic oligonucleotide
  Sense strand starting at position 2832 SEQ ID NO: 3355
ccauuacagucaguaaauc

SEQ ID NO: 260935 - RNA, 19 nt, Artificial Sequence
  Description of Artificial Sequence: Synthetic oligonucleotide
  Antisense strand to SEQ ID NO: 260934
gauuuacugacuguaaugg

SEQ ID NO: 260936 - RNA, 19 nt, Artificial Sequence
  Description of Artificial Sequence: Synthetic oligonucleotide
  Sense strand starting at position 2966 SEQ ID NO: 3355
uguuucucaguacacaaau

SEQ ID NO: 260937 - RNA, 19 nt, Artificial Sequence
  Description of Artificial Sequence: Synthetic oligonucleotide
  Antisense strand to SEQ ID NO: 260936
auuuguguacugagaaaca

SEQ ID NO: 260938 - RNA, 19 nt, Artificial Sequence
  Description of Artificial Sequence: Synthetic oligonucleotide
  Sense strand starting at position 3066 SEQ ID NO: 3355
agguaauuauuggugcaca

SEQ ID NO: 260939 - RNA, 19 nt, Artificial Sequence
  Description of Artificial Sequence: Synthetic oligonucleotide
  Antisense strand to SEQ ID NO: 260938
ugugcaccaauaauuaccu

SEQ ID NO: 260940 - RNA, 19 nt, Artificial Sequence
  Description of Artificial Sequence: Synthetic oligonucleotide
  Sense strand starting at position 3159 SEQ ID NO: 3355
aaaguugacguuugaacaa

SEQ ID NO: 260941 - RNA, 19 nt, Artificial Sequence
  Description of Artificial Sequence: Synthetic oligonucleotide
  Antisense strand to SEQ ID NO: 260940
uuguucaaacgucaacuuu

SEQ ID NO: 260942 - RNA, 19 nt, Artificial Sequence
  Description of Artificial Sequence: Synthetic oligonucleotide
  Sense strand starting at position 3168 SEQ ID NO: 3355
guuugaacaacauggguau

SEQ ID NO: 260943 - RNA, 19 nt, Artificial Sequence
  Description of Artificial Sequence: Synthetic oligonucleotide
  Antisense strand to SEQ ID NO: 260942
auacccauguuguucaaac

SEQ ID NO: 260944 - RNA, 19 nt, Artificial Sequence
  Description of Artificial Sequence: Synthetic oligonucleotide
  Sense strand starting at position 3881 SEQ ID NO: 3355
aagacaguauuccuggaau

SEQ ID NO: 260945 - RNA, 19 nt, Artificial Sequence
  Description of Artificial Sequence: Synthetic oligonucleotide
  Antisense strand to SEQ ID NO: 260944
auuccaggaauacugucuu

SEQ ID NO: 260946 - RNA, 19 nt, Artificial Sequence
  Description of Artificial Sequence: Synthetic oligonucleotide
  Sense strand starting at position 3883 SEQ ID NO: 3355
gacaguauuccuggaaugc

SEQ ID NO: 260947 - RNA, 19 nt, Artificial Sequence
  Description of Artificial Sequence: Synthetic oligonucleotide
  Antisense strand to SEQ ID NO: 260946
gcauuccaggaauacuguc

SEQ ID NO: 260948 - RNA, 19 nt, Artificial Sequence
  Description of Artificial Sequence: Synthetic oligonucleotide
  Sense strand starting at position 3884 SEQ ID NO: 3355
acaguauuccuggaaugca

SEQ ID NO: 260949 - RNA, 19 nt, Artificial Sequence
  Description of Artificial Sequence: Synthetic oligonucleotide
  Antisense strand to SEQ ID NO: 260948
ugcauuccaggaauacugu

SEQ ID NO: 260950 - RNA, 19 nt, Artificial Sequence
  Description of Artificial Sequence: Synthetic oligonucleotide
  Sense strand starting at position 3958 SEQ ID NO: 3355
ggagaacuugaguauccgu

SEQ ID NO: 260951 - RNA, 19 nt, Artificial Sequence
  Description of Artificial Sequence: Synthetic oligonucleotide
  Antisense strand to SEQ ID NO: 260950
acggauacucaaguucucc

SEQ ID NO: 260952 - RNA, 19 nt, Artificial Sequence
  Description of Artificial Sequence: Synthetic oligonucleotide
  Sense strand starting at position 109 SEQ ID NO: 3356
cagugauuagaagguugau

SEQ ID NO: 260953 - RNA, 19 nt, Artificial Sequence
  Description of Artificial Sequence: Synthetic oligonucleotide
  Antisense strand to SEQ ID NO: 260952
aucaaccuucuaaucacug

SEQ ID NO: 260954 - RNA, 19 nt, Artificial Sequence
  Description of Artificial Sequence: Synthetic oligonucleotide
  Sense strand starting at position 142 SEQ ID NO: 3356
aaaggauaauggugauuua

SEQ ID NO: 260955 - RNA, 19 nt, Artificial Sequence
  Description of Artificial Sequence: Synthetic oligonucleotide
  Antisense strand to SEQ ID NO: 260954
uaaaucaccauuauccuuu

SEQ ID NO: 260956 - RNA, 19 nt, Artificial Sequence
  Description of Artificial Sequence: Synthetic oligonucleotide
  Sense strand starting at position 176 SEQ ID NO: 3356
agugaauaugcugaguaua

SEQ ID NO: 260957 - RNA, 19 nt, Artificial Sequence
  Description of Artificial Sequence: Synthetic oligonucleotide
  Antisense strand to SEQ ID NO: 260956
uauacucagcauauucacu

SEQ ID NO: 260958 - RNA, 19 nt, Artificial Sequence
  Description of Artificial Sequence: Synthetic oligonucleotide
  Sense strand starting at position 178 SEQ ID NO: 3356
ugaauaugcugaguauagu

SEQ ID NO: 260959 - RNA, 19 nt, Artificial Sequence
  Description of Artificial Sequence: Synthetic oligonucleotide
  Antisense strand to SEQ ID NO: 260958
acuauacucagcauauuca

SEQ ID NO: 260960 - RNA, 19 nt, Artificial Sequence
  Description of Artificial Sequence: Synthetic oligonucleotide
  Sense strand starting at position 209 SEQ ID NO: 3356
cugacaggauugcuaaaga

SEQ ID NO: 260961 - RNA, 19 nt, Artificial Sequence
  Description of Artificial Sequence: Synthetic oligonucleotide
  Antisense strand to SEQ ID NO: 260960
ucuuuagcaauccugucag

SEQ ID NO: 260962 - RNA, 19 nt, Artificial Sequence
  Description of Artificial Sequence: Synthetic oligonucleotide
  Sense strand starting at position 501 SEQ ID NO: 3356
acauuccuccauugugacu

SEQ ID NO: 260963 - RNA, 19 nt, Artificial Sequence
  Description of Artificial Sequence: Synthetic oligonucleotide
  Antisense strand to SEQ ID NO: 260962
agucacaauggaggaaugu

SEQ ID NO: 260964 - RNA, 19 nt, Artificial Sequence
  Description of Artificial Sequence: Synthetic oligonucleotide
  Sense strand starting at position 811 SEQ ID NO: 3356
acagguguagcaugggaaa

SEQ ID NO: 260965 - RNA, 19 nt, Artificial Sequence
  Description of Artificial Sequence: Synthetic oligonucleotide
  Antisense strand to SEQ ID NO: 260964
uuucccaugcuacaccugu

SEQ ID NO: 260966 - RNA, 19 nt, Artificial Sequence
  Description of Artificial Sequence: Synthetic oligonucleotide
  Sense strand starting at position 847 SEQ ID NO: 3356
cagaguauagguggguaga

SEQ ID NO: 260967 - RNA, 19 nt, Artificial Sequence
  Description of Artificial Sequence: Synthetic oligonucleotide
  Antisense strand to SEQ ID NO: 260966
ucuacccaccuauacucug

SEQ ID NO: 260968 - RNA, 19 nt, Artificial Sequence
  Description of Artificial Sequence: Synthetic oligonucleotide
  Sense strand starting at position 848 SEQ ID NO: 3356
agaguauagguggguagaa

SEQ ID NO: 260969 - RNA, 19 nt, Artificial Sequence
  Description of Artificial Sequence: Synthetic oligonucleotide
  Antisense strand to SEQ ID NO: 260968
uucuacccaccuauacucu

SEQ ID NO: 260970 - RNA, 19 nt, Artificial Sequence
  Description of Artificial Sequence: Synthetic oligonucleotide
  Sense strand starting at position 849 SEQ ID NO: 3356
gaguauagguggguagaaa

SEQ ID NO: 260971 - RNA, 19 nt, Artificial Sequence
  Description of Artificial Sequence: Synthetic oligonucleotide
  Antisense strand to SEQ ID NO: 260970
uuucuacccaccuauacuc

SEQ ID NO: 260972 - RNA, 19 nt, Artificial Sequence
  Description of Artificial Sequence: Synthetic oligonucleotide
  Sense strand starting at position 922 SEQ ID NO: 3356
gaugcuugacaguaccaaa

SEQ ID NO: 260973 - RNA, 19 nt, Artificial Sequence
  Description of Artificial Sequence: Synthetic oligonucleotide
  Antisense strand to SEQ ID NO: 260972
uuugguacugucaagcauc

SEQ ID NO: 260974 - RNA, 19 nt, Artificial Sequence
  Description of Artificial Sequence: Synthetic oligonucleotide
  Sense strand starting at position 1149 SEQ ID NO: 3356
aguucuauuucugaagaag

SEQ ID NO: 260975 - RNA, 19 nt, Artificial Sequence
  Description of Artificial Sequence: Synthetic oligonucleotide
  Antisense strand to SEQ ID NO: 260974
cuucuucagaaauagaacu

SEQ ID NO: 260976 - RNA, 19 nt, Artificial Sequence
  Description of Artificial Sequence: Synthetic oligonucleotide
  Sense strand starting at position 1158 SEQ ID NO: 3356
ucugaagaagcuuagucau

SEQ ID NO: 260977 - RNA, 19 nt, Artificial Sequence
  Description of Artificial Sequence: Synthetic oligonucleotide
  Antisense strand to SEQ ID NO: 260976
augacuaagcuucuucaga

SEQ ID NO: 260978 - RNA, 19 nt, Artificial Sequence
  Description of Artificial Sequence: Synthetic oligonucleotide
  Sense strand starting at position 1311 SEQ ID NO: 3356
ggaagcuucuagguguuaa

SEQ ID NO: 260979 - RNA, 19 nt, Artificial Sequence
  Description of Artificial Sequence: Synthetic oligonucleotide
  Antisense strand to SEQ ID NO: 260978
uuaacaccuagaagcuucc

SEQ ID NO: 260980 - RNA, 19 nt, Artificial Sequence
  Description of Artificial Sequence: Synthetic oligonucleotide
  Sense strand starting at position 1322 SEQ ID NO: 3356
gguguuaacaauugagguu

SEQ ID NO: 260981 - RNA, 19 nt, Artificial Sequence
  Description of Artificial Sequence: Synthetic oligonucleotide
  Antisense strand to SEQ ID NO: 260980
aaccucaauuguuaacacc

SEQ ID NO: 260982 - RNA, 19 nt, Artificial Sequence
  Description of Artificial Sequence: Synthetic oligonucleotide
  Sense strand starting at position 1323 SEQ ID NO: 3356
guguuaacaauugagguua

SEQ ID NO: 260983 - RNA, 19 nt, Artificial Sequence
  Description of Artificial Sequence: Synthetic oligonucleotide
  Antisense strand to SEQ ID NO: 260982
uaaccucaauuguuaacac

SEQ ID NO: 260984 - RNA, 19 nt, Artificial Sequence
  Description of Artificial Sequence: Synthetic oligonucleotide
  Sense strand starting at position 2399 SEQ ID NO: 3356
gggagagucgagggaacuu

SEQ ID NO: 260985 - RNA, 19 nt, Artificial Sequence
  Description of Artificial Sequence: Synthetic oligonucleotide
  Antisense strand to SEQ ID NO: 260984
aaguucccucgacucuccc

SEQ ID NO: 260986 - RNA, 19 nt, Artificial Sequence
  Description of Artificial Sequence: Synthetic oligonucleotide
  Sense strand starting at position 2458 SEQ ID NO: 3356
agcggaucgguaaguuauu

SEQ ID NO: 260987 - RNA, 19 nt, Artificial Sequence
  Description of Artificial Sequence: Synthetic oligonucleotide
  Antisense strand to SEQ ID NO: 260986
aauaacuuaccgauccgcu

SEQ ID NO: 260988 - RNA, 19 nt, Artificial Sequence
  Description of Artificial Sequence: Synthetic oligonucleotide
  Sense strand starting at position 2459 SEQ ID NO: 3356
gcggaucgguaaguuauuu

SEQ ID NO: 260989 - RNA, 19 nt, Artificial Sequence
  Description of Artificial Sequence: Synthetic oligonucleotide
  Antisense strand to SEQ ID NO: 260988
aaauaacuuaccgauccgc

SEQ ID NO: 260990 - RNA, 19 nt, Artificial Sequence
  Description of Artificial Sequence: Synthetic oligonucleotide
  Sense strand starting at position 2566 SEQ ID NO: 3356
gcgugaccagcuuucuguu

SEQ ID NO: 260991 - RNA, 19 nt, Artificial Sequence
  Description of Artificial Sequence: Synthetic oligonucleotide
  Antisense strand to SEQ ID NO: 260990
aacagaaagcuggucacgc

SEQ ID NO: 260992 - RNA, 19 nt, Artificial Sequence
  Description of Artificial Sequence: Synthetic oligonucleotide
  Sense strand starting at position 2573 SEQ ID NO: 3356
cagcuuucuguugggaaca

SEQ ID NO: 260993 - RNA, 19 nt, Artificial Sequence
  Description of Artificial Sequence: Synthetic oligonucleotide
  Antisense strand to SEQ ID NO: 260992
uguucccaacagaaagcug

SEQ ID NO: 260994 - RNA, 19 nt, Artificial Sequence
  Description of Artificial Sequence: Synthetic oligonucleotide
  Sense strand starting at position 2597 SEQ ID NO: 3356
aggucagugguguaaagaa

SEQ ID NO: 260995 - RNA, 19 nt, Artificial Sequence
  Description of Artificial Sequence: Synthetic oligonucleotide
  Antisense strand to SEQ ID NO: 260994
uucuuuacaccacugaccu

SEQ ID NO: 260996 - RNA, 19 nt, Artificial Sequence
  Description of Artificial Sequence: Synthetic oligonucleotide
  Sense strand starting at position 2633 SEQ ID NO: 3356
uuccacgugcacuaauaua

SEQ ID NO: 260997 - RNA, 19 nt, Artificial Sequence
  Description of Artificial Sequence: Synthetic oligonucleotide
  Antisense strand to SEQ ID NO: 260996
uauauuagugcacguggaa

SEQ ID NO: 260998 - RNA, 19 nt, Artificial Sequence
  Description of Artificial Sequence: Synthetic oligonucleotide
  Sense strand starting at position 2644 SEQ ID NO: 3356
cuaauauauuuaucgcgua

SEQ ID NO: 260999 - RNA, 19 nt, Artificial Sequence
  Description of Artificial Sequence: Synthetic oligonucleotide
  Antisense strand to SEQ ID NO: 260998
uacgcgauaaauauauuag

SEQ ID NO: 261000 - RNA, 19 nt, Artificial Sequence
  Description of Artificial Sequence: Synthetic oligonucleotide
  Sense strand starting at position 2684 SEQ ID NO: 3356
uuggaaacuuucuugaguu

SEQ ID NO: 261001 - RNA, 19 nt, Artificial Sequence
  Description of Artificial Sequence: Synthetic oligonucleotide
  Antisense strand to SEQ ID NO: 261000
aacucaagaaaguuuccaa

SEQ ID NO: 261002 - RNA, 19 nt, Artificial Sequence
  Description of Artificial Sequence: Synthetic oligonucleotide
  Sense strand starting at position 2686 SEQ ID NO: 3356
ggaaacuuucuugaguucu

SEQ ID NO: 261003 - RNA, 19 nt, Artificial Sequence
  Description of Artificial Sequence: Synthetic oligonucleotide
  Antisense strand to SEQ ID NO: 261002
agaacucaagaaaguuucc

SEQ ID NO: 261004 - RNA, 19 nt, Artificial Sequence
  Description of Artificial Sequence: Synthetic oligonucleotide
  Sense strand starting at position 2857 SEQ ID NO: 3356
aucugagauucccuauuag

SEQ ID NO: 261005 - RNA, 19 nt, Artificial Sequence
  Description of Artificial Sequence: Synthetic oligonucleotide
  Antisense strand to SEQ ID NO: 261004
cuaauagggaaucucagau

SEQ ID NO: 261006 - RNA, 19 nt, Artificial Sequence
  Description of Artificial Sequence: Synthetic oligonucleotide
  Sense strand starting at position 2903 SEQ ID NO: 3356
agaguuacuccgggacauu

SEQ ID NO: 261007 - RNA, 19 nt, Artificial Sequence
  Description of Artificial Sequence: Synthetic oligonucleotide
  Antisense strand to SEQ ID NO: 261006
aaugucccggaguaacucu

SEQ ID NO: 261008 - RNA, 19 nt, Artificial Sequence
  Description of Artificial Sequence: Synthetic oligonucleotide
  Sense strand starting at position 2904 SEQ ID NO: 3356
gaguuacuccgggacauuc

SEQ ID NO: 261009 - RNA, 19 nt, Artificial Sequence
  Description of Artificial Sequence: Synthetic oligonucleotide
  Antisense strand to SEQ ID NO: 261008
gaaugucccggaguaacuc

SEQ ID NO: 261010 - RNA, 19 nt, Artificial Sequence
  Description of Artificial Sequence: Synthetic oligonucleotide
  Sense strand starting at position 2913 SEQ ID NO: 3356
cgggacauucgugauaaau

SEQ ID NO: 261011 - RNA, 19 nt, Artificial Sequence
  Description of Artificial Sequence: Synthetic oligonucleotide
  Antisense strand to SEQ ID NO: 261010
auuuaucacgaaugucccg

SEQ ID NO: 261012 - RNA, 19 nt, Artificial Sequence
  Description of Artificial Sequence: Synthetic oligonucleotide
  Sense strand starting at position 2952 SEQ ID NO: 3356
cauucuuaaccguaaggca

SEQ ID NO: 261013 - RNA, 19 nt, Artificial Sequence
  Description of Artificial Sequence: Synthetic oligonucleotide
  Antisense strand to SEQ ID NO: 261012
ugccuuacgguuaagaaug

SEQ ID NO: 261014 - RNA, 19 nt, Artificial Sequence
  Description of Artificial Sequence: Synthetic oligonucleotide
  Sense strand starting at position 3141 SEQ ID NO: 3356
cagauaaaggugcauguuu

SEQ ID NO: 261015 - RNA, 19 nt, Artificial Sequence
  Description of Artificial Sequence: Synthetic oligonucleotide
  Antisense strand to SEQ ID NO: 261014
aaacaugcaccuuuaucug

SEQ ID NO: 261016 - RNA, 19 nt, Artificial Sequence
  Description of Artificial Sequence: Synthetic oligonucleotide
  Sense strand starting at position 3213 SEQ ID NO: 3356
uccaaagauugccuuugau

SEQ ID NO: 261017 - RNA, 19 nt, Artificial Sequence
  Description of Artificial Sequence: Synthetic oligonucleotide
  Antisense strand to SEQ ID NO: 261016
aucaaaggcaaucuuugga

SEQ ID NO: 261018 - RNA, 19 nt, Artificial Sequence
  Description of Artificial Sequence: Synthetic oligonucleotide
  Sense strand starting at position 3222 SEQ ID NO: 3356
ugccuuugauuuguccuau

SEQ ID NO: 261019 - RNA, 19 nt, Artificial Sequence
  Description of Artificial Sequence: Synthetic oligonucleotide
  Antisense strand to SEQ ID NO: 261018
auaggacaaaucaaaggca

SEQ ID NO: 261020 - RNA, 19 nt, Artificial Sequence
  Description of Artificial Sequence: Synthetic oligonucleotide
  Sense strand starting at position 3223 SEQ ID NO: 3356
gccuuugauuuguccuauu

SEQ ID NO: 261021 - RNA, 19 nt, Artificial Sequence
  Description of Artificial Sequence: Synthetic oligonucleotide
  Antisense strand to SEQ ID NO: 261020
aauaggacaaaucaaaggc

SEQ ID NO: 261022 - RNA, 19 nt, Artificial Sequence
  Description of Artificial Sequence: Synthetic oligonucleotide
  Sense strand starting at position 3587 SEQ ID NO: 3356
gcgugagcccgucucuacu

SEQ ID NO: 261023 - RNA, 19 nt, Artificial Sequence
  Description of Artificial Sequence: Synthetic oligonucleotide
  Antisense strand to SEQ ID NO: 261022
aguagagacgggcucacgc

SEQ ID NO: 261024 - RNA, 19 nt, Artificial Sequence
  Description of Artificial Sequence: Synthetic oligonucleotide
  Sense strand starting at position 3911 SEQ ID NO: 3356
guguacaaauacuucugaa

SEQ ID NO: 261025 - RNA, 19 nt, Artificial Sequence
  Description of Artificial Sequence: Synthetic oligonucleotide
  Antisense strand to SEQ ID NO: 261024
uucagaaguauuuguacac

SEQ ID NO: 261026 - RNA, 19 nt, Artificial Sequence
  Description of Artificial Sequence: Synthetic oligonucleotide
  Sense strand starting at position 3945 SEQ ID NO: 3356
ggguguguauacucauaag

SEQ ID NO: 261027 - RNA, 19 nt, Artificial Sequence
  Description of Artificial Sequence: Synthetic oligonucleotide
  Antisense strand to SEQ ID NO: 261026
cuuaugaguauacacaccc

SEQ ID NO: 261028 - RNA, 19 nt, Artificial Sequence
  Description of Artificial Sequence: Synthetic oligonucleotide
  Sense strand starting at position 3951 SEQ ID NO: 3356
guauacucauaaguggaau

SEQ ID NO: 261029 - RNA, 19 nt, Artificial Sequence
  Description of Artificial Sequence: Synthetic oligonucleotide
  Antisense strand to SEQ ID NO: 261028
auuccacuuaugaguauac

SEQ ID NO: 261030 - RNA, 19 nt, Artificial Sequence
  Description of Artificial Sequence: Synthetic oligonucleotide
  Sense strand starting at position 3981 SEQ ID NO: 3356
augguaauucuauguuaug

SEQ ID NO: 261031 - RNA, 19 nt, Artificial Sequence
  Description of Artificial Sequence: Synthetic oligonucleotide
  Antisense strand to SEQ ID NO: 261030
cauaacauagaauuaccau

SEQ ID NO: 261032 - RNA, 19 nt, Artificial Sequence
  Description of Artificial Sequence: Synthetic oligonucleotide
  Sense strand starting at position 16 SEQ ID NO: 3357
gguuucuugagugaaugca

SEQ ID NO: 261033 - RNA, 19 nt, Artificial Sequence
  Description of Artificial Sequence: Synthetic oligonucleotide
  Antisense strand to SEQ ID NO: 261032
ugcauucacucaagaaacc

SEQ ID NO: 261034 - RNA, 19 nt, Artificial Sequence
  Description of Artificial Sequence: Synthetic oligonucleotide
  Sense strand starting at position 24 SEQ ID NO: 3357
gagugaaugcaaugguuaa

SEQ ID NO: 261035 - RNA, 19 nt, Artificial Sequence
  Description of Artificial Sequence: Synthetic oligonucleotide
  Antisense strand to SEQ ID NO: 261034
uuaaccauugcauucacuc

SEQ ID NO: 261036 - RNA, 19 nt, Artificial Sequence
  Description of Artificial Sequence: Synthetic oligonucleotide
  Sense strand starting at position 25 SEQ ID NO: 3357
agugaaugcaaugguuaaa

SEQ ID NO: 261037 - RNA, 19 nt, Artificial Sequence
  Description of Artificial Sequence: Synthetic oligonucleotide
  Antisense strand to SEQ ID NO: 261036
uuuaaccauugcauucacu

SEQ ID NO: 261038 - RNA, 19 nt, Artificial Sequence
  Description of Artificial Sequence: Synthetic oligonucleotide
  Sense strand starting at position 775 SEQ ID NO: 3357
agagauguugcuuaucuug

SEQ ID NO: 261039 - RNA, 19 nt, Artificial Sequence
  Description of Artificial Sequence: Synthetic oligonucleotide
  Antisense strand to SEQ ID NO: 261038
caagauaagcaacaucucu

SEQ ID NO: 261040 - RNA, 19 nt, Artificial Sequence
  Description of Artificial Sequence: Synthetic oligonucleotide
  Sense strand starting at position 1013 SEQ ID NO: 3357
cugguauccugacuuaaac

SEQ ID NO: 261041 - RNA, 19 nt, Artificial Sequence
  Description of Artificial Sequence: Synthetic oligonucleotide
  Antisense strand to SEQ ID NO: 261040
guuuaagucaggauaccag

SEQ ID NO: 261042 - RNA, 19 nt, Artificial Sequence
  Description of Artificial Sequence: Synthetic oligonucleotide
  Sense strand starting at position 1068 SEQ ID NO: 3357
gcggaucuuagagauaauc

SEQ ID NO: 261043 - RNA, 19 nt, Artificial Sequence
  Description of Artificial Sequence: Synthetic oligonucleotide
  Antisense strand to SEQ ID NO: 261042
gauuaucucuaagauccgc

SEQ ID NO: 261044 - RNA, 19 nt, Artificial Sequence
  Description of Artificial Sequence: Synthetic oligonucleotide
  Sense strand starting at position 1131 SEQ ID NO: 3357
ggagguauucaguagaguu

SEQ ID NO: 261045 - RNA, 19 nt, Artificial Sequence
  Description of Artificial Sequence: Synthetic oligonucleotide
  Antisense strand to SEQ ID NO: 261044
aacucuacugaauaccucc

SEQ ID NO: 261046 - RNA, 19 nt, Artificial Sequence
  Description of Artificial Sequence: Synthetic oligonucleotide
  Sense strand starting at position 1183 SEQ ID NO: 3357
uuccuuaguccugaaagau

SEQ ID NO: 261047 - RNA, 19 nt, Artificial Sequence
  Description of Artificial Sequence: Synthetic oligonucleotide
  Antisense strand to SEQ ID NO: 261046
aucuuucaggacuaaggaa

SEQ ID NO: 261048 - RNA, 19 nt, Artificial Sequence
  Description of Artificial Sequence: Synthetic oligonucleotide
  Sense strand starting at position 1269 SEQ ID NO: 3357
ucaguugaagcuuaucuau

SEQ ID NO: 261049 - RNA, 19 nt, Artificial Sequence
  Description of Artificial Sequence: Synthetic oligonucleotide
  Antisense strand to SEQ ID NO: 261048
auagauaagcuucaacuga

SEQ ID NO: 261050 - RNA, 19 nt, Artificial Sequence
  Description of Artificial Sequence: Synthetic oligonucleotide
  Sense strand starting at position 1293 SEQ ID NO: 3357
cuaucuugagagugagaau

SEQ ID NO: 261051 - RNA, 19 nt, Artificial Sequence
  Description of Artificial Sequence: Synthetic oligonucleotide
  Antisense strand to SEQ ID NO: 261050
auucucacucucaagauag

SEQ ID NO: 261052 - RNA, 19 nt, Artificial Sequence
  Description of Artificial Sequence: Synthetic oligonucleotide
  Sense strand starting at position 1302 SEQ ID NO: 3357
gagugagaauucuugauug

SEQ ID NO: 261053 - RNA, 19 nt, Artificial Sequence
  Description of Artificial Sequence: Synthetic oligonucleotide
  Antisense strand to SEQ ID NO: 261052
caaucaagaauucucacuc

SEQ ID NO: 261054 - RNA, 19 nt, Artificial Sequence
  Description of Artificial Sequence: Synthetic oligonucleotide
  Sense strand starting at position 1313 SEQ ID NO: 3357
cuugauugagacugcaaau

SEQ ID NO: 261055 - RNA, 19 nt, Artificial Sequence
  Description of Artificial Sequence: Synthetic oligonucleotide
  Antisense strand to SEQ ID NO: 261054
auuugcagucucaaucaag

SEQ ID NO: 261056 - RNA, 19 nt, Artificial Sequence
  Description of Artificial Sequence: Synthetic oligonucleotide
  Sense strand starting at position 1643 SEQ ID NO: 3357
agggcaaaugcccauugua

SEQ ID NO: 261057 - RNA, 19 nt, Artificial Sequence
  Description of Artificial Sequence: Synthetic oligonucleotide
  Antisense strand to SEQ ID NO: 261056
uacaaugggcauuugcccu

SEQ ID NO: 261058 - RNA, 19 nt, Artificial Sequence
  Description of Artificial Sequence: Synthetic oligonucleotide
  Sense strand starting at position 1782 SEQ ID NO: 3357
ugaguuagauuacccagau

SEQ ID NO: 261059 - RNA, 19 nt, Artificial Sequence
  Description of Artificial Sequence: Synthetic oligonucleotide
  Antisense strand to SEQ ID NO: 261058
aucuggguaaucuaacuca

SEQ ID NO: 261060 - RNA, 19 nt, Artificial Sequence
  Description of Artificial Sequence: Synthetic oligonucleotide
  Sense strand starting at position 1783 SEQ ID NO: 3357
gaguuagauuacccagauu

SEQ ID NO: 261061 - RNA, 19 nt, Artificial Sequence
  Description of Artificial Sequence: Synthetic oligonucleotide
  Antisense strand to SEQ ID NO: 261060
aaucuggguaaucuaacuc

SEQ ID NO: 261062 - RNA, 19 nt, Artificial Sequence
  Description of Artificial Sequence: Synthetic oligonucleotide
  Sense strand starting at position 1838 SEQ ID NO: 3357
ggcaguuauggauacaucu

SEQ ID NO: 261063 - RNA, 19 nt, Artificial Sequence
  Description of Artificial Sequence: Synthetic oligonucleotide
  Antisense strand to SEQ ID NO: 261062
agauguauccauaacugcc

SEQ ID NO: 261064 - RNA, 19 nt, Artificial Sequence
  Description of Artificial Sequence: Synthetic oligonucleotide
  Sense strand starting at position 1845 SEQ ID NO: 3357
auggauacaucuucuggua

SEQ ID NO: 261065 - RNA, 19 nt, Artificial Sequence
  Description of Artificial Sequence: Synthetic oligonucleotide
  Antisense strand to SEQ ID NO: 261064
uaccagaagauguauccau

SEQ ID NO: 261066 - RNA, 19 nt, Artificial Sequence
  Description of Artificial Sequence: Synthetic oligonucleotide
  Sense strand starting at position 1884 SEQ ID NO: 3357
gucucuuaccugcaagacu

SEQ ID NO: 261067 - RNA, 19 nt, Artificial Sequence
  Description of Artificial Sequence: Synthetic oligonucleotide
  Antisense strand to SEQ ID NO: 261066
agucuugcagguaagagac

SEQ ID NO: 261068 - RNA, 19 nt, Artificial Sequence
  Description of Artificial Sequence: Synthetic oligonucleotide
  Sense strand starting at position 1892 SEQ ID NO: 3357
ccugcaagacuguaaacau

SEQ ID NO: 261069 - RNA, 19 nt, Artificial Sequence
  Description of Artificial Sequence: Synthetic oligonucleotide
  Antisense strand to SEQ ID NO: 261068
auguuuacagucuugcagg

SEQ ID NO: 261070 - RNA, 19 nt, Artificial Sequence
  Description of Artificial Sequence: Synthetic oligonucleotide
  Sense strand starting at position 1933 SEQ ID NO: 3357
aaagcuuuaguaggauacu

SEQ ID NO: 261071 - RNA, 19 nt, Artificial Sequence
  Description of Artificial Sequence: Synthetic oligonucleotide
  Antisense strand to SEQ ID NO: 261070
aguauccuacuaaagcuuu

SEQ ID NO: 261072 - RNA, 19 nt, Artificial Sequence
  Description of Artificial Sequence: Synthetic oligonucleotide
  Sense strand starting at position 1936 SEQ ID NO: 3357
gcuuuaguaggauacuagu

SEQ ID NO: 261073 - RNA, 19 nt, Artificial Sequence
  Description of Artificial Sequence: Synthetic oligonucleotide
  Antisense strand to SEQ ID NO: 261072
acuaguauccuacuaaagc

SEQ ID NO: 261074 - RNA, 19 nt, Artificial Sequence
  Description of Artificial Sequence: Synthetic oligonucleotide
  Sense strand starting at position 1956 SEQ ID NO: 3357
gccuguuagcugccaaagu

SEQ ID NO: 261075 - RNA, 19 nt, Artificial Sequence
  Description of Artificial Sequence: Synthetic oligonucleotide
  Antisense strand to SEQ ID NO: 261074
acuuuggcagcuaacaggc

SEQ ID NO: 261076 - RNA, 19 nt, Artificial Sequence
  Description of Artificial Sequence: Synthetic oligonucleotide
  Sense strand starting at position 2085 SEQ ID NO: 3357
ucuuaaguauuccuugaag

SEQ ID NO: 261077 - RNA, 19 nt, Artificial Sequence
  Description of Artificial Sequence: Synthetic oligonucleotide
  Antisense strand to SEQ ID NO: 261076
cuucaaggaauacuuaaga

SEQ ID NO: 261078 - RNA, 19 nt, Artificial Sequence
  Description of Artificial Sequence: Synthetic oligonucleotide
  Sense strand starting at position 2528 SEQ ID NO: 3357
gaagguauugcugacagca

SEQ ID NO: 261079 - RNA, 19 nt, Artificial Sequence
  Description of Artificial Sequence: Synthetic oligonucleotide
  Antisense strand to SEQ ID NO: 261078
ugcugucagcaauaccuuc

SEQ ID NO: 261080 - RNA, 19 nt, Artificial Sequence
  Description of Artificial Sequence: Synthetic oligonucleotide
  Sense strand starting at position 2649 SEQ ID NO: 3357
acaaguugggaaugugaua

SEQ ID NO: 261081 - RNA, 19 nt, Artificial Sequence
  Description of Artificial Sequence: Synthetic oligonucleotide
  Antisense strand to SEQ ID NO: 261080
uaucacauucccaacuugu

SEQ ID NO: 261082 - RNA, 19 nt, Artificial Sequence
  Description of Artificial Sequence: Synthetic oligonucleotide
  Sense strand starting at position 2654 SEQ ID NO: 3357
uugggaaugugauacauuu

SEQ ID NO: 261083 - RNA, 19 nt, Artificial Sequence
  Description of Artificial Sequence: Synthetic oligonucleotide
  Antisense strand to SEQ ID NO: 261082
aaauguaucacauucccaa

SEQ ID NO: 261084 - RNA, 19 nt, Artificial Sequence
  Description of Artificial Sequence: Synthetic oligonucleotide
  Sense strand starting at position 2660 SEQ ID NO: 3357
augugauacauuuguguuu

SEQ ID NO: 261085 - RNA, 19 nt, Artificial Sequence
  Description of Artificial Sequence: Synthetic oligonucleotide
  Antisense strand to SEQ ID NO: 261084
aaacacaaauguaucacau

SEQ ID NO: 261086 - RNA, 19 nt, Artificial Sequence
  Description of Artificial Sequence: Synthetic oligonucleotide
  Sense strand starting at position 2807 SEQ ID NO: 3357
acuggacuucuagggaagu

SEQ ID NO: 261087 - RNA, 19 nt, Artificial Sequence
  Description of Artificial Sequence: Synthetic oligonucleotide
  Antisense strand to SEQ ID NO: 261086
acuucccuagaaguccagu

SEQ ID NO: 261088 - RNA, 19 nt, Artificial Sequence
  Description of Artificial Sequence: Synthetic oligonucleotide
  Sense strand starting at position 2869 SEQ ID NO: 3357
gagcaaaucuuggucacug

SEQ ID NO: 261089 - RNA, 19 nt, Artificial Sequence
  Description of Artificial Sequence: Synthetic oligonucleotide
  Antisense strand to SEQ ID NO: 261088
cagugaccaagauuugcuc

SEQ ID NO: 261090 - RNA, 19 nt, Artificial Sequence
  Description of Artificial Sequence: Synthetic oligonucleotide
  Sense strand starting at position 2914 SEQ ID NO: 3357
ggauaacaccugcauccuu

SEQ ID NO: 261091 - RNA, 19 nt, Artificial Sequence
  Description of Artificial Sequence: Synthetic oligonucleotide
  Antisense strand to SEQ ID NO: 261090
aaggaugcagguguuaucc

SEQ ID NO: 261092 - RNA, 19 nt, Artificial Sequence
  Description of Artificial Sequence: Synthetic oligonucleotide
  Sense strand starting at position 2960 SEQ ID NO: 3357
gugaaugaccauuguaaac

SEQ ID NO: 261093 - RNA, 19 nt, Artificial Sequence
  Description of Artificial Sequence: Synthetic oligonucleotide
  Antisense strand to SEQ ID NO: 261092
guuuacaauggucauucac

SEQ ID NO: 261094 - RNA, 19 nt, Artificial Sequence
  Description of Artificial Sequence: Synthetic oligonucleotide
  Sense strand starting at position 3009 SEQ ID NO: 3357
caaacauuggccuggagau

SEQ ID NO: 261095 - RNA, 19 nt, Artificial Sequence
  Description of Artificial Sequence: Synthetic oligonucleotide
  Antisense strand to SEQ ID NO: 261094
aucuccaggccaauguuug

SEQ ID NO: 261096 - RNA, 19 nt, Artificial Sequence
  Description of Artificial Sequence: Synthetic oligonucleotide
  Sense strand starting at position 3010 SEQ ID NO: 3357
aaacauuggccuggagauu

SEQ ID NO: 261097 - RNA, 19 nt, Artificial Sequence
  Description of Artificial Sequence: Synthetic oligonucleotide
  Antisense strand to SEQ ID NO: 261096
aaucuccaggccaauguuu

SEQ ID NO: 261098 - RNA, 19 nt, Artificial Sequence
  Description of Artificial Sequence: Synthetic oligonucleotide
  Sense strand starting at position 3181 SEQ ID NO: 3357
agccuaucaucauuggaaa

SEQ ID NO: 261099 - RNA, 19 nt, Artificial Sequence
  Description of Artificial Sequence: Synthetic oligonucleotide
  Antisense strand to SEQ ID NO: 261098
uuuccaaugaugauaggcu

SEQ ID NO: 261100 - RNA, 19 nt, Artificial Sequence
  Description of Artificial Sequence: Synthetic oligonucleotide
  Sense strand starting at position 3182 SEQ ID NO: 3357
gccuaucaucauuggaaau

SEQ ID NO: 261101 - RNA, 19 nt, Artificial Sequence
  Description of Artificial Sequence: Synthetic oligonucleotide
  Antisense strand to SEQ ID NO: 261100
auuuccaaugaugauaggc

SEQ ID NO: 261102 - RNA, 19 nt, Artificial Sequence
  Description of Artificial Sequence: Synthetic oligonucleotide
  Sense strand starting at position 3200 SEQ ID NO: 3357
ucuucucaaugggucaauu

SEQ ID NO: 261103 - RNA, 19 nt, Artificial Sequence
  Description of Artificial Sequence: Synthetic oligonucleotide
  Antisense strand to SEQ ID NO: 261102
aauugacccauugagaaga

SEQ ID NO: 261104 - RNA, 19 nt, Artificial Sequence
  Description of Artificial Sequence: Synthetic oligonucleotide
  Sense strand starting at position 3310 SEQ ID NO: 3357
ugguuauuuauguguuugu

SEQ ID NO: 261105 - RNA, 19 nt, Artificial Sequence
  Description of Artificial Sequence: Synthetic oligonucleotide
  Antisense strand to SEQ ID NO: 261104
acaaacacauaaauaacca

SEQ ID NO: 261106 - RNA, 19 nt, Artificial Sequence
  Description of Artificial Sequence: Synthetic oligonucleotide
  Sense strand starting at position 3311 SEQ ID NO: 3357
gguuauuuauguguuuguu

SEQ ID NO: 261107 - RNA, 19 nt, Artificial Sequence
  Description of Artificial Sequence: Synthetic oligonucleotide
  Antisense strand to SEQ ID NO: 261106
aacaaacacauaaauaacc

SEQ ID NO: 261108 - RNA, 19 nt, Artificial Sequence
  Description of Artificial Sequence: Synthetic oligonucleotide
  Sense strand starting at position 3674 SEQ ID NO: 3357
gggugcuauaacuauuggu

SEQ ID NO: 261109 - RNA, 19 nt, Artificial Sequence
  Description of Artificial Sequence: Synthetic oligonucleotide
  Antisense strand to SEQ ID NO: 261108
accaauaguuauagcaccc

SEQ ID NO: 261110 - RNA, 19 nt, Artificial Sequence
  Description of Artificial Sequence: Synthetic oligonucleotide
  Sense strand starting at position 3750 SEQ ID NO: 3357
uacuuagaggcauggauua

SEQ ID NO: 261111 - RNA, 19 nt, Artificial Sequence
  Description of Artificial Sequence: Synthetic oligonucleotide
  Antisense strand to SEQ ID NO: 261110
uaauccaugccucuaagua

SEQ ID NO: 261112 - RNA, 19 nt, Artificial Sequence
  Description of Artificial Sequence: Synthetic oligonucleotide
  Sense strand starting at position 80 SEQ ID NO: 3358
aguuaugggcccugaggga

SEQ ID NO: 261113 - RNA, 19 nt, Artificial Sequence
  Description of Artificial Sequence: Synthetic oligonucleotide
  Antisense strand to SEQ ID NO: 261112
ucccucagggcccauaacu

SEQ ID NO: 261114 - RNA, 19 nt, Artificial Sequence
  Description of Artificial Sequence: Synthetic oligonucleotide
  Sense strand starting at position 381 SEQ ID NO: 3358
auaguccucuucucagaag

SEQ ID NO: 261115 - RNA, 19 nt, Artificial Sequence
  Description of Artificial Sequence: Synthetic oligonucleotide
  Antisense strand to SEQ ID NO: 261114
cuucugagaagaggacuau

SEQ ID NO: 261116 - RNA, 19 nt, Artificial Sequence
  Description of Artificial Sequence: Synthetic oligonucleotide
  Sense strand starting at position 400 SEQ ID NO: 3358
gccagucaucacuagaauc

SEQ ID NO: 261117 - RNA, 19 nt, Artificial Sequence
  Description of Artificial Sequence: Synthetic oligonucleotide
  Antisense strand to SEQ ID NO: 261116
gauucuagugaugacuggc

SEQ ID NO: 261118 - RNA, 19 nt, Artificial Sequence
  Description of Artificial Sequence: Synthetic oligonucleotide
  Sense strand starting at position 439 SEQ ID NO: 3358
ugggcaagaccucaucuua

SEQ ID NO: 261119 - RNA, 19 nt, Artificial Sequence
  Description of Artificial Sequence: Synthetic oligonucleotide
  Antisense strand to SEQ ID NO: 261118
uaagaugaggucuugccca

SEQ ID NO: 261120 - RNA, 19 nt, Artificial Sequence
  Description of Artificial Sequence: Synthetic oligonucleotide
  Sense strand starting at position 605 SEQ ID NO: 3358
ugagguuaguacucaauca

SEQ ID NO: 261121 - RNA, 19 nt, Artificial Sequence
  Description of Artificial Sequence: Synthetic oligonucleotide
  Antisense strand to SEQ ID NO: 261120
ugauugaguacuaaccuca

SEQ ID NO: 261122 - RNA, 19 nt, Artificial Sequence
  Description of Artificial Sequence: Synthetic oligonucleotide
  Sense strand starting at position 641 SEQ ID NO: 3358
gguaucugaucacuccaaa

SEQ ID NO: 261123 - RNA, 19 nt, Artificial Sequence
  Description of Artificial Sequence: Synthetic oligonucleotide
  Antisense strand to SEQ ID NO: 261122
uuuggagugaucagauacc

SEQ ID NO: 261124 - RNA, 19 nt, Artificial Sequence
  Description of Artificial Sequence: Synthetic oligonucleotide
  Sense strand starting at position 801 SEQ ID NO: 3358
ucucaaagcugauuacuga

SEQ ID NO: 261125 - RNA, 19 nt, Artificial Sequence
  Description of Artificial Sequence: Synthetic oligonucleotide
  Antisense strand to SEQ ID NO: 261124
ucaguaaucagcuuugaga

SEQ ID NO: 261126 - RNA, 19 nt, Artificial Sequence
  Description of Artificial Sequence: Synthetic oligonucleotide
  Sense strand starting at position 942 SEQ ID NO: 3358
uuaggugugaucuaaugug

SEQ ID NO: 261127 - RNA, 19 nt, Artificial Sequence
  Description of Artificial Sequence: Synthetic oligonucleotide
  Antisense strand to SEQ ID NO: 261126
cacauuagaucacaccuaa

SEQ ID NO: 261128 - RNA, 19 nt, Artificial Sequence
  Description of Artificial Sequence: Synthetic oligonucleotide
  Sense strand starting at position 1006 SEQ ID NO: 3358
ugccauaacguauaugaaa

SEQ ID NO: 261129 - RNA, 19 nt, Artificial Sequence
  Description of Artificial Sequence: Synthetic oligonucleotide
  Antisense strand to SEQ ID NO: 261128
uuucauauacguuauggca

SEQ ID NO: 261130 - RNA, 19 nt, Artificial Sequence
  Description of Artificial Sequence: Synthetic oligonucleotide
  Sense strand starting at position 1392 SEQ ID NO: 3358
cugguaugcccgccagagu

SEQ ID NO: 261131 - RNA, 19 nt, Artificial Sequence
  Description of Artificial Sequence: Synthetic oligonucleotide
  Antisense strand to SEQ ID NO: 261130
acucuggcgggcauaccag

SEQ ID NO: 261132 - RNA, 19 nt, Artificial Sequence
  Description of Artificial Sequence: Synthetic oligonucleotide
  Sense strand starting at position 1519 SEQ ID NO: 3358
cuuccaaugugacuuaaag

SEQ ID NO: 261133 - RNA, 19 nt, Artificial Sequence
  Description of Artificial Sequence: Synthetic oligonucleotide
  Antisense strand to SEQ ID NO: 261132
cuuuaagucacauuggaag

SEQ ID NO: 261134 - RNA, 19 nt, Artificial Sequence
  Description of Artificial Sequence: Synthetic oligonucleotide
  Sense strand starting at position 1553 SEQ ID NO: 3358
gaaggaugcuucccagaca

SEQ ID NO: 261135 - RNA, 19 nt, Artificial Sequence
  Description of Artificial Sequence: Synthetic oligonucleotide
  Antisense strand to SEQ ID NO: 261134
ugucugggaagcauccuuc

SEQ ID NO: 261136 - RNA, 19 nt, Artificial Sequence
  Description of Artificial Sequence: Synthetic oligonucleotide
  Sense strand starting at position 2061 SEQ ID NO: 3358
gguggaccgagccaugaau

SEQ ID NO: 261137 - RNA, 19 nt, Artificial Sequence
  Description of Artificial Sequence: Synthetic oligonucleotide
  Antisense strand to SEQ ID NO: 261136
auucauggcucgguccacc

SEQ ID NO: 261138 - RNA, 19 nt, Artificial Sequence
  Description of Artificial Sequence: Synthetic oligonucleotide
  Sense strand starting at position 2073 SEQ ID NO: 3358
caugaauacccguggagag

SEQ ID NO: 261139 - RNA, 19 nt, Artificial Sequence
  Description of Artificial Sequence: Synthetic oligonucleotide
  Antisense strand to SEQ ID NO: 261138
cucuccacggguauucaug

SEQ ID NO: 261140 - RNA, 19 nt, Artificial Sequence
  Description of Artificial Sequence: Synthetic oligonucleotide
  Sense strand starting at position 2105 SEQ ID NO: 3358
ccacccacucugugagaga

SEQ ID NO: 261141 - RNA, 19 nt, Artificial Sequence
  Description of Artificial Sequence: Synthetic oligonucleotide
  Antisense strand to SEQ ID NO: 261140
ucucucacagagugggugg

SEQ ID NO: 261142 - RNA, 19 nt, Artificial Sequence
  Description of Artificial Sequence: Synthetic oligonucleotide
  Sense strand starting at position 2306 SEQ ID NO: 3358
uugucucagcaaucguagu

SEQ ID NO: 261143 - RNA, 19 nt, Artificial Sequence
  Description of Artificial Sequence: Synthetic oligonucleotide
  Antisense strand to SEQ ID NO: 261142
acuacgauugcugagacaa

SEQ ID NO: 261144 - RNA, 19 nt, Artificial Sequence
  Description of Artificial Sequence: Synthetic oligonucleotide
  Sense strand starting at position 2313 SEQ ID NO: 3358
agcaaucguaguuagggaa

SEQ ID NO: 261145 - RNA, 19 nt, Artificial Sequence
  Description of Artificial Sequence: Synthetic oligonucleotide
  Antisense strand to SEQ ID NO: 261144
uucccuaacuacgauugcu

SEQ ID NO: 261146 - RNA, 19 nt, Artificial Sequence
  Description of Artificial Sequence: Synthetic oligonucleotide
  Sense strand starting at position 2317 SEQ ID NO: 3358
aucguaguuagggaacuau

SEQ ID NO: 261147 - RNA, 19 nt, Artificial Sequence
  Description of Artificial Sequence: Synthetic oligonucleotide
  Antisense strand to SEQ ID NO: 261146
auaguucccuaacuacgau

SEQ ID NO: 261148 - RNA, 19 nt, Artificial Sequence
  Description of Artificial Sequence: Synthetic oligonucleotide
  Sense strand starting at position 2420 SEQ ID NO: 3358
ucauauuugucguccucau

SEQ ID NO: 261149 - RNA, 19 nt, Artificial Sequence
  Description of Artificial Sequence: Synthetic oligonucleotide
  Antisense strand to SEQ ID NO: 261148
augaggacgacaaauauga

SEQ ID NO: 261150 - RNA, 19 nt, Artificial Sequence
  Description of Artificial Sequence: Synthetic oligonucleotide
  Sense strand starting at position 2424 SEQ ID NO: 3358
auuugucguccucauagca

SEQ ID NO: 261151 - RNA, 19 nt, Artificial Sequence
  Description of Artificial Sequence: Synthetic oligonucleotide
  Antisense strand to SEQ ID NO: 261150
ugcuaugaggacgacaaau

SEQ ID NO: 261152 - RNA, 19 nt, Artificial Sequence
  Description of Artificial Sequence: Synthetic oligonucleotide
  Sense strand starting at position 2450 SEQ ID NO: 3358
cagugcuuugccgcaaaca

SEQ ID NO: 261153 - RNA, 19 nt, Artificial Sequence
  Description of Artificial Sequence: Synthetic oligonucleotide
  Antisense strand to SEQ ID NO: 261152
uguuugcggcaaagcacug

SEQ ID NO: 261154 - RNA, 19 nt, Artificial Sequence
  Description of Artificial Sequence: Synthetic oligonucleotide
  Sense strand starting at position 2490 SEQ ID NO: 3358
auguaugauucuuccacag

SEQ ID NO: 261155 - RNA, 19 nt, Artificial Sequence
  Description of Artificial Sequence: Synthetic oligonucleotide
  Antisense strand to SEQ ID NO: 261154
cuguggaagaaucauacau

SEQ ID NO: 261156 - RNA, 19 nt, Artificial Sequence
  Description of Artificial Sequence: Synthetic oligonucleotide
  Sense strand starting at position 2572 SEQ ID NO: 3358
agccuuggucaugacuaga

SEQ ID NO: 261157 - RNA, 19 nt, Artificial Sequence
  Description of Artificial Sequence: Synthetic oligonucleotide
  Antisense strand to SEQ ID NO: 261156
ucuagucaugaccaaggcu

SEQ ID NO: 261158 - RNA, 19 nt, Artificial Sequence
  Description of Artificial Sequence: Synthetic oligonucleotide
  Sense strand starting at position 2575 SEQ ID NO: 3358
cuuggucaugacuagacuu

SEQ ID NO: 261159 - RNA, 19 nt, Artificial Sequence
  Description of Artificial Sequence: Synthetic oligonucleotide
  Antisense strand to SEQ ID NO: 261158
aagucuagucaugaccaag

SEQ ID NO: 261160 - RNA, 19 nt, Artificial Sequence
  Description of Artificial Sequence: Synthetic oligonucleotide
  Sense strand starting at position 2844 SEQ ID NO: 3358
auucuaagagucugugaau

SEQ ID NO: 261161 - RNA, 19 nt, Artificial Sequence
  Description of Artificial Sequence: Synthetic oligonucleotide
  Antisense strand to SEQ ID NO: 261160
auucacagacucuuagaau

SEQ ID NO: 261162 - RNA, 19 nt, Artificial Sequence
  Description of Artificial Sequence: Synthetic oligonucleotide
  Sense strand starting at position 2845 SEQ ID NO: 3358
uucuaagagucugugaaua

SEQ ID NO: 261163 - RNA, 19 nt, Artificial Sequence
  Description of Artificial Sequence: Synthetic oligonucleotide
  Antisense strand to SEQ ID NO: 261162
uauucacagacucuuagaa

SEQ ID NO: 261164 - RNA, 19 nt, Artificial Sequence
  Description of Artificial Sequence: Synthetic oligonucleotide
  Sense strand starting at position 2865 SEQ ID NO: 3358
agagcaauauccuuucuag

SEQ ID NO: 261165 - RNA, 19 nt, Artificial Sequence
  Description of Artificial Sequence: Synthetic oligonucleotide
  Antisense strand to SEQ ID NO: 261164
cuagaaaggauauugcucu

SEQ ID NO: 261166 - RNA, 19 nt, Artificial Sequence
  Description of Artificial Sequence: Synthetic oligonucleotide
  Sense strand starting at position 2937 SEQ ID NO: 3358
cuuuacuuaucuccaggga

SEQ ID NO: 261167 - RNA, 19 nt, Artificial Sequence
  Description of Artificial Sequence: Synthetic oligonucleotide
  Antisense strand to SEQ ID NO: 261166
ucccuggagauaaguaaag

SEQ ID NO: 261168 - RNA, 19 nt, Artificial Sequence
  Description of Artificial Sequence: Synthetic oligonucleotide
  Sense strand starting at position 3024 SEQ ID NO: 3358
uuccuuuaugauuaaggca

SEQ ID NO: 261169 - RNA, 19 nt, Artificial Sequence
  Description of Artificial Sequence: Synthetic oligonucleotide
  Antisense strand to SEQ ID NO: 261168
ugccuuaaucauaaaggaa

SEQ ID NO: 261170 - RNA, 19 nt, Artificial Sequence
  Description of Artificial Sequence: Synthetic oligonucleotide
  Sense strand starting at position 3054 SEQ ID NO: 3358
gccacaaauccuggagaaa

SEQ ID NO: 261171 - RNA, 19 nt, Artificial Sequence
  Description of Artificial Sequence: Synthetic oligonucleotide
  Antisense strand to SEQ ID NO: 261170
uuucuccaggauuuguggc

SEQ ID NO: 261172 - RNA, 19 nt, Artificial Sequence
  Description of Artificial Sequence: Synthetic oligonucleotide
  Sense strand starting at position 3087 SEQ ID NO: 3358
aagagaagucaaugucaca

SEQ ID NO: 261173 - RNA, 19 nt, Artificial Sequence
  Description of Artificial Sequence: Synthetic oligonucleotide
  Antisense strand to SEQ ID NO: 261172
ugugacauugacuucucuu

SEQ ID NO: 261174 - RNA, 19 nt, Artificial Sequence
  Description of Artificial Sequence: Synthetic oligonucleotide
  Sense strand starting at position 3572 SEQ ID NO: 3358
aagguagagaaguguauga

SEQ ID NO: 261175 - RNA, 19 nt, Artificial Sequence
  Description of Artificial Sequence: Synthetic oligonucleotide
  Antisense strand to SEQ ID NO: 261174
ucauacacuucucuaccuu

SEQ ID NO: 261176 - RNA, 19 nt, Artificial Sequence
  Description of Artificial Sequence: Synthetic oligonucleotide
  Sense strand starting at position 3583 SEQ ID NO: 3358
guguaugaacaauggauag

SEQ ID NO: 261177 - RNA, 19 nt, Artificial Sequence
  Description of Artificial Sequence: Synthetic oligonucleotide
  Antisense strand to SEQ ID NO: 261176
cuauccauuguucauacac

SEQ ID NO: 261178 - RNA, 19 nt, Artificial Sequence
  Description of Artificial Sequence: Synthetic oligonucleotide
  Sense strand starting at position 3597 SEQ ID NO: 3358
gauaguaugaaguggguau

SEQ ID NO: 261179 - RNA, 19 nt, Artificial Sequence
  Description of Artificial Sequence: Synthetic oligonucleotide
  Antisense strand to SEQ ID NO: 261178
auacccacuucauacuauc

SEQ ID NO: 261180 - RNA, 19 nt, Artificial Sequence
  Description of Artificial Sequence: Synthetic oligonucleotide
  Sense strand starting at position 3598 SEQ ID NO: 3358
auaguaugaaguggguaua

SEQ ID NO: 261181 - RNA, 19 nt, Artificial Sequence
  Description of Artificial Sequence: Synthetic oligonucleotide
  Antisense strand to SEQ ID NO: 261180
uauacccacuucauacuau

SEQ ID NO: 261182 - RNA, 19 nt, Artificial Sequence
  Description of Artificial Sequence: Synthetic oligonucleotide
  Sense strand starting at position 3601 SEQ ID NO: 3358
guaugaaguggguauauug

SEQ ID NO: 261183 - RNA, 19 nt, Artificial Sequence
  Description of Artificial Sequence: Synthetic oligonucleotide
  Antisense strand to SEQ ID NO: 261182
caauauacccacuucauac

SEQ ID NO: 261184 - RNA, 19 nt, Artificial Sequence
  Description of Artificial Sequence: Synthetic oligonucleotide
  Sense strand starting at position 3681 SEQ ID NO: 3358
cugagacucaguugcagaa

SEQ ID NO: 261185 - RNA, 19 nt, Artificial Sequence
  Description of Artificial Sequence: Synthetic oligonucleotide
  Antisense strand to SEQ ID NO: 261184
uucugcaacugagucucag

SEQ ID NO: 261186 - RNA, 19 nt, Artificial Sequence
  Description of Artificial Sequence: Synthetic oligonucleotide
  Sense strand starting at position 3788 SEQ ID NO: 3358
uguagaauugaguaaagcu

SEQ ID NO: 261187 - RNA, 19 nt, Artificial Sequence
  Description of Artificial Sequence: Synthetic oligonucleotide
  Antisense strand to SEQ ID NO: 261186
agcuuuacucaauucuaca

SEQ ID NO: 261188 - RNA, 19 nt, Artificial Sequence
  Description of Artificial Sequence: Synthetic oligonucleotide
  Sense strand starting at position 3865 SEQ ID NO: 3358
gcuggaucccaauagggua

SEQ ID NO: 261189 - RNA, 19 nt, Artificial Sequence
  Description of Artificial Sequence: Synthetic oligonucleotide
  Antisense strand to SEQ ID NO: 261188
uacccuauugggauccagc

SEQ ID NO: 261190 - RNA, 19 nt, Artificial Sequence
  Description of Artificial Sequence: Synthetic oligonucleotide
  Sense strand starting at position 3963 SEQ ID NO: 3358
uucucaucuguacaggaua

SEQ ID NO: 261191 - RNA, 19 nt, Artificial Sequence
  Description of Artificial Sequence: Synthetic oligonucleotide
  Antisense strand to SEQ ID NO: 261190
uauccuguacagaugagaa

SEQ ID NO: 261192 - RNA, 19 nt, Artificial Sequence
  Description of Artificial Sequence: Synthetic oligonucleotide
  Sense strand starting at position 167 SEQ ID NO: 3359
gccucugagguugaaacua

SEQ ID NO: 261193 - RNA, 19 nt, Artificial Sequence
  Description of Artificial Sequence: Synthetic oligonucleotide
  Antisense strand to SEQ ID NO: 261192
uaguuucaaccucagaggc

SEQ ID NO: 261194 - RNA, 19 nt, Artificial Sequence
  Description of Artificial Sequence: Synthetic oligonucleotide
  Sense strand starting at position 261 SEQ ID NO: 3359
gcaguuacccacuaccuau

SEQ ID NO: 261195 - RNA, 19 nt, Artificial Sequence
  Description of Artificial Sequence: Synthetic oligonucleotide
  Antisense strand to SEQ ID NO: 261194
auagguaguggguaacugc

SEQ ID NO: 261196 - RNA, 19 nt, Artificial Sequence
  Description of Artificial Sequence: Synthetic oligonucleotide
  Sense strand starting at position 336 SEQ ID NO: 3359
gugggagugucauugacaa

SEQ ID NO: 261197 - RNA, 19 nt, Artificial Sequence
  Description of Artificial Sequence: Synthetic oligonucleotide
  Antisense strand to SEQ ID NO: 261196
uugucaaugacacucccac

SEQ ID NO: 261198 - RNA, 19 nt, Artificial Sequence
  Description of Artificial Sequence: Synthetic oligonucleotide
  Sense strand starting at position 343 SEQ ID NO: 3359
ugucauugacaagagcaau

SEQ ID NO: 261199 - RNA, 19 nt, Artificial Sequence
  Description of Artificial Sequence: Synthetic oligonucleotide
  Antisense strand to SEQ ID NO: 261198
auugcucuugucaaugaca

SEQ ID NO: 261200 - RNA, 19 nt, Artificial Sequence
  Description of Artificial Sequence: Synthetic oligonucleotide
  Sense strand starting at position 448 SEQ ID NO: 3359
cgaggaguagaugguaauu

SEQ ID NO: 261201 - RNA, 19 nt, Artificial Sequence
  Description of Artificial Sequence: Synthetic oligonucleotide
  Antisense strand to SEQ ID NO: 261200
aauuaccaucuacuccucg

SEQ ID NO: 261202 - RNA, 19 nt, Artificial Sequence
  Description of Artificial Sequence: Synthetic oligonucleotide
  Sense strand starting at position 598 SEQ ID NO: 3359
ggagccaaugaguggauua

SEQ ID NO: 261203 - RNA, 19 nt, Artificial Sequence
  Description of Artificial Sequence: Synthetic oligonucleotide
  Antisense strand to SEQ ID NO: 261202
uaauccacucauuggcucc

SEQ ID NO: 261204 - RNA, 19 nt, Artificial Sequence
  Description of Artificial Sequence: Synthetic oligonucleotide
  Sense strand starting at position 600 SEQ ID NO: 3359
agccaaugaguggauuauu

SEQ ID NO: 261205 - RNA, 19 nt, Artificial Sequence
  Description of Artificial Sequence: Synthetic oligonucleotide
  Antisense strand to SEQ ID NO: 261204
aauaauccacucauuggcu

SEQ ID NO: 261206 - RNA, 19 nt, Artificial Sequence
  Description of Artificial Sequence: Synthetic oligonucleotide
  Sense strand starting at position 631 SEQ ID NO: 3359
aggaguguacacuguuuaa

SEQ ID NO: 261207 - RNA, 19 nt, Artificial Sequence
  Description of Artificial Sequence: Synthetic oligonucleotide
  Antisense strand to SEQ ID NO: 261206
uuaaacaguguacacuccu

SEQ ID NO: 261208 - RNA, 19 nt, Artificial Sequence
  Description of Artificial Sequence: Synthetic oligonucleotide
  Sense strand starting at position 688 SEQ ID NO: 3359
auguaagaucuccaaaguc

SEQ ID NO: 261209 - RNA, 19 nt, Artificial Sequence
  Description of Artificial Sequence: Synthetic oligonucleotide
  Antisense strand to SEQ ID NO: 261208
gacuuuggagaucuuacau

SEQ ID NO: 261210 - RNA, 19 nt, Artificial Sequence
  Description of Artificial Sequence: Synthetic oligonucleotide
  Sense strand starting at position 712 SEQ ID NO: 3359
gguguuuggacuugauaga

SEQ ID NO: 261211 - RNA, 19 nt, Artificial Sequence
  Description of Artificial Sequence: Synthetic oligonucleotide
  Antisense strand to SEQ ID NO: 261210
ucuaucaaguccaaacacc

SEQ ID NO: 261212 - RNA, 19 nt, Artificial Sequence
  Description of Artificial Sequence: Synthetic oligonucleotide
  Sense strand starting at position 713 SEQ ID NO: 3359
guguuuggacuugauagag

SEQ ID NO: 261213 - RNA, 19 nt, Artificial Sequence
  Description of Artificial Sequence: Synthetic oligonucleotide
  Antisense strand to SEQ ID NO: 261212
cucuaucaaguccaaacac

SEQ ID NO: 261214 - RNA, 19 nt, Artificial Sequence
  Description of Artificial Sequence: Synthetic oligonucleotide
  Sense strand starting at position 740 SEQ ID NO: 3359
gguaaaucauuccuuagaa

SEQ ID NO: 261215 - RNA, 19 nt, Artificial Sequence
  Description of Artificial Sequence: Synthetic oligonucleotide
  Antisense strand to SEQ ID NO: 261214
uucuaaggaaugauuuacc

SEQ ID NO: 261216 - RNA, 19 nt, Artificial Sequence
  Description of Artificial Sequence: Synthetic oligonucleotide
  Sense strand starting at position 803 SEQ ID NO: 3359
aagaaacccuggcuuuagu

SEQ ID NO: 261217 - RNA, 19 nt, Artificial Sequence
  Description of Artificial Sequence: Synthetic oligonucleotide
  Antisense strand to SEQ ID NO: 261216
acuaaagccaggguuucuu

SEQ ID NO: 261218 - RNA, 19 nt, Artificial Sequence
  Description of Artificial Sequence: Synthetic oligonucleotide
  Sense strand starting at position 812 SEQ ID NO: 3359
uggcuuuaguauuugcuua

SEQ ID NO: 261219 - RNA, 19 nt, Artificial Sequence
  Description of Artificial Sequence: Synthetic oligonucleotide
  Antisense strand to SEQ ID NO: 261218
uaagcaaauacuaaagcca

SEQ ID NO: 261220 - RNA, 19 nt, Artificial Sequence
  Description of Artificial Sequence: Synthetic oligonucleotide
  Sense strand starting at position 814 SEQ ID NO: 3359
gcuuuaguauuugcuuacu

SEQ ID NO: 261221 - RNA, 19 nt, Artificial Sequence
  Description of Artificial Sequence: Synthetic oligonucleotide
  Antisense strand to SEQ ID NO: 261220
aguaagcaaauacuaaagc

SEQ ID NO: 261222 - RNA, 19 nt, Artificial Sequence
  Description of Artificial Sequence: Synthetic oligonucleotide
  Sense strand starting at position 816 SEQ ID NO: 3359
uuuaguauuugcuuacuca

SEQ ID NO: 261223 - RNA, 19 nt, Artificial Sequence
  Description of Artificial Sequence: Synthetic oligonucleotide
  Antisense strand to SEQ ID NO: 261222
ugaguaagcaaauacuaaa

SEQ ID NO: 261224 - RNA, 19 nt, Artificial Sequence
  Description of Artificial Sequence: Synthetic oligonucleotide
  Sense strand starting at position 1026 SEQ ID NO: 3359
auugcuaaugagcauuaca

SEQ ID NO: 261225 - RNA, 19 nt, Artificial Sequence
  Description of Artificial Sequence: Synthetic oligonucleotide
  Antisense strand to SEQ ID NO: 261224
uguaaugcucauuagcaau

SEQ ID NO: 261226 - RNA, 19 nt, Artificial Sequence
  Description of Artificial Sequence: Synthetic oligonucleotide
  Sense strand starting at position 1212 SEQ ID NO: 3359
ugcugaguggcacagaaau

SEQ ID NO: 261227 - RNA, 19 nt, Artificial Sequence
  Description of Artificial Sequence: Synthetic oligonucleotide
  Antisense strand to SEQ ID NO: 261226
auuucugugccacucagca

SEQ ID NO: 261228 - RNA, 19 nt, Artificial Sequence
  Description of Artificial Sequence: Synthetic oligonucleotide
  Sense strand starting at position 1363 SEQ ID NO: 3359
uggcacuuugcacagacau

SEQ ID NO: 261229 - RNA, 19 nt, Artificial Sequence
  Description of Artificial Sequence: Synthetic oligonucleotide
  Antisense strand to SEQ ID NO: 261228
augucugugcaaagugcca

SEQ ID NO: 261230 - RNA, 19 nt, Artificial Sequence
  Description of Artificial Sequence: Synthetic oligonucleotide
  Sense strand starting at position 1401 SEQ ID NO: 3359
cuccgaagauuugugcuuu

SEQ ID NO: 261231 - RNA, 19 nt, Artificial Sequence
  Description of Artificial Sequence: Synthetic oligonucleotide
  Antisense strand to SEQ ID NO: 261230
aaagcacaaaucuucggag

SEQ ID NO: 261232 - RNA, 19 nt, Artificial Sequence
  Description of Artificial Sequence: Synthetic oligonucleotide
  Sense strand starting at position 2120 SEQ ID NO: 3359
cgagguugggcugaaucua

SEQ ID NO: 261233 - RNA, 19 nt, Artificial Sequence
  Description of Artificial Sequence: Synthetic oligonucleotide
  Antisense strand to SEQ ID NO: 261232
uagauucagcccaaccucg

SEQ ID NO: 261234 - RNA, 19 nt, Artificial Sequence
  Description of Artificial Sequence: Synthetic oligonucleotide
  Sense strand starting at position 2163 SEQ ID NO: 3359
gcgcgaggaaauuaaagau

SEQ ID NO: 261235 - RNA, 19 nt, Artificial Sequence
  Description of Artificial Sequence: Synthetic oligonucleotide
  Antisense strand to SEQ ID NO: 261234
aucuuuaauuuccucgcgc

SEQ ID NO: 261236 - RNA, 19 nt, Artificial Sequence
  Description of Artificial Sequence: Synthetic oligonucleotide
  Sense strand starting at position 2421 SEQ ID NO: 3359
uuuauuugugcuuguacaa

SEQ ID NO: 261237 - RNA, 19 nt, Artificial Sequence
  Description of Artificial Sequence: Synthetic oligonucleotide
  Antisense strand to SEQ ID NO: 261236
uuguacaagcacaaauaaa

SEQ ID NO: 261238 - RNA, 19 nt, Artificial Sequence
  Description of Artificial Sequence: Synthetic oligonucleotide
  Sense strand starting at position 2546 SEQ ID NO: 3359
ccuugucagcgcguggaua

SEQ ID NO: 261239 - RNA, 19 nt, Artificial Sequence
  Description of Artificial Sequence: Synthetic oligonucleotide
  Antisense strand to SEQ ID NO: 261238
uauccacgcgcugacaagg

SEQ ID NO: 261240 - RNA, 19 nt, Artificial Sequence
  Description of Artificial Sequence: Synthetic oligonucleotide
  Sense strand starting at position 2715 SEQ ID NO: 3359
ugaacacgucugcaagaau

SEQ ID NO: 261241 - RNA, 19 nt, Artificial Sequence
  Description of Artificial Sequence: Synthetic oligonucleotide
  Antisense strand to SEQ ID NO: 261240
auucuugcagacguguuca

SEQ ID NO: 261242 - RNA, 19 nt, Artificial Sequence
  Description of Artificial Sequence: Synthetic oligonucleotide
  Sense strand starting at position 3291 SEQ ID NO: 3359
uguuaugugcuggguauuu

SEQ ID NO: 261243 - RNA, 19 nt, Artificial Sequence
  Description of Artificial Sequence: Synthetic oligonucleotide
  Antisense strand to SEQ ID NO: 261242
aaauacccagcacauaaca

SEQ ID NO: 261244 - RNA, 19 nt, Artificial Sequence
  Description of Artificial Sequence: Synthetic oligonucleotide
  Sense strand starting at position 3308 SEQ ID NO: 3359
uuucuaagagccgggaaua

SEQ ID NO: 261245 - RNA, 19 nt, Artificial Sequence
  Description of Artificial Sequence: Synthetic oligonucleotide
  Antisense strand to SEQ ID NO: 261244
uauucccggcucuuagaaa

SEQ ID NO: 261246 - RNA, 19 nt, Artificial Sequence
  Description of Artificial Sequence: Synthetic oligonucleotide
  Sense strand starting at position 3309 SEQ ID NO: 3359
uucuaagagccgggaauaa

SEQ ID NO: 261247 - RNA, 19 nt, Artificial Sequence
  Description of Artificial Sequence: Synthetic oligonucleotide
  Antisense strand to SEQ ID NO: 261246
uuauucccggcucuuagaa

SEQ ID NO: 261248 - RNA, 19 nt, Artificial Sequence
  Description of Artificial Sequence: Synthetic oligonucleotide
  Sense strand starting at position 3409 SEQ ID NO: 3359
auguuaggaguccauaugu

SEQ ID NO: 261249 - RNA, 19 nt, Artificial Sequence
  Description of Artificial Sequence: Synthetic oligonucleotide
  Antisense strand to SEQ ID NO: 261248
acauauggacuccuaacau

SEQ ID NO: 261250 - RNA, 19 nt, Artificial Sequence
  Description of Artificial Sequence: Synthetic oligonucleotide
  Sense strand starting at position 3414 SEQ ID NO: 3359
aggaguccauauguacuau

SEQ ID NO: 261251 - RNA, 19 nt, Artificial Sequence
  Description of Artificial Sequence: Synthetic oligonucleotide
  Antisense strand to SEQ ID NO: 261250
auaguacauauggacuccu

SEQ ID NO: 261252 - RNA, 19 nt, Artificial Sequence
  Description of Artificial Sequence: Synthetic oligonucleotide
  Sense strand starting at position 3420 SEQ ID NO: 3359
ccauauguacuauggagaa

SEQ ID NO: 261253 - RNA, 19 nt, Artificial Sequence
  Description of Artificial Sequence: Synthetic oligonucleotide
  Antisense strand to SEQ ID NO: 261252
uucuccauaguacauaugg

SEQ ID NO: 261254 - RNA, 19 nt, Artificial Sequence
  Description of Artificial Sequence: Synthetic oligonucleotide
  Sense strand starting at position 3646 SEQ ID NO: 3359
gagacugugacauguaaga

SEQ ID NO: 261255 - RNA, 19 nt, Artificial Sequence
  Description of Artificial Sequence: Synthetic oligonucleotide
  Antisense strand to SEQ ID NO: 261254
ucuuacaugucacagucuc

SEQ ID NO: 261256 - RNA, 19 nt, Artificial Sequence
  Description of Artificial Sequence: Synthetic oligonucleotide
  Sense strand starting at position 3692 SEQ ID NO: 3359
ccaugauaucgccaggaag

SEQ ID NO: 261257 - RNA, 19 nt, Artificial Sequence
  Description of Artificial Sequence: Synthetic oligonucleotide
  Antisense strand to SEQ ID NO: 261256
cuuccuggcgauaucaugg

SEQ ID NO: 261258 - RNA, 19 nt, Artificial Sequence
  Description of Artificial Sequence: Synthetic oligonucleotide
  Sense strand starting at position 3694 SEQ ID NO: 3359
augauaucgccaggaagag

SEQ ID NO: 261259 - RNA, 19 nt, Artificial Sequence
  Description of Artificial Sequence: Synthetic oligonucleotide
  Antisense strand to SEQ ID NO: 261258
cucuuccuggcgauaucau

SEQ ID NO: 261260 - RNA, 19 nt, Artificial Sequence
  Description of Artificial Sequence: Synthetic oligonucleotide
  Sense strand starting at position 3695 SEQ ID NO: 3359
ugauaucgccaggaagagu

SEQ ID NO: 261261 - RNA, 19 nt, Artificial Sequence
  Description of Artificial Sequence: Synthetic oligonucleotide
  Antisense strand to SEQ ID NO: 261260
acucuuccuggcgauauca

SEQ ID NO: 261262 - RNA, 19 nt, Artificial Sequence
  Description of Artificial Sequence: Synthetic oligonucleotide
  Sense strand starting at position 3711 SEQ ID NO: 3359
aguauuucaggcggaguga

SEQ ID NO: 261263 - RNA, 19 nt, Artificial Sequence
  Description of Artificial Sequence: Synthetic oligonucleotide
  Antisense strand to SEQ ID NO: 261262
ucacuccgccugaaauacu

SEQ ID NO: 261264 - RNA, 19 nt, Artificial Sequence
  Description of Artificial Sequence: Synthetic oligonucleotide
  Sense strand starting at position 3767 SEQ ID NO: 3359
aggguaccugugggagaau

SEQ ID NO: 261265 - RNA, 19 nt, Artificial Sequence
  Description of Artificial Sequence: Synthetic oligonucleotide
  Antisense strand to SEQ ID NO: 261264
auucucccacagguacccu

SEQ ID NO: 261266 - RNA, 19 nt, Artificial Sequence
  Description of Artificial Sequence: Synthetic oligonucleotide
  Sense strand starting at position 3936 SEQ ID NO: 3359
gagggaacgauauggucua

SEQ ID NO: 261267 - RNA, 19 nt, Artificial Sequence
  Description of Artificial Sequence: Synthetic oligonucleotide
  Antisense strand to SEQ ID NO: 261266
uagaccauaucguucccuc

SEQ ID NO: 261268 - RNA, 19 nt, Artificial Sequence
  Description of Artificial Sequence: Synthetic oligonucleotide
  Sense strand starting at position 3950 SEQ ID NO: 3359
gucuaacugagaugguaau

SEQ ID NO: 261269 - RNA, 19 nt, Artificial Sequence
  Description of Artificial Sequence: Synthetic oligonucleotide
  Antisense strand to SEQ ID NO: 261268
auuaccaucucaguuagac

SEQ ID NO: 261270 - RNA, 19 nt, Artificial Sequence
  Description of Artificial Sequence: Synthetic oligonucleotide
  Sense strand starting at position 3951 SEQ ID NO: 3359
ucuaacugagaugguaaua

SEQ ID NO: 261271 - RNA, 19 nt, Artificial Sequence
  Description of Artificial Sequence: Synthetic oligonucleotide
  Antisense strand to SEQ ID NO: 261270
uauuaccaucucaguuaga

SEQ ID NO: 261272 - RNA, 19 nt, Artificial Sequence
  Description of Artificial Sequence: Synthetic oligonucleotide
  Sense strand starting at position 177 SEQ ID NO: 3360
uuguucugcacuuggagau

SEQ ID NO: 261273 - RNA, 19 nt, Artificial Sequence
  Description of Artificial Sequence: Synthetic oligonucleotide
  Antisense strand to SEQ ID NO: 261272
aucuccaagugcagaacaa

SEQ ID NO: 261274 - RNA, 19 nt, Artificial Sequence
  Description of Artificial Sequence: Synthetic oligonucleotide
  Sense strand starting at position 181 SEQ ID NO: 3360
ucugcacuuggagauacau

SEQ ID NO: 261275 - RNA, 19 nt, Artificial Sequence
  Description of Artificial Sequence: Synthetic oligonucleotide
  Antisense strand to SEQ ID NO: 261274
auguaucuccaagugcaga

SEQ ID NO: 261276 - RNA, 19 nt, Artificial Sequence
  Description of Artificial Sequence: Synthetic oligonucleotide
  Sense strand starting at position 304 SEQ ID NO: 3360
uuugaaagaucacugaggu

SEQ ID NO: 261277 - RNA, 19 nt, Artificial Sequence
  Description of Artificial Sequence: Synthetic oligonucleotide
  Antisense strand to SEQ ID NO: 261276
accucagugaucuuucaaa

SEQ ID NO: 261278 - RNA, 19 nt, Artificial Sequence
  Description of Artificial Sequence: Synthetic oligonucleotide
  Sense strand starting at position 319 SEQ ID NO: 3360
aggugaugugguugccaag

SEQ ID NO: 261279 - RNA, 19 nt, Artificial Sequence
  Description of Artificial Sequence: Synthetic oligonucleotide
  Antisense strand to SEQ ID NO: 261278
cuuggcaaccacaucaccu

SEQ ID NO: 261280 - RNA, 19 nt, Artificial Sequence
  Description of Artificial Sequence: Synthetic oligonucleotide
  Sense strand starting at position 392 SEQ ID NO: 3360
ccaugcugcaguggauaua

SEQ ID NO: 261281 - RNA, 19 nt, Artificial Sequence
  Description of Artificial Sequence: Synthetic oligonucleotide
  Antisense strand to SEQ ID NO: 261280
uauauccacugcagcaugg

SEQ ID NO: 261282 - RNA, 19 nt, Artificial Sequence
  Description of Artificial Sequence: Synthetic oligonucleotide
  Sense strand starting at position 488 SEQ ID NO: 3360
gugaaugugucagcaauug

SEQ ID NO: 261283 - RNA, 19 nt, Artificial Sequence
  Description of Artificial Sequence: Synthetic oligonucleotide
  Antisense strand to SEQ ID NO: 261282
caauugcugacacauucac

SEQ ID NO: 261284 - RNA, 19 nt, Artificial Sequence
  Description of Artificial Sequence: Synthetic oligonucleotide
  Sense strand starting at position 559 SEQ ID NO: 3360
aguucacaaguguaugagu

SEQ ID NO: 261285 - RNA, 19 nt, Artificial Sequence
  Description of Artificial Sequence: Synthetic oligonucleotide
  Antisense strand to SEQ ID NO: 261284
acucauacacuugugaacu

SEQ ID NO: 261286 - RNA, 19 nt, Artificial Sequence
  Description of Artificial Sequence: Synthetic oligonucleotide
  Sense strand starting at position 673 SEQ ID NO: 3360
ucgcuauuggcugaaauga

SEQ ID NO: 261287 - RNA, 19 nt, Artificial Sequence
  Description of Artificial Sequence: Synthetic oligonucleotide
  Antisense strand to SEQ ID NO: 261286
ucauuucagccaauagcga

SEQ ID NO: 261288 - RNA, 19 nt, Artificial Sequence
  Description of Artificial Sequence: Synthetic oligonucleotide
  Sense strand starting at position 801 SEQ ID NO: 3360
acuugaaaccagugcucau

SEQ ID NO: 261289 - RNA, 19 nt, Artificial Sequence
  Description of Artificial Sequence: Synthetic oligonucleotide
  Antisense strand to SEQ ID NO: 261288
augagcacugguuucaagu

SEQ ID NO: 261290 - RNA, 19 nt, Artificial Sequence
  Description of Artificial Sequence: Synthetic oligonucleotide
  Sense strand starting at position 918 SEQ ID NO: 3360
ucacauugugaaggauaug

SEQ ID NO: 261291 - RNA, 19 nt, Artificial Sequence
  Description of Artificial Sequence: Synthetic oligonucleotide
  Antisense strand to SEQ ID NO: 261290
cauauccuucacaauguga

SEQ ID NO: 261292 - RNA, 19 nt, Artificial Sequence
  Description of Artificial Sequence: Synthetic oligonucleotide
  Sense strand starting at position 923 SEQ ID NO: 3360
uugugaaggauauggcaau

SEQ ID NO: 261293 - RNA, 19 nt, Artificial Sequence
  Description of Artificial Sequence: Synthetic oligonucleotide
  Antisense strand to SEQ ID NO: 261292
auugccauauccuucacaa

SEQ ID NO: 261294 - RNA, 19 nt, Artificial Sequence
  Description of Artificial Sequence: Synthetic oligonucleotide
  Sense strand starting at position 1022 SEQ ID NO: 3360
ugagcauguuaucuacaga

SEQ ID NO: 261295 - RNA, 19 nt, Artificial Sequence
  Description of Artificial Sequence: Synthetic oligonucleotide
  Antisense strand to SEQ ID NO: 261294
ucuguagauaacaugcuca

SEQ ID NO: 261296 - RNA, 19 nt, Artificial Sequence
  Description of Artificial Sequence: Synthetic oligonucleotide
  Sense strand starting at position 1025 SEQ ID NO: 3360
gcauguuaucuacagagga

SEQ ID NO: 261297 - RNA, 19 nt, Artificial Sequence
  Description of Artificial Sequence: Synthetic oligonucleotide
  Antisense strand to SEQ ID NO: 261296
uccucuguagauaacaugc

SEQ ID NO: 261298 - RNA, 19 nt, Artificial Sequence
  Description of Artificial Sequence: Synthetic oligonucleotide
  Sense strand starting at position 1425 SEQ ID NO: 3360
ccacuacuucuaugggaac

SEQ ID NO: 261299 - RNA, 19 nt, Artificial Sequence
  Description of Artificial Sequence: Synthetic oligonucleotide
  Antisense strand to SEQ ID NO: 261298
guucccauagaaguagugg

SEQ ID NO: 261300 - RNA, 19 nt, Artificial Sequence
  Description of Artificial Sequence: Synthetic oligonucleotide
  Sense strand starting at position 1464 SEQ ID NO: 3360
gcuuuauucguagcauccu

SEQ ID NO: 261301 - RNA, 19 nt, Artificial Sequence
  Description of Artificial Sequence: Synthetic oligonucleotide
  Antisense strand to SEQ ID NO: 261300
aggaugcuacgaauaaagc

SEQ ID NO: 261302 - RNA, 19 nt, Artificial Sequence
  Description of Artificial Sequence: Synthetic oligonucleotide
  Sense strand starting at position 1475 SEQ ID NO: 3360
agcauccugugagcuuaaa

SEQ ID NO: 261303 - RNA, 19 nt, Artificial Sequence
  Description of Artificial Sequence: Synthetic oligonucleotide
  Antisense strand to SEQ ID NO: 261302
uuuaagcucacaggaugcu

SEQ ID NO: 261304 - RNA, 19 nt, Artificial Sequence
  Description of Artificial Sequence: Synthetic oligonucleotide
  Sense strand starting at position 1527 SEQ ID NO: 3360
uggaaauauugugcagaag

SEQ ID NO: 261305 - RNA, 19 nt, Artificial Sequence
  Description of Artificial Sequence: Synthetic oligonucleotide
  Antisense strand to SEQ ID NO: 261304
cuucugcacaauauuucca

SEQ ID NO: 261306 - RNA, 19 nt, Artificial Sequence
  Description of Artificial Sequence: Synthetic oligonucleotide
  Sense strand starting at position 1538 SEQ ID NO: 3360
ugcagaagcugacuguauu

SEQ ID NO: 261307 - RNA, 19 nt, Artificial Sequence
  Description of Artificial Sequence: Synthetic oligonucleotide
  Antisense strand to SEQ ID NO: 261306
aauacagucagcuucugca

SEQ ID NO: 261308 - RNA, 19 nt, Artificial Sequence
  Description of Artificial Sequence: Synthetic oligonucleotide
  Sense strand starting at position 1539 SEQ ID NO: 3360
gcagaagcugacuguauua

SEQ ID NO: 261309 - RNA, 19 nt, Artificial Sequence
  Description of Artificial Sequence: Synthetic oligonucleotide
  Antisense strand to SEQ ID NO: 261308
uaauacagucagcuucugc

SEQ ID NO: 261310 - RNA, 19 nt, Artificial Sequence
  Description of Artificial Sequence: Synthetic oligonucleotide
  Sense strand starting at position 1541 SEQ ID NO: 3360
agaagcugacuguauuagu

SEQ ID NO: 261311 - RNA, 19 nt, Artificial Sequence
  Description of Artificial Sequence: Synthetic oligonucleotide
  Antisense strand to SEQ ID NO: 261310
acuaauacagucagcuucu

SEQ ID NO: 261312 - RNA, 19 nt, Artificial Sequence
  Description of Artificial Sequence: Synthetic oligonucleotide
  Sense strand starting at position 2035 SEQ ID NO: 3360
cccucucggcauugaugau

SEQ ID NO: 261313 - RNA, 19 nt, Artificial Sequence
  Description of Artificial Sequence: Synthetic oligonucleotide
  Antisense strand to SEQ ID NO: 261312
aucaucaaugccgagaggg

SEQ ID NO: 261314 - RNA, 19 nt, Artificial Sequence
  Description of Artificial Sequence: Synthetic oligonucleotide
  Sense strand starting at position 2041 SEQ ID NO: 3360
cggcauugaugauuggaca

SEQ ID NO: 261315 - RNA, 19 nt, Artificial Sequence
  Description of Artificial Sequence: Synthetic oligonucleotide
  Antisense strand to SEQ ID NO: 261314
uguccaaucaucaaugccg

SEQ ID NO: 261316 - RNA, 19 nt, Artificial Sequence
  Description of Artificial Sequence: Synthetic oligonucleotide
  Sense strand starting at position 2308 SEQ ID NO: 3360
ucagaagccugucuccuua

SEQ ID NO: 261317 - RNA, 19 nt, Artificial Sequence
  Description of Artificial Sequence: Synthetic oligonucleotide
  Antisense strand to SEQ ID NO: 261316
uaaggagacaggcuucuga

SEQ ID NO: 261318 - RNA, 19 nt, Artificial Sequence
  Description of Artificial Sequence: Synthetic oligonucleotide
  Sense strand starting at position 2334 SEQ ID NO: 3360
acuguuuaugcuuaaggua

SEQ ID NO: 261319 - RNA, 19 nt, Artificial Sequence
  Description of Artificial Sequence: Synthetic oligonucleotide
  Antisense strand to SEQ ID NO: 261318
uaccuuaagcauaaacagu

SEQ ID NO: 261320 - RNA, 19 nt, Artificial Sequence
  Description of Artificial Sequence: Synthetic oligonucleotide
  Sense strand starting at position 2361 SEQ ID NO: 3360
uggguucucucacuuguaa

SEQ ID NO: 261321 - RNA, 19 nt, Artificial Sequence
  Description of Artificial Sequence: Synthetic oligonucleotide
  Antisense strand to SEQ ID NO: 261320
uuacaagugagagaaccca

SEQ ID NO: 261322 - RNA, 19 nt, Artificial Sequence
  Description of Artificial Sequence: Synthetic oligonucleotide
  Sense strand starting at position 2800 SEQ ID NO: 3360
cauucuggugaaugcaaua

SEQ ID NO: 261323 - RNA, 19 nt, Artificial Sequence
  Description of Artificial Sequence: Synthetic oligonucleotide
  Antisense strand to SEQ ID NO: 261322
uauugcauucaccagaaug

SEQ ID NO: 261324 - RNA, 19 nt, Artificial Sequence
  Description of Artificial Sequence: Synthetic oligonucleotide
  Sense strand starting at position 2829 SEQ ID NO: 3360
ccaaauccucaggguaaua

SEQ ID NO: 261325 - RNA, 19 nt, Artificial Sequence
  Description of Artificial Sequence: Synthetic oligonucleotide
  Antisense strand to SEQ ID NO: 261324
uauuacccugaggauuugg

SEQ ID NO: 261326 - RNA, 19 nt, Artificial Sequence
  Description of Artificial Sequence: Synthetic oligonucleotide
  Sense strand starting at position 3008 SEQ ID NO: 3360
aagauaguacuuugugcua

SEQ ID NO: 261327 - RNA, 19 nt, Artificial Sequence
  Description of Artificial Sequence: Synthetic oligonucleotide
  Antisense strand to SEQ ID NO: 261326
uagcacaaaguacuaucuu

SEQ ID NO: 261328 - RNA, 19 nt, Artificial Sequence
  Description of Artificial Sequence: Synthetic oligonucleotide
  Sense strand starting at position 3100 SEQ ID NO: 3360
cuauuuguccaggguagca

SEQ ID NO: 261329 - RNA, 19 nt, Artificial Sequence
  Description of Artificial Sequence: Synthetic oligonucleotide
  Antisense strand to SEQ ID NO: 261328
ugcuacccuggacaaauag

SEQ ID NO: 261330 - RNA, 19 nt, Artificial Sequence
  Description of Artificial Sequence: Synthetic oligonucleotide
  Sense strand starting at position 3208 SEQ ID NO: 3360
cccuuuguggccuaaugga

SEQ ID NO: 261331 - RNA, 19 nt, Artificial Sequence
  Description of Artificial Sequence: Synthetic oligonucleotide
  Antisense strand to SEQ ID NO: 261330
uccauuaggccacaaaggg

SEQ ID NO: 261332 - RNA, 19 nt, Artificial Sequence
  Description of Artificial Sequence: Synthetic oligonucleotide
  Sense strand starting at position 3239 SEQ ID NO: 3360
uuacuacuaccugggagua

SEQ ID NO: 261333 - RNA, 19 nt, Artificial Sequence
  Description of Artificial Sequence: Synthetic oligonucleotide
  Antisense strand to SEQ ID NO: 261332
uacucccagguaguaguaa

SEQ ID NO: 261334 - RNA, 19 nt, Artificial Sequence
  Description of Artificial Sequence: Synthetic oligonucleotide
  Sense strand starting at position 3301 SEQ ID NO: 3360
cguguuccucauugggaua

SEQ ID NO: 261335 - RNA, 19 nt, Artificial Sequence
  Description of Artificial Sequence: Synthetic oligonucleotide
  Antisense strand to SEQ ID NO: 261334
uaucccaaugaggaacacg

SEQ ID NO: 261336 - RNA, 19 nt, Artificial Sequence
  Description of Artificial Sequence: Synthetic oligonucleotide
  Sense strand starting at position 3302 SEQ ID NO: 3360
guguuccucauugggauaa

SEQ ID NO: 261337 - RNA, 19 nt, Artificial Sequence
  Description of Artificial Sequence: Synthetic oligonucleotide
  Antisense strand to SEQ ID NO: 261336
uuaucccaaugaggaacac

SEQ ID NO: 261338 - RNA, 19 nt, Artificial Sequence
  Description of Artificial Sequence: Synthetic oligonucleotide
  Sense strand starting at position 3306 SEQ ID NO: 3360
uccucauugggauaagucu

SEQ ID NO: 261339 - RNA, 19 nt, Artificial Sequence
  Description of Artificial Sequence: Synthetic oligonucleotide
  Antisense strand to SEQ ID NO: 261338
agacuuaucccaaugagga

SEQ ID NO: 261340 - RNA, 19 nt, Artificial Sequence
  Description of Artificial Sequence: Synthetic oligonucleotide
  Sense strand starting at position 3351 SEQ ID NO: 3360
agagucacccagcaggauu

SEQ ID NO: 261341 - RNA, 19 nt, Artificial Sequence
  Description of Artificial Sequence: Synthetic oligonucleotide
  Antisense strand to SEQ ID NO: 261340
aauccugcugggugacucu

SEQ ID NO: 261342 - RNA, 19 nt, Artificial Sequence
  Description of Artificial Sequence: Synthetic oligonucleotide
  Sense strand starting at position 3364 SEQ ID NO: 3360
aggauuaagcuccgauuga

SEQ ID NO: 261343 - RNA, 19 nt, Artificial Sequence
  Description of Artificial Sequence: Synthetic oligonucleotide
  Antisense strand to SEQ ID NO: 261342
ucaaucggagcuuaauccu

SEQ ID NO: 261344 - RNA, 19 nt, Artificial Sequence
  Description of Artificial Sequence: Synthetic oligonucleotide
  Sense strand starting at position 3426 SEQ ID NO: 3360
cugccacuccucuaucagu

SEQ ID NO: 261345 - RNA, 19 nt, Artificial Sequence
  Description of Artificial Sequence: Synthetic oligonucleotide
  Antisense strand to SEQ ID NO: 261344
acugauagaggaguggcag

SEQ ID NO: 261346 - RNA, 19 nt, Artificial Sequence
  Description of Artificial Sequence: Synthetic oligonucleotide
  Sense strand starting at position 3532 SEQ ID NO: 3360
agcacuuuccaacagaagu

SEQ ID NO: 261347 - RNA, 19 nt, Artificial Sequence
  Description of Artificial Sequence: Synthetic oligonucleotide
  Antisense strand to SEQ ID NO: 261346
acuucuguuggaaagugcu

SEQ ID NO: 261348 - RNA, 19 nt, Artificial Sequence
  Description of Artificial Sequence: Synthetic oligonucleotide
  Sense strand starting at position 3564 SEQ ID NO: 3360
uggaaagccuuagcuacua

SEQ ID NO: 261349 - RNA, 19 nt, Artificial Sequence
  Description of Artificial Sequence: Synthetic oligonucleotide
  Antisense strand to SEQ ID NO: 261348
uaguagcuaaggcuuucca

SEQ ID NO: 261350 - RNA, 19 nt, Artificial Sequence
  Description of Artificial Sequence: Synthetic oligonucleotide
  Sense strand starting at position 3581 SEQ ID NO: 3360
uaggauguccagugagauu

SEQ ID NO: 261351 - RNA, 19 nt, Artificial Sequence
  Description of Artificial Sequence: Synthetic oligonucleotide
  Antisense strand to SEQ ID NO: 261350
aaucucacuggacauccua

SEQ ID NO: 261352 - RNA, 19 nt, Artificial Sequence
  Description of Artificial Sequence: Synthetic oligonucleotide
  Sense strand starting at position 453 SEQ ID NO: 3361
guacauacacguuaggagu

SEQ ID NO: 261353 - RNA, 19 nt, Artificial Sequence
  Description of Artificial Sequence: Synthetic oligonucleotide
  Antisense strand to SEQ ID NO: 261352
acuccuaacguguauguac

SEQ ID NO: 261354 - RNA, 19 nt, Artificial Sequence
  Description of Artificial Sequence: Synthetic oligonucleotide
  Sense strand starting at position 475 SEQ ID NO: 3361
aguugugugcuuucugagu

SEQ ID NO: 261355 - RNA, 19 nt, Artificial Sequence
  Description of Artificial Sequence: Synthetic oligonucleotide
  Antisense strand to SEQ ID NO: 261354
acucagaaagcacacaacu

SEQ ID NO: 261356 - RNA, 19 nt, Artificial Sequence
  Description of Artificial Sequence: Synthetic oligonucleotide
  Sense strand starting at position 480 SEQ ID NO: 3361
ugugcuuucugagugagaa

SEQ ID NO: 261357 - RNA, 19 nt, Artificial Sequence
  Description of Artificial Sequence: Synthetic oligonucleotide
  Antisense strand to SEQ ID NO: 261356
uucucacucagaaagcaca

SEQ ID NO: 261358 - RNA, 19 nt, Artificial Sequence
  Description of Artificial Sequence: Synthetic oligonucleotide
  Sense strand starting at position 481 SEQ ID NO: 3361
gugcuuucugagugagaag

SEQ ID NO: 261359 - RNA, 19 nt, Artificial Sequence
  Description of Artificial Sequence: Synthetic oligonucleotide
  Antisense strand to SEQ ID NO: 261358
cuucucacucagaaagcac

SEQ ID NO: 261360 - RNA, 19 nt, Artificial Sequence
  Description of Artificial Sequence: Synthetic oligonucleotide
  Sense strand starting at position 526 SEQ ID NO: 3361
ucugucaaauuguucucua

SEQ ID NO: 261361 - RNA, 19 nt, Artificial Sequence
  Description of Artificial Sequence: Synthetic oligonucleotide
  Antisense strand to SEQ ID NO: 261360
uagagaacaauuugacaga

SEQ ID NO: 261362 - RNA, 19 nt, Artificial Sequence
  Description of Artificial Sequence: Synthetic oligonucleotide
  Sense strand starting at position 527 SEQ ID NO: 3361
cugucaaauuguucucuag

SEQ ID NO: 261363 - RNA, 19 nt, Artificial Sequence
  Description of Artificial Sequence: Synthetic oligonucleotide
  Antisense strand to SEQ ID NO: 261362
cuagagaacaauuugacag

SEQ ID NO: 261364 - RNA, 19 nt, Artificial Sequence
  Description of Artificial Sequence: Synthetic oligonucleotide
  Sense strand starting at position 529 SEQ ID NO: 3361
gucaaauuguucucuagag

SEQ ID NO: 261365 - RNA, 19 nt, Artificial Sequence
  Description of Artificial Sequence: Synthetic oligonucleotide
  Antisense strand to SEQ ID NO: 261364
cucuagagaacaauuugac

SEQ ID NO: 261366 - RNA, 19 nt, Artificial Sequence
  Description of Artificial Sequence: Synthetic oligonucleotide
  Sense strand starting at position 536 SEQ ID NO: 3361
uguucucuagagcauauaa

SEQ ID NO: 261367 - RNA, 19 nt, Artificial Sequence
  Description of Artificial Sequence: Synthetic oligonucleotide
  Antisense strand to SEQ ID NO: 261366
uuauaugcucuagagaaca

SEQ ID NO: 261368 - RNA, 19 nt, Artificial Sequence
  Description of Artificial Sequence: Synthetic oligonucleotide
  Sense strand starting at position 691 SEQ ID NO: 3361
uuuaaauccguggaauauu

SEQ ID NO: 261369 - RNA, 19 nt, Artificial Sequence
  Description of Artificial Sequence: Synthetic oligonucleotide
  Antisense strand to SEQ ID NO: 261368
aauauuccacggauuuaaa

SEQ ID NO: 261370 - RNA, 19 nt, Artificial Sequence
  Description of Artificial Sequence: Synthetic oligonucleotide
  Sense strand starting at position 1118 SEQ ID NO: 3361
acaauuuaguggccaguuu

SEQ ID NO: 261371 - RNA, 19 nt, Artificial Sequence
  Description of Artificial Sequence: Synthetic oligonucleotide
  Antisense strand to SEQ ID NO: 261370
aaacuggccacuaaauugu

SEQ ID NO: 261372 - RNA, 19 nt, Artificial Sequence
  Description of Artificial Sequence: Synthetic oligonucleotide
  Sense strand starting at position 1201 SEQ ID NO: 3361
gauuccuauccaggguuaa

SEQ ID NO: 261373 - RNA, 19 nt, Artificial Sequence
  Description of Artificial Sequence: Synthetic oligonucleotide
  Antisense strand to SEQ ID NO: 261372
uuaacccuggauaggaauc

SEQ ID NO: 261374 - RNA, 19 nt, Artificial Sequence
  Description of Artificial Sequence: Synthetic oligonucleotide
  Sense strand starting at position 1202 SEQ ID NO: 3361
auuccuauccaggguuaag

SEQ ID NO: 261375 - RNA, 19 nt, Artificial Sequence
  Description of Artificial Sequence: Synthetic oligonucleotide
  Antisense strand to SEQ ID NO: 261374
cuuaacccuggauaggaau

SEQ ID NO: 261376 - RNA, 19 nt, Artificial Sequence
  Description of Artificial Sequence: Synthetic oligonucleotide
  Sense strand starting at position 1237 SEQ ID NO: 3361
agaagagcucuuggacgua

SEQ ID NO: 261377 - RNA, 19 nt, Artificial Sequence
  Description of Artificial Sequence: Synthetic oligonucleotide
  Antisense strand to SEQ ID NO: 261376
uacguccaagagcucuucu

SEQ ID NO: 261378 - RNA, 19 nt, Artificial Sequence
  Description of Artificial Sequence: Synthetic oligonucleotide
  Sense strand starting at position 1866 SEQ ID NO: 3361
ccacuuacugcaggcgaua

SEQ ID NO: 261379 - RNA, 19 nt, Artificial Sequence
  Description of Artificial Sequence: Synthetic oligonucleotide
  Antisense strand to SEQ ID NO: 261378
uaucgccugcaguaagugg

SEQ ID NO: 261380 - RNA, 19 nt, Artificial Sequence
  Description of Artificial Sequence: Synthetic oligonucleotide
  Sense strand starting at position 2072 SEQ ID NO: 3361
ggauaagucucuccucgcu

SEQ ID NO: 261381 - RNA, 19 nt, Artificial Sequence
  Description of Artificial Sequence: Synthetic oligonucleotide
  Antisense strand to SEQ ID NO: 261380
agcgaggagagacuuaucc

SEQ ID NO: 261382 - RNA, 19 nt, Artificial Sequence
  Description of Artificial Sequence: Synthetic oligonucleotide
  Sense strand starting at position 2132 SEQ ID NO: 3361
ccucguaaugcgccaaguu

SEQ ID NO: 261383 - RNA, 19 nt, Artificial Sequence
  Description of Artificial Sequence: Synthetic oligonucleotide
  Antisense strand to SEQ ID NO: 261382
aacuuggcgcauuacgagg

SEQ ID NO: 261384 - RNA, 19 nt, Artificial Sequence
  Description of Artificial Sequence: Synthetic oligonucleotide
  Sense strand starting at position 2643 SEQ ID NO: 3361
auagaauaguuccugacag

SEQ ID NO: 261385 - RNA, 19 nt, Artificial Sequence
  Description of Artificial Sequence: Synthetic oligonucleotide
  Antisense strand to SEQ ID NO: 261384
cugucaggaacuauucuau

SEQ ID NO: 261386 - RNA, 19 nt, Artificial Sequence
  Description of Artificial Sequence: Synthetic oligonucleotide
  Sense strand starting at position 2669 SEQ ID NO: 3361
ggcccauaguccuugagac

SEQ ID NO: 261387 - RNA, 19 nt, Artificial Sequence
  Description of Artificial Sequence: Synthetic oligonucleotide
  Antisense strand to SEQ ID NO: 261386
gucucaaggacuaugggcc

SEQ ID NO: 261388 - RNA, 19 nt, Artificial Sequence
  Description of Artificial Sequence: Synthetic oligonucleotide
  Sense strand starting at position 2670 SEQ ID NO: 3361
gcccauaguccuugagacu

SEQ ID NO: 261389 - RNA, 19 nt, Artificial Sequence
  Description of Artificial Sequence: Synthetic oligonucleotide
  Antisense strand to SEQ ID NO: 261388
agucucaaggacuaugggc

SEQ ID NO: 261390 - RNA, 19 nt, Artificial Sequence
  Description of Artificial Sequence: Synthetic oligonucleotide
  Sense strand starting at position 2671 SEQ ID NO: 3361
cccauaguccuugagacua

SEQ ID NO: 261391 - RNA, 19 nt, Artificial Sequence
  Description of Artificial Sequence: Synthetic oligonucleotide
  Antisense strand to SEQ ID NO: 261390
uagucucaaggacuauggg

SEQ ID NO: 261392 - RNA, 19 nt, Artificial Sequence
  Description of Artificial Sequence: Synthetic oligonucleotide
  Sense strand starting at position 2696 SEQ ID NO: 3361
gcauuaacccuuugaggaa

SEQ ID NO: 261393 - RNA, 19 nt, Artificial Sequence
  Description of Artificial Sequence: Synthetic oligonucleotide
  Antisense strand to SEQ ID NO: 261392
uuccucaaaggguuaaugc

SEQ ID NO: 261394 - RNA, 19 nt, Artificial Sequence
  Description of Artificial Sequence: Synthetic oligonucleotide
  Sense strand starting at position 2778 SEQ ID NO: 3361
gguaaauuguaagucuugu

SEQ ID NO: 261395 - RNA, 19 nt, Artificial Sequence
  Description of Artificial Sequence: Synthetic oligonucleotide
  Antisense strand to SEQ ID NO: 261394
acaagacuuacaauuuacc

SEQ ID NO: 261396 - RNA, 19 nt, Artificial Sequence
  Description of Artificial Sequence: Synthetic oligonucleotide
  Sense strand starting at position 2784 SEQ ID NO: 3361
uuguaagucuuguuaagaa

SEQ ID NO: 261397 - RNA, 19 nt, Artificial Sequence
  Description of Artificial Sequence: Synthetic oligonucleotide
  Antisense strand to SEQ ID NO: 261396
uucuuaacaagacuuacaa

SEQ ID NO: 261398 - RNA, 19 nt, Artificial Sequence
  Description of Artificial Sequence: Synthetic oligonucleotide
  Sense strand starting at position 2873 SEQ ID NO: 3361
gucccuugagcucaugagu

SEQ ID NO: 261399 - RNA, 19 nt, Artificial Sequence
  Description of Artificial Sequence: Synthetic oligonucleotide
  Antisense strand to SEQ ID NO: 261398
acucaugagcucaagggac

SEQ ID NO: 261400 - RNA, 19 nt, Artificial Sequence
  Description of Artificial Sequence: Synthetic oligonucleotide
  Sense strand starting at position 2878 SEQ ID NO: 3361
uugagcucaugaguuggaa

SEQ ID NO: 261401 - RNA, 19 nt, Artificial Sequence
  Description of Artificial Sequence: Synthetic oligonucleotide
  Antisense strand to SEQ ID NO: 261400
uuccaacucaugagcucaa

SEQ ID NO: 261402 - RNA, 19 nt, Artificial Sequence
  Description of Artificial Sequence: Synthetic oligonucleotide
  Sense strand starting at position 2917 SEQ ID NO: 3361
gagaccguaucucuaagaa

SEQ ID NO: 261403 - RNA, 19 nt, Artificial Sequence
  Description of Artificial Sequence: Synthetic oligonucleotide
  Antisense strand to SEQ ID NO: 261402
uucuuagagauacggucuc

SEQ ID NO: 261404 - RNA, 19 nt, Artificial Sequence
  Description of Artificial Sequence: Synthetic oligonucleotide
  Sense strand starting at position 3289 SEQ ID NO: 3361
auugaacacuuagaguaau

SEQ ID NO: 261405 - RNA, 19 nt, Artificial Sequence
  Description of Artificial Sequence: Synthetic oligonucleotide
  Antisense strand to SEQ ID NO: 261404
auuacucuaaguguucaau

SEQ ID NO: 261406 - RNA, 19 nt, Artificial Sequence
  Description of Artificial Sequence: Synthetic oligonucleotide
  Sense strand starting at position 3322 SEQ ID NO: 3361
acauaauagucauuccagu

SEQ ID NO: 261407 - RNA, 19 nt, Artificial Sequence
  Description of Artificial Sequence: Synthetic oligonucleotide
  Antisense strand to SEQ ID NO: 261406
acuggaaugacuauuaugu

SEQ ID NO: 261408 - RNA, 19 nt, Artificial Sequence
  Description of Artificial Sequence: Synthetic oligonucleotide
  Sense strand starting at position 3417 SEQ ID NO: 3361
cccaguauuggcuaucuca

SEQ ID NO: 261409 - RNA, 19 nt, Artificial Sequence
  Description of Artificial Sequence: Synthetic oligonucleotide
  Antisense strand to SEQ ID NO: 261408
ugagauagccaauacuggg

SEQ ID NO: 261410 - RNA, 19 nt, Artificial Sequence
  Description of Artificial Sequence: Synthetic oligonucleotide
  Sense strand starting at position 3502 SEQ ID NO: 3361
cugucuccuccuggaugaa

SEQ ID NO: 261411 - RNA, 19 nt, Artificial Sequence
  Description of Artificial Sequence: Synthetic oligonucleotide
  Antisense strand to SEQ ID NO: 261410
uucauccaggaggagacag

SEQ ID NO: 261412 - RNA, 19 nt, Artificial Sequence
  Description of Artificial Sequence: Synthetic oligonucleotide
  Sense strand starting at position 3535 SEQ ID NO: 3361
gccugacaccgucaaauau

SEQ ID NO: 261413 - RNA, 19 nt, Artificial Sequence
  Description of Artificial Sequence: Synthetic oligonucleotide
  Antisense strand to SEQ ID NO: 261412
auauuugacggugucaggc

SEQ ID NO: 261414 - RNA, 19 nt, Artificial Sequence
  Description of Artificial Sequence: Synthetic oligonucleotide
  Sense strand starting at position 3631 SEQ ID NO: 3361
ccuggagaucccugcaaca

SEQ ID NO: 261415 - RNA, 19 nt, Artificial Sequence
  Description of Artificial Sequence: Synthetic oligonucleotide
  Antisense strand to SEQ ID NO: 261414
uguugcagggaucuccagg

SEQ ID NO: 261416 - RNA, 19 nt, Artificial Sequence
  Description of Artificial Sequence: Synthetic oligonucleotide
  Sense strand starting at position 3644 SEQ ID NO: 3361
gcaacagccuucucauuag

SEQ ID NO: 261417 - RNA, 19 nt, Artificial Sequence
  Description of Artificial Sequence: Synthetic oligonucleotide
  Antisense strand to SEQ ID NO: 261416
cuaaugagaaggcuguugc

SEQ ID NO: 261418 - RNA, 19 nt, Artificial Sequence
  Description of Artificial Sequence: Synthetic oligonucleotide
  Sense strand starting at position 3647 SEQ ID NO: 3361
acagccuucucauuagucu

SEQ ID NO: 261419 - RNA, 19 nt, Artificial Sequence
  Description of Artificial Sequence: Synthetic oligonucleotide
  Antisense strand to SEQ ID NO: 261418
agacuaaugagaaggcugu

SEQ ID NO: 261420 - RNA, 19 nt, Artificial Sequence
  Description of Artificial Sequence: Synthetic oligonucleotide
  Sense strand starting at position 3751 SEQ ID NO: 3361
aguuuaaagccuuacuguu

SEQ ID NO: 261421 - RNA, 19 nt, Artificial Sequence
  Description of Artificial Sequence: Synthetic oligonucleotide
  Antisense strand to SEQ ID NO: 261420
aacaguaaggcuuuaaacu

SEQ ID NO: 261422 - RNA, 19 nt, Artificial Sequence
  Description of Artificial Sequence: Synthetic oligonucleotide
  Sense strand starting at position 3847 SEQ ID NO: 3361
ugaagaacaugagcuguua

SEQ ID NO: 261423 - RNA, 19 nt, Artificial Sequence
  Description of Artificial Sequence: Synthetic oligonucleotide
  Antisense strand to SEQ ID NO: 261422
uaacagcucauguucuuca

SEQ ID NO: 261424 - RNA, 19 nt, Artificial Sequence
  Description of Artificial Sequence: Synthetic oligonucleotide
  Sense strand starting at position 3862 SEQ ID NO: 3361
guuacaucagccugaggaa

SEQ ID NO: 261425 - RNA, 19 nt, Artificial Sequence
  Description of Artificial Sequence: Synthetic oligonucleotide
  Antisense strand to SEQ ID NO: 261424
uuccucaggcugauguaac

SEQ ID NO: 261426 - RNA, 19 nt, Artificial Sequence
  Description of Artificial Sequence: Synthetic oligonucleotide
  Sense strand starting at position 3949 SEQ ID NO: 3361
agcuucuuugauuagaaca

SEQ ID NO: 261427 - RNA, 19 nt, Artificial Sequence
  Description of Artificial Sequence: Synthetic oligonucleotide
  Antisense strand to SEQ ID NO: 261426
uguucuaaucaaagaagcu

SEQ ID NO: 261428 - RNA, 19 nt, Artificial Sequence
  Description of Artificial Sequence: Synthetic oligonucleotide
  Sense strand starting at position 3951 SEQ ID NO: 3361
cuucuuugauuagaacaag

SEQ ID NO: 261429 - RNA, 19 nt, Artificial Sequence
  Description of Artificial Sequence: Synthetic oligonucleotide
  Antisense strand to SEQ ID NO: 261428
cuuguucuaaucaaagaag

SEQ ID NO: 261430 - RNA, 19 nt, Artificial Sequence
  Description of Artificial Sequence: Synthetic oligonucleotide
  Sense strand starting at position 3976 SEQ ID NO: 3361
uucuauaaaugacaaggaa

SEQ ID NO: 261431 - RNA, 19 nt, Artificial Sequence
  Description of Artificial Sequence: Synthetic oligonucleotide
  Antisense strand to SEQ ID NO: 261430
uuccuugucauuuauagaa

SEQ ID NO: 261432 - RNA, 19 nt, Artificial Sequence
  Description of Artificial Sequence: Synthetic oligonucleotide
  Sense strand starting at position 128 SEQ ID NO: 3362
cgugcuuaucuucuaacgu

SEQ ID NO: 261433 - RNA, 19 nt, Artificial Sequence
  Description of Artificial Sequence: Synthetic oligonucleotide
  Antisense strand to SEQ ID NO: 261432
acguuagaagauaagcacg

SEQ ID NO: 261434 - RNA, 19 nt, Artificial Sequence
  Description of Artificial Sequence: Synthetic oligonucleotide
  Sense strand starting at position 148 SEQ ID NO: 3362
acuuaauuaucuguuaggu

SEQ ID NO: 261435 - RNA, 19 nt, Artificial Sequence
  Description of Artificial Sequence: Synthetic oligonucleotide
  Antisense strand to SEQ ID NO: 261434
accuaacagauaauuaagu

SEQ ID NO: 261436 - RNA, 19 nt, Artificial Sequence
  Description of Artificial Sequence: Synthetic oligonucleotide
  Sense strand starting at position 198 SEQ ID NO: 3362
acgcuaauuccauaggaaa

SEQ ID NO: 261437 - RNA, 19 nt, Artificial Sequence
  Description of Artificial Sequence: Synthetic oligonucleotide
  Antisense strand to SEQ ID NO: 261436
uuuccuauggaauuagcgu

SEQ ID NO: 261438 - RNA, 19 nt, Artificial Sequence
  Description of Artificial Sequence: Synthetic oligonucleotide
  Sense strand starting at position 265 SEQ ID NO: 3362
ucccaaacaucuguguaaa

SEQ ID NO: 261439 - RNA, 19 nt, Artificial Sequence
  Description of Artificial Sequence: Synthetic oligonucleotide
  Antisense strand to SEQ ID NO: 261438
uuuacacagauguuuggga

SEQ ID NO: 261440 - RNA, 19 nt, Artificial Sequence
  Description of Artificial Sequence: Synthetic oligonucleotide
  Sense strand starting at position 266 SEQ ID NO: 3362
cccaaacaucuguguaaag

SEQ ID NO: 261441 - RNA, 19 nt, Artificial Sequence
  Description of Artificial Sequence: Synthetic oligonucleotide
  Antisense strand to SEQ ID NO: 261440
cuuuacacagauguuuggg

SEQ ID NO: 261442 - RNA, 19 nt, Artificial Sequence
  Description of Artificial Sequence: Synthetic oligonucleotide
  Sense strand starting at position 287 SEQ ID NO: 3362
guaucugcccuauagcaga

SEQ ID NO: 261443 - RNA, 19 nt, Artificial Sequence
  Description of Artificial Sequence: Synthetic oligonucleotide
  Antisense strand to SEQ ID NO: 261442
ucugcuauagggcagauac

SEQ ID NO: 261444 - RNA, 19 nt, Artificial Sequence
  Description of Artificial Sequence: Synthetic oligonucleotide
  Sense strand starting at position 292 SEQ ID NO: 3362
ugcccuauagcagacauau

SEQ ID NO: 261445 - RNA, 19 nt, Artificial Sequence
  Description of Artificial Sequence: Synthetic oligonucleotide
  Antisense strand to SEQ ID NO: 261444
auaugucugcuauagggca

SEQ ID NO: 261446 - RNA, 19 nt, Artificial Sequence
  Description of Artificial Sequence: Synthetic oligonucleotide
  Sense strand starting at position 349 SEQ ID NO: 3362
cagacuucugaagguguga

SEQ ID NO: 261447 - RNA, 19 nt, Artificial Sequence
  Description of Artificial Sequence: Synthetic oligonucleotide
  Antisense strand to SEQ ID NO: 261446
ucacaccuucagaagucug

SEQ ID NO: 261448 - RNA, 19 nt, Artificial Sequence
  Description of Artificial Sequence: Synthetic oligonucleotide
  Sense strand starting at position 351 SEQ ID NO: 3362
gacuucugaaggugugaua

SEQ ID NO: 261449 - RNA, 19 nt, Artificial Sequence
  Description of Artificial Sequence: Synthetic oligonucleotide
  Antisense strand to SEQ ID NO: 261448
uaucacaccuucagaaguc

SEQ ID NO: 261450 - RNA, 19 nt, Artificial Sequence
  Description of Artificial Sequence: Synthetic oligonucleotide
  Sense strand starting at position 400 SEQ ID NO: 3362
ucucgcuauguuucuggua

SEQ ID NO: 261451 - RNA, 19 nt, Artificial Sequence
  Description of Artificial Sequence: Synthetic oligonucleotide
  Antisense strand to SEQ ID NO: 261450
uaccagaaacauagcgaga

SEQ ID NO: 261452 - RNA, 19 nt, Artificial Sequence
  Description of Artificial Sequence: Synthetic oligonucleotide
  Sense strand starting at position 488 SEQ ID NO: 3362
cucaaagaauacguuuauu

SEQ ID NO: 261453 - RNA, 19 nt, Artificial Sequence
  Description of Artificial Sequence: Synthetic oligonucleotide
  Antisense strand to SEQ ID NO: 261452
aauaaacguauucuuugag

SEQ ID NO: 261454 - RNA, 19 nt, Artificial Sequence
  Description of Artificial Sequence: Synthetic oligonucleotide
  Sense strand starting at position 919 SEQ ID NO: 3362
ggagaaguaugaucccauu

SEQ ID NO: 261455 - RNA, 19 nt, Artificial Sequence
  Description of Artificial Sequence: Synthetic oligonucleotide
  Antisense strand to SEQ ID NO: 261454
aaugggaucauacuucucc

SEQ ID NO: 261456 - RNA, 19 nt, Artificial Sequence
  Description of Artificial Sequence: Synthetic oligonucleotide
  Sense strand starting at position 983 SEQ ID NO: 3362
ucuggaagguugucagaaa

SEQ ID NO: 261457 - RNA, 19 nt, Artificial Sequence
  Description of Artificial Sequence: Synthetic oligonucleotide
  Antisense strand to SEQ ID NO: 261456
uuucugacaaccuuccaga

SEQ ID NO: 261458 - RNA, 19 nt, Artificial Sequence
  Description of Artificial Sequence: Synthetic oligonucleotide
  Sense strand starting at position 1102 SEQ ID NO: 3362
augcaacaggaauguuaaa

SEQ ID NO: 261459 - RNA, 19 nt, Artificial Sequence
  Description of Artificial Sequence: Synthetic oligonucleotide
  Antisense strand to SEQ ID NO: 261458
uuuaacauuccuguugcau

SEQ ID NO: 261460 - RNA, 19 nt, Artificial Sequence
  Description of Artificial Sequence: Synthetic oligonucleotide
  Sense strand starting at position 1133 SEQ ID NO: 3362
uuucuaaaccgacaaugua

SEQ ID NO: 261461 - RNA, 19 nt, Artificial Sequence
  Description of Artificial Sequence: Synthetic oligonucleotide
  Antisense strand to SEQ ID NO: 261460
uacauugucgguuuagaaa

SEQ ID NO: 261462 - RNA, 19 nt, Artificial Sequence
  Description of Artificial Sequence: Synthetic oligonucleotide
  Sense strand starting at position 1216 SEQ ID NO: 3362
accagagaucucugaaagc

SEQ ID NO: 261463 - RNA, 19 nt, Artificial Sequence
  Description of Artificial Sequence: Synthetic oligonucleotide
  Antisense strand to SEQ ID NO: 261462
gcuuucagagaucucuggu

SEQ ID NO: 261464 - RNA, 19 nt, Artificial Sequence
  Description of Artificial Sequence: Synthetic oligonucleotide
  Sense strand starting at position 1330 SEQ ID NO: 3362
uugguaggucucgaucaaa

SEQ ID NO: 261465 - RNA, 19 nt, Artificial Sequence
  Description of Artificial Sequence: Synthetic oligonucleotide
  Antisense strand to SEQ ID NO: 261464
uuugaucgagaccuaccaa

SEQ ID NO: 261466 - RNA, 19 nt, Artificial Sequence
  Description of Artificial Sequence: Synthetic oligonucleotide
  Sense strand starting at position 1580 SEQ ID NO: 3362
guucuugagcuccaagagu

SEQ ID NO: 261467 - RNA, 19 nt, Artificial Sequence
  Description of Artificial Sequence: Synthetic oligonucleotide
  Antisense strand to SEQ ID NO: 261466
acucuuggagcucaagaac

SEQ ID NO: 261468 - RNA, 19 nt, Artificial Sequence
  Description of Artificial Sequence: Synthetic oligonucleotide
  Sense strand starting at position 1591 SEQ ID NO: 3362
ccaagagucugggcacaaa

SEQ ID NO: 261469 - RNA, 19 nt, Artificial Sequence
  Description of Artificial Sequence: Synthetic oligonucleotide
  Antisense strand to SEQ ID NO: 261468
uuugugcccagacucuugg

SEQ ID NO: 261470 - RNA, 19 nt, Artificial Sequence
  Description of Artificial Sequence: Synthetic oligonucleotide
  Sense strand starting at position 2239 SEQ ID NO: 3362
gguucugaaaggugagcaa

SEQ ID NO: 261471 - RNA, 19 nt, Artificial Sequence
  Description of Artificial Sequence: Synthetic oligonucleotide
  Antisense strand to SEQ ID NO: 261470
uugcucaccuuucagaacc

SEQ ID NO: 261472 - RNA, 19 nt, Artificial Sequence
  Description of Artificial Sequence: Synthetic oligonucleotide
  Sense strand starting at position 2350 SEQ ID NO: 3362
cgaagaagcaguuaaauac

SEQ ID NO: 261473 - RNA, 19 nt, Artificial Sequence
  Description of Artificial Sequence: Synthetic oligonucleotide
  Antisense strand to SEQ ID NO: 261472
guauuuaacugcuucuucg

SEQ ID NO: 261474 - RNA, 19 nt, Artificial Sequence
  Description of Artificial Sequence: Synthetic oligonucleotide
  Sense strand starting at position 2424 SEQ ID NO: 3362
gauugauguuaccuagaaa

SEQ ID NO: 261475 - RNA, 19 nt, Artificial Sequence
  Description of Artificial Sequence: Synthetic oligonucleotide
  Antisense strand to SEQ ID NO: 261474
uuucuagguaacaucaauc

SEQ ID NO: 261476 - RNA, 19 nt, Artificial Sequence
  Description of Artificial Sequence: Synthetic oligonucleotide
  Sense strand starting at position 2449 SEQ ID NO: 3362
ggaggcuacuagucuagau

SEQ ID NO: 261477 - RNA, 19 nt, Artificial Sequence
  Description of Artificial Sequence: Synthetic oligonucleotide
  Antisense strand to SEQ ID NO: 261476
aucuagacuaguagccucc

SEQ ID NO: 261478 - RNA, 19 nt, Artificial Sequence
  Description of Artificial Sequence: Synthetic oligonucleotide
  Sense strand starting at position 2507 SEQ ID NO: 3362
auauauaagcuuugauagg

SEQ ID NO: 261479 - RNA, 19 nt, Artificial Sequence
  Description of Artificial Sequence: Synthetic oligonucleotide
  Antisense strand to SEQ ID NO: 261478
ccuaucaaagcuuauauau

SEQ ID NO: 261480 - RNA, 19 nt, Artificial Sequence
  Description of Artificial Sequence: Synthetic oligonucleotide
  Sense strand starting at position 2608 SEQ ID NO: 3362
uuucuuaggcaauaugauu

SEQ ID NO: 261481 - RNA, 19 nt, Artificial Sequence
  Description of Artificial Sequence: Synthetic oligonucleotide
  Antisense strand to SEQ ID NO: 261480
aaucauauugccuaagaaa

SEQ ID NO: 261482 - RNA, 19 nt, Artificial Sequence
  Description of Artificial Sequence: Synthetic oligonucleotide
  Sense strand starting at position 2688 SEQ ID NO: 3362
cuaugaugucuuuaguuaa

SEQ ID NO: 261483 - RNA, 19 nt, Artificial Sequence
  Description of Artificial Sequence: Synthetic oligonucleotide
  Antisense strand to SEQ ID NO: 261482
uuaacuaaagacaucauag

SEQ ID NO: 261484 - RNA, 19 nt, Artificial Sequence
  Description of Artificial Sequence: Synthetic oligonucleotide
  Sense strand starting at position 2774 SEQ ID NO: 3362
uucggugauggguaauaag

SEQ ID NO: 261485 - RNA, 19 nt, Artificial Sequence
  Description of Artificial Sequence: Synthetic oligonucleotide
  Antisense strand to SEQ ID NO: 261484
cuuauuacccaucaccgaa

SEQ ID NO: 261486 - RNA, 19 nt, Artificial Sequence
  Description of Artificial Sequence: Synthetic oligonucleotide
  Sense strand starting at position 2783 SEQ ID NO: 3362
ggguaauaaggguguuuau

SEQ ID NO: 261487 - RNA, 19 nt, Artificial Sequence
  Description of Artificial Sequence: Synthetic oligonucleotide
  Antisense strand to SEQ ID NO: 261486
auaaacacccuuauuaccc

SEQ ID NO: 261488 - RNA, 19 nt, Artificial Sequence
  Description of Artificial Sequence: Synthetic oligonucleotide
  Sense strand starting at position 2890 SEQ ID NO: 3362
uucuuaaacggaugagguu

SEQ ID NO: 261489 - RNA, 19 nt, Artificial Sequence
  Description of Artificial Sequence: Synthetic oligonucleotide
  Antisense strand to SEQ ID NO: 261488
aaccucauccguuuaagaa

SEQ ID NO: 261490 - RNA, 19 nt, Artificial Sequence
  Description of Artificial Sequence: Synthetic oligonucleotide
  Sense strand starting at position 2925 SEQ ID NO: 3362
caggguuguggaggagaca

SEQ ID NO: 261491 - RNA, 19 nt, Artificial Sequence
  Description of Artificial Sequence: Synthetic oligonucleotide
  Antisense strand to SEQ ID NO: 261490
ugucuccuccacaacccug

SEQ ID NO: 261492 - RNA, 19 nt, Artificial Sequence
  Description of Artificial Sequence: Synthetic oligonucleotide
  Sense strand starting at position 3186 SEQ ID NO: 3362
uggugcuuuggucagaacu

SEQ ID NO: 261493 - RNA, 19 nt, Artificial Sequence
  Description of Artificial Sequence: Synthetic oligonucleotide
  Antisense strand to SEQ ID NO: 261492
aguucugaccaaagcacca

SEQ ID NO: 261494 - RNA, 19 nt, Artificial Sequence
  Description of Artificial Sequence: Synthetic oligonucleotide
  Sense strand starting at position 3468 SEQ ID NO: 3362
ccagucugccaauagaaca

SEQ ID NO: 261495 - RNA, 19 nt, Artificial Sequence
  Description of Artificial Sequence: Synthetic oligonucleotide
  Antisense strand to SEQ ID NO: 261494
uguucuauuggcagacugg

SEQ ID NO: 261496 - RNA, 19 nt, Artificial Sequence
  Description of Artificial Sequence: Synthetic oligonucleotide
  Sense strand starting at position 3662 SEQ ID NO: 3362
ugcccuaucaaguaggagu

SEQ ID NO: 261497 - RNA, 19 nt, Artificial Sequence
  Description of Artificial Sequence: Synthetic oligonucleotide
  Antisense strand to SEQ ID NO: 261496
acuccuacuugauagggca

SEQ ID NO: 261498 - RNA, 19 nt, Artificial Sequence
  Description of Artificial Sequence: Synthetic oligonucleotide
  Sense strand starting at position 3831 SEQ ID NO: 3362
uggaacacugcucaaguuu

SEQ ID NO: 261499 - RNA, 19 nt, Artificial Sequence
  Description of Artificial Sequence: Synthetic oligonucleotide
  Antisense strand to SEQ ID NO: 261498
aaacuugagcaguguucca

SEQ ID NO: 261500 - RNA, 19 nt, Artificial Sequence
  Description of Artificial Sequence: Synthetic oligonucleotide
  Sense strand starting at position 3905 SEQ ID NO: 3362
acugaucccguagagguua

SEQ ID NO: 261501 - RNA, 19 nt, Artificial Sequence
  Description of Artificial Sequence: Synthetic oligonucleotide
  Antisense strand to SEQ ID NO: 261500
uaaccucuacgggaucagu

SEQ ID NO: 261502 - RNA, 19 nt, Artificial Sequence
  Description of Artificial Sequence: Synthetic oligonucleotide
  Sense strand starting at position 3935 SEQ ID NO: 3362
augucacauagauggguua

SEQ ID NO: 261503 - RNA, 19 nt, Artificial Sequence
  Description of Artificial Sequence: Synthetic oligonucleotide
  Antisense strand to SEQ ID NO: 261502
uaacccaucuaugugacau

SEQ ID NO: 261504 - RNA, 19 nt, Artificial Sequence
  Description of Artificial Sequence: Synthetic oligonucleotide
  Sense strand starting at position 3936 SEQ ID NO: 3362
ugucacauagauggguuaa

SEQ ID NO: 261505 - RNA, 19 nt, Artificial Sequence
  Description of Artificial Sequence: Synthetic oligonucleotide
  Antisense strand to SEQ ID NO: 261504
uuaacccaucuaugugaca

SEQ ID NO: 261506 - RNA, 19 nt, Artificial Sequence
  Description of Artificial Sequence: Synthetic oligonucleotide
  Sense strand starting at position 3937 SEQ ID NO: 3362
gucacauagauggguuaag

SEQ ID NO: 261507 - RNA, 19 nt, Artificial Sequence
  Description of Artificial Sequence: Synthetic oligonucleotide
  Antisense strand to SEQ ID NO: 261506
cuuaacccaucuaugugac

SEQ ID NO: 261508 - RNA, 19 nt, Artificial Sequence
  Description of Artificial Sequence: Synthetic oligonucleotide
  Sense strand starting at position 3970 SEQ ID NO: 3362
agcgcuaauacagggaaua

SEQ ID NO: 261509 - RNA, 19 nt, Artificial Sequence
  Description of Artificial Sequence: Synthetic oligonucleotide
  Antisense strand to SEQ ID NO: 261508
uauucccuguauuagcgcu

SEQ ID NO: 261510 - RNA, 19 nt, Artificial Sequence
  Description of Artificial Sequence: Synthetic oligonucleotide
  Sense strand starting at position 3971 SEQ ID NO: 3362
gcgcuaauacagggaauaa

SEQ ID NO: 261511 - RNA, 19 nt, Artificial Sequence
  Description of Artificial Sequence: Synthetic oligonucleotide
  Antisense strand to SEQ ID NO: 261510
uuauucccuguauuagcgc

SEQ ID NO: 261512 - RNA, 19 nt, Artificial Sequence
  Description of Artificial Sequence: Synthetic oligonucleotide
  Sense strand starting at position 61 SEQ ID NO: 3363
aagcacuuacucuguggaa

SEQ ID NO: 261513 - RNA, 19 nt, Artificial Sequence
  Description of Artificial Sequence: Synthetic oligonucleotide
  Antisense strand to SEQ ID NO: 261512
uuccacagaguaagugcuu

SEQ ID NO: 261514 - RNA, 19 nt, Artificial Sequence
  Description of Artificial Sequence: Synthetic oligonucleotide
  Sense strand starting at position 195 SEQ ID NO: 3363
auaugucacaaggguagaa

SEQ ID NO: 261515 - RNA, 19 nt, Artificial Sequence
  Description of Artificial Sequence: Synthetic oligonucleotide
  Antisense strand to SEQ ID NO: 261514
uucuacccuugugacauau

SEQ ID NO: 261516 - RNA, 19 nt, Artificial Sequence
  Description of Artificial Sequence: Synthetic oligonucleotide
  Sense strand starting at position 318 SEQ ID NO: 3363
cuacgugaaucacugaaag

SEQ ID NO: 261517 - RNA, 19 nt, Artificial Sequence
  Description of Artificial Sequence: Synthetic oligonucleotide
  Antisense strand to SEQ ID NO: 261516
cuuucagugauucacguag

SEQ ID NO: 261518 - RNA, 19 nt, Artificial Sequence
  Description of Artificial Sequence: Synthetic oligonucleotide
  Sense strand starting at position 344 SEQ ID NO: 3363
gagggaaagcgcuaacaua

SEQ ID NO: 261519 - RNA, 19 nt, Artificial Sequence
  Description of Artificial Sequence: Synthetic oligonucleotide
  Antisense strand to SEQ ID NO: 261518
uauguuagcgcuuucccuc

SEQ ID NO: 261520 - RNA, 19 nt, Artificial Sequence
  Description of Artificial Sequence: Synthetic oligonucleotide
  Sense strand starting at position 471 SEQ ID NO: 3363
ucuguuauugucuacaaca

SEQ ID NO: 261521 - RNA, 19 nt, Artificial Sequence
  Description of Artificial Sequence: Synthetic oligonucleotide
  Antisense strand to SEQ ID NO: 261520
uguuguagacaauaacaga

SEQ ID NO: 261522 - RNA, 19 nt, Artificial Sequence
  Description of Artificial Sequence: Synthetic oligonucleotide
  Sense strand starting at position 473 SEQ ID NO: 3363
uguuauugucuacaacauu

SEQ ID NO: 261523 - RNA, 19 nt, Artificial Sequence
  Description of Artificial Sequence: Synthetic oligonucleotide
  Antisense strand to SEQ ID NO: 261522
aauguuguagacaauaaca

SEQ ID NO: 261524 - RNA, 19 nt, Artificial Sequence
  Description of Artificial Sequence: Synthetic oligonucleotide
  Sense strand starting at position 498 SEQ ID NO: 3363
gaaauacaaguuugguagu

SEQ ID NO: 261525 - RNA, 19 nt, Artificial Sequence
  Description of Artificial Sequence: Synthetic oligonucleotide
  Antisense strand to SEQ ID NO: 261524
acuaccaaacuuguauuuc

SEQ ID NO: 261526 - RNA, 19 nt, Artificial Sequence
  Description of Artificial Sequence: Synthetic oligonucleotide
  Sense strand starting at position 568 SEQ ID NO: 3363
ugcuuauaccaugaaugca

SEQ ID NO: 261527 - RNA, 19 nt, Artificial Sequence
  Description of Artificial Sequence: Synthetic oligonucleotide
  Antisense strand to SEQ ID NO: 261526
ugcauucaugguauaagca

SEQ ID NO: 261528 - RNA, 19 nt, Artificial Sequence
  Description of Artificial Sequence: Synthetic oligonucleotide
  Sense strand starting at position 644 SEQ ID NO: 3363
ucuggauucccguagugag

SEQ ID NO: 261529 - RNA, 19 nt, Artificial Sequence
  Description of Artificial Sequence: Synthetic oligonucleotide
  Antisense strand to SEQ ID NO: 261528
cucacuacgggaauccaga

SEQ ID NO: 261530 - RNA, 19 nt, Artificial Sequence
  Description of Artificial Sequence: Synthetic oligonucleotide
  Sense strand starting at position 656 SEQ ID NO: 3363
uagugagcuccagacacau

SEQ ID NO: 261531 - RNA, 19 nt, Artificial Sequence
  Description of Artificial Sequence: Synthetic oligonucleotide
  Antisense strand to SEQ ID NO: 261530
augugucuggagcucacua

SEQ ID NO: 261532 - RNA, 19 nt, Artificial Sequence
  Description of Artificial Sequence: Synthetic oligonucleotide
  Sense strand starting at position 734 SEQ ID NO: 3363
cccaaugguuuguuuagaa

SEQ ID NO: 261533 - RNA, 19 nt, Artificial Sequence
  Description of Artificial Sequence: Synthetic oligonucleotide
  Antisense strand to SEQ ID NO: 261532
uucuaaacaaaccauuggg

SEQ ID NO: 261534 - RNA, 19 nt, Artificial Sequence
  Description of Artificial Sequence: Synthetic oligonucleotide
  Sense strand starting at position 765 SEQ ID NO: 3363
cucacaaauccugggacua

SEQ ID NO: 261535 - RNA, 19 nt, Artificial Sequence
  Description of Artificial Sequence: Synthetic oligonucleotide
  Antisense strand to SEQ ID NO: 261534
uagucccaggauuugugag

SEQ ID NO: 261536 - RNA, 19 nt, Artificial Sequence
  Description of Artificial Sequence: Synthetic oligonucleotide
  Sense strand starting at position 1154 SEQ ID NO: 3363
ugaaauaugccaugaggug

SEQ ID NO: 261537 - RNA, 19 nt, Artificial Sequence
  Description of Artificial Sequence: Synthetic oligonucleotide
  Antisense strand to SEQ ID NO: 261536
caccucauggcauauuuca

SEQ ID NO: 261538 - RNA, 19 nt, Artificial Sequence
  Description of Artificial Sequence: Synthetic oligonucleotide
  Sense strand starting at position 1155 SEQ ID NO: 3363
gaaauaugccaugaggugu

SEQ ID NO: 261539 - RNA, 19 nt, Artificial Sequence
  Description of Artificial Sequence: Synthetic oligonucleotide
  Antisense strand to SEQ ID NO: 261538
acaccucauggcauauuuc

SEQ ID NO: 261540 - RNA, 19 nt, Artificial Sequence
  Description of Artificial Sequence: Synthetic oligonucleotide
  Sense strand starting at position 1166 SEQ ID NO: 3363
ugaggugucacucaaguaa

SEQ ID NO: 261541 - RNA, 19 nt, Artificial Sequence
  Description of Artificial Sequence: Synthetic oligonucleotide
  Antisense strand to SEQ ID NO: 261540
uuacuugagugacaccuca

SEQ ID NO: 261542 - RNA, 19 nt, Artificial Sequence
  Description of Artificial Sequence: Synthetic oligonucleotide
  Sense strand starting at position 1390 SEQ ID NO: 3363
guuugacaaguuuaaccuu

SEQ ID NO: 261543 - RNA, 19 nt, Artificial Sequence
  Description of Artificial Sequence: Synthetic oligonucleotide
  Antisense strand to SEQ ID NO: 261542
aagguuaaacuugucaaac

SEQ ID NO: 261544 - RNA, 19 nt, Artificial Sequence
  Description of Artificial Sequence: Synthetic oligonucleotide
  Sense strand starting at position 1464 SEQ ID NO: 3363
gaagucagccaaggguaaa

SEQ ID NO: 261545 - RNA, 19 nt, Artificial Sequence
  Description of Artificial Sequence: Synthetic oligonucleotide
  Antisense strand to SEQ ID NO: 261544
uuuacccuuggcugacuuc

SEQ ID NO: 261546 - RNA, 19 nt, Artificial Sequence
  Description of Artificial Sequence: Synthetic oligonucleotide
  Sense strand starting at position 1560 SEQ ID NO: 3363
gggagcgguuuccuuauuu

SEQ ID NO: 261547 - RNA, 19 nt, Artificial Sequence
  Description of Artificial Sequence: Synthetic oligonucleotide
  Antisense strand to SEQ ID NO: 261546
aaauaaggaaaccgcuccc

SEQ ID NO: 261548 - RNA, 19 nt, Artificial Sequence
  Description of Artificial Sequence: Synthetic oligonucleotide
  Sense strand starting at position 2099 SEQ ID NO: 3363
ucgguuucucagagcgagu

SEQ ID NO: 261549 - RNA, 19 nt, Artificial Sequence
  Description of Artificial Sequence: Synthetic oligonucleotide
  Antisense strand to SEQ ID NO: 261548
acucgcucugagaaaccga

SEQ ID NO: 261550 - RNA, 19 nt, Artificial Sequence
  Description of Artificial Sequence: Synthetic oligonucleotide
  Sense strand starting at position 2216 SEQ ID NO: 3363
ggucaagugcuuucagcgu

SEQ ID NO: 261551 - RNA, 19 nt, Artificial Sequence
  Description of Artificial Sequence: Synthetic oligonucleotide
  Antisense strand to SEQ ID NO: 261550
acgcugaaagcacuugacc

SEQ ID NO: 261552 - RNA, 19 nt, Artificial Sequence
  Description of Artificial Sequence: Synthetic oligonucleotide
  Sense strand starting at position 2222 SEQ ID NO: 3363
gugcuuucagcguuaggug

SEQ ID NO: 261553 - RNA, 19 nt, Artificial Sequence
  Description of Artificial Sequence: Synthetic oligonucleotide
  Antisense strand to SEQ ID NO: 261552
caccuaacgcugaaagcac

SEQ ID NO: 261554 - RNA, 19 nt, Artificial Sequence
  Description of Artificial Sequence: Synthetic oligonucleotide
  Sense strand starting at position 2231 SEQ ID NO: 3363
gcguuaggugcuuuccaua

SEQ ID NO: 261555 - RNA, 19 nt, Artificial Sequence
  Description of Artificial Sequence: Synthetic oligonucleotide
  Antisense strand to SEQ ID NO: 261554
uauggaaagcaccuaacgc

SEQ ID NO: 261556 - RNA, 19 nt, Artificial Sequence
  Description of Artificial Sequence: Synthetic oligonucleotide
  Sense strand starting at position 2293 SEQ ID NO: 3363
agaacaacuguguauugua

SEQ ID NO: 261557 - RNA, 19 nt, Artificial Sequence
  Description of Artificial Sequence: Synthetic oligonucleotide
  Antisense strand to SEQ ID NO: 261556
uacaauacacaguuguucu

SEQ ID NO: 261558 - RNA, 19 nt, Artificial Sequence
  Description of Artificial Sequence: Synthetic oligonucleotide
  Sense strand starting at position 2514 SEQ ID NO: 3363
agcacaguuccugacauag

SEQ ID NO: 261559 - RNA, 19 nt, Artificial Sequence
  Description of Artificial Sequence: Synthetic oligonucleotide
  Antisense strand to SEQ ID NO: 261558
cuaugucaggaacugugcu

SEQ ID NO: 261560 - RNA, 19 nt, Artificial Sequence
  Description of Artificial Sequence: Synthetic oligonucleotide
  Sense strand starting at position 2560 SEQ ID NO: 3363
acaucacgugccuaauauc

SEQ ID NO: 261561 - RNA, 19 nt, Artificial Sequence
  Description of Artificial Sequence: Synthetic oligonucleotide
  Antisense strand to SEQ ID NO: 261560
gauauuaggcacgugaugu

SEQ ID NO: 261562 - RNA, 19 nt, Artificial Sequence
  Description of Artificial Sequence: Synthetic oligonucleotide
  Sense strand starting at position 2642 SEQ ID NO: 3363
ugccuuucccaguagacau

SEQ ID NO: 261563 - RNA, 19 nt, Artificial Sequence
  Description of Artificial Sequence: Synthetic oligonucleotide
  Antisense strand to SEQ ID NO: 261562
augucuacugggaaaggca

SEQ ID NO: 261564 - RNA, 19 nt, Artificial Sequence
  Description of Artificial Sequence: Synthetic oligonucleotide
  Sense strand starting at position 2739 SEQ ID NO: 3363
ucaguaaccucauuucgca

SEQ ID NO: 261565 - RNA, 19 nt, Artificial Sequence
  Description of Artificial Sequence: Synthetic oligonucleotide
  Antisense strand to SEQ ID NO: 261564
ugcgaaaugagguuacuga

SEQ ID NO: 261566 - RNA, 19 nt, Artificial Sequence
  Description of Artificial Sequence: Synthetic oligonucleotide
  Sense strand starting at position 2784 SEQ ID NO: 3363
uuuccuaauccgugauuug

SEQ ID NO: 261567 - RNA, 19 nt, Artificial Sequence
  Description of Artificial Sequence: Synthetic oligonucleotide
  Antisense strand to SEQ ID NO: 261566
caaaucacggauuaggaaa

SEQ ID NO: 261568 - RNA, 19 nt, Artificial Sequence
  Description of Artificial Sequence: Synthetic oligonucleotide
  Sense strand starting at position 2787 SEQ ID NO: 3363
ccuaauccgugauuuguau

SEQ ID NO: 261569 - RNA, 19 nt, Artificial Sequence
  Description of Artificial Sequence: Synthetic oligonucleotide
  Antisense strand to SEQ ID NO: 261568
auacaaaucacggauuagg

SEQ ID NO: 261570 - RNA, 19 nt, Artificial Sequence
  Description of Artificial Sequence: Synthetic oligonucleotide
  Sense strand starting at position 2794 SEQ ID NO: 3363
cgugauuuguaucuacaua

SEQ ID NO: 261571 - RNA, 19 nt, Artificial Sequence
  Description of Artificial Sequence: Synthetic oligonucleotide
  Antisense strand to SEQ ID NO: 261570
uauguagauacaaaucacg

SEQ ID NO: 261572 - RNA, 19 nt, Artificial Sequence
  Description of Artificial Sequence: Synthetic oligonucleotide
  Sense strand starting at position 2837 SEQ ID NO: 3363
gauuuaaucgcauggcuca

SEQ ID NO: 261573 - RNA, 19 nt, Artificial Sequence
  Description of Artificial Sequence: Synthetic oligonucleotide
  Antisense strand to SEQ ID NO: 261572
ugagccaugcgauuaaauc

SEQ ID NO: 261574 - RNA, 19 nt, Artificial Sequence
  Description of Artificial Sequence: Synthetic oligonucleotide
  Sense strand starting at position 2938 SEQ ID NO: 3363
gcggaaucccgccuguacu

SEQ ID NO: 261575 - RNA, 19 nt, Artificial Sequence
  Description of Artificial Sequence: Synthetic oligonucleotide
  Antisense strand to SEQ ID NO: 261574
aguacaggcgggauuccgc

SEQ ID NO: 261576 - RNA, 19 nt, Artificial Sequence
  Description of Artificial Sequence: Synthetic oligonucleotide
  Sense strand starting at position 2941 SEQ ID NO: 3363
gaaucccgccuguacuaaa

SEQ ID NO: 261577 - RNA, 19 nt, Artificial Sequence
  Description of Artificial Sequence: Synthetic oligonucleotide
  Antisense strand to SEQ ID NO: 261576
uuuaguacaggcgggauuc

SEQ ID NO: 261578 - RNA, 19 nt, Artificial Sequence
  Description of Artificial Sequence: Synthetic oligonucleotide
  Sense strand starting at position 3340 SEQ ID NO: 3363
aggauaagguuucuuauau

SEQ ID NO: 261579 - RNA, 19 nt, Artificial Sequence
  Description of Artificial Sequence: Synthetic oligonucleotide
  Antisense strand to SEQ ID NO: 261578
auauaagaaaccuuauccu

SEQ ID NO: 261580 - RNA, 19 nt, Artificial Sequence
  Description of Artificial Sequence: Synthetic oligonucleotide
  Sense strand starting at position 3341 SEQ ID NO: 3363
ggauaagguuucuuauauu

SEQ ID NO: 261581 - RNA, 19 nt, Artificial Sequence
  Description of Artificial Sequence: Synthetic oligonucleotide
  Antisense strand to SEQ ID NO: 261580
aauauaagaaaccuuaucc

SEQ ID NO: 261582 - RNA, 19 nt, Artificial Sequence
  Description of Artificial Sequence: Synthetic oligonucleotide
  Sense strand starting at position 3355 SEQ ID NO: 3363
auauuuccuuuagaggauu

SEQ ID NO: 261583 - RNA, 19 nt, Artificial Sequence
  Description of Artificial Sequence: Synthetic oligonucleotide
  Antisense strand to SEQ ID NO: 261582
aauccucuaaaggaaauau

SEQ ID NO: 261584 - RNA, 19 nt, Artificial Sequence
  Description of Artificial Sequence: Synthetic oligonucleotide
  Sense strand starting at position 3422 SEQ ID NO: 3363
uguucugucccuuagaaag

SEQ ID NO: 261585 - RNA, 19 nt, Artificial Sequence
  Description of Artificial Sequence: Synthetic oligonucleotide
  Antisense strand to SEQ ID NO: 261584
cuuucuaagggacagaaca

SEQ ID NO: 261586 - RNA, 19 nt, Artificial Sequence
  Description of Artificial Sequence: Synthetic oligonucleotide
  Sense strand starting at position 3584 SEQ ID NO: 3363
auugucuuuggcuaccaga

SEQ ID NO: 261587 - RNA, 19 nt, Artificial Sequence
  Description of Artificial Sequence: Synthetic oligonucleotide
  Antisense strand to SEQ ID NO: 261586
ucugguagccaaagacaau

SEQ ID NO: 261588 - RNA, 19 nt, Artificial Sequence
  Description of Artificial Sequence: Synthetic oligonucleotide
  Sense strand starting at position 3597 SEQ ID NO: 3363
accagaaugcugggcaaca

SEQ ID NO: 261589 - RNA, 19 nt, Artificial Sequence
  Description of Artificial Sequence: Synthetic oligonucleotide
  Antisense strand to SEQ ID NO: 261588
uguugcccagcauucuggu

SEQ ID NO: 261590 - RNA, 19 nt, Artificial Sequence
  Description of Artificial Sequence: Synthetic oligonucleotide
  Sense strand starting at position 3811 SEQ ID NO: 3363
cuuuaaguauugucaauag

SEQ ID NO: 261591 - RNA, 19 nt, Artificial Sequence
  Description of Artificial Sequence: Synthetic oligonucleotide
  Antisense strand to SEQ ID NO: 261590
cuauugacaauacuuaaag

SEQ ID NO: 261592 - RNA, 19 nt, Artificial Sequence
  Description of Artificial Sequence: Synthetic oligonucleotide
  Sense strand starting at position 132 SEQ ID NO: 3364
gcuuguuauuaaucagaga

SEQ ID NO: 261593 - RNA, 19 nt, Artificial Sequence
  Description of Artificial Sequence: Synthetic oligonucleotide
  Antisense strand to SEQ ID NO: 261592
ucucugauuaauaacaagc

SEQ ID NO: 261594 - RNA, 19 nt, Artificial Sequence
  Description of Artificial Sequence: Synthetic oligonucleotide
  Sense strand starting at position 206 SEQ ID NO: 3364
auuuguaggucugacaaua

SEQ ID NO: 261595 - RNA, 19 nt, Artificial Sequence
  Description of Artificial Sequence: Synthetic oligonucleotide
  Antisense strand to SEQ ID NO: 261594
uauugucagaccuacaaau

SEQ ID NO: 261596 - RNA, 19 nt, Artificial Sequence
  Description of Artificial Sequence: Synthetic oligonucleotide
  Sense strand starting at position 214 SEQ ID NO: 3364
gucugacaauaucuauuga

SEQ ID NO: 261597 - RNA, 19 nt, Artificial Sequence
  Description of Artificial Sequence: Synthetic oligonucleotide
  Antisense strand to SEQ ID NO: 261596
ucaauagauauugucagac

SEQ ID NO: 261598 - RNA, 19 nt, Artificial Sequence
  Description of Artificial Sequence: Synthetic oligonucleotide
  Sense strand starting at position 237 SEQ ID NO: 3364
aucaauaucagguguuggu

SEQ ID NO: 261599 - RNA, 19 nt, Artificial Sequence
  Description of Artificial Sequence: Synthetic oligonucleotide
  Antisense strand to SEQ ID NO: 261598
accaacaccugauauugau

SEQ ID NO: 261600 - RNA, 19 nt, Artificial Sequence
  Description of Artificial Sequence: Synthetic oligonucleotide
  Sense strand starting at position 287 SEQ ID NO: 3364
ucaggcaaugcugaauaua

SEQ ID NO: 261601 - RNA, 19 nt, Artificial Sequence
  Description of Artificial Sequence: Synthetic oligonucleotide
  Antisense strand to SEQ ID NO: 261600
uauauucagcauugccuga

SEQ ID NO: 261602 - RNA, 19 nt, Artificial Sequence
  Description of Artificial Sequence: Synthetic oligonucleotide
  Sense strand starting at position 321 SEQ ID NO: 3364
caggcaauuccacagcgau

SEQ ID NO: 261603 - RNA, 19 nt, Artificial Sequence
  Description of Artificial Sequence: Synthetic oligonucleotide
  Antisense strand to SEQ ID NO: 261602
aucgcuguggaauugccug

SEQ ID NO: 261604 - RNA, 19 nt, Artificial Sequence
  Description of Artificial Sequence: Synthetic oligonucleotide
  Sense strand starting at position 389 SEQ ID NO: 3364
ugagaucaaucagcuuugu

SEQ ID NO: 261605 - RNA, 19 nt, Artificial Sequence
  Description of Artificial Sequence: Synthetic oligonucleotide
  Antisense strand to SEQ ID NO: 261604
acaaagcugauugaucuca

SEQ ID NO: 261606 - RNA, 19 nt, Artificial Sequence
  Description of Artificial Sequence: Synthetic oligonucleotide
  Sense strand starting at position 434 SEQ ID NO: 3364
agaauuguggcacagucau

SEQ ID NO: 261607 - RNA, 19 nt, Artificial Sequence
  Description of Artificial Sequence: Synthetic oligonucleotide
  Antisense strand to SEQ ID NO: 261606
augacugugccacaauucu

SEQ ID NO: 261608 - RNA, 19 nt, Artificial Sequence
  Description of Artificial Sequence: Synthetic oligonucleotide
  Sense strand starting at position 765 SEQ ID NO: 3364
augagaaagcauuacagcu

SEQ ID NO: 261609 - RNA, 19 nt, Artificial Sequence
  Description of Artificial Sequence: Synthetic oligonucleotide
  Antisense strand to SEQ ID NO: 261608
agcuguaaugcuuucucau

SEQ ID NO: 261610 - RNA, 19 nt, Artificial Sequence
  Description of Artificial Sequence: Synthetic oligonucleotide
  Sense strand starting at position 822 SEQ ID NO: 3364
gauacuaaagcguauauac

SEQ ID NO: 261611 - RNA, 19 nt, Artificial Sequence
  Description of Artificial Sequence: Synthetic oligonucleotide
  Antisense strand to SEQ ID NO: 261610
guauauacgcuuuaguauc

SEQ ID NO: 261612 - RNA, 19 nt, Artificial Sequence
  Description of Artificial Sequence: Synthetic oligonucleotide
  Sense strand starting at position 831 SEQ ID NO: 3364
gcguauauacuguaugaac

SEQ ID NO: 261613 - RNA, 19 nt, Artificial Sequence
  Description of Artificial Sequence: Synthetic oligonucleotide
  Antisense strand to SEQ ID NO: 261612
guucauacaguauauacgc

SEQ ID NO: 261614 - RNA, 19 nt, Artificial Sequence
  Description of Artificial Sequence: Synthetic oligonucleotide
  Sense strand starting at position 833 SEQ ID NO: 3364
guauauacuguaugaacca

SEQ ID NO: 261615 - RNA, 19 nt, Artificial Sequence
  Description of Artificial Sequence: Synthetic oligonucleotide
  Antisense strand to SEQ ID NO: 261614
ugguucauacaguauauac

SEQ ID NO: 261616 - RNA, 19 nt, Artificial Sequence
  Description of Artificial Sequence: Synthetic oligonucleotide
  Sense strand starting at position 895 SEQ ID NO: 3364
ugcacauauggaugcuaaa

SEQ ID NO: 261617 - RNA, 19 nt, Artificial Sequence
  Description of Artificial Sequence: Synthetic oligonucleotide
  Antisense strand to SEQ ID NO: 261616
uuuagcauccauaugugca

SEQ ID NO: 261618 - RNA, 19 nt, Artificial Sequence
  Description of Artificial Sequence: Synthetic oligonucleotide
  Sense strand starting at position 954 SEQ ID NO: 3364
aaaugagaacaguguuuau

SEQ ID NO: 261619 - RNA, 19 nt, Artificial Sequence
  Description of Artificial Sequence: Synthetic oligonucleotide
  Antisense strand to SEQ ID NO: 261618
auaaacacuguucucauuu

SEQ ID NO: 261620 - RNA, 19 nt, Artificial Sequence
  Description of Artificial Sequence: Synthetic oligonucleotide
  Sense strand starting at position 957 SEQ ID NO: 3364
ugagaacaguguuuauauc

SEQ ID NO: 261621 - RNA, 19 nt, Artificial Sequence
  Description of Artificial Sequence: Synthetic oligonucleotide
  Antisense strand to SEQ ID NO: 261620
gauauaaacacuguucuca

SEQ ID NO: 261622 - RNA, 19 nt, Artificial Sequence
  Description of Artificial Sequence: Synthetic oligonucleotide
  Sense strand starting at position 958 SEQ ID NO: 3364
gagaacaguguuuauaucu

SEQ ID NO: 261623 - RNA, 19 nt, Artificial Sequence
  Description of Artificial Sequence: Synthetic oligonucleotide
  Antisense strand to SEQ ID NO: 261622
agauauaaacacuguucuc

SEQ ID NO: 261624 - RNA, 19 nt, Artificial Sequence
  Description of Artificial Sequence: Synthetic oligonucleotide
  Sense strand starting at position 1053 SEQ ID NO: 3364
acagguguuugcuuuagaa

SEQ ID NO: 261625 - RNA, 19 nt, Artificial Sequence
  Description of Artificial Sequence: Synthetic oligonucleotide
  Antisense strand to SEQ ID NO: 261624
uucuaaagcaaacaccugu

SEQ ID NO: 261626 - RNA, 19 nt, Artificial Sequence
  Description of Artificial Sequence: Synthetic oligonucleotide
  Sense strand starting at position 1055 SEQ ID NO: 3364
agguguuugcuuuagaacu

SEQ ID NO: 261627 - RNA, 19 nt, Artificial Sequence
  Description of Artificial Sequence: Synthetic oligonucleotide
  Antisense strand to SEQ ID NO: 261626
aguucuaaagcaaacaccu

SEQ ID NO: 261628 - RNA, 19 nt, Artificial Sequence
  Description of Artificial Sequence: Synthetic oligonucleotide
  Sense strand starting at position 1112 SEQ ID NO: 3364
uauguauuauauuucgcga

SEQ ID NO: 261629 - RNA, 19 nt, Artificial Sequence
  Description of Artificial Sequence: Synthetic oligonucleotide
  Antisense strand to SEQ ID NO: 261628
ucgcgaaauauaauacaua

SEQ ID NO: 261630 - RNA, 19 nt, Artificial Sequence
  Description of Artificial Sequence: Synthetic oligonucleotide
  Sense strand starting at position 1115 SEQ ID NO: 3364
guauuauauuucgcgaaca

SEQ ID NO: 261631 - RNA, 19 nt, Artificial Sequence
  Description of Artificial Sequence: Synthetic oligonucleotide
  Antisense strand to SEQ ID NO: 261630
uguucgcgaaauauaauac

SEQ ID NO: 261632 - RNA, 19 nt, Artificial Sequence
  Description of Artificial Sequence: Synthetic oligonucleotide
  Sense strand starting at position 1253 SEQ ID NO: 3364
gaaaguaacuuacugagca

SEQ ID NO: 261633 - RNA, 19 nt, Artificial Sequence
  Description of Artificial Sequence: Synthetic oligonucleotide
  Antisense strand to SEQ ID NO: 261632
ugcucaguaaguuacuuuc

SEQ ID NO: 261634 - RNA, 19 nt, Artificial Sequence
  Description of Artificial Sequence: Synthetic oligonucleotide
  Sense strand starting at position 1353 SEQ ID NO: 3364
ugcuaucucucagucaaga

SEQ ID NO: 261635 - RNA, 19 nt, Artificial Sequence
  Description of Artificial Sequence: Synthetic oligonucleotide
  Antisense strand to SEQ ID NO: 261634
ucuugacugagagauagca

SEQ ID NO: 261636 - RNA, 19 nt, Artificial Sequence
  Description of Artificial Sequence: Synthetic oligonucleotide
  Sense strand starting at position 1513 SEQ ID NO: 3364
uuuagagguguagaaucuu

SEQ ID NO: 261637 - RNA, 19 nt, Artificial Sequence
  Description of Artificial Sequence: Synthetic oligonucleotide
  Antisense strand to SEQ ID NO: 261636
aagauucuacaccucuaaa

SEQ ID NO: 261638 - RNA, 19 nt, Artificial Sequence
  Description of Artificial Sequence: Synthetic oligonucleotide
  Sense strand starting at position 1522 SEQ ID NO: 3364
guagaaucuuaaguuagga

SEQ ID NO: 261639 - RNA, 19 nt, Artificial Sequence
  Description of Artificial Sequence: Synthetic oligonucleotide
  Antisense strand to SEQ ID NO: 261638
uccuaacuuaagauucuac

SEQ ID NO: 261640 - RNA, 19 nt, Artificial Sequence
  Description of Artificial Sequence: Synthetic oligonucleotide
  Sense strand starting at position 1540 SEQ ID NO: 3364
agacauuaauucucaaggu

SEQ ID NO: 261641 - RNA, 19 nt, Artificial Sequence
  Description of Artificial Sequence: Synthetic oligonucleotide
  Antisense strand to SEQ ID NO: 261640
accuugagaauuaaugucu

SEQ ID NO: 261642 - RNA, 19 nt, Artificial Sequence
  Description of Artificial Sequence: Synthetic oligonucleotide
  Sense strand starting at position 1554 SEQ ID NO: 3364
aagguuaaaggucgugaau

SEQ ID NO: 261643 - RNA, 19 nt, Artificial Sequence
  Description of Artificial Sequence: Synthetic oligonucleotide
  Antisense strand to SEQ ID NO: 261642
auucacgaccuuuaaccuu

SEQ ID NO: 261644 - RNA, 19 nt, Artificial Sequence
  Description of Artificial Sequence: Synthetic oligonucleotide
  Sense strand starting at position 1594 SEQ ID NO: 3364
cagaaaguuaggugagacu

SEQ ID NO: 261645 - RNA, 19 nt, Artificial Sequence
  Description of Artificial Sequence: Synthetic oligonucleotide
  Antisense strand to SEQ ID NO: 261644
agucucaccuaacuuucug

SEQ ID NO: 261646 - RNA, 19 nt, Artificial Sequence
  Description of Artificial Sequence: Synthetic oligonucleotide
  Sense strand starting at position 1810 SEQ ID NO: 3364
cuuguuaaccuccagucua

SEQ ID NO: 261647 - RNA, 19 nt, Artificial Sequence
  Description of Artificial Sequence: Synthetic oligonucleotide
  Antisense strand to SEQ ID NO: 261646
uagacuggagguuaacaag

SEQ ID NO: 261648 - RNA, 19 nt, Artificial Sequence
  Description of Artificial Sequence: Synthetic oligonucleotide
  Sense strand starting at position 1866 SEQ ID NO: 3364
gaaggcaugcauggaguau

SEQ ID NO: 261649 - RNA, 19 nt, Artificial Sequence
  Description of Artificial Sequence: Synthetic oligonucleotide
  Antisense strand to SEQ ID NO: 261648
auacuccaugcaugccuuc

SEQ ID NO: 261650 - RNA, 19 nt, Artificial Sequence
  Description of Artificial Sequence: Synthetic oligonucleotide
  Sense strand starting at position 2089 SEQ ID NO: 3364
cguucuucgccgcuguaaa

SEQ ID NO: 261651 - RNA, 19 nt, Artificial Sequence
  Description of Artificial Sequence: Synthetic oligonucleotide
  Antisense strand to SEQ ID NO: 261650
uuuacagcggcgaagaacg

SEQ ID NO: 261652 - RNA, 19 nt, Artificial Sequence
  Description of Artificial Sequence: Synthetic oligonucleotide
  Sense strand starting at position 2696 SEQ ID NO: 3364
gagcaagauauagggugua

SEQ ID NO: 261653 - RNA, 19 nt, Artificial Sequence
  Description of Artificial Sequence: Synthetic oligonucleotide
  Antisense strand to SEQ ID NO: 261652
uacacccuauaucuugcuc

SEQ ID NO: 261654 - RNA, 19 nt, Artificial Sequence
  Description of Artificial Sequence: Synthetic oligonucleotide
  Sense strand starting at position 2699 SEQ ID NO: 3364
caagauauaggguguauua

SEQ ID NO: 261655 - RNA, 19 nt, Artificial Sequence
  Description of Artificial Sequence: Synthetic oligonucleotide
  Antisense strand to SEQ ID NO: 261654
uaauacacccuauaucuug

SEQ ID NO: 261656 - RNA, 19 nt, Artificial Sequence
  Description of Artificial Sequence: Synthetic oligonucleotide
  Sense strand starting at position 2760 SEQ ID NO: 3364
uggccacuuugaguccaaa

SEQ ID NO: 261657 - RNA, 19 nt, Artificial Sequence
  Description of Artificial Sequence: Synthetic oligonucleotide
  Antisense strand to SEQ ID NO: 261656
uuuggacucaaaguggcca

SEQ ID NO: 261658 - RNA, 19 nt, Artificial Sequence
  Description of Artificial Sequence: Synthetic oligonucleotide
  Sense strand starting at position 2784 SEQ ID NO: 3364
gcacauacgcuagacaagu

SEQ ID NO: 261659 - RNA, 19 nt, Artificial Sequence
  Description of Artificial Sequence: Synthetic oligonucleotide
  Antisense strand to SEQ ID NO: 261658
acuugucuagcguaugugc

SEQ ID NO: 261660 - RNA, 19 nt, Artificial Sequence
  Description of Artificial Sequence: Synthetic oligonucleotide
  Sense strand starting at position 2878 SEQ ID NO: 3364
ggucuuggucuguugcgaa

SEQ ID NO: 261661 - RNA, 19 nt, Artificial Sequence
  Description of Artificial Sequence: Synthetic oligonucleotide
  Antisense strand to SEQ ID NO: 261660
uucgcaacagaccaagacc

SEQ ID NO: 261662 - RNA, 19 nt, Artificial Sequence
  Description of Artificial Sequence: Synthetic oligonucleotide
  Sense strand starting at position 2883 SEQ ID NO: 3364
uggucuguugcgaaggcuu

SEQ ID NO: 261663 - RNA, 19 nt, Artificial Sequence
  Description of Artificial Sequence: Synthetic oligonucleotide
  Antisense strand to SEQ ID NO: 261662
aagccuucgcaacagacca

SEQ ID NO: 261664 - RNA, 19 nt, Artificial Sequence
  Description of Artificial Sequence: Synthetic oligonucleotide
  Sense strand starting at position 3064 SEQ ID NO: 3364
ucaauuauuugguauggaa

SEQ ID NO: 261665 - RNA, 19 nt, Artificial Sequence
  Description of Artificial Sequence: Synthetic oligonucleotide
  Antisense strand to SEQ ID NO: 261664
uuccauaccaaauaauuga

SEQ ID NO: 261666 - RNA, 19 nt, Artificial Sequence
  Description of Artificial Sequence: Synthetic oligonucleotide
  Sense strand starting at position 3168 SEQ ID NO: 3364
acaagugagugacuugauu

SEQ ID NO: 261667 - RNA, 19 nt, Artificial Sequence
  Description of Artificial Sequence: Synthetic oligonucleotide
  Antisense strand to SEQ ID NO: 261666
aaucaagucacucacuugu

SEQ ID NO: 261668 - RNA, 19 nt, Artificial Sequence
  Description of Artificial Sequence: Synthetic oligonucleotide
  Sense strand starting at position 3337 SEQ ID NO: 3364
uguuuauagagaugagguu

SEQ ID NO: 261669 - RNA, 19 nt, Artificial Sequence
  Description of Artificial Sequence: Synthetic oligonucleotide
  Antisense strand to SEQ ID NO: 261668
aaccucaucucuauaaaca

SEQ ID NO: 261670 - RNA, 19 nt, Artificial Sequence
  Description of Artificial Sequence: Synthetic oligonucleotide
  Sense strand starting at position 3338 SEQ ID NO: 3364
guuuauagagaugagguuu

SEQ ID NO: 261671 - RNA, 19 nt, Artificial Sequence
  Description of Artificial Sequence: Synthetic oligonucleotide
  Antisense strand to SEQ ID NO: 261670
aaaccucaucucuauaaac

SEQ ID NO: 261672 - RNA, 19 nt, Artificial Sequence
  Description of Artificial Sequence: Synthetic oligonucleotide
  Sense strand starting at position 2 SEQ ID NO: 3365
ccagguugauauucuaaau

SEQ ID NO: 261673 - RNA, 19 nt, Artificial Sequence
  Description of Artificial Sequence: Synthetic oligonucleotide
  Antisense strand to SEQ ID NO: 261672
auuuagaauaucaaccugg

SEQ ID NO: 261674 - RNA, 19 nt, Artificial Sequence
  Description of Artificial Sequence: Synthetic oligonucleotide
  Sense strand starting at position 50 SEQ ID NO: 3365
aguccuuugcuauauucua

SEQ ID NO: 261675 - RNA, 19 nt, Artificial Sequence
  Description of Artificial Sequence: Synthetic oligonucleotide
  Antisense strand to SEQ ID NO: 261674
uagaauauagcaaaggacu

SEQ ID NO: 261676 - RNA, 19 nt, Artificial Sequence
  Description of Artificial Sequence: Synthetic oligonucleotide
  Sense strand starting at position 205 SEQ ID NO: 3365
aaguaugaagcauaaaugu

SEQ ID NO: 261677 - RNA, 19 nt, Artificial Sequence
  Description of Artificial Sequence: Synthetic oligonucleotide
  Antisense strand to SEQ ID NO: 261676
acauuuaugcuucauacuu

SEQ ID NO: 261678 - RNA, 19 nt, Artificial Sequence
  Description of Artificial Sequence: Synthetic oligonucleotide
  Sense strand starting at position 348 SEQ ID NO: 3365
auauaaaugguguaguaca

SEQ ID NO: 261679 - RNA, 19 nt, Artificial Sequence
  Description of Artificial Sequence: Synthetic oligonucleotide
  Antisense strand to SEQ ID NO: 261678
uguacuacaccauuuauau

SEQ ID NO: 261680 - RNA, 19 nt, Artificial Sequence
  Description of Artificial Sequence: Synthetic oligonucleotide
  Sense strand starting at position 434 SEQ ID NO: 3365
aacugaaggucuguagcaa

SEQ ID NO: 261681 - RNA, 19 nt, Artificial Sequence
  Description of Artificial Sequence: Synthetic oligonucleotide
  Antisense strand to SEQ ID NO: 261680
uugcuacagaccuucaguu

SEQ ID NO: 261682 - RNA, 19 nt, Artificial Sequence
  Description of Artificial Sequence: Synthetic oligonucleotide
  Sense strand starting at position 435 SEQ ID NO: 3365
acugaaggucuguagcaau

SEQ ID NO: 261683 - RNA, 19 nt, Artificial Sequence
  Description of Artificial Sequence: Synthetic oligonucleotide
  Antisense strand to SEQ ID NO: 261682
auugcuacagaccuucagu

SEQ ID NO: 261684 - RNA, 19 nt, Artificial Sequence
  Description of Artificial Sequence: Synthetic oligonucleotide
  Sense strand starting at position 633 SEQ ID NO: 3365
ugucguggucuagaaccaa

SEQ ID NO: 261685 - RNA, 19 nt, Artificial Sequence
  Description of Artificial Sequence: Synthetic oligonucleotide
  Antisense strand to SEQ ID NO: 261684
uugguucuagaccacgaca

SEQ ID NO: 261686 - RNA, 19 nt, Artificial Sequence
  Description of Artificial Sequence: Synthetic oligonucleotide
  Sense strand starting at position 654 SEQ ID NO: 3365
cuacaauauguaugaggua

SEQ ID NO: 261687 - RNA, 19 nt, Artificial Sequence
  Description of Artificial Sequence: Synthetic oligonucleotide
  Antisense strand to SEQ ID NO: 261686
uaccucauacauauuguag

SEQ ID NO: 261688 - RNA, 19 nt, Artificial Sequence
  Description of Artificial Sequence: Synthetic oligonucleotide
  Sense strand starting at position 796 SEQ ID NO: 3365
uagguugaaagucguaaga

SEQ ID NO: 261689 - RNA, 19 nt, Artificial Sequence
  Description of Artificial Sequence: Synthetic oligonucleotide
  Antisense strand to SEQ ID NO: 261688
ucuuacgacuuucaaccua

SEQ ID NO: 261690 - RNA, 19 nt, Artificial Sequence
  Description of Artificial Sequence: Synthetic oligonucleotide
  Sense strand starting at position 844 SEQ ID NO: 3365
cuguccaacccauaaaguu

SEQ ID NO: 261691 - RNA, 19 nt, Artificial Sequence
  Description of Artificial Sequence: Synthetic oligonucleotide
  Antisense strand to SEQ ID NO: 261690
aacuuuauggguuggacag

SEQ ID NO: 261692 - RNA, 19 nt, Artificial Sequence
  Description of Artificial Sequence: Synthetic oligonucleotide
  Sense strand starting at position 1005 SEQ ID NO: 3365
uuuggagggcaauguuaaa

SEQ ID NO: 261693 - RNA, 19 nt, Artificial Sequence
  Description of Artificial Sequence: Synthetic oligonucleotide
  Antisense strand to SEQ ID NO: 261692
uuuaacauugcccuccaaa

SEQ ID NO: 261694 - RNA, 19 nt, Artificial Sequence
  Description of Artificial Sequence: Synthetic oligonucleotide
  Sense strand starting at position 1064 SEQ ID NO: 3365
ccuuuacgcgcuguuacau

SEQ ID NO: 261695 - RNA, 19 nt, Artificial Sequence
  Description of Artificial Sequence: Synthetic oligonucleotide
  Antisense strand to SEQ ID NO: 261694
auguaacagcgcguaaagg

SEQ ID NO: 261696 - RNA, 19 nt, Artificial Sequence
  Description of Artificial Sequence: Synthetic oligonucleotide
  Sense strand starting at position 1065 SEQ ID NO: 3365
cuuuacgcgcuguuacaua

SEQ ID NO: 261697 - RNA, 19 nt, Artificial Sequence
  Description of Artificial Sequence: Synthetic oligonucleotide
  Antisense strand to SEQ ID NO: 261696
uauguaacagcgcguaaag

SEQ ID NO: 261698 - RNA, 19 nt, Artificial Sequence
  Description of Artificial Sequence: Synthetic oligonucleotide
  Sense strand starting at position 1106 SEQ ID NO: 3365
agcucauaggcccauauau

SEQ ID NO: 261699 - RNA, 19 nt, Artificial Sequence
  Description of Artificial Sequence: Synthetic oligonucleotide
  Antisense strand to SEQ ID NO: 261698
auauaugggccuaugagcu

SEQ ID NO: 261700 - RNA, 19 nt, Artificial Sequence
  Description of Artificial Sequence: Synthetic oligonucleotide
  Sense strand starting at position 1144 SEQ ID NO: 3365
ugagguacauaucuuugua

SEQ ID NO: 261701 - RNA, 19 nt, Artificial Sequence
  Description of Artificial Sequence: Synthetic oligonucleotide
  Antisense strand to SEQ ID NO: 261700
uacaaagauauguaccuca

SEQ ID NO: 261702 - RNA, 19 nt, Artificial Sequence
  Description of Artificial Sequence: Synthetic oligonucleotide
  Sense strand starting at position 1146 SEQ ID NO: 3365
agguacauaucuuuguaau

SEQ ID NO: 261703 - RNA, 19 nt, Artificial Sequence
  Description of Artificial Sequence: Synthetic oligonucleotide
  Antisense strand to SEQ ID NO: 261702
auuacaaagauauguaccu

SEQ ID NO: 261704 - RNA, 19 nt, Artificial Sequence
  Description of Artificial Sequence: Synthetic oligonucleotide
  Sense strand starting at position 1147 SEQ ID NO: 3365
gguacauaucuuuguaaua

SEQ ID NO: 261705 - RNA, 19 nt, Artificial Sequence
  Description of Artificial Sequence: Synthetic oligonucleotide
  Antisense strand to SEQ ID NO: 261704
uauuacaaagauauguacc

SEQ ID NO: 261706 - RNA, 19 nt, Artificial Sequence
  Description of Artificial Sequence: Synthetic oligonucleotide
  Sense strand starting at position 1148 SEQ ID NO: 3365
guacauaucuuuguaauac

SEQ ID NO: 261707 - RNA, 19 nt, Artificial Sequence
  Description of Artificial Sequence: Synthetic oligonucleotide
  Antisense strand to SEQ ID NO: 261706
guauuacaaagauauguac

SEQ ID NO: 261708 - RNA, 19 nt, Artificial Sequence
  Description of Artificial Sequence: Synthetic oligonucleotide
  Sense strand starting at position 2153 SEQ ID NO: 3365
ucgaguuacuuuccaauga

SEQ ID NO: 261709 - RNA, 19 nt, Artificial Sequence
  Description of Artificial Sequence: Synthetic oligonucleotide
  Antisense strand to SEQ ID NO: 261708
ucauuggaaaguaacucga

SEQ ID NO: 261710 - RNA, 19 nt, Artificial Sequence
  Description of Artificial Sequence: Synthetic oligonucleotide
  Sense strand starting at position 2354 SEQ ID NO: 3365
gccacuacugagcaaguau

SEQ ID NO: 261711 - RNA, 19 nt, Artificial Sequence
  Description of Artificial Sequence: Synthetic oligonucleotide
  Antisense strand to SEQ ID NO: 261710
auacuugcucaguaguggc

SEQ ID NO: 261712 - RNA, 19 nt, Artificial Sequence
  Description of Artificial Sequence: Synthetic oligonucleotide
  Sense strand starting at position 2435 SEQ ID NO: 3365
cucagaaauguuggcuuau

SEQ ID NO: 261713 - RNA, 19 nt, Artificial Sequence
  Description of Artificial Sequence: Synthetic oligonucleotide
  Antisense strand to SEQ ID NO: 261712
auaagccaacauuucugag

SEQ ID NO: 261714 - RNA, 19 nt, Artificial Sequence
  Description of Artificial Sequence: Synthetic oligonucleotide
  Sense strand starting at position 2436 SEQ ID NO: 3365
ucagaaauguuggcuuauc

SEQ ID NO: 261715 - RNA, 19 nt, Artificial Sequence
  Description of Artificial Sequence: Synthetic oligonucleotide
  Antisense strand to SEQ ID NO: 261714
gauaagccaacauuucuga

SEQ ID NO: 261716 - RNA, 19 nt, Artificial Sequence
  Description of Artificial Sequence: Synthetic oligonucleotide
  Sense strand starting at position 2617 SEQ ID NO: 3365
cuguuaauacaguacaauu

SEQ ID NO: 261717 - RNA, 19 nt, Artificial Sequence
  Description of Artificial Sequence: Synthetic oligonucleotide
  Antisense strand to SEQ ID NO: 261716
aauuguacuguauuaacag

SEQ ID NO: 261718 - RNA, 19 nt, Artificial Sequence
  Description of Artificial Sequence: Synthetic oligonucleotide
  Sense strand starting at position 2660 SEQ ID NO: 3365
aagggaggcuuguuugaau

SEQ ID NO: 261719 - RNA, 19 nt, Artificial Sequence
  Description of Artificial Sequence: Synthetic oligonucleotide
  Antisense strand to SEQ ID NO: 261718
auucaaacaagccucccuu

SEQ ID NO: 261720 - RNA, 19 nt, Artificial Sequence
  Description of Artificial Sequence: Synthetic oligonucleotide
  Sense strand starting at position 2734 SEQ ID NO: 3365
ugugaucucuuuguuaaag

SEQ ID NO: 261721 - RNA, 19 nt, Artificial Sequence
  Description of Artificial Sequence: Synthetic oligonucleotide
  Antisense strand to SEQ ID NO: 261720
cuuuaacaaagagaucaca

SEQ ID NO: 261722 - RNA, 19 nt, Artificial Sequence
  Description of Artificial Sequence: Synthetic oligonucleotide
  Sense strand starting at position 2735 SEQ ID NO: 3365
gugaucucuuuguuaaagg

SEQ ID NO: 261723 - RNA, 19 nt, Artificial Sequence
  Description of Artificial Sequence: Synthetic oligonucleotide
  Antisense strand to SEQ ID NO: 261722
ccuuuaacaaagagaucac

SEQ ID NO: 261724 - RNA, 19 nt, Artificial Sequence
  Description of Artificial Sequence: Synthetic oligonucleotide
  Sense strand starting at position 2767 SEQ ID NO: 3365
agcagucacccagauugaa

SEQ ID NO: 261725 - RNA, 19 nt, Artificial Sequence
  Description of Artificial Sequence: Synthetic oligonucleotide
  Antisense strand to SEQ ID NO: 261724
uucaaucugggugacugcu

SEQ ID NO: 261726 - RNA, 19 nt, Artificial Sequence
  Description of Artificial Sequence: Synthetic oligonucleotide
  Sense strand starting at position 2996 SEQ ID NO: 3365
uaugacuuagcccgagaau

SEQ ID NO: 261727 - RNA, 19 nt, Artificial Sequence
  Description of Artificial Sequence: Synthetic oligonucleotide
  Antisense strand to SEQ ID NO: 261726
auucucgggcuaagucaua

SEQ ID NO: 261728 - RNA, 19 nt, Artificial Sequence
  Description of Artificial Sequence: Synthetic oligonucleotide
  Sense strand starting at position 2997 SEQ ID NO: 3365
augacuuagcccgagaauc

SEQ ID NO: 261729 - RNA, 19 nt, Artificial Sequence
  Description of Artificial Sequence: Synthetic oligonucleotide
  Antisense strand to SEQ ID NO: 261728
gauucucgggcuaagucau

SEQ ID NO: 261730 - RNA, 19 nt, Artificial Sequence
  Description of Artificial Sequence: Synthetic oligonucleotide
  Sense strand starting at position 2999 SEQ ID NO: 3365
gacuuagcccgagaaucuu

SEQ ID NO: 261731 - RNA, 19 nt, Artificial Sequence
  Description of Artificial Sequence: Synthetic oligonucleotide
  Antisense strand to SEQ ID NO: 261730
aagauucucgggcuaaguc

SEQ ID NO: 261732 - RNA, 19 nt, Artificial Sequence
  Description of Artificial Sequence: Synthetic oligonucleotide
  Sense strand starting at position 3047 SEQ ID NO: 3365
guuucucagcuugaccauu

SEQ ID NO: 261733 - RNA, 19 nt, Artificial Sequence
  Description of Artificial Sequence: Synthetic oligonucleotide
  Antisense strand to SEQ ID NO: 261732
aauggucaagcugagaaac

SEQ ID NO: 261734 - RNA, 19 nt, Artificial Sequence
  Description of Artificial Sequence: Synthetic oligonucleotide
  Sense strand starting at position 3205 SEQ ID NO: 3365
gugaaaggagguuacgauu

SEQ ID NO: 261735 - RNA, 19 nt, Artificial Sequence
  Description of Artificial Sequence: Synthetic oligonucleotide
  Antisense strand to SEQ ID NO: 261734
aaucguaaccuccuuucac

SEQ ID NO: 261736 - RNA, 19 nt, Artificial Sequence
  Description of Artificial Sequence: Synthetic oligonucleotide
  Sense strand starting at position 3211 SEQ ID NO: 3365
ggagguuacgauugaccuu

SEQ ID NO: 261737 - RNA, 19 nt, Artificial Sequence
  Description of Artificial Sequence: Synthetic oligonucleotide
  Antisense strand to SEQ ID NO: 261736
aaggucaaucguaaccucc

SEQ ID NO: 261738 - RNA, 19 nt, Artificial Sequence
  Description of Artificial Sequence: Synthetic oligonucleotide
  Sense strand starting at position 3353 SEQ ID NO: 3365
ccaguuguagcacaaucau

SEQ ID NO: 261739 - RNA, 19 nt, Artificial Sequence
  Description of Artificial Sequence: Synthetic oligonucleotide
  Antisense strand to SEQ ID NO: 261738
augauugugcuacaacugg

SEQ ID NO: 261740 - RNA, 19 nt, Artificial Sequence
  Description of Artificial Sequence: Synthetic oligonucleotide
  Sense strand starting at position 3401 SEQ ID NO: 3365
gagaguuucucagucauac

SEQ ID NO: 261741 - RNA, 19 nt, Artificial Sequence
  Description of Artificial Sequence: Synthetic oligonucleotide
  Antisense strand to SEQ ID NO: 261740
guaugacugagaaacucuc

SEQ ID NO: 261742 - RNA, 19 nt, Artificial Sequence
  Description of Artificial Sequence: Synthetic oligonucleotide
  Sense strand starting at position 3526 SEQ ID NO: 3365
gcucauacauuugucuauu

SEQ ID NO: 261743 - RNA, 19 nt, Artificial Sequence
  Description of Artificial Sequence: Synthetic oligonucleotide
  Antisense strand to SEQ ID NO: 261742
aauagacaaauguaugagc

SEQ ID NO: 261744 - RNA, 19 nt, Artificial Sequence
  Description of Artificial Sequence: Synthetic oligonucleotide
  Sense strand starting at position 3665 SEQ ID NO: 3365
ugcuguuagcccuaauuug

SEQ ID NO: 261745 - RNA, 19 nt, Artificial Sequence
  Description of Artificial Sequence: Synthetic oligonucleotide
  Antisense strand to SEQ ID NO: 261744
caaauuagggcuaacagca

SEQ ID NO: 261746 - RNA, 19 nt, Artificial Sequence
  Description of Artificial Sequence: Synthetic oligonucleotide
  Sense strand starting at position 3835 SEQ ID NO: 3365
cagggauauugcuuauaua

SEQ ID NO: 261747 - RNA, 19 nt, Artificial Sequence
  Description of Artificial Sequence: Synthetic oligonucleotide
  Antisense strand to SEQ ID NO: 261746
uauauaagcaauaucccug

SEQ ID NO: 261748 - RNA, 19 nt, Artificial Sequence
  Description of Artificial Sequence: Synthetic oligonucleotide
  Sense strand starting at position 3867 SEQ ID NO: 3365
ggugaaggcagcuggaaua

SEQ ID NO: 261749 - RNA, 19 nt, Artificial Sequence
  Description of Artificial Sequence: Synthetic oligonucleotide
  Antisense strand to SEQ ID NO: 261748
uauuccagcugccuucacc

SEQ ID NO: 261750 - RNA, 19 nt, Artificial Sequence
  Description of Artificial Sequence: Synthetic oligonucleotide
  Sense strand starting at position 3967 SEQ ID NO: 3365
ugggauuacucaccacuac

SEQ ID NO: 261751 - RNA, 19 nt, Artificial Sequence
  Description of Artificial Sequence: Synthetic oligonucleotide
  Antisense strand to SEQ ID NO: 261750
guaguggugaguaauccca

SEQ ID NO: 261752 - RNA, 19 nt, Artificial Sequence
  Description of Artificial Sequence: Synthetic oligonucleotide
  Sense strand starting at position 279 SEQ ID NO: 3366
acuuguguccaagaguuag

SEQ ID NO: 261753 - RNA, 19 nt, Artificial Sequence
  Description of Artificial Sequence: Synthetic oligonucleotide
  Antisense strand to SEQ ID NO: 261752
cuaacucuuggacacaagu

SEQ ID NO: 261754 - RNA, 19 nt, Artificial Sequence
  Description of Artificial Sequence: Synthetic oligonucleotide
  Sense strand starting at position 689 SEQ ID NO: 3366
ucagccuaucaguguucuu

SEQ ID NO: 261755 - RNA, 19 nt, Artificial Sequence
  Description of Artificial Sequence: Synthetic oligonucleotide
  Antisense strand to SEQ ID NO: 261754
aagaacacugauaggcuga

SEQ ID NO: 261756 - RNA, 19 nt, Artificial Sequence
  Description of Artificial Sequence: Synthetic oligonucleotide
  Sense strand starting at position 939 SEQ ID NO: 3366
guuacagugagcuagaauc

SEQ ID NO: 261757 - RNA, 19 nt, Artificial Sequence
  Description of Artificial Sequence: Synthetic oligonucleotide
  Antisense strand to SEQ ID NO: 261756
gauucuagcucacuguaac

SEQ ID NO: 261758 - RNA, 19 nt, Artificial Sequence
  Description of Artificial Sequence: Synthetic oligonucleotide
  Sense strand starting at position 1041 SEQ ID NO: 3366
uugagugagugguaggaga

SEQ ID NO: 261759 - RNA, 19 nt, Artificial Sequence
  Description of Artificial Sequence: Synthetic oligonucleotide
  Antisense strand to SEQ ID NO: 261758
ucuccuaccacucacucaa

SEQ ID NO: 261760 - RNA, 19 nt, Artificial Sequence
  Description of Artificial Sequence: Synthetic oligonucleotide
  Sense strand starting at position 1080 SEQ ID NO: 3366
aggguuaagcagugaguga

SEQ ID NO: 261761 - RNA, 19 nt, Artificial Sequence
  Description of Artificial Sequence: Synthetic oligonucleotide
  Antisense strand to SEQ ID NO: 261760
ucacucacugcuuaacccu

SEQ ID NO: 261762 - RNA, 19 nt, Artificial Sequence
  Description of Artificial Sequence: Synthetic oligonucleotide
  Sense strand starting at position 1081 SEQ ID NO: 3366
ggguuaagcagugagugau

SEQ ID NO: 261763 - RNA, 19 nt, Artificial Sequence
  Description of Artificial Sequence: Synthetic oligonucleotide
  Antisense strand to SEQ ID NO: 261762
aucacucacugcuuaaccc

SEQ ID NO: 261764 - RNA, 19 nt, Artificial Sequence
  Description of Artificial Sequence: Synthetic oligonucleotide
  Sense strand starting at position 1084 SEQ ID NO: 3366
uuaagcagugagugauagu

SEQ ID NO: 261765 - RNA, 19 nt, Artificial Sequence
  Description of Artificial Sequence: Synthetic oligonucleotide
  Antisense strand to SEQ ID NO: 261764
acuaucacucacugcuuaa

SEQ ID NO: 261766 - RNA, 19 nt, Artificial Sequence
  Description of Artificial Sequence: Synthetic oligonucleotide
  Sense strand starting at position 1085 SEQ ID NO: 3366
uaagcagugagugauagua

SEQ ID NO: 261767 - RNA, 19 nt, Artificial Sequence
  Description of Artificial Sequence: Synthetic oligonucleotide
  Antisense strand to SEQ ID NO: 261766
uacuaucacucacugcuua

SEQ ID NO: 261768 - RNA, 19 nt, Artificial Sequence
  Description of Artificial Sequence: Synthetic oligonucleotide
  Sense strand starting at position 1093 SEQ ID NO: 3366
gagugauaguaagaaagug

SEQ ID NO: 261769 - RNA, 19 nt, Artificial Sequence
  Description of Artificial Sequence: Synthetic oligonucleotide
  Antisense strand to SEQ ID NO: 261768
cacuuucuuacuaucacuc

SEQ ID NO: 261770 - RNA, 19 nt, Artificial Sequence
  Description of Artificial Sequence: Synthetic oligonucleotide
  Sense strand starting at position 1144 SEQ ID NO: 3366
gaucuagucuuguuccaga

SEQ ID NO: 261771 - RNA, 19 nt, Artificial Sequence
  Description of Artificial Sequence: Synthetic oligonucleotide
  Antisense strand to SEQ ID NO: 261770
ucuggaacaagacuagauc

SEQ ID NO: 261772 - RNA, 19 nt, Artificial Sequence
  Description of Artificial Sequence: Synthetic oligonucleotide
  Sense strand starting at position 1149 SEQ ID NO: 3366
agucuuguuccagaaacau

SEQ ID NO: 261773 - RNA, 19 nt, Artificial Sequence
  Description of Artificial Sequence: Synthetic oligonucleotide
  Antisense strand to SEQ ID NO: 261772
auguuucuggaacaagacu

SEQ ID NO: 261774 - RNA, 19 nt, Artificial Sequence
  Description of Artificial Sequence: Synthetic oligonucleotide
  Sense strand starting at position 1234 SEQ ID NO: 3366
aagugaaacucuucuuagg

SEQ ID NO: 261775 - RNA, 19 nt, Artificial Sequence
  Description of Artificial Sequence: Synthetic oligonucleotide
  Antisense strand to SEQ ID NO: 261774
ccuaagaagaguuucacuu

SEQ ID NO: 261776 - RNA, 19 nt, Artificial Sequence
  Description of Artificial Sequence: Synthetic oligonucleotide
  Sense strand starting at position 1236 SEQ ID NO: 3366
gugaaacucuucuuagguu

SEQ ID NO: 261777 - RNA, 19 nt, Artificial Sequence
  Description of Artificial Sequence: Synthetic oligonucleotide
  Antisense strand to SEQ ID NO: 261776
aaccuaagaagaguuucac

SEQ ID NO: 261778 - RNA, 19 nt, Artificial Sequence
  Description of Artificial Sequence: Synthetic oligonucleotide
  Sense strand starting at position 1237 SEQ ID NO: 3366
ugaaacucuucuuagguua

SEQ ID NO: 261779 - RNA, 19 nt, Artificial Sequence
  Description of Artificial Sequence: Synthetic oligonucleotide
  Antisense strand to SEQ ID NO: 261778
uaaccuaagaagaguuuca

SEQ ID NO: 261780 - RNA, 19 nt, Artificial Sequence
  Description of Artificial Sequence: Synthetic oligonucleotide
  Sense strand starting at position 1258 SEQ ID NO: 3366
uguccuaguccacgcuaaa

SEQ ID NO: 261781 - RNA, 19 nt, Artificial Sequence
  Description of Artificial Sequence: Synthetic oligonucleotide
  Antisense strand to SEQ ID NO: 261780
uuuagcguggacuaggaca

SEQ ID NO: 261782 - RNA, 19 nt, Artificial Sequence
  Description of Artificial Sequence: Synthetic oligonucleotide
  Sense strand starting at position 1381 SEQ ID NO: 3366
ugagcauuuccagagcggu

SEQ ID NO: 261783 - RNA, 19 nt, Artificial Sequence
  Description of Artificial Sequence: Synthetic oligonucleotide
  Antisense strand to SEQ ID NO: 261782
accgcucuggaaaugcuca

SEQ ID NO: 261784 - RNA, 19 nt, Artificial Sequence
  Description of Artificial Sequence: Synthetic oligonucleotide
  Sense strand starting at position 1595 SEQ ID NO: 3366
cacugagcaguugagauua

SEQ ID NO: 261785 - RNA, 19 nt, Artificial Sequence
  Description of Artificial Sequence: Synthetic oligonucleotide
  Antisense strand to SEQ ID NO: 261784
uaaucucaacugcucagug

SEQ ID NO: 261786 - RNA, 19 nt, Artificial Sequence
  Description of Artificial Sequence: Synthetic oligonucleotide
  Sense strand starting at position 1912 SEQ ID NO: 3366
ugcgcuucugcgggauaga

SEQ ID NO: 261787 - RNA, 19 nt, Artificial Sequence
  Description of Artificial Sequence: Synthetic oligonucleotide
  Antisense strand to SEQ ID NO: 261786
ucuaucccgcagaagcgca

SEQ ID NO: 261788 - RNA, 19 nt, Artificial Sequence
  Description of Artificial Sequence: Synthetic oligonucleotide
  Sense strand starting at position 1915 SEQ ID NO: 3366
gcuucugcgggauagacuu

SEQ ID NO: 261789 - RNA, 19 nt, Artificial Sequence
  Description of Artificial Sequence: Synthetic oligonucleotide
  Antisense strand to SEQ ID NO: 261788
aagucuaucccgcagaagc

SEQ ID NO: 261790 - RNA, 19 nt, Artificial Sequence
  Description of Artificial Sequence: Synthetic oligonucleotide
  Sense strand starting at position 2066 SEQ ID NO: 3366
acagccuaucaugaauagu

SEQ ID NO: 261791 - RNA, 19 nt, Artificial Sequence
  Description of Artificial Sequence: Synthetic oligonucleotide
  Antisense strand to SEQ ID NO: 261790
acuauucaugauaggcugu

SEQ ID NO: 261792 - RNA, 19 nt, Artificial Sequence
  Description of Artificial Sequence: Synthetic oligonucleotide
  Sense strand starting at position 2086 SEQ ID NO: 3366
cucucauacgacggugaaa

SEQ ID NO: 261793 - RNA, 19 nt, Artificial Sequence
  Description of Artificial Sequence: Synthetic oligonucleotide
  Antisense strand to SEQ ID NO: 261792
uuucaccgucguaugagag

SEQ ID NO: 261794 - RNA, 19 nt, Artificial Sequence
  Description of Artificial Sequence: Synthetic oligonucleotide
  Sense strand starting at position 2194 SEQ ID NO: 3366
cuaggcuaacucgaucuua

SEQ ID NO: 261795 - RNA, 19 nt, Artificial Sequence
  Description of Artificial Sequence: Synthetic oligonucleotide
  Antisense strand to SEQ ID NO: 261794
uaagaucgaguuagccuag

SEQ ID NO: 261796 - RNA, 19 nt, Artificial Sequence
  Description of Artificial Sequence: Synthetic oligonucleotide
  Sense strand starting at position 2304 SEQ ID NO: 3366
cguagugagcucugaauag

SEQ ID NO: 261797 - RNA, 19 nt, Artificial Sequence
  Description of Artificial Sequence: Synthetic oligonucleotide
  Antisense strand to SEQ ID NO: 261796
cuauucagagcucacuacg

SEQ ID NO: 261798 - RNA, 19 nt, Artificial Sequence
  Description of Artificial Sequence: Synthetic oligonucleotide
  Sense strand starting at position 2308 SEQ ID NO: 3366
gugagcucugaauagccaa

SEQ ID NO: 261799 - RNA, 19 nt, Artificial Sequence
  Description of Artificial Sequence: Synthetic oligonucleotide
  Antisense strand to SEQ ID NO: 261798
uuggcuauucagagcucac

SEQ ID NO: 261800 - RNA, 19 nt, Artificial Sequence
  Description of Artificial Sequence: Synthetic oligonucleotide
  Sense strand starting at position 2326 SEQ ID NO: 3366
aagcuuaaacgugaaagua

SEQ ID NO: 261801 - RNA, 19 nt, Artificial Sequence
  Description of Artificial Sequence: Synthetic oligonucleotide
  Antisense strand to SEQ ID NO: 261800
uacuuucacguuuaagcuu

SEQ ID NO: 261802 - RNA, 19 nt, Artificial Sequence
  Description of Artificial Sequence: Synthetic oligonucleotide
  Sense strand starting at position 2350 SEQ ID NO: 3366
gcccaauauuaguaaauga

SEQ ID NO: 261803 - RNA, 19 nt, Artificial Sequence
  Description of Artificial Sequence: Synthetic oligonucleotide
  Antisense strand to SEQ ID NO: 261802
ucauuuacuaauauugggc

SEQ ID NO: 261804 - RNA, 19 nt, Artificial Sequence
  Description of Artificial Sequence: Synthetic oligonucleotide
  Sense strand starting at position 2439 SEQ ID NO: 3366
cuauuaaaccucugugguu

SEQ ID NO: 261805 - RNA, 19 nt, Artificial Sequence
  Description of Artificial Sequence: Synthetic oligonucleotide
  Antisense strand to SEQ ID NO: 261804
aaccacagagguuuaauag

SEQ ID NO: 261806 - RNA, 19 nt, Artificial Sequence
  Description of Artificial Sequence: Synthetic oligonucleotide
  Sense strand starting at position 2448 SEQ ID NO: 3366
cucugugguucuccaugaa

SEQ ID NO: 261807 - RNA, 19 nt, Artificial Sequence
  Description of Artificial Sequence: Synthetic oligonucleotide
  Antisense strand to SEQ ID NO: 261806
uucauggagaaccacagag

SEQ ID NO: 261808 - RNA, 19 nt, Artificial Sequence
  Description of Artificial Sequence: Synthetic oligonucleotide
  Sense strand starting at position 2451 SEQ ID NO: 3366
ugugguucuccaugaauua

SEQ ID NO: 261809 - RNA, 19 nt, Artificial Sequence
  Description of Artificial Sequence: Synthetic oligonucleotide
  Antisense strand to SEQ ID NO: 261808
uaauucauggagaaccaca

SEQ ID NO: 261810 - RNA, 19 nt, Artificial Sequence
  Description of Artificial Sequence: Synthetic oligonucleotide
  Sense strand starting at position 2452 SEQ ID NO: 3366
gugguucuccaugaauuag

SEQ ID NO: 261811 - RNA, 19 nt, Artificial Sequence
  Description of Artificial Sequence: Synthetic oligonucleotide
  Antisense strand to SEQ ID NO: 261810
cuaauucauggagaaccac

SEQ ID NO: 261812 - RNA, 19 nt, Artificial Sequence
  Description of Artificial Sequence: Synthetic oligonucleotide
  Sense strand starting at position 2495 SEQ ID NO: 3366
agugcauucuagccaguuu

SEQ ID NO: 261813 - RNA, 19 nt, Artificial Sequence
  Description of Artificial Sequence: Synthetic oligonucleotide
  Antisense strand to SEQ ID NO: 261812
aaacuggcuagaaugcacu

SEQ ID NO: 261814 - RNA, 19 nt, Artificial Sequence
  Description of Artificial Sequence: Synthetic oligonucleotide
  Sense strand starting at position 3251 SEQ ID NO: 3366
ccugccuaaucuuggauuu

SEQ ID NO: 261815 - RNA, 19 nt, Artificial Sequence
  Description of Artificial Sequence: Synthetic oligonucleotide
  Antisense strand to SEQ ID NO: 261814
aaauccaagauuaggcagg

SEQ ID NO: 261816 - RNA, 19 nt, Artificial Sequence
  Description of Artificial Sequence: Synthetic oligonucleotide
  Sense strand starting at position 3598 SEQ ID NO: 3366
uguagcuuauucuccagua

SEQ ID NO: 261817 - RNA, 19 nt, Artificial Sequence
  Description of Artificial Sequence: Synthetic oligonucleotide
  Antisense strand to SEQ ID NO: 261816
uacuggagaauaagcuaca

SEQ ID NO: 261818 - RNA, 19 nt, Artificial Sequence
  Description of Artificial Sequence: Synthetic oligonucleotide
  Sense strand starting at position 3599 SEQ ID NO: 3366
guagcuuauucuccaguau

SEQ ID NO: 261819 - RNA, 19 nt, Artificial Sequence
  Description of Artificial Sequence: Synthetic oligonucleotide
  Antisense strand to SEQ ID NO: 261818
auacuggagaauaagcuac

SEQ ID NO: 261820 - RNA, 19 nt, Artificial Sequence
  Description of Artificial Sequence: Synthetic oligonucleotide
  Sense strand starting at position 3603 SEQ ID NO: 3366
cuuauucuccaguaugcuu

SEQ ID NO: 261821 - RNA, 19 nt, Artificial Sequence
  Description of Artificial Sequence: Synthetic oligonucleotide
  Antisense strand to SEQ ID NO: 261820
aagcauacuggagaauaag

SEQ ID NO: 261822 - RNA, 19 nt, Artificial Sequence
  Description of Artificial Sequence: Synthetic oligonucleotide
  Sense strand starting at position 3719 SEQ ID NO: 3366
gucccaggcuccuuaggau

SEQ ID NO: 261823 - RNA, 19 nt, Artificial Sequence
  Description of Artificial Sequence: Synthetic oligonucleotide
  Antisense strand to SEQ ID NO: 261822
auccuaaggagccugggac

SEQ ID NO: 261824 - RNA, 19 nt, Artificial Sequence
  Description of Artificial Sequence: Synthetic oligonucleotide
  Sense strand starting at position 3789 SEQ ID NO: 3366
ugguguugccugagggcaa

SEQ ID NO: 261825 - RNA, 19 nt, Artificial Sequence
  Description of Artificial Sequence: Synthetic oligonucleotide
  Antisense strand to SEQ ID NO: 261824
uugcccucaggcaacacca

SEQ ID NO: 261826 - RNA, 19 nt, Artificial Sequence
  Description of Artificial Sequence: Synthetic oligonucleotide
  Sense strand starting at position 3894 SEQ ID NO: 3366
ggagauguuccaggcugga

SEQ ID NO: 261827 - RNA, 19 nt, Artificial Sequence
  Description of Artificial Sequence: Synthetic oligonucleotide
  Antisense strand to SEQ ID NO: 261826
uccagccuggaacaucucc

SEQ ID NO: 261828 - RNA, 19 nt, Artificial Sequence
  Description of Artificial Sequence: Synthetic oligonucleotide
  Sense strand starting at position 3922 SEQ ID NO: 3366
ccaagcucuccaggcuauu

SEQ ID NO: 261829 - RNA, 19 nt, Artificial Sequence
  Description of Artificial Sequence: Synthetic oligonucleotide
  Antisense strand to SEQ ID NO: 261828
aauagccuggagagcuugg

SEQ ID NO: 261830 - RNA, 19 nt, Artificial Sequence
  Description of Artificial Sequence: Synthetic oligonucleotide
  Sense strand starting at position 3955 SEQ ID NO: 3366
gcaauuucguggucuggac

SEQ ID NO: 261831 - RNA, 19 nt, Artificial Sequence
  Description of Artificial Sequence: Synthetic oligonucleotide
  Antisense strand to SEQ ID NO: 261830
guccagaccacgaaauugc

SEQ ID NO: 261832 - RNA, 19 nt, Artificial Sequence
  Description of Artificial Sequence: Synthetic oligonucleotide
  Sense strand starting at position 261 SEQ ID NO: 3367
ggaugaagugcugguacau

SEQ ID NO: 261833 - RNA, 19 nt, Artificial Sequence
  Description of Artificial Sequence: Synthetic oligonucleotide
  Antisense strand to SEQ ID NO: 261832
auguaccagcacuucaucc

SEQ ID NO: 261834 - RNA, 19 nt, Artificial Sequence
  Description of Artificial Sequence: Synthetic oligonucleotide
  Sense strand starting at position 502 SEQ ID NO: 3367
cauugcucuggugauauac

SEQ ID NO: 261835 - RNA, 19 nt, Artificial Sequence
  Description of Artificial Sequence: Synthetic oligonucleotide
  Antisense strand to SEQ ID NO: 261834
guauaucaccagagcaaug

SEQ ID NO: 261836 - RNA, 19 nt, Artificial Sequence
  Description of Artificial Sequence: Synthetic oligonucleotide
  Sense strand starting at position 542 SEQ ID NO: 3367
cuuuaaacggauuaauugu

SEQ ID NO: 261837 - RNA, 19 nt, Artificial Sequence
  Description of Artificial Sequence: Synthetic oligonucleotide
  Antisense strand to SEQ ID NO: 261836
acaauuaauccguuuaaag

SEQ ID NO: 261838 - RNA, 19 nt, Artificial Sequence
  Description of Artificial Sequence: Synthetic oligonucleotide
  Sense strand starting at position 550 SEQ ID NO: 3367
ggauuaauuguaugguaug

SEQ ID NO: 261839 - RNA, 19 nt, Artificial Sequence
  Description of Artificial Sequence: Synthetic oligonucleotide
  Antisense strand to SEQ ID NO: 261838
cauaccauacaauuaaucc

SEQ ID NO: 261840 - RNA, 19 nt, Artificial Sequence
  Description of Artificial Sequence: Synthetic oligonucleotide
  Sense strand starting at position 584 SEQ ID NO: 3367
caaggaagccguuaccaaa

SEQ ID NO: 261841 - RNA, 19 nt, Artificial Sequence
  Description of Artificial Sequence: Synthetic oligonucleotide
  Antisense strand to SEQ ID NO: 261840
uuugguaacggcuuccuug

SEQ ID NO: 261842 - RNA, 19 nt, Artificial Sequence
  Description of Artificial Sequence: Synthetic oligonucleotide
  Sense strand starting at position 624 SEQ ID NO: 3367
ccaggugauaugggugcaa

SEQ ID NO: 261843 - RNA, 19 nt, Artificial Sequence
  Description of Artificial Sequence: Synthetic oligonucleotide
  Antisense strand to SEQ ID NO: 261842
uugcacccauaucaccugg

SEQ ID NO: 261844 - RNA, 19 nt, Artificial Sequence
  Description of Artificial Sequence: Synthetic oligonucleotide
  Sense strand starting at position 725 SEQ ID NO: 3367
agcaguauauaccucauga

SEQ ID NO: 261845 - RNA, 19 nt, Artificial Sequence
  Description of Artificial Sequence: Synthetic oligonucleotide
  Antisense strand to SEQ ID NO: 261844
ucaugagguauauacugcu

SEQ ID NO: 261846 - RNA, 19 nt, Artificial Sequence
  Description of Artificial Sequence: Synthetic oligonucleotide
  Sense strand starting at position 1338 SEQ ID NO: 3367
gagcgucuccuagagauaa

SEQ ID NO: 261847 - RNA, 19 nt, Artificial Sequence
  Description of Artificial Sequence: Synthetic oligonucleotide
  Antisense strand to SEQ ID NO: 261846
uuaucucuaggagacgcuc

SEQ ID NO: 261848 - RNA, 19 nt, Artificial Sequence
  Description of Artificial Sequence: Synthetic oligonucleotide
  Sense strand starting at position 1340 SEQ ID NO: 3367
gcgucuccuagagauaaac

SEQ ID NO: 261849 - RNA, 19 nt, Artificial Sequence
  Description of Artificial Sequence: Synthetic oligonucleotide
  Antisense strand to SEQ ID NO: 261848
guuuaucucuaggagacgc

SEQ ID NO: 261850 - RNA, 19 nt, Artificial Sequence
  Description of Artificial Sequence: Synthetic oligonucleotide
  Sense strand starting at position 1342 SEQ ID NO: 3367
gucuccuagagauaaacgu

SEQ ID NO: 261851 - RNA, 19 nt, Artificial Sequence
  Description of Artificial Sequence: Synthetic oligonucleotide
  Antisense strand to SEQ ID NO: 261850
acguuuaucucuaggagac

SEQ ID NO: 261852 - RNA, 19 nt, Artificial Sequence
  Description of Artificial Sequence: Synthetic oligonucleotide
  Sense strand starting at position 1346 SEQ ID NO: 3367
ccuagagauaaacguuaug

SEQ ID NO: 261853 - RNA, 19 nt, Artificial Sequence
  Description of Artificial Sequence: Synthetic oligonucleotide
  Antisense strand to SEQ ID NO: 261852
cauaacguuuaucucuagg

SEQ ID NO: 261854 - RNA, 19 nt, Artificial Sequence
  Description of Artificial Sequence: Synthetic oligonucleotide
  Sense strand starting at position 1356 SEQ ID NO: 3367
aacguuaugcuggacgaca

SEQ ID NO: 261855 - RNA, 19 nt, Artificial Sequence
  Description of Artificial Sequence: Synthetic oligonucleotide
  Antisense strand to SEQ ID NO: 261854
ugucguccagcauaacguu

SEQ ID NO: 261856 - RNA, 19 nt, Artificial Sequence
  Description of Artificial Sequence: Synthetic oligonucleotide
  Sense strand starting at position 1461 SEQ ID NO: 3367
gcucaagcgguuucgugaa

SEQ ID NO: 261857 - RNA, 19 nt, Artificial Sequence
  Description of Artificial Sequence: Synthetic oligonucleotide
  Antisense strand to SEQ ID NO: 261856
uucacgaaaccgcuugagc

SEQ ID NO: 261858 - RNA, 19 nt, Artificial Sequence
  Description of Artificial Sequence: Synthetic oligonucleotide
  Sense strand starting at position 1467 SEQ ID NO: 3367
gcgguuucgugaacuggga

SEQ ID NO: 261859 - RNA, 19 nt, Artificial Sequence
  Description of Artificial Sequence: Synthetic oligonucleotide
  Antisense strand to SEQ ID NO: 261858
ucccaguucacgaaaccgc

SEQ ID NO: 261860 - RNA, 19 nt, Artificial Sequence
  Description of Artificial Sequence: Synthetic oligonucleotide
  Sense strand starting at position 1471 SEQ ID NO: 3367
uuucgugaacugggaagaa

SEQ ID NO: 261861 - RNA, 19 nt, Artificial Sequence
  Description of Artificial Sequence: Synthetic oligonucleotide
  Antisense strand to SEQ ID NO: 261860
uucuucccaguucacgaaa

SEQ ID NO: 261862 - RNA, 19 nt, Artificial Sequence
  Description of Artificial Sequence: Synthetic oligonucleotide
  Sense strand starting at position 2174 SEQ ID NO: 3367
cccugcgagguucauagaa

SEQ ID NO: 261863 - RNA, 19 nt, Artificial Sequence
  Description of Artificial Sequence: Synthetic oligonucleotide
  Antisense strand to SEQ ID NO: 261862
uucuaugaaccucgcaggg

SEQ ID NO: 261864 - RNA, 19 nt, Artificial Sequence
  Description of Artificial Sequence: Synthetic oligonucleotide
  Sense strand starting at position 2204 SEQ ID NO: 3367
ggccaagugcaaugaggau

SEQ ID NO: 261865 - RNA, 19 nt, Artificial Sequence
  Description of Artificial Sequence: Synthetic oligonucleotide
  Antisense strand to SEQ ID NO: 261864
auccucauugcacuuggcc

SEQ ID NO: 261866 - RNA, 19 nt, Artificial Sequence
  Description of Artificial Sequence: Synthetic oligonucleotide
  Sense strand starting at position 2230 SEQ ID NO: 3367
augaauaagcgaggaaugu

SEQ ID NO: 261867 - RNA, 19 nt, Artificial Sequence
  Description of Artificial Sequence: Synthetic oligonucleotide
  Antisense strand to SEQ ID NO: 261866
acauuccucgcuuauucau

SEQ ID NO: 261868 - RNA, 19 nt, Artificial Sequence
  Description of Artificial Sequence: Synthetic oligonucleotide
  Sense strand starting at position 2239 SEQ ID NO: 3367
cgaggaauguagagaaagu

SEQ ID NO: 261869 - RNA, 19 nt, Artificial Sequence
  Description of Artificial Sequence: Synthetic oligonucleotide
  Antisense strand to SEQ ID NO: 261868
acuuucucuacauuccucg

SEQ ID NO: 261870 - RNA, 19 nt, Artificial Sequence
  Description of Artificial Sequence: Synthetic oligonucleotide
  Sense strand starting at position 2456 SEQ ID NO: 3367
agggcacaaugucuuguaa

SEQ ID NO: 261871 - RNA, 19 nt, Artificial Sequence
  Description of Artificial Sequence: Synthetic oligonucleotide
  Antisense strand to SEQ ID NO: 261870
uuacaagacauugugcccu

SEQ ID NO: 261872 - RNA, 19 nt, Artificial Sequence
  Description of Artificial Sequence: Synthetic oligonucleotide
  Sense strand starting at position 2705 SEQ ID NO: 3367
auauauugaguuggcgaaa

SEQ ID NO: 261873 - RNA, 19 nt, Artificial Sequence
  Description of Artificial Sequence: Synthetic oligonucleotide
  Antisense strand to SEQ ID NO: 261872
uuucgccaacucaauauau

SEQ ID NO: 261874 - RNA, 19 nt, Artificial Sequence
  Description of Artificial Sequence: Synthetic oligonucleotide
  Sense strand starting at position 2706 SEQ ID NO: 3367
uauauugaguuggcgaaau

SEQ ID NO: 261875 - RNA, 19 nt, Artificial Sequence
  Description of Artificial Sequence: Synthetic oligonucleotide
  Antisense strand to SEQ ID NO: 261874
auuucgccaacucaauaua

SEQ ID NO: 261876 - RNA, 19 nt, Artificial Sequence
  Description of Artificial Sequence: Synthetic oligonucleotide
  Sense strand starting at position 2708 SEQ ID NO: 3367
uauugaguuggcgaaauua

SEQ ID NO: 261877 - RNA, 19 nt, Artificial Sequence
  Description of Artificial Sequence: Synthetic oligonucleotide
  Antisense strand to SEQ ID NO: 261876
uaauuucgccaacucaaua

SEQ ID NO: 261878 - RNA, 19 nt, Artificial Sequence
  Description of Artificial Sequence: Synthetic oligonucleotide
  Sense strand starting at position 2740 SEQ ID NO: 3367
ugauuacaccuauguguaa

SEQ ID NO: 261879 - RNA, 19 nt, Artificial Sequence
  Description of Artificial Sequence: Synthetic oligonucleotide
  Antisense strand to SEQ ID NO: 261878
uuacacauagguguaauca

SEQ ID NO: 261880 - RNA, 19 nt, Artificial Sequence
  Description of Artificial Sequence: Synthetic oligonucleotide
  Sense strand starting at position 2798 SEQ ID NO: 3367
agcuaauuccaugagcaag

SEQ ID NO: 261881 - RNA, 19 nt, Artificial Sequence
  Description of Artificial Sequence: Synthetic oligonucleotide
  Antisense strand to SEQ ID NO: 261880
cuugcucauggaauuagcu

SEQ ID NO: 261882 - RNA, 19 nt, Artificial Sequence
  Description of Artificial Sequence: Synthetic oligonucleotide
  Sense strand starting at position 2843 SEQ ID NO: 3367
uggagugaguuccuaaguc

SEQ ID NO: 261883 - RNA, 19 nt, Artificial Sequence
  Description of Artificial Sequence: Synthetic oligonucleotide
  Antisense strand to SEQ ID NO: 261882
gacuuaggaacucacucca

SEQ ID NO: 261884 - RNA, 19 nt, Artificial Sequence
  Description of Artificial Sequence: Synthetic oligonucleotide
  Sense strand starting at position 2847 SEQ ID NO: 3367
gugaguuccuaagucagag

SEQ ID NO: 261885 - RNA, 19 nt, Artificial Sequence
  Description of Artificial Sequence: Synthetic oligonucleotide
  Antisense strand to SEQ ID NO: 261884
cucugacuuaggaacucac

SEQ ID NO: 261886 - RNA, 19 nt, Artificial Sequence
  Description of Artificial Sequence: Synthetic oligonucleotide
  Sense strand starting at position 2863 SEQ ID NO: 3367
gaggcaacagugugugaaa

SEQ ID NO: 261887 - RNA, 19 nt, Artificial Sequence
  Description of Artificial Sequence: Synthetic oligonucleotide
  Antisense strand to SEQ ID NO: 261886
uuucacacacuguugccuc

SEQ ID NO: 261888 - RNA, 19 nt, Artificial Sequence
  Description of Artificial Sequence: Synthetic oligonucleotide
  Sense strand starting at position 2864 SEQ ID NO: 3367
aggcaacagugugugaaau

SEQ ID NO: 261889 - RNA, 19 nt, Artificial Sequence
  Description of Artificial Sequence: Synthetic oligonucleotide
  Antisense strand to SEQ ID NO: 261888
auuucacacacuguugccu

SEQ ID NO: 261890 - RNA, 19 nt, Artificial Sequence
  Description of Artificial Sequence: Synthetic oligonucleotide
  Sense strand starting at position 2865 SEQ ID NO: 3367
ggcaacagugugugaaaua

SEQ ID NO: 261891 - RNA, 19 nt, Artificial Sequence
  Description of Artificial Sequence: Synthetic oligonucleotide
  Antisense strand to SEQ ID NO: 261890
uauuucacacacuguugcc

SEQ ID NO: 261892 - RNA, 19 nt, Artificial Sequence
  Description of Artificial Sequence: Synthetic oligonucleotide
  Sense strand starting at position 2912 SEQ ID NO: 3367
gaugcauugugggcaggaa

SEQ ID NO: 261893 - RNA, 19 nt, Artificial Sequence
  Description of Artificial Sequence: Synthetic oligonucleotide
  Antisense strand to SEQ ID NO: 261892
uuccugcccacaaugcauc

SEQ ID NO: 261894 - RNA, 19 nt, Artificial Sequence
  Description of Artificial Sequence: Synthetic oligonucleotide
  Sense strand starting at position 2943 SEQ ID NO: 3367
auccaaagugucuauucua

SEQ ID NO: 261895 - RNA, 19 nt, Artificial Sequence
  Description of Artificial Sequence: Synthetic oligonucleotide
  Antisense strand to SEQ ID NO: 261894
uagaauagacacuuuggau

SEQ ID NO: 261896 - RNA, 19 nt, Artificial Sequence
  Description of Artificial Sequence: Synthetic oligonucleotide
  Sense strand starting at position 2946 SEQ ID NO: 3367
caaagugucuauucuagug

SEQ ID NO: 261897 - RNA, 19 nt, Artificial Sequence
  Description of Artificial Sequence: Synthetic oligonucleotide
  Antisense strand to SEQ ID NO: 261896
cacuagaauagacacuuug

SEQ ID NO: 261898 - RNA, 19 nt, Artificial Sequence
  Description of Artificial Sequence: Synthetic oligonucleotide
  Sense strand starting at position 3169 SEQ ID NO: 3367
ggguuauucuauccaccuc

SEQ ID NO: 261899 - RNA, 19 nt, Artificial Sequence
  Description of Artificial Sequence: Synthetic oligonucleotide
  Antisense strand to SEQ ID NO: 261898
gagguggauagaauaaccc

SEQ ID NO: 261900 - RNA, 19 nt, Artificial Sequence
  Description of Artificial Sequence: Synthetic oligonucleotide
  Sense strand starting at position 3221 SEQ ID NO: 3367
agcacucaugugggaaaua

SEQ ID NO: 261901 - RNA, 19 nt, Artificial Sequence
  Description of Artificial Sequence: Synthetic oligonucleotide
  Antisense strand to SEQ ID NO: 261900
uauuucccacaugagugcu

SEQ ID NO: 261902 - RNA, 19 nt, Artificial Sequence
  Description of Artificial Sequence: Synthetic oligonucleotide
  Sense strand starting at position 3351 SEQ ID NO: 3367
uuagccacugcucaugaaa

SEQ ID NO: 261903 - RNA, 19 nt, Artificial Sequence
  Description of Artificial Sequence: Synthetic oligonucleotide
  Antisense strand to SEQ ID NO: 261902
uuucaugagcaguggcuaa

SEQ ID NO: 261904 - RNA, 19 nt, Artificial Sequence
  Description of Artificial Sequence: Synthetic oligonucleotide
  Sense strand starting at position 3532 SEQ ID NO: 3367
caugcagaaccaugaguaa

SEQ ID NO: 261905 - RNA, 19 nt, Artificial Sequence
  Description of Artificial Sequence: Synthetic oligonucleotide
  Antisense strand to SEQ ID NO: 261904
uuacucaugguucugcaug

SEQ ID NO: 261906 - RNA, 19 nt, Artificial Sequence
  Description of Artificial Sequence: Synthetic oligonucleotide
  Sense strand starting at position 3588 SEQ ID NO: 3367
acagguaauuccucaugaa

SEQ ID NO: 261907 - RNA, 19 nt, Artificial Sequence
  Description of Artificial Sequence: Synthetic oligonucleotide
  Antisense strand to SEQ ID NO: 261906
uucaugaggaauuaccugu

SEQ ID NO: 261908 - RNA, 19 nt, Artificial Sequence
  Description of Artificial Sequence: Synthetic oligonucleotide
  Sense strand starting at position 3724 SEQ ID NO: 3367
aacuuuauggcuuggugau

SEQ ID NO: 261909 - RNA, 19 nt, Artificial Sequence
  Description of Artificial Sequence: Synthetic oligonucleotide
  Antisense strand to SEQ ID NO: 261908
aucaccaagccauaaaguu

SEQ ID NO: 261910 - RNA, 19 nt, Artificial Sequence
  Description of Artificial Sequence: Synthetic oligonucleotide
  Sense strand starting at position 3731 SEQ ID NO: 3367
uggcuuggugaucauacaa

SEQ ID NO: 261911 - RNA, 19 nt, Artificial Sequence
  Description of Artificial Sequence: Synthetic oligonucleotide
  Antisense strand to SEQ ID NO: 261910
uuguaugaucaccaagcca

SEQ ID NO: 261912 - RNA, 19 nt, Artificial Sequence
  Description of Artificial Sequence: Synthetic oligonucleotide
  Sense strand starting at position 29 SEQ ID NO: 3368
gugcuaaggguggauacua

SEQ ID NO: 261913 - RNA, 19 nt, Artificial Sequence
  Description of Artificial Sequence: Synthetic oligonucleotide
  Antisense strand to SEQ ID NO: 261912
uaguauccacccuuagcac

SEQ ID NO: 261914 - RNA, 19 nt, Artificial Sequence
  Description of Artificial Sequence: Synthetic oligonucleotide
  Sense strand starting at position 37 SEQ ID NO: 3368
gguggauacuaucuuguaa

SEQ ID NO: 261915 - RNA, 19 nt, Artificial Sequence
  Description of Artificial Sequence: Synthetic oligonucleotide
  Antisense strand to SEQ ID NO: 261914
uuacaagauaguauccacc

SEQ ID NO: 261916 - RNA, 19 nt, Artificial Sequence
  Description of Artificial Sequence: Synthetic oligonucleotide
  Sense strand starting at position 48 SEQ ID NO: 3368
ucuuguaauuguuugacuu

SEQ ID NO: 261917 - RNA, 19 nt, Artificial Sequence
  Description of Artificial Sequence: Synthetic oligonucleotide
  Antisense strand to SEQ ID NO: 261916
aagucaaacaauuacaaga

SEQ ID NO: 261918 - RNA, 19 nt, Artificial Sequence
  Description of Artificial Sequence: Synthetic oligonucleotide
  Sense strand starting at position 49 SEQ ID NO: 3368
cuuguaauuguuugacuuu

SEQ ID NO: 261919 - RNA, 19 nt, Artificial Sequence
  Description of Artificial Sequence: Synthetic oligonucleotide
  Antisense strand to SEQ ID NO: 261918
aaagucaaacaauuacaag

SEQ ID NO: 261920 - RNA, 19 nt, Artificial Sequence
  Description of Artificial Sequence: Synthetic oligonucleotide
  Sense strand starting at position 95 SEQ ID NO: 3368
cagguaaagugcucaguaa

SEQ ID NO: 261921 - RNA, 19 nt, Artificial Sequence
  Description of Artificial Sequence: Synthetic oligonucleotide
  Antisense strand to SEQ ID NO: 261920
uuacugagcacuuuaccug

SEQ ID NO: 261922 - RNA, 19 nt, Artificial Sequence
  Description of Artificial Sequence: Synthetic oligonucleotide
  Sense strand starting at position 96 SEQ ID NO: 3368
agguaaagugcucaguaaa

SEQ ID NO: 261923 - RNA, 19 nt, Artificial Sequence
  Description of Artificial Sequence: Synthetic oligonucleotide
  Antisense strand to SEQ ID NO: 261922
uuuacugagcacuuuaccu

SEQ ID NO: 261924 - RNA, 19 nt, Artificial Sequence
  Description of Artificial Sequence: Synthetic oligonucleotide
  Sense strand starting at position 229 SEQ ID NO: 3368
accagauguuuacugaaac

SEQ ID NO: 261925 - RNA, 19 nt, Artificial Sequence
  Description of Artificial Sequence: Synthetic oligonucleotide
  Antisense strand to SEQ ID NO: 261924
guuucaguaaacaucuggu

SEQ ID NO: 261926 - RNA, 19 nt, Artificial Sequence
  Description of Artificial Sequence: Synthetic oligonucleotide
  Sense strand starting at position 246 SEQ ID NO: 3368
acuuuauuagugcaaagaa

SEQ ID NO: 261927 - RNA, 19 nt, Artificial Sequence
  Description of Artificial Sequence: Synthetic oligonucleotide
  Antisense strand to SEQ ID NO: 261926
uucuuugcacuaauaaagu

SEQ ID NO: 261928 - RNA, 19 nt, Artificial Sequence
  Description of Artificial Sequence: Synthetic oligonucleotide
  Sense strand starting at position 277 SEQ ID NO: 3368
gcaaauguccaucaauugu

SEQ ID NO: 261929 - RNA, 19 nt, Artificial Sequence
  Description of Artificial Sequence: Synthetic oligonucleotide
  Antisense strand to SEQ ID NO: 261928
acaauugauggacauuugc

SEQ ID NO: 261930 - RNA, 19 nt, Artificial Sequence
  Description of Artificial Sequence: Synthetic oligonucleotide
  Sense strand starting at position 283 SEQ ID NO: 3368
guccaucaauuguuacauu

SEQ ID NO: 261931 - RNA, 19 nt, Artificial Sequence
  Description of Artificial Sequence: Synthetic oligonucleotide
  Antisense strand to SEQ ID NO: 261930
aauguaacaauugauggac

SEQ ID NO: 261932 - RNA, 19 nt, Artificial Sequence
  Description of Artificial Sequence: Synthetic oligonucleotide
  Sense strand starting at position 326 SEQ ID NO: 3368
aauaguaugcagcaguuaa

SEQ ID NO: 261933 - RNA, 19 nt, Artificial Sequence
  Description of Artificial Sequence: Synthetic oligonucleotide
  Antisense strand to SEQ ID NO: 261932
uuaacugcugcauacuauu

SEQ ID NO: 261934 - RNA, 19 nt, Artificial Sequence
  Description of Artificial Sequence: Synthetic oligonucleotide
  Sense strand starting at position 477 SEQ ID NO: 3368
auguauguuuaugcaugau

SEQ ID NO: 261935 - RNA, 19 nt, Artificial Sequence
  Description of Artificial Sequence: Synthetic oligonucleotide
  Antisense strand to SEQ ID NO: 261934
aucaugcauaaacauacau

SEQ ID NO: 261936 - RNA, 19 nt, Artificial Sequence
  Description of Artificial Sequence: Synthetic oligonucleotide
  Sense strand starting at position 483 SEQ ID NO: 3368
guuuaugcaugauuauaag

SEQ ID NO: 261937 - RNA, 19 nt, Artificial Sequence
  Description of Artificial Sequence: Synthetic oligonucleotide
  Antisense strand to SEQ ID NO: 261936
cuuauaaucaugcauaaac

SEQ ID NO: 261938 - RNA, 19 nt, Artificial Sequence
  Description of Artificial Sequence: Synthetic oligonucleotide
  Sense strand starting at position 599 SEQ ID NO: 3368
augauauagucccucucau

SEQ ID NO: 261939 - RNA, 19 nt, Artificial Sequence
  Description of Artificial Sequence: Synthetic oligonucleotide
  Antisense strand to SEQ ID NO: 261938
augagagggacuauaucau

SEQ ID NO: 261940 - RNA, 19 nt, Artificial Sequence
  Description of Artificial Sequence: Synthetic oligonucleotide
  Sense strand starting at position 734 SEQ ID NO: 3368
uggacugguugaucuagau

SEQ ID NO: 261941 - RNA, 19 nt, Artificial Sequence
  Description of Artificial Sequence: Synthetic oligonucleotide
  Antisense strand to SEQ ID NO: 261940
aucuagaucaaccagucca

SEQ ID NO: 261942 - RNA, 19 nt, Artificial Sequence
  Description of Artificial Sequence: Synthetic oligonucleotide
  Sense strand starting at position 818 SEQ ID NO: 3368
guauuugacuuuccugcaa

SEQ ID NO: 261943 - RNA, 19 nt, Artificial Sequence
  Description of Artificial Sequence: Synthetic oligonucleotide
  Antisense strand to SEQ ID NO: 261942
uugcaggaaagucaaauac

SEQ ID NO: 261944 - RNA, 19 nt, Artificial Sequence
  Description of Artificial Sequence: Synthetic oligonucleotide
  Sense strand starting at position 989 SEQ ID NO: 3368
cugccuacuccucaguaca

SEQ ID NO: 261945 - RNA, 19 nt, Artificial Sequence
  Description of Artificial Sequence: Synthetic oligonucleotide
  Antisense strand to SEQ ID NO: 261944
uguacugaggaguaggcag

SEQ ID NO: 261946 - RNA, 19 nt, Artificial Sequence
  Description of Artificial Sequence: Synthetic oligonucleotide
  Sense strand starting at position 1003 SEQ ID NO: 3368
guacacucucccuagguaa

SEQ ID NO: 261947 - RNA, 19 nt, Artificial Sequence
  Description of Artificial Sequence: Synthetic oligonucleotide
  Antisense strand to SEQ ID NO: 261946
uuaccuagggagaguguac

SEQ ID NO: 261948 - RNA, 19 nt, Artificial Sequence
  Description of Artificial Sequence: Synthetic oligonucleotide
  Sense strand starting at position 1081 SEQ ID NO: 3368
aguucuccuccugagcuau

SEQ ID NO: 261949 - RNA, 19 nt, Artificial Sequence
  Description of Artificial Sequence: Synthetic oligonucleotide
  Antisense strand to SEQ ID NO: 261948
auagcucaggaggagaacu

SEQ ID NO: 261950 - RNA, 19 nt, Artificial Sequence
  Description of Artificial Sequence: Synthetic oligonucleotide
  Sense strand starting at position 1100 SEQ ID NO: 3368
acacuugacuauccguaga

SEQ ID NO: 261951 - RNA, 19 nt, Artificial Sequence
  Description of Artificial Sequence: Synthetic oligonucleotide
  Antisense strand to SEQ ID NO: 261950
ucuacggauagucaagugu

SEQ ID NO: 261952 - RNA, 19 nt, Artificial Sequence
  Description of Artificial Sequence: Synthetic oligonucleotide
  Sense strand starting at position 1259 SEQ ID NO: 3368
ccuggauuaaacgaaacgu

SEQ ID NO: 261953 - RNA, 19 nt, Artificial Sequence
  Description of Artificial Sequence: Synthetic oligonucleotide
  Antisense strand to SEQ ID NO: 261952
acguuucguuuaauccagg

SEQ ID NO: 261954 - RNA, 19 nt, Artificial Sequence
  Description of Artificial Sequence: Synthetic oligonucleotide
  Sense strand starting at position 1331 SEQ ID NO: 3368
ccagaaauugcgcauauug

SEQ ID NO: 261955 - RNA, 19 nt, Artificial Sequence
  Description of Artificial Sequence: Synthetic oligonucleotide
  Antisense strand to SEQ ID NO: 261954
caauaugcgcaauuucugg

SEQ ID NO: 261956 - RNA, 19 nt, Artificial Sequence
  Description of Artificial Sequence: Synthetic oligonucleotide
  Sense strand starting at position 1333 SEQ ID NO: 3368
agaaauugcgcauauugaa

SEQ ID NO: 261957 - RNA, 19 nt, Artificial Sequence
  Description of Artificial Sequence: Synthetic oligonucleotide
  Antisense strand to SEQ ID NO: 261956
uucaauaugcgcaauuucu

SEQ ID NO: 261958 - RNA, 19 nt, Artificial Sequence
  Description of Artificial Sequence: Synthetic oligonucleotide
  Sense strand starting at position 1366 SEQ ID NO: 3368
gucacuguccucuacacaa

SEQ ID NO: 261959 - RNA, 19 nt, Artificial Sequence
  Description of Artificial Sequence: Synthetic oligonucleotide
  Antisense strand to SEQ ID NO: 261958
uuguguagaggacagugac

SEQ ID NO: 261960 - RNA, 19 nt, Artificial Sequence
  Description of Artificial Sequence: Synthetic oligonucleotide
  Sense strand starting at position 2376 SEQ ID NO: 3368
uccugucugccuuauccua

SEQ ID NO: 261961 - RNA, 19 nt, Artificial Sequence
  Description of Artificial Sequence: Synthetic oligonucleotide
  Antisense strand to SEQ ID NO: 261960
uaggauaaggcagacagga

SEQ ID NO: 261962 - RNA, 19 nt, Artificial Sequence
  Description of Artificial Sequence: Synthetic oligonucleotide
  Sense strand starting at position 2503 SEQ ID NO: 3368
guuucuuaacuguauaaug

SEQ ID NO: 261963 - RNA, 19 nt, Artificial Sequence
  Description of Artificial Sequence: Synthetic oligonucleotide
  Antisense strand to SEQ ID NO: 261962
cauuauacaguuaagaaac

SEQ ID NO: 261964 - RNA, 19 nt, Artificial Sequence
  Description of Artificial Sequence: Synthetic oligonucleotide
  Sense strand starting at position 2512 SEQ ID NO: 3368
cuguauaaugcacaggaua

SEQ ID NO: 261965 - RNA, 19 nt, Artificial Sequence
  Description of Artificial Sequence: Synthetic oligonucleotide
  Antisense strand to SEQ ID NO: 261964
uauccugugcauuauacag

SEQ ID NO: 261966 - RNA, 19 nt, Artificial Sequence
  Description of Artificial Sequence: Synthetic oligonucleotide
  Sense strand starting at position 2594 SEQ ID NO: 3368
gguacuaagccuuacuuga

SEQ ID NO: 261967 - RNA, 19 nt, Artificial Sequence
  Description of Artificial Sequence: Synthetic oligonucleotide
  Antisense strand to SEQ ID NO: 261966
ucaaguaaggcuuaguacc

SEQ ID NO: 261968 - RNA, 19 nt, Artificial Sequence
  Description of Artificial Sequence: Synthetic oligonucleotide
  Sense strand starting at position 2622 SEQ ID NO: 3368
agaacugauuaauuguuga

SEQ ID NO: 261969 - RNA, 19 nt, Artificial Sequence
  Description of Artificial Sequence: Synthetic oligonucleotide
  Antisense strand to SEQ ID NO: 261968
ucaacaauuaaucaguucu

SEQ ID NO: 261970 - RNA, 19 nt, Artificial Sequence
  Description of Artificial Sequence: Synthetic oligonucleotide
  Sense strand starting at position 2636 SEQ ID NO: 3368
guugaauagagaugaguau

SEQ ID NO: 261971 - RNA, 19 nt, Artificial Sequence
  Description of Artificial Sequence: Synthetic oligonucleotide
  Antisense strand to SEQ ID NO: 261970
auacucaucucuauucaac

SEQ ID NO: 261972 - RNA, 19 nt, Artificial Sequence
  Description of Artificial Sequence: Synthetic oligonucleotide
  Sense strand starting at position 2645 SEQ ID NO: 3368
agaugaguaugucuugcuu

SEQ ID NO: 261973 - RNA, 19 nt, Artificial Sequence
  Description of Artificial Sequence: Synthetic oligonucleotide
  Antisense strand to SEQ ID NO: 261972
aagcaagacauacucaucu

SEQ ID NO: 261974 - RNA, 19 nt, Artificial Sequence
  Description of Artificial Sequence: Synthetic oligonucleotide
  Sense strand starting at position 2653 SEQ ID NO: 3368
augucuugcuuucugaaac

SEQ ID NO: 261975 - RNA, 19 nt, Artificial Sequence
  Description of Artificial Sequence: Synthetic oligonucleotide
  Antisense strand to SEQ ID NO: 261974
guuucagaaagcaagacau

SEQ ID NO: 261976 - RNA, 19 nt, Artificial Sequence
  Description of Artificial Sequence: Synthetic oligonucleotide
  Sense strand starting at position 2699 SEQ ID NO: 3368
gguugcuuucuacgaaaca

SEQ ID NO: 261977 - RNA, 19 nt, Artificial Sequence
  Description of Artificial Sequence: Synthetic oligonucleotide
  Antisense strand to SEQ ID NO: 261976
uguuucguagaaagcaacc

SEQ ID NO: 261978 - RNA, 19 nt, Artificial Sequence
  Description of Artificial Sequence: Synthetic oligonucleotide
  Sense strand starting at position 2840 SEQ ID NO: 3368
cgucuacuaucaccaucau

SEQ ID NO: 261979 - RNA, 19 nt, Artificial Sequence
  Description of Artificial Sequence: Synthetic oligonucleotide
  Antisense strand to SEQ ID NO: 261978
augauggugauaguagacg

SEQ ID NO: 261980 - RNA, 19 nt, Artificial Sequence
  Description of Artificial Sequence: Synthetic oligonucleotide
  Sense strand starting at position 3276 SEQ ID NO: 3368
gggauaugcaucuguaaag

SEQ ID NO: 261981 - RNA, 19 nt, Artificial Sequence
  Description of Artificial Sequence: Synthetic oligonucleotide
  Antisense strand to SEQ ID NO: 261980
cuuuacagaugcauauccc

SEQ ID NO: 261982 - RNA, 19 nt, Artificial Sequence
  Description of Artificial Sequence: Synthetic oligonucleotide
  Sense strand starting at position 3277 SEQ ID NO: 3368
ggauaugcaucuguaaaga

SEQ ID NO: 261983 - RNA, 19 nt, Artificial Sequence
  Description of Artificial Sequence: Synthetic oligonucleotide
  Antisense strand to SEQ ID NO: 261982
ucuuuacagaugcauaucc

SEQ ID NO: 261984 - RNA, 19 nt, Artificial Sequence
  Description of Artificial Sequence: Synthetic oligonucleotide
  Sense strand starting at position 3469 SEQ ID NO: 3368
cuaucagucccaggucuuu

SEQ ID NO: 261985 - RNA, 19 nt, Artificial Sequence
  Description of Artificial Sequence: Synthetic oligonucleotide
  Antisense strand to SEQ ID NO: 261984
aaagaccugggacugauag

SEQ ID NO: 261986 - RNA, 19 nt, Artificial Sequence
  Description of Artificial Sequence: Synthetic oligonucleotide
  Sense strand starting at position 3685 SEQ ID NO: 3368
uuugucaacggauggauaa

SEQ ID NO: 261987 - RNA, 19 nt, Artificial Sequence
  Description of Artificial Sequence: Synthetic oligonucleotide
  Antisense strand to SEQ ID NO: 261986
uuauccauccguugacaaa

SEQ ID NO: 261988 - RNA, 19 nt, Artificial Sequence
  Description of Artificial Sequence: Synthetic oligonucleotide
  Sense strand starting at position 3686 SEQ ID NO: 3368
uugucaacggauggauaaa

SEQ ID NO: 261989 - RNA, 19 nt, Artificial Sequence
  Description of Artificial Sequence: Synthetic oligonucleotide
  Antisense strand to SEQ ID NO: 261988
uuuauccauccguugacaa

SEQ ID NO: 261990 - RNA, 19 nt, Artificial Sequence
  Description of Artificial Sequence: Synthetic oligonucleotide
  Sense strand starting at position 3704 SEQ ID NO: 3368
acuagcauuugggaaucaa

SEQ ID NO: 261991 - RNA, 19 nt, Artificial Sequence
  Description of Artificial Sequence: Synthetic oligonucleotide
  Antisense strand to SEQ ID NO: 261990
uugauucccaaaugcuagu

SEQ ID NO: 261992 - RNA, 19 nt, Artificial Sequence
  Description of Artificial Sequence: Synthetic oligonucleotide
  Sense strand starting at position 475 SEQ ID NO: 3369
agaaguaaaugccuuugga

SEQ ID NO: 261993 - RNA, 19 nt, Artificial Sequence
  Description of Artificial Sequence: Synthetic oligonucleotide
  Antisense strand to SEQ ID NO: 261992
uccaaaggcauuuacuucu

SEQ ID NO: 261994 - RNA, 19 nt, Artificial Sequence
  Description of Artificial Sequence: Synthetic oligonucleotide
  Sense strand starting at position 530 SEQ ID NO: 3369
uuaguuauucuuuauggga

SEQ ID NO: 261995 - RNA, 19 nt, Artificial Sequence
  Description of Artificial Sequence: Synthetic oligonucleotide
  Antisense strand to SEQ ID NO: 261994
ucccauaaagaauaacuaa

SEQ ID NO: 261996 - RNA, 19 nt, Artificial Sequence
  Description of Artificial Sequence: Synthetic oligonucleotide
  Sense strand starting at position 539 SEQ ID NO: 3369
cuuuaugggauucgaauca

SEQ ID NO: 261997 - RNA, 19 nt, Artificial Sequence
  Description of Artificial Sequence: Synthetic oligonucleotide
  Antisense strand to SEQ ID NO: 261996
ugauucgaaucccauaaag

SEQ ID NO: 261998 - RNA, 19 nt, Artificial Sequence
  Description of Artificial Sequence: Synthetic oligonucleotide
  Sense strand starting at position 810 SEQ ID NO: 3369
gccugucugccugugacuu

SEQ ID NO: 261999 - RNA, 19 nt, Artificial Sequence
  Description of Artificial Sequence: Synthetic oligonucleotide
  Antisense strand to SEQ ID NO: 261998
aagucacaggcagacaggc

SEQ ID NO: 262000 - RNA, 19 nt, Artificial Sequence
  Description of Artificial Sequence: Synthetic oligonucleotide
  Sense strand starting at position 818 SEQ ID NO: 3369
gccugugacuuuccauuua

SEQ ID NO: 262001 - RNA, 19 nt, Artificial Sequence
  Description of Artificial Sequence: Synthetic oligonucleotide
  Antisense strand to SEQ ID NO: 262000
uaaauggaaagucacaggc

SEQ ID NO: 262002 - RNA, 19 nt, Artificial Sequence
  Description of Artificial Sequence: Synthetic oligonucleotide
  Sense strand starting at position 846 SEQ ID NO: 3369
cagugccuuccgcauuuaa

SEQ ID NO: 262003 - RNA, 19 nt, Artificial Sequence
  Description of Artificial Sequence: Synthetic oligonucleotide
  Antisense strand to SEQ ID NO: 262002
uuaaaugcggaaggcacug

SEQ ID NO: 262004 - RNA, 19 nt, Artificial Sequence
  Description of Artificial Sequence: Synthetic oligonucleotide
  Sense strand starting at position 951 SEQ ID NO: 3369
gcccuuuacuuggcacaaa

SEQ ID NO: 262005 - RNA, 19 nt, Artificial Sequence
  Description of Artificial Sequence: Synthetic oligonucleotide
  Antisense strand to SEQ ID NO: 262004
uuugugccaaguaaagggc

SEQ ID NO: 262006 - RNA, 19 nt, Artificial Sequence
  Description of Artificial Sequence: Synthetic oligonucleotide
  Sense strand starting at position 1205 SEQ ID NO: 3369
aggugaaagucucugcuca

SEQ ID NO: 262007 - RNA, 19 nt, Artificial Sequence
  Description of Artificial Sequence: Synthetic oligonucleotide
  Antisense strand to SEQ ID NO: 262006
ugagcagagacuuucaccu

SEQ ID NO: 262008 - RNA, 19 nt, Artificial Sequence
  Description of Artificial Sequence: Synthetic oligonucleotide
  Sense strand starting at position 1263 SEQ ID NO: 3369
ugugaauucccuuaggguu

SEQ ID NO: 262009 - RNA, 19 nt, Artificial Sequence
  Description of Artificial Sequence: Synthetic oligonucleotide
  Antisense strand to SEQ ID NO: 262008
aacccuaagggaauucaca

SEQ ID NO: 262010 - RNA, 19 nt, Artificial Sequence
  Description of Artificial Sequence: Synthetic oligonucleotide
  Sense strand starting at position 1320 SEQ ID NO: 3369
ucacucuacgccgaucauu

SEQ ID NO: 262011 - RNA, 19 nt, Artificial Sequence
  Description of Artificial Sequence: Synthetic oligonucleotide
  Antisense strand to SEQ ID NO: 262010
aaugaucggcguagaguga

SEQ ID NO: 262012 - RNA, 19 nt, Artificial Sequence
  Description of Artificial Sequence: Synthetic oligonucleotide
  Sense strand starting at position 2030 SEQ ID NO: 3369
cucccuggcaagugagaaa

SEQ ID NO: 262013 - RNA, 19 nt, Artificial Sequence
  Description of Artificial Sequence: Synthetic oligonucleotide
  Antisense strand to SEQ ID NO: 262012
uuucucacuugccagggag

SEQ ID NO: 262014 - RNA, 19 nt, Artificial Sequence
  Description of Artificial Sequence: Synthetic oligonucleotide
  Sense strand starting at position 2116 SEQ ID NO: 3369
gaaagagggccguguaaag

SEQ ID NO: 262015 - RNA, 19 nt, Artificial Sequence
  Description of Artificial Sequence: Synthetic oligonucleotide
  Antisense strand to SEQ ID NO: 262014
cuuuacacggcccucuuuc

SEQ ID NO: 262016 - RNA, 19 nt, Artificial Sequence
  Description of Artificial Sequence: Synthetic oligonucleotide
  Sense strand starting at position 2265 SEQ ID NO: 3369
ggaauuaucuuguuguaac

SEQ ID NO: 262017 - RNA, 19 nt, Artificial Sequence
  Description of Artificial Sequence: Synthetic oligonucleotide
  Antisense strand to SEQ ID NO: 262016
guuacaacaagauaauucc

SEQ ID NO: 262018 - RNA, 19 nt, Artificial Sequence
  Description of Artificial Sequence: Synthetic oligonucleotide
  Sense strand starting at position 2287 SEQ ID NO: 3369
accaauuaaggcugcauaa

SEQ ID NO: 262019 - RNA, 19 nt, Artificial Sequence
  Description of Artificial Sequence: Synthetic oligonucleotide
  Antisense strand to SEQ ID NO: 262018
uuaugcagccuuaauuggu

SEQ ID NO: 262020 - RNA, 19 nt, Artificial Sequence
  Description of Artificial Sequence: Synthetic oligonucleotide
  Sense strand starting at position 2476 SEQ ID NO: 3369
ugggcuguauuguuggaga

SEQ ID NO: 262021 - RNA, 19 nt, Artificial Sequence
  Description of Artificial Sequence: Synthetic oligonucleotide
  Antisense strand to SEQ ID NO: 262020
ucuccaacaauacagccca

SEQ ID NO: 262022 - RNA, 19 nt, Artificial Sequence
  Description of Artificial Sequence: Synthetic oligonucleotide
  Sense strand starting at position 2478 SEQ ID NO: 3369
ggcuguauuguuggagaag

SEQ ID NO: 262023 - RNA, 19 nt, Artificial Sequence
  Description of Artificial Sequence: Synthetic oligonucleotide
  Antisense strand to SEQ ID NO: 262022
cuucuccaacaauacagcc

SEQ ID NO: 262024 - RNA, 19 nt, Artificial Sequence
  Description of Artificial Sequence: Synthetic oligonucleotide
  Sense strand starting at position 2497 SEQ ID NO: 3369
cagcauggucuagggacaa

SEQ ID NO: 262025 - RNA, 19 nt, Artificial Sequence
  Description of Artificial Sequence: Synthetic oligonucleotide
  Antisense strand to SEQ ID NO: 262024
uugucccuagaccaugcug

SEQ ID NO: 262026 - RNA, 19 nt, Artificial Sequence
  Description of Artificial Sequence: Synthetic oligonucleotide
  Sense strand starting at position 2528 SEQ ID NO: 3369
gggcuuugauucccuaaug

SEQ ID NO: 262027 - RNA, 19 nt, Artificial Sequence
  Description of Artificial Sequence: Synthetic oligonucleotide
  Antisense strand to SEQ ID NO: 262026
cauuagggaaucaaagccc

SEQ ID NO: 262028 - RNA, 19 nt, Artificial Sequence
  Description of Artificial Sequence: Synthetic oligonucleotide
  Sense strand starting at position 2539 SEQ ID NO: 3369
cccuaauguguccaacaca

SEQ ID NO: 262029 - RNA, 19 nt, Artificial Sequence
  Description of Artificial Sequence: Synthetic oligonucleotide
  Antisense strand to SEQ ID NO: 262028
uguguuggacacauuaggg

SEQ ID NO: 262030 - RNA, 19 nt, Artificial Sequence
  Description of Artificial Sequence: Synthetic oligonucleotide
  Sense strand starting at position 2632 SEQ ID NO: 3369
guaaauuucccugggucgu

SEQ ID NO: 262031 - RNA, 19 nt, Artificial Sequence
  Description of Artificial Sequence: Synthetic oligonucleotide
  Antisense strand to SEQ ID NO: 262030
acgacccagggaaauuuac

SEQ ID NO: 262032 - RNA, 19 nt, Artificial Sequence
  Description of Artificial Sequence: Synthetic oligonucleotide
  Sense strand starting at position 2633 SEQ ID NO: 3369
uaaauuucccugggucgua

SEQ ID NO: 262033 - RNA, 19 nt, Artificial Sequence
  Description of Artificial Sequence: Synthetic oligonucleotide
  Antisense strand to SEQ ID NO: 262032
uacgacccagggaaauuua

SEQ ID NO: 262034 - RNA, 19 nt, Artificial Sequence
  Description of Artificial Sequence: Synthetic oligonucleotide
  Sense strand starting at position 2634 SEQ ID NO: 3369
aaauuucccugggucguau

SEQ ID NO: 262035 - RNA, 19 nt, Artificial Sequence
  Description of Artificial Sequence: Synthetic oligonucleotide
  Antisense strand to SEQ ID NO: 262034
auacgacccagggaaauuu

SEQ ID NO: 262036 - RNA, 19 nt, Artificial Sequence
  Description of Artificial Sequence: Synthetic oligonucleotide
  Sense strand starting at position 2658 SEQ ID NO: 3369
gcagacaugcccggaacau

SEQ ID NO: 262037 - RNA, 19 nt, Artificial Sequence
  Description of Artificial Sequence: Synthetic oligonucleotide
  Antisense strand to SEQ ID NO: 262036
auguuccgggcaugucugc

SEQ ID NO: 262038 - RNA, 19 nt, Artificial Sequence
  Description of Artificial Sequence: Synthetic oligonucleotide
  Sense strand starting at position 2715 SEQ ID NO: 3369
agccuagagccuuaaagag

SEQ ID NO: 262039 - RNA, 19 nt, Artificial Sequence
  Description of Artificial Sequence: Synthetic oligonucleotide
  Antisense strand to SEQ ID NO: 262038
cucuuuaaggcucuaggcu

SEQ ID NO: 262040 - RNA, 19 nt, Artificial Sequence
  Description of Artificial Sequence: Synthetic oligonucleotide
  Sense strand starting at position 2767 SEQ ID NO: 3369
gcuguuaccgagcagauuu

SEQ ID NO: 262041 - RNA, 19 nt, Artificial Sequence
  Description of Artificial Sequence: Synthetic oligonucleotide
  Antisense strand to SEQ ID NO: 262040
aaaucugcucgguaacagc

SEQ ID NO: 262042 - RNA, 19 nt, Artificial Sequence
  Description of Artificial Sequence: Synthetic oligonucleotide
  Sense strand starting at position 2784 SEQ ID NO: 3369
uuggauuccgcacagcaaa

SEQ ID NO: 262043 - RNA, 19 nt, Artificial Sequence
  Description of Artificial Sequence: Synthetic oligonucleotide
  Antisense strand to SEQ ID NO: 262042
uuugcugugcggaauccaa

SEQ ID NO: 262044 - RNA, 19 nt, Artificial Sequence
  Description of Artificial Sequence: Synthetic oligonucleotide
  Sense strand starting at position 2798 SEQ ID NO: 3369
gcaaacagauacuaggaaa

SEQ ID NO: 262045 - RNA, 19 nt, Artificial Sequence
  Description of Artificial Sequence: Synthetic oligonucleotide
  Antisense strand to SEQ ID NO: 262044
uuuccuaguaucuguuugc

SEQ ID NO: 262046 - RNA, 19 nt, Artificial Sequence
  Description of Artificial Sequence: Synthetic oligonucleotide
  Sense strand starting at position 3157 SEQ ID NO: 3369
ucaagucgcagugaguuaa

SEQ ID NO: 262047 - RNA, 19 nt, Artificial Sequence
  Description of Artificial Sequence: Synthetic oligonucleotide
  Antisense strand to SEQ ID NO: 262046
uuaacucacugcgacuuga

SEQ ID NO: 262048 - RNA, 19 nt, Artificial Sequence
  Description of Artificial Sequence: Synthetic oligonucleotide
  Sense strand starting at position 3168 SEQ ID NO: 3369
ugaguuaaaguguagagua

SEQ ID NO: 262049 - RNA, 19 nt, Artificial Sequence
  Description of Artificial Sequence: Synthetic oligonucleotide
  Antisense strand to SEQ ID NO: 262048
uacucuacacuuuaacuca

SEQ ID NO: 262050 - RNA, 19 nt, Artificial Sequence
  Description of Artificial Sequence: Synthetic oligonucleotide
  Sense strand starting at position 3170 SEQ ID NO: 3369
aguuaaaguguagaguaau

SEQ ID NO: 262051 - RNA, 19 nt, Artificial Sequence
  Description of Artificial Sequence: Synthetic oligonucleotide
  Antisense strand to SEQ ID NO: 262050
auuacucuacacuuuaacu

SEQ ID NO: 262052 - RNA, 19 nt, Artificial Sequence
  Description of Artificial Sequence: Synthetic oligonucleotide
  Sense strand starting at position 3278 SEQ ID NO: 3369
uuuaauuagcaaggcucaa

SEQ ID NO: 262053 - RNA, 19 nt, Artificial Sequence
  Description of Artificial Sequence: Synthetic oligonucleotide
  Antisense strand to SEQ ID NO: 262052
uugagccuugcuaauuaaa

SEQ ID NO: 262054 - RNA, 19 nt, Artificial Sequence
  Description of Artificial Sequence: Synthetic oligonucleotide
  Sense strand starting at position 3313 SEQ ID NO: 3369
guagguaaucuguagaaga

SEQ ID NO: 262055 - RNA, 19 nt, Artificial Sequence
  Description of Artificial Sequence: Synthetic oligonucleotide
  Antisense strand to SEQ ID NO: 262054
ucuucuacagauuaccuac

SEQ ID NO: 262056 - RNA, 19 nt, Artificial Sequence
  Description of Artificial Sequence: Synthetic oligonucleotide
  Sense strand starting at position 3324 SEQ ID NO: 3369
guagaagaaugcucuuaau

SEQ ID NO: 262057 - RNA, 19 nt, Artificial Sequence
  Description of Artificial Sequence: Synthetic oligonucleotide
  Antisense strand to SEQ ID NO: 262056
auuaagagcauucuucuac

SEQ ID NO: 262058 - RNA, 19 nt, Artificial Sequence
  Description of Artificial Sequence: Synthetic oligonucleotide
  Sense strand starting at position 3451 SEQ ID NO: 3369
uuccaauucuuguugagaa

SEQ ID NO: 262059 - RNA, 19 nt, Artificial Sequence
  Description of Artificial Sequence: Synthetic oligonucleotide
  Antisense strand to SEQ ID NO: 262058
uucucaacaagaauuggaa

SEQ ID NO: 262060 - RNA, 19 nt, Artificial Sequence
  Description of Artificial Sequence: Synthetic oligonucleotide
  Sense strand starting at position 3469 SEQ ID NO: 3369
agcccagaaucugcugaua

SEQ ID NO: 262061 - RNA, 19 nt, Artificial Sequence
  Description of Artificial Sequence: Synthetic oligonucleotide
  Antisense strand to SEQ ID NO: 262060
uaucagcagauucugggcu

SEQ ID NO: 262062 - RNA, 19 nt, Artificial Sequence
  Description of Artificial Sequence: Synthetic oligonucleotide
  Sense strand starting at position 3472 SEQ ID NO: 3369
ccagaaucugcugauacua

SEQ ID NO: 262063 - RNA, 19 nt, Artificial Sequence
  Description of Artificial Sequence: Synthetic oligonucleotide
  Antisense strand to SEQ ID NO: 262062
uaguaucagcagauucugg

SEQ ID NO: 262064 - RNA, 19 nt, Artificial Sequence
  Description of Artificial Sequence: Synthetic oligonucleotide
  Sense strand starting at position 3480 SEQ ID NO: 3369
ugcugauacuaugcaagga

SEQ ID NO: 262065 - RNA, 19 nt, Artificial Sequence
  Description of Artificial Sequence: Synthetic oligonucleotide
  Antisense strand to SEQ ID NO: 262064
uccuugcauaguaucagca

SEQ ID NO: 262066 - RNA, 19 nt, Artificial Sequence
  Description of Artificial Sequence: Synthetic oligonucleotide
  Sense strand starting at position 3602 SEQ ID NO: 3369
gcucaugucaacugaguag

SEQ ID NO: 262067 - RNA, 19 nt, Artificial Sequence
  Description of Artificial Sequence: Synthetic oligonucleotide
  Antisense strand to SEQ ID NO: 262066
cuacucaguugacaugagc

SEQ ID NO: 262068 - RNA, 19 nt, Artificial Sequence
  Description of Artificial Sequence: Synthetic oligonucleotide
  Sense strand starting at position 3606 SEQ ID NO: 3369
augucaacugaguagugua

SEQ ID NO: 262069 - RNA, 19 nt, Artificial Sequence
  Description of Artificial Sequence: Synthetic oligonucleotide
  Antisense strand to SEQ ID NO: 262068
uacacuacucaguugacau

SEQ ID NO: 262070 - RNA, 19 nt, Artificial Sequence
  Description of Artificial Sequence: Synthetic oligonucleotide
  Sense strand starting at position 3959 SEQ ID NO: 3369
gugaauuguguugaaguaa

SEQ ID NO: 262071 - RNA, 19 nt, Artificial Sequence
  Description of Artificial Sequence: Synthetic oligonucleotide
  Antisense strand to SEQ ID NO: 262070
uuacuucaacacaauucac

SEQ ID NO: 262072 - RNA, 19 nt, Artificial Sequence
  Description of Artificial Sequence: Synthetic oligonucleotide
  Sense strand starting at position 546 SEQ ID NO: 3370
ggacuuuggugucucauau

SEQ ID NO: 262073 - RNA, 19 nt, Artificial Sequence
  Description of Artificial Sequence: Synthetic oligonucleotide
  Antisense strand to SEQ ID NO: 262072
auaugagacaccaaagucc

SEQ ID NO: 262074 - RNA, 19 nt, Artificial Sequence
  Description of Artificial Sequence: Synthetic oligonucleotide
  Sense strand starting at position 580 SEQ ID NO: 3370
guaugagacucuuccaaag

SEQ ID NO: 262075 - RNA, 19 nt, Artificial Sequence
  Description of Artificial Sequence: Synthetic oligonucleotide
  Antisense strand to SEQ ID NO: 262074
cuuuggaagagucucauac

SEQ ID NO: 262076 - RNA, 19 nt, Artificial Sequence
  Description of Artificial Sequence: Synthetic oligonucleotide
  Sense strand starting at position 690 SEQ ID NO: 3370
ugccuugcuguccaauagu

SEQ ID NO: 262077 - RNA, 19 nt, Artificial Sequence
  Description of Artificial Sequence: Synthetic oligonucleotide
  Antisense strand to SEQ ID NO: 262076
acuauuggacagcaaggca

SEQ ID NO: 262078 - RNA, 19 nt, Artificial Sequence
  Description of Artificial Sequence: Synthetic oligonucleotide
  Sense strand starting at position 693 SEQ ID NO: 3370
cuugcuguccaauagugau

SEQ ID NO: 262079 - RNA, 19 nt, Artificial Sequence
  Description of Artificial Sequence: Synthetic oligonucleotide
  Antisense strand to SEQ ID NO: 262078
aucacuauuggacagcaag

SEQ ID NO: 262080 - RNA, 19 nt, Artificial Sequence
  Description of Artificial Sequence: Synthetic oligonucleotide
  Sense strand starting at position 699 SEQ ID NO: 3370
guccaauagugaucucuau

SEQ ID NO: 262081 - RNA, 19 nt, Artificial Sequence
  Description of Artificial Sequence: Synthetic oligonucleotide
  Antisense strand to SEQ ID NO: 262080
auagagaucacuauuggac

SEQ ID NO: 262082 - RNA, 19 nt, Artificial Sequence
  Description of Artificial Sequence: Synthetic oligonucleotide
  Sense strand starting at position 705 SEQ ID NO: 3370
uagugaucucuaugaaagu

SEQ ID NO: 262083 - RNA, 19 nt, Artificial Sequence
  Description of Artificial Sequence: Synthetic oligonucleotide
  Antisense strand to SEQ ID NO: 262082
acuuucauagagaucacua

SEQ ID NO: 262084 - RNA, 19 nt, Artificial Sequence
  Description of Artificial Sequence: Synthetic oligonucleotide
  Sense strand starting at position 817 SEQ ID NO: 3370
gcacuaguccucuagucag

SEQ ID NO: 262085 - RNA, 19 nt, Artificial Sequence
  Description of Artificial Sequence: Synthetic oligonucleotide
  Antisense strand to SEQ ID NO: 262084
cugacuagaggacuagugc

SEQ ID NO: 262086 - RNA, 19 nt, Artificial Sequence
  Description of Artificial Sequence: Synthetic oligonucleotide
  Sense strand starting at position 928 SEQ ID NO: 3370
agagguuaacuaggccuau

SEQ ID NO: 262087 - RNA, 19 nt, Artificial Sequence
  Description of Artificial Sequence: Synthetic oligonucleotide
  Antisense strand to SEQ ID NO: 262086
auaggccuaguuaaccucu

SEQ ID NO: 262088 - RNA, 19 nt, Artificial Sequence
  Description of Artificial Sequence: Synthetic oligonucleotide
  Sense strand starting at position 977 SEQ ID NO: 3370
guuuguagcuuuccaggga

SEQ ID NO: 262089 - RNA, 19 nt, Artificial Sequence
  Description of Artificial Sequence: Synthetic oligonucleotide
  Antisense strand to SEQ ID NO: 262088
ucccuggaaagcuacaaac

SEQ ID NO: 262090 - RNA, 19 nt, Artificial Sequence
  Description of Artificial Sequence: Synthetic oligonucleotide
  Sense strand starting at position 981 SEQ ID NO: 3370
guagcuuuccagggagaga

SEQ ID NO: 262091 - RNA, 19 nt, Artificial Sequence
  Description of Artificial Sequence: Synthetic oligonucleotide
  Antisense strand to SEQ ID NO: 262090
ucucucccuggaaagcuac

SEQ ID NO: 262092 - RNA, 19 nt, Artificial Sequence
  Description of Artificial Sequence: Synthetic oligonucleotide
  Sense strand starting at position 994 SEQ ID NO: 3370
gagagauaauccuggauag

SEQ ID NO: 262093 - RNA, 19 nt, Artificial Sequence
  Description of Artificial Sequence: Synthetic oligonucleotide
  Antisense strand to SEQ ID NO: 262092
cuauccaggauuaucucuc

SEQ ID NO: 262094 - RNA, 19 nt, Artificial Sequence
  Description of Artificial Sequence: Synthetic oligonucleotide
  Sense strand starting at position 1053 SEQ ID NO: 3370
gcagauagcguccaugacu

SEQ ID NO: 262095 - RNA, 19 nt, Artificial Sequence
  Description of Artificial Sequence: Synthetic oligonucleotide
  Antisense strand to SEQ ID NO: 262094
agucauggacgcuaucugc

SEQ ID NO: 262096 - RNA, 19 nt, Artificial Sequence
  Description of Artificial Sequence: Synthetic oligonucleotide
  Sense strand starting at position 1201 SEQ ID NO: 3370
cuggaccggcgguauaaau

SEQ ID NO: 262097 - RNA, 19 nt, Artificial Sequence
  Description of Artificial Sequence: Synthetic oligonucleotide
  Antisense strand to SEQ ID NO: 262096
auuuauaccgccgguccag

SEQ ID NO: 262098 - RNA, 19 nt, Artificial Sequence
  Description of Artificial Sequence: Synthetic oligonucleotide
  Sense strand starting at position 1224 SEQ ID NO: 3370
gcgucgugggagcagaauu

SEQ ID NO: 262099 - RNA, 19 nt, Artificial Sequence
  Description of Artificial Sequence: Synthetic oligonucleotide
  Antisense strand to SEQ ID NO: 262098
aauucugcucccacgacgc

SEQ ID NO: 262100 - RNA, 19 nt, Artificial Sequence
  Description of Artificial Sequence: Synthetic oligonucleotide
  Sense strand starting at position 1234 SEQ ID NO: 3370
agcagaauuacgugucaua

SEQ ID NO: 262101 - RNA, 19 nt, Artificial Sequence
  Description of Artificial Sequence: Synthetic oligonucleotide
  Antisense strand to SEQ ID NO: 262100
uaugacacguaauucugcu

SEQ ID NO: 262102 - RNA, 19 nt, Artificial Sequence
  Description of Artificial Sequence: Synthetic oligonucleotide
  Sense strand starting at position 1313 SEQ ID NO: 3370
aagagauucuggccguguu

SEQ ID NO: 262103 - RNA, 19 nt, Artificial Sequence
  Description of Artificial Sequence: Synthetic oligonucleotide
  Antisense strand to SEQ ID NO: 262102
aacacggccagaaucucuu

SEQ ID NO: 262104 - RNA, 19 nt, Artificial Sequence
  Description of Artificial Sequence: Synthetic oligonucleotide
  Sense strand starting at position 1314 SEQ ID NO: 3370
agagauucuggccguguuu

SEQ ID NO: 262105 - RNA, 19 nt, Artificial Sequence
  Description of Artificial Sequence: Synthetic oligonucleotide
  Antisense strand to SEQ ID NO: 262104
aaacacggccagaaucucu

SEQ ID NO: 262106 - RNA, 19 nt, Artificial Sequence
  Description of Artificial Sequence: Synthetic oligonucleotide
  Sense strand starting at position 1317 SEQ ID NO: 3370
gauucuggccguguuugua

SEQ ID NO: 262107 - RNA, 19 nt, Artificial Sequence
  Description of Artificial Sequence: Synthetic oligonucleotide
  Antisense strand to SEQ ID NO: 262106
uacaaacacggccagaauc

SEQ ID NO: 262108 - RNA, 19 nt, Artificial Sequence
  Description of Artificial Sequence: Synthetic oligonucleotide
  Sense strand starting at position 1332 SEQ ID NO: 3370
uguaaugagcgcuacaugu

SEQ ID NO: 262109 - RNA, 19 nt, Artificial Sequence
  Description of Artificial Sequence: Synthetic oligonucleotide
  Antisense strand to SEQ ID NO: 262108
acauguagcgcucauuaca

SEQ ID NO: 262110 - RNA, 19 nt, Artificial Sequence
  Description of Artificial Sequence: Synthetic oligonucleotide
  Sense strand starting at position 1418 SEQ ID NO: 3370
acguaaacacuccgugauc

SEQ ID NO: 262111 - RNA, 19 nt, Artificial Sequence
  Description of Artificial Sequence: Synthetic oligonucleotide
  Antisense strand to SEQ ID NO: 262110
gaucacggaguguuuacgu

SEQ ID NO: 262112 - RNA, 19 nt, Artificial Sequence
  Description of Artificial Sequence: Synthetic oligonucleotide
  Sense strand starting at position 1419 SEQ ID NO: 3370
cguaaacacuccgugauca

SEQ ID NO: 262113 - RNA, 19 nt, Artificial Sequence
  Description of Artificial Sequence: Synthetic oligonucleotide
  Antisense strand to SEQ ID NO: 262112
ugaucacggaguguuuacg

SEQ ID NO: 262114 - RNA, 19 nt, Artificial Sequence
  Description of Artificial Sequence: Synthetic oligonucleotide
  Sense strand starting at position 2151 SEQ ID NO: 3370
gagcuccuuucuguguuua

SEQ ID NO: 262115 - RNA, 19 nt, Artificial Sequence
  Description of Artificial Sequence: Synthetic oligonucleotide
  Antisense strand to SEQ ID NO: 262114
uaaacacagaaaggagcuc

SEQ ID NO: 262116 - RNA, 19 nt, Artificial Sequence
  Description of Artificial Sequence: Synthetic oligonucleotide
  Sense strand starting at position 2155 SEQ ID NO: 3370
uccuuucuguguuuacuca

SEQ ID NO: 262117 - RNA, 19 nt, Artificial Sequence
  Description of Artificial Sequence: Synthetic oligonucleotide
  Antisense strand to SEQ ID NO: 262116
ugaguaaacacagaaagga

SEQ ID NO: 262118 - RNA, 19 nt, Artificial Sequence
  Description of Artificial Sequence: Synthetic oligonucleotide
  Sense strand starting at position 2254 SEQ ID NO: 3370
gcucguaaugugcccggaa

SEQ ID NO: 262119 - RNA, 19 nt, Artificial Sequence
  Description of Artificial Sequence: Synthetic oligonucleotide
  Antisense strand to SEQ ID NO: 262118
uuccgggcacauuacgagc

SEQ ID NO: 262120 - RNA, 19 nt, Artificial Sequence
  Description of Artificial Sequence: Synthetic oligonucleotide
  Sense strand starting at position 2266 SEQ ID NO: 3370
cccggaagcaugggaguaa

SEQ ID NO: 262121 - RNA, 19 nt, Artificial Sequence
  Description of Artificial Sequence: Synthetic oligonucleotide
  Antisense strand to SEQ ID NO: 262120
uuacucccaugcuuccggg

SEQ ID NO: 262122 - RNA, 19 nt, Artificial Sequence
  Description of Artificial Sequence: Synthetic oligonucleotide
  Sense strand starting at position 2278 SEQ ID NO: 3370
ggaguaacaucagaaggaa

SEQ ID NO: 262123 - RNA, 19 nt, Artificial Sequence
  Description of Artificial Sequence: Synthetic oligonucleotide
  Antisense strand to SEQ ID NO: 262122
uuccuucugauguuacucc

SEQ ID NO: 262124 - RNA, 19 nt, Artificial Sequence
  Description of Artificial Sequence: Synthetic oligonucleotide
  Sense strand starting at position 2408 SEQ ID NO: 3370
ggauuacggguuuauucua

SEQ ID NO: 262125 - RNA, 19 nt, Artificial Sequence
  Description of Artificial Sequence: Synthetic oligonucleotide
  Antisense strand to SEQ ID NO: 262124
uagaauaaacccguaaucc

SEQ ID NO: 262126 - RNA, 19 nt, Artificial Sequence
  Description of Artificial Sequence: Synthetic oligonucleotide
  Sense strand starting at position 2445 SEQ ID NO: 3370
gccuguuagccacauuauc

SEQ ID NO: 262127 - RNA, 19 nt, Artificial Sequence
  Description of Artificial Sequence: Synthetic oligonucleotide
  Antisense strand to SEQ ID NO: 262126
gauaauguggcuaacaggc

SEQ ID NO: 262128 - RNA, 19 nt, Artificial Sequence
  Description of Artificial Sequence: Synthetic oligonucleotide
  Sense strand starting at position 2467 SEQ ID NO: 3370
ucauccacucguugaugau

SEQ ID NO: 262129 - RNA, 19 nt, Artificial Sequence
  Description of Artificial Sequence: Synthetic oligonucleotide
  Antisense strand to SEQ ID NO: 262128
aucaucaacgaguggauga

SEQ ID NO: 262130 - RNA, 19 nt, Artificial Sequence
  Description of Artificial Sequence: Synthetic oligonucleotide
  Sense strand starting at position 2468 SEQ ID NO: 3370
cauccacucguugaugauu

SEQ ID NO: 262131 - RNA, 19 nt, Artificial Sequence
  Description of Artificial Sequence: Synthetic oligonucleotide
  Antisense strand to SEQ ID NO: 262130
aaucaucaacgaguggaug

SEQ ID NO: 262132 - RNA, 19 nt, Artificial Sequence
  Description of Artificial Sequence: Synthetic oligonucleotide
  Sense strand starting at position 2514 SEQ ID NO: 3370
ugcuaugucccagacucuu

SEQ ID NO: 262133 - RNA, 19 nt, Artificial Sequence
  Description of Artificial Sequence: Synthetic oligonucleotide
  Antisense strand to SEQ ID NO: 262132
aagagucugggacauagca

SEQ ID NO: 262134 - RNA, 19 nt, Artificial Sequence
  Description of Artificial Sequence: Synthetic oligonucleotide
  Sense strand starting at position 2529 SEQ ID NO: 3370
ucuucuuggcucugaggau

SEQ ID NO: 262135 - RNA, 19 nt, Artificial Sequence
  Description of Artificial Sequence: Synthetic oligonucleotide
  Antisense strand to SEQ ID NO: 262134
auccucagagccaagaaga

SEQ ID NO: 262136 - RNA, 19 nt, Artificial Sequence
  Description of Artificial Sequence: Synthetic oligonucleotide
  Sense strand starting at position 2538 SEQ ID NO: 3370
cucugaggaucgccaguaa

SEQ ID NO: 262137 - RNA, 19 nt, Artificial Sequence
  Description of Artificial Sequence: Synthetic oligonucleotide
  Antisense strand to SEQ ID NO: 262136
uuacuggcgauccucagag

SEQ ID NO: 262138 - RNA, 19 nt, Artificial Sequence
  Description of Artificial Sequence: Synthetic oligonucleotide
  Sense strand starting at position 2629 SEQ ID NO: 3370
aaugaaaugguacguuaga

SEQ ID NO: 262139 - RNA, 19 nt, Artificial Sequence
  Description of Artificial Sequence: Synthetic oligonucleotide
  Antisense strand to SEQ ID NO: 262138
ucuaacguaccauuucauu

SEQ ID NO: 262140 - RNA, 19 nt, Artificial Sequence
  Description of Artificial Sequence: Synthetic oligonucleotide
  Sense strand starting at position 2630 SEQ ID NO: 3370
augaaaugguacguuagaa

SEQ ID NO: 262141 - RNA, 19 nt, Artificial Sequence
  Description of Artificial Sequence: Synthetic oligonucleotide
  Antisense strand to SEQ ID NO: 262140
uucuaacguaccauuucau

SEQ ID NO: 262142 - RNA, 19 nt, Artificial Sequence
  Description of Artificial Sequence: Synthetic oligonucleotide
  Sense strand starting at position 2643 SEQ ID NO: 3370
uuagaagauaugcguuugu

SEQ ID NO: 262143 - RNA, 19 nt, Artificial Sequence
  Description of Artificial Sequence: Synthetic oligonucleotide
  Antisense strand to SEQ ID NO: 262142
acaaacgcauaucuucuaa

SEQ ID NO: 262144 - RNA, 19 nt, Artificial Sequence
  Description of Artificial Sequence: Synthetic oligonucleotide
  Sense strand starting at position 2770 SEQ ID NO: 3370
ccacgucugugaucccaga

SEQ ID NO: 262145 - RNA, 19 nt, Artificial Sequence
  Description of Artificial Sequence: Synthetic oligonucleotide
  Antisense strand to SEQ ID NO: 262144
ucugggaucacagacgugg

SEQ ID NO: 262146 - RNA, 19 nt, Artificial Sequence
  Description of Artificial Sequence: Synthetic oligonucleotide
  Sense strand starting at position 2785 SEQ ID NO: 3370
cagauauuagcagggcuga

SEQ ID NO: 262147 - RNA, 19 nt, Artificial Sequence
  Description of Artificial Sequence: Synthetic oligonucleotide
  Antisense strand to SEQ ID NO: 262146
ucagcccugcuaauaucug

SEQ ID NO: 262148 - RNA, 19 nt, Artificial Sequence
  Description of Artificial Sequence: Synthetic oligonucleotide
  Sense strand starting at position 3019 SEQ ID NO: 3370
ggucuucugccgucagcua

SEQ ID NO: 262149 - RNA, 19 nt, Artificial Sequence
  Description of Artificial Sequence: Synthetic oligonucleotide
  Antisense strand to SEQ ID NO: 262148
uagcugacggcagaagacc

SEQ ID NO: 262150 - RNA, 19 nt, Artificial Sequence
  Description of Artificial Sequence: Synthetic oligonucleotide
  Sense strand starting at position 3960 SEQ ID NO: 3370
ggucuuaauuucuggagua

SEQ ID NO: 262151 - RNA, 19 nt, Artificial Sequence
  Description of Artificial Sequence: Synthetic oligonucleotide
  Antisense strand to SEQ ID NO: 262150
uacuccagaaauuaagacc

SEQ ID NO: 262152 - RNA, 19 nt, Artificial Sequence
  Description of Artificial Sequence: Synthetic oligonucleotide
  Sense strand starting at position 145 SEQ ID NO: 3371
gcaggauaaucucuugauc

SEQ ID NO: 262153 - RNA, 19 nt, Artificial Sequence
  Description of Artificial Sequence: Synthetic oligonucleotide
  Antisense strand to SEQ ID NO: 262152
gaucaagagauuauccugc

SEQ ID NO: 262154 - RNA, 19 nt, Artificial Sequence
  Description of Artificial Sequence: Synthetic oligonucleotide
  Sense strand starting at position 147 SEQ ID NO: 3371
aggauaaucucuugaucca

SEQ ID NO: 262155 - RNA, 19 nt, Artificial Sequence
  Description of Artificial Sequence: Synthetic oligonucleotide
  Antisense strand to SEQ ID NO: 262154
uggaucaagagauuauccu

SEQ ID NO: 262156 - RNA, 19 nt, Artificial Sequence
  Description of Artificial Sequence: Synthetic oligonucleotide
  Sense strand starting at position 250 SEQ ID NO: 3371
auauguaucuggcaaacag

SEQ ID NO: 262157 - RNA, 19 nt, Artificial Sequence
  Description of Artificial Sequence: Synthetic oligonucleotide
  Antisense strand to SEQ ID NO: 262156
cuguuugccagauacauau

SEQ ID NO: 262158 - RNA, 19 nt, Artificial Sequence
  Description of Artificial Sequence: Synthetic oligonucleotide
  Sense strand starting at position 575 SEQ ID NO: 3371
ccuggacuugagcgaaacu

SEQ ID NO: 262159 - RNA, 19 nt, Artificial Sequence
  Description of Artificial Sequence: Synthetic oligonucleotide
  Antisense strand to SEQ ID NO: 262158
aguuucgcucaaguccagg

SEQ ID NO: 262160 - RNA, 19 nt, Artificial Sequence
  Description of Artificial Sequence: Synthetic oligonucleotide
  Sense strand starting at position 1314 SEQ ID NO: 3371
cgcgucuccucccuccaaa

SEQ ID NO: 262161 - RNA, 19 nt, Artificial Sequence
  Description of Artificial Sequence: Synthetic oligonucleotide
  Antisense strand to SEQ ID NO: 262160
uuuggagggaggagacgcg

SEQ ID NO: 262162 - RNA, 19 nt, Artificial Sequence
  Description of Artificial Sequence: Synthetic oligonucleotide
  Sense strand starting at position 2369 SEQ ID NO: 3371
gcgugaccuccugccguua

SEQ ID NO: 262163 - RNA, 19 nt, Artificial Sequence
  Description of Artificial Sequence: Synthetic oligonucleotide
  Antisense strand to SEQ ID NO: 262162
uaacggcaggaggucacgc

SEQ ID NO: 262164 - RNA, 19 nt, Artificial Sequence
  Description of Artificial Sequence: Synthetic oligonucleotide
  Sense strand starting at position 2447 SEQ ID NO: 3371
cacguuguauucucaagau

SEQ ID NO: 262165 - RNA, 19 nt, Artificial Sequence
  Description of Artificial Sequence: Synthetic oligonucleotide
  Antisense strand to SEQ ID NO: 262164
aucuugagaauacaacgug

SEQ ID NO: 262166 - RNA, 19 nt, Artificial Sequence
  Description of Artificial Sequence: Synthetic oligonucleotide
  Sense strand starting at position 2457 SEQ ID NO: 3371
ucucaagauuuguauagag

SEQ ID NO: 262167 - RNA, 19 nt, Artificial Sequence
  Description of Artificial Sequence: Synthetic oligonucleotide
  Antisense strand to SEQ ID NO: 262166
cucuauacaaaucuugaga

SEQ ID NO: 262168 - RNA, 19 nt, Artificial Sequence
  Description of Artificial Sequence: Synthetic oligonucleotide
  Sense strand starting at position 2479 SEQ ID NO: 3371
gcacuugguaaacgcuaaa

SEQ ID NO: 262169 - RNA, 19 nt, Artificial Sequence
  Description of Artificial Sequence: Synthetic oligonucleotide
  Antisense strand to SEQ ID NO: 262168
uuuagcguuuaccaagugc

SEQ ID NO: 262170 - RNA, 19 nt, Artificial Sequence
  Description of Artificial Sequence: Synthetic oligonucleotide
  Sense strand starting at position 2482 SEQ ID NO: 3371
cuugguaaacgcuaaauga

SEQ ID NO: 262171 - RNA, 19 nt, Artificial Sequence
  Description of Artificial Sequence: Synthetic oligonucleotide
  Antisense strand to SEQ ID NO: 262170
ucauuuagcguuuaccaag

SEQ ID NO: 262172 - RNA, 19 nt, Artificial Sequence
  Description of Artificial Sequence: Synthetic oligonucleotide
  Sense strand starting at position 2490 SEQ ID NO: 3371
acgcuaaaugaauauugua

SEQ ID NO: 262173 - RNA, 19 nt, Artificial Sequence
  Description of Artificial Sequence: Synthetic oligonucleotide
  Antisense strand to SEQ ID NO: 262172
uacaauauucauuuagcgu

SEQ ID NO: 262174 - RNA, 19 nt, Artificial Sequence
  Description of Artificial Sequence: Synthetic oligonucleotide
  Sense strand starting at position 2508 SEQ ID NO: 3371
aauagcauucguuagcgau

SEQ ID NO: 262175 - RNA, 19 nt, Artificial Sequence
  Description of Artificial Sequence: Synthetic oligonucleotide
  Antisense strand to SEQ ID NO: 262174
aucgcuaacgaaugcuauu

SEQ ID NO: 262176 - RNA, 19 nt, Artificial Sequence
  Description of Artificial Sequence: Synthetic oligonucleotide
  Sense strand starting at position 2526 SEQ ID NO: 3371
ugcuguuguguauggugaa

SEQ ID NO: 262177 - RNA, 19 nt, Artificial Sequence
  Description of Artificial Sequence: Synthetic oligonucleotide
  Antisense strand to SEQ ID NO: 262176
uucaccauacacaacagca

SEQ ID NO: 262178 - RNA, 19 nt, Artificial Sequence
  Description of Artificial Sequence: Synthetic oligonucleotide
  Sense strand starting at position 2621 SEQ ID NO: 3371
cucaauaaccugugacgua

SEQ ID NO: 262179 - RNA, 19 nt, Artificial Sequence
  Description of Artificial Sequence: Synthetic oligonucleotide
  Antisense strand to SEQ ID NO: 262178
uacgucacagguuauugag

SEQ ID NO: 262180 - RNA, 19 nt, Artificial Sequence
  Description of Artificial Sequence: Synthetic oligonucleotide
  Sense strand starting at position 2630 SEQ ID NO: 3371
cugugacguaaguacuuaa

SEQ ID NO: 262181 - RNA, 19 nt, Artificial Sequence
  Description of Artificial Sequence: Synthetic oligonucleotide
  Antisense strand to SEQ ID NO: 262180
uuaaguacuuacgucacag

SEQ ID NO: 262182 - RNA, 19 nt, Artificial Sequence
  Description of Artificial Sequence: Synthetic oligonucleotide
  Sense strand starting at position 2651 SEQ ID NO: 3371
gccacaguccguuaucuga

SEQ ID NO: 262183 - RNA, 19 nt, Artificial Sequence
  Description of Artificial Sequence: Synthetic oligonucleotide
  Antisense strand to SEQ ID NO: 262182
ucagauaacggacuguggc

SEQ ID NO: 262184 - RNA, 19 nt, Artificial Sequence
  Description of Artificial Sequence: Synthetic oligonucleotide
  Sense strand starting at position 2658 SEQ ID NO: 3371
uccguuaucugagcccuuu

SEQ ID NO: 262185 - RNA, 19 nt, Artificial Sequence
  Description of Artificial Sequence: Synthetic oligonucleotide
  Antisense strand to SEQ ID NO: 262184
aaagggcucagauaacgga

SEQ ID NO: 262186 - RNA, 19 nt, Artificial Sequence
  Description of Artificial Sequence: Synthetic oligonucleotide
  Sense strand starting at position 2711 SEQ ID NO: 3371
uuagaaagcuaagagacua

SEQ ID NO: 262187 - RNA, 19 nt, Artificial Sequence
  Description of Artificial Sequence: Synthetic oligonucleotide
  Antisense strand to SEQ ID NO: 262186
uagucucuuagcuuucuaa

SEQ ID NO: 262188 - RNA, 19 nt, Artificial Sequence
  Description of Artificial Sequence: Synthetic oligonucleotide
  Sense strand starting at position 3038 SEQ ID NO: 3371
cuaagaggcuaugagaaua

SEQ ID NO: 262189 - RNA, 19 nt, Artificial Sequence
  Description of Artificial Sequence: Synthetic oligonucleotide
  Antisense strand to SEQ ID NO: 262188
uauucucauagccucuuag

SEQ ID NO: 262190 - RNA, 19 nt, Artificial Sequence
  Description of Artificial Sequence: Synthetic oligonucleotide
  Sense strand starting at position 3076 SEQ ID NO: 3371
caagaaagauaguggaaga

SEQ ID NO: 262191 - RNA, 19 nt, Artificial Sequence
  Description of Artificial Sequence: Synthetic oligonucleotide
  Antisense strand to SEQ ID NO: 262190
ucuuccacuaucuuucuug

SEQ ID NO: 262192 - RNA, 19 nt, Artificial Sequence
  Description of Artificial Sequence: Synthetic oligonucleotide
  Sense strand starting at position 3112 SEQ ID NO: 3371
ccuuauccagauugugaaa

SEQ ID NO: 262193 - RNA, 19 nt, Artificial Sequence
  Description of Artificial Sequence: Synthetic oligonucleotide
  Antisense strand to SEQ ID NO: 262192
uuucacaaucuggauaagg

SEQ ID NO: 262194 - RNA, 19 nt, Artificial Sequence
  Description of Artificial Sequence: Synthetic oligonucleotide
  Sense strand starting at position 3114 SEQ ID NO: 3371
uuauccagauugugaaauc

SEQ ID NO: 262195 - RNA, 19 nt, Artificial Sequence
  Description of Artificial Sequence: Synthetic oligonucleotide
  Antisense strand to SEQ ID NO: 262194
gauuucacaaucuggauaa

SEQ ID NO: 262196 - RNA, 19 nt, Artificial Sequence
  Description of Artificial Sequence: Synthetic oligonucleotide
  Sense strand starting at position 3131 SEQ ID NO: 3371
uccagauugccggaaacca

SEQ ID NO: 262197 - RNA, 19 nt, Artificial Sequence
  Description of Artificial Sequence: Synthetic oligonucleotide
  Antisense strand to SEQ ID NO: 262196
ugguuuccggcaaucugga

SEQ ID NO: 262198 - RNA, 19 nt, Artificial Sequence
  Description of Artificial Sequence: Synthetic oligonucleotide
  Sense strand starting at position 3142 SEQ ID NO: 3371
ggaaaccagucacaaucaa

SEQ ID NO: 262199 - RNA, 19 nt, Artificial Sequence
  Description of Artificial Sequence: Synthetic oligonucleotide
  Antisense strand to SEQ ID NO: 262198
uugauugugacugguuucc

SEQ ID NO: 262200 - RNA, 19 nt, Artificial Sequence
  Description of Artificial Sequence: Synthetic oligonucleotide
  Sense strand starting at position 3160 SEQ ID NO: 3371
acagcuguacauugguaaa

SEQ ID NO: 262201 - RNA, 19 nt, Artificial Sequence
  Description of Artificial Sequence: Synthetic oligonucleotide
  Antisense strand to SEQ ID NO: 262200
uuuaccaauguacagcugu

SEQ ID NO: 262202 - RNA, 19 nt, Artificial Sequence
  Description of Artificial Sequence: Synthetic oligonucleotide
  Sense strand starting at position 3194 SEQ ID NO: 3371
aguuguuugccuuguucuu

SEQ ID NO: 262203 - RNA, 19 nt, Artificial Sequence
  Description of Artificial Sequence: Synthetic oligonucleotide
  Antisense strand to SEQ ID NO: 262202
aagaacaaggcaaacaacu

SEQ ID NO: 262204 - RNA, 19 nt, Artificial Sequence
  Description of Artificial Sequence: Synthetic oligonucleotide
  Sense strand starting at position 3199 SEQ ID NO: 3371
uuugccuuguucuuggaga

SEQ ID NO: 262205 - RNA, 19 nt, Artificial Sequence
  Description of Artificial Sequence: Synthetic oligonucleotide
  Antisense strand to SEQ ID NO: 262204
ucuccaagaacaaggcaaa

SEQ ID NO: 262206 - RNA, 19 nt, Artificial Sequence
  Description of Artificial Sequence: Synthetic oligonucleotide
  Sense strand starting at position 3201 SEQ ID NO: 3371
ugccuuguucuuggagacu

SEQ ID NO: 262207 - RNA, 19 nt, Artificial Sequence
  Description of Artificial Sequence: Synthetic oligonucleotide
  Antisense strand to SEQ ID NO: 262206
agucuccaagaacaaggca

SEQ ID NO: 262208 - RNA, 19 nt, Artificial Sequence
  Description of Artificial Sequence: Synthetic oligonucleotide
  Sense strand starting at position 3213 SEQ ID NO: 3371
ggagacuguucugccagaa

SEQ ID NO: 262209 - RNA, 19 nt, Artificial Sequence
  Description of Artificial Sequence: Synthetic oligonucleotide
  Antisense strand to SEQ ID NO: 262208
uucuggcagaacagucucc

SEQ ID NO: 262210 - RNA, 19 nt, Artificial Sequence
  Description of Artificial Sequence: Synthetic oligonucleotide
  Sense strand starting at position 3217 SEQ ID NO: 3371
acuguucugccagaagguu

SEQ ID NO: 262211 - RNA, 19 nt, Artificial Sequence
  Description of Artificial Sequence: Synthetic oligonucleotide
  Antisense strand to SEQ ID NO: 262210
aaccuucuggcagaacagu

SEQ ID NO: 262212 - RNA, 19 nt, Artificial Sequence
  Description of Artificial Sequence: Synthetic oligonucleotide
  Sense strand starting at position 3236 SEQ ID NO: 3371
cuccuuugcuaggcaagua

SEQ ID NO: 262213 - RNA, 19 nt, Artificial Sequence
  Description of Artificial Sequence: Synthetic oligonucleotide
  Antisense strand to SEQ ID NO: 262212
uacuugccuagcaaaggag

SEQ ID NO: 262214 - RNA, 19 nt, Artificial Sequence
  Description of Artificial Sequence: Synthetic oligonucleotide
  Sense strand starting at position 3708 SEQ ID NO: 3371
gaaaccaacuguuugagau

SEQ ID NO: 262215 - RNA, 19 nt, Artificial Sequence
  Description of Artificial Sequence: Synthetic oligonucleotide
  Antisense strand to SEQ ID NO: 262214
aucucaaacaguugguuuc

SEQ ID NO: 262216 - RNA, 19 nt, Artificial Sequence
  Description of Artificial Sequence: Synthetic oligonucleotide
  Sense strand starting at position 3712 SEQ ID NO: 3371
ccaacuguuugagauaaua

SEQ ID NO: 262217 - RNA, 19 nt, Artificial Sequence
  Description of Artificial Sequence: Synthetic oligonucleotide
  Antisense strand to SEQ ID NO: 262216
uauuaucucaaacaguugg

SEQ ID NO: 262218 - RNA, 19 nt, Artificial Sequence
  Description of Artificial Sequence: Synthetic oligonucleotide
  Sense strand starting at position 3722 SEQ ID NO: 3371
gagauaauauuugagaguu

SEQ ID NO: 262219 - RNA, 19 nt, Artificial Sequence
  Description of Artificial Sequence: Synthetic oligonucleotide
  Antisense strand to SEQ ID NO: 262218
aacucucaaauauuaucuc

SEQ ID NO: 262220 - RNA, 19 nt, Artificial Sequence
  Description of Artificial Sequence: Synthetic oligonucleotide
  Sense strand starting at position 3952 SEQ ID NO: 3371
cacguaagaggcugguuau

SEQ ID NO: 262221 - RNA, 19 nt, Artificial Sequence
  Description of Artificial Sequence: Synthetic oligonucleotide
  Antisense strand to SEQ ID NO: 262220
auaaccagccucuuacgug

SEQ ID NO: 262222 - RNA, 19 nt, Artificial Sequence
  Description of Artificial Sequence: Synthetic oligonucleotide
  Sense strand starting at position 3959 SEQ ID NO: 3371
gaggcugguuauccuguau

SEQ ID NO: 262223 - RNA, 19 nt, Artificial Sequence
  Description of Artificial Sequence: Synthetic oligonucleotide
  Antisense strand to SEQ ID NO: 262222
auacaggauaaccagccuc

SEQ ID NO: 262224 - RNA, 19 nt, Artificial Sequence
  Description of Artificial Sequence: Synthetic oligonucleotide
  Sense strand starting at position 3966 SEQ ID NO: 3371
guuauccuguaucuccaua

SEQ ID NO: 262225 - RNA, 19 nt, Artificial Sequence
  Description of Artificial Sequence: Synthetic oligonucleotide
  Antisense strand to SEQ ID NO: 262224
uauggagauacaggauaac

SEQ ID NO: 262226 - RNA, 19 nt, Artificial Sequence
  Description of Artificial Sequence: Synthetic oligonucleotide
  Sense strand starting at position 3971 SEQ ID NO: 3371
ccuguaucuccauaucaug

SEQ ID NO: 262227 - RNA, 19 nt, Artificial Sequence
  Description of Artificial Sequence: Synthetic oligonucleotide
  Antisense strand to SEQ ID NO: 262226
caugauauggagauacagg

SEQ ID NO: 262228 - RNA, 19 nt, Artificial Sequence
  Description of Artificial Sequence: Synthetic oligonucleotide
  Sense strand starting at position 3976 SEQ ID NO: 3371
aucuccauaucauggauga

SEQ ID NO: 262229 - RNA, 19 nt, Artificial Sequence
  Description of Artificial Sequence: Synthetic oligonucleotide
  Antisense strand to SEQ ID NO: 262228
ucauccaugauauggagau

SEQ ID NO: 262230 - RNA, 19 nt, Artificial Sequence
  Description of Artificial Sequence: Synthetic oligonucleotide
  Sense strand starting at position 3977 SEQ ID NO: 3371
ucuccauaucauggaugaa

SEQ ID NO: 262231 - RNA, 19 nt, Artificial Sequence
  Description of Artificial Sequence: Synthetic oligonucleotide
  Antisense strand to SEQ ID NO: 262230
uucauccaugauauggaga

SEQ ID NO: 262232 - RNA, 19 nt, Artificial Sequence
  Description of Artificial Sequence: Synthetic oligonucleotide
  Sense strand starting at position 24 SEQ ID NO: 3372
ucuugaauacccuggaauc

SEQ ID NO: 262233 - RNA, 19 nt, Artificial Sequence
  Description of Artificial Sequence: Synthetic oligonucleotide
  Antisense strand to SEQ ID NO: 262232
gauuccaggguauucaaga

SEQ ID NO: 262234 - RNA, 19 nt, Artificial Sequence
  Description of Artificial Sequence: Synthetic oligonucleotide
  Sense strand starting at position 55 SEQ ID NO: 3372
ggaggugaaauguauacgu

SEQ ID NO: 262235 - RNA, 19 nt, Artificial Sequence
  Description of Artificial Sequence: Synthetic oligonucleotide
  Antisense strand to SEQ ID NO: 262234
acguauacauuucaccucc

SEQ ID NO: 262236 - RNA, 19 nt, Artificial Sequence
  Description of Artificial Sequence: Synthetic oligonucleotide
  Sense strand starting at position 57 SEQ ID NO: 3372
aggugaaauguauacguuu

SEQ ID NO: 262237 - RNA, 19 nt, Artificial Sequence
  Description of Artificial Sequence: Synthetic oligonucleotide
  Antisense strand to SEQ ID NO: 262236
aaacguauacauuucaccu

SEQ ID NO: 262238 - RNA, 19 nt, Artificial Sequence
  Description of Artificial Sequence: Synthetic oligonucleotide
  Sense strand starting at position 228 SEQ ID NO: 3372
uaaccaggaguuuguuauu

SEQ ID NO: 262239 - RNA, 19 nt, Artificial Sequence
  Description of Artificial Sequence: Synthetic oligonucleotide
  Antisense strand to SEQ ID NO: 262238
aauaacaaacuccugguua

SEQ ID NO: 262240 - RNA, 19 nt, Artificial Sequence
  Description of Artificial Sequence: Synthetic oligonucleotide
  Sense strand starting at position 233 SEQ ID NO: 3372
aggaguuuguuauugcgga

SEQ ID NO: 262241 - RNA, 19 nt, Artificial Sequence
  Description of Artificial Sequence: Synthetic oligonucleotide
  Antisense strand to SEQ ID NO: 262240
uccgcaauaacaaacuccu

SEQ ID NO: 262242 - RNA, 19 nt, Artificial Sequence
  Description of Artificial Sequence: Synthetic oligonucleotide
  Sense strand starting at position 311 SEQ ID NO: 3372
gcgggaaagggucgcuuaa

SEQ ID NO: 262243 - RNA, 19 nt, Artificial Sequence
  Description of Artificial Sequence: Synthetic oligonucleotide
  Antisense strand to SEQ ID NO: 262242
uuaagcgacccuuucccgc

SEQ ID NO: 262244 - RNA, 19 nt, Artificial Sequence
  Description of Artificial Sequence: Synthetic oligonucleotide
  Sense strand starting at position 313 SEQ ID NO: 3372
gggaaagggucgcuuaaac

SEQ ID NO: 262245 - RNA, 19 nt, Artificial Sequence
  Description of Artificial Sequence: Synthetic oligonucleotide
  Antisense strand to SEQ ID NO: 262244
guuuaagcgacccuuuccc

SEQ ID NO: 262246 - RNA, 19 nt, Artificial Sequence
  Description of Artificial Sequence: Synthetic oligonucleotide
  Sense strand starting at position 367 SEQ ID NO: 3372
agaauuccuuuaggacacu

SEQ ID NO: 262247 - RNA, 19 nt, Artificial Sequence
  Description of Artificial Sequence: Synthetic oligonucleotide
  Antisense strand to SEQ ID NO: 262246
aguguccuaaaggaauucu

SEQ ID NO: 262248 - RNA, 19 nt, Artificial Sequence
  Description of Artificial Sequence: Synthetic oligonucleotide
  Sense strand starting at position 540 SEQ ID NO: 3372
ggugaaacuccauggugaa

SEQ ID NO: 262249 - RNA, 19 nt, Artificial Sequence
  Description of Artificial Sequence: Synthetic oligonucleotide
  Antisense strand to SEQ ID NO: 262248
uucaccauggaguuucacc

SEQ ID NO: 262250 - RNA, 19 nt, Artificial Sequence
  Description of Artificial Sequence: Synthetic oligonucleotide
  Sense strand starting at position 541 SEQ ID NO: 3372
gugaaacuccauggugaaa

SEQ ID NO: 262251 - RNA, 19 nt, Artificial Sequence
  Description of Artificial Sequence: Synthetic oligonucleotide
  Antisense strand to SEQ ID NO: 262250
uuucaccauggaguuucac

SEQ ID NO: 262252 - RNA, 19 nt, Artificial Sequence
  Description of Artificial Sequence: Synthetic oligonucleotide
  Sense strand starting at position 737 SEQ ID NO: 3372
acuggcucuuaucuugaau

SEQ ID NO: 262253 - RNA, 19 nt, Artificial Sequence
  Description of Artificial Sequence: Synthetic oligonucleotide
  Antisense strand to SEQ ID NO: 262252
auucaagauaagagccagu

SEQ ID NO: 262254 - RNA, 19 nt, Artificial Sequence
  Description of Artificial Sequence: Synthetic oligonucleotide
  Sense strand starting at position 773 SEQ ID NO: 3372
ccuuuauuucuucguuugu

SEQ ID NO: 262255 - RNA, 19 nt, Artificial Sequence
  Description of Artificial Sequence: Synthetic oligonucleotide
  Antisense strand to SEQ ID NO: 262254
acaaacgaagaaauaaagg

SEQ ID NO: 262256 - RNA, 19 nt, Artificial Sequence
  Description of Artificial Sequence: Synthetic oligonucleotide
  Sense strand starting at position 774 SEQ ID NO: 3372
cuuuauuucuucguuuguu

SEQ ID NO: 262257 - RNA, 19 nt, Artificial Sequence
  Description of Artificial Sequence: Synthetic oligonucleotide
  Antisense strand to SEQ ID NO: 262256
aacaaacgaagaaauaaag

SEQ ID NO: 262258 - RNA, 19 nt, Artificial Sequence
  Description of Artificial Sequence: Synthetic oligonucleotide
  Sense strand starting at position 802 SEQ ID NO: 3372
accauuaaacuuuguguuu

SEQ ID NO: 262259 - RNA, 19 nt, Artificial Sequence
  Description of Artificial Sequence: Synthetic oligonucleotide
  Antisense strand to SEQ ID NO: 262258
aaacacaaaguuuaauggu

SEQ ID NO: 262260 - RNA, 19 nt, Artificial Sequence
  Description of Artificial Sequence: Synthetic oligonucleotide
  Sense strand starting at position 803 SEQ ID NO: 3372
ccauuaaacuuuguguuua

SEQ ID NO: 262261 - RNA, 19 nt, Artificial Sequence
  Description of Artificial Sequence: Synthetic oligonucleotide
  Antisense strand to SEQ ID NO: 262260
uaaacacaaaguuuaaugg

SEQ ID NO: 262262 - RNA, 19 nt, Artificial Sequence
  Description of Artificial Sequence: Synthetic oligonucleotide
  Sense strand starting at position 814 SEQ ID NO: 3372
uguguuuaguaucugacaa

SEQ ID NO: 262263 - RNA, 19 nt, Artificial Sequence
  Description of Artificial Sequence: Synthetic oligonucleotide
  Antisense strand to SEQ ID NO: 262262
uugucagauacuaaacaca

SEQ ID NO: 262264 - RNA, 19 nt, Artificial Sequence
  Description of Artificial Sequence: Synthetic oligonucleotide
  Sense strand starting at position 815 SEQ ID NO: 3372
guguuuaguaucugacaaa

SEQ ID NO: 262265 - RNA, 19 nt, Artificial Sequence
  Description of Artificial Sequence: Synthetic oligonucleotide
  Antisense strand to SEQ ID NO: 262264
uuugucagauacuaaacac

SEQ ID NO: 262266 - RNA, 19 nt, Artificial Sequence
  Description of Artificial Sequence: Synthetic oligonucleotide
  Sense strand starting at position 816 SEQ ID NO: 3372
uguuuaguaucugacaaac

SEQ ID NO: 262267 - RNA, 19 nt, Artificial Sequence
  Description of Artificial Sequence: Synthetic oligonucleotide
  Antisense strand to SEQ ID NO: 262266
guuugucagauacuaaaca

SEQ ID NO: 262268 - RNA, 19 nt, Artificial Sequence
  Description of Artificial Sequence: Synthetic oligonucleotide
  Sense strand starting at position 1018 SEQ ID NO: 3372
gcaggauaaucucuugauc

SEQ ID NO: 262269 - RNA, 19 nt, Artificial Sequence
  Description of Artificial Sequence: Synthetic oligonucleotide
  Antisense strand to SEQ ID NO: 262268
gaucaagagauuauccugc

SEQ ID NO: 262270 - RNA, 19 nt, Artificial Sequence
  Description of Artificial Sequence: Synthetic oligonucleotide
  Sense strand starting at position 1020 SEQ ID NO: 3372
aggauaaucucuugaucca

SEQ ID NO: 262271 - RNA, 19 nt, Artificial Sequence
  Description of Artificial Sequence: Synthetic oligonucleotide
  Antisense strand to SEQ ID NO: 262270
uggaucaagagauuauccu

SEQ ID NO: 262272 - RNA, 19 nt, Artificial Sequence
  Description of Artificial Sequence: Synthetic oligonucleotide
  Sense strand starting at position 1123 SEQ ID NO: 3372
auauguaucuggcaaacag

SEQ ID NO: 262273 - RNA, 19 nt, Artificial Sequence
  Description of Artificial Sequence: Synthetic oligonucleotide
  Antisense strand to SEQ ID NO: 262272
cuguuugccagauacauau

SEQ ID NO: 262274 - RNA, 19 nt, Artificial Sequence
  Description of Artificial Sequence: Synthetic oligonucleotide
  Sense strand starting at position 1448 SEQ ID NO: 3372
ccuggacuugagcgaaacu

SEQ ID NO: 262275 - RNA, 19 nt, Artificial Sequence
  Description of Artificial Sequence: Synthetic oligonucleotide
  Antisense strand to SEQ ID NO: 262274
aguuucgcucaaguccagg

SEQ ID NO: 262276 - RNA, 19 nt, Artificial Sequence
  Description of Artificial Sequence: Synthetic oligonucleotide
  Sense strand starting at position 2187 SEQ ID NO: 3372
cgcgucuccucccuccaaa

SEQ ID NO: 262277 - RNA, 19 nt, Artificial Sequence
  Description of Artificial Sequence: Synthetic oligonucleotide
  Antisense strand to SEQ ID NO: 262276
uuuggagggaggagacgcg

SEQ ID NO: 262278 - RNA, 19 nt, Artificial Sequence
  Description of Artificial Sequence: Synthetic oligonucleotide
  Sense strand starting at position 3242 SEQ ID NO: 3372
gcgugaccuccugccguua

SEQ ID NO: 262279 - RNA, 19 nt, Artificial Sequence
  Description of Artificial Sequence: Synthetic oligonucleotide
  Antisense strand to SEQ ID NO: 262278
uaacggcaggaggucacgc

SEQ ID NO: 262280 - RNA, 19 nt, Artificial Sequence
  Description of Artificial Sequence: Synthetic oligonucleotide
  Sense strand starting at position 3320 SEQ ID NO: 3372
cacguuguauucucaagau

SEQ ID NO: 262281 - RNA, 19 nt, Artificial Sequence
  Description of Artificial Sequence: Synthetic oligonucleotide
  Antisense strand to SEQ ID NO: 262280
aucuugagaauacaacgug

SEQ ID NO: 262282 - RNA, 19 nt, Artificial Sequence
  Description of Artificial Sequence: Synthetic oligonucleotide
  Sense strand starting at position 3330 SEQ ID NO: 3372
ucucaagauuuguauagag

SEQ ID NO: 262283 - RNA, 19 nt, Artificial Sequence
  Description of Artificial Sequence: Synthetic oligonucleotide
  Antisense strand to SEQ ID NO: 262282
cucuauacaaaucuugaga

SEQ ID NO: 262284 - RNA, 19 nt, Artificial Sequence
  Description of Artificial Sequence: Synthetic oligonucleotide
  Sense strand starting at position 3352 SEQ ID NO: 3372
gcacuugguaaacgcuaaa

SEQ ID NO: 262285 - RNA, 19 nt, Artificial Sequence
  Description of Artificial Sequence: Synthetic oligonucleotide
  Antisense strand to SEQ ID NO: 262284
uuuagcguuuaccaagugc

SEQ ID NO: 262286 - RNA, 19 nt, Artificial Sequence
  Description of Artificial Sequence: Synthetic oligonucleotide
  Sense strand starting at position 3355 SEQ ID NO: 3372
cuugguaaacgcuaaauga

SEQ ID NO: 262287 - RNA, 19 nt, Artificial Sequence
  Description of Artificial Sequence: Synthetic oligonucleotide
  Antisense strand to SEQ ID NO: 262286
ucauuuagcguuuaccaag

SEQ ID NO: 262288 - RNA, 19 nt, Artificial Sequence
  Description of Artificial Sequence: Synthetic oligonucleotide
  Sense strand starting at position 3363 SEQ ID NO: 3372
acgcuaaaugaauauugua

SEQ ID NO: 262289 - RNA, 19 nt, Artificial Sequence
  Description of Artificial Sequence: Synthetic oligonucleotide
  Antisense strand to SEQ ID NO: 262288
uacaauauucauuuagcgu

SEQ ID NO: 262290 - RNA, 19 nt, Artificial Sequence
  Description of Artificial Sequence: Synthetic oligonucleotide
  Sense strand starting at position 3381 SEQ ID NO: 3372
aauagcauucguuagcgau

SEQ ID NO: 262291 - RNA, 19 nt, Artificial Sequence
  Description of Artificial Sequence: Synthetic oligonucleotide
  Antisense strand to SEQ ID NO: 262290
aucgcuaacgaaugcuauu

SEQ ID NO: 262292 - RNA, 19 nt, Artificial Sequence
  Description of Artificial Sequence: Synthetic oligonucleotide
  Sense strand starting at position 3399 SEQ ID NO: 3372
ugcuguuguguauggugaa

SEQ ID NO: 262293 - RNA, 19 nt, Artificial Sequence
  Description of Artificial Sequence: Synthetic oligonucleotide
  Antisense strand to SEQ ID NO: 262292
uucaccauacacaacagca

SEQ ID NO: 262294 - RNA, 19 nt, Artificial Sequence
  Description of Artificial Sequence: Synthetic oligonucleotide
  Sense strand starting at position 3449 SEQ ID NO: 3372
aggcacugaucccagcauu

SEQ ID NO: 262295 - RNA, 19 nt, Artificial Sequence
  Description of Artificial Sequence: Synthetic oligonucleotide
  Antisense strand to SEQ ID NO: 262294
aaugcugggaucagugccu

SEQ ID NO: 262296 - RNA, 19 nt, Artificial Sequence
  Description of Artificial Sequence: Synthetic oligonucleotide
  Sense strand starting at position 3494 SEQ ID NO: 3372
cucaauaaccugugacgua

SEQ ID NO: 262297 - RNA, 19 nt, Artificial Sequence
  Description of Artificial Sequence: Synthetic oligonucleotide
  Antisense strand to SEQ ID NO: 262296
uacgucacagguuauugag

SEQ ID NO: 262298 - RNA, 19 nt, Artificial Sequence
  Description of Artificial Sequence: Synthetic oligonucleotide
  Sense strand starting at position 3495 SEQ ID NO: 3372
ucaauaaccugugacguaa

SEQ ID NO: 262299 - RNA, 19 nt, Artificial Sequence
  Description of Artificial Sequence: Synthetic oligonucleotide
  Antisense strand to SEQ ID NO: 262298
uuacgucacagguuauuga

SEQ ID NO: 262300 - RNA, 19 nt, Artificial Sequence
  Description of Artificial Sequence: Synthetic oligonucleotide
  Sense strand starting at position 3503 SEQ ID NO: 3372
cugugacguaaguacuuaa

SEQ ID NO: 262301 - RNA, 19 nt, Artificial Sequence
  Description of Artificial Sequence: Synthetic oligonucleotide
  Antisense strand to SEQ ID NO: 262300
uuaaguacuuacgucacag

SEQ ID NO: 262302 - RNA, 19 nt, Artificial Sequence
  Description of Artificial Sequence: Synthetic oligonucleotide
  Sense strand starting at position 3524 SEQ ID NO: 3372
gccacaguccguuaucuga

SEQ ID NO: 262303 - RNA, 19 nt, Artificial Sequence
  Description of Artificial Sequence: Synthetic oligonucleotide
  Antisense strand to SEQ ID NO: 262302
ucagauaacggacuguggc

SEQ ID NO: 262304 - RNA, 19 nt, Artificial Sequence
  Description of Artificial Sequence: Synthetic oligonucleotide
  Sense strand starting at position 3531 SEQ ID NO: 3372
uccguuaucugagcccuuu

SEQ ID NO: 262305 - RNA, 19 nt, Artificial Sequence
  Description of Artificial Sequence: Synthetic oligonucleotide
  Antisense strand to SEQ ID NO: 262304
aaagggcucagauaacgga

SEQ ID NO: 262306 - RNA, 19 nt, Artificial Sequence
  Description of Artificial Sequence: Synthetic oligonucleotide
  Sense strand starting at position 3584 SEQ ID NO: 3372
uuagaaagcuaagagacua

SEQ ID NO: 262307 - RNA, 19 nt, Artificial Sequence
  Description of Artificial Sequence: Synthetic oligonucleotide
  Antisense strand to SEQ ID NO: 262306
uagucucuuagcuuucuaa

SEQ ID NO: 262308 - RNA, 19 nt, Artificial Sequence
  Description of Artificial Sequence: Synthetic oligonucleotide
  Sense strand starting at position 3911 SEQ ID NO: 3372
cuaagaggcuaugagaaua

SEQ ID NO: 262309 - RNA, 19 nt, Artificial Sequence
  Description of Artificial Sequence: Synthetic oligonucleotide
  Antisense strand to SEQ ID NO: 262308
uauucucauagccucuuag

SEQ ID NO: 262310 - RNA, 19 nt, Artificial Sequence
  Description of Artificial Sequence: Synthetic oligonucleotide
  Sense strand starting at position 3949 SEQ ID NO: 3372
caagaaagauaguggaaga

SEQ ID NO: 262311 - RNA, 19 nt, Artificial Sequence
  Description of Artificial Sequence: Synthetic oligonucleotide
  Antisense strand to SEQ ID NO: 262310
ucuuccacuaucuuucuug

SEQ ID NO: 262312 - RNA, 19 nt, Artificial Sequence
  Description of Artificial Sequence: Synthetic oligonucleotide
  Sense strand starting at position 54 SEQ ID NO: 3373
cuuagaauucuuugggaau

SEQ ID NO: 262313 - RNA, 19 nt, Artificial Sequence
  Description of Artificial Sequence: Synthetic oligonucleotide
  Antisense strand to SEQ ID NO: 262312
auucccaaagaauucuaag

SEQ ID NO: 262314 - RNA, 19 nt, Artificial Sequence
  Description of Artificial Sequence: Synthetic oligonucleotide
  Sense strand starting at position 65 SEQ ID NO: 3373
uugggaaucugaguaguua

SEQ ID NO: 262315 - RNA, 19 nt, Artificial Sequence
  Description of Artificial Sequence: Synthetic oligonucleotide
  Antisense strand to SEQ ID NO: 262314
uaacuacucagauucccaa

SEQ ID NO: 262316 - RNA, 19 nt, Artificial Sequence
  Description of Artificial Sequence: Synthetic oligonucleotide
  Sense strand starting at position 66 SEQ ID NO: 3373
ugggaaucugaguaguuac

SEQ ID NO: 262317 - RNA, 19 nt, Artificial Sequence
  Description of Artificial Sequence: Synthetic oligonucleotide
  Antisense strand to SEQ ID NO: 262316
guaacuacucagauuccca

SEQ ID NO: 262318 - RNA, 19 nt, Artificial Sequence
  Description of Artificial Sequence: Synthetic oligonucleotide
  Sense strand starting at position 69 SEQ ID NO: 3373
gaaucugaguaguuacacu

SEQ ID NO: 262319 - RNA, 19 nt, Artificial Sequence
  Description of Artificial Sequence: Synthetic oligonucleotide
  Antisense strand to SEQ ID NO: 262318
aguguaacuacucagauuc

SEQ ID NO: 262320 - RNA, 19 nt, Artificial Sequence
  Description of Artificial Sequence: Synthetic oligonucleotide
  Sense strand starting at position 101 SEQ ID NO: 3373
uaccaaucagucuggaaga

SEQ ID NO: 262321 - RNA, 19 nt, Artificial Sequence
  Description of Artificial Sequence: Synthetic oligonucleotide
  Antisense strand to SEQ ID NO: 262320
ucuuccagacugauuggua

SEQ ID NO: 262322 - RNA, 19 nt, Artificial Sequence
  Description of Artificial Sequence: Synthetic oligonucleotide
  Sense strand starting at position 172 SEQ ID NO: 3373
cuuacugagccucaggaau

SEQ ID NO: 262323 - RNA, 19 nt, Artificial Sequence
  Description of Artificial Sequence: Synthetic oligonucleotide
  Antisense strand to SEQ ID NO: 262322
auuccugaggcucaguaag

SEQ ID NO: 262324 - RNA, 19 nt, Artificial Sequence
  Description of Artificial Sequence: Synthetic oligonucleotide
  Sense strand starting at position 401 SEQ ID NO: 3373
guaaaucugcuccagaccu

SEQ ID NO: 262325 - RNA, 19 nt, Artificial Sequence
  Description of Artificial Sequence: Synthetic oligonucleotide
  Antisense strand to SEQ ID NO: 262324
aggucuggagcagauuuac

SEQ ID NO: 262326 - RNA, 19 nt, Artificial Sequence
  Description of Artificial Sequence: Synthetic oligonucleotide
  Sense strand starting at position 414 SEQ ID NO: 3373
agaccuauuugauagcaga

SEQ ID NO: 262327 - RNA, 19 nt, Artificial Sequence
  Description of Artificial Sequence: Synthetic oligonucleotide
  Antisense strand to SEQ ID NO: 262326
ucugcuaucaaauaggucu

SEQ ID NO: 262328 - RNA, 19 nt, Artificial Sequence
  Description of Artificial Sequence: Synthetic oligonucleotide
  Sense strand starting at position 505 SEQ ID NO: 3373
uggagucuuguuuaaagua

SEQ ID NO: 262329 - RNA, 19 nt, Artificial Sequence
  Description of Artificial Sequence: Synthetic oligonucleotide
  Antisense strand to SEQ ID NO: 262328
uacuuuaaacaagacucca

SEQ ID NO: 262330 - RNA, 19 nt, Artificial Sequence
  Description of Artificial Sequence: Synthetic oligonucleotide
  Sense strand starting at position 601 SEQ ID NO: 3373
uuucucuuuccuggagaaa

SEQ ID NO: 262331 - RNA, 19 nt, Artificial Sequence
  Description of Artificial Sequence: Synthetic oligonucleotide
  Antisense strand to SEQ ID NO: 262330
uuucuccaggaaagagaaa

SEQ ID NO: 262332 - RNA, 19 nt, Artificial Sequence
  Description of Artificial Sequence: Synthetic oligonucleotide
  Sense strand starting at position 655 SEQ ID NO: 3373
gaaauauguuaucugucag

SEQ ID NO: 262333 - RNA, 19 nt, Artificial Sequence
  Description of Artificial Sequence: Synthetic oligonucleotide
  Antisense strand to SEQ ID NO: 262332
cugacagauaacauauuuc

SEQ ID NO: 262334 - RNA, 19 nt, Artificial Sequence
  Description of Artificial Sequence: Synthetic oligonucleotide
  Sense strand starting at position 728 SEQ ID NO: 3373
uuuagaagguuauuaagca

SEQ ID NO: 262335 - RNA, 19 nt, Artificial Sequence
  Description of Artificial Sequence: Synthetic oligonucleotide
  Antisense strand to SEQ ID NO: 262334
ugcuuaauaaccuucuaaa

SEQ ID NO: 262336 - RNA, 19 nt, Artificial Sequence
  Description of Artificial Sequence: Synthetic oligonucleotide
  Sense strand starting at position 774 SEQ ID NO: 3373
ggguacucucaauaauagu

SEQ ID NO: 262337 - RNA, 19 nt, Artificial Sequence
  Description of Artificial Sequence: Synthetic oligonucleotide
  Antisense strand to SEQ ID NO: 262336
acuauuauugagaguaccc

SEQ ID NO: 262338 - RNA, 19 nt, Artificial Sequence
  Description of Artificial Sequence: Synthetic oligonucleotide
  Sense strand starting at position 785 SEQ ID NO: 3373
auaauaguacuauggucaa

SEQ ID NO: 262339 - RNA, 19 nt, Artificial Sequence
  Description of Artificial Sequence: Synthetic oligonucleotide
  Antisense strand to SEQ ID NO: 262338
uugaccauaguacuauuau

SEQ ID NO: 262340 - RNA, 19 nt, Artificial Sequence
  Description of Artificial Sequence: Synthetic oligonucleotide
  Sense strand starting at position 789 SEQ ID NO: 3373
uaguacuauggucaaggua

SEQ ID NO: 262341 - RNA, 19 nt, Artificial Sequence
  Description of Artificial Sequence: Synthetic oligonucleotide
  Antisense strand to SEQ ID NO: 262340
uaccuugaccauaguacua

SEQ ID NO: 262342 - RNA, 19 nt, Artificial Sequence
  Description of Artificial Sequence: Synthetic oligonucleotide
  Sense strand starting at position 792 SEQ ID NO: 3373
uacuauggucaagguacaa

SEQ ID NO: 262343 - RNA, 19 nt, Artificial Sequence
  Description of Artificial Sequence: Synthetic oligonucleotide
  Antisense strand to SEQ ID NO: 262342
uuguaccuugaccauagua

SEQ ID NO: 262344 - RNA, 19 nt, Artificial Sequence
  Description of Artificial Sequence: Synthetic oligonucleotide
  Sense strand starting at position 813 SEQ ID NO: 3373
aggacuuugugagccauaa

SEQ ID NO: 262345 - RNA, 19 nt, Artificial Sequence
  Description of Artificial Sequence: Synthetic oligonucleotide
  Antisense strand to SEQ ID NO: 262344
uuauggcucacaaaguccu

SEQ ID NO: 262346 - RNA, 19 nt, Artificial Sequence
  Description of Artificial Sequence: Synthetic oligonucleotide
  Sense strand starting at position 817 SEQ ID NO: 3373
cuuugugagccauaaccua

SEQ ID NO: 262347 - RNA, 19 nt, Artificial Sequence
  Description of Artificial Sequence: Synthetic oligonucleotide
  Antisense strand to SEQ ID NO: 262346
uagguuauggcucacaaag

SEQ ID NO: 262348 - RNA, 19 nt, Artificial Sequence
  Description of Artificial Sequence: Synthetic oligonucleotide
  Sense strand starting at position 1458 SEQ ID NO: 3373
agcagaacuguugauauac

SEQ ID NO: 262349 - RNA, 19 nt, Artificial Sequence
  Description of Artificial Sequence: Synthetic oligonucleotide
  Antisense strand to SEQ ID NO: 262348
guauaucaacaguucugcu

SEQ ID NO: 262350 - RNA, 19 nt, Artificial Sequence
  Description of Artificial Sequence: Synthetic oligonucleotide
  Sense strand starting at position 1520 SEQ ID NO: 3373
uuccguuguagcgugauaa

SEQ ID NO: 262351 - RNA, 19 nt, Artificial Sequence
  Description of Artificial Sequence: Synthetic oligonucleotide
  Antisense strand to SEQ ID NO: 262350
uuaucacgcuacaacggaa

SEQ ID NO: 262352 - RNA, 19 nt, Artificial Sequence
  Description of Artificial Sequence: Synthetic oligonucleotide
  Sense strand starting at position 1554 SEQ ID NO: 3373
gagccaucgcugcugucau

SEQ ID NO: 262353 - RNA, 19 nt, Artificial Sequence
  Description of Artificial Sequence: Synthetic oligonucleotide
  Antisense strand to SEQ ID NO: 262352
augacagcagcgauggcuc

SEQ ID NO: 262354 - RNA, 19 nt, Artificial Sequence
  Description of Artificial Sequence: Synthetic oligonucleotide
  Sense strand starting at position 1782 SEQ ID NO: 3373
ugcucacuguucucauuua

SEQ ID NO: 262355 - RNA, 19 nt, Artificial Sequence
  Description of Artificial Sequence: Synthetic oligonucleotide
  Antisense strand to SEQ ID NO: 262354
uaaaugagaacagugagca

SEQ ID NO: 262356 - RNA, 19 nt, Artificial Sequence
  Description of Artificial Sequence: Synthetic oligonucleotide
  Sense strand starting at position 2243 SEQ ID NO: 3373
cuauguuggcaauaauaua

SEQ ID NO: 262357 - RNA, 19 nt, Artificial Sequence
  Description of Artificial Sequence: Synthetic oligonucleotide
  Antisense strand to SEQ ID NO: 262356
uauauuauugccaacauag

SEQ ID NO: 262358 - RNA, 19 nt, Artificial Sequence
  Description of Artificial Sequence: Synthetic oligonucleotide
  Sense strand starting at position 2447 SEQ ID NO: 3373
gugccaaguaauuaggaaa

SEQ ID NO: 262359 - RNA, 19 nt, Artificial Sequence
  Description of Artificial Sequence: Synthetic oligonucleotide
  Antisense strand to SEQ ID NO: 262358
uuuccuaauuacuuggcac

SEQ ID NO: 262360 - RNA, 19 nt, Artificial Sequence
  Description of Artificial Sequence: Synthetic oligonucleotide
  Sense strand starting at position 2501 SEQ ID NO: 3373
uuaugauacuaguugagaa

SEQ ID NO: 262361 - RNA, 19 nt, Artificial Sequence
  Description of Artificial Sequence: Synthetic oligonucleotide
  Antisense strand to SEQ ID NO: 262360
uucucaacuaguaucauaa

SEQ ID NO: 262362 - RNA, 19 nt, Artificial Sequence
  Description of Artificial Sequence: Synthetic oligonucleotide
  Sense strand starting at position 2591 SEQ ID NO: 3373
uaacauauugugcauggaa

SEQ ID NO: 262363 - RNA, 19 nt, Artificial Sequence
  Description of Artificial Sequence: Synthetic oligonucleotide
  Antisense strand to SEQ ID NO: 262362
uuccaugcacaauauguua

SEQ ID NO: 262364 - RNA, 19 nt, Artificial Sequence
  Description of Artificial Sequence: Synthetic oligonucleotide
  Sense strand starting at position 2671 SEQ ID NO: 3373
gugcuauuauuuccuauuc

SEQ ID NO: 262365 - RNA, 19 nt, Artificial Sequence
  Description of Artificial Sequence: Synthetic oligonucleotide
  Antisense strand to SEQ ID NO: 262364
gaauaggaaauaauagcac

SEQ ID NO: 262366 - RNA, 19 nt, Artificial Sequence
  Description of Artificial Sequence: Synthetic oligonucleotide
  Sense strand starting at position 2805 SEQ ID NO: 3373
acuggcauggcagagauua

SEQ ID NO: 262367 - RNA, 19 nt, Artificial Sequence
  Description of Artificial Sequence: Synthetic oligonucleotide
  Antisense strand to SEQ ID NO: 262366
uaaucucugccaugccagu

SEQ ID NO: 262368 - RNA, 19 nt, Artificial Sequence
  Description of Artificial Sequence: Synthetic oligonucleotide
  Sense strand starting at position 2807 SEQ ID NO: 3373
uggcauggcagagauuauu

SEQ ID NO: 262369 - RNA, 19 nt, Artificial Sequence
  Description of Artificial Sequence: Synthetic oligonucleotide
  Antisense strand to SEQ ID NO: 262368
aauaaucucugccaugcca

SEQ ID NO: 262370 - RNA, 19 nt, Artificial Sequence
  Description of Artificial Sequence: Synthetic oligonucleotide
  Sense strand starting at position 2846 SEQ ID NO: 3373
agcaguaaauauccagaga

SEQ ID NO: 262371 - RNA, 19 nt, Artificial Sequence
  Description of Artificial Sequence: Synthetic oligonucleotide
  Antisense strand to SEQ ID NO: 262370
ucucuggauauuuacugcu

SEQ ID NO: 262372 - RNA, 19 nt, Artificial Sequence
  Description of Artificial Sequence: Synthetic oligonucleotide
  Sense strand starting at position 3093 SEQ ID NO: 3373
ggccucuguagggaucaaa

SEQ ID NO: 262373 - RNA, 19 nt, Artificial Sequence
  Description of Artificial Sequence: Synthetic oligonucleotide
  Antisense strand to SEQ ID NO: 262372
uuugaucccuacagaggcc

SEQ ID NO: 262374 - RNA, 19 nt, Artificial Sequence
  Description of Artificial Sequence: Synthetic oligonucleotide
  Sense strand starting at position 3193 SEQ ID NO: 3373
agaagauauuucuaggcca

SEQ ID NO: 262375 - RNA, 19 nt, Artificial Sequence
  Description of Artificial Sequence: Synthetic oligonucleotide
  Antisense strand to SEQ ID NO: 262374
uggccuagaaauaucuucu

SEQ ID NO: 262376 - RNA, 19 nt, Artificial Sequence
  Description of Artificial Sequence: Synthetic oligonucleotide
  Sense strand starting at position 3290 SEQ ID NO: 3373
agagaauacaguggcucau

SEQ ID NO: 262377 - RNA, 19 nt, Artificial Sequence
  Description of Artificial Sequence: Synthetic oligonucleotide
  Antisense strand to SEQ ID NO: 262376
augagccacuguauucucu

SEQ ID NO: 262378 - RNA, 19 nt, Artificial Sequence
  Description of Artificial Sequence: Synthetic oligonucleotide
  Sense strand starting at position 3292 SEQ ID NO: 3373
agaauacaguggcucauau

SEQ ID NO: 262379 - RNA, 19 nt, Artificial Sequence
  Description of Artificial Sequence: Synthetic oligonucleotide
  Antisense strand to SEQ ID NO: 262378
auaugagccacuguauucu

SEQ ID NO: 262380 - RNA, 19 nt, Artificial Sequence
  Description of Artificial Sequence: Synthetic oligonucleotide
  Sense strand starting at position 3434 SEQ ID NO: 3373
guaucuacaucucuugaga

SEQ ID NO: 262381 - RNA, 19 nt, Artificial Sequence
  Description of Artificial Sequence: Synthetic oligonucleotide
  Antisense strand to SEQ ID NO: 262380
ucucaagagauguagauac

SEQ ID NO: 262382 - RNA, 19 nt, Artificial Sequence
  Description of Artificial Sequence: Synthetic oligonucleotide
  Sense strand starting at position 3697 SEQ ID NO: 3373
cuuagaauuguauagcagu

SEQ ID NO: 262383 - RNA, 19 nt, Artificial Sequence
  Description of Artificial Sequence: Synthetic oligonucleotide
  Antisense strand to SEQ ID NO: 262382
acugcuauacaauucuaag

SEQ ID NO: 262384 - RNA, 19 nt, Artificial Sequence
  Description of Artificial Sequence: Synthetic oligonucleotide
  Sense strand starting at position 3866 SEQ ID NO: 3373
auguaaauugcugaauaug

SEQ ID NO: 262385 - RNA, 19 nt, Artificial Sequence
  Description of Artificial Sequence: Synthetic oligonucleotide
  Antisense strand to SEQ ID NO: 262384
cauauucagcaauuuacau

SEQ ID NO: 262386 - RNA, 19 nt, Artificial Sequence
  Description of Artificial Sequence: Synthetic oligonucleotide
  Sense strand starting at position 3923 SEQ ID NO: 3373
gagugcuugcucuuuguuu

SEQ ID NO: 262387 - RNA, 19 nt, Artificial Sequence
  Description of Artificial Sequence: Synthetic oligonucleotide
  Antisense strand to SEQ ID NO: 262386
aaacaaagagcaagcacuc

SEQ ID NO: 262388 - RNA, 19 nt, Artificial Sequence
  Description of Artificial Sequence: Synthetic oligonucleotide
  Sense strand starting at position 3944 SEQ ID NO: 3373
ugcagaaggguuugagauu

SEQ ID NO: 262389 - RNA, 19 nt, Artificial Sequence
  Description of Artificial Sequence: Synthetic oligonucleotide
  Antisense strand to SEQ ID NO: 262388
aaucucaaacccuucugca

SEQ ID NO: 262390 - RNA, 19 nt, Artificial Sequence
  Description of Artificial Sequence: Synthetic oligonucleotide
  Sense strand starting at position 3950 SEQ ID NO: 3373
aggguuugagauuaugcuu

SEQ ID NO: 262391 - RNA, 19 nt, Artificial Sequence
  Description of Artificial Sequence: Synthetic oligonucleotide
  Antisense strand to SEQ ID NO: 262390
aagcauaaucucaaacccu

SEQ ID NO: 262392 - RNA, 19 nt, Artificial Sequence
  Description of Artificial Sequence: Synthetic oligonucleotide
  Sense strand starting at position 24 SEQ ID NO: 3374
uguaaugcauucuaaagau

SEQ ID NO: 262393 - RNA, 19 nt, Artificial Sequence
  Description of Artificial Sequence: Synthetic oligonucleotide
  Antisense strand to SEQ ID NO: 262392
aucuuuagaaugcauuaca

SEQ ID NO: 262394 - RNA, 19 nt, Artificial Sequence
  Description of Artificial Sequence: Synthetic oligonucleotide
  Sense strand starting at position 68 SEQ ID NO: 3374
ucccgagucuaggagagaa

SEQ ID NO: 262395 - RNA, 19 nt, Artificial Sequence
  Description of Artificial Sequence: Synthetic oligonucleotide
  Antisense strand to SEQ ID NO: 262394
uucucuccuagacucggga

SEQ ID NO: 262396 - RNA, 19 nt, Artificial Sequence
  Description of Artificial Sequence: Synthetic oligonucleotide
  Sense strand starting at position 78 SEQ ID NO: 3374
aggagagaaucuggaugua

SEQ ID NO: 262397 - RNA, 19 nt, Artificial Sequence
  Description of Artificial Sequence: Synthetic oligonucleotide
  Antisense strand to SEQ ID NO: 262396
uacauccagauucucuccu

SEQ ID NO: 262398 - RNA, 19 nt, Artificial Sequence
  Description of Artificial Sequence: Synthetic oligonucleotide
  Sense strand starting at position 161 SEQ ID NO: 3374
accagauuauauugagaca

SEQ ID NO: 262399 - RNA, 19 nt, Artificial Sequence
  Description of Artificial Sequence: Synthetic oligonucleotide
  Antisense strand to SEQ ID NO: 262398
ugucucaauauaaucuggu

SEQ ID NO: 262400 - RNA, 19 nt, Artificial Sequence
  Description of Artificial Sequence: Synthetic oligonucleotide
  Sense strand starting at position 172 SEQ ID NO: 3374
uugagacaagccuaucauu

SEQ ID NO: 262401 - RNA, 19 nt, Artificial Sequence
  Description of Artificial Sequence: Synthetic oligonucleotide
  Antisense strand to SEQ ID NO: 262400
aaugauaggcuugucucaa

SEQ ID NO: 262402 - RNA, 19 nt, Artificial Sequence
  Description of Artificial Sequence: Synthetic oligonucleotide
  Sense strand starting at position 241 SEQ ID NO: 3374
gcagcagugguugaugaua

SEQ ID NO: 262403 - RNA, 19 nt, Artificial Sequence
  Description of Artificial Sequence: Synthetic oligonucleotide
  Antisense strand to SEQ ID NO: 262402
uaucaucaaccacugcugc

SEQ ID NO: 262404 - RNA, 19 nt, Artificial Sequence
  Description of Artificial Sequence: Synthetic oligonucleotide
  Sense strand starting at position 243 SEQ ID NO: 3374
agcagugguugaugauauu

SEQ ID NO: 262405 - RNA, 19 nt, Artificial Sequence
  Description of Artificial Sequence: Synthetic oligonucleotide
  Antisense strand to SEQ ID NO: 262404
aauaucaucaaccacugcu

SEQ ID NO: 262406 - RNA, 19 nt, Artificial Sequence
  Description of Artificial Sequence: Synthetic oligonucleotide
  Sense strand starting at position 246 SEQ ID NO: 3374
agugguugaugauauuaaa

SEQ ID NO: 262407 - RNA, 19 nt, Artificial Sequence
  Description of Artificial Sequence: Synthetic oligonucleotide
  Antisense strand to SEQ ID NO: 262406
uuuaauaucaucaaccacu

SEQ ID NO: 262408 - RNA, 19 nt, Artificial Sequence
  Description of Artificial Sequence: Synthetic oligonucleotide
  Sense strand starting at position 445 SEQ ID NO: 3374
gaaggauucuacggagaga

SEQ ID NO: 262409 - RNA, 19 nt, Artificial Sequence
  Description of Artificial Sequence: Synthetic oligonucleotide
  Antisense strand to SEQ ID NO: 262408
ucucuccguagaauccuuc

SEQ ID NO: 262410 - RNA, 19 nt, Artificial Sequence
  Description of Artificial Sequence: Synthetic oligonucleotide
  Sense strand starting at position 480 SEQ ID NO: 3374
cuacaauaauguuagagca

SEQ ID NO: 262411 - RNA, 19 nt, Artificial Sequence
  Description of Artificial Sequence: Synthetic oligonucleotide
  Antisense strand to SEQ ID NO: 262410
ugcucuaacauuauuguag

SEQ ID NO: 262412 - RNA, 19 nt, Artificial Sequence
  Description of Artificial Sequence: Synthetic oligonucleotide
  Sense strand starting at position 482 SEQ ID NO: 3374
acaauaauguuagagcaaa

SEQ ID NO: 262413 - RNA, 19 nt, Artificial Sequence
  Description of Artificial Sequence: Synthetic oligonucleotide
  Antisense strand to SEQ ID NO: 262412
uuugcucuaacauuauugu

SEQ ID NO: 262414 - RNA, 19 nt, Artificial Sequence
  Description of Artificial Sequence: Synthetic oligonucleotide
  Sense strand starting at position 496 SEQ ID NO: 3374
gcaaacaaucggcacuaua

SEQ ID NO: 262415 - RNA, 19 nt, Artificial Sequence
  Description of Artificial Sequence: Synthetic oligonucleotide
  Antisense strand to SEQ ID NO: 262414
uauagugccgauuguuugc

SEQ ID NO: 262416 - RNA, 19 nt, Artificial Sequence
  Description of Artificial Sequence: Synthetic oligonucleotide
  Sense strand starting at position 512 SEQ ID NO: 3374
auaguucugucuucuauug

SEQ ID NO: 262417 - RNA, 19 nt, Artificial Sequence
  Description of Artificial Sequence: Synthetic oligonucleotide
  Antisense strand to SEQ ID NO: 262416
caauagaagacagaacuau

SEQ ID NO: 262418 - RNA, 19 nt, Artificial Sequence
  Description of Artificial Sequence: Synthetic oligonucleotide
  Sense strand starting at position 519 SEQ ID NO: 3374
ugucuucuauugcuuguga

SEQ ID NO: 262419 - RNA, 19 nt, Artificial Sequence
  Description of Artificial Sequence: Synthetic oligonucleotide
  Antisense strand to SEQ ID NO: 262418
ucacaagcaauagaagaca

SEQ ID NO: 262420 - RNA, 19 nt, Artificial Sequence
  Description of Artificial Sequence: Synthetic oligonucleotide
  Sense strand starting at position 520 SEQ ID NO: 3374
gucuucuauugcuugugau

SEQ ID NO: 262421 - RNA, 19 nt, Artificial Sequence
  Description of Artificial Sequence: Synthetic oligonucleotide
  Antisense strand to SEQ ID NO: 262420
aucacaagcaauagaagac

SEQ ID NO: 262422 - RNA, 19 nt, Artificial Sequence
  Description of Artificial Sequence: Synthetic oligonucleotide
  Sense strand starting at position 521 SEQ ID NO: 3374
ucuucuauugcuugugaug

SEQ ID NO: 262423 - RNA, 19 nt, Artificial Sequence
  Description of Artificial Sequence: Synthetic oligonucleotide
  Antisense strand to SEQ ID NO: 262422
caucacaagcaauagaaga

SEQ ID NO: 262424 - RNA, 19 nt, Artificial Sequence
  Description of Artificial Sequence: Synthetic oligonucleotide
  Sense strand starting at position 524 SEQ ID NO: 3374
ucuauugcuugugaugcuu

SEQ ID NO: 262425 - RNA, 19 nt, Artificial Sequence
  Description of Artificial Sequence: Synthetic oligonucleotide
  Antisense strand to SEQ ID NO: 262424
aagcaucacaagcaauaga

SEQ ID NO: 262426 - RNA, 19 nt, Artificial Sequence
  Description of Artificial Sequence: Synthetic oligonucleotide
  Sense strand starting at position 532 SEQ ID NO: 3374
uugugaugcuucuagaaag

SEQ ID NO: 262427 - RNA, 19 nt, Artificial Sequence
  Description of Artificial Sequence: Synthetic oligonucleotide
  Antisense strand to SEQ ID NO: 262426
cuuucuagaagcaucacaa

SEQ ID NO: 262428 - RNA, 19 nt, Artificial Sequence
  Description of Artificial Sequence: Synthetic oligonucleotide
  Sense strand starting at position 560 SEQ ID NO: 3374
acggcuuccugaugaauug

SEQ ID NO: 262429 - RNA, 19 nt, Artificial Sequence
  Description of Artificial Sequence: Synthetic oligonucleotide
  Antisense strand to SEQ ID NO: 262428
caauucaucaggaagccgu

SEQ ID NO: 262430 - RNA, 19 nt, Artificial Sequence
  Description of Artificial Sequence: Synthetic oligonucleotide
  Sense strand starting at position 572 SEQ ID NO: 3374
ugaauuggcucuugguauc

SEQ ID NO: 262431 - RNA, 19 nt, Artificial Sequence
  Description of Artificial Sequence: Synthetic oligonucleotide
  Antisense strand to SEQ ID NO: 262430
gauaccaagagccaauuca

SEQ ID NO: 262432 - RNA, 19 nt, Artificial Sequence
  Description of Artificial Sequence: Synthetic oligonucleotide
  Sense strand starting at position 598 SEQ ID NO: 3374
gcucaucucuggcucacau

SEQ ID NO: 262433 - RNA, 19 nt, Artificial Sequence
  Description of Artificial Sequence: Synthetic oligonucleotide
  Antisense strand to SEQ ID NO: 262432
augugagccagagaugagc

SEQ ID NO: 262434 - RNA, 19 nt, Artificial Sequence
  Description of Artificial Sequence: Synthetic oligonucleotide
  Sense strand starting at position 608 SEQ ID NO: 3374
ggcucacaucugcaaacuu

SEQ ID NO: 262435 - RNA, 19 nt, Artificial Sequence
  Description of Artificial Sequence: Synthetic oligonucleotide
  Antisense strand to SEQ ID NO: 262434
aaguuugcagaugugagcc

SEQ ID NO: 262436 - RNA, 19 nt, Artificial Sequence
  Description of Artificial Sequence: Synthetic oligonucleotide
  Sense strand starting at position 669 SEQ ID NO: 3374
ugcaaaguucuuggucuca

SEQ ID NO: 262437 - RNA, 19 nt, Artificial Sequence
  Description of Artificial Sequence: Synthetic oligonucleotide
  Antisense strand to SEQ ID NO: 262436
ugagaccaagaacuuugca

SEQ ID NO: 262438 - RNA, 19 nt, Artificial Sequence
  Description of Artificial Sequence: Synthetic oligonucleotide
  Sense strand starting at position 682 SEQ ID NO: 3374
gucucagcguuucucagaa

SEQ ID NO: 262439 - RNA, 19 nt, Artificial Sequence
  Description of Artificial Sequence: Synthetic oligonucleotide
  Antisense strand to SEQ ID NO: 262438
uucugagaaacgcugagac

SEQ ID NO: 262440 - RNA, 19 nt, Artificial Sequence
  Description of Artificial Sequence: Synthetic oligonucleotide
  Sense strand starting at position 684 SEQ ID NO: 3374
cucagcguuucucagaaca

SEQ ID NO: 262441 - RNA, 19 nt, Artificial Sequence
  Description of Artificial Sequence: Synthetic oligonucleotide
  Antisense strand to SEQ ID NO: 262440
uguucugagaaacgcugag

SEQ ID NO: 262442 - RNA, 19 nt, Artificial Sequence
  Description of Artificial Sequence: Synthetic oligonucleotide
  Sense strand starting at position 686 SEQ ID NO: 3374
cagcguuucucagaacaga

SEQ ID NO: 262443 - RNA, 19 nt, Artificial Sequence
  Description of Artificial Sequence: Synthetic oligonucleotide
  Antisense strand to SEQ ID NO: 262442
ucuguucugagaaacgcug

SEQ ID NO: 262444 - RNA, 19 nt, Artificial Sequence
  Description of Artificial Sequence: Synthetic oligonucleotide
  Sense strand starting at position 741 SEQ ID NO: 3374
ccauuccuggguugcgaaa

SEQ ID NO: 262445 - RNA, 19 nt, Artificial Sequence
  Description of Artificial Sequence: Synthetic oligonucleotide
  Antisense strand to SEQ ID NO: 262444
uuucgcaacccaggaaugg

SEQ ID NO: 262446 - RNA, 19 nt, Artificial Sequence
  Description of Artificial Sequence: Synthetic oligonucleotide
  Sense strand starting at position 846 SEQ ID NO: 3374
cagggauuccauugcuuau

SEQ ID NO: 262447 - RNA, 19 nt, Artificial Sequence
  Description of Artificial Sequence: Synthetic oligonucleotide
  Antisense strand to SEQ ID NO: 262446
auaagcaauggaaucccug

SEQ ID NO: 262448 - RNA, 19 nt, Artificial Sequence
  Description of Artificial Sequence: Synthetic oligonucleotide
  Sense strand starting at position 850 SEQ ID NO: 3374
gauuccauugcuuauggga

SEQ ID NO: 262449 - RNA, 19 nt, Artificial Sequence
  Description of Artificial Sequence: Synthetic oligonucleotide
  Antisense strand to SEQ ID NO: 262448
ucccauaagcaauggaauc

SEQ ID NO: 262450 - RNA, 19 nt, Artificial Sequence
  Description of Artificial Sequence: Synthetic oligonucleotide
  Sense strand starting at position 910 SEQ ID NO: 3374
gggcaagugcauuauacuu

SEQ ID NO: 262451 - RNA, 19 nt, Artificial Sequence
  Description of Artificial Sequence: Synthetic oligonucleotide
  Antisense strand to SEQ ID NO: 262450
aaguauaaugcacuugccc

SEQ ID NO: 262452 - RNA, 19 nt, Artificial Sequence
  Description of Artificial Sequence: Synthetic oligonucleotide
  Sense strand starting at position 1462 SEQ ID NO: 3374
agguuacccuguggucaga

SEQ ID NO: 262453 - RNA, 19 nt, Artificial Sequence
  Description of Artificial Sequence: Synthetic oligonucleotide
  Antisense strand to SEQ ID NO: 262452
ucugaccacaggguaaccu

SEQ ID NO: 262454 - RNA, 19 nt, Artificial Sequence
  Description of Artificial Sequence: Synthetic oligonucleotide
  Sense strand starting at position 1475 SEQ ID NO: 3374
gucagaugaccgcaucuca

SEQ ID NO: 262455 - RNA, 19 nt, Artificial Sequence
  Description of Artificial Sequence: Synthetic oligonucleotide
  Antisense strand to SEQ ID NO: 262454
ugagaugcggucaucugac

SEQ ID NO: 262456 - RNA, 19 nt, Artificial Sequence
  Description of Artificial Sequence: Synthetic oligonucleotide
  Sense strand starting at position 1542 SEQ ID NO: 3374
cacgguucgccuuacaacu

SEQ ID NO: 262457 - RNA, 19 nt, Artificial Sequence
  Description of Artificial Sequence: Synthetic oligonucleotide
  Antisense strand to SEQ ID NO: 262456
aguuguaaggcgaaccgug

SEQ ID NO: 262458 - RNA, 19 nt, Artificial Sequence
  Description of Artificial Sequence: Synthetic oligonucleotide
  Sense strand starting at position 2069 SEQ ID NO: 3374
gagcaaagucggcaggaaa

SEQ ID NO: 262459 - RNA, 19 nt, Artificial Sequence
  Description of Artificial Sequence: Synthetic oligonucleotide
  Antisense strand to SEQ ID NO: 262458
uuuccugccgacuuugcuc

SEQ ID NO: 262460 - RNA, 19 nt, Artificial Sequence
  Description of Artificial Sequence: Synthetic oligonucleotide
  Sense strand starting at position 2097 SEQ ID NO: 3374
ugggaugccuucccugaga

SEQ ID NO: 262461 - RNA, 19 nt, Artificial Sequence
  Description of Artificial Sequence: Synthetic oligonucleotide
  Antisense strand to SEQ ID NO: 262460
ucucagggaaggcauccca

SEQ ID NO: 262462 - RNA, 19 nt, Artificial Sequence
  Description of Artificial Sequence: Synthetic oligonucleotide
  Sense strand starting at position 2099 SEQ ID NO: 3374
ggaugccuucccugagaaa

SEQ ID NO: 262463 - RNA, 19 nt, Artificial Sequence
  Description of Artificial Sequence: Synthetic oligonucleotide
  Antisense strand to SEQ ID NO: 262462
uuucucagggaaggcaucc

SEQ ID NO: 262464 - RNA, 19 nt, Artificial Sequence
  Description of Artificial Sequence: Synthetic oligonucleotide
  Sense strand starting at position 2151 SEQ ID NO: 3374
uccggacaguuucuggaaa

SEQ ID NO: 262465 - RNA, 19 nt, Artificial Sequence
  Description of Artificial Sequence: Synthetic oligonucleotide
  Antisense strand to SEQ ID NO: 262464
uuuccagaaacuguccgga

SEQ ID NO: 262466 - RNA, 19 nt, Artificial Sequence
  Description of Artificial Sequence: Synthetic oligonucleotide
  Sense strand starting at position 3607 SEQ ID NO: 3374
ucgugaucguguccauggu

SEQ ID NO: 262467 - RNA, 19 nt, Artificial Sequence
  Description of Artificial Sequence: Synthetic oligonucleotide
  Antisense strand to SEQ ID NO: 262466
accauggacacgaucacga

SEQ ID NO: 262468 - RNA, 19 nt, Artificial Sequence
  Description of Artificial Sequence: Synthetic oligonucleotide
  Sense strand starting at position 3926 SEQ ID NO: 3374
gggucuggcccuuacacua

SEQ ID NO: 262469 - RNA, 19 nt, Artificial Sequence
  Description of Artificial Sequence: Synthetic oligonucleotide
  Antisense strand to SEQ ID NO: 262468
uaguguaagggccagaccc

SEQ ID NO: 262470 - RNA, 19 nt, Artificial Sequence
  Description of Artificial Sequence: Synthetic oligonucleotide
  Sense strand starting at position 3948 SEQ ID NO: 3374
gcaccucuugagggcgaaa

SEQ ID NO: 262471 - RNA, 19 nt, Artificial Sequence
  Description of Artificial Sequence: Synthetic oligonucleotide
  Antisense strand to SEQ ID NO: 262470
uuucgcccucaagaggugc

SEQ ID NO: 262472 - RNA, 19 nt, Artificial Sequence
  Description of Artificial Sequence: Synthetic oligonucleotide
  Sense strand starting at position 210 SEQ ID NO: 3375
gggugauaucagcaucuuu

SEQ ID NO: 262473 - RNA, 19 nt, Artificial Sequence
  Description of Artificial Sequence: Synthetic oligonucleotide
  Antisense strand to SEQ ID NO: 262472
aaagaugcugauaucaccc

SEQ ID NO: 262474 - RNA, 19 nt, Artificial Sequence
  Description of Artificial Sequence: Synthetic oligonucleotide
  Sense strand starting at position 264 SEQ ID NO: 3375
aaugucuugugauuaagaa

SEQ ID NO: 262475 - RNA, 19 nt, Artificial Sequence
  Description of Artificial Sequence: Synthetic oligonucleotide
  Antisense strand to SEQ ID NO: 262474
uucuuaaucacaagacauu

SEQ ID NO: 262476 - RNA, 19 nt, Artificial Sequence
  Description of Artificial Sequence: Synthetic oligonucleotide
  Sense strand starting at position 345 SEQ ID NO: 3375
auaggcuugcuggaaacuu

SEQ ID NO: 262477 - RNA, 19 nt, Artificial Sequence
  Description of Artificial Sequence: Synthetic oligonucleotide
  Antisense strand to SEQ ID NO: 262476
aaguuuccagcaagccuau

SEQ ID NO: 262478 - RNA, 19 nt, Artificial Sequence
  Description of Artificial Sequence: Synthetic oligonucleotide
  Sense strand starting at position 353 SEQ ID NO: 3375
gcuggaaacuucccacugu

SEQ ID NO: 262479 - RNA, 19 nt, Artificial Sequence
  Description of Artificial Sequence: Synthetic oligonucleotide
  Antisense strand to SEQ ID NO: 262478
acagugggaaguuuccagc

SEQ ID NO: 262480 - RNA, 19 nt, Artificial Sequence
  Description of Artificial Sequence: Synthetic oligonucleotide
  Sense strand starting at position 424 SEQ ID NO: 3375
cgccgcucucuucugcaaa

SEQ ID NO: 262481 - RNA, 19 nt, Artificial Sequence
  Description of Artificial Sequence: Synthetic oligonucleotide
  Antisense strand to SEQ ID NO: 262480
uuugcagaagagagcggcg

SEQ ID NO: 262482 - RNA, 19 nt, Artificial Sequence
  Description of Artificial Sequence: Synthetic oligonucleotide
  Sense strand starting at position 448 SEQ ID NO: 3375
cucauuuagccaggccauu

SEQ ID NO: 262483 - RNA, 19 nt, Artificial Sequence
  Description of Artificial Sequence: Synthetic oligonucleotide
  Antisense strand to SEQ ID NO: 262482
aauggccuggcuaaaugag

SEQ ID NO: 262484 - RNA, 19 nt, Artificial Sequence
  Description of Artificial Sequence: Synthetic oligonucleotide
  Sense strand starting at position 531 SEQ ID NO: 3375
acacgccacuuaucugaau

SEQ ID NO: 262485 - RNA, 19 nt, Artificial Sequence
  Description of Artificial Sequence: Synthetic oligonucleotide
  Antisense strand to SEQ ID NO: 262484
auucagauaaguggcgugu

SEQ ID NO: 262486 - RNA, 19 nt, Artificial Sequence
  Description of Artificial Sequence: Synthetic oligonucleotide
  Sense strand starting at position 591 SEQ ID NO: 3375
gggagaaaguuuguuugac

SEQ ID NO: 262487 - RNA, 19 nt, Artificial Sequence
  Description of Artificial Sequence: Synthetic oligonucleotide
  Antisense strand to SEQ ID NO: 262486
gucaaacaaacuuucuccc

SEQ ID NO: 262488 - RNA, 19 nt, Artificial Sequence
  Description of Artificial Sequence: Synthetic oligonucleotide
  Sense strand starting at position 592 SEQ ID NO: 3375
ggagaaaguuuguuugacc

SEQ ID NO: 262489 - RNA, 19 nt, Artificial Sequence
  Description of Artificial Sequence: Synthetic oligonucleotide
  Antisense strand to SEQ ID NO: 262488
ggucaaacaaacuuucucc

SEQ ID NO: 262490 - RNA, 19 nt, Artificial Sequence
  Description of Artificial Sequence: Synthetic oligonucleotide
  Sense strand starting at position 593 SEQ ID NO: 3375
gagaaaguuuguuugaccu

SEQ ID NO: 262491 - RNA, 19 nt, Artificial Sequence
  Description of Artificial Sequence: Synthetic oligonucleotide
  Antisense strand to SEQ ID NO: 262490
aggucaaacaaacuuucuc

SEQ ID NO: 262492 - RNA, 19 nt, Artificial Sequence
  Description of Artificial Sequence: Synthetic oligonucleotide
  Sense strand starting at position 617 SEQ ID NO: 3375
cucucuuccgcagaagacu

SEQ ID NO: 262493 - RNA, 19 nt, Artificial Sequence
  Description of Artificial Sequence: Synthetic oligonucleotide
  Antisense strand to SEQ ID NO: 262492
agucuucugcggaagagag

SEQ ID NO: 262494 - RNA, 19 nt, Artificial Sequence
  Description of Artificial Sequence: Synthetic oligonucleotide
  Sense strand starting at position 2270 SEQ ID NO: 3375
guuucaugucgauggacac

SEQ ID NO: 262495 - RNA, 19 nt, Artificial Sequence
  Description of Artificial Sequence: Synthetic oligonucleotide
  Antisense strand to SEQ ID NO: 262494
guguccaucgacaugaaac

SEQ ID NO: 262496 - RNA, 19 nt, Artificial Sequence
  Description of Artificial Sequence: Synthetic oligonucleotide
  Sense strand starting at position 2566 SEQ ID NO: 3375
ugucgacucuggguuuaag

SEQ ID NO: 262497 - RNA, 19 nt, Artificial Sequence
  Description of Artificial Sequence: Synthetic oligonucleotide
  Antisense strand to SEQ ID NO: 262496
cuuaaacccagagucgaca

SEQ ID NO: 262498 - RNA, 19 nt, Artificial Sequence
  Description of Artificial Sequence: Synthetic oligonucleotide
  Sense strand starting at position 2651 SEQ ID NO: 3375
uugugauggucacuuauca

SEQ ID NO: 262499 - RNA, 19 nt, Artificial Sequence
  Description of Artificial Sequence: Synthetic oligonucleotide
  Antisense strand to SEQ ID NO: 262498
ugauaagugaccaucacaa

SEQ ID NO: 262500 - RNA, 19 nt, Artificial Sequence
  Description of Artificial Sequence: Synthetic oligonucleotide
  Sense strand starting at position 2817 SEQ ID NO: 3375
aucaguugcgaugauaucu

SEQ ID NO: 262501 - RNA, 19 nt, Artificial Sequence
  Description of Artificial Sequence: Synthetic oligonucleotide
  Antisense strand to SEQ ID NO: 262500
agauaucaucgcaacugau

SEQ ID NO: 262502 - RNA, 19 nt, Artificial Sequence
  Description of Artificial Sequence: Synthetic oligonucleotide
  Sense strand starting at position 2841 SEQ ID NO: 3375
ugcuuuguaaaccagggaa

SEQ ID NO: 262503 - RNA, 19 nt, Artificial Sequence
  Description of Artificial Sequence: Synthetic oligonucleotide
  Antisense strand to SEQ ID NO: 262502
uucccugguuuacaaagca

SEQ ID NO: 262504 - RNA, 19 nt, Artificial Sequence
  Description of Artificial Sequence: Synthetic oligonucleotide
  Sense strand starting at position 2843 SEQ ID NO: 3375
cuuuguaaaccagggaaca

SEQ ID NO: 262505 - RNA, 19 nt, Artificial Sequence
  Description of Artificial Sequence: Synthetic oligonucleotide
  Antisense strand to SEQ ID NO: 262504
uguucccugguuuacaaag

SEQ ID NO: 262506 - RNA, 19 nt, Artificial Sequence
  Description of Artificial Sequence: Synthetic oligonucleotide
  Sense strand starting at position 2965 SEQ ID NO: 3375
gucaaauucugacccaaag

SEQ ID NO: 262507 - RNA, 19 nt, Artificial Sequence
  Description of Artificial Sequence: Synthetic oligonucleotide
  Antisense strand to SEQ ID NO: 262506
cuuugggucagaauuugac

SEQ ID NO: 262508 - RNA, 19 nt, Artificial Sequence
  Description of Artificial Sequence: Synthetic oligonucleotide
  Sense strand starting at position 3170 SEQ ID NO: 3375
ccuuuccucuggccuagaa

SEQ ID NO: 262509 - RNA, 19 nt, Artificial Sequence
  Description of Artificial Sequence: Synthetic oligonucleotide
  Antisense strand to SEQ ID NO: 262508
uucuaggccagaggaaagg

SEQ ID NO: 262510 - RNA, 19 nt, Artificial Sequence
  Description of Artificial Sequence: Synthetic oligonucleotide
  Sense strand starting at position 3174 SEQ ID NO: 3375
uccucuggccuagaauguu

SEQ ID NO: 262511 - RNA, 19 nt, Artificial Sequence
  Description of Artificial Sequence: Synthetic oligonucleotide
  Antisense strand to SEQ ID NO: 262510
aacauucuaggccagagga

SEQ ID NO: 262512 - RNA, 19 nt, Artificial Sequence
  Description of Artificial Sequence: Synthetic oligonucleotide
  Sense strand starting at position 3180 SEQ ID NO: 3375
ggccuagaauguucugaac

SEQ ID NO: 262513 - RNA, 19 nt, Artificial Sequence
  Description of Artificial Sequence: Synthetic oligonucleotide
  Antisense strand to SEQ ID NO: 262512
guucagaacauucuaggcc

SEQ ID NO: 262514 - RNA, 19 nt, Artificial Sequence
  Description of Artificial Sequence: Synthetic oligonucleotide
  Sense strand starting at position 3339 SEQ ID NO: 3375
cauugugugccugucucau

SEQ ID NO: 262515 - RNA, 19 nt, Artificial Sequence
  Description of Artificial Sequence: Synthetic oligonucleotide
  Antisense strand to SEQ ID NO: 262514
augagacaggcacacaaug

SEQ ID NO: 262516 - RNA, 19 nt, Artificial Sequence
  Description of Artificial Sequence: Synthetic oligonucleotide
  Sense strand starting at position 3341 SEQ ID NO: 3375
uugugugccugucucauuu

SEQ ID NO: 262517 - RNA, 19 nt, Artificial Sequence
  Description of Artificial Sequence: Synthetic oligonucleotide
  Antisense strand to SEQ ID NO: 262516
aaaugagacaggcacacaa

SEQ ID NO: 262518 - RNA, 19 nt, Artificial Sequence
  Description of Artificial Sequence: Synthetic oligonucleotide
  Sense strand starting at position 3371 SEQ ID NO: 3375
ugcucuugccagguguuua

SEQ ID NO: 262519 - RNA, 19 nt, Artificial Sequence
  Description of Artificial Sequence: Synthetic oligonucleotide
  Antisense strand to SEQ ID NO: 262518
uaaacaccuggcaagagca

SEQ ID NO: 262520 - RNA, 19 nt, Artificial Sequence
  Description of Artificial Sequence: Synthetic oligonucleotide
  Sense strand starting at position 3387 SEQ ID NO: 3375
uuaugaugacugugcuaac

SEQ ID NO: 262521 - RNA, 19 nt, Artificial Sequence
  Description of Artificial Sequence: Synthetic oligonucleotide
  Antisense strand to SEQ ID NO: 262520
guuagcacagucaucauaa

SEQ ID NO: 262522 - RNA, 19 nt, Artificial Sequence
  Description of Artificial Sequence: Synthetic oligonucleotide
  Sense strand starting at position 3456 SEQ ID NO: 3375
ggaacagccucauccagaa

SEQ ID NO: 262523 - RNA, 19 nt, Artificial Sequence
  Description of Artificial Sequence: Synthetic oligonucleotide
  Antisense strand to SEQ ID NO: 262522
uucuggaugaggcuguucc

SEQ ID NO: 262524 - RNA, 19 nt, Artificial Sequence
  Description of Artificial Sequence: Synthetic oligonucleotide
  Sense strand starting at position 3568 SEQ ID NO: 3375
auauuagucucuuccaugu

SEQ ID NO: 262525 - RNA, 19 nt, Artificial Sequence
  Description of Artificial Sequence: Synthetic oligonucleotide
  Antisense strand to SEQ ID NO: 262524
acauggaagagacuaauau

SEQ ID NO: 262526 - RNA, 19 nt, Artificial Sequence
  Description of Artificial Sequence: Synthetic oligonucleotide
  Sense strand starting at position 3596 SEQ ID NO: 3375
aggccaauguccucuacau

SEQ ID NO: 262527 - RNA, 19 nt, Artificial Sequence
  Description of Artificial Sequence: Synthetic oligonucleotide
  Antisense strand to SEQ ID NO: 262526
auguagaggacauuggccu

SEQ ID NO: 262528 - RNA, 19 nt, Artificial Sequence
  Description of Artificial Sequence: Synthetic oligonucleotide
  Sense strand starting at position 3626 SEQ ID NO: 3375
cacaguagaugcucaguau

SEQ ID NO: 262529 - RNA, 19 nt, Artificial Sequence
  Description of Artificial Sequence: Synthetic oligonucleotide
  Antisense strand to SEQ ID NO: 262528
auacugagcaucuacugug

SEQ ID NO: 262530 - RNA, 19 nt, Artificial Sequence
  Description of Artificial Sequence: Synthetic oligonucleotide
  Sense strand starting at position 3630 SEQ ID NO: 3375
guagaugcucaguaucuga

SEQ ID NO: 262531 - RNA, 19 nt, Artificial Sequence
  Description of Artificial Sequence: Synthetic oligonucleotide
  Antisense strand to SEQ ID NO: 262530
ucagauacugagcaucuac

SEQ ID NO: 262532 - RNA, 19 nt, Artificial Sequence
  Description of Artificial Sequence: Synthetic oligonucleotide
  Sense strand starting at position 3633 SEQ ID NO: 3375
gaugcucaguaucugaaga

SEQ ID NO: 262533 - RNA, 19 nt, Artificial Sequence
  Description of Artificial Sequence: Synthetic oligonucleotide
  Antisense strand to SEQ ID NO: 262532
ucuucagauacugagcauc

SEQ ID NO: 262534 - RNA, 19 nt, Artificial Sequence
  Description of Artificial Sequence: Synthetic oligonucleotide
  Sense strand starting at position 3659 SEQ ID NO: 3375
ccaacaaaucguggacuca

SEQ ID NO: 262535 - RNA, 19 nt, Artificial Sequence
  Description of Artificial Sequence: Synthetic oligonucleotide
  Antisense strand to SEQ ID NO: 262534
ugaguccacgauuuguugg

SEQ ID NO: 262536 - RNA, 19 nt, Artificial Sequence
  Description of Artificial Sequence: Synthetic oligonucleotide
  Sense strand starting at position 3690 SEQ ID NO: 3375
agcugaauacaaggacuuu

SEQ ID NO: 262537 - RNA, 19 nt, Artificial Sequence
  Description of Artificial Sequence: Synthetic oligonucleotide
  Antisense strand to SEQ ID NO: 262536
aaaguccuuguauucagcu

SEQ ID NO: 262538 - RNA, 19 nt, Artificial Sequence
  Description of Artificial Sequence: Synthetic oligonucleotide
  Sense strand starting at position 3724 SEQ ID NO: 3375
guccuaauuccagagaggu

SEQ ID NO: 262539 - RNA, 19 nt, Artificial Sequence
  Description of Artificial Sequence: Synthetic oligonucleotide
  Antisense strand to SEQ ID NO: 262538
accucucuggaauuaggac

SEQ ID NO: 262540 - RNA, 19 nt, Artificial Sequence
  Description of Artificial Sequence: Synthetic oligonucleotide
  Sense strand starting at position 3759 SEQ ID NO: 3375
ucagcaaauguuuguagau

SEQ ID NO: 262541 - RNA, 19 nt, Artificial Sequence
  Description of Artificial Sequence: Synthetic oligonucleotide
  Antisense strand to SEQ ID NO: 262540
aucuacaaacauuugcuga

SEQ ID NO: 262542 - RNA, 19 nt, Artificial Sequence
  Description of Artificial Sequence: Synthetic oligonucleotide
  Sense strand starting at position 3760 SEQ ID NO: 3375
cagcaaauguuuguagauu

SEQ ID NO: 262543 - RNA, 19 nt, Artificial Sequence
  Description of Artificial Sequence: Synthetic oligonucleotide
  Antisense strand to SEQ ID NO: 262542
aaucuacaaacauuugcug

SEQ ID NO: 262544 - RNA, 19 nt, Artificial Sequence
  Description of Artificial Sequence: Synthetic oligonucleotide
  Sense strand starting at position 3766 SEQ ID NO: 3375
auguuuguagauugaaaga

SEQ ID NO: 262545 - RNA, 19 nt, Artificial Sequence
  Description of Artificial Sequence: Synthetic oligonucleotide
  Antisense strand to SEQ ID NO: 262544
ucuuucaaucuacaaacau

SEQ ID NO: 262546 - RNA, 19 nt, Artificial Sequence
  Description of Artificial Sequence: Synthetic oligonucleotide
  Sense strand starting at position 3909 SEQ ID NO: 3375
uuggcaguuuaacuauaaa

SEQ ID NO: 262547 - RNA, 19 nt, Artificial Sequence
  Description of Artificial Sequence: Synthetic oligonucleotide
  Antisense strand to SEQ ID NO: 262546
uuuauaguuaaacugccaa

SEQ ID NO: 262548 - RNA, 19 nt, Artificial Sequence
  Description of Artificial Sequence: Synthetic oligonucleotide
  Sense strand starting at position 3912 SEQ ID NO: 3375
gcaguuuaacuauaaagac

SEQ ID NO: 262549 - RNA, 19 nt, Artificial Sequence
  Description of Artificial Sequence: Synthetic oligonucleotide
  Antisense strand to SEQ ID NO: 262548
gucuuuauaguuaaacugc

SEQ ID NO: 262550 - RNA, 19 nt, Artificial Sequence
  Description of Artificial Sequence: Synthetic oligonucleotide
  Sense strand starting at position 3921 SEQ ID NO: 3375
cuauaaagaccuugagcaa

SEQ ID NO: 262551 - RNA, 19 nt, Artificial Sequence
  Description of Artificial Sequence: Synthetic oligonucleotide
  Antisense strand to SEQ ID NO: 262550
uugcucaaggucuuuauag

SEQ ID NO: 262552 - RNA, 19 nt, Artificial Sequence
  Description of Artificial Sequence: Synthetic oligonucleotide
  Sense strand starting at position 4 SEQ ID NO: 3376
caguguauaccuuguugag

SEQ ID NO: 262553 - RNA, 19 nt, Artificial Sequence
  Description of Artificial Sequence: Synthetic oligonucleotide
  Antisense strand to SEQ ID NO: 262552
cucaacaagguauacacug

SEQ ID NO: 262554 - RNA, 19 nt, Artificial Sequence
  Description of Artificial Sequence: Synthetic oligonucleotide
  Sense strand starting at position 169 SEQ ID NO: 3376
guuugaaauuaagcucaua

SEQ ID NO: 262555 - RNA, 19 nt, Artificial Sequence
  Description of Artificial Sequence: Synthetic oligonucleotide
  Antisense strand to SEQ ID NO: 262554
uaugagcuuaauuucaaac

SEQ ID NO: 262556 - RNA, 19 nt, Artificial Sequence
  Description of Artificial Sequence: Synthetic oligonucleotide
  Sense strand starting at position 298 SEQ ID NO: 3376
uuaucaguuucuccuagac

SEQ ID NO: 262557 - RNA, 19 nt, Artificial Sequence
  Description of Artificial Sequence: Synthetic oligonucleotide
  Antisense strand to SEQ ID NO: 262556
gucuaggagaaacugauaa

SEQ ID NO: 262558 - RNA, 19 nt, Artificial Sequence
  Description of Artificial Sequence: Synthetic oligonucleotide
  Sense strand starting at position 364 SEQ ID NO: 3376
ucuuaucacuguguaguca

SEQ ID NO: 262559 - RNA, 19 nt, Artificial Sequence
  Description of Artificial Sequence: Synthetic oligonucleotide
  Antisense strand to SEQ ID NO: 262558
ugacuacacagugauaaga

SEQ ID NO: 262560 - RNA, 19 nt, Artificial Sequence
  Description of Artificial Sequence: Synthetic oligonucleotide
  Sense strand starting at position 394 SEQ ID NO: 3376
acauguguccucuguacua

SEQ ID NO: 262561 - RNA, 19 nt, Artificial Sequence
  Description of Artificial Sequence: Synthetic oligonucleotide
  Antisense strand to SEQ ID NO: 262560
uaguacagaggacacaugu

SEQ ID NO: 262562 - RNA, 19 nt, Artificial Sequence
  Description of Artificial Sequence: Synthetic oligonucleotide
  Sense strand starting at position 396 SEQ ID NO: 3376
auguguccucuguacuaua

SEQ ID NO: 262563 - RNA, 19 nt, Artificial Sequence
  Description of Artificial Sequence: Synthetic oligonucleotide
  Antisense strand to SEQ ID NO: 262562
uauaguacagaggacacau

SEQ ID NO: 262564 - RNA, 19 nt, Artificial Sequence
  Description of Artificial Sequence: Synthetic oligonucleotide
  Sense strand starting at position 682 SEQ ID NO: 3376
gggugauaucagcaucuuu

SEQ ID NO: 262565 - RNA, 19 nt, Artificial Sequence
  Description of Artificial Sequence: Synthetic oligonucleotide
  Antisense strand to SEQ ID NO: 262564
aaagaugcugauaucaccc

SEQ ID NO: 262566 - RNA, 19 nt, Artificial Sequence
  Description of Artificial Sequence: Synthetic oligonucleotide
  Sense strand starting at position 736 SEQ ID NO: 3376
aaugucuugugauuaagaa

SEQ ID NO: 262567 - RNA, 19 nt, Artificial Sequence
  Description of Artificial Sequence: Synthetic oligonucleotide
  Antisense strand to SEQ ID NO: 262566
uucuuaaucacaagacauu

SEQ ID NO: 262568 - RNA, 19 nt, Artificial Sequence
  Description of Artificial Sequence: Synthetic oligonucleotide
  Sense strand starting at position 817 SEQ ID NO: 3376
auaggcuugcuggaaacuu

SEQ ID NO: 262569 - RNA, 19 nt, Artificial Sequence
  Description of Artificial Sequence: Synthetic oligonucleotide
  Antisense strand to SEQ ID NO: 262568
aaguuuccagcaagccuau

SEQ ID NO: 262570 - RNA, 19 nt, Artificial Sequence
  Description of Artificial Sequence: Synthetic oligonucleotide
  Sense strand starting at position 825 SEQ ID NO: 3376
gcuggaaacuucccacugu

SEQ ID NO: 262571 - RNA, 19 nt, Artificial Sequence
  Description of Artificial Sequence: Synthetic oligonucleotide
  Antisense strand to SEQ ID NO: 262570
acagugggaaguuuccagc

SEQ ID NO: 262572 - RNA, 19 nt, Artificial Sequence
  Description of Artificial Sequence: Synthetic oligonucleotide
  Sense strand starting at position 829 SEQ ID NO: 3376
gaaacuucccacugugugu

SEQ ID NO: 262573 - RNA, 19 nt, Artificial Sequence
  Description of Artificial Sequence: Synthetic oligonucleotide
  Antisense strand to SEQ ID NO: 262572
acacacagugggaaguuuc

SEQ ID NO: 262574 - RNA, 19 nt, Artificial Sequence
  Description of Artificial Sequence: Synthetic oligonucleotide
  Sense strand starting at position 896 SEQ ID NO: 3376
cgccgcucucuucugcaaa

SEQ ID NO: 262575 - RNA, 19 nt, Artificial Sequence
  Description of Artificial Sequence: Synthetic oligonucleotide
  Antisense strand to SEQ ID NO: 262574
uuugcagaagagagcggcg

SEQ ID NO: 262576 - RNA, 19 nt, Artificial Sequence
  Description of Artificial Sequence: Synthetic oligonucleotide
  Sense strand starting at position 920 SEQ ID NO: 3376
cucauuuagccaggccauu

SEQ ID NO: 262577 - RNA, 19 nt, Artificial Sequence
  Description of Artificial Sequence: Synthetic oligonucleotide
  Antisense strand to SEQ ID NO: 262576
aauggccuggcuaaaugag

SEQ ID NO: 262578 - RNA, 19 nt, Artificial Sequence
  Description of Artificial Sequence: Synthetic oligonucleotide
  Sense strand starting at position 1003 SEQ ID NO: 3376
acacgccacuuaucugaau

SEQ ID NO: 262579 - RNA, 19 nt, Artificial Sequence
  Description of Artificial Sequence: Synthetic oligonucleotide
  Antisense strand to SEQ ID NO: 262578
auucagauaaguggcgugu

SEQ ID NO: 262580 - RNA, 19 nt, Artificial Sequence
  Description of Artificial Sequence: Synthetic oligonucleotide
  Sense strand starting at position 1063 SEQ ID NO: 3376
gggagaaaguuuguuugac

SEQ ID NO: 262581 - RNA, 19 nt, Artificial Sequence
  Description of Artificial Sequence: Synthetic oligonucleotide
  Antisense strand to SEQ ID NO: 262580
gucaaacaaacuuucuccc

SEQ ID NO: 262582 - RNA, 19 nt, Artificial Sequence
  Description of Artificial Sequence: Synthetic oligonucleotide
  Sense strand starting at position 1064 SEQ ID NO: 3376
ggagaaaguuuguuugacc

SEQ ID NO: 262583 - RNA, 19 nt, Artificial Sequence
  Description of Artificial Sequence: Synthetic oligonucleotide
  Antisense strand to SEQ ID NO: 262582
ggucaaacaaacuuucucc

SEQ ID NO: 262584 - RNA, 19 nt, Artificial Sequence
  Description of Artificial Sequence: Synthetic oligonucleotide
  Sense strand starting at position 1065 SEQ ID NO: 3376
gagaaaguuuguuugaccu

SEQ ID NO: 262585 - RNA, 19 nt, Artificial Sequence
  Description of Artificial Sequence: Synthetic oligonucleotide
  Antisense strand to SEQ ID NO: 262584
aggucaaacaaacuuucuc

SEQ ID NO: 262586 - RNA, 19 nt, Artificial Sequence
  Description of Artificial Sequence: Synthetic oligonucleotide
  Sense strand starting at position 1089 SEQ ID NO: 3376
cucucuuccgcagaagacu

SEQ ID NO: 262587 - RNA, 19 nt, Artificial Sequence
  Description of Artificial Sequence: Synthetic oligonucleotide
  Antisense strand to SEQ ID NO: 262586
agucuucugcggaagagag

SEQ ID NO: 262588 - RNA, 19 nt, Artificial Sequence
  Description of Artificial Sequence: Synthetic oligonucleotide
  Sense strand starting at position 2742 SEQ ID NO: 3376
guuucaugucgauggacac

SEQ ID NO: 262589 - RNA, 19 nt, Artificial Sequence
  Description of Artificial Sequence: Synthetic oligonucleotide
  Antisense strand to SEQ ID NO: 262588
guguccaucgacaugaaac

SEQ ID NO: 262590 - RNA, 19 nt, Artificial Sequence
  Description of Artificial Sequence: Synthetic oligonucleotide
  Sense strand starting at position 2782 SEQ ID NO: 3376
gcuucuaaaugguuauugu

SEQ ID NO: 262591 - RNA, 19 nt, Artificial Sequence
  Description of Artificial Sequence: Synthetic oligonucleotide
  Antisense strand to SEQ ID NO: 262590
acaauaaccauuuagaagc

SEQ ID NO: 262592 - RNA, 19 nt, Artificial Sequence
  Description of Artificial Sequence: Synthetic oligonucleotide
  Sense strand starting at position 2793 SEQ ID NO: 3376
guuauugucccaggccaau

SEQ ID NO: 262593 - RNA, 19 nt, Artificial Sequence
  Description of Artificial Sequence: Synthetic oligonucleotide
  Antisense strand to SEQ ID NO: 262592
auuggccugggacaauaac

SEQ ID NO: 262594 - RNA, 19 nt, Artificial Sequence
  Description of Artificial Sequence: Synthetic oligonucleotide
  Sense strand starting at position 3038 SEQ ID NO: 3376
ugucgacucuggguuuaag

SEQ ID NO: 262595 - RNA, 19 nt, Artificial Sequence
  Description of Artificial Sequence: Synthetic oligonucleotide
  Antisense strand to SEQ ID NO: 262594
cuuaaacccagagucgaca

SEQ ID NO: 262596 - RNA, 19 nt, Artificial Sequence
  Description of Artificial Sequence: Synthetic oligonucleotide
  Sense strand starting at position 3123 SEQ ID NO: 3376
uugugauggucacuuauca

SEQ ID NO: 262597 - RNA, 19 nt, Artificial Sequence
  Description of Artificial Sequence: Synthetic oligonucleotide
  Antisense strand to SEQ ID NO: 262596
ugauaagugaccaucacaa

SEQ ID NO: 262598 - RNA, 19 nt, Artificial Sequence
  Description of Artificial Sequence: Synthetic oligonucleotide
  Sense strand starting at position 3289 SEQ ID NO: 3376
aucaguugcgaugauaucu

SEQ ID NO: 262599 - RNA, 19 nt, Artificial Sequence
  Description of Artificial Sequence: Synthetic oligonucleotide
  Antisense strand to SEQ ID NO: 262598
agauaucaucgcaacugau

SEQ ID NO: 262600 - RNA, 19 nt, Artificial Sequence
  Description of Artificial Sequence: Synthetic oligonucleotide
  Sense strand starting at position 3313 SEQ ID NO: 3376
ugcuuuguaaaccagggaa

SEQ ID NO: 262601 - RNA, 19 nt, Artificial Sequence
  Description of Artificial Sequence: Synthetic oligonucleotide
  Antisense strand to SEQ ID NO: 262600
uucccugguuuacaaagca

SEQ ID NO: 262602 - RNA, 19 nt, Artificial Sequence
  Description of Artificial Sequence: Synthetic oligonucleotide
  Sense strand starting at position 3315 SEQ ID NO: 3376
cuuuguaaaccagggaaca

SEQ ID NO: 262603 - RNA, 19 nt, Artificial Sequence
  Description of Artificial Sequence: Synthetic oligonucleotide
  Antisense strand to SEQ ID NO: 262602
uguucccugguuuacaaag

SEQ ID NO: 262604 - RNA, 19 nt, Artificial Sequence
  Description of Artificial Sequence: Synthetic oligonucleotide
  Sense strand starting at position 3418 SEQ ID NO: 3376
gucaaauucugagccaugu

SEQ ID NO: 262605 - RNA, 19 nt, Artificial Sequence
  Description of Artificial Sequence: Synthetic oligonucleotide
  Antisense strand to SEQ ID NO: 262604
acauggcucagaauuugac

SEQ ID NO: 262606 - RNA, 19 nt, Artificial Sequence
  Description of Artificial Sequence: Synthetic oligonucleotide
  Sense strand starting at position 3422 SEQ ID NO: 3376
aauucugagccauguguca

SEQ ID NO: 262607 - RNA, 19 nt, Artificial Sequence
  Description of Artificial Sequence: Synthetic oligonucleotide
  Antisense strand to SEQ ID NO: 262606
ugacacauggcucagaauu

SEQ ID NO: 262608 - RNA, 19 nt, Artificial Sequence
  Description of Artificial Sequence: Synthetic oligonucleotide
  Sense strand starting at position 3437 SEQ ID NO: 3376
gucaaauucugacccaaag

SEQ ID NO: 262609 - RNA, 19 nt, Artificial Sequence
  Description of Artificial Sequence: Synthetic oligonucleotide
  Antisense strand to SEQ ID NO: 262608
cuuugggucagaauuugac

SEQ ID NO: 262610 - RNA, 19 nt, Artificial Sequence
  Description of Artificial Sequence: Synthetic oligonucleotide
  Sense strand starting at position 3642 SEQ ID NO: 3376
ccuuuccucuggccuagaa

SEQ ID NO: 262611 - RNA, 19 nt, Artificial Sequence
  Description of Artificial Sequence: Synthetic oligonucleotide
  Antisense strand to SEQ ID NO: 262610
uucuaggccagaggaaagg

SEQ ID NO: 262612 - RNA, 19 nt, Artificial Sequence
  Description of Artificial Sequence: Synthetic oligonucleotide
  Sense strand starting at position 3646 SEQ ID NO: 3376
uccucuggccuagaauguu

SEQ ID NO: 262613 - RNA, 19 nt, Artificial Sequence
  Description of Artificial Sequence: Synthetic oligonucleotide
  Antisense strand to SEQ ID NO: 262612
aacauucuaggccagagga

SEQ ID NO: 262614 - RNA, 19 nt, Artificial Sequence
  Description of Artificial Sequence: Synthetic oligonucleotide
  Sense strand starting at position 3652 SEQ ID NO: 3376
ggccuagaauguucugaac

SEQ ID NO: 262615 - RNA, 19 nt, Artificial Sequence
  Description of Artificial Sequence: Synthetic oligonucleotide
  Antisense strand to SEQ ID NO: 262614
guucagaacauucuaggcc

SEQ ID NO: 262616 - RNA, 19 nt, Artificial Sequence
  Description of Artificial Sequence: Synthetic oligonucleotide
  Sense strand starting at position 3782 SEQ ID NO: 3376
uucgaaaucuuucccuguu

SEQ ID NO: 262617 - RNA, 19 nt, Artificial Sequence
  Description of Artificial Sequence: Synthetic oligonucleotide
  Antisense strand to SEQ ID NO: 262616
aacagggaaagauuucgaa

SEQ ID NO: 262618 - RNA, 19 nt, Artificial Sequence
  Description of Artificial Sequence: Synthetic oligonucleotide
  Sense strand starting at position 3783 SEQ ID NO: 3376
ucgaaaucuuucccuguuu

SEQ ID NO: 262619 - RNA, 19 nt, Artificial Sequence
  Description of Artificial Sequence: Synthetic oligonucleotide
  Antisense strand to SEQ ID NO: 262618
aaacagggaaagauuucga

SEQ ID NO: 262620 - RNA, 19 nt, Artificial Sequence
  Description of Artificial Sequence: Synthetic oligonucleotide
  Sense strand starting at position 3811 SEQ ID NO: 3376
cauugugugccugucucau

SEQ ID NO: 262621 - RNA, 19 nt, Artificial Sequence
  Description of Artificial Sequence: Synthetic oligonucleotide
  Antisense strand to SEQ ID NO: 262620
augagacaggcacacaaug

SEQ ID NO: 262622 - RNA, 19 nt, Artificial Sequence
  Description of Artificial Sequence: Synthetic oligonucleotide
  Sense strand starting at position 3813 SEQ ID NO: 3376
uugugugccugucucauuu

SEQ ID NO: 262623 - RNA, 19 nt, Artificial Sequence
  Description of Artificial Sequence: Synthetic oligonucleotide
  Antisense strand to SEQ ID NO: 262622
aaaugagacaggcacacaa

SEQ ID NO: 262624 - RNA, 19 nt, Artificial Sequence
  Description of Artificial Sequence: Synthetic oligonucleotide
  Sense strand starting at position 3843 SEQ ID NO: 3376
ugcucuugccagguguuua

SEQ ID NO: 262625 - RNA, 19 nt, Artificial Sequence
  Description of Artificial Sequence: Synthetic oligonucleotide
  Antisense strand to SEQ ID NO: 262624
uaaacaccuggcaagagca

SEQ ID NO: 262626 - RNA, 19 nt, Artificial Sequence
  Description of Artificial Sequence: Synthetic oligonucleotide
  Sense strand starting at position 3857 SEQ ID NO: 3376
guuuaugaugacugugcua

SEQ ID NO: 262627 - RNA, 19 nt, Artificial Sequence
  Description of Artificial Sequence: Synthetic oligonucleotide
  Antisense strand to SEQ ID NO: 262626
uagcacagucaucauaaac

SEQ ID NO: 262628 - RNA, 19 nt, Artificial Sequence
  Description of Artificial Sequence: Synthetic oligonucleotide
  Sense strand starting at position 3859 SEQ ID NO: 3376
uuaugaugacugugcuaac

SEQ ID NO: 262629 - RNA, 19 nt, Artificial Sequence
  Description of Artificial Sequence: Synthetic oligonucleotide
  Antisense strand to SEQ ID NO: 262628
guuagcacagucaucauaa

SEQ ID NO: 262630 - RNA, 19 nt, Artificial Sequence
  Description of Artificial Sequence: Synthetic oligonucleotide
  Sense strand starting at position 3928 SEQ ID NO: 3376
ggaacagccucauccagaa

SEQ ID NO: 262631 - RNA, 19 nt, Artificial Sequence
  Description of Artificial Sequence: Synthetic oligonucleotide
  Antisense strand to SEQ ID NO: 262630
uucuggaugaggcuguucc

SEQ ID NO: 262632 - RNA, 19 nt, Artificial Sequence
  Description of Artificial Sequence: Synthetic oligonucleotide
  Sense strand starting at position 403 SEQ ID NO: 3377
caagauauguguuaacugu

SEQ ID NO: 262633 - RNA, 19 nt, Artificial Sequence
  Description of Artificial Sequence: Synthetic oligonucleotide
  Antisense strand to SEQ ID NO: 262632
acaguuaacacauaucuug

SEQ ID NO: 262634 - RNA, 19 nt, Artificial Sequence
  Description of Artificial Sequence: Synthetic oligonucleotide
  Sense strand starting at position 411 SEQ ID NO: 3377
guguuaacuguuuauguug

SEQ ID NO: 262635 - RNA, 19 nt, Artificial Sequence
  Description of Artificial Sequence: Synthetic oligonucleotide
  Antisense strand to SEQ ID NO: 262634
caacauaaacaguuaacac

SEQ ID NO: 262636 - RNA, 19 nt, Artificial Sequence
  Description of Artificial Sequence: Synthetic oligonucleotide
  Sense strand starting at position 418 SEQ ID NO: 3377
cuguuuauguugucgguaa

SEQ ID NO: 262637 - RNA, 19 nt, Artificial Sequence
  Description of Artificial Sequence: Synthetic oligonucleotide
  Antisense strand to SEQ ID NO: 262636
uuaccgacaacauaaacag

SEQ ID NO: 262638 - RNA, 19 nt, Artificial Sequence
  Description of Artificial Sequence: Synthetic oligonucleotide
  Sense strand starting at position 422 SEQ ID NO: 3377
uuauguugucgguaaggcu

SEQ ID NO: 262639 - RNA, 19 nt, Artificial Sequence
  Description of Artificial Sequence: Synthetic oligonucleotide
  Antisense strand to SEQ ID NO: 262638
agccuuaccgacaacauaa

SEQ ID NO: 262640 - RNA, 19 nt, Artificial Sequence
  Description of Artificial Sequence: Synthetic oligonucleotide
  Sense strand starting at position 441 SEQ ID NO: 3377
uccagucaugaguaggcua

SEQ ID NO: 262641 - RNA, 19 nt, Artificial Sequence
  Description of Artificial Sequence: Synthetic oligonucleotide
  Antisense strand to SEQ ID NO: 262640
uagccuacucaugacugga

SEQ ID NO: 262642 - RNA, 19 nt, Artificial Sequence
  Description of Artificial Sequence: Synthetic oligonucleotide
  Sense strand starting at position 443 SEQ ID NO: 3377
cagucaugaguaggcuauu

SEQ ID NO: 262643 - RNA, 19 nt, Artificial Sequence
  Description of Artificial Sequence: Synthetic oligonucleotide
  Antisense strand to SEQ ID NO: 262642
aauagccuacucaugacug

SEQ ID NO: 262644 - RNA, 19 nt, Artificial Sequence
  Description of Artificial Sequence: Synthetic oligonucleotide
  Sense strand starting at position 444 SEQ ID NO: 3377
agucaugaguaggcuauua

SEQ ID NO: 262645 - RNA, 19 nt, Artificial Sequence
  Description of Artificial Sequence: Synthetic oligonucleotide
  Antisense strand to SEQ ID NO: 262644
uaauagccuacucaugacu

SEQ ID NO: 262646 - RNA, 19 nt, Artificial Sequence
  Description of Artificial Sequence: Synthetic oligonucleotide
  Sense strand starting at position 446 SEQ ID NO: 3377
ucaugaguaggcuauuagu

SEQ ID NO: 262647 - RNA, 19 nt, Artificial Sequence
  Description of Artificial Sequence: Synthetic oligonucleotide
  Antisense strand to SEQ ID NO: 262646
acuaauagccuacucauga

SEQ ID NO: 262648 - RNA, 19 nt, Artificial Sequence
  Description of Artificial Sequence: Synthetic oligonucleotide
  Sense strand starting at position 476 SEQ ID NO: 3377
ggaggagucaaacguuaua

SEQ ID NO: 262649 - RNA, 19 nt, Artificial Sequence
  Description of Artificial Sequence: Synthetic oligonucleotide
  Antisense strand to SEQ ID NO: 262648
uauaacguuugacuccucc

SEQ ID NO: 262650 - RNA, 19 nt, Artificial Sequence
  Description of Artificial Sequence: Synthetic oligonucleotide
  Sense strand starting at position 479 SEQ ID NO: 3377
ggagucaaacguuauacac

SEQ ID NO: 262651 - RNA, 19 nt, Artificial Sequence
  Description of Artificial Sequence: Synthetic oligonucleotide
  Antisense strand to SEQ ID NO: 262650
guguauaacguuugacucc

SEQ ID NO: 262652 - RNA, 19 nt, Artificial Sequence
  Description of Artificial Sequence: Synthetic oligonucleotide
  Sense strand starting at position 553 SEQ ID NO: 3377
gggucacaguaauuaguca

SEQ ID NO: 262653 - RNA, 19 nt, Artificial Sequence
  Description of Artificial Sequence: Synthetic oligonucleotide
  Antisense strand to SEQ ID NO: 262652
ugacuaauuacugugaccc

SEQ ID NO: 262654 - RNA, 19 nt, Artificial Sequence
  Description of Artificial Sequence: Synthetic oligonucleotide
  Sense strand starting at position 617 SEQ ID NO: 3377
caggcuggugcuuaacaaa

SEQ ID NO: 262655 - RNA, 19 nt, Artificial Sequence
  Description of Artificial Sequence: Synthetic oligonucleotide
  Antisense strand to SEQ ID NO: 262654
uuuguuaagcaccagccug

SEQ ID NO: 262656 - RNA, 19 nt, Artificial Sequence
  Description of Artificial Sequence: Synthetic oligonucleotide
  Sense strand starting at position 913 SEQ ID NO: 3377
cagaucaucgggcaucaga

SEQ ID NO: 262657 - RNA, 19 nt, Artificial Sequence
  Description of Artificial Sequence: Synthetic oligonucleotide
  Antisense strand to SEQ ID NO: 262656
ucugaugcccgaugaucug

SEQ ID NO: 262658 - RNA, 19 nt, Artificial Sequence
  Description of Artificial Sequence: Synthetic oligonucleotide
  Sense strand starting at position 983 SEQ ID NO: 3377
guucgcgcuccagugagaa

SEQ ID NO: 262659 - RNA, 19 nt, Artificial Sequence
  Description of Artificial Sequence: Synthetic oligonucleotide
  Antisense strand to SEQ ID NO: 262658
uucucacuggagcgcgaac

SEQ ID NO: 262660 - RNA, 19 nt, Artificial Sequence
  Description of Artificial Sequence: Synthetic oligonucleotide
  Sense strand starting at position 1391 SEQ ID NO: 3377
auguuaucuuccuugugaa

SEQ ID NO: 262661 - RNA, 19 nt, Artificial Sequence
  Description of Artificial Sequence: Synthetic oligonucleotide
  Antisense strand to SEQ ID NO: 262660
uucacaaggaagauaacau

SEQ ID NO: 262662 - RNA, 19 nt, Artificial Sequence
  Description of Artificial Sequence: Synthetic oligonucleotide
  Sense strand starting at position 1392 SEQ ID NO: 3377
uguuaucuuccuugugaag

SEQ ID NO: 262663 - RNA, 19 nt, Artificial Sequence
  Description of Artificial Sequence: Synthetic oligonucleotide
  Antisense strand to SEQ ID NO: 262662
cuucacaaggaagauaaca

SEQ ID NO: 262664 - RNA, 19 nt, Artificial Sequence
  Description of Artificial Sequence: Synthetic oligonucleotide
  Sense strand starting at position 1823 SEQ ID NO: 3377
acgaccuggccgugaaaca

SEQ ID NO: 262665 - RNA, 19 nt, Artificial Sequence
  Description of Artificial Sequence: Synthetic oligonucleotide
  Antisense strand to SEQ ID NO: 262664
uguuucacggccaggucgu

SEQ ID NO: 262666 - RNA, 19 nt, Artificial Sequence
  Description of Artificial Sequence: Synthetic oligonucleotide
  Sense strand starting at position 1937 SEQ ID NO: 3377
gccauagcgcggagaagau

SEQ ID NO: 262667 - RNA, 19 nt, Artificial Sequence
  Description of Artificial Sequence: Synthetic oligonucleotide
  Antisense strand to SEQ ID NO: 262666
aucuucuccgcgcuauggc

SEQ ID NO: 262668 - RNA, 19 nt, Artificial Sequence
  Description of Artificial Sequence: Synthetic oligonucleotide
  Sense strand starting at position 2048 SEQ ID NO: 3377
ggugugguggaucgugauu

SEQ ID NO: 262669 - RNA, 19 nt, Artificial Sequence
  Description of Artificial Sequence: Synthetic oligonucleotide
  Antisense strand to SEQ ID NO: 262668
aaucacgauccaccacacc

SEQ ID NO: 262670 - RNA, 19 nt, Artificial Sequence
  Description of Artificial Sequence: Synthetic oligonucleotide
  Sense strand starting at position 2311 SEQ ID NO: 3377
gagaauuccucucaagagu

SEQ ID NO: 262671 - RNA, 19 nt, Artificial Sequence
  Description of Artificial Sequence: Synthetic oligonucleotide
  Antisense strand to SEQ ID NO: 262670
acucuugagaggaauucuc

SEQ ID NO: 262672 - RNA, 19 nt, Artificial Sequence
  Description of Artificial Sequence: Synthetic oligonucleotide
  Sense strand starting at position 2411 SEQ ID NO: 3377
uuccguuccauguagagau

SEQ ID NO: 262673 - RNA, 19 nt, Artificial Sequence
  Description of Artificial Sequence: Synthetic oligonucleotide
  Antisense strand to SEQ ID NO: 262672
aucucuacauggaacggaa

SEQ ID NO: 262674 - RNA, 19 nt, Artificial Sequence
  Description of Artificial Sequence: Synthetic oligonucleotide
  Sense strand starting at position 2413 SEQ ID NO: 3377
ccguuccauguagagauau

SEQ ID NO: 262675 - RNA, 19 nt, Artificial Sequence
  Description of Artificial Sequence: Synthetic oligonucleotide
  Antisense strand to SEQ ID NO: 262674
auaucucuacauggaacgg

SEQ ID NO: 262676 - RNA, 19 nt, Artificial Sequence
  Description of Artificial Sequence: Synthetic oligonucleotide
  Sense strand starting at position 2590 SEQ ID NO: 3377
cggcacauuucccuuuaua

SEQ ID NO: 262677 - RNA, 19 nt, Artificial Sequence
  Description of Artificial Sequence: Synthetic oligonucleotide
  Antisense strand to SEQ ID NO: 262676
uauaaagggaaaugugccg

SEQ ID NO: 262678 - RNA, 19 nt, Artificial Sequence
  Description of Artificial Sequence: Synthetic oligonucleotide
  Sense strand starting at position 2610 SEQ ID NO: 3377
gcaagagccuucccaacuu

SEQ ID NO: 262679 - RNA, 19 nt, Artificial Sequence
  Description of Artificial Sequence: Synthetic oligonucleotide
  Antisense strand to SEQ ID NO: 262678
aaguugggaaggcucuugc

SEQ ID NO: 262680 - RNA, 19 nt, Artificial Sequence
  Description of Artificial Sequence: Synthetic oligonucleotide
  Sense strand starting at position 2630 SEQ ID NO: 3377
gaggucugguucccucuua

SEQ ID NO: 262681 - RNA, 19 nt, Artificial Sequence
  Description of Artificial Sequence: Synthetic oligonucleotide
  Antisense strand to SEQ ID NO: 262680
uaagagggaaccagaccuc

SEQ ID NO: 262682 - RNA, 19 nt, Artificial Sequence
  Description of Artificial Sequence: Synthetic oligonucleotide
  Sense strand starting at position 2638 SEQ ID NO: 3377
guucccucuuaggaugaaa

SEQ ID NO: 262683 - RNA, 19 nt, Artificial Sequence
  Description of Artificial Sequence: Synthetic oligonucleotide
  Antisense strand to SEQ ID NO: 262682
uuucauccuaagagggaac

SEQ ID NO: 262684 - RNA, 19 nt, Artificial Sequence
  Description of Artificial Sequence: Synthetic oligonucleotide
  Sense strand starting at position 2640 SEQ ID NO: 3377
ucccucuuaggaugaaaua

SEQ ID NO: 262685 - RNA, 19 nt, Artificial Sequence
  Description of Artificial Sequence: Synthetic oligonucleotide
  Antisense strand to SEQ ID NO: 262684
uauuucauccuaagaggga

SEQ ID NO: 262686 - RNA, 19 nt, Artificial Sequence
  Description of Artificial Sequence: Synthetic oligonucleotide
  Sense strand starting at position 2707 SEQ ID NO: 3377
gaccuaagagcguaggcau

SEQ ID NO: 262687 - RNA, 19 nt, Artificial Sequence
  Description of Artificial Sequence: Synthetic oligonucleotide
  Antisense strand to SEQ ID NO: 262686
augccuacgcucuuagguc

SEQ ID NO: 262688 - RNA, 19 nt, Artificial Sequence
  Description of Artificial Sequence: Synthetic oligonucleotide
  Sense strand starting at position 2732 SEQ ID NO: 3377
caaggugaugcuugugaag

SEQ ID NO: 262689 - RNA, 19 nt, Artificial Sequence
  Description of Artificial Sequence: Synthetic oligonucleotide
  Antisense strand to SEQ ID NO: 262688
cuucacaagcaucaccuug

SEQ ID NO: 262690 - RNA, 19 nt, Artificial Sequence
  Description of Artificial Sequence: Synthetic oligonucleotide
  Sense strand starting at position 2735 SEQ ID NO: 3377
ggugaugcuugugaagaau

SEQ ID NO: 262691 - RNA, 19 nt, Artificial Sequence
  Description of Artificial Sequence: Synthetic oligonucleotide
  Antisense strand to SEQ ID NO: 262690
auucuucacaagcaucacc

SEQ ID NO: 262692 - RNA, 19 nt, Artificial Sequence
  Description of Artificial Sequence: Synthetic oligonucleotide
  Sense strand starting at position 2762 SEQ ID NO: 3377
gugcuuucucagcugccua

SEQ ID NO: 262693 - RNA, 19 nt, Artificial Sequence
  Description of Artificial Sequence: Synthetic oligonucleotide
  Antisense strand to SEQ ID NO: 262692
uaggcagcugagaaagcac

SEQ ID NO: 262694 - RNA, 19 nt, Artificial Sequence
  Description of Artificial Sequence: Synthetic oligonucleotide
  Sense strand starting at position 2971 SEQ ID NO: 3377
agguucuaauccguguaga

SEQ ID NO: 262695 - RNA, 19 nt, Artificial Sequence
  Description of Artificial Sequence: Synthetic oligonucleotide
  Antisense strand to SEQ ID NO: 262694
ucuacacggauuagaaccu

SEQ ID NO: 262696 - RNA, 19 nt, Artificial Sequence
  Description of Artificial Sequence: Synthetic oligonucleotide
  Sense strand starting at position 2972 SEQ ID NO: 3377
gguucuaauccguguagaa

SEQ ID NO: 262697 - RNA, 19 nt, Artificial Sequence
  Description of Artificial Sequence: Synthetic oligonucleotide
  Antisense strand to SEQ ID NO: 262696
uucuacacggauuagaacc

SEQ ID NO: 262698 - RNA, 19 nt, Artificial Sequence
  Description of Artificial Sequence: Synthetic oligonucleotide
  Sense strand starting at position 2974 SEQ ID NO: 3377
uucuaauccguguagaaac

SEQ ID NO: 262699 - RNA, 19 nt, Artificial Sequence
  Description of Artificial Sequence: Synthetic oligonucleotide
  Antisense strand to SEQ ID NO: 262698
guuucuacacggauuagaa

SEQ ID NO: 262700 - RNA, 19 nt, Artificial Sequence
  Description of Artificial Sequence: Synthetic oligonucleotide
  Sense strand starting at position 2976 SEQ ID NO: 3377
cuaauccguguagaaacua

SEQ ID NO: 262701 - RNA, 19 nt, Artificial Sequence
  Description of Artificial Sequence: Synthetic oligonucleotide
  Antisense strand to SEQ ID NO: 262700
uaguuucuacacggauuag

SEQ ID NO: 262702 - RNA, 19 nt, Artificial Sequence
  Description of Artificial Sequence: Synthetic oligonucleotide
  Sense strand starting at position 3391 SEQ ID NO: 3377
guguuaaugcuacaccaaa

SEQ ID NO: 262703 - RNA, 19 nt, Artificial Sequence
  Description of Artificial Sequence: Synthetic oligonucleotide
  Antisense strand to SEQ ID NO: 262702
uuugguguagcauuaacac

SEQ ID NO: 262704 - RNA, 19 nt, Artificial Sequence
  Description of Artificial Sequence: Synthetic oligonucleotide
  Sense strand starting at position 3468 SEQ ID NO: 3377
caguuugucuagcucuaga

SEQ ID NO: 262705 - RNA, 19 nt, Artificial Sequence
  Description of Artificial Sequence: Synthetic oligonucleotide
  Antisense strand to SEQ ID NO: 262704
ucuagagcuagacaaacug

SEQ ID NO: 262706 - RNA, 19 nt, Artificial Sequence
  Description of Artificial Sequence: Synthetic oligonucleotide
  Sense strand starting at position 3471 SEQ ID NO: 3377
uuugucuagcucuagaaau

SEQ ID NO: 262707 - RNA, 19 nt, Artificial Sequence
  Description of Artificial Sequence: Synthetic oligonucleotide
  Antisense strand to SEQ ID NO: 262706
auuucuagagcuagacaaa

SEQ ID NO: 262708 - RNA, 19 nt, Artificial Sequence
  Description of Artificial Sequence: Synthetic oligonucleotide
  Sense strand starting at position 3473 SEQ ID NO: 3377
ugucuagcucuagaaauaa

SEQ ID NO: 262709 - RNA, 19 nt, Artificial Sequence
  Description of Artificial Sequence: Synthetic oligonucleotide
  Antisense strand to SEQ ID NO: 262708
uuauuucuagagcuagaca

SEQ ID NO: 262710 - RNA, 19 nt, Artificial Sequence
  Description of Artificial Sequence: Synthetic oligonucleotide
  Sense strand starting at position 3867 SEQ ID NO: 3377
cuuugcucucucgaaccau

SEQ ID NO: 262711 - RNA, 19 nt, Artificial Sequence
  Description of Artificial Sequence: Synthetic oligonucleotide
  Antisense strand to SEQ ID NO: 262710
augguucgagagagcaaag

SEQ ID NO: 262712 - RNA, 19 nt, Artificial Sequence
  Description of Artificial Sequence: Synthetic oligonucleotide
  Sense strand starting at position 113 SEQ ID NO: 3378
aagcaauaugugggaauug

SEQ ID NO: 262713 - RNA, 19 nt, Artificial Sequence
  Description of Artificial Sequence: Synthetic oligonucleotide
  Antisense strand to SEQ ID NO: 262712
caauucccacauauugcuu

SEQ ID NO: 262714 - RNA, 19 nt, Artificial Sequence
  Description of Artificial Sequence: Synthetic oligonucleotide
  Sense strand starting at position 118 SEQ ID NO: 3378
auaugugggaauuguaaau

SEQ ID NO: 262715 - RNA, 19 nt, Artificial Sequence
  Description of Artificial Sequence: Synthetic oligonucleotide
  Antisense strand to SEQ ID NO: 262714
auuuacaauucccacauau

SEQ ID NO: 262716 - RNA, 19 nt, Artificial Sequence
  Description of Artificial Sequence: Synthetic oligonucleotide
  Sense strand starting at position 138 SEQ ID NO: 3378
gcaaaugugcaguacagau

SEQ ID NO: 262717 - RNA, 19 nt, Artificial Sequence
  Description of Artificial Sequence: Synthetic oligonucleotide
  Antisense strand to SEQ ID NO: 262716
aucuguacugcacauuugc

SEQ ID NO: 262718 - RNA, 19 nt, Artificial Sequence
  Description of Artificial Sequence: Synthetic oligonucleotide
  Sense strand starting at position 218 SEQ ID NO: 3378
aagagcauuuguuauugga

SEQ ID NO: 262719 - RNA, 19 nt, Artificial Sequence
  Description of Artificial Sequence: Synthetic oligonucleotide
  Antisense strand to SEQ ID NO: 262718
uccaauaacaaaugcucuu

SEQ ID NO: 262720 - RNA, 19 nt, Artificial Sequence
  Description of Artificial Sequence: Synthetic oligonucleotide
  Sense strand starting at position 222 SEQ ID NO: 3378
gcauuuguuauuggagagu

SEQ ID NO: 262721 - RNA, 19 nt, Artificial Sequence
  Description of Artificial Sequence: Synthetic oligonucleotide
  Antisense strand to SEQ ID NO: 262720
acucuccaauaacaaaugc

SEQ ID NO: 262722 - RNA, 19 nt, Artificial Sequence
  Description of Artificial Sequence: Synthetic oligonucleotide
  Sense strand starting at position 225 SEQ ID NO: 3378
uuuguuauuggagagugua

SEQ ID NO: 262723 - RNA, 19 nt, Artificial Sequence
  Description of Artificial Sequence: Synthetic oligonucleotide
  Antisense strand to SEQ ID NO: 262722
uacacucuccaauaacaaa

SEQ ID NO: 262724 - RNA, 19 nt, Artificial Sequence
  Description of Artificial Sequence: Synthetic oligonucleotide
  Sense strand starting at position 252 SEQ ID NO: 3378
ggcccaguucuuuagguaa

SEQ ID NO: 262725 - RNA, 19 nt, Artificial Sequence
  Description of Artificial Sequence: Synthetic oligonucleotide
  Antisense strand to SEQ ID NO: 262724
uuaccuaaagaacugggcc

SEQ ID NO: 262726 - RNA, 19 nt, Artificial Sequence
  Description of Artificial Sequence: Synthetic oligonucleotide
  Sense strand starting at position 274 SEQ ID NO: 3378
augagagcaucuuuauaaa

SEQ ID NO: 262727 - RNA, 19 nt, Artificial Sequence
  Description of Artificial Sequence: Synthetic oligonucleotide
  Antisense strand to SEQ ID NO: 262726
uuuauaaagaugcucucau

SEQ ID NO: 262728 - RNA, 19 nt, Artificial Sequence
  Description of Artificial Sequence: Synthetic oligonucleotide
  Sense strand starting at position 314 SEQ ID NO: 3378
cuaggaaaggucuggucca

SEQ ID NO: 262729 - RNA, 19 nt, Artificial Sequence
  Description of Artificial Sequence: Synthetic oligonucleotide
  Antisense strand to SEQ ID NO: 262728
uggaccagaccuuuccuag

SEQ ID NO: 262730 - RNA, 19 nt, Artificial Sequence
  Description of Artificial Sequence: Synthetic oligonucleotide
  Sense strand starting at position 509 SEQ ID NO: 3378
uccgcacugacuggaaauu

SEQ ID NO: 262731 - RNA, 19 nt, Artificial Sequence
  Description of Artificial Sequence: Synthetic oligonucleotide
  Antisense strand to SEQ ID NO: 262730
aauuuccagucagugcgga

SEQ ID NO: 262732 - RNA, 19 nt, Artificial Sequence
  Description of Artificial Sequence: Synthetic oligonucleotide
  Sense strand starting at position 510 SEQ ID NO: 3378
ccgcacugacuggaaauua

SEQ ID NO: 262733 - RNA, 19 nt, Artificial Sequence
  Description of Artificial Sequence: Synthetic oligonucleotide
  Antisense strand to SEQ ID NO: 262732
uaauuuccagucagugcgg

SEQ ID NO: 262734 - RNA, 19 nt, Artificial Sequence
  Description of Artificial Sequence: Synthetic oligonucleotide
  Sense strand starting at position 622 SEQ ID NO: 3378
cacagugaacguuagauga

SEQ ID NO: 262735 - RNA, 19 nt, Artificial Sequence
  Description of Artificial Sequence: Synthetic oligonucleotide
  Antisense strand to SEQ ID NO: 262734
ucaucuaacguucacugug

SEQ ID NO: 262736 - RNA, 19 nt, Artificial Sequence
  Description of Artificial Sequence: Synthetic oligonucleotide
  Sense strand starting at position 666 SEQ ID NO: 3378
ggugcagggcucuaacaau

SEQ ID NO: 262737 - RNA, 19 nt, Artificial Sequence
  Description of Artificial Sequence: Synthetic oligonucleotide
  Antisense strand to SEQ ID NO: 262736
auuguuagagcccugcacc

SEQ ID NO: 262738 - RNA, 19 nt, Artificial Sequence
  Description of Artificial Sequence: Synthetic oligonucleotide
  Sense strand starting at position 1029 SEQ ID NO: 3378
ucauauguugugcaaccau

SEQ ID NO: 262739 - RNA, 19 nt, Artificial Sequence
  Description of Artificial Sequence: Synthetic oligonucleotide
  Antisense strand to SEQ ID NO: 262738
augguugcacaacauauga

SEQ ID NO: 262740 - RNA, 19 nt, Artificial Sequence
  Description of Artificial Sequence: Synthetic oligonucleotide
  Sense strand starting at position 1085 SEQ ID NO: 3378
acugaaauucugcaaguac

SEQ ID NO: 262741 - RNA, 19 nt, Artificial Sequence
  Description of Artificial Sequence: Synthetic oligonucleotide
  Antisense strand to SEQ ID NO: 262740
guacuugcagaauuucagu

SEQ ID NO: 262742 - RNA, 19 nt, Artificial Sequence
  Description of Artificial Sequence: Synthetic oligonucleotide
  Sense strand starting at position 1096 SEQ ID NO: 3378
gcaaguaccgcugaaauau

SEQ ID NO: 262743 - RNA, 19 nt, Artificial Sequence
  Description of Artificial Sequence: Synthetic oligonucleotide
  Antisense strand to SEQ ID NO: 262742
auauuucagcgguacuugc

SEQ ID NO: 262744 - RNA, 19 nt, Artificial Sequence
  Description of Artificial Sequence: Synthetic oligonucleotide
  Sense strand starting at position 1104 SEQ ID NO: 3378
cgcugaaauauggguacuu

SEQ ID NO: 262745 - RNA, 19 nt, Artificial Sequence
  Description of Artificial Sequence: Synthetic oligonucleotide
  Antisense strand to SEQ ID NO: 262744
aaguacccauauuucagcg

SEQ ID NO: 262746 - RNA, 19 nt, Artificial Sequence
  Description of Artificial Sequence: Synthetic oligonucleotide
  Sense strand starting at position 1105 SEQ ID NO: 3378
gcugaaauauggguacuug

SEQ ID NO: 262747 - RNA, 19 nt, Artificial Sequence
  Description of Artificial Sequence: Synthetic oligonucleotide
  Antisense strand to SEQ ID NO: 262746
caaguacccauauuucagc

SEQ ID NO: 262748 - RNA, 19 nt, Artificial Sequence
  Description of Artificial Sequence: Synthetic oligonucleotide
  Sense strand starting at position 1106 SEQ ID NO: 3378
cugaaauauggguacuugu

SEQ ID NO: 262749 - RNA, 19 nt, Artificial Sequence
  Description of Artificial Sequence: Synthetic oligonucleotide
  Antisense strand to SEQ ID NO: 262748
acaaguacccauauuucag

SEQ ID NO: 262750 - RNA, 19 nt, Artificial Sequence
  Description of Artificial Sequence: Synthetic oligonucleotide
  Sense strand starting at position 1156 SEQ ID NO: 3378
gggagccucccggauguuu

SEQ ID NO: 262751 - RNA, 19 nt, Artificial Sequence
  Description of Artificial Sequence: Synthetic oligonucleotide
  Antisense strand to SEQ ID NO: 262750
aaacauccgggaggcuccc

SEQ ID NO: 262752 - RNA, 19 nt, Artificial Sequence
  Description of Artificial Sequence: Synthetic oligonucleotide
  Sense strand starting at position 2087 SEQ ID NO: 3378
cuuuauuaaacguaagcga

SEQ ID NO: 262753 - RNA, 19 nt, Artificial Sequence
  Description of Artificial Sequence: Synthetic oligonucleotide
  Antisense strand to SEQ ID NO: 262752
ucgcuuacguuuaauaaag

SEQ ID NO: 262754 - RNA, 19 nt, Artificial Sequence
  Description of Artificial Sequence: Synthetic oligonucleotide
  Sense strand starting at position 2274 SEQ ID NO: 3378
ucauucguugaacaauuau

SEQ ID NO: 262755 - RNA, 19 nt, Artificial Sequence
  Description of Artificial Sequence: Synthetic oligonucleotide
  Antisense strand to SEQ ID NO: 262754
auaauuguucaacgaauga

SEQ ID NO: 262756 - RNA, 19 nt, Artificial Sequence
  Description of Artificial Sequence: Synthetic oligonucleotide
  Sense strand starting at position 2285 SEQ ID NO: 3378
acaauuauaugagcgccua

SEQ ID NO: 262757 - RNA, 19 nt, Artificial Sequence
  Description of Artificial Sequence: Synthetic oligonucleotide
  Antisense strand to SEQ ID NO: 262756
uaggcgcucauauaauugu

SEQ ID NO: 262758 - RNA, 19 nt, Artificial Sequence
  Description of Artificial Sequence: Synthetic oligonucleotide
  Sense strand starting at position 2692 SEQ ID NO: 3378
uacauauaggguugccaga

SEQ ID NO: 262759 - RNA, 19 nt, Artificial Sequence
  Description of Artificial Sequence: Synthetic oligonucleotide
  Antisense strand to SEQ ID NO: 262758
ucuggcaacccuauaugua

SEQ ID NO: 262760 - RNA, 19 nt, Artificial Sequence
  Description of Artificial Sequence: Synthetic oligonucleotide
  Sense strand starting at position 2701 SEQ ID NO: 3378
gguugccagaucuagcaaa

SEQ ID NO: 262761 - RNA, 19 nt, Artificial Sequence
  Description of Artificial Sequence: Synthetic oligonucleotide
  Antisense strand to SEQ ID NO: 262760
uuugcuagaucuggcaacc

SEQ ID NO: 262762 - RNA, 19 nt, Artificial Sequence
  Description of Artificial Sequence: Synthetic oligonucleotide
  Sense strand starting at position 2760 SEQ ID NO: 3378
aacacuuugggaggucaua

SEQ ID NO: 262763 - RNA, 19 nt, Artificial Sequence
  Description of Artificial Sequence: Synthetic oligonucleotide
  Antisense strand to SEQ ID NO: 262762
uaugaccucccaaaguguu

SEQ ID NO: 262764 - RNA, 19 nt, Artificial Sequence
  Description of Artificial Sequence: Synthetic oligonucleotide
  Sense strand starting at position 2866 SEQ ID NO: 3378
guaucucucccgcaaggaa

SEQ ID NO: 262765 - RNA, 19 nt, Artificial Sequence
  Description of Artificial Sequence: Synthetic oligonucleotide
  Antisense strand to SEQ ID NO: 262764
uuccuugcgggagagauac

SEQ ID NO: 262766 - RNA, 19 nt, Artificial Sequence
  Description of Artificial Sequence: Synthetic oligonucleotide
  Sense strand starting at position 3266 SEQ ID NO: 3378
augguaaauuuacagugaa

SEQ ID NO: 262767 - RNA, 19 nt, Artificial Sequence
  Description of Artificial Sequence: Synthetic oligonucleotide
  Antisense strand to SEQ ID NO: 262766
uucacuguaaauuuaccau

SEQ ID NO: 262768 - RNA, 19 nt, Artificial Sequence
  Description of Artificial Sequence: Synthetic oligonucleotide
  Sense strand starting at position 3305 SEQ ID NO: 3378
ucaaccacgugaucaaagu

SEQ ID NO: 262769 - RNA, 19 nt, Artificial Sequence
  Description of Artificial Sequence: Synthetic oligonucleotide
  Antisense strand to SEQ ID NO: 262768
acuuugaucacgugguuga

SEQ ID NO: 262770 - RNA, 19 nt, Artificial Sequence
  Description of Artificial Sequence: Synthetic oligonucleotide
  Sense strand starting at position 3306 SEQ ID NO: 3378
caaccacgugaucaaaguu

SEQ ID NO: 262771 - RNA, 19 nt, Artificial Sequence
  Description of Artificial Sequence: Synthetic oligonucleotide
  Antisense strand to SEQ ID NO: 262770
aacuuugaucacgugguug

SEQ ID NO: 262772 - RNA, 19 nt, Artificial Sequence
  Description of Artificial Sequence: Synthetic oligonucleotide
  Sense strand starting at position 3378 SEQ ID NO: 3378
ggagacacaucacuucgua

SEQ ID NO: 262773 - RNA, 19 nt, Artificial Sequence
  Description of Artificial Sequence: Synthetic oligonucleotide
  Antisense strand to SEQ ID NO: 262772
uacgaagugaugugucucc

SEQ ID NO: 262774 - RNA, 19 nt, Artificial Sequence
  Description of Artificial Sequence: Synthetic oligonucleotide
  Sense strand starting at position 3537 SEQ ID NO: 3378
guuguaaagcuuuggaaca

SEQ ID NO: 262775 - RNA, 19 nt, Artificial Sequence
  Description of Artificial Sequence: Synthetic oligonucleotide
  Antisense strand to SEQ ID NO: 262774
uguuccaaagcuuuacaac

SEQ ID NO: 262776 - RNA, 19 nt, Artificial Sequence
  Description of Artificial Sequence: Synthetic oligonucleotide
  Sense strand starting at position 3622 SEQ ID NO: 3378
agauaaauugcuuguacuc

SEQ ID NO: 262777 - RNA, 19 nt, Artificial Sequence
  Description of Artificial Sequence: Synthetic oligonucleotide
  Antisense strand to SEQ ID NO: 262776
gaguacaagcaauuuaucu

SEQ ID NO: 262778 - RNA, 19 nt, Artificial Sequence
  Description of Artificial Sequence: Synthetic oligonucleotide
  Sense strand starting at position 3647 SEQ ID NO: 3378
gcuccaaggccaugaaaga

SEQ ID NO: 262779 - RNA, 19 nt, Artificial Sequence
  Description of Artificial Sequence: Synthetic oligonucleotide
  Antisense strand to SEQ ID NO: 262778
ucuuucauggccuuggagc

SEQ ID NO: 262780 - RNA, 19 nt, Artificial Sequence
  Description of Artificial Sequence: Synthetic oligonucleotide
  Sense strand starting at position 3672 SEQ ID NO: 3378
augagaaacuguucuccau

SEQ ID NO: 262781 - RNA, 19 nt, Artificial Sequence
  Description of Artificial Sequence: Synthetic oligonucleotide
  Antisense strand to SEQ ID NO: 262780
auggagaacaguuucucau

SEQ ID NO: 262782 - RNA, 19 nt, Artificial Sequence
  Description of Artificial Sequence: Synthetic oligonucleotide
  Sense strand starting at position 3838 SEQ ID NO: 3378
augaauaaagucugcaacu

SEQ ID NO: 262783 - RNA, 19 nt, Artificial Sequence
  Description of Artificial Sequence: Synthetic oligonucleotide
  Antisense strand to SEQ ID NO: 262782
aguugcagacuuuauucau

SEQ ID NO: 262784 - RNA, 19 nt, Artificial Sequence
  Description of Artificial Sequence: Synthetic oligonucleotide
  Sense strand starting at position 3839 SEQ ID NO: 3378
ugaauaaagucugcaacua

SEQ ID NO: 262785 - RNA, 19 nt, Artificial Sequence
  Description of Artificial Sequence: Synthetic oligonucleotide
  Antisense strand to SEQ ID NO: 262784
uaguugcagacuuuauuca

SEQ ID NO: 262786 - RNA, 19 nt, Artificial Sequence
  Description of Artificial Sequence: Synthetic oligonucleotide
  Sense strand starting at position 3936 SEQ ID NO: 3378
aggaccaugucuguaacuu

SEQ ID NO: 262787 - RNA, 19 nt, Artificial Sequence
  Description of Artificial Sequence: Synthetic oligonucleotide
  Antisense strand to SEQ ID NO: 262786
aaguuacagacaugguccu

SEQ ID NO: 262788 - RNA, 19 nt, Artificial Sequence
  Description of Artificial Sequence: Synthetic oligonucleotide
  Sense strand starting at position 3937 SEQ ID NO: 3378
ggaccaugucuguaacuua

SEQ ID NO: 262789 - RNA, 19 nt, Artificial Sequence
  Description of Artificial Sequence: Synthetic oligonucleotide
  Antisense strand to SEQ ID NO: 262788
uaaguuacagacauggucc

SEQ ID NO: 262790 - RNA, 19 nt, Artificial Sequence
  Description of Artificial Sequence: Synthetic oligonucleotide
  Sense strand starting at position 3981 SEQ ID NO: 3378
augcuuuguauguauaagu

SEQ ID NO: 262791 - RNA, 19 nt, Artificial Sequence
  Description of Artificial Sequence: Synthetic oligonucleotide
  Antisense strand to SEQ ID NO: 262790
acuuauacauacaaagcau

SEQ ID NO: 262792 - RNA, 19 nt, Artificial Sequence
  Description of Artificial Sequence: Synthetic oligonucleotide
  Sense strand starting at position 344 SEQ ID NO: 3379
gaaaguaucuuauuaggca

SEQ ID NO: 262793 - RNA, 19 nt, Artificial Sequence
  Description of Artificial Sequence: Synthetic oligonucleotide
  Antisense strand to SEQ ID NO: 262792
ugccuaauaagauacuuuc

SEQ ID NO: 262794 - RNA, 19 nt, Artificial Sequence
  Description of Artificial Sequence: Synthetic oligonucleotide
  Sense strand starting at position 348 SEQ ID NO: 3379
guaucuuauuaggcaacaa

SEQ ID NO: 262795 - RNA, 19 nt, Artificial Sequence
  Description of Artificial Sequence: Synthetic oligonucleotide
  Antisense strand to SEQ ID NO: 262794
uuguugccuaauaagauac

SEQ ID NO: 262796 - RNA, 19 nt, Artificial Sequence
  Description of Artificial Sequence: Synthetic oligonucleotide
  Sense strand starting at position 399 SEQ ID NO: 3379
caguguuaucuggacucag

SEQ ID NO: 262797 - RNA, 19 nt, Artificial Sequence
  Description of Artificial Sequence: Synthetic oligonucleotide
  Antisense strand to SEQ ID NO: 262796
cugaguccagauaacacug

SEQ ID NO: 262798 - RNA, 19 nt, Artificial Sequence
  Description of Artificial Sequence: Synthetic oligonucleotide
  Sense strand starting at position 537 SEQ ID NO: 3379
guauauacuuuaucaucag

SEQ ID NO: 262799 - RNA, 19 nt, Artificial Sequence
  Description of Artificial Sequence: Synthetic oligonucleotide
  Antisense strand to SEQ ID NO: 262798
cugaugauaaaguauauac

SEQ ID NO: 262800 - RNA, 19 nt, Artificial Sequence
  Description of Artificial Sequence: Synthetic oligonucleotide
  Sense strand starting at position 590 SEQ ID NO: 3379
gcuuauaagcuuugaggau

SEQ ID NO: 262801 - RNA, 19 nt, Artificial Sequence
  Description of Artificial Sequence: Synthetic oligonucleotide
  Antisense strand to SEQ ID NO: 262800
auccucaaagcuuauaagc

SEQ ID NO: 262802 - RNA, 19 nt, Artificial Sequence
  Description of Artificial Sequence: Synthetic oligonucleotide
  Sense strand starting at position 651 SEQ ID NO: 3379
uuuaccuucggacaauuau

SEQ ID NO: 262803 - RNA, 19 nt, Artificial Sequence
  Description of Artificial Sequence: Synthetic oligonucleotide
  Antisense strand to SEQ ID NO: 262802
auaauuguccgaagguaaa

SEQ ID NO: 262804 - RNA, 19 nt, Artificial Sequence
  Description of Artificial Sequence: Synthetic oligonucleotide
  Sense strand starting at position 716 SEQ ID NO: 3379
ggcuuauucgaguaaagau

SEQ ID NO: 262805 - RNA, 19 nt, Artificial Sequence
  Description of Artificial Sequence: Synthetic oligonucleotide
  Antisense strand to SEQ ID NO: 262804
aucuuuacucgaauaagcc

SEQ ID NO: 262806 - RNA, 19 nt, Artificial Sequence
  Description of Artificial Sequence: Synthetic oligonucleotide
  Sense strand starting at position 749 SEQ ID NO: 3379
acuuaaugccaacgaaaua

SEQ ID NO: 262807 - RNA, 19 nt, Artificial Sequence
  Description of Artificial Sequence: Synthetic oligonucleotide
  Antisense strand to SEQ ID NO: 262806
uauuucguuggcauuaagu

SEQ ID NO: 262808 - RNA, 19 nt, Artificial Sequence
  Description of Artificial Sequence: Synthetic oligonucleotide
  Sense strand starting at position 1379 SEQ ID NO: 3379
gaaggaaacuugucacuua

SEQ ID NO: 262809 - RNA, 19 nt, Artificial Sequence
  Description of Artificial Sequence: Synthetic oligonucleotide
  Antisense strand to SEQ ID NO: 262808
uaagugacaaguuuccuuc

SEQ ID NO: 262810 - RNA, 19 nt, Artificial Sequence
  Description of Artificial Sequence: Synthetic oligonucleotide
  Sense strand starting at position 1382 SEQ ID NO: 3379
ggaaacuugucacuuacuc

SEQ ID NO: 262811 - RNA, 19 nt, Artificial Sequence
  Description of Artificial Sequence: Synthetic oligonucleotide
  Antisense strand to SEQ ID NO: 262810
gaguaagugacaaguuucc

SEQ ID NO: 262812 - RNA, 19 nt, Artificial Sequence
  Description of Artificial Sequence: Synthetic oligonucleotide
  Sense strand starting at position 1476 SEQ ID NO: 3379
guuaauggcagucaagacu

SEQ ID NO: 262813 - RNA, 19 nt, Artificial Sequence
  Description of Artificial Sequence: Synthetic oligonucleotide
  Antisense strand to SEQ ID NO: 262812
agucuugacugccauuaac

SEQ ID NO: 262814 - RNA, 19 nt, Artificial Sequence
  Description of Artificial Sequence: Synthetic oligonucleotide
  Sense strand starting at position 1525 SEQ ID NO: 3379
uguuguuucgccgcuagga

SEQ ID NO: 262815 - RNA, 19 nt, Artificial Sequence
  Description of Artificial Sequence: Synthetic oligonucleotide
  Antisense strand to SEQ ID NO: 262814
uccuagcggcgaaacaaca

SEQ ID NO: 262816 - RNA, 19 nt, Artificial Sequence
  Description of Artificial Sequence: Synthetic oligonucleotide
  Sense strand starting at position 1526 SEQ ID NO: 3379
guuguuucgccgcuaggau

SEQ ID NO: 262817 - RNA, 19 nt, Artificial Sequence
  Description of Artificial Sequence: Synthetic oligonucleotide
  Antisense strand to SEQ ID NO: 262816
auccuagcggcgaaacaac

SEQ ID NO: 262818 - RNA, 19 nt, Artificial Sequence
  Description of Artificial Sequence: Synthetic oligonucleotide
  Sense strand starting at position 1538 SEQ ID NO: 3379
cuaggauauccuugucaag

SEQ ID NO: 262819 - RNA, 19 nt, Artificial Sequence
  Description of Artificial Sequence: Synthetic oligonucleotide
  Antisense strand to SEQ ID NO: 262818
cuugacaaggauauccuag

SEQ ID NO: 262820 - RNA, 19 nt, Artificial Sequence
  Description of Artificial Sequence: Synthetic oligonucleotide
  Sense strand starting at position 1540 SEQ ID NO: 3379
aggauauccuugucaagga

SEQ ID NO: 262821 - RNA, 19 nt, Artificial Sequence
  Description of Artificial Sequence: Synthetic oligonucleotide
  Antisense strand to SEQ ID NO: 262820
uccuugacaaggauauccu

SEQ ID NO: 262822 - RNA, 19 nt, Artificial Sequence
  Description of Artificial Sequence: Synthetic oligonucleotide
  Sense strand starting at position 1582 SEQ ID NO: 3379
uacguaguugcguuaggga

SEQ ID NO: 262823 - RNA, 19 nt, Artificial Sequence
  Description of Artificial Sequence: Synthetic oligonucleotide
  Antisense strand to SEQ ID NO: 262822
ucccuaacgcaacuacgua

SEQ ID NO: 262824 - RNA, 19 nt, Artificial Sequence
  Description of Artificial Sequence: Synthetic oligonucleotide
  Sense strand starting at position 1584 SEQ ID NO: 3379
cguaguugcguuagggaaa

SEQ ID NO: 262825 - RNA, 19 nt, Artificial Sequence
  Description of Artificial Sequence: Synthetic oligonucleotide
  Antisense strand to SEQ ID NO: 262824
uuucccuaacgcaacuacg

SEQ ID NO: 262826 - RNA, 19 nt, Artificial Sequence
  Description of Artificial Sequence: Synthetic oligonucleotide
  Sense strand starting at position 1605 SEQ ID NO: 3379
gucugaaugugagcuggaa

SEQ ID NO: 262827 - RNA, 19 nt, Artificial Sequence
  Description of Artificial Sequence: Synthetic oligonucleotide
  Antisense strand to SEQ ID NO: 262826
uuccagcucacauucagac

SEQ ID NO: 262828 - RNA, 19 nt, Artificial Sequence
  Description of Artificial Sequence: Synthetic oligonucleotide
  Sense strand starting at position 1609 SEQ ID NO: 3379
gaaugugagcuggaagcuu

SEQ ID NO: 262829 - RNA, 19 nt, Artificial Sequence
  Description of Artificial Sequence: Synthetic oligonucleotide
  Antisense strand to SEQ ID NO: 262828
aagcuuccagcucacauuc

SEQ ID NO: 262830 - RNA, 19 nt, Artificial Sequence
  Description of Artificial Sequence: Synthetic oligonucleotide
  Sense strand starting at position 1784 SEQ ID NO: 3379
agccgcuuccgagagaaca

SEQ ID NO: 262831 - RNA, 19 nt, Artificial Sequence
  Description of Artificial Sequence: Synthetic oligonucleotide
  Antisense strand to SEQ ID NO: 262830
uguucucucggaagcggcu

SEQ ID NO: 262832 - RNA, 19 nt, Artificial Sequence
  Description of Artificial Sequence: Synthetic oligonucleotide
  Sense strand starting at position 1803 SEQ ID NO: 3379
gugcacaugccuucgugaa

SEQ ID NO: 262833 - RNA, 19 nt, Artificial Sequence
  Description of Artificial Sequence: Synthetic oligonucleotide
  Antisense strand to SEQ ID NO: 262832
uucacgaaggcaugugcac

SEQ ID NO: 262834 - RNA, 19 nt, Artificial Sequence
  Description of Artificial Sequence: Synthetic oligonucleotide
  Sense strand starting at position 1833 SEQ ID NO: 3379
ggcucacgcagggauuaaa

SEQ ID NO: 262835 - RNA, 19 nt, Artificial Sequence
  Description of Artificial Sequence: Synthetic oligonucleotide
  Antisense strand to SEQ ID NO: 262834
uuuaaucccugcgugagcc

SEQ ID NO: 262836 - RNA, 19 nt, Artificial Sequence
  Description of Artificial Sequence: Synthetic oligonucleotide
  Sense strand starting at position 1888 SEQ ID NO: 3379
ugaaguucgcgugauuugu

SEQ ID NO: 262837 - RNA, 19 nt, Artificial Sequence
  Description of Artificial Sequence: Synthetic oligonucleotide
  Antisense strand to SEQ ID NO: 262836
acaaaucacgcgaacuuca

SEQ ID NO: 262838 - RNA, 19 nt, Artificial Sequence
  Description of Artificial Sequence: Synthetic oligonucleotide
  Sense strand starting at position 2045 SEQ ID NO: 3379
ggaagaauggucgguaggu

SEQ ID NO: 262839 - RNA, 19 nt, Artificial Sequence
  Description of Artificial Sequence: Synthetic oligonucleotide
  Antisense strand to SEQ ID NO: 262838
accuaccgaccauucuucc

SEQ ID NO: 262840 - RNA, 19 nt, Artificial Sequence
  Description of Artificial Sequence: Synthetic oligonucleotide
  Sense strand starting at position 2046 SEQ ID NO: 3379
gaagaauggucgguagguc

SEQ ID NO: 262841 - RNA, 19 nt, Artificial Sequence
  Description of Artificial Sequence: Synthetic oligonucleotide
  Antisense strand to SEQ ID NO: 262840
gaccuaccgaccauucuuc

SEQ ID NO: 262842 - RNA, 19 nt, Artificial Sequence
  Description of Artificial Sequence: Synthetic oligonucleotide
  Sense strand starting at position 2047 SEQ ID NO: 3379
aagaauggucgguagguca

SEQ ID NO: 262843 - RNA, 19 nt, Artificial Sequence
  Description of Artificial Sequence: Synthetic oligonucleotide
  Antisense strand to SEQ ID NO: 262842
ugaccuaccgaccauucuu

SEQ ID NO: 262844 - RNA, 19 nt, Artificial Sequence
  Description of Artificial Sequence: Synthetic oligonucleotide
  Sense strand starting at position 2468 SEQ ID NO: 3379
aguguaaucagcuggagaa

SEQ ID NO: 262845 - RNA, 19 nt, Artificial Sequence
  Description of Artificial Sequence: Synthetic oligonucleotide
  Antisense strand to SEQ ID NO: 262844
uucuccagcugauuacacu

SEQ ID NO: 262846 - RNA, 19 nt, Artificial Sequence
  Description of Artificial Sequence: Synthetic oligonucleotide
  Sense strand starting at position 2469 SEQ ID NO: 3379
guguaaucagcuggagaaa

SEQ ID NO: 262847 - RNA, 19 nt, Artificial Sequence
  Description of Artificial Sequence: Synthetic oligonucleotide
  Antisense strand to SEQ ID NO: 262846
uuucuccagcugauuacac

SEQ ID NO: 262848 - RNA, 19 nt, Artificial Sequence
  Description of Artificial Sequence: Synthetic oligonucleotide
  Sense strand starting at position 2597 SEQ ID NO: 3379
ugcuuaacacuguaggaaa

SEQ ID NO: 262849 - RNA, 19 nt, Artificial Sequence
  Description of Artificial Sequence: Synthetic oligonucleotide
  Antisense strand to SEQ ID NO: 262848
uuuccuacaguguuaagca

SEQ ID NO: 262850 - RNA, 19 nt, Artificial Sequence
  Description of Artificial Sequence: Synthetic oligonucleotide
  Sense strand starting at position 2615 SEQ ID NO: 3379
acguuaaauggagaauugu

SEQ ID NO: 262851 - RNA, 19 nt, Artificial Sequence
  Description of Artificial Sequence: Synthetic oligonucleotide
  Antisense strand to SEQ ID NO: 262850
acaauucuccauuuaacgu

SEQ ID NO: 262852 - RNA, 19 nt, Artificial Sequence
  Description of Artificial Sequence: Synthetic oligonucleotide
  Sense strand starting at position 2655 SEQ ID NO: 3379
aaagauacguguuccuaac

SEQ ID NO: 262853 - RNA, 19 nt, Artificial Sequence
  Description of Artificial Sequence: Synthetic oligonucleotide
  Antisense strand to SEQ ID NO: 262852
guuaggaacacguaucuuu

SEQ ID NO: 262854 - RNA, 19 nt, Artificial Sequence
  Description of Artificial Sequence: Synthetic oligonucleotide
  Sense strand starting at position 2657 SEQ ID NO: 3379
agauacguguuccuaacaa

SEQ ID NO: 262855 - RNA, 19 nt, Artificial Sequence
  Description of Artificial Sequence: Synthetic oligonucleotide
  Antisense strand to SEQ ID NO: 262854
uuguuaggaacacguaucu

SEQ ID NO: 262856 - RNA, 19 nt, Artificial Sequence
  Description of Artificial Sequence: Synthetic oligonucleotide
  Sense strand starting at position 2708 SEQ ID NO: 3379
gguagaaccaguuaguauu

SEQ ID NO: 262857 - RNA, 19 nt, Artificial Sequence
  Description of Artificial Sequence: Synthetic oligonucleotide
  Antisense strand to SEQ ID NO: 262856
aauacuaacugguucuacc

SEQ ID NO: 262858 - RNA, 19 nt, Artificial Sequence
  Description of Artificial Sequence: Synthetic oligonucleotide
  Sense strand starting at position 2753 SEQ ID NO: 3379
cuaagucagcucgugugua

SEQ ID NO: 262859 - RNA, 19 nt, Artificial Sequence
  Description of Artificial Sequence: Synthetic oligonucleotide
  Antisense strand to SEQ ID NO: 262858
uacacacgagcugacuuag

SEQ ID NO: 262860 - RNA, 19 nt, Artificial Sequence
  Description of Artificial Sequence: Synthetic oligonucleotide
  Sense strand starting at position 2766 SEQ ID NO: 3379
uguguauggcauuaggagu

SEQ ID NO: 262861 - RNA, 19 nt, Artificial Sequence
  Description of Artificial Sequence: Synthetic oligonucleotide
  Antisense strand to SEQ ID NO: 262860
acuccuaaugccauacaca

SEQ ID NO: 262862 - RNA, 19 nt, Artificial Sequence
  Description of Artificial Sequence: Synthetic oligonucleotide
  Sense strand starting at position 2781 SEQ ID NO: 3379
gaguaauagagccagagug

SEQ ID NO: 262863 - RNA, 19 nt, Artificial Sequence
  Description of Artificial Sequence: Synthetic oligonucleotide
  Antisense strand to SEQ ID NO: 262862
cacucuggcucuauuacuc

SEQ ID NO: 262864 - RNA, 19 nt, Artificial Sequence
  Description of Artificial Sequence: Synthetic oligonucleotide
  Sense strand starting at position 3568 SEQ ID NO: 3379
auguguuugcuguuauggu

SEQ ID NO: 262865 - RNA, 19 nt, Artificial Sequence
  Description of Artificial Sequence: Synthetic oligonucleotide
  Antisense strand to SEQ ID NO: 262864
accauaacagcaaacacau

SEQ ID NO: 262866 - RNA, 19 nt, Artificial Sequence
  Description of Artificial Sequence: Synthetic oligonucleotide
  Sense strand starting at position 3782 SEQ ID NO: 3379
ggguaauugguaugguaca

SEQ ID NO: 262867 - RNA, 19 nt, Artificial Sequence
  Description of Artificial Sequence: Synthetic oligonucleotide
  Antisense strand to SEQ ID NO: 262866
uguaccauaccaauuaccc

SEQ ID NO: 262868 - RNA, 19 nt, Artificial Sequence
  Description of Artificial Sequence: Synthetic oligonucleotide
  Sense strand starting at position 3787 SEQ ID NO: 3379
auugguaugguacagaagu

SEQ ID NO: 262869 - RNA, 19 nt, Artificial Sequence
  Description of Artificial Sequence: Synthetic oligonucleotide
  Antisense strand to SEQ ID NO: 262868
acuucuguaccauaccaau

SEQ ID NO: 262870 - RNA, 19 nt, Artificial Sequence
  Description of Artificial Sequence: Synthetic oligonucleotide
  Sense strand starting at position 3820 SEQ ID NO: 3379
cauacuugccauugaggga

SEQ ID NO: 262871 - RNA, 19 nt, Artificial Sequence
  Description of Artificial Sequence: Synthetic oligonucleotide
  Antisense strand to SEQ ID NO: 262870
ucccucaauggcaaguaug

SEQ ID NO: 262872 - RNA, 19 nt, Artificial Sequence
  Description of Artificial Sequence: Synthetic oligonucleotide
  Sense strand starting at position 275 SEQ ID NO: 3380
gaaaguaucuuauuaggca

SEQ ID NO: 262873 - RNA, 19 nt, Artificial Sequence
  Description of Artificial Sequence: Synthetic oligonucleotide
  Antisense strand to SEQ ID NO: 262872
ugccuaauaagauacuuuc

SEQ ID NO: 262874 - RNA, 19 nt, Artificial Sequence
  Description of Artificial Sequence: Synthetic oligonucleotide
  Sense strand starting at position 279 SEQ ID NO: 3380
guaucuuauuaggcaacaa

SEQ ID NO: 262875 - RNA, 19 nt, Artificial Sequence
  Description of Artificial Sequence: Synthetic oligonucleotide
  Antisense strand to SEQ ID NO: 262874
uuguugccuaauaagauac

SEQ ID NO: 262876 - RNA, 19 nt, Artificial Sequence
  Description of Artificial Sequence: Synthetic oligonucleotide
  Sense strand starting at position 330 SEQ ID NO: 3380
caguguuaucuggacucag

SEQ ID NO: 262877 - RNA, 19 nt, Artificial Sequence
  Description of Artificial Sequence: Synthetic oligonucleotide
  Antisense strand to SEQ ID NO: 262876
cugaguccagauaacacug

SEQ ID NO: 262878 - RNA, 19 nt, Artificial Sequence
  Description of Artificial Sequence: Synthetic oligonucleotide
  Sense strand starting at position 468 SEQ ID NO: 3380
guauauacuuuaucaucag

SEQ ID NO: 262879 - RNA, 19 nt, Artificial Sequence
  Description of Artificial Sequence: Synthetic oligonucleotide
  Antisense strand to SEQ ID NO: 262878
cugaugauaaaguauauac

SEQ ID NO: 262880 - RNA, 19 nt, Artificial Sequence
  Description of Artificial Sequence: Synthetic oligonucleotide
  Sense strand starting at position 521 SEQ ID NO: 3380
gcuuauaagcuuugaggau

SEQ ID NO: 262881 - RNA, 19 nt, Artificial Sequence
  Description of Artificial Sequence: Synthetic oligonucleotide
  Antisense strand to SEQ ID NO: 262880
auccucaaagcuuauaagc

SEQ ID NO: 262882 - RNA, 19 nt, Artificial Sequence
  Description of Artificial Sequence: Synthetic oligonucleotide
  Sense strand starting at position 582 SEQ ID NO: 3380
uuuaccuucggacaauuau

SEQ ID NO: 262883 - RNA, 19 nt, Artificial Sequence
  Description of Artificial Sequence: Synthetic oligonucleotide
  Antisense strand to SEQ ID NO: 262882
auaauuguccgaagguaaa

SEQ ID NO: 262884 - RNA, 19 nt, Artificial Sequence
  Description of Artificial Sequence: Synthetic oligonucleotide
  Sense strand starting at position 647 SEQ ID NO: 3380
ggcuuauucgaguaaagau

SEQ ID NO: 262885 - RNA, 19 nt, Artificial Sequence
  Description of Artificial Sequence: Synthetic oligonucleotide
  Antisense strand to SEQ ID NO: 262884
aucuuuacucgaauaagcc

SEQ ID NO: 262886 - RNA, 19 nt, Artificial Sequence
  Description of Artificial Sequence: Synthetic oligonucleotide
  Sense strand starting at position 680 SEQ ID NO: 3380
acuuaaugccaacgaaaua

SEQ ID NO: 262887 - RNA, 19 nt, Artificial Sequence
  Description of Artificial Sequence: Synthetic oligonucleotide
  Antisense strand to SEQ ID NO: 262886
uauuucguuggcauuaagu

SEQ ID NO: 262888 - RNA, 19 nt, Artificial Sequence
  Description of Artificial Sequence: Synthetic oligonucleotide
  Sense strand starting at position 1310 SEQ ID NO: 3380
gaaggaaacuugucacuua

SEQ ID NO: 262889 - RNA, 19 nt, Artificial Sequence
  Description of Artificial Sequence: Synthetic oligonucleotide
  Antisense strand to SEQ ID NO: 262888
uaagugacaaguuuccuuc

SEQ ID NO: 262890 - RNA, 19 nt, Artificial Sequence
  Description of Artificial Sequence: Synthetic oligonucleotide
  Sense strand starting at position 1313 SEQ ID NO: 3380
ggaaacuugucacuuacuc

SEQ ID NO: 262891 - RNA, 19 nt, Artificial Sequence
  Description of Artificial Sequence: Synthetic oligonucleotide
  Antisense strand to SEQ ID NO: 262890
gaguaagugacaaguuucc

SEQ ID NO: 262892 - RNA, 19 nt, Artificial Sequence
  Description of Artificial Sequence: Synthetic oligonucleotide
  Sense strand starting at position 1407 SEQ ID NO: 3380
guuaauggcagucaagacu

SEQ ID NO: 262893 - RNA, 19 nt, Artificial Sequence
  Description of Artificial Sequence: Synthetic oligonucleotide
  Antisense strand to SEQ ID NO: 262892
agucuugacugccauuaac

SEQ ID NO: 262894 - RNA, 19 nt, Artificial Sequence
  Description of Artificial Sequence: Synthetic oligonucleotide
  Sense strand starting at position 1456 SEQ ID NO: 3380
uguuguuucgccgcuagga

SEQ ID NO: 262895 - RNA, 19 nt, Artificial Sequence
  Description of Artificial Sequence: Synthetic oligonucleotide
  Antisense strand to SEQ ID NO: 262894
uccuagcggcgaaacaaca

SEQ ID NO: 262896 - RNA, 19 nt, Artificial Sequence
  Description of Artificial Sequence: Synthetic oligonucleotide
  Sense strand starting at position 1457 SEQ ID NO: 3380
guuguuucgccgcuaggau

SEQ ID NO: 262897 - RNA, 19 nt, Artificial Sequence
  Description of Artificial Sequence: Synthetic oligonucleotide
  Antisense strand to SEQ ID NO: 262896
auccuagcggcgaaacaac

SEQ ID NO: 262898 - RNA, 19 nt, Artificial Sequence
  Description of Artificial Sequence: Synthetic oligonucleotide
  Sense strand starting at position 1469 SEQ ID NO: 3380
cuaggauauccuugucaag

SEQ ID NO: 262899 - RNA, 19 nt, Artificial Sequence
  Description of Artificial Sequence: Synthetic oligonucleotide
  Antisense strand to SEQ ID NO: 262898
cuugacaaggauauccuag

SEQ ID NO: 262900 - RNA, 19 nt, Artificial Sequence
  Description of Artificial Sequence: Synthetic oligonucleotide
  Sense strand starting at position 1471 SEQ ID NO: 3380
aggauauccuugucaagga

SEQ ID NO: 262901 - RNA, 19 nt, Artificial Sequence
  Description of Artificial Sequence: Synthetic oligonucleotide
  Antisense strand to SEQ ID NO: 262900
uccuugacaaggauauccu

SEQ ID NO: 262902 - RNA, 19 nt, Artificial Sequence
  Description of Artificial Sequence: Synthetic oligonucleotide
  Sense strand starting at position 1513 SEQ ID NO: 3380
uacguaguugcguuaggga

SEQ ID NO: 262903 - RNA, 19 nt, Artificial Sequence
  Description of Artificial Sequence: Synthetic oligonucleotide
  Antisense strand to SEQ ID NO: 262902
ucccuaacgcaacuacgua

SEQ ID NO: 262904 - RNA, 19 nt, Artificial Sequence
  Description of Artificial Sequence: Synthetic oligonucleotide
  Sense strand starting at position 1515 SEQ ID NO: 3380
cguaguugcguuagggaaa

SEQ ID NO: 262905 - RNA, 19 nt, Artificial Sequence
  Description of Artificial Sequence: Synthetic oligonucleotide
  Antisense strand to SEQ ID NO: 262904
uuucccuaacgcaacuacg

SEQ ID NO: 262906 - RNA, 19 nt, Artificial Sequence
  Description of Artificial Sequence: Synthetic oligonucleotide
  Sense strand starting at position 1536 SEQ ID NO: 3380
gucugaaugugagcuggaa

SEQ ID NO: 262907 - RNA, 19 nt, Artificial Sequence
  Description of Artificial Sequence: Synthetic oligonucleotide
  Antisense strand to SEQ ID NO: 262906
uuccagcucacauucagac

SEQ ID NO: 262908 - RNA, 19 nt, Artificial Sequence
  Description of Artificial Sequence: Synthetic oligonucleotide
  Sense strand starting at position 1540 SEQ ID NO: 3380
gaaugugagcuggaagcuu

SEQ ID NO: 262909 - RNA, 19 nt, Artificial Sequence
  Description of Artificial Sequence: Synthetic oligonucleotide
  Antisense strand to SEQ ID NO: 262908
aagcuuccagcucacauuc

SEQ ID NO: 262910 - RNA, 19 nt, Artificial Sequence
  Description of Artificial Sequence: Synthetic oligonucleotide
  Sense strand starting at position 1715 SEQ ID NO: 3380
agccgcuuccgagagaaca

SEQ ID NO: 262911 - RNA, 19 nt, Artificial Sequence
  Description of Artificial Sequence: Synthetic oligonucleotide
  Antisense strand to SEQ ID NO: 262910
uguucucucggaagcggcu

SEQ ID NO: 262912 - RNA, 19 nt, Artificial Sequence
  Description of Artificial Sequence: Synthetic oligonucleotide
  Sense strand starting at position 1734 SEQ ID NO: 3380
gugcacaugccuucgugaa

SEQ ID NO: 262913 - RNA, 19 nt, Artificial Sequence
  Description of Artificial Sequence: Synthetic oligonucleotide
  Antisense strand to SEQ ID NO: 262912
uucacgaaggcaugugcac

SEQ ID NO: 262914 - RNA, 19 nt, Artificial Sequence
  Description of Artificial Sequence: Synthetic oligonucleotide
  Sense strand starting at position 1764 SEQ ID NO: 3380
ggcucacgcagggauuaaa

SEQ ID NO: 262915 - RNA, 19 nt, Artificial Sequence
  Description of Artificial Sequence: Synthetic oligonucleotide
  Antisense strand to SEQ ID NO: 262914
uuuaaucccugcgugagcc

SEQ ID NO: 262916 - RNA, 19 nt, Artificial Sequence
  Description of Artificial Sequence: Synthetic oligonucleotide
  Sense strand starting at position 1819 SEQ ID NO: 3380
ugaaguucgcgugauuugu

SEQ ID NO: 262917 - RNA, 19 nt, Artificial Sequence
  Description of Artificial Sequence: Synthetic oligonucleotide
  Antisense strand to SEQ ID NO: 262916
acaaaucacgcgaacuuca

SEQ ID NO: 262918 - RNA, 19 nt, Artificial Sequence
  Description of Artificial Sequence: Synthetic oligonucleotide
  Sense strand starting at position 1976 SEQ ID NO: 3380
ggaagaauggucgguaggu

SEQ ID NO: 262919 - RNA, 19 nt, Artificial Sequence
  Description of Artificial Sequence: Synthetic oligonucleotide
  Antisense strand to SEQ ID NO: 262918
accuaccgaccauucuucc

SEQ ID NO: 262920 - RNA, 19 nt, Artificial Sequence
  Description of Artificial Sequence: Synthetic oligonucleotide
  Sense strand starting at position 1977 SEQ ID NO: 3380
gaagaauggucgguagguc

SEQ ID NO: 262921 - RNA, 19 nt, Artificial Sequence
  Description of Artificial Sequence: Synthetic oligonucleotide
  Antisense strand to SEQ ID NO: 262920
gaccuaccgaccauucuuc

SEQ ID NO: 262922 - RNA, 19 nt, Artificial Sequence
  Description of Artificial Sequence: Synthetic oligonucleotide
  Sense strand starting at position 1978 SEQ ID NO: 3380
aagaauggucgguagguca

SEQ ID NO: 262923 - RNA, 19 nt, Artificial Sequence
  Description of Artificial Sequence: Synthetic oligonucleotide
  Antisense strand to SEQ ID NO: 262922
ugaccuaccgaccauucuu

SEQ ID NO: 262924 - RNA, 19 nt, Artificial Sequence
  Description of Artificial Sequence: Synthetic oligonucleotide
  Sense strand starting at position 2399 SEQ ID NO: 3380
aguguaaucagcuggagaa

SEQ ID NO: 262925 - RNA, 19 nt, Artificial Sequence
  Description of Artificial Sequence: Synthetic oligonucleotide
  Antisense strand to SEQ ID NO: 262924
uucuccagcugauuacacu

SEQ ID NO: 262926 - RNA, 19 nt, Artificial Sequence
  Description of Artificial Sequence: Synthetic oligonucleotide
  Sense strand starting at position 2400 SEQ ID NO: 3380
guguaaucagcuggagaaa

SEQ ID NO: 262927 - RNA, 19 nt, Artificial Sequence
  Description of Artificial Sequence: Synthetic oligonucleotide
  Antisense strand to SEQ ID NO: 262926
uuucuccagcugauuacac

SEQ ID NO: 262928 - RNA, 19 nt, Artificial Sequence
  Description of Artificial Sequence: Synthetic oligonucleotide
  Sense strand starting at position 2528 SEQ ID NO: 3380
ugcuuaacacuguaggaaa

SEQ ID NO: 262929 - RNA, 19 nt, Artificial Sequence
  Description of Artificial Sequence: Synthetic oligonucleotide
  Antisense strand to SEQ ID NO: 262928
uuuccuacaguguuaagca

SEQ ID NO: 262930 - RNA, 19 nt, Artificial Sequence
  Description of Artificial Sequence: Synthetic oligonucleotide
  Sense strand starting at position 2546 SEQ ID NO: 3380
acguuaaauggagaauugu

SEQ ID NO: 262931 - RNA, 19 nt, Artificial Sequence
  Description of Artificial Sequence: Synthetic oligonucleotide
  Antisense strand to SEQ ID NO: 262930
acaauucuccauuuaacgu

SEQ ID NO: 262932 - RNA, 19 nt, Artificial Sequence
  Description of Artificial Sequence: Synthetic oligonucleotide
  Sense strand starting at position 2586 SEQ ID NO: 3380
aaagauacguguuccuaac

SEQ ID NO: 262933 - RNA, 19 nt, Artificial Sequence
  Description of Artificial Sequence: Synthetic oligonucleotide
  Antisense strand to SEQ ID NO: 262932
guuaggaacacguaucuuu

SEQ ID NO: 262934 - RNA, 19 nt, Artificial Sequence
  Description of Artificial Sequence: Synthetic oligonucleotide
  Sense strand starting at position 2588 SEQ ID NO: 3380
agauacguguuccuaacaa

SEQ ID NO: 262935 - RNA, 19 nt, Artificial Sequence
  Description of Artificial Sequence: Synthetic oligonucleotide
  Antisense strand to SEQ ID NO: 262934
uuguuaggaacacguaucu

SEQ ID NO: 262936 - RNA, 19 nt, Artificial Sequence
  Description of Artificial Sequence: Synthetic oligonucleotide
  Sense strand starting at position 2639 SEQ ID NO: 3380
gguagaaccaguuaguauu

SEQ ID NO: 262937 - RNA, 19 nt, Artificial Sequence
  Description of Artificial Sequence: Synthetic oligonucleotide
  Antisense strand to SEQ ID NO: 262936
aauacuaacugguucuacc

SEQ ID NO: 262938 - RNA, 19 nt, Artificial Sequence
  Description of Artificial Sequence: Synthetic oligonucleotide
  Sense strand starting at position 2684 SEQ ID NO: 3380
cuaagucagcucgugugua

SEQ ID NO: 262939 - RNA, 19 nt, Artificial Sequence
  Description of Artificial Sequence: Synthetic oligonucleotide
  Antisense strand to SEQ ID NO: 262938
uacacacgagcugacuuag

SEQ ID NO: 262940 - RNA, 19 nt, Artificial Sequence
  Description of Artificial Sequence: Synthetic oligonucleotide
  Sense strand starting at position 2697 SEQ ID NO: 3380
uguguauggcauuaggagu

SEQ ID NO: 262941 - RNA, 19 nt, Artificial Sequence
  Description of Artificial Sequence: Synthetic oligonucleotide
  Antisense strand to SEQ ID NO: 262940
acuccuaaugccauacaca

SEQ ID NO: 262942 - RNA, 19 nt, Artificial Sequence
  Description of Artificial Sequence: Synthetic oligonucleotide
  Sense strand starting at position 2712 SEQ ID NO: 3380
gaguaauagagccagagug

SEQ ID NO: 262943 - RNA, 19 nt, Artificial Sequence
  Description of Artificial Sequence: Synthetic oligonucleotide
  Antisense strand to SEQ ID NO: 262942
cacucuggcucuauuacuc

SEQ ID NO: 262944 - RNA, 19 nt, Artificial Sequence
  Description of Artificial Sequence: Synthetic oligonucleotide
  Sense strand starting at position 3499 SEQ ID NO: 3380
auguguuugcuguuauggu

SEQ ID NO: 262945 - RNA, 19 nt, Artificial Sequence
  Description of Artificial Sequence: Synthetic oligonucleotide
  Antisense strand to SEQ ID NO: 262944
accauaacagcaaacacau

SEQ ID NO: 262946 - RNA, 19 nt, Artificial Sequence
  Description of Artificial Sequence: Synthetic oligonucleotide
  Sense strand starting at position 3713 SEQ ID NO: 3380
ggguaauugguaugguaca

SEQ ID NO: 262947 - RNA, 19 nt, Artificial Sequence
  Description of Artificial Sequence: Synthetic oligonucleotide
  Antisense strand to SEQ ID NO: 262946
uguaccauaccaauuaccc

SEQ ID NO: 262948 - RNA, 19 nt, Artificial Sequence
  Description of Artificial Sequence: Synthetic oligonucleotide
  Sense strand starting at position 3718 SEQ ID NO: 3380
auugguaugguacagaagu

SEQ ID NO: 262949 - RNA, 19 nt, Artificial Sequence
  Description of Artificial Sequence: Synthetic oligonucleotide
  Antisense strand to SEQ ID NO: 262948
acuucuguaccauaccaau

SEQ ID NO: 262950 - RNA, 19 nt, Artificial Sequence
  Description of Artificial Sequence: Synthetic oligonucleotide
  Sense strand starting at position 3751 SEQ ID NO: 3380
cauacuugccauugaggga

SEQ ID NO: 262951 - RNA, 19 nt, Artificial Sequence
  Description of Artificial Sequence: Synthetic oligonucleotide
  Antisense strand to SEQ ID NO: 262950
ucccucaauggcaaguaug

SEQ ID NO: 262952 - RNA, 19 nt, Artificial Sequence
  Description of Artificial Sequence: Synthetic oligonucleotide
  Sense strand starting at position 53 SEQ ID NO: 3381
ucugcuauccaaggauuau

SEQ ID NO: 262953 - RNA, 19 nt, Artificial Sequence
  Description of Artificial Sequence: Synthetic oligonucleotide
  Antisense strand to SEQ ID NO: 262952
auaauccuuggauagcaga

SEQ ID NO: 262954 - RNA, 19 nt, Artificial Sequence
  Description of Artificial Sequence: Synthetic oligonucleotide
  Sense strand starting at position 161 SEQ ID NO: 3381
gguguaaugacuuaguagu

SEQ ID NO: 262955 - RNA, 19 nt, Artificial Sequence
  Description of Artificial Sequence: Synthetic oligonucleotide
  Antisense strand to SEQ ID NO: 262954
acuacuaagucauuacacc

SEQ ID NO: 262956 - RNA, 19 nt, Artificial Sequence
  Description of Artificial Sequence: Synthetic oligonucleotide
  Sense strand starting at position 440 SEQ ID NO: 3381
uuaaaucgcugaucuaacu

SEQ ID NO: 262957 - RNA, 19 nt, Artificial Sequence
  Description of Artificial Sequence: Synthetic oligonucleotide
  Antisense strand to SEQ ID NO: 262956
aguuagaucagcgauuuaa

SEQ ID NO: 262958 - RNA, 19 nt, Artificial Sequence
  Description of Artificial Sequence: Synthetic oligonucleotide
  Sense strand starting at position 498 SEQ ID NO: 3381
agaaauaaucauugcuuga

SEQ ID NO: 262959 - RNA, 19 nt, Artificial Sequence
  Description of Artificial Sequence: Synthetic oligonucleotide
  Antisense strand to SEQ ID NO: 262958
ucaagcaaugauuauuucu

SEQ ID NO: 262960 - RNA, 19 nt, Artificial Sequence
  Description of Artificial Sequence: Synthetic oligonucleotide
  Sense strand starting at position 519 SEQ ID NO: 3381
ucucaagauuagucauuga

SEQ ID NO: 262961 - RNA, 19 nt, Artificial Sequence
  Description of Artificial Sequence: Synthetic oligonucleotide
  Antisense strand to SEQ ID NO: 262960
ucaaugacuaaucuugaga

SEQ ID NO: 262962 - RNA, 19 nt, Artificial Sequence
  Description of Artificial Sequence: Synthetic oligonucleotide
  Sense strand starting at position 635 SEQ ID NO: 3381
aggagcuucucuccucuaa

SEQ ID NO: 262963 - RNA, 19 nt, Artificial Sequence
  Description of Artificial Sequence: Synthetic oligonucleotide
  Antisense strand to SEQ ID NO: 262962
uuagaggagagaagcuccu

SEQ ID NO: 262964 - RNA, 19 nt, Artificial Sequence
  Description of Artificial Sequence: Synthetic oligonucleotide
  Sense strand starting at position 819 SEQ ID NO: 3381
ucauuacuguacucauguu

SEQ ID NO: 262965 - RNA, 19 nt, Artificial Sequence
  Description of Artificial Sequence: Synthetic oligonucleotide
  Antisense strand to SEQ ID NO: 262964
aacaugaguacaguaauga

SEQ ID NO: 262966 - RNA, 19 nt, Artificial Sequence
  Description of Artificial Sequence: Synthetic oligonucleotide
  Sense strand starting at position 845 SEQ ID NO: 3381
cugcuagggaguuaugacu

SEQ ID NO: 262967 - RNA, 19 nt, Artificial Sequence
  Description of Artificial Sequence: Synthetic oligonucleotide
  Antisense strand to SEQ ID NO: 262966
agucauaacucccuagcag

SEQ ID NO: 262968 - RNA, 19 nt, Artificial Sequence
  Description of Artificial Sequence: Synthetic oligonucleotide
  Sense strand starting at position 1232 SEQ ID NO: 3381
ccuagagucuuagcaaaug

SEQ ID NO: 262969 - RNA, 19 nt, Artificial Sequence
  Description of Artificial Sequence: Synthetic oligonucleotide
  Antisense strand to SEQ ID NO: 262968
cauuugcuaagacucuagg

SEQ ID NO: 262970 - RNA, 19 nt, Artificial Sequence
  Description of Artificial Sequence: Synthetic oligonucleotide
  Sense strand starting at position 1275 SEQ ID NO: 3381
aagcaagaagucugguguu

SEQ ID NO: 262971 - RNA, 19 nt, Artificial Sequence
  Description of Artificial Sequence: Synthetic oligonucleotide
  Antisense strand to SEQ ID NO: 262970
aacaccagacuucuugcuu

SEQ ID NO: 262972 - RNA, 19 nt, Artificial Sequence
  Description of Artificial Sequence: Synthetic oligonucleotide
  Sense strand starting at position 1306 SEQ ID NO: 3381
gguaacaacugauuaguga

SEQ ID NO: 262973 - RNA, 19 nt, Artificial Sequence
  Description of Artificial Sequence: Synthetic oligonucleotide
  Antisense strand to SEQ ID NO: 262972
ucacuaaucaguuguuacc

SEQ ID NO: 262974 - RNA, 19 nt, Artificial Sequence
  Description of Artificial Sequence: Synthetic oligonucleotide
  Sense strand starting at position 1573 SEQ ID NO: 3381
gugagauaagguugguagu

SEQ ID NO: 262975 - RNA, 19 nt, Artificial Sequence
  Description of Artificial Sequence: Synthetic oligonucleotide
  Antisense strand to SEQ ID NO: 262974
acuaccaaccuuaucucac

SEQ ID NO: 262976 - RNA, 19 nt, Artificial Sequence
  Description of Artificial Sequence: Synthetic oligonucleotide
  Sense strand starting at position 2148 SEQ ID NO: 3381
uccuuucuguaagccagaa

SEQ ID NO: 262977 - RNA, 19 nt, Artificial Sequence
  Description of Artificial Sequence: Synthetic oligonucleotide
  Antisense strand to SEQ ID NO: 262976
uucuggcuuacagaaagga

SEQ ID NO: 262978 - RNA, 19 nt, Artificial Sequence
  Description of Artificial Sequence: Synthetic oligonucleotide
  Sense strand starting at position 2168 SEQ ID NO: 3381
uuuguaaccgaguaacauu

SEQ ID NO: 262979 - RNA, 19 nt, Artificial Sequence
  Description of Artificial Sequence: Synthetic oligonucleotide
  Antisense strand to SEQ ID NO: 262978
aauguuacucgguuacaaa

SEQ ID NO: 262980 - RNA, 19 nt, Artificial Sequence
  Description of Artificial Sequence: Synthetic oligonucleotide
  Sense strand starting at position 2378 SEQ ID NO: 3381
guaauaauauuaucgccau

SEQ ID NO: 262981 - RNA, 19 nt, Artificial Sequence
  Description of Artificial Sequence: Synthetic oligonucleotide
  Antisense strand to SEQ ID NO: 262980
auggcgauaauauuauuac

SEQ ID NO: 262982 - RNA, 19 nt, Artificial Sequence
  Description of Artificial Sequence: Synthetic oligonucleotide
  Sense strand starting at position 2492 SEQ ID NO: 3381
cauuauauugcuggguuga

SEQ ID NO: 262983 - RNA, 19 nt, Artificial Sequence
  Description of Artificial Sequence: Synthetic oligonucleotide
  Antisense strand to SEQ ID NO: 262982
ucaacccagcaauauaaug

SEQ ID NO: 262984 - RNA, 19 nt, Artificial Sequence
  Description of Artificial Sequence: Synthetic oligonucleotide
  Sense strand starting at position 2493 SEQ ID NO: 3381
auuauauugcuggguugau

SEQ ID NO: 262985 - RNA, 19 nt, Artificial Sequence
  Description of Artificial Sequence: Synthetic oligonucleotide
  Antisense strand to SEQ ID NO: 262984
aucaacccagcaauauaau

SEQ ID NO: 262986 - RNA, 19 nt, Artificial Sequence
  Description of Artificial Sequence: Synthetic oligonucleotide
  Sense strand starting at position 2494 SEQ ID NO: 3381
uuauauugcuggguugauu

SEQ ID NO: 262987 - RNA, 19 nt, Artificial Sequence
  Description of Artificial Sequence: Synthetic oligonucleotide
  Antisense strand to SEQ ID NO: 262986
aaucaacccagcaauauaa

SEQ ID NO: 262988 - RNA, 19 nt, Artificial Sequence
  Description of Artificial Sequence: Synthetic oligonucleotide
  Sense strand starting at position 2507 SEQ ID NO: 3381
uugauuaguccguggauag

SEQ ID NO: 262989 - RNA, 19 nt, Artificial Sequence
  Description of Artificial Sequence: Synthetic oligonucleotide
  Antisense strand to SEQ ID NO: 262988
cuauccacggacuaaucaa

SEQ ID NO: 262990 - RNA, 19 nt, Artificial Sequence
  Description of Artificial Sequence: Synthetic oligonucleotide
  Sense strand starting at position 2508 SEQ ID NO: 3381
ugauuaguccguggauaga

SEQ ID NO: 262991 - RNA, 19 nt, Artificial Sequence
  Description of Artificial Sequence: Synthetic oligonucleotide
  Antisense strand to SEQ ID NO: 262990
ucuauccacggacuaauca

SEQ ID NO: 262992 - RNA, 19 nt, Artificial Sequence
  Description of Artificial Sequence: Synthetic oligonucleotide
  Sense strand starting at position 2518 SEQ ID NO: 3381
guggauagacauuaguguu

SEQ ID NO: 262993 - RNA, 19 nt, Artificial Sequence
  Description of Artificial Sequence: Synthetic oligonucleotide
  Antisense strand to SEQ ID NO: 262992
aacacuaaugucuauccac

SEQ ID NO: 262994 - RNA, 19 nt, Artificial Sequence
  Description of Artificial Sequence: Synthetic oligonucleotide
  Sense strand starting at position 2556 SEQ ID NO: 3381
ucaaacaugcuuggcagaa

SEQ ID NO: 262995 - RNA, 19 nt, Artificial Sequence
  Description of Artificial Sequence: Synthetic oligonucleotide
  Antisense strand to SEQ ID NO: 262994
uucugccaagcauguuuga

SEQ ID NO: 262996 - RNA, 19 nt, Artificial Sequence
  Description of Artificial Sequence: Synthetic oligonucleotide
  Sense strand starting at position 2634 SEQ ID NO: 3381
aaaugaugcucagcuugga

SEQ ID NO: 262997 - RNA, 19 nt, Artificial Sequence
  Description of Artificial Sequence: Synthetic oligonucleotide
  Antisense strand to SEQ ID NO: 262996
uccaagcugagcaucauuu

SEQ ID NO: 262998 - RNA, 19 nt, Artificial Sequence
  Description of Artificial Sequence: Synthetic oligonucleotide
  Sense strand starting at position 2637 SEQ ID NO: 3381
ugaugcucagcuuggagaa

SEQ ID NO: 262999 - RNA, 19 nt, Artificial Sequence
  Description of Artificial Sequence: Synthetic oligonucleotide
  Antisense strand to SEQ ID NO: 262998
uucuccaagcugagcauca

SEQ ID NO: 263000 - RNA, 19 nt, Artificial Sequence
  Description of Artificial Sequence: Synthetic oligonucleotide
  Sense strand starting at position 2638 SEQ ID NO: 3381
gaugcucagcuuggagaau

SEQ ID NO: 263001 - RNA, 19 nt, Artificial Sequence
  Description of Artificial Sequence: Synthetic oligonucleotide
  Antisense strand to SEQ ID NO: 263000
auucuccaagcugagcauc

SEQ ID NO: 263002 - RNA, 19 nt, Artificial Sequence
  Description of Artificial Sequence: Synthetic oligonucleotide
  Sense strand starting at position 2729 SEQ ID NO: 3381
cugaguaacuuugucuuaa

SEQ ID NO: 263003 - RNA, 19 nt, Artificial Sequence
  Description of Artificial Sequence: Synthetic oligonucleotide
  Antisense strand to SEQ ID NO: 263002
uuaagacaaaguuacucag

SEQ ID NO: 263004 - RNA, 19 nt, Artificial Sequence
  Description of Artificial Sequence: Synthetic oligonucleotide
  Sense strand starting at position 2730 SEQ ID NO: 3381
ugaguaacuuugucuuaac

SEQ ID NO: 263005 - RNA, 19 nt, Artificial Sequence
  Description of Artificial Sequence: Synthetic oligonucleotide
  Antisense strand to SEQ ID NO: 263004
guuaagacaaaguuacuca

SEQ ID NO: 263006 - RNA, 19 nt, Artificial Sequence
  Description of Artificial Sequence: Synthetic oligonucleotide
  Sense strand starting at position 2790 SEQ ID NO: 3381
gcauuacagauugguggua

SEQ ID NO: 263007 - RNA, 19 nt, Artificial Sequence
  Description of Artificial Sequence: Synthetic oligonucleotide
  Antisense strand to SEQ ID NO: 263006
uaccaccaaucuguaaugc

SEQ ID NO: 263008 - RNA, 19 nt, Artificial Sequence
  Description of Artificial Sequence: Synthetic oligonucleotide
  Sense strand starting at position 2804 SEQ ID NO: 3381
ugguauuacaagugggaca

SEQ ID NO: 263009 - RNA, 19 nt, Artificial Sequence
  Description of Artificial Sequence: Synthetic oligonucleotide
  Antisense strand to SEQ ID NO: 263008
ugucccacuuguaauacca

SEQ ID NO: 263010 - RNA, 19 nt, Artificial Sequence
  Description of Artificial Sequence: Synthetic oligonucleotide
  Sense strand starting at position 2869 SEQ ID NO: 3381
aguucagagaggugaggua

SEQ ID NO: 263011 - RNA, 19 nt, Artificial Sequence
  Description of Artificial Sequence: Synthetic oligonucleotide
  Antisense strand to SEQ ID NO: 263010
uaccucaccucucugaacu

SEQ ID NO: 263012 - RNA, 19 nt, Artificial Sequence
  Description of Artificial Sequence: Synthetic oligonucleotide
  Sense strand starting at position 2947 SEQ ID NO: 3381
ggaaaccuguauucuaaga

SEQ ID NO: 263013 - RNA, 19 nt, Artificial Sequence
  Description of Artificial Sequence: Synthetic oligonucleotide
  Antisense strand to SEQ ID NO: 263012
ucuuagaauacagguuucc

SEQ ID NO: 263014 - RNA, 19 nt, Artificial Sequence
  Description of Artificial Sequence: Synthetic oligonucleotide
  Sense strand starting at position 2974 SEQ ID NO: 3381
ccaugacauuuagaaagcu

SEQ ID NO: 263015 - RNA, 19 nt, Artificial Sequence
  Description of Artificial Sequence: Synthetic oligonucleotide
  Antisense strand to SEQ ID NO: 263014
agcuuucuaaaugucaugg

SEQ ID NO: 263016 - RNA, 19 nt, Artificial Sequence
  Description of Artificial Sequence: Synthetic oligonucleotide
  Sense strand starting at position 3002 SEQ ID NO: 3381
uucuuuauauccguagauc

SEQ ID NO: 263017 - RNA, 19 nt, Artificial Sequence
  Description of Artificial Sequence: Synthetic oligonucleotide
  Antisense strand to SEQ ID NO: 263016
gaucuacggauauaaagaa

SEQ ID NO: 263018 - RNA, 19 nt, Artificial Sequence
  Description of Artificial Sequence: Synthetic oligonucleotide
  Sense strand starting at position 3003 SEQ ID NO: 3381
ucuuuauauccguagaucu

SEQ ID NO: 263019 - RNA, 19 nt, Artificial Sequence
  Description of Artificial Sequence: Synthetic oligonucleotide
  Antisense strand to SEQ ID NO: 263018
agaucuacggauauaaaga

SEQ ID NO: 263020 - RNA, 19 nt, Artificial Sequence
  Description of Artificial Sequence: Synthetic oligonucleotide
  Sense strand starting at position 3005 SEQ ID NO: 3381
uuuauauccguagaucucu

SEQ ID NO: 263021 - RNA, 19 nt, Artificial Sequence
  Description of Artificial Sequence: Synthetic oligonucleotide
  Antisense strand to SEQ ID NO: 263020
agagaucuacggauauaaa

SEQ ID NO: 263022 - RNA, 19 nt, Artificial Sequence
  Description of Artificial Sequence: Synthetic oligonucleotide
  Sense strand starting at position 3011 SEQ ID NO: 3381
uccguagaucucuauuacu

SEQ ID NO: 263023 - RNA, 19 nt, Artificial Sequence
  Description of Artificial Sequence: Synthetic oligonucleotide
  Antisense strand to SEQ ID NO: 263022
aguaauagagaucuacgga

SEQ ID NO: 263024 - RNA, 19 nt, Artificial Sequence
  Description of Artificial Sequence: Synthetic oligonucleotide
  Sense strand starting at position 3821 SEQ ID NO: 3381
gugucuucucuauagcuga

SEQ ID NO: 263025 - RNA, 19 nt, Artificial Sequence
  Description of Artificial Sequence: Synthetic oligonucleotide
  Antisense strand to SEQ ID NO: 263024
ucagcuauagagaagacac

SEQ ID NO: 263026 - RNA, 19 nt, Artificial Sequence
  Description of Artificial Sequence: Synthetic oligonucleotide
  Sense strand starting at position 3849 SEQ ID NO: 3381
uugacaagcagcugugaau

SEQ ID NO: 263027 - RNA, 19 nt, Artificial Sequence
  Description of Artificial Sequence: Synthetic oligonucleotide
  Antisense strand to SEQ ID NO: 263026
auucacagcugcuugucaa

SEQ ID NO: 263028 - RNA, 19 nt, Artificial Sequence
  Description of Artificial Sequence: Synthetic oligonucleotide
  Sense strand starting at position 3855 SEQ ID NO: 3381
agcagcugugaauaguaga

SEQ ID NO: 263029 - RNA, 19 nt, Artificial Sequence
  Description of Artificial Sequence: Synthetic oligonucleotide
  Antisense strand to SEQ ID NO: 263028
ucuacuauucacagcugcu

SEQ ID NO: 263030 - RNA, 19 nt, Artificial Sequence
  Description of Artificial Sequence: Synthetic oligonucleotide
  Sense strand starting at position 3962 SEQ ID NO: 3381
cuccucaucccauagguau

SEQ ID NO: 263031 - RNA, 19 nt, Artificial Sequence
  Description of Artificial Sequence: Synthetic oligonucleotide
  Antisense strand to SEQ ID NO: 263030
auaccuaugggaugaggag

SEQ ID NO: 263032 - RNA, 19 nt, Artificial Sequence
  Description of Artificial Sequence: Synthetic oligonucleotide
  Sense strand starting at position 93 SEQ ID NO: 3382
uugcauguaccagaaacua

SEQ ID NO: 263033 - RNA, 19 nt, Artificial Sequence
  Description of Artificial Sequence: Synthetic oligonucleotide
  Antisense strand to SEQ ID NO: 263032
uaguuucugguacaugcaa

SEQ ID NO: 263034 - RNA, 19 nt, Artificial Sequence
  Description of Artificial Sequence: Synthetic oligonucleotide
  Sense strand starting at position 150 SEQ ID NO: 3382
ccaaaucuccagugagauu

SEQ ID NO: 263035 - RNA, 19 nt, Artificial Sequence
  Description of Artificial Sequence: Synthetic oligonucleotide
  Antisense strand to SEQ ID NO: 263034
aaucucacuggagauuugg

SEQ ID NO: 263036 - RNA, 19 nt, Artificial Sequence
  Description of Artificial Sequence: Synthetic oligonucleotide
  Sense strand starting at position 189 SEQ ID NO: 3382
guauaagauaaucgauaag

SEQ ID NO: 263037 - RNA, 19 nt, Artificial Sequence
  Description of Artificial Sequence: Synthetic oligonucleotide
  Antisense strand to SEQ ID NO: 263036
cuuaucgauuaucuuauac

SEQ ID NO: 263038 - RNA, 19 nt, Artificial Sequence
  Description of Artificial Sequence: Synthetic oligonucleotide
  Sense strand starting at position 243 SEQ ID NO: 3382
gguauuauauauuccucua

SEQ ID NO: 263039 - RNA, 19 nt, Artificial Sequence
  Description of Artificial Sequence: Synthetic oligonucleotide
  Antisense strand to SEQ ID NO: 263038
uagaggaauauauaauacc

SEQ ID NO: 263040 - RNA, 19 nt, Artificial Sequence
  Description of Artificial Sequence: Synthetic oligonucleotide
  Sense strand starting at position 359 SEQ ID NO: 3382
acaugucaaguaugagauc

SEQ ID NO: 263041 - RNA, 19 nt, Artificial Sequence
  Description of Artificial Sequence: Synthetic oligonucleotide
  Antisense strand to SEQ ID NO: 263040
gaucucauacuugacaugu

SEQ ID NO: 263042 - RNA, 19 nt, Artificial Sequence
  Description of Artificial Sequence: Synthetic oligonucleotide
  Sense strand starting at position 398 SEQ ID NO: 3382
gguacuuuaauguguuuau

SEQ ID NO: 263043 - RNA, 19 nt, Artificial Sequence
  Description of Artificial Sequence: Synthetic oligonucleotide
  Antisense strand to SEQ ID NO: 263042
auaaacacauuaaaguacc

SEQ ID NO: 263044 - RNA, 19 nt, Artificial Sequence
  Description of Artificial Sequence: Synthetic oligonucleotide
  Sense strand starting at position 444 SEQ ID NO: 3382
aauggauaauguccagcau

SEQ ID NO: 263045 - RNA, 19 nt, Artificial Sequence
  Description of Artificial Sequence: Synthetic oligonucleotide
  Antisense strand to SEQ ID NO: 263044
augcuggacauuauccauu

SEQ ID NO: 263046 - RNA, 19 nt, Artificial Sequence
  Description of Artificial Sequence: Synthetic oligonucleotide
  Sense strand starting at position 445 SEQ ID NO: 3382
auggauaauguccagcauu

SEQ ID NO: 263047 - RNA, 19 nt, Artificial Sequence
  Description of Artificial Sequence: Synthetic oligonucleotide
  Antisense strand to SEQ ID NO: 263046
aaugcuggacauuauccau

SEQ ID NO: 263048 - RNA, 19 nt, Artificial Sequence
  Description of Artificial Sequence: Synthetic oligonucleotide
  Sense strand starting at position 523 SEQ ID NO: 3382
uugcuaaucucacuugaag

SEQ ID NO: 263049 - RNA, 19 nt, Artificial Sequence
  Description of Artificial Sequence: Synthetic oligonucleotide
  Antisense strand to SEQ ID NO: 263048
cuucaagugagauuagcaa

SEQ ID NO: 263050 - RNA, 19 nt, Artificial Sequence
  Description of Artificial Sequence: Synthetic oligonucleotide
  Sense strand starting at position 657 SEQ ID NO: 3382
agaaacagcuuccugcaau

SEQ ID NO: 263051 - RNA, 19 nt, Artificial Sequence
  Description of Artificial Sequence: Synthetic oligonucleotide
  Antisense strand to SEQ ID NO: 263050
auugcaggaagcuguuucu

SEQ ID NO: 263052 - RNA, 19 nt, Artificial Sequence
  Description of Artificial Sequence: Synthetic oligonucleotide
  Sense strand starting at position 679 SEQ ID NO: 3382
uuaaguccauguguacauu

SEQ ID NO: 263053 - RNA, 19 nt, Artificial Sequence
  Description of Artificial Sequence: Synthetic oligonucleotide
  Antisense strand to SEQ ID NO: 263052
aauguacacauggacuuaa

SEQ ID NO: 263054 - RNA, 19 nt, Artificial Sequence
  Description of Artificial Sequence: Synthetic oligonucleotide
  Sense strand starting at position 682 SEQ ID NO: 3382
aguccauguguacauuacu

SEQ ID NO: 263055 - RNA, 19 nt, Artificial Sequence
  Description of Artificial Sequence: Synthetic oligonucleotide
  Antisense strand to SEQ ID NO: 263054
aguaauguacacauggacu

SEQ ID NO: 263056 - RNA, 19 nt, Artificial Sequence
  Description of Artificial Sequence: Synthetic oligonucleotide
  Sense strand starting at position 685 SEQ ID NO: 3382
ccauguguacauuacugaa

SEQ ID NO: 263057 - RNA, 19 nt, Artificial Sequence
  Description of Artificial Sequence: Synthetic oligonucleotide
  Antisense strand to SEQ ID NO: 263056
uucaguaauguacacaugg

SEQ ID NO: 263058 - RNA, 19 nt, Artificial Sequence
  Description of Artificial Sequence: Synthetic oligonucleotide
  Sense strand starting at position 768 SEQ ID NO: 3382
uugugucaccuacaauaua

SEQ ID NO: 263059 - RNA, 19 nt, Artificial Sequence
  Description of Artificial Sequence: Synthetic oligonucleotide
  Antisense strand to SEQ ID NO: 263058
uauauuguaggugacacaa

SEQ ID NO: 263060 - RNA, 19 nt, Artificial Sequence
  Description of Artificial Sequence: Synthetic oligonucleotide
  Sense strand starting at position 1039 SEQ ID NO: 3382
aauggaguaagguggaauu

SEQ ID NO: 263061 - RNA, 19 nt, Artificial Sequence
  Description of Artificial Sequence: Synthetic oligonucleotide
  Antisense strand to SEQ ID NO: 263060
aauuccaccuuacuccauu

SEQ ID NO: 263062 - RNA, 19 nt, Artificial Sequence
  Description of Artificial Sequence: Synthetic oligonucleotide
  Sense strand starting at position 1085 SEQ ID NO: 3382
gugugaauaucgucaauuc

SEQ ID NO: 263063 - RNA, 19 nt, Artificial Sequence
  Description of Artificial Sequence: Synthetic oligonucleotide
  Antisense strand to SEQ ID NO: 263062
gaauugacgauauucacac

SEQ ID NO: 263064 - RNA, 19 nt, Artificial Sequence
  Description of Artificial Sequence: Synthetic oligonucleotide
  Sense strand starting at position 1094 SEQ ID NO: 3382
ucgucaauucggagcaggu

SEQ ID NO: 263065 - RNA, 19 nt, Artificial Sequence
  Description of Artificial Sequence: Synthetic oligonucleotide
  Antisense strand to SEQ ID NO: 263064
accugcuccgaauugacga

SEQ ID NO: 263066 - RNA, 19 nt, Artificial Sequence
  Description of Artificial Sequence: Synthetic oligonucleotide
  Sense strand starting at position 1127 SEQ ID NO: 3382
agcugcucauuguugagaa

SEQ ID NO: 263067 - RNA, 19 nt, Artificial Sequence
  Description of Artificial Sequence: Synthetic oligonucleotide
  Antisense strand to SEQ ID NO: 263066
uucucaacaaugagcagcu

SEQ ID NO: 263068 - RNA, 19 nt, Artificial Sequence
  Description of Artificial Sequence: Synthetic oligonucleotide
  Sense strand starting at position 1129 SEQ ID NO: 3382
cugcucauuguugagaaag

SEQ ID NO: 263069 - RNA, 19 nt, Artificial Sequence
  Description of Artificial Sequence: Synthetic oligonucleotide
  Antisense strand to SEQ ID NO: 263068
cuuucucaacaaugagcag

SEQ ID NO: 263070 - RNA, 19 nt, Artificial Sequence
  Description of Artificial Sequence: Synthetic oligonucleotide
  Sense strand starting at position 2121 SEQ ID NO: 3382
guuggucacacuugacaag

SEQ ID NO: 263071 - RNA, 19 nt, Artificial Sequence
  Description of Artificial Sequence: Synthetic oligonucleotide
  Antisense strand to SEQ ID NO: 263070
cuugucaagugugaccaac

SEQ ID NO: 263072 - RNA, 19 nt, Artificial Sequence
  Description of Artificial Sequence: Synthetic oligonucleotide
  Sense strand starting at position 2251 SEQ ID NO: 3382
uuguuaguauuggccaaga

SEQ ID NO: 263073 - RNA, 19 nt, Artificial Sequence
  Description of Artificial Sequence: Synthetic oligonucleotide
  Antisense strand to SEQ ID NO: 263072
ucuuggccaauacuaacaa

SEQ ID NO: 263074 - RNA, 19 nt, Artificial Sequence
  Description of Artificial Sequence: Synthetic oligonucleotide
  Sense strand starting at position 2292 SEQ ID NO: 3382
ccggucucccauuggugaa

SEQ ID NO: 263075 - RNA, 19 nt, Artificial Sequence
  Description of Artificial Sequence: Synthetic oligonucleotide
  Antisense strand to SEQ ID NO: 263074
uucaccaaugggagaccgg

SEQ ID NO: 263076 - RNA, 19 nt, Artificial Sequence
  Description of Artificial Sequence: Synthetic oligonucleotide
  Sense strand starting at position 2304 SEQ ID NO: 3382
uggugaagccuucggaaac

SEQ ID NO: 263077 - RNA, 19 nt, Artificial Sequence
  Description of Artificial Sequence: Synthetic oligonucleotide
  Antisense strand to SEQ ID NO: 263076
guuuccgaaggcuucacca

SEQ ID NO: 263078 - RNA, 19 nt, Artificial Sequence
  Description of Artificial Sequence: Synthetic oligonucleotide
  Sense strand starting at position 2901 SEQ ID NO: 3382
ccgggaagugauggaauaa

SEQ ID NO: 263079 - RNA, 19 nt, Artificial Sequence
  Description of Artificial Sequence: Synthetic oligonucleotide
  Antisense strand to SEQ ID NO: 263078
uuauuccaucacuucccgg

SEQ ID NO: 263080 - RNA, 19 nt, Artificial Sequence
  Description of Artificial Sequence: Synthetic oligonucleotide
  Sense strand starting at position 3366 SEQ ID NO: 3382
ggccaagaauacucuuuaa

SEQ ID NO: 263081 - RNA, 19 nt, Artificial Sequence
  Description of Artificial Sequence: Synthetic oligonucleotide
  Antisense strand to SEQ ID NO: 263080
uuaaagaguauucuuggcc

SEQ ID NO: 263082 - RNA, 19 nt, Artificial Sequence
  Description of Artificial Sequence: Synthetic oligonucleotide
  Sense strand starting at position 3379 SEQ ID NO: 3382
cuuuaagacgucugcaaau

SEQ ID NO: 263083 - RNA, 19 nt, Artificial Sequence
  Description of Artificial Sequence: Synthetic oligonucleotide
  Antisense strand to SEQ ID NO: 263082
auuugcagacgucuuaaag

SEQ ID NO: 263084 - RNA, 19 nt, Artificial Sequence
  Description of Artificial Sequence: Synthetic oligonucleotide
  Sense strand starting at position 3381 SEQ ID NO: 3382
uuaagacgucugcaaauug

SEQ ID NO: 263085 - RNA, 19 nt, Artificial Sequence
  Description of Artificial Sequence: Synthetic oligonucleotide
  Antisense strand to SEQ ID NO: 263084
caauuugcagacgucuuaa

SEQ ID NO: 263086 - RNA, 19 nt, Artificial Sequence
  Description of Artificial Sequence: Synthetic oligonucleotide
  Sense strand starting at position 3438 SEQ ID NO: 3382
auagaauguuacguauaca

SEQ ID NO: 263087 - RNA, 19 nt, Artificial Sequence
  Description of Artificial Sequence: Synthetic oligonucleotide
  Antisense strand to SEQ ID NO: 263086
uguauacguaacauucuau

SEQ ID NO: 263088 - RNA, 19 nt, Artificial Sequence
  Description of Artificial Sequence: Synthetic oligonucleotide
  Sense strand starting at position 3441 SEQ ID NO: 3382
gaauguuacguauacagaa

SEQ ID NO: 263089 - RNA, 19 nt, Artificial Sequence
  Description of Artificial Sequence: Synthetic oligonucleotide
  Antisense strand to SEQ ID NO: 263088
uucuguauacguaacauuc

SEQ ID NO: 263090 - RNA, 19 nt, Artificial Sequence
  Description of Artificial Sequence: Synthetic oligonucleotide
  Sense strand starting at position 3467 SEQ ID NO: 3382
gguuaaagaucggucccua

SEQ ID NO: 263091 - RNA, 19 nt, Artificial Sequence
  Description of Artificial Sequence: Synthetic oligonucleotide
  Antisense strand to SEQ ID NO: 263090
uagggaccgaucuuuaacc

SEQ ID NO: 263092 - RNA, 19 nt, Artificial Sequence
  Description of Artificial Sequence: Synthetic oligonucleotide
  Sense strand starting at position 3576 SEQ ID NO: 3382
aauaaaguucuugguaggu

SEQ ID NO: 263093 - RNA, 19 nt, Artificial Sequence
  Description of Artificial Sequence: Synthetic oligonucleotide
  Antisense strand to SEQ ID NO: 263092
accuaccaagaacuuuauu

SEQ ID NO: 263094 - RNA, 19 nt, Artificial Sequence
  Description of Artificial Sequence: Synthetic oligonucleotide
  Sense strand starting at position 3613 SEQ ID NO: 3382
augaguaaagcaugaacau

SEQ ID NO: 263095 - RNA, 19 nt, Artificial Sequence
  Description of Artificial Sequence: Synthetic oligonucleotide
  Antisense strand to SEQ ID NO: 263094
auguucaugcuuuacucau

SEQ ID NO: 263096 - RNA, 19 nt, Artificial Sequence
  Description of Artificial Sequence: Synthetic oligonucleotide
  Sense strand starting at position 3647 SEQ ID NO: 3382
aguuuauuauuguugccaa

SEQ ID NO: 263097 - RNA, 19 nt, Artificial Sequence
  Description of Artificial Sequence: Synthetic oligonucleotide
  Antisense strand to SEQ ID NO: 263096
uuggcaacaauaauaaacu

SEQ ID NO: 263098 - RNA, 19 nt, Artificial Sequence
  Description of Artificial Sequence: Synthetic oligonucleotide
  Sense strand starting at position 3674 SEQ ID NO: 3382
agcuuacuauguguaggua

SEQ ID NO: 263099 - RNA, 19 nt, Artificial Sequence
  Description of Artificial Sequence: Synthetic oligonucleotide
  Antisense strand to SEQ ID NO: 263098
uaccuacacauaguaagcu

SEQ ID NO: 263100 - RNA, 19 nt, Artificial Sequence
  Description of Artificial Sequence: Synthetic oligonucleotide
  Sense strand starting at position 3675 SEQ ID NO: 3382
gcuuacuauguguagguau

SEQ ID NO: 263101 - RNA, 19 nt, Artificial Sequence
  Description of Artificial Sequence: Synthetic oligonucleotide
  Antisense strand to SEQ ID NO: 263100
auaccuacacauaguaagc

SEQ ID NO: 263102 - RNA, 19 nt, Artificial Sequence
  Description of Artificial Sequence: Synthetic oligonucleotide
  Sense strand starting at position 3732 SEQ ID NO: 3382
gagguagguuguguuaauu

SEQ ID NO: 263103 - RNA, 19 nt, Artificial Sequence
  Description of Artificial Sequence: Synthetic oligonucleotide
  Antisense strand to SEQ ID NO: 263102
aauuaacacaaccuaccuc

SEQ ID NO: 263104 - RNA, 19 nt, Artificial Sequence
  Description of Artificial Sequence: Synthetic oligonucleotide
  Sense strand starting at position 3879 SEQ ID NO: 3382
uugguaguuguauaaagac

SEQ ID NO: 263105 - RNA, 19 nt, Artificial Sequence
  Description of Artificial Sequence: Synthetic oligonucleotide
  Antisense strand to SEQ ID NO: 263104
gucuuuauacaacuaccaa

SEQ ID NO: 263106 - RNA, 19 nt, Artificial Sequence
  Description of Artificial Sequence: Synthetic oligonucleotide
  Sense strand starting at position 3975 SEQ ID NO: 3382
guguaaauguaauuauggu

SEQ ID NO: 263107 - RNA, 19 nt, Artificial Sequence
  Description of Artificial Sequence: Synthetic oligonucleotide
  Antisense strand to SEQ ID NO: 263106
accauaauuacauuuacac

SEQ ID NO: 263108 - RNA, 19 nt, Artificial Sequence
  Description of Artificial Sequence: Synthetic oligonucleotide
  Sense strand starting at position 3982 SEQ ID NO: 3382
uguaauuauggugggaaau

SEQ ID NO: 263109 - RNA, 19 nt, Artificial Sequence
  Description of Artificial Sequence: Synthetic oligonucleotide
  Antisense strand to SEQ ID NO: 263108
auuucccaccauaauuaca

SEQ ID NO: 263110 - RNA, 19 nt, Artificial Sequence
  Description of Artificial Sequence: Synthetic oligonucleotide
  Sense strand starting at position 3983 SEQ ID NO: 3382
guaauuauggugggaaaua

SEQ ID NO: 263111 - RNA, 19 nt, Artificial Sequence
  Description of Artificial Sequence: Synthetic oligonucleotide
  Antisense strand to SEQ ID NO: 263110
uauuucccaccauaauuac

SEQ ID NO: 263112 - RNA, 19 nt, Artificial Sequence
  Description of Artificial Sequence: Synthetic oligonucleotide
  Sense strand starting at position 671 SEQ ID NO: 3383
guacaagcugucuacgaca

SEQ ID NO: 263113 - RNA, 19 nt, Artificial Sequence
  Description of Artificial Sequence: Synthetic oligonucleotide
  Antisense strand to SEQ ID NO: 263112
ugucguagacagcuuguac

SEQ ID NO: 263114 - RNA, 19 nt, Artificial Sequence
  Description of Artificial Sequence: Synthetic oligonucleotide
  Sense strand starting at position 789 SEQ ID NO: 3383
ggcuguuccuggcugcaga

SEQ ID NO: 263115 - RNA, 19 nt, Artificial Sequence
  Description of Artificial Sequence: Synthetic oligonucleotide
  Antisense strand to SEQ ID NO: 263114
ucugcagccaggaacagcc

SEQ ID NO: 263116 - RNA, 19 nt, Artificial Sequence
  Description of Artificial Sequence: Synthetic oligonucleotide
  Sense strand starting at position 790 SEQ ID NO: 3383
gcuguuccuggcugcagaa

SEQ ID NO: 263117 - RNA, 19 nt, Artificial Sequence
  Description of Artificial Sequence: Synthetic oligonucleotide
  Antisense strand to SEQ ID NO: 263116
uucugcagccaggaacagc

SEQ ID NO: 263118 - RNA, 19 nt, Artificial Sequence
  Description of Artificial Sequence: Synthetic oligonucleotide
  Sense strand starting at position 792 SEQ ID NO: 3383
uguuccuggcugcagaauu

SEQ ID NO: 263119 - RNA, 19 nt, Artificial Sequence
  Description of Artificial Sequence: Synthetic oligonucleotide
  Antisense strand to SEQ ID NO: 263118
aauucugcagccaggaaca

SEQ ID NO: 263120 - RNA, 19 nt, Artificial Sequence
  Description of Artificial Sequence: Synthetic oligonucleotide
  Sense strand starting at position 803 SEQ ID NO: 3383
gcagaauucuagcucucac

SEQ ID NO: 263121 - RNA, 19 nt, Artificial Sequence
  Description of Artificial Sequence: Synthetic oligonucleotide
  Antisense strand to SEQ ID NO: 263120
gugagagcuagaauucugc

SEQ ID NO: 263122 - RNA, 19 nt, Artificial Sequence
  Description of Artificial Sequence: Synthetic oligonucleotide
  Sense strand starting at position 2219 SEQ ID NO: 3383
cuggcaauugcuugucauu

SEQ ID NO: 263123 - RNA, 19 nt, Artificial Sequence
  Description of Artificial Sequence: Synthetic oligonucleotide
  Antisense strand to SEQ ID NO: 263122
aaugacaagcaauugccag

SEQ ID NO: 263124 - RNA, 19 nt, Artificial Sequence
  Description of Artificial Sequence: Synthetic oligonucleotide
  Sense strand starting at position 2221 SEQ ID NO: 3383
ggcaauugcuugucauuaa

SEQ ID NO: 263125 - RNA, 19 nt, Artificial Sequence
  Description of Artificial Sequence: Synthetic oligonucleotide
  Antisense strand to SEQ ID NO: 263124
uuaaugacaagcaauugcc

SEQ ID NO: 263126 - RNA, 19 nt, Artificial Sequence
  Description of Artificial Sequence: Synthetic oligonucleotide
  Sense strand starting at position 2375 SEQ ID NO: 3383
gguugcuccuguguaauua

SEQ ID NO: 263127 - RNA, 19 nt, Artificial Sequence
  Description of Artificial Sequence: Synthetic oligonucleotide
  Antisense strand to SEQ ID NO: 263126
uaauuacacaggagcaacc

SEQ ID NO: 263128 - RNA, 19 nt, Artificial Sequence
  Description of Artificial Sequence: Synthetic oligonucleotide
  Sense strand starting at position 2376 SEQ ID NO: 3383
guugcuccuguguaauuac

SEQ ID NO: 263129 - RNA, 19 nt, Artificial Sequence
  Description of Artificial Sequence: Synthetic oligonucleotide
  Antisense strand to SEQ ID NO: 263128
guaauuacacaggagcaac

SEQ ID NO: 263130 - RNA, 19 nt, Artificial Sequence
  Description of Artificial Sequence: Synthetic oligonucleotide
  Sense strand starting at position 2379 SEQ ID NO: 3383
gcuccuguguaauuacgaa

SEQ ID NO: 263131 - RNA, 19 nt, Artificial Sequence
  Description of Artificial Sequence: Synthetic oligonucleotide
  Antisense strand to SEQ ID NO: 263130
uucguaauuacacaggagc

SEQ ID NO: 263132 - RNA, 19 nt, Artificial Sequence
  Description of Artificial Sequence: Synthetic oligonucleotide
  Sense strand starting at position 2383 SEQ ID NO: 3383
cuguguaauuacgaaagaa

SEQ ID NO: 263133 - RNA, 19 nt, Artificial Sequence
  Description of Artificial Sequence: Synthetic oligonucleotide
  Antisense strand to SEQ ID NO: 263132
uucuuucguaauuacacag

SEQ ID NO: 263134 - RNA, 19 nt, Artificial Sequence
  Description of Artificial Sequence: Synthetic oligonucleotide
  Sense strand starting at position 2450 SEQ ID NO: 3383
gaacaagaccucuggaugu

SEQ ID NO: 263135 - RNA, 19 nt, Artificial Sequence
  Description of Artificial Sequence: Synthetic oligonucleotide
  Antisense strand to SEQ ID NO: 263134
acauccagaggucuuguuc

SEQ ID NO: 263136 - RNA, 19 nt, Artificial Sequence
  Description of Artificial Sequence: Synthetic oligonucleotide
  Sense strand starting at position 2522 SEQ ID NO: 3383
aauaaauaagugcgagcua

SEQ ID NO: 263137 - RNA, 19 nt, Artificial Sequence
  Description of Artificial Sequence: Synthetic oligonucleotide
  Antisense strand to SEQ ID NO: 263136
uagcucgcacuuauuuauu

SEQ ID NO: 263138 - RNA, 19 nt, Artificial Sequence
  Description of Artificial Sequence: Synthetic oligonucleotide
  Sense strand starting at position 2557 SEQ ID NO: 3383
gugguuucuucggccgaag

SEQ ID NO: 263139 - RNA, 19 nt, Artificial Sequence
  Description of Artificial Sequence: Synthetic oligonucleotide
  Antisense strand to SEQ ID NO: 263138
cuucggccgaagaaaccac

SEQ ID NO: 263140 - RNA, 19 nt, Artificial Sequence
  Description of Artificial Sequence: Synthetic oligonucleotide
  Sense strand starting at position 2805 SEQ ID NO: 3383
caguuaugggcaggcgaau

SEQ ID NO: 263141 - RNA, 19 nt, Artificial Sequence
  Description of Artificial Sequence: Synthetic oligonucleotide
  Antisense strand to SEQ ID NO: 263140
auucgccugcccauaacug

SEQ ID NO: 263142 - RNA, 19 nt, Artificial Sequence
  Description of Artificial Sequence: Synthetic oligonucleotide
  Sense strand starting at position 2924 SEQ ID NO: 3383
gucacuacuucguuucuuu

SEQ ID NO: 263143 - RNA, 19 nt, Artificial Sequence
  Description of Artificial Sequence: Synthetic oligonucleotide
  Antisense strand to SEQ ID NO: 263142
aaagaaacgaaguagugac

SEQ ID NO: 263144 - RNA, 19 nt, Artificial Sequence
  Description of Artificial Sequence: Synthetic oligonucleotide
  Sense strand starting at position 2957 SEQ ID NO: 3383
ucaauugugaaauggaguu

SEQ ID NO: 263145 - RNA, 19 nt, Artificial Sequence
  Description of Artificial Sequence: Synthetic oligonucleotide
  Antisense strand to SEQ ID NO: 263144
aacuccauuucacaauuga

SEQ ID NO: 263146 - RNA, 19 nt, Artificial Sequence
  Description of Artificial Sequence: Synthetic oligonucleotide
  Sense strand starting at position 2980 SEQ ID NO: 3383
gugccuccuaccugagagu

SEQ ID NO: 263147 - RNA, 19 nt, Artificial Sequence
  Description of Artificial Sequence: Synthetic oligonucleotide
  Antisense strand to SEQ ID NO: 263146
acucucagguaggaggcac

SEQ ID NO: 263148 - RNA, 19 nt, Artificial Sequence
  Description of Artificial Sequence: Synthetic oligonucleotide
  Sense strand starting at position 2983 SEQ ID NO: 3383
ccuccuaccugagaguuau

SEQ ID NO: 263149 - RNA, 19 nt, Artificial Sequence
  Description of Artificial Sequence: Synthetic oligonucleotide
  Antisense strand to SEQ ID NO: 263148
auaacucucagguaggagg

SEQ ID NO: 263150 - RNA, 19 nt, Artificial Sequence
  Description of Artificial Sequence: Synthetic oligonucleotide
  Sense strand starting at position 3023 SEQ ID NO: 3383
gcccauaauaguuguguca

SEQ ID NO: 263151 - RNA, 19 nt, Artificial Sequence
  Description of Artificial Sequence: Synthetic oligonucleotide
  Antisense strand to SEQ ID NO: 263150
ugacacaacuauuaugggc

SEQ ID NO: 263152 - RNA, 19 nt, Artificial Sequence
  Description of Artificial Sequence: Synthetic oligonucleotide
  Sense strand starting at position 3030 SEQ ID NO: 3383
auaguugugucagcuauua

SEQ ID NO: 263153 - RNA, 19 nt, Artificial Sequence
  Description of Artificial Sequence: Synthetic oligonucleotide
  Antisense strand to SEQ ID NO: 263152
uaauagcugacacaacuau

SEQ ID NO: 263154 - RNA, 19 nt, Artificial Sequence
  Description of Artificial Sequence: Synthetic oligonucleotide
  Sense strand starting at position 3032 SEQ ID NO: 3383
aguugugucagcuauuauu

SEQ ID NO: 263155 - RNA, 19 nt, Artificial Sequence
  Description of Artificial Sequence: Synthetic oligonucleotide
  Antisense strand to SEQ ID NO: 263154
aauaauagcugacacaacu

SEQ ID NO: 263156 - RNA, 19 nt, Artificial Sequence
  Description of Artificial Sequence: Synthetic oligonucleotide
  Sense strand starting at position 3043 SEQ ID NO: 3383
cuauuauuaugaugaugac

SEQ ID NO: 263157 - RNA, 19 nt, Artificial Sequence
  Description of Artificial Sequence: Synthetic oligonucleotide
  Antisense strand to SEQ ID NO: 263156
gucaucaucauaauaauag

SEQ ID NO: 263158 - RNA, 19 nt, Artificial Sequence
  Description of Artificial Sequence: Synthetic oligonucleotide
  Sense strand starting at position 3565 SEQ ID NO: 3383
gagaaagauucccagaguu

SEQ ID NO: 263159 - RNA, 19 nt, Artificial Sequence
  Description of Artificial Sequence: Synthetic oligonucleotide
  Antisense strand to SEQ ID NO: 263158
aacucugggaaucuuucuc

SEQ ID NO: 263160 - RNA, 19 nt, Artificial Sequence
  Description of Artificial Sequence: Synthetic oligonucleotide
  Sense strand starting at position 3573 SEQ ID NO: 3383
uucccagaguucuaggaag

SEQ ID NO: 263161 - RNA, 19 nt, Artificial Sequence
  Description of Artificial Sequence: Synthetic oligonucleotide
  Antisense strand to SEQ ID NO: 263160
cuuccuagaacucugggaa

SEQ ID NO: 263162 - RNA, 19 nt, Artificial Sequence
  Description of Artificial Sequence: Synthetic oligonucleotide
  Sense strand starting at position 3625 SEQ ID NO: 3383
gcaccuuuauuauuguuau

SEQ ID NO: 263163 - RNA, 19 nt, Artificial Sequence
  Description of Artificial Sequence: Synthetic oligonucleotide
  Antisense strand to SEQ ID NO: 263162
auaacaauaauaaaggugc

SEQ ID NO: 263164 - RNA, 19 nt, Artificial Sequence
  Description of Artificial Sequence: Synthetic oligonucleotide
  Sense strand starting at position 3740 SEQ ID NO: 3383
gcugaauucucgccuagca

SEQ ID NO: 263165 - RNA, 19 nt, Artificial Sequence
  Description of Artificial Sequence: Synthetic oligonucleotide
  Antisense strand to SEQ ID NO: 263164
ugcuaggcgagaauucagc

SEQ ID NO: 263166 - RNA, 19 nt, Artificial Sequence
  Description of Artificial Sequence: Synthetic oligonucleotide
  Sense strand starting at position 3742 SEQ ID NO: 3383
ugaauucucgccuagcauc

SEQ ID NO: 263167 - RNA, 19 nt, Artificial Sequence
  Description of Artificial Sequence: Synthetic oligonucleotide
  Antisense strand to SEQ ID NO: 263166
gaugcuaggcgagaauuca

SEQ ID NO: 263168 - RNA, 19 nt, Artificial Sequence
  Description of Artificial Sequence: Synthetic oligonucleotide
  Sense strand starting at position 3798 SEQ ID NO: 3383
ugauccaugccugggagua

SEQ ID NO: 263169 - RNA, 19 nt, Artificial Sequence
  Description of Artificial Sequence: Synthetic oligonucleotide
  Antisense strand to SEQ ID NO: 263168
uacucccaggcauggauca

SEQ ID NO: 263170 - RNA, 19 nt, Artificial Sequence
  Description of Artificial Sequence: Synthetic oligonucleotide
  Sense strand starting at position 3799 SEQ ID NO: 3383
gauccaugccugggaguau

SEQ ID NO: 263171 - RNA, 19 nt, Artificial Sequence
  Description of Artificial Sequence: Synthetic oligonucleotide
  Antisense strand to SEQ ID NO: 263170
auacucccaggcauggauc

SEQ ID NO: 263172 - RNA, 19 nt, Artificial Sequence
  Description of Artificial Sequence: Synthetic oligonucleotide
  Sense strand starting at position 3808 SEQ ID NO: 3383
cugggaguauuuguuuagu

SEQ ID NO: 263173 - RNA, 19 nt, Artificial Sequence
  Description of Artificial Sequence: Synthetic oligonucleotide
  Antisense strand to SEQ ID NO: 263172
acuaaacaaauacucccag

SEQ ID NO: 263174 - RNA, 19 nt, Artificial Sequence
  Description of Artificial Sequence: Synthetic oligonucleotide
  Sense strand starting at position 3811 SEQ ID NO: 3383
ggaguauuuguuuagugcu

SEQ ID NO: 263175 - RNA, 19 nt, Artificial Sequence
  Description of Artificial Sequence: Synthetic oligonucleotide
  Antisense strand to SEQ ID NO: 263174
agcacuaaacaaauacucc

SEQ ID NO: 263176 - RNA, 19 nt, Artificial Sequence
  Description of Artificial Sequence: Synthetic oligonucleotide
  Sense strand starting at position 3813 SEQ ID NO: 3383
aguauuuguuuagugcuca

SEQ ID NO: 263177 - RNA, 19 nt, Artificial Sequence
  Description of Artificial Sequence: Synthetic oligonucleotide
  Antisense strand to SEQ ID NO: 263176
ugagcacuaaacaaauacu

SEQ ID NO: 263178 - RNA, 19 nt, Artificial Sequence
  Description of Artificial Sequence: Synthetic oligonucleotide
  Sense strand starting at position 3826 SEQ ID NO: 3383
ugcucacuuccgugacacu

SEQ ID NO: 263179 - RNA, 19 nt, Artificial Sequence
  Description of Artificial Sequence: Synthetic oligonucleotide
  Antisense strand to SEQ ID NO: 263178
agugucacggaagugagca

SEQ ID NO: 263180 - RNA, 19 nt, Artificial Sequence
  Description of Artificial Sequence: Synthetic oligonucleotide
  Sense strand starting at position 3855 SEQ ID NO: 3383
ggcucagucucccucacua

SEQ ID NO: 263181 - RNA, 19 nt, Artificial Sequence
  Description of Artificial Sequence: Synthetic oligonucleotide
  Antisense strand to SEQ ID NO: 263180
uagugagggagacugagcc

SEQ ID NO: 263182 - RNA, 19 nt, Artificial Sequence
  Description of Artificial Sequence: Synthetic oligonucleotide
  Sense strand starting at position 3919 SEQ ID NO: 3383
acagcaguguaccuguaua

SEQ ID NO: 263183 - RNA, 19 nt, Artificial Sequence
  Description of Artificial Sequence: Synthetic oligonucleotide
  Antisense strand to SEQ ID NO: 263182
uauacagguacacugcugu

SEQ ID NO: 263184 - RNA, 19 nt, Artificial Sequence
  Description of Artificial Sequence: Synthetic oligonucleotide
  Sense strand starting at position 3924 SEQ ID NO: 3383
aguguaccuguauauagua

SEQ ID NO: 263185 - RNA, 19 nt, Artificial Sequence
  Description of Artificial Sequence: Synthetic oligonucleotide
  Antisense strand to SEQ ID NO: 263184
uacuauauacagguacacu

SEQ ID NO: 263186 - RNA, 19 nt, Artificial Sequence
  Description of Artificial Sequence: Synthetic oligonucleotide
  Sense strand starting at position 3937 SEQ ID NO: 3383
auaguaaguacucauggua

SEQ ID NO: 263187 - RNA, 19 nt, Artificial Sequence
  Description of Artificial Sequence: Synthetic oligonucleotide
  Antisense strand to SEQ ID NO: 263186
uaccaugaguacuuacuau

SEQ ID NO: 263188 - RNA, 19 nt, Artificial Sequence
  Description of Artificial Sequence: Synthetic oligonucleotide
  Sense strand starting at position 3940 SEQ ID NO: 3383
guaaguacucaugguauua

SEQ ID NO: 263189 - RNA, 19 nt, Artificial Sequence
  Description of Artificial Sequence: Synthetic oligonucleotide
  Antisense strand to SEQ ID NO: 263188
uaauaccaugaguacuuac

SEQ ID NO: 263190 - RNA, 19 nt, Artificial Sequence
  Description of Artificial Sequence: Synthetic oligonucleotide
  Sense strand starting at position 3975 SEQ ID NO: 3383
cugaaugaguccuucuaag

SEQ ID NO: 263191 - RNA, 19 nt, Artificial Sequence
  Description of Artificial Sequence: Synthetic oligonucleotide
  Antisense strand to SEQ ID NO: 263190
cuuagaaggacucauucag

SEQ ID NO: 263192 - RNA, 19 nt, Artificial Sequence
  Description of Artificial Sequence: Synthetic oligonucleotide
  Sense strand starting at position 201 SEQ ID NO: 3384
aucugaagcccucaggauu

SEQ ID NO: 263193 - RNA, 19 nt, Artificial Sequence
  Description of Artificial Sequence: Synthetic oligonucleotide
  Antisense strand to SEQ ID NO: 263192
aauccugagggcuucagau

SEQ ID NO: 263194 - RNA, 19 nt, Artificial Sequence
  Description of Artificial Sequence: Synthetic oligonucleotide
  Sense strand starting at position 233 SEQ ID NO: 3384
agagucaaccggugacaga

SEQ ID NO: 263195 - RNA, 19 nt, Artificial Sequence
  Description of Artificial Sequence: Synthetic oligonucleotide
  Antisense strand to SEQ ID NO: 263194
ucugucaccgguugacucu

SEQ ID NO: 263196 - RNA, 19 nt, Artificial Sequence
  Description of Artificial Sequence: Synthetic oligonucleotide
  Sense strand starting at position 255 SEQ ID NO: 3384
agcagauuccucugacagc

SEQ ID NO: 263197 - RNA, 19 nt, Artificial Sequence
  Description of Artificial Sequence: Synthetic oligonucleotide
  Antisense strand to SEQ ID NO: 263196
gcugucagaggaaucugcu

SEQ ID NO: 263198 - RNA, 19 nt, Artificial Sequence
  Description of Artificial Sequence: Synthetic oligonucleotide
  Sense strand starting at position 687 SEQ ID NO: 3384
gacugagaagccuggguuu

SEQ ID NO: 263199 - RNA, 19 nt, Artificial Sequence
  Description of Artificial Sequence: Synthetic oligonucleotide
  Antisense strand to SEQ ID NO: 263198
aaacccaggcuucucaguc

SEQ ID NO: 263200 - RNA, 19 nt, Artificial Sequence
  Description of Artificial Sequence: Synthetic oligonucleotide
  Sense strand starting at position 689 SEQ ID NO: 3384
cugagaagccuggguuuaa

SEQ ID NO: 263201 - RNA, 19 nt, Artificial Sequence
  Description of Artificial Sequence: Synthetic oligonucleotide
  Antisense strand to SEQ ID NO: 263200
uuaaacccaggcuucucag

SEQ ID NO: 263202 - RNA, 19 nt, Artificial Sequence
  Description of Artificial Sequence: Synthetic oligonucleotide
  Sense strand starting at position 690 SEQ ID NO: 3384
ugagaagccuggguuuaau

SEQ ID NO: 263203 - RNA, 19 nt, Artificial Sequence
  Description of Artificial Sequence: Synthetic oligonucleotide
  Antisense strand to SEQ ID NO: 263202
auuaaacccaggcuucuca

SEQ ID NO: 263204 - RNA, 19 nt, Artificial Sequence
  Description of Artificial Sequence: Synthetic oligonucleotide
  Sense strand starting at position 745 SEQ ID NO: 3384
ucuuuagcaugguuccaga

SEQ ID NO: 263205 - RNA, 19 nt, Artificial Sequence
  Description of Artificial Sequence: Synthetic oligonucleotide
  Antisense strand to SEQ ID NO: 263204
ucuggaaccaugcuaaaga

SEQ ID NO: 263206 - RNA, 19 nt, Artificial Sequence
  Description of Artificial Sequence: Synthetic oligonucleotide
  Sense strand starting at position 1073 SEQ ID NO: 3384
ccgcucugccaugcuauua

SEQ ID NO: 263207 - RNA, 19 nt, Artificial Sequence
  Description of Artificial Sequence: Synthetic oligonucleotide
  Antisense strand to SEQ ID NO: 263206
uaauagcauggcagagcgg

SEQ ID NO: 263208 - RNA, 19 nt, Artificial Sequence
  Description of Artificial Sequence: Synthetic oligonucleotide
  Sense strand starting at position 1252 SEQ ID NO: 3384
caaggucacucugugaaca

SEQ ID NO: 263209 - RNA, 19 nt, Artificial Sequence
  Description of Artificial Sequence: Synthetic oligonucleotide
  Antisense strand to SEQ ID NO: 263208
uguucacagagugaccuug

SEQ ID NO: 263210 - RNA, 19 nt, Artificial Sequence
  Description of Artificial Sequence: Synthetic oligonucleotide
  Sense strand starting at position 1291 SEQ ID NO: 3384
ccaagacgacuguauaauc

SEQ ID NO: 263211 - RNA, 19 nt, Artificial Sequence
  Description of Artificial Sequence: Synthetic oligonucleotide
  Antisense strand to SEQ ID NO: 263210
gauuauacagucgucuugg

SEQ ID NO: 263212 - RNA, 19 nt, Artificial Sequence
  Description of Artificial Sequence: Synthetic oligonucleotide
  Sense strand starting at position 1350 SEQ ID NO: 3384
acauaaaugccagaugucu

SEQ ID NO: 263213 - RNA, 19 nt, Artificial Sequence
  Description of Artificial Sequence: Synthetic oligonucleotide
  Antisense strand to SEQ ID NO: 263212
agacaucuggcauuuaugu

SEQ ID NO: 263214 - RNA, 19 nt, Artificial Sequence
  Description of Artificial Sequence: Synthetic oligonucleotide
  Sense strand starting at position 1398 SEQ ID NO: 3384
gcuccagucuucccucauu

SEQ ID NO: 263215 - RNA, 19 nt, Artificial Sequence
  Description of Artificial Sequence: Synthetic oligonucleotide
  Antisense strand to SEQ ID NO: 263214
aaugagggaagacuggagc

SEQ ID NO: 263216 - RNA, 19 nt, Artificial Sequence
  Description of Artificial Sequence: Synthetic oligonucleotide
  Sense strand starting at position 1433 SEQ ID NO: 3384
ggcccaaucggagaauuau

SEQ ID NO: 263217 - RNA, 19 nt, Artificial Sequence
  Description of Artificial Sequence: Synthetic oligonucleotide
  Antisense strand to SEQ ID NO: 263216
auaauucuccgauugggcc

SEQ ID NO: 263218 - RNA, 19 nt, Artificial Sequence
  Description of Artificial Sequence: Synthetic oligonucleotide
  Sense strand starting at position 1442 SEQ ID NO: 3384
ggagaauuauccucgcuuc

SEQ ID NO: 263219 - RNA, 19 nt, Artificial Sequence
  Description of Artificial Sequence: Synthetic oligonucleotide
  Antisense strand to SEQ ID NO: 263218
gaagcgaggauaauucucc

SEQ ID NO: 263220 - RNA, 19 nt, Artificial Sequence
  Description of Artificial Sequence: Synthetic oligonucleotide
  Sense strand starting at position 2306 SEQ ID NO: 3384
ucagacguuugucugaaga

SEQ ID NO: 263221 - RNA, 19 nt, Artificial Sequence
  Description of Artificial Sequence: Synthetic oligonucleotide
  Antisense strand to SEQ ID NO: 263220
ucuucagacaaacgucuga

SEQ ID NO: 263222 - RNA, 19 nt, Artificial Sequence
  Description of Artificial Sequence: Synthetic oligonucleotide
  Sense strand starting at position 2688 SEQ ID NO: 3384
uggauacgugcauaagcaa

SEQ ID NO: 263223 - RNA, 19 nt, Artificial Sequence
  Description of Artificial Sequence: Synthetic oligonucleotide
  Antisense strand to SEQ ID NO: 263222
uugcuuaugcacguaucca

SEQ ID NO: 263224 - RNA, 19 nt, Artificial Sequence
  Description of Artificial Sequence: Synthetic oligonucleotide
  Sense strand starting at position 2868 SEQ ID NO: 3384
gagucaaagucauagagac

SEQ ID NO: 263225 - RNA, 19 nt, Artificial Sequence
  Description of Artificial Sequence: Synthetic oligonucleotide
  Antisense strand to SEQ ID NO: 263224
gucucuaugacuuugacuc

SEQ ID NO: 263226 - RNA, 19 nt, Artificial Sequence
  Description of Artificial Sequence: Synthetic oligonucleotide
  Sense strand starting at position 3003 SEQ ID NO: 3384
ggcugcacaguucgugaau

SEQ ID NO: 263227 - RNA, 19 nt, Artificial Sequence
  Description of Artificial Sequence: Synthetic oligonucleotide
  Antisense strand to SEQ ID NO: 263226
auucacgaacugugcagcc

SEQ ID NO: 263228 - RNA, 19 nt, Artificial Sequence
  Description of Artificial Sequence: Synthetic oligonucleotide
  Sense strand starting at position 3015 SEQ ID NO: 3384
cgugaaugugcuuaacguc

SEQ ID NO: 263229 - RNA, 19 nt, Artificial Sequence
  Description of Artificial Sequence: Synthetic oligonucleotide
  Antisense strand to SEQ ID NO: 263228
gacguuaagcacauucacg

SEQ ID NO: 263230 - RNA, 19 nt, Artificial Sequence
  Description of Artificial Sequence: Synthetic oligonucleotide
  Sense strand starting at position 3021 SEQ ID NO: 3384
ugugcuuaacgucacugaa

SEQ ID NO: 263231 - RNA, 19 nt, Artificial Sequence
  Description of Artificial Sequence: Synthetic oligonucleotide
  Antisense strand to SEQ ID NO: 263230
uucagugacguuaagcaca

SEQ ID NO: 263232 - RNA, 19 nt, Artificial Sequence
  Description of Artificial Sequence: Synthetic oligonucleotide
  Sense strand starting at position 3023 SEQ ID NO: 3384
ugcuuaacgucacugaaau

SEQ ID NO: 263233 - RNA, 19 nt, Artificial Sequence
  Description of Artificial Sequence: Synthetic oligonucleotide
  Antisense strand to SEQ ID NO: 263232
auuucagugacguuaagca

SEQ ID NO: 263234 - RNA, 19 nt, Artificial Sequence
  Description of Artificial Sequence: Synthetic oligonucleotide
  Sense strand starting at position 3024 SEQ ID NO: 3384
gcuuaacgucacugaaaug

SEQ ID NO: 263235 - RNA, 19 nt, Artificial Sequence
  Description of Artificial Sequence: Synthetic oligonucleotide
  Antisense strand to SEQ ID NO: 263234
cauuucagugacguuaagc

SEQ ID NO: 263236 - RNA, 19 nt, Artificial Sequence
  Description of Artificial Sequence: Synthetic oligonucleotide
  Sense strand starting at position 3029 SEQ ID NO: 3384
acgucacugaaaugugguu

SEQ ID NO: 263237 - RNA, 19 nt, Artificial Sequence
  Description of Artificial Sequence: Synthetic oligonucleotide
  Antisense strand to SEQ ID NO: 263236
aaccacauuucagugacgu

SEQ ID NO: 263238 - RNA, 19 nt, Artificial Sequence
  Description of Artificial Sequence: Synthetic oligonucleotide
  Sense strand starting at position 3031 SEQ ID NO: 3384
gucacugaaaugugguuaa

SEQ ID NO: 263239 - RNA, 19 nt, Artificial Sequence
  Description of Artificial Sequence: Synthetic oligonucleotide
  Antisense strand to SEQ ID NO: 263238
uuaaccacauuucagugac

SEQ ID NO: 263240 - RNA, 19 nt, Artificial Sequence
  Description of Artificial Sequence: Synthetic oligonucleotide
  Sense strand starting at position 3034 SEQ ID NO: 3384
acugaaaugugguuaagau

SEQ ID NO: 263241 - RNA, 19 nt, Artificial Sequence
  Description of Artificial Sequence: Synthetic oligonucleotide
  Antisense strand to SEQ ID NO: 263240
aucuuaaccacauuucagu

SEQ ID NO: 263242 - RNA, 19 nt, Artificial Sequence
  Description of Artificial Sequence: Synthetic oligonucleotide
  Sense strand starting at position 3038 SEQ ID NO: 3384
aaaugugguuaagauggaa

SEQ ID NO: 263243 - RNA, 19 nt, Artificial Sequence
  Description of Artificial Sequence: Synthetic oligonucleotide
  Antisense strand to SEQ ID NO: 263242
uuccaucuuaaccacauuu

SEQ ID NO: 263244 - RNA, 19 nt, Artificial Sequence
  Description of Artificial Sequence: Synthetic oligonucleotide
  Sense strand starting at position 3053 SEQ ID NO: 3384
ggaaacaauuugugaaguu

SEQ ID NO: 263245 - RNA, 19 nt, Artificial Sequence
  Description of Artificial Sequence: Synthetic oligonucleotide
  Antisense strand to SEQ ID NO: 263244
aacuucacaaauuguuucc

SEQ ID NO: 263246 - RNA, 19 nt, Artificial Sequence
  Description of Artificial Sequence: Synthetic oligonucleotide
  Sense strand starting at position 3054 SEQ ID NO: 3384
gaaacaauuugugaaguuu

SEQ ID NO: 263247 - RNA, 19 nt, Artificial Sequence
  Description of Artificial Sequence: Synthetic oligonucleotide
  Antisense strand to SEQ ID NO: 263246
aaacuucacaaauuguuuc

SEQ ID NO: 263248 - RNA, 19 nt, Artificial Sequence
  Description of Artificial Sequence: Synthetic oligonucleotide
  Sense strand starting at position 3206 SEQ ID NO: 3384
gcaacagguccuggaacua

SEQ ID NO: 263249 - RNA, 19 nt, Artificial Sequence
  Description of Artificial Sequence: Synthetic oligonucleotide
  Antisense strand to SEQ ID NO: 263248
uaguuccaggaccuguugc

SEQ ID NO: 263250 - RNA, 19 nt, Artificial Sequence
  Description of Artificial Sequence: Synthetic oligonucleotide
  Sense strand starting at position 3218 SEQ ID NO: 3384
ggaacuagacuuugccaaa

SEQ ID NO: 263251 - RNA, 19 nt, Artificial Sequence
  Description of Artificial Sequence: Synthetic oligonucleotide
  Antisense strand to SEQ ID NO: 263250
uuuggcaaagucuaguucc

SEQ ID NO: 263252 - RNA, 19 nt, Artificial Sequence
  Description of Artificial Sequence: Synthetic oligonucleotide
  Sense strand starting at position 3221 SEQ ID NO: 3384
acuagacuuugccaaagau

SEQ ID NO: 263253 - RNA, 19 nt, Artificial Sequence
  Description of Artificial Sequence: Synthetic oligonucleotide
  Antisense strand to SEQ ID NO: 263252
aucuuuggcaaagucuagu

SEQ ID NO: 263254 - RNA, 19 nt, Artificial Sequence
  Description of Artificial Sequence: Synthetic oligonucleotide
  Sense strand starting at position 3231 SEQ ID NO: 3384
gccaaagauuccuugcuca

SEQ ID NO: 263255 - RNA, 19 nt, Artificial Sequence
  Description of Artificial Sequence: Synthetic oligonucleotide
  Antisense strand to SEQ ID NO: 263254
ugagcaaggaaucuuuggc

SEQ ID NO: 263256 - RNA, 19 nt, Artificial Sequence
  Description of Artificial Sequence: Synthetic oligonucleotide
  Sense strand starting at position 3690 SEQ ID NO: 3384
ggguuaggcuguagagaag

SEQ ID NO: 263257 - RNA, 19 nt, Artificial Sequence
  Description of Artificial Sequence: Synthetic oligonucleotide
  Antisense strand to SEQ ID NO: 263256
cuucucuacagccuaaccc

SEQ ID NO: 263258 - RNA, 19 nt, Artificial Sequence
  Description of Artificial Sequence: Synthetic oligonucleotide
  Sense strand starting at position 3831 SEQ ID NO: 3384
gaagcuggcaguggauauu

SEQ ID NO: 263259 - RNA, 19 nt, Artificial Sequence
  Description of Artificial Sequence: Synthetic oligonucleotide
  Antisense strand to SEQ ID NO: 263258
aauauccacugccagcuuc

SEQ ID NO: 263260 - RNA, 19 nt, Artificial Sequence
  Description of Artificial Sequence: Synthetic oligonucleotide
  Sense strand starting at position 3873 SEQ ID NO: 3384
ugugcaucacccugaagga

SEQ ID NO: 263261 - RNA, 19 nt, Artificial Sequence
  Description of Artificial Sequence: Synthetic oligonucleotide
  Antisense strand to SEQ ID NO: 263260
uccuucagggugaugcaca

SEQ ID NO: 263262 - RNA, 19 nt, Artificial Sequence
  Description of Artificial Sequence: Synthetic oligonucleotide
  Sense strand starting at position 3895 SEQ ID NO: 3384
aagugaaagucaguccgau

SEQ ID NO: 263263 - RNA, 19 nt, Artificial Sequence
  Description of Artificial Sequence: Synthetic oligonucleotide
  Antisense strand to SEQ ID NO: 263262
aucggacugacuuucacuu

SEQ ID NO: 263264 - RNA, 19 nt, Artificial Sequence
  Description of Artificial Sequence: Synthetic oligonucleotide
  Sense strand starting at position 3901 SEQ ID NO: 3384
aagucaguccgauggaaca

SEQ ID NO: 263265 - RNA, 19 nt, Artificial Sequence
  Description of Artificial Sequence: Synthetic oligonucleotide
  Antisense strand to SEQ ID NO: 263264
uguuccaucggacugacuu

SEQ ID NO: 263266 - RNA, 19 nt, Artificial Sequence
  Description of Artificial Sequence: Synthetic oligonucleotide
  Sense strand starting at position 3927 SEQ ID NO: 3384
ggcagugacuaagaagauu

SEQ ID NO: 263267 - RNA, 19 nt, Artificial Sequence
  Description of Artificial Sequence: Synthetic oligonucleotide
  Antisense strand to SEQ ID NO: 263266
aaucuucuuagucacugcc

SEQ ID NO: 263268 - RNA, 19 nt, Artificial Sequence
  Description of Artificial Sequence: Synthetic oligonucleotide
  Sense strand starting at position 3949 SEQ ID NO: 3384
ccauuaagucaaggucuuu

SEQ ID NO: 263269 - RNA, 19 nt, Artificial Sequence
  Description of Artificial Sequence: Synthetic oligonucleotide
  Antisense strand to SEQ ID NO: 263268
aaagaccuugacuuaaugg

SEQ ID NO: 263270 - RNA, 19 nt, Artificial Sequence
  Description of Artificial Sequence: Synthetic oligonucleotide
  Sense strand starting at position 3954 SEQ ID NO: 3384
aagucaaggucuuuacuag

SEQ ID NO: 263271 - RNA, 19 nt, Artificial Sequence
  Description of Artificial Sequence: Synthetic oligonucleotide
  Antisense strand to SEQ ID NO: 263270
cuaguaaagaccuugacuu

SEQ ID NO: 263272 - RNA, 19 nt, Artificial Sequence
  Description of Artificial Sequence: Synthetic oligonucleotide
  Sense strand starting at position 184 SEQ ID NO: 3385
aucugaagcccucaggauu

SEQ ID NO: 263273 - RNA, 19 nt, Artificial Sequence
  Description of Artificial Sequence: Synthetic oligonucleotide
  Antisense strand to SEQ ID NO: 263272
aauccugagggcuucagau

SEQ ID NO: 263274 - RNA, 19 nt, Artificial Sequence
  Description of Artificial Sequence: Synthetic oligonucleotide
  Sense strand starting at position 216 SEQ ID NO: 3385
agagucaaccggugacaga

SEQ ID NO: 263275 - RNA, 19 nt, Artificial Sequence
  Description of Artificial Sequence: Synthetic oligonucleotide
  Antisense strand to SEQ ID NO: 263274
ucugucaccgguugacucu

SEQ ID NO: 263276 - RNA, 19 nt, Artificial Sequence
  Description of Artificial Sequence: Synthetic oligonucleotide
  Sense strand starting at position 238 SEQ ID NO: 3385
agcagauuccucugacagc

SEQ ID NO: 263277 - RNA, 19 nt, Artificial Sequence
  Description of Artificial Sequence: Synthetic oligonucleotide
  Antisense strand to SEQ ID NO: 263276
gcugucagaggaaucugcu

SEQ ID NO: 263278 - RNA, 19 nt, Artificial Sequence
  Description of Artificial Sequence: Synthetic oligonucleotide
  Sense strand starting at position 670 SEQ ID NO: 3385
gacugagaagccuggguuu

SEQ ID NO: 263279 - RNA, 19 nt, Artificial Sequence
  Description of Artificial Sequence: Synthetic oligonucleotide
  Antisense strand to SEQ ID NO: 263278
aaacccaggcuucucaguc

SEQ ID NO: 263280 - RNA, 19 nt, Artificial Sequence
  Description of Artificial Sequence: Synthetic oligonucleotide
  Sense strand starting at position 672 SEQ ID NO: 3385
cugagaagccuggguuuaa

SEQ ID NO: 263281 - RNA, 19 nt, Artificial Sequence
  Description of Artificial Sequence: Synthetic oligonucleotide
  Antisense strand to SEQ ID NO: 263280
uuaaacccaggcuucucag

SEQ ID NO: 263282 - RNA, 19 nt, Artificial Sequence
  Description of Artificial Sequence: Synthetic oligonucleotide
  Sense strand starting at position 673 SEQ ID NO: 3385
ugagaagccuggguuuaau

SEQ ID NO: 263283 - RNA, 19 nt, Artificial Sequence
  Description of Artificial Sequence: Synthetic oligonucleotide
  Antisense strand to SEQ ID NO: 263282
auuaaacccaggcuucuca

SEQ ID NO: 263284 - RNA, 19 nt, Artificial Sequence
  Description of Artificial Sequence: Synthetic oligonucleotide
  Sense strand starting at position 728 SEQ ID NO: 3385
ucuuuagcaugguuccaga

SEQ ID NO: 263285 - RNA, 19 nt, Artificial Sequence
  Description of Artificial Sequence: Synthetic oligonucleotide
  Antisense strand to SEQ ID NO: 263284
ucuggaaccaugcuaaaga

SEQ ID NO: 263286 - RNA, 19 nt, Artificial Sequence
  Description of Artificial Sequence: Synthetic oligonucleotide
  Sense strand starting at position 1056 SEQ ID NO: 3385
ccgcucugccaugcuauua

SEQ ID NO: 263287 - RNA, 19 nt, Artificial Sequence
  Description of Artificial Sequence: Synthetic oligonucleotide
  Antisense strand to SEQ ID NO: 263286
uaauagcauggcagagcgg

SEQ ID NO: 263288 - RNA, 19 nt, Artificial Sequence
  Description of Artificial Sequence: Synthetic oligonucleotide
  Sense strand starting at position 1235 SEQ ID NO: 3385
caaggucacucugugaaca

SEQ ID NO: 263289 - RNA, 19 nt, Artificial Sequence
  Description of Artificial Sequence: Synthetic oligonucleotide
  Antisense strand to SEQ ID NO: 263288
uguucacagagugaccuug

SEQ ID NO: 263290 - RNA, 19 nt, Artificial Sequence
  Description of Artificial Sequence: Synthetic oligonucleotide
  Sense strand starting at position 1274 SEQ ID NO: 3385
ccaagacgacuguauaauc

SEQ ID NO: 263291 - RNA, 19 nt, Artificial Sequence
  Description of Artificial Sequence: Synthetic oligonucleotide
  Antisense strand to SEQ ID NO: 263290
gauuauacagucgucuugg

SEQ ID NO: 263292 - RNA, 19 nt, Artificial Sequence
  Description of Artificial Sequence: Synthetic oligonucleotide
  Sense strand starting at position 1333 SEQ ID NO: 3385
acauaaaugccagaugucu

SEQ ID NO: 263293 - RNA, 19 nt, Artificial Sequence
  Description of Artificial Sequence: Synthetic oligonucleotide
  Antisense strand to SEQ ID NO: 263292
agacaucuggcauuuaugu

SEQ ID NO: 263294 - RNA, 19 nt, Artificial Sequence
  Description of Artificial Sequence: Synthetic oligonucleotide
  Sense strand starting at position 1381 SEQ ID NO: 3385
gcuccagucuucccucauu

SEQ ID NO: 263295 - RNA, 19 nt, Artificial Sequence
  Description of Artificial Sequence: Synthetic oligonucleotide
  Antisense strand to SEQ ID NO: 263294
aaugagggaagacuggagc

SEQ ID NO: 263296 - RNA, 19 nt, Artificial Sequence
  Description of Artificial Sequence: Synthetic oligonucleotide
  Sense strand starting at position 1416 SEQ ID NO: 3385
ggcccaaucggagaauuau

SEQ ID NO: 263297 - RNA, 19 nt, Artificial Sequence
  Description of Artificial Sequence: Synthetic oligonucleotide
  Antisense strand to SEQ ID NO: 263296
auaauucuccgauugggcc

SEQ ID NO: 263298 - RNA, 19 nt, Artificial Sequence
  Description of Artificial Sequence: Synthetic oligonucleotide
  Sense strand starting at position 1425 SEQ ID NO: 3385
ggagaauuauccucgcuuc

SEQ ID NO: 263299 - RNA, 19 nt, Artificial Sequence
  Description of Artificial Sequence: Synthetic oligonucleotide
  Antisense strand to SEQ ID NO: 263298
gaagcgaggauaauucucc

SEQ ID NO: 263300 - RNA, 19 nt, Artificial Sequence
  Description of Artificial Sequence: Synthetic oligonucleotide
  Sense strand starting at position 2289 SEQ ID NO: 3385
ucagacguuugucugaaga

SEQ ID NO: 263301 - RNA, 19 nt, Artificial Sequence
  Description of Artificial Sequence: Synthetic oligonucleotide
  Antisense strand to SEQ ID NO: 263300
ucuucagacaaacgucuga

SEQ ID NO: 263302 - RNA, 19 nt, Artificial Sequence
  Description of Artificial Sequence: Synthetic oligonucleotide
  Sense strand starting at position 2671 SEQ ID NO: 3385
uggauacgugcauaagcaa

SEQ ID NO: 263303 - RNA, 19 nt, Artificial Sequence
  Description of Artificial Sequence: Synthetic oligonucleotide
  Antisense strand to SEQ ID NO: 263302
uugcuuaugcacguaucca

SEQ ID NO: 263304 - RNA, 19 nt, Artificial Sequence
  Description of Artificial Sequence: Synthetic oligonucleotide
  Sense strand starting at position 2851 SEQ ID NO: 3385
gagucaaagucauagagac

SEQ ID NO: 263305 - RNA, 19 nt, Artificial Sequence
  Description of Artificial Sequence: Synthetic oligonucleotide
  Antisense strand to SEQ ID NO: 263304
gucucuaugacuuugacuc

SEQ ID NO: 263306 - RNA, 19 nt, Artificial Sequence
  Description of Artificial Sequence: Synthetic oligonucleotide
  Sense strand starting at position 2986 SEQ ID NO: 3385
ggcugcacaguucgugaau

SEQ ID NO: 263307 - RNA, 19 nt, Artificial Sequence
  Description of Artificial Sequence: Synthetic oligonucleotide
  Antisense strand to SEQ ID NO: 263306
auucacgaacugugcagcc

SEQ ID NO: 263308 - RNA, 19 nt, Artificial Sequence
  Description of Artificial Sequence: Synthetic oligonucleotide
  Sense strand starting at position 2998 SEQ ID NO: 3385
cgugaaugugcuuaacguc

SEQ ID NO: 263309 - RNA, 19 nt, Artificial Sequence
  Description of Artificial Sequence: Synthetic oligonucleotide
  Antisense strand to SEQ ID NO: 263308
gacguuaagcacauucacg

SEQ ID NO: 263310 - RNA, 19 nt, Artificial Sequence
  Description of Artificial Sequence: Synthetic oligonucleotide
  Sense strand starting at position 3004 SEQ ID NO: 3385
ugugcuuaacgucacugaa

SEQ ID NO: 263311 - RNA, 19 nt, Artificial Sequence
  Description of Artificial Sequence: Synthetic oligonucleotide
  Antisense strand to SEQ ID NO: 263310
uucagugacguuaagcaca

SEQ ID NO: 263312 - RNA, 19 nt, Artificial Sequence
  Description of Artificial Sequence: Synthetic oligonucleotide
  Sense strand starting at position 3006 SEQ ID NO: 3385
ugcuuaacgucacugaaau

SEQ ID NO: 263313 - RNA, 19 nt, Artificial Sequence
  Description of Artificial Sequence: Synthetic oligonucleotide
  Antisense strand to SEQ ID NO: 263312
auuucagugacguuaagca

SEQ ID NO: 263314 - RNA, 19 nt, Artificial Sequence
  Description of Artificial Sequence: Synthetic oligonucleotide
  Sense strand starting at position 3007 SEQ ID NO: 3385
gcuuaacgucacugaaaug

SEQ ID NO: 263315 - RNA, 19 nt, Artificial Sequence
  Description of Artificial Sequence: Synthetic oligonucleotide
  Antisense strand to SEQ ID NO: 263314
cauuucagugacguuaagc

SEQ ID NO: 263316 - RNA, 19 nt, Artificial Sequence
  Description of Artificial Sequence: Synthetic oligonucleotide
  Sense strand starting at position 3012 SEQ ID NO: 3385
acgucacugaaaugugguu

SEQ ID NO: 263317 - RNA, 19 nt, Artificial Sequence
  Description of Artificial Sequence: Synthetic oligonucleotide
  Antisense strand to SEQ ID NO: 263316
aaccacauuucagugacgu

SEQ ID NO: 263318 - RNA, 19 nt, Artificial Sequence
  Description of Artificial Sequence: Synthetic oligonucleotide
  Sense strand starting at position 3014 SEQ ID NO: 3385
gucacugaaaugugguuaa

SEQ ID NO: 263319 - RNA, 19 nt, Artificial Sequence
  Description of Artificial Sequence: Synthetic oligonucleotide
  Antisense strand to SEQ ID NO: 263318
uuaaccacauuucagugac

SEQ ID NO: 263320 - RNA, 19 nt, Artificial Sequence
  Description of Artificial Sequence: Synthetic oligonucleotide
  Sense strand starting at position 3017 SEQ ID NO: 3385
acugaaaugugguuaagau

SEQ ID NO: 263321 - RNA, 19 nt, Artificial Sequence
  Description of Artificial Sequence: Synthetic oligonucleotide
  Antisense strand to SEQ ID NO: 263320
aucuuaaccacauuucagu

SEQ ID NO: 263322 - RNA, 19 nt, Artificial Sequence
  Description of Artificial Sequence: Synthetic oligonucleotide
  Sense strand starting at position 3021 SEQ ID NO: 3385
aaaugugguuaagauggaa

SEQ ID NO: 263323 - RNA, 19 nt, Artificial Sequence
  Description of Artificial Sequence: Synthetic oligonucleotide
  Antisense strand to SEQ ID NO: 263322
uuccaucuuaaccacauuu

SEQ ID NO: 263324 - RNA, 19 nt, Artificial Sequence
  Description of Artificial Sequence: Synthetic oligonucleotide
  Sense strand starting at position 3036 SEQ ID NO: 3385
ggaaacaauuugugaaguu

SEQ ID NO: 263325 - RNA, 19 nt, Artificial Sequence
  Description of Artificial Sequence: Synthetic oligonucleotide
  Antisense strand to SEQ ID NO: 263324
aacuucacaaauuguuucc

SEQ ID NO: 263326 - RNA, 19 nt, Artificial Sequence
  Description of Artificial Sequence: Synthetic oligonucleotide
  Sense strand starting at position 3037 SEQ ID NO: 3385
gaaacaauuugugaaguuu

SEQ ID NO: 263327 - RNA, 19 nt, Artificial Sequence
  Description of Artificial Sequence: Synthetic oligonucleotide
  Antisense strand to SEQ ID NO: 263326
aaacuucacaaauuguuuc

SEQ ID NO: 263328 - RNA, 19 nt, Artificial Sequence
  Description of Artificial Sequence: Synthetic oligonucleotide
  Sense strand starting at position 3189 SEQ ID NO: 3385
gcaacagguccuggaacua

SEQ ID NO: 263329 - RNA, 19 nt, Artificial Sequence
  Description of Artificial Sequence: Synthetic oligonucleotide
  Antisense strand to SEQ ID NO: 263328
uaguuccaggaccuguugc

SEQ ID NO: 263330 - RNA, 19 nt, Artificial Sequence
  Description of Artificial Sequence: Synthetic oligonucleotide
  Sense strand starting at position 3201 SEQ ID NO: 3385
ggaacuagacuuugccaaa

SEQ ID NO: 263331 - RNA, 19 nt, Artificial Sequence
  Description of Artificial Sequence: Synthetic oligonucleotide
  Antisense strand to SEQ ID NO: 263330
uuuggcaaagucuaguucc

SEQ ID NO: 263332 - RNA, 19 nt, Artificial Sequence
  Description of Artificial Sequence: Synthetic oligonucleotide
  Sense strand starting at position 3204 SEQ ID NO: 3385
acuagacuuugccaaagau

SEQ ID NO: 263333 - RNA, 19 nt, Artificial Sequence
  Description of Artificial Sequence: Synthetic oligonucleotide
  Antisense strand to SEQ ID NO: 263332
aucuuuggcaaagucuagu

SEQ ID NO: 263334 - RNA, 19 nt, Artificial Sequence
  Description of Artificial Sequence: Synthetic oligonucleotide
  Sense strand starting at position 3214 SEQ ID NO: 3385
gccaaagauuccuugcuca

SEQ ID NO: 263335 - RNA, 19 nt, Artificial Sequence
  Description of Artificial Sequence: Synthetic oligonucleotide
  Antisense strand to SEQ ID NO: 263334
ugagcaaggaaucuuuggc

SEQ ID NO: 263336 - RNA, 19 nt, Artificial Sequence
  Description of Artificial Sequence: Synthetic oligonucleotide
  Sense strand starting at position 3673 SEQ ID NO: 3385
ggguuaggcuguagagaag

SEQ ID NO: 263337 - RNA, 19 nt, Artificial Sequence
  Description of Artificial Sequence: Synthetic oligonucleotide
  Antisense strand to SEQ ID NO: 263336
cuucucuacagccuaaccc

SEQ ID NO: 263338 - RNA, 19 nt, Artificial Sequence
  Description of Artificial Sequence: Synthetic oligonucleotide
  Sense strand starting at position 3814 SEQ ID NO: 3385
gaagcuggcaguggauauu

SEQ ID NO: 263339 - RNA, 19 nt, Artificial Sequence
  Description of Artificial Sequence: Synthetic oligonucleotide
  Antisense strand to SEQ ID NO: 263338
aauauccacugccagcuuc

SEQ ID NO: 263340 - RNA, 19 nt, Artificial Sequence
  Description of Artificial Sequence: Synthetic oligonucleotide
  Sense strand starting at position 3856 SEQ ID NO: 3385
ugugcaucacccugaagga

SEQ ID NO: 263341 - RNA, 19 nt, Artificial Sequence
  Description of Artificial Sequence: Synthetic oligonucleotide
  Antisense strand to SEQ ID NO: 263340
uccuucagggugaugcaca

SEQ ID NO: 263342 - RNA, 19 nt, Artificial Sequence
  Description of Artificial Sequence: Synthetic oligonucleotide
  Sense strand starting at position 3878 SEQ ID NO: 3385
aagugaaagucaguccgau

SEQ ID NO: 263343 - RNA, 19 nt, Artificial Sequence
  Description of Artificial Sequence: Synthetic oligonucleotide
  Antisense strand to SEQ ID NO: 263342
aucggacugacuuucacuu

SEQ ID NO: 263344 - RNA, 19 nt, Artificial Sequence
  Description of Artificial Sequence: Synthetic oligonucleotide
  Sense strand starting at position 3884 SEQ ID NO: 3385
aagucaguccgauggaaca

SEQ ID NO: 263345 - RNA, 19 nt, Artificial Sequence
  Description of Artificial Sequence: Synthetic oligonucleotide
  Antisense strand to SEQ ID NO: 263344
uguuccaucggacugacuu

SEQ ID NO: 263346 - RNA, 19 nt, Artificial Sequence
  Description of Artificial Sequence: Synthetic oligonucleotide
  Sense strand starting at position 3910 SEQ ID NO: 3385
ggcagugacuaagaagauu

SEQ ID NO: 263347 - RNA, 19 nt, Artificial Sequence
  Description of Artificial Sequence: Synthetic oligonucleotide
  Antisense strand to SEQ ID NO: 263346
aaucuucuuagucacugcc

SEQ ID NO: 263348 - RNA, 19 nt, Artificial Sequence
  Description of Artificial Sequence: Synthetic oligonucleotide
  Sense strand starting at position 3932 SEQ ID NO: 3385
ccauuaagucaaggucuuu

SEQ ID NO: 263349 - RNA, 19 nt, Artificial Sequence
  Description of Artificial Sequence: Synthetic oligonucleotide
  Antisense strand to SEQ ID NO: 263348
aaagaccuugacuuaaugg

SEQ ID NO: 263350 - RNA, 19 nt, Artificial Sequence
  Description of Artificial Sequence: Synthetic oligonucleotide
  Sense strand starting at position 3937 SEQ ID NO: 3385
aagucaaggucuuuacuag

SEQ ID NO: 263351 - RNA, 19 nt, Artificial Sequence
  Description of Artificial Sequence: Synthetic oligonucleotide
  Antisense strand to SEQ ID NO: 263350
cuaguaaagaccuugacuu

SEQ ID NO: 263352 - RNA, 19 nt, Artificial Sequence
  Description of Artificial Sequence: Synthetic oligonucleotide
  Sense strand starting at position 90 SEQ ID NO: 3387
gaguaugggaucuguugga

SEQ ID NO: 263353 - RNA, 19 nt, Artificial Sequence
  Description of Artificial Sequence: Synthetic oligonucleotide
  Antisense strand to SEQ ID NO: 263352
uccaacagaucccauacuc

SEQ ID NO: 263354 - RNA, 19 nt, Artificial Sequence
  Description of Artificial Sequence: Synthetic oligonucleotide
  Sense strand starting at position 94 SEQ ID NO: 3387
augggaucuguuggaucca

SEQ ID NO: 263355 - RNA, 19 nt, Artificial Sequence
  Description of Artificial Sequence: Synthetic oligonucleotide
  Antisense strand to SEQ ID NO: 263354
uggauccaacagaucccau

SEQ ID NO: 263356 - RNA, 19 nt, Artificial Sequence
  Description of Artificial Sequence: Synthetic oligonucleotide
  Sense strand starting at position 264 SEQ ID NO: 3387
uucuuugagucauugagaa

SEQ ID NO: 263357 - RNA, 19 nt, Artificial Sequence
  Description of Artificial Sequence: Synthetic oligonucleotide
  Antisense strand to SEQ ID NO: 263356
uucucaaugacucaaagaa

SEQ ID NO: 263358 - RNA, 19 nt, Artificial Sequence
  Description of Artificial Sequence: Synthetic oligonucleotide
  Sense strand starting at position 442 SEQ ID NO: 3387
gauauagguuuaguaauug

SEQ ID NO: 263359 - RNA, 19 nt, Artificial Sequence
  Description of Artificial Sequence: Synthetic oligonucleotide
  Antisense strand to SEQ ID NO: 263358
caauuacuaaaccuauauc

SEQ ID NO: 263360 - RNA, 19 nt, Artificial Sequence
  Description of Artificial Sequence: Synthetic oligonucleotide
  Sense strand starting at position 678 SEQ ID NO: 3387
uuugauuacugaguaucag

SEQ ID NO: 263361 - RNA, 19 nt, Artificial Sequence
  Description of Artificial Sequence: Synthetic oligonucleotide
  Antisense strand to SEQ ID NO: 263360
cugauacucaguaaucaaa

SEQ ID NO: 263362 - RNA, 19 nt, Artificial Sequence
  Description of Artificial Sequence: Synthetic oligonucleotide
  Sense strand starting at position 725 SEQ ID NO: 3387
uuuagagugaucgagagca

SEQ ID NO: 263363 - RNA, 19 nt, Artificial Sequence
  Description of Artificial Sequence: Synthetic oligonucleotide
  Antisense strand to SEQ ID NO: 263362
ugcucucgaucacucuaaa

SEQ ID NO: 263364 - RNA, 19 nt, Artificial Sequence
  Description of Artificial Sequence: Synthetic oligonucleotide
  Sense strand starting at position 727 SEQ ID NO: 3387
uagagugaucgagagcaau

SEQ ID NO: 263365 - RNA, 19 nt, Artificial Sequence
  Description of Artificial Sequence: Synthetic oligonucleotide
  Antisense strand to SEQ ID NO: 263364
auugcucucgaucacucua

SEQ ID NO: 263366 - RNA, 19 nt, Artificial Sequence
  Description of Artificial Sequence: Synthetic oligonucleotide
  Sense strand starting at position 792 SEQ ID NO: 3387
aacucaucccaagggaguu

SEQ ID NO: 263367 - RNA, 19 nt, Artificial Sequence
  Description of Artificial Sequence: Synthetic oligonucleotide
  Antisense strand to SEQ ID NO: 263366
aacucccuugggaugaguu

SEQ ID NO: 263368 - RNA, 19 nt, Artificial Sequence
  Description of Artificial Sequence: Synthetic oligonucleotide
  Sense strand starting at position 820 SEQ ID NO: 3387
acaugccaucuuuaugagu

SEQ ID NO: 263369 - RNA, 19 nt, Artificial Sequence
  Description of Artificial Sequence: Synthetic oligonucleotide
  Antisense strand to SEQ ID NO: 263368
acucauaaagauggcaugu

SEQ ID NO: 263370 - RNA, 19 nt, Artificial Sequence
  Description of Artificial Sequence: Synthetic oligonucleotide
  Sense strand starting at position 876 SEQ ID NO: 3387
ccugcuguuccuuagagaa

SEQ ID NO: 263371 - RNA, 19 nt, Artificial Sequence
  Description of Artificial Sequence: Synthetic oligonucleotide
  Antisense strand to SEQ ID NO: 263370
uucucuaaggaacagcagg

SEQ ID NO: 263372 - RNA, 19 nt, Artificial Sequence
  Description of Artificial Sequence: Synthetic oligonucleotide
  Sense strand starting at position 886 SEQ ID NO: 3387
cuuagagaacucgaucugu

SEQ ID NO: 263373 - RNA, 19 nt, Artificial Sequence
  Description of Artificial Sequence: Synthetic oligonucleotide
  Antisense strand to SEQ ID NO: 263372
acagaucgaguucucuaag

SEQ ID NO: 263374 - RNA, 19 nt, Artificial Sequence
  Description of Artificial Sequence: Synthetic oligonucleotide
  Sense strand starting at position 891 SEQ ID NO: 3387
agaacucgaucuguuagaa

SEQ ID NO: 263375 - RNA, 19 nt, Artificial Sequence
  Description of Artificial Sequence: Synthetic oligonucleotide
  Antisense strand to SEQ ID NO: 263374
uucuaacagaucgaguucu

SEQ ID NO: 263376 - RNA, 19 nt, Artificial Sequence
  Description of Artificial Sequence: Synthetic oligonucleotide
  Sense strand starting at position 971 SEQ ID NO: 3387
agcucauucccugaguaau

SEQ ID NO: 263377 - RNA, 19 nt, Artificial Sequence
  Description of Artificial Sequence: Synthetic oligonucleotide
  Antisense strand to SEQ ID NO: 263376
auuacucagggaaugagcu

SEQ ID NO: 263378 - RNA, 19 nt, Artificial Sequence
  Description of Artificial Sequence: Synthetic oligonucleotide
  Sense strand starting at position 1068 SEQ ID NO: 3387
guaacaugccuugaagaua

SEQ ID NO: 263379 - RNA, 19 nt, Artificial Sequence
  Description of Artificial Sequence: Synthetic oligonucleotide
  Antisense strand to SEQ ID NO: 263378
uaucuucaaggcauguuac

SEQ ID NO: 263380 - RNA, 19 nt, Artificial Sequence
  Description of Artificial Sequence: Synthetic oligonucleotide
  Sense strand starting at position 1106 SEQ ID NO: 3387
ggcagugcugugccuacau

SEQ ID NO: 263381 - RNA, 19 nt, Artificial Sequence
  Description of Artificial Sequence: Synthetic oligonucleotide
  Antisense strand to SEQ ID NO: 263380
auguaggcacagcacugcc

SEQ ID NO: 263382 - RNA, 19 nt, Artificial Sequence
  Description of Artificial Sequence: Synthetic oligonucleotide
  Sense strand starting at position 1454 SEQ ID NO: 3387
uaagauacacgguguuaaa

SEQ ID NO: 263383 - RNA, 19 nt, Artificial Sequence
  Description of Artificial Sequence: Synthetic oligonucleotide
  Antisense strand to SEQ ID NO: 263382
uuuaacaccguguaucuua

SEQ ID NO: 263384 - RNA, 19 nt, Artificial Sequence
  Description of Artificial Sequence: Synthetic oligonucleotide
  Sense strand starting at position 1464 SEQ ID NO: 3387
gguguuaaaguacagauau

SEQ ID NO: 263385 - RNA, 19 nt, Artificial Sequence
  Description of Artificial Sequence: Synthetic oligonucleotide
  Antisense strand to SEQ ID NO: 263384
auaucuguacuuuaacacc

SEQ ID NO: 263386 - RNA, 19 nt, Artificial Sequence
  Description of Artificial Sequence: Synthetic oligonucleotide
  Sense strand starting at position 1502 SEQ ID NO: 3387
uuaagucugucuucuauuu

SEQ ID NO: 263387 - RNA, 19 nt, Artificial Sequence
  Description of Artificial Sequence: Synthetic oligonucleotide
  Antisense strand to SEQ ID NO: 263386
aaauagaagacagacuuaa

SEQ ID NO: 263388 - RNA, 19 nt, Artificial Sequence
  Description of Artificial Sequence: Synthetic oligonucleotide
  Sense strand starting at position 1585 SEQ ID NO: 3387
cuaucagcaucacuggauu

SEQ ID NO: 263389 - RNA, 19 nt, Artificial Sequence
  Description of Artificial Sequence: Synthetic oligonucleotide
  Antisense strand to SEQ ID NO: 263388
aauccagugaugcugauag

SEQ ID NO: 263390 - RNA, 19 nt, Artificial Sequence
  Description of Artificial Sequence: Synthetic oligonucleotide
  Sense strand starting at position 1588 SEQ ID NO: 3387
ucagcaucacuggauugua

SEQ ID NO: 263391 - RNA, 19 nt, Artificial Sequence
  Description of Artificial Sequence: Synthetic oligonucleotide
  Antisense strand to SEQ ID NO: 263390
uacaauccagugaugcuga

SEQ ID NO: 263392 - RNA, 19 nt, Artificial Sequence
  Description of Artificial Sequence: Synthetic oligonucleotide
  Sense strand starting at position 1709 SEQ ID NO: 3387
cagcucuuggaagauguau

SEQ ID NO: 263393 - RNA, 19 nt, Artificial Sequence
  Description of Artificial Sequence: Synthetic oligonucleotide
  Antisense strand to SEQ ID NO: 263392
auacaucuuccaagagcug

SEQ ID NO: 263394 - RNA, 19 nt, Artificial Sequence
  Description of Artificial Sequence: Synthetic oligonucleotide
  Sense strand starting at position 2131 SEQ ID NO: 3387
auggaucuguacccugaga

SEQ ID NO: 263395 - RNA, 19 nt, Artificial Sequence
  Description of Artificial Sequence: Synthetic oligonucleotide
  Antisense strand to SEQ ID NO: 263394
ucucaggguacagauccau

SEQ ID NO: 263396 - RNA, 19 nt, Artificial Sequence
  Description of Artificial Sequence: Synthetic oligonucleotide
  Sense strand starting at position 2162 SEQ ID NO: 3387
ugaccagaaccuuggagua

SEQ ID NO: 263397 - RNA, 19 nt, Artificial Sequence
  Description of Artificial Sequence: Synthetic oligonucleotide
  Antisense strand to SEQ ID NO: 263396
uacuccaagguucugguca

SEQ ID NO: 263398 - RNA, 19 nt, Artificial Sequence
  Description of Artificial Sequence: Synthetic oligonucleotide
  Sense strand starting at position 2231 SEQ ID NO: 3387
ccaagauguucucuuggag

SEQ ID NO: 263399 - RNA, 19 nt, Artificial Sequence
  Description of Artificial Sequence: Synthetic oligonucleotide
  Antisense strand to SEQ ID NO: 263398
cuccaagagaacaucuugg

SEQ ID NO: 263400 - RNA, 19 nt, Artificial Sequence
  Description of Artificial Sequence: Synthetic oligonucleotide
  Sense strand starting at position 2246 SEQ ID NO: 3387
ggagcaucuuccuuuaaga

SEQ ID NO: 263401 - RNA, 19 nt, Artificial Sequence
  Description of Artificial Sequence: Synthetic oligonucleotide
  Antisense strand to SEQ ID NO: 263400
ucuuaaaggaagaugcucc

SEQ ID NO: 263402 - RNA, 19 nt, Artificial Sequence
  Description of Artificial Sequence: Synthetic oligonucleotide
  Sense strand starting at position 2248 SEQ ID NO: 3387
agcaucuuccuuuaagaag

SEQ ID NO: 263403 - RNA, 19 nt, Artificial Sequence
  Description of Artificial Sequence: Synthetic oligonucleotide
  Antisense strand to SEQ ID NO: 263402
cuucuuaaaggaagaugcu

SEQ ID NO: 263404 - RNA, 19 nt, Artificial Sequence
  Description of Artificial Sequence: Synthetic oligonucleotide
  Sense strand starting at position 2682 SEQ ID NO: 3387
uuuauaauggcugaguagu

SEQ ID NO: 263405 - RNA, 19 nt, Artificial Sequence
  Description of Artificial Sequence: Synthetic oligonucleotide
  Antisense strand to SEQ ID NO: 263404
acuacucagccauuauaaa

SEQ ID NO: 263406 - RNA, 19 nt, Artificial Sequence
  Description of Artificial Sequence: Synthetic oligonucleotide
  Sense strand starting at position 3043 SEQ ID NO: 3387
ccagacuccugaguaggua

SEQ ID NO: 263407 - RNA, 19 nt, Artificial Sequence
  Description of Artificial Sequence: Synthetic oligonucleotide
  Antisense strand to SEQ ID NO: 263406
uaccuacucaggagucugg

SEQ ID NO: 263408 - RNA, 19 nt, Artificial Sequence
  Description of Artificial Sequence: Synthetic oligonucleotide
  Sense strand starting at position 3176 SEQ ID NO: 3387
cugcccauuguugagauua

SEQ ID NO: 263409 - RNA, 19 nt, Artificial Sequence
  Description of Artificial Sequence: Synthetic oligonucleotide
  Antisense strand to SEQ ID NO: 263408
uaaucucaacaaugggcag

SEQ ID NO: 263410 - RNA, 19 nt, Artificial Sequence
  Description of Artificial Sequence: Synthetic oligonucleotide
  Sense strand starting at position 3356 SEQ ID NO: 3387
uaggauguccacuaaaguu

SEQ ID NO: 263411 - RNA, 19 nt, Artificial Sequence
  Description of Artificial Sequence: Synthetic oligonucleotide
  Antisense strand to SEQ ID NO: 263410
aacuuuaguggacauccua

SEQ ID NO: 263412 - RNA, 19 nt, Artificial Sequence
  Description of Artificial Sequence: Synthetic oligonucleotide
  Sense strand starting at position 3413 SEQ ID NO: 3387
agcucacaggcauaaugua

SEQ ID NO: 263413 - RNA, 19 nt, Artificial Sequence
  Description of Artificial Sequence: Synthetic oligonucleotide
  Antisense strand to SEQ ID NO: 263412
uacauuaugccugugagcu

SEQ ID NO: 263414 - RNA, 19 nt, Artificial Sequence
  Description of Artificial Sequence: Synthetic oligonucleotide
  Sense strand starting at position 3433 SEQ ID NO: 3387
auuggagauuaauuguaac

SEQ ID NO: 263415 - RNA, 19 nt, Artificial Sequence
  Description of Artificial Sequence: Synthetic oligonucleotide
  Antisense strand to SEQ ID NO: 263414
guuacaauuaaucuccaau

SEQ ID NO: 263416 - RNA, 19 nt, Artificial Sequence
  Description of Artificial Sequence: Synthetic oligonucleotide
  Sense strand starting at position 3439 SEQ ID NO: 3387
gauuaauuguaacuugagu

SEQ ID NO: 263417 - RNA, 19 nt, Artificial Sequence
  Description of Artificial Sequence: Synthetic oligonucleotide
  Antisense strand to SEQ ID NO: 263416
acucaaguuacaauuaauc

SEQ ID NO: 263418 - RNA, 19 nt, Artificial Sequence
  Description of Artificial Sequence: Synthetic oligonucleotide
  Sense strand starting at position 3596 SEQ ID NO: 3387
cuaaguuuauaaguaggaa

SEQ ID NO: 263419 - RNA, 19 nt, Artificial Sequence
  Description of Artificial Sequence: Synthetic oligonucleotide
  Antisense strand to SEQ ID NO: 263418
uuccuacuuauaaacuuag

SEQ ID NO: 263420 - RNA, 19 nt, Artificial Sequence
  Description of Artificial Sequence: Synthetic oligonucleotide
  Sense strand starting at position 3625 SEQ ID NO: 3387
auagaaucuugaguuccaa

SEQ ID NO: 263421 - RNA, 19 nt, Artificial Sequence
  Description of Artificial Sequence: Synthetic oligonucleotide
  Antisense strand to SEQ ID NO: 263420
uuggaacucaagauucuau

SEQ ID NO: 263422 - RNA, 19 nt, Artificial Sequence
  Description of Artificial Sequence: Synthetic oligonucleotide
  Sense strand starting at position 3798 SEQ ID NO: 3387
gguggaaauguguaacuuu

SEQ ID NO: 263423 - RNA, 19 nt, Artificial Sequence
  Description of Artificial Sequence: Synthetic oligonucleotide
  Antisense strand to SEQ ID NO: 263422
aaaguuacacauuuccacc

SEQ ID NO: 263424 - RNA, 19 nt, Artificial Sequence
  Description of Artificial Sequence: Synthetic oligonucleotide
  Sense strand starting at position 3801 SEQ ID NO: 3387
ggaaauguguaacuuugaa

SEQ ID NO: 263425 - RNA, 19 nt, Artificial Sequence
  Description of Artificial Sequence: Synthetic oligonucleotide
  Antisense strand to SEQ ID NO: 263424
uucaaaguuacacauuucc

SEQ ID NO: 263426 - RNA, 19 nt, Artificial Sequence
  Description of Artificial Sequence: Synthetic oligonucleotide
  Sense strand starting at position 3967 SEQ ID NO: 3387
agcauauaucauuaguuga

SEQ ID NO: 263427 - RNA, 19 nt, Artificial Sequence
  Description of Artificial Sequence: Synthetic oligonucleotide
  Antisense strand to SEQ ID NO: 263426
ucaacuaaugauauaugcu

SEQ ID NO: 263428 - RNA, 19 nt, Artificial Sequence
  Description of Artificial Sequence: Synthetic oligonucleotide
  Sense strand starting at position 3972 SEQ ID NO: 3387
auaucauuaguugagcuaa

SEQ ID NO: 263429 - RNA, 19 nt, Artificial Sequence
  Description of Artificial Sequence: Synthetic oligonucleotide
  Antisense strand to SEQ ID NO: 263428
uuagcucaacuaaugauau

SEQ ID NO: 263430 - RNA, 19 nt, Artificial Sequence
  Description of Artificial Sequence: Synthetic oligonucleotide
  Sense strand starting at position 3974 SEQ ID NO: 3387
aucauuaguugagcuaaua

SEQ ID NO: 263431 - RNA, 19 nt, Artificial Sequence
  Description of Artificial Sequence: Synthetic oligonucleotide
  Antisense strand to SEQ ID NO: 263430
uauuagcucaacuaaugau

SEQ ID NO: 263432 - RNA, 19 nt, Artificial Sequence
  Description of Artificial Sequence: Synthetic oligonucleotide
  Sense strand starting at position 37 SEQ ID NO: 3386
uugcuucuuagguaaagag

SEQ ID NO: 263433 - RNA, 19 nt, Artificial Sequence
  Description of Artificial Sequence: Synthetic oligonucleotide
  Antisense strand to SEQ ID NO: 263432
cucuuuaccuaagaagcaa

SEQ ID NO: 263434 - RNA, 19 nt, Artificial Sequence
  Description of Artificial Sequence: Synthetic oligonucleotide
  Sense strand starting at position 102 SEQ ID NO: 3386
agguaacauugucuuauaa

SEQ ID NO: 263435 - RNA, 19 nt, Artificial Sequence
  Description of Artificial Sequence: Synthetic oligonucleotide
  Antisense strand to SEQ ID NO: 263434
uuauaagacaauguuaccu

SEQ ID NO: 263436 - RNA, 19 nt, Artificial Sequence
  Description of Artificial Sequence: Synthetic oligonucleotide
  Sense strand starting at position 211 SEQ ID NO: 3386
uuacuaucauggcuaugau

SEQ ID NO: 263437 - RNA, 19 nt, Artificial Sequence
  Description of Artificial Sequence: Synthetic oligonucleotide
  Antisense strand to SEQ ID NO: 263436
aucauagccaugauaguaa

SEQ ID NO: 263438 - RNA, 19 nt, Artificial Sequence
  Description of Artificial Sequence: Synthetic oligonucleotide
  Sense strand starting at position 231 SEQ ID NO: 3386
ucacuuauuguguaaugua

SEQ ID NO: 263439 - RNA, 19 nt, Artificial Sequence
  Description of Artificial Sequence: Synthetic oligonucleotide
  Antisense strand to SEQ ID NO: 263438
uacauuacacaauaaguga

SEQ ID NO: 263440 - RNA, 19 nt, Artificial Sequence
  Description of Artificial Sequence: Synthetic oligonucleotide
  Sense strand starting at position 238 SEQ ID NO: 3386
uuguguaauguagacagua

SEQ ID NO: 263441 - RNA, 19 nt, Artificial Sequence
  Description of Artificial Sequence: Synthetic oligonucleotide
  Antisense strand to SEQ ID NO: 263440
uacugucuacauuacacaa

SEQ ID NO: 263442 - RNA, 19 nt, Artificial Sequence
  Description of Artificial Sequence: Synthetic oligonucleotide
  Sense strand starting at position 240 SEQ ID NO: 3386
guguaauguagacaguaug

SEQ ID NO: 263443 - RNA, 19 nt, Artificial Sequence
  Description of Artificial Sequence: Synthetic oligonucleotide
  Antisense strand to SEQ ID NO: 263442
cauacugucuacauuacac

SEQ ID NO: 263444 - RNA, 19 nt, Artificial Sequence
  Description of Artificial Sequence: Synthetic oligonucleotide
  Sense strand starting at position 314 SEQ ID NO: 3386
cuuaaagaacuguaugcau

SEQ ID NO: 263445 - RNA, 19 nt, Artificial Sequence
  Description of Artificial Sequence: Synthetic oligonucleotide
  Antisense strand to SEQ ID NO: 263444
augcauacaguucuuuaag

SEQ ID NO: 263446 - RNA, 19 nt, Artificial Sequence
  Description of Artificial Sequence: Synthetic oligonucleotide
  Sense strand starting at position 569 SEQ ID NO: 3386
uuacauaaugucuaagggu

SEQ ID NO: 263447 - RNA, 19 nt, Artificial Sequence
  Description of Artificial Sequence: Synthetic oligonucleotide
  Antisense strand to SEQ ID NO: 263446
acccuuagacauuauguaa

SEQ ID NO: 263448 - RNA, 19 nt, Artificial Sequence
  Description of Artificial Sequence: Synthetic oligonucleotide
  Sense strand starting at position 575 SEQ ID NO: 3386
aaugucuaagggugaucua

SEQ ID NO: 263449 - RNA, 19 nt, Artificial Sequence
  Description of Artificial Sequence: Synthetic oligonucleotide
  Antisense strand to SEQ ID NO: 263448
uagaucacccuuagacauu

SEQ ID NO: 263450 - RNA, 19 nt, Artificial Sequence
  Description of Artificial Sequence: Synthetic oligonucleotide
  Sense strand starting at position 578 SEQ ID NO: 3386
gucuaagggugaucuaacu

SEQ ID NO: 263451 - RNA, 19 nt, Artificial Sequence
  Description of Artificial Sequence: Synthetic oligonucleotide
  Antisense strand to SEQ ID NO: 263450
aguuagaucacccuuagac

SEQ ID NO: 263452 - RNA, 19 nt, Artificial Sequence
  Description of Artificial Sequence: Synthetic oligonucleotide
  Sense strand starting at position 659 SEQ ID NO: 3386
augggucagcaucauaguu

SEQ ID NO: 263453 - RNA, 19 nt, Artificial Sequence
  Description of Artificial Sequence: Synthetic oligonucleotide
  Antisense strand to SEQ ID NO: 263452
aacuaugaugcugacccau

SEQ ID NO: 263454 - RNA, 19 nt, Artificial Sequence
  Description of Artificial Sequence: Synthetic oligonucleotide
  Sense strand starting at position 759 SEQ ID NO: 3386
gguacuauugcucauugau

SEQ ID NO: 263455 - RNA, 19 nt, Artificial Sequence
  Description of Artificial Sequence: Synthetic oligonucleotide
  Antisense strand to SEQ ID NO: 263454
aucaaugagcaauaguacc

SEQ ID NO: 263456 - RNA, 19 nt, Artificial Sequence
  Description of Artificial Sequence: Synthetic oligonucleotide
  Sense strand starting at position 787 SEQ ID NO: 3386
aaggcagguuuccuuagau

SEQ ID NO: 263457 - RNA, 19 nt, Artificial Sequence
  Description of Artificial Sequence: Synthetic oligonucleotide
  Antisense strand to SEQ ID NO: 263456
aucuaaggaaaccugccuu

SEQ ID NO: 263458 - RNA, 19 nt, Artificial Sequence
  Description of Artificial Sequence: Synthetic oligonucleotide
  Sense strand starting at position 873 SEQ ID NO: 3386
gagucacaucacuggaagu

SEQ ID NO: 263459 - RNA, 19 nt, Artificial Sequence
  Description of Artificial Sequence: Synthetic oligonucleotide
  Antisense strand to SEQ ID NO: 263458
acuuccagugaugugacuc

SEQ ID NO: 263460 - RNA, 19 nt, Artificial Sequence
  Description of Artificial Sequence: Synthetic oligonucleotide
  Sense strand starting at position 875 SEQ ID NO: 3386
gucacaucacuggaaguua

SEQ ID NO: 263461 - RNA, 19 nt, Artificial Sequence
  Description of Artificial Sequence: Synthetic oligonucleotide
  Antisense strand to SEQ ID NO: 263460
uaacuuccagugaugugac

SEQ ID NO: 263462 - RNA, 19 nt, Artificial Sequence
  Description of Artificial Sequence: Synthetic oligonucleotide
  Sense strand starting at position 987 SEQ ID NO: 3386
uucuuaguccaagaucagu

SEQ ID NO: 263463 - RNA, 19 nt, Artificial Sequence
  Description of Artificial Sequence: Synthetic oligonucleotide
  Antisense strand to SEQ ID NO: 263462
acugaucuuggacuaagaa

SEQ ID NO: 263464 - RNA, 19 nt, Artificial Sequence
  Description of Artificial Sequence: Synthetic oligonucleotide
  Sense strand starting at position 993 SEQ ID NO: 3386
guccaagaucaguaggcaa

SEQ ID NO: 263465 - RNA, 19 nt, Artificial Sequence
  Description of Artificial Sequence: Synthetic oligonucleotide
  Antisense strand to SEQ ID NO: 263464
uugccuacugaucuuggac

SEQ ID NO: 263466 - RNA, 19 nt, Artificial Sequence
  Description of Artificial Sequence: Synthetic oligonucleotide
  Sense strand starting at position 995 SEQ ID NO: 3386
ccaagaucaguaggcaaau

SEQ ID NO: 263467 - RNA, 19 nt, Artificial Sequence
  Description of Artificial Sequence: Synthetic oligonucleotide
  Antisense strand to SEQ ID NO: 263466
auuugccuacugaucuugg

SEQ ID NO: 263468 - RNA, 19 nt, Artificial Sequence
  Description of Artificial Sequence: Synthetic oligonucleotide
  Sense strand starting at position 1004 SEQ ID NO: 3386
guaggcaaauacucuaaga

SEQ ID NO: 263469 - RNA, 19 nt, Artificial Sequence
  Description of Artificial Sequence: Synthetic oligonucleotide
  Antisense strand to SEQ ID NO: 263468
ucuuagaguauuugccuac

SEQ ID NO: 263470 - RNA, 19 nt, Artificial Sequence
  Description of Artificial Sequence: Synthetic oligonucleotide
  Sense strand starting at position 1135 SEQ ID NO: 3386
aguuacagucacugaaaca

SEQ ID NO: 263471 - RNA, 19 nt, Artificial Sequence
  Description of Artificial Sequence: Synthetic oligonucleotide
  Antisense strand to SEQ ID NO: 263470
uguuucagugacuguaacu

SEQ ID NO: 263472 - RNA, 19 nt, Artificial Sequence
  Description of Artificial Sequence: Synthetic oligonucleotide
  Sense strand starting at position 1148 SEQ ID NO: 3386
gaaacacuugagugcauaa

SEQ ID NO: 263473 - RNA, 19 nt, Artificial Sequence
  Description of Artificial Sequence: Synthetic oligonucleotide
  Antisense strand to SEQ ID NO: 263472
uuaugcacucaaguguuuc

SEQ ID NO: 263474 - RNA, 19 nt, Artificial Sequence
  Description of Artificial Sequence: Synthetic oligonucleotide
  Sense strand starting at position 1377 SEQ ID NO: 3386
gggaucugguuuccagaga

SEQ ID NO: 263475 - RNA, 19 nt, Artificial Sequence
  Description of Artificial Sequence: Synthetic oligonucleotide
  Antisense strand to SEQ ID NO: 263474
ucucuggaaaccagauccc

SEQ ID NO: 263476 - RNA, 19 nt, Artificial Sequence
  Description of Artificial Sequence: Synthetic oligonucleotide
  Sense strand starting at position 1464 SEQ ID NO: 3386
ucuccuaaacaguauaagu

SEQ ID NO: 263477 - RNA, 19 nt, Artificial Sequence
  Description of Artificial Sequence: Synthetic oligonucleotide
  Antisense strand to SEQ ID NO: 263476
acuuauacuguuuaggaga

SEQ ID NO: 263478 - RNA, 19 nt, Artificial Sequence
  Description of Artificial Sequence: Synthetic oligonucleotide
  Sense strand starting at position 1498 SEQ ID NO: 3386
auggaaacuugagaauaaa

SEQ ID NO: 263479 - RNA, 19 nt, Artificial Sequence
  Description of Artificial Sequence: Synthetic oligonucleotide
  Antisense strand to SEQ ID NO: 263478
uuuauucucaaguuuccau

SEQ ID NO: 263480 - RNA, 19 nt, Artificial Sequence
  Description of Artificial Sequence: Synthetic oligonucleotide
  Sense strand starting at position 1988 SEQ ID NO: 3386
auggacccagaguguuaaa

SEQ ID NO: 263481 - RNA, 19 nt, Artificial Sequence
  Description of Artificial Sequence: Synthetic oligonucleotide
  Antisense strand to SEQ ID NO: 263480
uuuaacacucuggguccau

SEQ ID NO: 263482 - RNA, 19 nt, Artificial Sequence
  Description of Artificial Sequence: Synthetic oligonucleotide
  Sense strand starting at position 2032 SEQ ID NO: 3386
ucacuuagugccuaauaga

SEQ ID NO: 263483 - RNA, 19 nt, Artificial Sequence
  Description of Artificial Sequence: Synthetic oligonucleotide
  Antisense strand to SEQ ID NO: 263482
ucuauuaggcacuaaguga

SEQ ID NO: 263484 - RNA, 19 nt, Artificial Sequence
  Description of Artificial Sequence: Synthetic oligonucleotide
  Sense strand starting at position 2073 SEQ ID NO: 3386
uggacaguucucuagucaa

SEQ ID NO: 263485 - RNA, 19 nt, Artificial Sequence
  Description of Artificial Sequence: Synthetic oligonucleotide
  Antisense strand to SEQ ID NO: 263484
uugacuagagaacugucca

SEQ ID NO: 263486 - RNA, 19 nt, Artificial Sequence
  Description of Artificial Sequence: Synthetic oligonucleotide
  Sense strand starting at position 2104 SEQ ID NO: 3386
uccggcucagacuauaaau

SEQ ID NO: 263487 - RNA, 19 nt, Artificial Sequence
  Description of Artificial Sequence: Synthetic oligonucleotide
  Antisense strand to SEQ ID NO: 263486
auuuauagucugagccgga

SEQ ID NO: 263488 - RNA, 19 nt, Artificial Sequence
  Description of Artificial Sequence: Synthetic oligonucleotide
  Sense strand starting at position 2133 SEQ ID NO: 3386
gggucagggcuucaucaau

SEQ ID NO: 263489 - RNA, 19 nt, Artificial Sequence
  Description of Artificial Sequence: Synthetic oligonucleotide
  Antisense strand to SEQ ID NO: 263488
auugaugaagcccugaccc

SEQ ID NO: 263490 - RNA, 19 nt, Artificial Sequence
  Description of Artificial Sequence: Synthetic oligonucleotide
  Sense strand starting at position 2251 SEQ ID NO: 3386
gagguagauugacuguacu

SEQ ID NO: 263491 - RNA, 19 nt, Artificial Sequence
  Description of Artificial Sequence: Synthetic oligonucleotide
  Antisense strand to SEQ ID NO: 263490
aguacagucaaucuaccuc

SEQ ID NO: 263492 - RNA, 19 nt, Artificial Sequence
  Description of Artificial Sequence: Synthetic oligonucleotide
  Sense strand starting at position 2372 SEQ ID NO: 3386
cagggaguaucaccaacuu

SEQ ID NO: 263493 - RNA, 19 nt, Artificial Sequence
  Description of Artificial Sequence: Synthetic oligonucleotide
  Antisense strand to SEQ ID NO: 263492
aaguuggugauacucccug

SEQ ID NO: 263494 - RNA, 19 nt, Artificial Sequence
  Description of Artificial Sequence: Synthetic oligonucleotide
  Sense strand starting at position 2438 SEQ ID NO: 3386
aaggaaauguuggucagca

SEQ ID NO: 263495 - RNA, 19 nt, Artificial Sequence
  Description of Artificial Sequence: Synthetic oligonucleotide
  Antisense strand to SEQ ID NO: 263494
ugcugaccaacauuuccuu

SEQ ID NO: 263496 - RNA, 19 nt, Artificial Sequence
  Description of Artificial Sequence: Synthetic oligonucleotide
  Sense strand starting at position 2439 SEQ ID NO: 3386
aggaaauguuggucagcaa

SEQ ID NO: 263497 - RNA, 19 nt, Artificial Sequence
  Description of Artificial Sequence: Synthetic oligonucleotide
  Antisense strand to SEQ ID NO: 263496
uugcugaccaacauuuccu

SEQ ID NO: 263498 - RNA, 19 nt, Artificial Sequence
  Description of Artificial Sequence: Synthetic oligonucleotide
  Sense strand starting at position 2440 SEQ ID NO: 3386
ggaaauguuggucagcaaa

SEQ ID NO: 263499 - RNA, 19 nt, Artificial Sequence
  Description of Artificial Sequence: Synthetic oligonucleotide
  Antisense strand to SEQ ID NO: 263498
uuugcugaccaacauuucc

SEQ ID NO: 263500 - RNA, 19 nt, Artificial Sequence
  Description of Artificial Sequence: Synthetic oligonucleotide
  Sense strand starting at position 2442 SEQ ID NO: 3386
aaauguuggucagcaaaga

SEQ ID NO: 263501 - RNA, 19 nt, Artificial Sequence
  Description of Artificial Sequence: Synthetic oligonucleotide
  Antisense strand to SEQ ID NO: 263500
ucuuugcugaccaacauuu

SEQ ID NO: 263502 - RNA, 19 nt, Artificial Sequence
  Description of Artificial Sequence: Synthetic oligonucleotide
  Sense strand starting at position 2751 SEQ ID NO: 3386
uucuaaaugguguaaaguc

SEQ ID NO: 263503 - RNA, 19 nt, Artificial Sequence
  Description of Artificial Sequence: Synthetic oligonucleotide
  Antisense strand to SEQ ID NO: 263502
gacuuuacaccauuuagaa

SEQ ID NO: 263504 - RNA, 19 nt, Artificial Sequence
  Description of Artificial Sequence: Synthetic oligonucleotide
  Sense strand starting at position 2758 SEQ ID NO: 3386
ugguguaaagucuaauuau

SEQ ID NO: 263505 - RNA, 19 nt, Artificial Sequence
  Description of Artificial Sequence: Synthetic oligonucleotide
  Antisense strand to SEQ ID NO: 263504
auaauuagacuuuacacca

SEQ ID NO: 263506 - RNA, 19 nt, Artificial Sequence
  Description of Artificial Sequence: Synthetic oligonucleotide
  Sense strand starting at position 3005 SEQ ID NO: 3386
ggguuacaauuaguaauca

SEQ ID NO: 263507 - RNA, 19 nt, Artificial Sequence
  Description of Artificial Sequence: Synthetic oligonucleotide
  Antisense strand to SEQ ID NO: 263506
ugauuacuaauuguaaccc

SEQ ID NO: 263508 - RNA, 19 nt, Artificial Sequence
  Description of Artificial Sequence: Synthetic oligonucleotide
  Sense strand starting at position 3237 SEQ ID NO: 3386
auccauacauguguacaaa

SEQ ID NO: 263509 - RNA, 19 nt, Artificial Sequence
  Description of Artificial Sequence: Synthetic oligonucleotide
  Antisense strand to SEQ ID NO: 263508
uuuguacacauguauggau

SEQ ID NO: 263510 - RNA, 19 nt, Artificial Sequence
  Description of Artificial Sequence: Synthetic oligonucleotide
  Sense strand starting at position 3327 SEQ ID NO: 3386
cuuucuugggucugauaua

SEQ ID NO: 263511 - RNA, 19 nt, Artificial Sequence
  Description of Artificial Sequence: Synthetic oligonucleotide
  Antisense strand to SEQ ID NO: 263510
uauaucagacccaagaaag

SEQ ID NO: 263512 - RNA, 19 nt, Artificial Sequence
  Description of Artificial Sequence: Synthetic oligonucleotide
  Sense strand starting at position 252 SEQ ID NO: 3388
ccaugaaugccuggaaaug

SEQ ID NO: 263513 - RNA, 19 nt, Artificial Sequence
  Description of Artificial Sequence: Synthetic oligonucleotide
  Antisense strand to SEQ ID NO: 263512
cauuuccaggcauucaugg

SEQ ID NO: 263514 - RNA, 19 nt, Artificial Sequence
  Description of Artificial Sequence: Synthetic oligonucleotide
  Sense strand starting at position 253 SEQ ID NO: 3388
caugaaugccuggaaaugu

SEQ ID NO: 263515 - RNA, 19 nt, Artificial Sequence
  Description of Artificial Sequence: Synthetic oligonucleotide
  Antisense strand to SEQ ID NO: 263514
acauuuccaggcauucaug

SEQ ID NO: 263516 - RNA, 19 nt, Artificial Sequence
  Description of Artificial Sequence: Synthetic oligonucleotide
  Sense strand starting at position 866 SEQ ID NO: 3388
gcaaucuaacauugggaac

SEQ ID NO: 263517 - RNA, 19 nt, Artificial Sequence
  Description of Artificial Sequence: Synthetic oligonucleotide
  Antisense strand to SEQ ID NO: 263516
guucccaauguuagauugc

SEQ ID NO: 263518 - RNA, 19 nt, Artificial Sequence
  Description of Artificial Sequence: Synthetic oligonucleotide
  Sense strand starting at position 974 SEQ ID NO: 3388
ucacauggcccuugaacaa

SEQ ID NO: 263519 - RNA, 19 nt, Artificial Sequence
  Description of Artificial Sequence: Synthetic oligonucleotide
  Antisense strand to SEQ ID NO: 263518
uuguucaagggccauguga

SEQ ID NO: 263520 - RNA, 19 nt, Artificial Sequence
  Description of Artificial Sequence: Synthetic oligonucleotide
  Sense strand starting at position 1084 SEQ ID NO: 3388
cguagcucccgucucuaau

SEQ ID NO: 263521 - RNA, 19 nt, Artificial Sequence
  Description of Artificial Sequence: Synthetic oligonucleotide
  Antisense strand to SEQ ID NO: 263520
auuagagacgggagcuacg

SEQ ID NO: 263522 - RNA, 19 nt, Artificial Sequence
  Description of Artificial Sequence: Synthetic oligonucleotide
  Sense strand starting at position 1393 SEQ ID NO: 3388
agcugugggccagaggaau

SEQ ID NO: 263523 - RNA, 19 nt, Artificial Sequence
  Description of Artificial Sequence: Synthetic oligonucleotide
  Antisense strand to SEQ ID NO: 263522
auuccucuggcccacagcu

SEQ ID NO: 263524 - RNA, 19 nt, Artificial Sequence
  Description of Artificial Sequence: Synthetic oligonucleotide
  Sense strand starting at position 1488 SEQ ID NO: 3388
agagcaacuuaguuuacaa

SEQ ID NO: 263525 - RNA, 19 nt, Artificial Sequence
  Description of Artificial Sequence: Synthetic oligonucleotide
  Antisense strand to SEQ ID NO: 263524
uuguaaacuaaguugcucu

SEQ ID NO: 263526 - RNA, 19 nt, Artificial Sequence
  Description of Artificial Sequence: Synthetic oligonucleotide
  Sense strand starting at position 2429 SEQ ID NO: 3388
uuuggaugccgagaauauc

SEQ ID NO: 263527 - RNA, 19 nt, Artificial Sequence
  Description of Artificial Sequence: Synthetic oligonucleotide
  Antisense strand to SEQ ID NO: 263526
gauauucucggcauccaaa

SEQ ID NO: 263528 - RNA, 19 nt, Artificial Sequence
  Description of Artificial Sequence: Synthetic oligonucleotide
  Sense strand starting at position 2478 SEQ ID NO: 3388
aaauuauacugaguggugu

SEQ ID NO: 263529 - RNA, 19 nt, Artificial Sequence
  Description of Artificial Sequence: Synthetic oligonucleotide
  Antisense strand to SEQ ID NO: 263528
acaccacucaguauaauuu

SEQ ID NO: 263530 - RNA, 19 nt, Artificial Sequence
  Description of Artificial Sequence: Synthetic oligonucleotide
  Sense strand starting at position 2491 SEQ ID NO: 3388
ugguguggugugucuucau

SEQ ID NO: 263531 - RNA, 19 nt, Artificial Sequence
  Description of Artificial Sequence: Synthetic oligonucleotide
  Antisense strand to SEQ ID NO: 263530
augaagacacaccacacca

SEQ ID NO: 263532 - RNA, 19 nt, Artificial Sequence
  Description of Artificial Sequence: Synthetic oligonucleotide
  Sense strand starting at position 2494 SEQ ID NO: 3388
uguggugugucuucauuua

SEQ ID NO: 263533 - RNA, 19 nt, Artificial Sequence
  Description of Artificial Sequence: Synthetic oligonucleotide
  Antisense strand to SEQ ID NO: 263532
uaaaugaagacacaccaca

SEQ ID NO: 263534 - RNA, 19 nt, Artificial Sequence
  Description of Artificial Sequence: Synthetic oligonucleotide
  Sense strand starting at position 2544 SEQ ID NO: 3388
ucucacauugugggaaaua

SEQ ID NO: 263535 - RNA, 19 nt, Artificial Sequence
  Description of Artificial Sequence: Synthetic oligonucleotide
  Antisense strand to SEQ ID NO: 263534
uauuucccacaaugugaga

SEQ ID NO: 263536 - RNA, 19 nt, Artificial Sequence
  Description of Artificial Sequence: Synthetic oligonucleotide
  Sense strand starting at position 2650 SEQ ID NO: 3388
uuaacagguccugaguaau

SEQ ID NO: 263537 - RNA, 19 nt, Artificial Sequence
  Description of Artificial Sequence: Synthetic oligonucleotide
  Antisense strand to SEQ ID NO: 263536
auuacucaggaccuguuaa

SEQ ID NO: 263538 - RNA, 19 nt, Artificial Sequence
  Description of Artificial Sequence: Synthetic oligonucleotide
  Sense strand starting at position 2680 SEQ ID NO: 3388
ggguauauuauacaggcau

SEQ ID NO: 263539 - RNA, 19 nt, Artificial Sequence
  Description of Artificial Sequence: Synthetic oligonucleotide
  Antisense strand to SEQ ID NO: 263538
augccuguauaauauaccc

SEQ ID NO: 263540 - RNA, 19 nt, Artificial Sequence
  Description of Artificial Sequence: Synthetic oligonucleotide
  Sense strand starting at position 2760 SEQ ID NO: 3388
ccuauugccucauuggaga

SEQ ID NO: 263541 - RNA, 19 nt, Artificial Sequence
  Description of Artificial Sequence: Synthetic oligonucleotide
  Antisense strand to SEQ ID NO: 263540
ucuccaaugaggcaauagg

SEQ ID NO: 263542 - RNA, 19 nt, Artificial Sequence
  Description of Artificial Sequence: Synthetic oligonucleotide
  Sense strand starting at position 2846 SEQ ID NO: 3388
aaacuuacucacuggguga

SEQ ID NO: 263543 - RNA, 19 nt, Artificial Sequence
  Description of Artificial Sequence: Synthetic oligonucleotide
  Antisense strand to SEQ ID NO: 263542
ucacccagugaguaaguuu

SEQ ID NO: 263544 - RNA, 19 nt, Artificial Sequence
  Description of Artificial Sequence: Synthetic oligonucleotide
  Sense strand starting at position 2848 SEQ ID NO: 3388
acuuacucacugggugaga

SEQ ID NO: 263545 - RNA, 19 nt, Artificial Sequence
  Description of Artificial Sequence: Synthetic oligonucleotide
  Antisense strand to SEQ ID NO: 263544
ucucacccagugaguaagu

SEQ ID NO: 263546 - RNA, 19 nt, Artificial Sequence
  Description of Artificial Sequence: Synthetic oligonucleotide
  Sense strand starting at position 2849 SEQ ID NO: 3388
cuuacucacugggugagau

SEQ ID NO: 263547 - RNA, 19 nt, Artificial Sequence
  Description of Artificial Sequence: Synthetic oligonucleotide
  Antisense strand to SEQ ID NO: 263546
aucucacccagugaguaag

SEQ ID NO: 263548 - RNA, 19 nt, Artificial Sequence
  Description of Artificial Sequence: Synthetic oligonucleotide
  Sense strand starting at position 2869 SEQ ID NO: 3388
aggauuacuuggcugaggu

SEQ ID NO: 263549 - RNA, 19 nt, Artificial Sequence
  Description of Artificial Sequence: Synthetic oligonucleotide
  Antisense strand to SEQ ID NO: 263548
accucagccaaguaauccu

SEQ ID NO: 263550 - RNA, 19 nt, Artificial Sequence
  Description of Artificial Sequence: Synthetic oligonucleotide
  Sense strand starting at position 2870 SEQ ID NO: 3388
ggauuacuuggcugaggug

SEQ ID NO: 263551 - RNA, 19 nt, Artificial Sequence
  Description of Artificial Sequence: Synthetic oligonucleotide
  Antisense strand to SEQ ID NO: 263550
caccucagccaaguaaucc

SEQ ID NO: 263552 - RNA, 19 nt, Artificial Sequence
  Description of Artificial Sequence: Synthetic oligonucleotide
  Sense strand starting at position 2908 SEQ ID NO: 3388
aguaauuauuacucauggu

SEQ ID NO: 263553 - RNA, 19 nt, Artificial Sequence
  Description of Artificial Sequence: Synthetic oligonucleotide
  Antisense strand to SEQ ID NO: 263552
accaugaguaauaauuacu

SEQ ID NO: 263554 - RNA, 19 nt, Artificial Sequence
  Description of Artificial Sequence: Synthetic oligonucleotide
  Sense strand starting at position 2912 SEQ ID NO: 3388
auuauuacucaugguucua

SEQ ID NO: 263555 - RNA, 19 nt, Artificial Sequence
  Description of Artificial Sequence: Synthetic oligonucleotide
  Antisense strand to SEQ ID NO: 263554
uagaaccaugaguaauaau

SEQ ID NO: 263556 - RNA, 19 nt, Artificial Sequence
  Description of Artificial Sequence: Synthetic oligonucleotide
  Sense strand starting at position 2960 SEQ ID NO: 3388
ccauaaaugggccagguuu

SEQ ID NO: 263557 - RNA, 19 nt, Artificial Sequence
  Description of Artificial Sequence: Synthetic oligonucleotide
  Antisense strand to SEQ ID NO: 263556
aaaccuggcccauuuaugg

SEQ ID NO: 263558 - RNA, 19 nt, Artificial Sequence
  Description of Artificial Sequence: Synthetic oligonucleotide
  Sense strand starting at position 2962 SEQ ID NO: 3388
auaaaugggccagguuuaa

SEQ ID NO: 263559 - RNA, 19 nt, Artificial Sequence
  Description of Artificial Sequence: Synthetic oligonucleotide
  Antisense strand to SEQ ID NO: 263558
uuaaaccuggcccauuuau

SEQ ID NO: 263560 - RNA, 19 nt, Artificial Sequence
  Description of Artificial Sequence: Synthetic oligonucleotide
  Sense strand starting at position 2971 SEQ ID NO: 3388
ccagguuuaaauggacuga

SEQ ID NO: 263561 - RNA, 19 nt, Artificial Sequence
  Description of Artificial Sequence: Synthetic oligonucleotide
  Antisense strand to SEQ ID NO: 263560
ucaguccauuuaaaccugg

SEQ ID NO: 263562 - RNA, 19 nt, Artificial Sequence
  Description of Artificial Sequence: Synthetic oligonucleotide
  Sense strand starting at position 2985 SEQ ID NO: 3388
acugaccuguaucuggaaa

SEQ ID NO: 263563 - RNA, 19 nt, Artificial Sequence
  Description of Artificial Sequence: Synthetic oligonucleotide
  Antisense strand to SEQ ID NO: 263562
uuuccagauacaggucagu

SEQ ID NO: 263564 - RNA, 19 nt, Artificial Sequence
  Description of Artificial Sequence: Synthetic oligonucleotide
  Sense strand starting at position 2998 SEQ ID NO: 3388
uggaaacugucacuaaagu

SEQ ID NO: 263565 - RNA, 19 nt, Artificial Sequence
  Description of Artificial Sequence: Synthetic oligonucleotide
  Antisense strand to SEQ ID NO: 263564
acuuuagugacaguuucca

SEQ ID NO: 263566 - RNA, 19 nt, Artificial Sequence
  Description of Artificial Sequence: Synthetic oligonucleotide
  Sense strand starting at position 3078 SEQ ID NO: 3388
ggcgcugggauuuguuaaa

SEQ ID NO: 263567 - RNA, 19 nt, Artificial Sequence
  Description of Artificial Sequence: Synthetic oligonucleotide
  Antisense strand to SEQ ID NO: 263566
uuuaacaaaucccagcgcc

SEQ ID NO: 263568 - RNA, 19 nt, Artificial Sequence
  Description of Artificial Sequence: Synthetic oligonucleotide
  Sense strand starting at position 3091 SEQ ID NO: 3388
guuaaaugccacuaguaga

SEQ ID NO: 263569 - RNA, 19 nt, Artificial Sequence
  Description of Artificial Sequence: Synthetic oligonucleotide
  Antisense strand to SEQ ID NO: 263568
ucuacuaguggcauuuaac

SEQ ID NO: 263570 - RNA, 19 nt, Artificial Sequence
  Description of Artificial Sequence: Synthetic oligonucleotide
  Sense strand starting at position 3101 SEQ ID NO: 3388
acuaguagaguuuggaaag

SEQ ID NO: 263571 - RNA, 19 nt, Artificial Sequence
  Description of Artificial Sequence: Synthetic oligonucleotide
  Antisense strand to SEQ ID NO: 263570
cuuuccaaacucuacuagu

SEQ ID NO: 263572 - RNA, 19 nt, Artificial Sequence
  Description of Artificial Sequence: Synthetic oligonucleotide
  Sense strand starting at position 3104 SEQ ID NO: 3388
aguagaguuuggaaaggug

SEQ ID NO: 263573 - RNA, 19 nt, Artificial Sequence
  Description of Artificial Sequence: Synthetic oligonucleotide
  Antisense strand to SEQ ID NO: 263572
caccuuuccaaacucuacu

SEQ ID NO: 263574 - RNA, 19 nt, Artificial Sequence
  Description of Artificial Sequence: Synthetic oligonucleotide
  Sense strand starting at position 3132 SEQ ID NO: 3388
cagacuauaucugcuggga

SEQ ID NO: 263575 - RNA, 19 nt, Artificial Sequence
  Description of Artificial Sequence: Synthetic oligonucleotide
  Antisense strand to SEQ ID NO: 263574
ucccagcagauauagucug

SEQ ID NO: 263576 - RNA, 19 nt, Artificial Sequence
  Description of Artificial Sequence: Synthetic oligonucleotide
  Sense strand starting at position 3135 SEQ ID NO: 3388
acuauaucugcugggaacu

SEQ ID NO: 263577 - RNA, 19 nt, Artificial Sequence
  Description of Artificial Sequence: Synthetic oligonucleotide
  Antisense strand to SEQ ID NO: 263576
aguucccagcagauauagu

SEQ ID NO: 263578 - RNA, 19 nt, Artificial Sequence
  Description of Artificial Sequence: Synthetic oligonucleotide
  Sense strand starting at position 3148 SEQ ID NO: 3388
ggaacugucucaucauuga

SEQ ID NO: 263579 - RNA, 19 nt, Artificial Sequence
  Description of Artificial Sequence: Synthetic oligonucleotide
  Antisense strand to SEQ ID NO: 263578
ucaaugaugagacaguucc

SEQ ID NO: 263580 - RNA, 19 nt, Artificial Sequence
  Description of Artificial Sequence: Synthetic oligonucleotide
  Sense strand starting at position 3203 SEQ ID NO: 3388
gugauaaugggcgaaacua

SEQ ID NO: 263581 - RNA, 19 nt, Artificial Sequence
  Description of Artificial Sequence: Synthetic oligonucleotide
  Antisense strand to SEQ ID NO: 263580
uaguuucgcccauuaucac

SEQ ID NO: 263582 - RNA, 19 nt, Artificial Sequence
  Description of Artificial Sequence: Synthetic oligonucleotide
  Sense strand starting at position 3371 SEQ ID NO: 3388
cccauuagagaguggauau

SEQ ID NO: 263583 - RNA, 19 nt, Artificial Sequence
  Description of Artificial Sequence: Synthetic oligonucleotide
  Antisense strand to SEQ ID NO: 263582
auauccacucucuaauggg

SEQ ID NO: 263584 - RNA, 19 nt, Artificial Sequence
  Description of Artificial Sequence: Synthetic oligonucleotide
  Sense strand starting at position 3372 SEQ ID NO: 3388
ccauuagagaguggauauu

SEQ ID NO: 263585 - RNA, 19 nt, Artificial Sequence
  Description of Artificial Sequence: Synthetic oligonucleotide
  Antisense strand to SEQ ID NO: 263584
aauauccacucucuaaugg

SEQ ID NO: 263586 - RNA, 19 nt, Artificial Sequence
  Description of Artificial Sequence: Synthetic oligonucleotide
  Sense strand starting at position 3404 SEQ ID NO: 3388
uugaauauggucuggacuu

SEQ ID NO: 263587 - RNA, 19 nt, Artificial Sequence
  Description of Artificial Sequence: Synthetic oligonucleotide
  Antisense strand to SEQ ID NO: 263586
aaguccagaccauauucaa

SEQ ID NO: 263588 - RNA, 19 nt, Artificial Sequence
  Description of Artificial Sequence: Synthetic oligonucleotide
  Sense strand starting at position 3410 SEQ ID NO: 3388
auggucuggacuuagugau

SEQ ID NO: 263589 - RNA, 19 nt, Artificial Sequence
  Description of Artificial Sequence: Synthetic oligonucleotide
  Antisense strand to SEQ ID NO: 263588
aucacuaaguccagaccau

SEQ ID NO: 263590 - RNA, 19 nt, Artificial Sequence
  Description of Artificial Sequence: Synthetic oligonucleotide
  Sense strand starting at position 3755 SEQ ID NO: 3388
ccggaaacguaagugauaa

SEQ ID NO: 263591 - RNA, 19 nt, Artificial Sequence
  Description of Artificial Sequence: Synthetic oligonucleotide
  Antisense strand to SEQ ID NO: 263590
uuaucacuuacguuuccgg

SEQ ID NO: 263592 - RNA, 19 nt, Artificial Sequence
  Description of Artificial Sequence: Synthetic oligonucleotide
  Sense strand starting at position 122 SEQ ID NO: 3389
cuuagugggcaggagauau

SEQ ID NO: 263593 - RNA, 19 nt, Artificial Sequence
  Description of Artificial Sequence: Synthetic oligonucleotide
  Antisense strand to SEQ ID NO: 263592
auaucuccugcccacuaag

SEQ ID NO: 263594 - RNA, 19 nt, Artificial Sequence
  Description of Artificial Sequence: Synthetic oligonucleotide
  Sense strand starting at position 399 SEQ ID NO: 3389
ccaugaaugccuggaaaug

SEQ ID NO: 263595 - RNA, 19 nt, Artificial Sequence
  Description of Artificial Sequence: Synthetic oligonucleotide
  Antisense strand to SEQ ID NO: 263594
cauuuccaggcauucaugg

SEQ ID NO: 263596 - RNA, 19 nt, Artificial Sequence
  Description of Artificial Sequence: Synthetic oligonucleotide
  Sense strand starting at position 400 SEQ ID NO: 3389
caugaaugccuggaaaugu

SEQ ID NO: 263597 - RNA, 19 nt, Artificial Sequence
  Description of Artificial Sequence: Synthetic oligonucleotide
  Antisense strand to SEQ ID NO: 263596
acauuuccaggcauucaug

SEQ ID NO: 263598 - RNA, 19 nt, Artificial Sequence
  Description of Artificial Sequence: Synthetic oligonucleotide
  Sense strand starting at position 1013 SEQ ID NO: 3389
gcaaucuaacauugggaac

SEQ ID NO: 263599 - RNA, 19 nt, Artificial Sequence
  Description of Artificial Sequence: Synthetic oligonucleotide
  Antisense strand to SEQ ID NO: 263598
guucccaauguuagauugc

SEQ ID NO: 263600 - RNA, 19 nt, Artificial Sequence
  Description of Artificial Sequence: Synthetic oligonucleotide
  Sense strand starting at position 1121 SEQ ID NO: 3389
ucacauggcccuugaacaa

SEQ ID NO: 263601 - RNA, 19 nt, Artificial Sequence
  Description of Artificial Sequence: Synthetic oligonucleotide
  Antisense strand to SEQ ID NO: 263600
uuguucaagggccauguga

SEQ ID NO: 263602 - RNA, 19 nt, Artificial Sequence
  Description of Artificial Sequence: Synthetic oligonucleotide
  Sense strand starting at position 1231 SEQ ID NO: 3389
cguagcucccgucucuaau

SEQ ID NO: 263603 - RNA, 19 nt, Artificial Sequence
  Description of Artificial Sequence: Synthetic oligonucleotide
  Antisense strand to SEQ ID NO: 263602
auuagagacgggagcuacg

SEQ ID NO: 263604 - RNA, 19 nt, Artificial Sequence
  Description of Artificial Sequence: Synthetic oligonucleotide
  Sense strand starting at position 1540 SEQ ID NO: 3389
agcugugggccagaggaau

SEQ ID NO: 263605 - RNA, 19 nt, Artificial Sequence
  Description of Artificial Sequence: Synthetic oligonucleotide
  Antisense strand to SEQ ID NO: 263604
auuccucuggcccacagcu

SEQ ID NO: 263606 - RNA, 19 nt, Artificial Sequence
  Description of Artificial Sequence: Synthetic oligonucleotide
  Sense strand starting at position 1635 SEQ ID NO: 3389
agagcaacuuaguuuacaa

SEQ ID NO: 263607 - RNA, 19 nt, Artificial Sequence
  Description of Artificial Sequence: Synthetic oligonucleotide
  Antisense strand to SEQ ID NO: 263606
uuguaaacuaaguugcucu

SEQ ID NO: 263608 - RNA, 19 nt, Artificial Sequence
  Description of Artificial Sequence: Synthetic oligonucleotide
  Sense strand starting at position 2576 SEQ ID NO: 3389
uuuggaugccgagaauauc

SEQ ID NO: 263609 - RNA, 19 nt, Artificial Sequence
  Description of Artificial Sequence: Synthetic oligonucleotide
  Antisense strand to SEQ ID NO: 263608
gauauucucggcauccaaa

SEQ ID NO: 263610 - RNA, 19 nt, Artificial Sequence
  Description of Artificial Sequence: Synthetic oligonucleotide
  Sense strand starting at position 2625 SEQ ID NO: 3389
aaauuauacugaguggugu

SEQ ID NO: 263611 - RNA, 19 nt, Artificial Sequence
  Description of Artificial Sequence: Synthetic oligonucleotide
  Antisense strand to SEQ ID NO: 263610
acaccacucaguauaauuu

SEQ ID NO: 263612 - RNA, 19 nt, Artificial Sequence
  Description of Artificial Sequence: Synthetic oligonucleotide
  Sense strand starting at position 2638 SEQ ID NO: 3389
ugguguggugugucuucau

SEQ ID NO: 263613 - RNA, 19 nt, Artificial Sequence
  Description of Artificial Sequence: Synthetic oligonucleotide
  Antisense strand to SEQ ID NO: 263612
augaagacacaccacacca

SEQ ID NO: 263614 - RNA, 19 nt, Artificial Sequence
  Description of Artificial Sequence: Synthetic oligonucleotide
  Sense strand starting at position 2641 SEQ ID NO: 3389
uguggugugucuucauuua

SEQ ID NO: 263615 - RNA, 19 nt, Artificial Sequence
  Description of Artificial Sequence: Synthetic oligonucleotide
  Antisense strand to SEQ ID NO: 263614
uaaaugaagacacaccaca

SEQ ID NO: 263616 - RNA, 19 nt, Artificial Sequence
  Description of Artificial Sequence: Synthetic oligonucleotide
  Sense strand starting at position 2691 SEQ ID NO: 3389
ucucacauugugggaaaua

SEQ ID NO: 263617 - RNA, 19 nt, Artificial Sequence
  Description of Artificial Sequence: Synthetic oligonucleotide
  Antisense strand to SEQ ID NO: 263616
uauuucccacaaugugaga

SEQ ID NO: 263618 - RNA, 19 nt, Artificial Sequence
  Description of Artificial Sequence: Synthetic oligonucleotide
  Sense strand starting at position 2797 SEQ ID NO: 3389
uuaacagguccugaguaau

SEQ ID NO: 263619 - RNA, 19 nt, Artificial Sequence
  Description of Artificial Sequence: Synthetic oligonucleotide
  Antisense strand to SEQ ID NO: 263618
auuacucaggaccuguuaa

SEQ ID NO: 263620 - RNA, 19 nt, Artificial Sequence
  Description of Artificial Sequence: Synthetic oligonucleotide
  Sense strand starting at position 2827 SEQ ID NO: 3389
ggguauauuauacaggcau

SEQ ID NO: 263621 - RNA, 19 nt, Artificial Sequence
  Description of Artificial Sequence: Synthetic oligonucleotide
  Antisense strand to SEQ ID NO: 263620
augccuguauaauauaccc

SEQ ID NO: 263622 - RNA, 19 nt, Artificial Sequence
  Description of Artificial Sequence: Synthetic oligonucleotide
  Sense strand starting at position 2907 SEQ ID NO: 3389
ccuauugccucauuggaga

SEQ ID NO: 263623 - RNA, 19 nt, Artificial Sequence
  Description of Artificial Sequence: Synthetic oligonucleotide
  Antisense strand to SEQ ID NO: 263622
ucuccaaugaggcaauagg

SEQ ID NO: 263624 - RNA, 19 nt, Artificial Sequence
  Description of Artificial Sequence: Synthetic oligonucleotide
  Sense strand starting at position 2993 SEQ ID NO: 3389
aaacuuacucacuggguga

SEQ ID NO: 263625 - RNA, 19 nt, Artificial Sequence
  Description of Artificial Sequence: Synthetic oligonucleotide
  Antisense strand to SEQ ID NO: 263624
ucacccagugaguaaguuu

SEQ ID NO: 263626 - RNA, 19 nt, Artificial Sequence
  Description of Artificial Sequence: Synthetic oligonucleotide
  Sense strand starting at position 2995 SEQ ID NO: 3389
acuuacucacugggugaga

SEQ ID NO: 263627 - RNA, 19 nt, Artificial Sequence
  Description of Artificial Sequence: Synthetic oligonucleotide
  Antisense strand to SEQ ID NO: 263626
ucucacccagugaguaagu

SEQ ID NO: 263628 - RNA, 19 nt, Artificial Sequence
  Description of Artificial Sequence: Synthetic oligonucleotide
  Sense strand starting at position 2996 SEQ ID NO: 3389
cuuacucacugggugagau

SEQ ID NO: 263629 - RNA, 19 nt, Artificial Sequence
  Description of Artificial Sequence: Synthetic oligonucleotide
  Antisense strand to SEQ ID NO: 263628
aucucacccagugaguaag

SEQ ID NO: 263630 - RNA, 19 nt, Artificial Sequence
  Description of Artificial Sequence: Synthetic oligonucleotide
  Sense strand starting at position 3016 SEQ ID NO: 3389
aggauuacuuggcugaggu

SEQ ID NO: 263631 - RNA, 19 nt, Artificial Sequence
  Description of Artificial Sequence: Synthetic oligonucleotide
  Antisense strand to SEQ ID NO: 263630
accucagccaaguaauccu

SEQ ID NO: 263632 - RNA, 19 nt, Artificial Sequence
  Description of Artificial Sequence: Synthetic oligonucleotide
  Sense strand starting at position 3055 SEQ ID NO: 3389
aguaauuauuacucauggu

SEQ ID NO: 263633 - RNA, 19 nt, Artificial Sequence
  Description of Artificial Sequence: Synthetic oligonucleotide
  Antisense strand to SEQ ID NO: 263632
accaugaguaauaauuacu

SEQ ID NO: 263634 - RNA, 19 nt, Artificial Sequence
  Description of Artificial Sequence: Synthetic oligonucleotide
  Sense strand starting at position 3059 SEQ ID NO: 3389
auuauuacucaugguucua

SEQ ID NO: 263635 - RNA, 19 nt, Artificial Sequence
  Description of Artificial Sequence: Synthetic oligonucleotide
  Antisense strand to SEQ ID NO: 263634
uagaaccaugaguaauaau

SEQ ID NO: 263636 - RNA, 19 nt, Artificial Sequence
  Description of Artificial Sequence: Synthetic oligonucleotide
  Sense strand starting at position 3107 SEQ ID NO: 3389
ccauaaaugggccagguuu

SEQ ID NO: 263637 - RNA, 19 nt, Artificial Sequence
  Description of Artificial Sequence: Synthetic oligonucleotide
  Antisense strand to SEQ ID NO: 263636
aaaccuggcccauuuaugg

SEQ ID NO: 263638 - RNA, 19 nt, Artificial Sequence
  Description of Artificial Sequence: Synthetic oligonucleotide
  Sense strand starting at position 3109 SEQ ID NO: 3389
auaaaugggccagguuuaa

SEQ ID NO: 263639 - RNA, 19 nt, Artificial Sequence
  Description of Artificial Sequence: Synthetic oligonucleotide
  Antisense strand to SEQ ID NO: 263638
uuaaaccuggcccauuuau

SEQ ID NO: 263640 - RNA, 19 nt, Artificial Sequence
  Description of Artificial Sequence: Synthetic oligonucleotide
  Sense strand starting at position 3118 SEQ ID NO: 3389
ccagguuuaaauggacuga

SEQ ID NO: 263641 - RNA, 19 nt, Artificial Sequence
  Description of Artificial Sequence: Synthetic oligonucleotide
  Antisense strand to SEQ ID NO: 263640
ucaguccauuuaaaccugg

SEQ ID NO: 263642 - RNA, 19 nt, Artificial Sequence
  Description of Artificial Sequence: Synthetic oligonucleotide
  Sense strand starting at position 3132 SEQ ID NO: 3389
acugaccuguaucuggaaa

SEQ ID NO: 263643 - RNA, 19 nt, Artificial Sequence
  Description of Artificial Sequence: Synthetic oligonucleotide
  Antisense strand to SEQ ID NO: 263642
uuuccagauacaggucagu

SEQ ID NO: 263644 - RNA, 19 nt, Artificial Sequence
  Description of Artificial Sequence: Synthetic oligonucleotide
  Sense strand starting at position 3145 SEQ ID NO: 3389
uggaaacugucacuaaagu

SEQ ID NO: 263645 - RNA, 19 nt, Artificial Sequence
  Description of Artificial Sequence: Synthetic oligonucleotide
  Antisense strand to SEQ ID NO: 263644
acuuuagugacaguuucca

SEQ ID NO: 263646 - RNA, 19 nt, Artificial Sequence
  Description of Artificial Sequence: Synthetic oligonucleotide
  Sense strand starting at position 3225 SEQ ID NO: 3389
ggcgcugggauuuguuaaa

SEQ ID NO: 263647 - RNA, 19 nt, Artificial Sequence
  Description of Artificial Sequence: Synthetic oligonucleotide
  Antisense strand to SEQ ID NO: 263646
uuuaacaaaucccagcgcc

SEQ ID NO: 263648 - RNA, 19 nt, Artificial Sequence
  Description of Artificial Sequence: Synthetic oligonucleotide
  Sense strand starting at position 3238 SEQ ID NO: 3389
guuaaaugccacuaguaga

SEQ ID NO: 263649 - RNA, 19 nt, Artificial Sequence
  Description of Artificial Sequence: Synthetic oligonucleotide
  Antisense strand to SEQ ID NO: 263648
ucuacuaguggcauuuaac

SEQ ID NO: 263650 - RNA, 19 nt, Artificial Sequence
  Description of Artificial Sequence: Synthetic oligonucleotide
  Sense strand starting at position 3248 SEQ ID NO: 3389
acuaguagaguuuggaaag

SEQ ID NO: 263651 - RNA, 19 nt, Artificial Sequence
  Description of Artificial Sequence: Synthetic oligonucleotide
  Antisense strand to SEQ ID NO: 263650
cuuuccaaacucuacuagu

SEQ ID NO: 263652 - RNA, 19 nt, Artificial Sequence
  Description of Artificial Sequence: Synthetic oligonucleotide
  Sense strand starting at position 3251 SEQ ID NO: 3389
aguagaguuuggaaaggug

SEQ ID NO: 263653 - RNA, 19 nt, Artificial Sequence
  Description of Artificial Sequence: Synthetic oligonucleotide
  Antisense strand to SEQ ID NO: 263652
caccuuuccaaacucuacu

SEQ ID NO: 263654 - RNA, 19 nt, Artificial Sequence
  Description of Artificial Sequence: Synthetic oligonucleotide
  Sense strand starting at position 3279 SEQ ID NO: 3389
cagacuauaucugcuggga

SEQ ID NO: 263655 - RNA, 19 nt, Artificial Sequence
  Description of Artificial Sequence: Synthetic oligonucleotide
  Antisense strand to SEQ ID NO: 263654
ucccagcagauauagucug

SEQ ID NO: 263656 - RNA, 19 nt, Artificial Sequence
  Description of Artificial Sequence: Synthetic oligonucleotide
  Sense strand starting at position 3282 SEQ ID NO: 3389
acuauaucugcugggaacu

SEQ ID NO: 263657 - RNA, 19 nt, Artificial Sequence
  Description of Artificial Sequence: Synthetic oligonucleotide
  Antisense strand to SEQ ID NO: 263656
aguucccagcagauauagu

SEQ ID NO: 263658 - RNA, 19 nt, Artificial Sequence
  Description of Artificial Sequence: Synthetic oligonucleotide
  Sense strand starting at position 3295 SEQ ID NO: 3389
ggaacugucucaucauuga

SEQ ID NO: 263659 - RNA, 19 nt, Artificial Sequence
  Description of Artificial Sequence: Synthetic oligonucleotide
  Antisense strand to SEQ ID NO: 263658
ucaaugaugagacaguucc

SEQ ID NO: 263660 - RNA, 19 nt, Artificial Sequence
  Description of Artificial Sequence: Synthetic oligonucleotide
  Sense strand starting at position 3350 SEQ ID NO: 3389
gugauaaugggcgaaacua

SEQ ID NO: 263661 - RNA, 19 nt, Artificial Sequence
  Description of Artificial Sequence: Synthetic oligonucleotide
  Antisense strand to SEQ ID NO: 263660
uaguuucgcccauuaucac

SEQ ID NO: 263662 - RNA, 19 nt, Artificial Sequence
  Description of Artificial Sequence: Synthetic oligonucleotide
  Sense strand starting at position 3518 SEQ ID NO: 3389
cccauuagagaguggauau

SEQ ID NO: 263663 - RNA, 19 nt, Artificial Sequence
  Description of Artificial Sequence: Synthetic oligonucleotide
  Antisense strand to SEQ ID NO: 263662
auauccacucucuaauggg

SEQ ID NO: 263664 - RNA, 19 nt, Artificial Sequence
  Description of Artificial Sequence: Synthetic oligonucleotide
  Sense strand starting at position 3519 SEQ ID NO: 3389
ccauuagagaguggauauu

SEQ ID NO: 263665 - RNA, 19 nt, Artificial Sequence
  Description of Artificial Sequence: Synthetic oligonucleotide
  Antisense strand to SEQ ID NO: 263664
aauauccacucucuaaugg

SEQ ID NO: 263666 - RNA, 19 nt, Artificial Sequence
  Description of Artificial Sequence: Synthetic oligonucleotide
  Sense strand starting at position 3551 SEQ ID NO: 3389
uugaauauggucuggacuu

SEQ ID NO: 263667 - RNA, 19 nt, Artificial Sequence
  Description of Artificial Sequence: Synthetic oligonucleotide
  Antisense strand to SEQ ID NO: 263666
aaguccagaccauauucaa

SEQ ID NO: 263668 - RNA, 19 nt, Artificial Sequence
  Description of Artificial Sequence: Synthetic oligonucleotide
  Sense strand starting at position 3557 SEQ ID NO: 3389
auggucuggacuuagugau

SEQ ID NO: 263669 - RNA, 19 nt, Artificial Sequence
  Description of Artificial Sequence: Synthetic oligonucleotide
  Antisense strand to SEQ ID NO: 263668
aucacuaaguccagaccau

SEQ ID NO: 263670 - RNA, 19 nt, Artificial Sequence
  Description of Artificial Sequence: Synthetic oligonucleotide
  Sense strand starting at position 3902 SEQ ID NO: 3389
ccggaaacguaagugauaa

SEQ ID NO: 263671 - RNA, 19 nt, Artificial Sequence
  Description of Artificial Sequence: Synthetic oligonucleotide
  Antisense strand to SEQ ID NO: 263670
uuaucacuuacguuuccgg

SEQ ID NO: 263672 - RNA, 19 nt, Artificial Sequence
  Description of Artificial Sequence: Synthetic oligonucleotide
  Sense strand starting at position 223 SEQ ID NO: 3390
ugaacugugaaaugucaga

SEQ ID NO: 263673 - RNA, 19 nt, Artificial Sequence
  Description of Artificial Sequence: Synthetic oligonucleotide
  Antisense strand to SEQ ID NO: 263672
ucugacauuucacaguuca

SEQ ID NO: 263674 - RNA, 19 nt, Artificial Sequence
  Description of Artificial Sequence: Synthetic oligonucleotide
  Sense strand starting at position 302 SEQ ID NO: 3390
ccauacaagcgugaguaaa

SEQ ID NO: 263675 - RNA, 19 nt, Artificial Sequence
  Description of Artificial Sequence: Synthetic oligonucleotide
  Antisense strand to SEQ ID NO: 263674
uuuacucacgcuuguaugg

SEQ ID NO: 263676 - RNA, 19 nt, Artificial Sequence
  Description of Artificial Sequence: Synthetic oligonucleotide
  Sense strand starting at position 310 SEQ ID NO: 3390
gcgugaguaaauuagagaa

SEQ ID NO: 263677 - RNA, 19 nt, Artificial Sequence
  Description of Artificial Sequence: Synthetic oligonucleotide
  Antisense strand to SEQ ID NO: 263676
uucucuaauuuacucacgc

SEQ ID NO: 263678 - RNA, 19 nt, Artificial Sequence
  Description of Artificial Sequence: Synthetic oligonucleotide
  Sense strand starting at position 347 SEQ ID NO: 3390
uaagcaagugcauaauagu

SEQ ID NO: 263679 - RNA, 19 nt, Artificial Sequence
  Description of Artificial Sequence: Synthetic oligonucleotide
  Antisense strand to SEQ ID NO: 263678
acuauuaugcacuugcuua

SEQ ID NO: 263680 - RNA, 19 nt, Artificial Sequence
  Description of Artificial Sequence: Synthetic oligonucleotide
  Sense strand starting at position 749 SEQ ID NO: 3390
augguaaagacguaagagu

SEQ ID NO: 263681 - RNA, 19 nt, Artificial Sequence
  Description of Artificial Sequence: Synthetic oligonucleotide
  Antisense strand to SEQ ID NO: 263680
acucuuacgucuuuaccau

SEQ ID NO: 263682 - RNA, 19 nt, Artificial Sequence
  Description of Artificial Sequence: Synthetic oligonucleotide
  Sense strand starting at position 822 SEQ ID NO: 3390
ucaaguauagcucaaaugu

SEQ ID NO: 263683 - RNA, 19 nt, Artificial Sequence
  Description of Artificial Sequence: Synthetic oligonucleotide
  Antisense strand to SEQ ID NO: 263682
acauuugagcuauacuuga

SEQ ID NO: 263684 - RNA, 19 nt, Artificial Sequence
  Description of Artificial Sequence: Synthetic oligonucleotide
  Sense strand starting at position 1105 SEQ ID NO: 3390
auccaaugaucucuagguu

SEQ ID NO: 263685 - RNA, 19 nt, Artificial Sequence
  Description of Artificial Sequence: Synthetic oligonucleotide
  Antisense strand to SEQ ID NO: 263684
aaccuagagaucauuggau

SEQ ID NO: 263686 - RNA, 19 nt, Artificial Sequence
  Description of Artificial Sequence: Synthetic oligonucleotide
  Sense strand starting at position 1108 SEQ ID NO: 3390
caaugaucucuagguugau

SEQ ID NO: 263687 - RNA, 19 nt, Artificial Sequence
  Description of Artificial Sequence: Synthetic oligonucleotide
  Antisense strand to SEQ ID NO: 263686
aucaaccuagagaucauug

SEQ ID NO: 263688 - RNA, 19 nt, Artificial Sequence
  Description of Artificial Sequence: Synthetic oligonucleotide
  Sense strand starting at position 1109 SEQ ID NO: 3390
aaugaucucuagguugauc

SEQ ID NO: 263689 - RNA, 19 nt, Artificial Sequence
  Description of Artificial Sequence: Synthetic oligonucleotide
  Antisense strand to SEQ ID NO: 263688
gaucaaccuagagaucauu

SEQ ID NO: 263690 - RNA, 19 nt, Artificial Sequence
  Description of Artificial Sequence: Synthetic oligonucleotide
  Sense strand starting at position 1114 SEQ ID NO: 3390
ucucuagguugaucucuaa

SEQ ID NO: 263691 - RNA, 19 nt, Artificial Sequence
  Description of Artificial Sequence: Synthetic oligonucleotide
  Antisense strand to SEQ ID NO: 263690
uuagagaucaaccuagaga

SEQ ID NO: 263692 - RNA, 19 nt, Artificial Sequence
  Description of Artificial Sequence: Synthetic oligonucleotide
  Sense strand starting at position 1118 SEQ ID NO: 3390
uagguugaucucuaaguuc

SEQ ID NO: 263693 - RNA, 19 nt, Artificial Sequence
  Description of Artificial Sequence: Synthetic oligonucleotide
  Antisense strand to SEQ ID NO: 263692
gaacuuagagaucaaccua

SEQ ID NO: 263694 - RNA, 19 nt, Artificial Sequence
  Description of Artificial Sequence: Synthetic oligonucleotide
  Sense strand starting at position 1271 SEQ ID NO: 3390
uauugcagucacuaaggaa

SEQ ID NO: 263695 - RNA, 19 nt, Artificial Sequence
  Description of Artificial Sequence: Synthetic oligonucleotide
  Antisense strand to SEQ ID NO: 263694
uuccuuagugacugcaaua

SEQ ID NO: 263696 - RNA, 19 nt, Artificial Sequence
  Description of Artificial Sequence: Synthetic oligonucleotide
  Sense strand starting at position 1389 SEQ ID NO: 3390
gaaaccucucuugggugaa

SEQ ID NO: 263697 - RNA, 19 nt, Artificial Sequence
  Description of Artificial Sequence: Synthetic oligonucleotide
  Antisense strand to SEQ ID NO: 263696
uucacccaagagagguuuc

SEQ ID NO: 263698 - RNA, 19 nt, Artificial Sequence
  Description of Artificial Sequence: Synthetic oligonucleotide
  Sense strand starting at position 1456 SEQ ID NO: 3390
uggccucaagcugagaaau

SEQ ID NO: 263699 - RNA, 19 nt, Artificial Sequence
  Description of Artificial Sequence: Synthetic oligonucleotide
  Antisense strand to SEQ ID NO: 263698
auuucucagcuugaggcca

SEQ ID NO: 263700 - RNA, 19 nt, Artificial Sequence
  Description of Artificial Sequence: Synthetic oligonucleotide
  Sense strand starting at position 1468 SEQ ID NO: 3390
gagaaauucugugcagaaa

SEQ ID NO: 263701 - RNA, 19 nt, Artificial Sequence
  Description of Artificial Sequence: Synthetic oligonucleotide
  Antisense strand to SEQ ID NO: 263700
uuucugcacagaauuucuc

SEQ ID NO: 263702 - RNA, 19 nt, Artificial Sequence
  Description of Artificial Sequence: Synthetic oligonucleotide
  Sense strand starting at position 1480 SEQ ID NO: 3390
gcagaaauaaagugguuua

SEQ ID NO: 263703 - RNA, 19 nt, Artificial Sequence
  Description of Artificial Sequence: Synthetic oligonucleotide
  Antisense strand to SEQ ID NO: 263702
uaaaccacuuuauuucugc

SEQ ID NO: 263704 - RNA, 19 nt, Artificial Sequence
  Description of Artificial Sequence: Synthetic oligonucleotide
  Sense strand starting at position 1490 SEQ ID NO: 3390
agugguuuauaaucccaca

SEQ ID NO: 263705 - RNA, 19 nt, Artificial Sequence
  Description of Artificial Sequence: Synthetic oligonucleotide
  Antisense strand to SEQ ID NO: 263704
ugugggauuauaaaccacu

SEQ ID NO: 263706 - RNA, 19 nt, Artificial Sequence
  Description of Artificial Sequence: Synthetic oligonucleotide
  Sense strand starting at position 1621 SEQ ID NO: 3390
uacucaagaggguguuuau

SEQ ID NO: 263707 - RNA, 19 nt, Artificial Sequence
  Description of Artificial Sequence: Synthetic oligonucleotide
  Antisense strand to SEQ ID NO: 263706
auaaacacccucuugagua

SEQ ID NO: 263708 - RNA, 19 nt, Artificial Sequence
  Description of Artificial Sequence: Synthetic oligonucleotide
  Sense strand starting at position 1700 SEQ ID NO: 3390
ccaggaaucugggugaugu

SEQ ID NO: 263709 - RNA, 19 nt, Artificial Sequence
  Description of Artificial Sequence: Synthetic oligonucleotide
  Antisense strand to SEQ ID NO: 263708
acaucacccagauuccugg

SEQ ID NO: 263710 - RNA, 19 nt, Artificial Sequence
  Description of Artificial Sequence: Synthetic oligonucleotide
  Sense strand starting at position 1701 SEQ ID NO: 3390
caggaaucugggugauguc

SEQ ID NO: 263711 - RNA, 19 nt, Artificial Sequence
  Description of Artificial Sequence: Synthetic oligonucleotide
  Antisense strand to SEQ ID NO: 263710
gacaucacccagauuccug

SEQ ID NO: 263712 - RNA, 19 nt, Artificial Sequence
  Description of Artificial Sequence: Synthetic oligonucleotide
  Sense strand starting at position 2010 SEQ ID NO: 3390
agguguuagccucagauga

SEQ ID NO: 263713 - RNA, 19 nt, Artificial Sequence
  Description of Artificial Sequence: Synthetic oligonucleotide
  Antisense strand to SEQ ID NO: 263712
ucaucugaggcuaacaccu

SEQ ID NO: 263714 - RNA, 19 nt, Artificial Sequence
  Description of Artificial Sequence: Synthetic oligonucleotide
  Sense strand starting at position 2055 SEQ ID NO: 3390
accaaauccuuggugacuu

SEQ ID NO: 263715 - RNA, 19 nt, Artificial Sequence
  Description of Artificial Sequence: Synthetic oligonucleotide
  Antisense strand to SEQ ID NO: 263714
aagucaccaaggauuuggu

SEQ ID NO: 263716 - RNA, 19 nt, Artificial Sequence
  Description of Artificial Sequence: Synthetic oligonucleotide
  Sense strand starting at position 2111 SEQ ID NO: 3390
gguagugagccugaucuau

SEQ ID NO: 263717 - RNA, 19 nt, Artificial Sequence
  Description of Artificial Sequence: Synthetic oligonucleotide
  Antisense strand to SEQ ID NO: 263716
auagaucaggcucacuacc

SEQ ID NO: 263718 - RNA, 19 nt, Artificial Sequence
  Description of Artificial Sequence: Synthetic oligonucleotide
  Sense strand starting at position 2184 SEQ ID NO: 3390
guuugcaugucauuuaaca

SEQ ID NO: 263719 - RNA, 19 nt, Artificial Sequence
  Description of Artificial Sequence: Synthetic oligonucleotide
  Antisense strand to SEQ ID NO: 263718
uguuaaaugacaugcaaac

SEQ ID NO: 263720 - RNA, 19 nt, Artificial Sequence
  Description of Artificial Sequence: Synthetic oligonucleotide
  Sense strand starting at position 2376 SEQ ID NO: 3390
augaguuucugaucugaau

SEQ ID NO: 263721 - RNA, 19 nt, Artificial Sequence
  Description of Artificial Sequence: Synthetic oligonucleotide
  Antisense strand to SEQ ID NO: 263720
auucagaucagaaacucau

SEQ ID NO: 263722 - RNA, 19 nt, Artificial Sequence
  Description of Artificial Sequence: Synthetic oligonucleotide
  Sense strand starting at position 2881 SEQ ID NO: 3390
cacauaggcccaugugaaa

SEQ ID NO: 263723 - RNA, 19 nt, Artificial Sequence
  Description of Artificial Sequence: Synthetic oligonucleotide
  Antisense strand to SEQ ID NO: 263722
uuucacaugggccuaugug

SEQ ID NO: 263724 - RNA, 19 nt, Artificial Sequence
  Description of Artificial Sequence: Synthetic oligonucleotide
  Sense strand starting at position 2888 SEQ ID NO: 3390
gcccaugugaaauaguuga

SEQ ID NO: 263725 - RNA, 19 nt, Artificial Sequence
  Description of Artificial Sequence: Synthetic oligonucleotide
  Antisense strand to SEQ ID NO: 263724
ucaacuauuucacaugggc

SEQ ID NO: 263726 - RNA, 19 nt, Artificial Sequence
  Description of Artificial Sequence: Synthetic oligonucleotide
  Sense strand starting at position 2892 SEQ ID NO: 3390
augugaaauaguugaagac

SEQ ID NO: 263727 - RNA, 19 nt, Artificial Sequence
  Description of Artificial Sequence: Synthetic oligonucleotide
  Antisense strand to SEQ ID NO: 263726
gucuucaacuauuucacau

SEQ ID NO: 263728 - RNA, 19 nt, Artificial Sequence
  Description of Artificial Sequence: Synthetic oligonucleotide
  Sense strand starting at position 2912 SEQ ID NO: 3390
gugcaauaacacuggauaa

SEQ ID NO: 263729 - RNA, 19 nt, Artificial Sequence
  Description of Artificial Sequence: Synthetic oligonucleotide
  Antisense strand to SEQ ID NO: 263728
uuauccaguguuauugcac

SEQ ID NO: 263730 - RNA, 19 nt, Artificial Sequence
  Description of Artificial Sequence: Synthetic oligonucleotide
  Sense strand starting at position 2923 SEQ ID NO: 3390
cuggauaagcuauauccau

SEQ ID NO: 263731 - RNA, 19 nt, Artificial Sequence
  Description of Artificial Sequence: Synthetic oligonucleotide
  Antisense strand to SEQ ID NO: 263730
auggauauagcuuauccag

SEQ ID NO: 263732 - RNA, 19 nt, Artificial Sequence
  Description of Artificial Sequence: Synthetic oligonucleotide
  Sense strand starting at position 2989 SEQ ID NO: 3390
gaaugcuuccuggagcaga

SEQ ID NO: 263733 - RNA, 19 nt, Artificial Sequence
  Description of Artificial Sequence: Synthetic oligonucleotide
  Antisense strand to SEQ ID NO: 263732
ucugcuccaggaagcauuc

SEQ ID NO: 263734 - RNA, 19 nt, Artificial Sequence
  Description of Artificial Sequence: Synthetic oligonucleotide
  Sense strand starting at position 3005 SEQ ID NO: 3390
agauaaaucuagguacagu

SEQ ID NO: 263735 - RNA, 19 nt, Artificial Sequence
  Description of Artificial Sequence: Synthetic oligonucleotide
  Antisense strand to SEQ ID NO: 263734
acuguaccuagauuuaucu

SEQ ID NO: 263736 - RNA, 19 nt, Artificial Sequence
  Description of Artificial Sequence: Synthetic oligonucleotide
  Sense strand starting at position 3161 SEQ ID NO: 3390
gccuuuguguuuccauuua

SEQ ID NO: 263737 - RNA, 19 nt, Artificial Sequence
  Description of Artificial Sequence: Synthetic oligonucleotide
  Antisense strand to SEQ ID NO: 263736
uaaauggaaacacaaaggc

SEQ ID NO: 263738 - RNA, 19 nt, Artificial Sequence
  Description of Artificial Sequence: Synthetic oligonucleotide
  Sense strand starting at position 3318 SEQ ID NO: 3390
cugcuugcagaauaaauua

SEQ ID NO: 263739 - RNA, 19 nt, Artificial Sequence
  Description of Artificial Sequence: Synthetic oligonucleotide
  Antisense strand to SEQ ID NO: 263738
uaauuuauucugcaagcag

SEQ ID NO: 263740 - RNA, 19 nt, Artificial Sequence
  Description of Artificial Sequence: Synthetic oligonucleotide
  Sense strand starting at position 3439 SEQ ID NO: 3390
guauacaagagucaguuga

SEQ ID NO: 263741 - RNA, 19 nt, Artificial Sequence
  Description of Artificial Sequence: Synthetic oligonucleotide
  Antisense strand to SEQ ID NO: 263740
ucaacugacucuuguauac

SEQ ID NO: 263742 - RNA, 19 nt, Artificial Sequence
  Description of Artificial Sequence: Synthetic oligonucleotide
  Sense strand starting at position 3441 SEQ ID NO: 3390
auacaagagucaguugaag

SEQ ID NO: 263743 - RNA, 19 nt, Artificial Sequence
  Description of Artificial Sequence: Synthetic oligonucleotide
  Antisense strand to SEQ ID NO: 263742
cuucaacugacucuuguau

SEQ ID NO: 263744 - RNA, 19 nt, Artificial Sequence
  Description of Artificial Sequence: Synthetic oligonucleotide
  Sense strand starting at position 3538 SEQ ID NO: 3390
agaguaacauaggaaauuu

SEQ ID NO: 263745 - RNA, 19 nt, Artificial Sequence
  Description of Artificial Sequence: Synthetic oligonucleotide
  Antisense strand to SEQ ID NO: 263744
aaauuuccuauguuacucu

SEQ ID NO: 263746 - RNA, 19 nt, Artificial Sequence
  Description of Artificial Sequence: Synthetic oligonucleotide
  Sense strand starting at position 3562 SEQ ID NO: 3390
gagaaagagugucuuggca

SEQ ID NO: 263747 - RNA, 19 nt, Artificial Sequence
  Description of Artificial Sequence: Synthetic oligonucleotide
  Antisense strand to SEQ ID NO: 263746
ugccaagacacucuuucuc

SEQ ID NO: 263748 - RNA, 19 nt, Artificial Sequence
  Description of Artificial Sequence: Synthetic oligonucleotide
  Sense strand starting at position 3829 SEQ ID NO: 3390
cccugauaguacuuauuag

SEQ ID NO: 263749 - RNA, 19 nt, Artificial Sequence
  Description of Artificial Sequence: Synthetic oligonucleotide
  Antisense strand to SEQ ID NO: 263748
cuaauaaguacuaucaggg

SEQ ID NO: 263750 - RNA, 19 nt, Artificial Sequence
  Description of Artificial Sequence: Synthetic oligonucleotide
  Sense strand starting at position 3916 SEQ ID NO: 3390
auaaguguuuccucuaaga

SEQ ID NO: 263751 - RNA, 19 nt, Artificial Sequence
  Description of Artificial Sequence: Synthetic oligonucleotide
  Antisense strand to SEQ ID NO: 263750
ucuuagaggaaacacuuau

SEQ ID NO: 263752 - RNA, 19 nt, Artificial Sequence
  Description of Artificial Sequence: Synthetic oligonucleotide
  Sense strand starting at position 38 SEQ ID NO: 3391
uccaguggccuuggucaaa

SEQ ID NO: 263753 - RNA, 19 nt, Artificial Sequence
  Description of Artificial Sequence: Synthetic oligonucleotide
  Antisense strand to SEQ ID NO: 263752
uuugaccaaggccacugga

SEQ ID NO: 263754 - RNA, 19 nt, Artificial Sequence
  Description of Artificial Sequence: Synthetic oligonucleotide
  Sense strand starting at position 147 SEQ ID NO: 3391
cuucuauagagauggaguc

SEQ ID NO: 263755 - RNA, 19 nt, Artificial Sequence
  Description of Artificial Sequence: Synthetic oligonucleotide
  Antisense strand to SEQ ID NO: 263754
gacuccaucucuauagaag

SEQ ID NO: 263756 - RNA, 19 nt, Artificial Sequence
  Description of Artificial Sequence: Synthetic oligonucleotide
  Sense strand starting at position 300 SEQ ID NO: 3391
ggcucuuccucccugaaca

SEQ ID NO: 263757 - RNA, 19 nt, Artificial Sequence
  Description of Artificial Sequence: Synthetic oligonucleotide
  Antisense strand to SEQ ID NO: 263756
uguucagggaggaagagcc

SEQ ID NO: 263758 - RNA, 19 nt, Artificial Sequence
  Description of Artificial Sequence: Synthetic oligonucleotide
  Sense strand starting at position 544 SEQ ID NO: 3391
aguuucagcgggcaugaua

SEQ ID NO: 263759 - RNA, 19 nt, Artificial Sequence
  Description of Artificial Sequence: Synthetic oligonucleotide
  Antisense strand to SEQ ID NO: 263758
uaucaugcccgcugaaacu

SEQ ID NO: 263760 - RNA, 19 nt, Artificial Sequence
  Description of Artificial Sequence: Synthetic oligonucleotide
  Sense strand starting at position 978 SEQ ID NO: 3391
gcugaugagcugagugguu

SEQ ID NO: 263761 - RNA, 19 nt, Artificial Sequence
  Description of Artificial Sequence: Synthetic oligonucleotide
  Antisense strand to SEQ ID NO: 263760
aaccacucagcucaucagc

SEQ ID NO: 263762 - RNA, 19 nt, Artificial Sequence
  Description of Artificial Sequence: Synthetic oligonucleotide
  Sense strand starting at position 983 SEQ ID NO: 3391
ugagcugagugguuccuaa

SEQ ID NO: 263763 - RNA, 19 nt, Artificial Sequence
  Description of Artificial Sequence: Synthetic oligonucleotide
  Antisense strand to SEQ ID NO: 263762
uuaggaaccacucagcuca

SEQ ID NO: 263764 - RNA, 19 nt, Artificial Sequence
  Description of Artificial Sequence: Synthetic oligonucleotide
  Sense strand starting at position 1020 SEQ ID NO: 3391
gugugugaaucucugaacu

SEQ ID NO: 263765 - RNA, 19 nt, Artificial Sequence
  Description of Artificial Sequence: Synthetic oligonucleotide
  Antisense strand to SEQ ID NO: 263764
aguucagagauucacacac

SEQ ID NO: 263766 - RNA, 19 nt, Artificial Sequence
  Description of Artificial Sequence: Synthetic oligonucleotide
  Sense strand starting at position 1119 SEQ ID NO: 3391
aggccucgucauggagaau

SEQ ID NO: 263767 - RNA, 19 nt, Artificial Sequence
  Description of Artificial Sequence: Synthetic oligonucleotide
  Antisense strand to SEQ ID NO: 263766
auucuccaugacgaggccu

SEQ ID NO: 263768 - RNA, 19 nt, Artificial Sequence
  Description of Artificial Sequence: Synthetic oligonucleotide
  Sense strand starting at position 1120 SEQ ID NO: 3391
ggccucgucauggagaauu

SEQ ID NO: 263769 - RNA, 19 nt, Artificial Sequence
  Description of Artificial Sequence: Synthetic oligonucleotide
  Antisense strand to SEQ ID NO: 263768
aauucuccaugacgaggcc

SEQ ID NO: 263770 - RNA, 19 nt, Artificial Sequence
  Description of Artificial Sequence: Synthetic oligonucleotide
  Sense strand starting at position 1195 SEQ ID NO: 3391
ucacaaucucugugucuca

SEQ ID NO: 263771 - RNA, 19 nt, Artificial Sequence
  Description of Artificial Sequence: Synthetic oligonucleotide
  Antisense strand to SEQ ID NO: 263770
ugagacacagagauuguga

SEQ ID NO: 263772 - RNA, 19 nt, Artificial Sequence
  Description of Artificial Sequence: Synthetic oligonucleotide
  Sense strand starting at position 1376 SEQ ID NO: 3391
gccuuccagaggugacuaa

SEQ ID NO: 263773 - RNA, 19 nt, Artificial Sequence
  Description of Artificial Sequence: Synthetic oligonucleotide
  Antisense strand to SEQ ID NO: 263772
uuagucaccucuggaaggc

SEQ ID NO: 263774 - RNA, 19 nt, Artificial Sequence
  Description of Artificial Sequence: Synthetic oligonucleotide
  Sense strand starting at position 1704 SEQ ID NO: 3391
cagggaguuugcccuucua

SEQ ID NO: 263775 - RNA, 19 nt, Artificial Sequence
  Description of Artificial Sequence: Synthetic oligonucleotide
  Antisense strand to SEQ ID NO: 263774
uagaagggcaaacucccug

SEQ ID NO: 263776 - RNA, 19 nt, Artificial Sequence
  Description of Artificial Sequence: Synthetic oligonucleotide
  Sense strand starting at position 1964 SEQ ID NO: 3391
gcccuuaccuugucaggau

SEQ ID NO: 263777 - RNA, 19 nt, Artificial Sequence
  Description of Artificial Sequence: Synthetic oligonucleotide
  Antisense strand to SEQ ID NO: 263776
auccugacaagguaagggc

SEQ ID NO: 263778 - RNA, 19 nt, Artificial Sequence
  Description of Artificial Sequence: Synthetic oligonucleotide
  Sense strand starting at position 2061 SEQ ID NO: 3391
gggugugucagggaguaag

SEQ ID NO: 263779 - RNA, 19 nt, Artificial Sequence
  Description of Artificial Sequence: Synthetic oligonucleotide
  Antisense strand to SEQ ID NO: 263778
cuuacucccugacacaccc

SEQ ID NO: 263780 - RNA, 19 nt, Artificial Sequence
  Description of Artificial Sequence: Synthetic oligonucleotide
  Sense strand starting at position 2132 SEQ ID NO: 3391
gggcccacguaauuuauua

SEQ ID NO: 263781 - RNA, 19 nt, Artificial Sequence
  Description of Artificial Sequence: Synthetic oligonucleotide
  Antisense strand to SEQ ID NO: 263780
uaauaaauuacgugggccc

SEQ ID NO: 263782 - RNA, 19 nt, Artificial Sequence
  Description of Artificial Sequence: Synthetic oligonucleotide
  Sense strand starting at position 2137 SEQ ID NO: 3391
cacguaauuuauuacagga

SEQ ID NO: 263783 - RNA, 19 nt, Artificial Sequence
  Description of Artificial Sequence: Synthetic oligonucleotide
  Antisense strand to SEQ ID NO: 263782
uccuguaauaaauuacgug

SEQ ID NO: 263784 - RNA, 19 nt, Artificial Sequence
  Description of Artificial Sequence: Synthetic oligonucleotide
  Sense strand starting at position 2139 SEQ ID NO: 3391
cguaauuuauuacaggacu

SEQ ID NO: 263785 - RNA, 19 nt, Artificial Sequence
  Description of Artificial Sequence: Synthetic oligonucleotide
  Antisense strand to SEQ ID NO: 263784
aguccuguaauaaauuacg

SEQ ID NO: 263786 - RNA, 19 nt, Artificial Sequence
  Description of Artificial Sequence: Synthetic oligonucleotide
  Sense strand starting at position 2210 SEQ ID NO: 3391
cuggcagagccucaugaua

SEQ ID NO: 263787 - RNA, 19 nt, Artificial Sequence
  Description of Artificial Sequence: Synthetic oligonucleotide
  Antisense strand to SEQ ID NO: 263786
uaucaugaggcucugccag

SEQ ID NO: 263788 - RNA, 19 nt, Artificial Sequence
  Description of Artificial Sequence: Synthetic oligonucleotide
  Sense strand starting at position 2337 SEQ ID NO: 3391
gugacagucagcugaccau

SEQ ID NO: 263789 - RNA, 19 nt, Artificial Sequence
  Description of Artificial Sequence: Synthetic oligonucleotide
  Antisense strand to SEQ ID NO: 263788
auggucagcugacugucac

SEQ ID NO: 263790 - RNA, 19 nt, Artificial Sequence
  Description of Artificial Sequence: Synthetic oligonucleotide
  Sense strand starting at position 2417 SEQ ID NO: 3391
gcucuaauugaggguggua

SEQ ID NO: 263791 - RNA, 19 nt, Artificial Sequence
  Description of Artificial Sequence: Synthetic oligonucleotide
  Antisense strand to SEQ ID NO: 263790
uaccacccucaauuagagc

SEQ ID NO: 263792 - RNA, 19 nt, Artificial Sequence
  Description of Artificial Sequence: Synthetic oligonucleotide
  Sense strand starting at position 2419 SEQ ID NO: 3391
ucuaauugagggugguagu

SEQ ID NO: 263793 - RNA, 19 nt, Artificial Sequence
  Description of Artificial Sequence: Synthetic oligonucleotide
  Antisense strand to SEQ ID NO: 263792
acuaccacccucaauuaga

SEQ ID NO: 263794 - RNA, 19 nt, Artificial Sequence
  Description of Artificial Sequence: Synthetic oligonucleotide
  Sense strand starting at position 2420 SEQ ID NO: 3391
cuaauugagggugguagua

SEQ ID NO: 263795 - RNA, 19 nt, Artificial Sequence
  Description of Artificial Sequence: Synthetic oligonucleotide
  Antisense strand to SEQ ID NO: 263794
uacuaccacccucaauuag

SEQ ID NO: 263796 - RNA, 19 nt, Artificial Sequence
  Description of Artificial Sequence: Synthetic oligonucleotide
  Sense strand starting at position 2843 SEQ ID NO: 3391
ucauaaugaguccguuuga

SEQ ID NO: 263797 - RNA, 19 nt, Artificial Sequence
  Description of Artificial Sequence: Synthetic oligonucleotide
  Antisense strand to SEQ ID NO: 263796
ucaaacggacucauuauga

SEQ ID NO: 263798 - RNA, 19 nt, Artificial Sequence
  Description of Artificial Sequence: Synthetic oligonucleotide
  Sense strand starting at position 2844 SEQ ID NO: 3391
cauaaugaguccguuugau

SEQ ID NO: 263799 - RNA, 19 nt, Artificial Sequence
  Description of Artificial Sequence: Synthetic oligonucleotide
  Antisense strand to SEQ ID NO: 263798
aucaaacggacucauuaug

SEQ ID NO: 263800 - RNA, 19 nt, Artificial Sequence
  Description of Artificial Sequence: Synthetic oligonucleotide
  Sense strand starting at position 3097 SEQ ID NO: 3391
ucaccugugcguguuuauu

SEQ ID NO: 263801 - RNA, 19 nt, Artificial Sequence
  Description of Artificial Sequence: Synthetic oligonucleotide
  Antisense strand to SEQ ID NO: 263800
aauaaacacgcacagguga

SEQ ID NO: 263802 - RNA, 19 nt, Artificial Sequence
  Description of Artificial Sequence: Synthetic oligonucleotide
  Sense strand starting at position 3107 SEQ ID NO: 3391
guguuuauucggcugcuca

SEQ ID NO: 263803 - RNA, 19 nt, Artificial Sequence
  Description of Artificial Sequence: Synthetic oligonucleotide
  Antisense strand to SEQ ID NO: 263802
ugagcagccgaauaaacac

SEQ ID NO: 263804 - RNA, 19 nt, Artificial Sequence
  Description of Artificial Sequence: Synthetic oligonucleotide
  Sense strand starting at position 3115 SEQ ID NO: 3391
ucggcugcucaucuguaau

SEQ ID NO: 263805 - RNA, 19 nt, Artificial Sequence
  Description of Artificial Sequence: Synthetic oligonucleotide
  Antisense strand to SEQ ID NO: 263804
auuacagaugagcagccga

SEQ ID NO: 263806 - RNA, 19 nt, Artificial Sequence
  Description of Artificial Sequence: Synthetic oligonucleotide
  Sense strand starting at position 3152 SEQ ID NO: 3391
ccacgaacuggucaauaug

SEQ ID NO: 263807 - RNA, 19 nt, Artificial Sequence
  Description of Artificial Sequence: Synthetic oligonucleotide
  Antisense strand to SEQ ID NO: 263806
cauauugaccaguucgugg

SEQ ID NO: 263808 - RNA, 19 nt, Artificial Sequence
  Description of Artificial Sequence: Synthetic oligonucleotide
  Sense strand starting at position 3155 SEQ ID NO: 3391
cgaacuggucaauaugagu

SEQ ID NO: 263809 - RNA, 19 nt, Artificial Sequence
  Description of Artificial Sequence: Synthetic oligonucleotide
  Antisense strand to SEQ ID NO: 263808
acucauauugaccaguucg

SEQ ID NO: 263810 - RNA, 19 nt, Artificial Sequence
  Description of Artificial Sequence: Synthetic oligonucleotide
  Sense strand starting at position 3352 SEQ ID NO: 3391
guugacagugucugauuga

SEQ ID NO: 263811 - RNA, 19 nt, Artificial Sequence
  Description of Artificial Sequence: Synthetic oligonucleotide
  Antisense strand to SEQ ID NO: 263810
ucaaucagacacugucaac

SEQ ID NO: 263812 - RNA, 19 nt, Artificial Sequence
  Description of Artificial Sequence: Synthetic oligonucleotide
  Sense strand starting at position 3355 SEQ ID NO: 3391
gacagugucugauugaauu

SEQ ID NO: 263813 - RNA, 19 nt, Artificial Sequence
  Description of Artificial Sequence: Synthetic oligonucleotide
  Antisense strand to SEQ ID NO: 263812
aauucaaucagacacuguc

SEQ ID NO: 263814 - RNA, 19 nt, Artificial Sequence
  Description of Artificial Sequence: Synthetic oligonucleotide
  Sense strand starting at position 3393 SEQ ID NO: 3391
cggagucugcuggagaacu

SEQ ID NO: 263815 - RNA, 19 nt, Artificial Sequence
  Description of Artificial Sequence: Synthetic oligonucleotide
  Antisense strand to SEQ ID NO: 263814
aguucuccagcagacuccg

SEQ ID NO: 263816 - RNA, 19 nt, Artificial Sequence
  Description of Artificial Sequence: Synthetic oligonucleotide
  Sense strand starting at position 3430 SEQ ID NO: 3391
gagaguguucuguguugag

SEQ ID NO: 263817 - RNA, 19 nt, Artificial Sequence
  Description of Artificial Sequence: Synthetic oligonucleotide
  Antisense strand to SEQ ID NO: 263816
cucaacacagaacacucuc

SEQ ID NO: 263818 - RNA, 19 nt, Artificial Sequence
  Description of Artificial Sequence: Synthetic oligonucleotide
  Sense strand starting at position 3456 SEQ ID NO: 3391
ggagcauacaccugggaca

SEQ ID NO: 263819 - RNA, 19 nt, Artificial Sequence
  Description of Artificial Sequence: Synthetic oligonucleotide
  Antisense strand to SEQ ID NO: 263818
ugucccagguguaugcucc

SEQ ID NO: 263820 - RNA, 19 nt, Artificial Sequence
  Description of Artificial Sequence: Synthetic oligonucleotide
  Sense strand starting at position 3457 SEQ ID NO: 3391
gagcauacaccugggacau

SEQ ID NO: 263821 - RNA, 19 nt, Artificial Sequence
  Description of Artificial Sequence: Synthetic oligonucleotide
  Antisense strand to SEQ ID NO: 263820
augucccagguguaugcuc

SEQ ID NO: 263822 - RNA, 19 nt, Artificial Sequence
  Description of Artificial Sequence: Synthetic oligonucleotide
  Sense strand starting at position 3563 SEQ ID NO: 3391
ugggcuggcacuugaucaa

SEQ ID NO: 263823 - RNA, 19 nt, Artificial Sequence
  Description of Artificial Sequence: Synthetic oligonucleotide
  Antisense strand to SEQ ID NO: 263822
uugaucaagugccagccca

SEQ ID NO: 263824 - RNA, 19 nt, Artificial Sequence
  Description of Artificial Sequence: Synthetic oligonucleotide
  Sense strand starting at position 3609 SEQ ID NO: 3391
gacuguuuagaagggaagu

SEQ ID NO: 263825 - RNA, 19 nt, Artificial Sequence
  Description of Artificial Sequence: Synthetic oligonucleotide
  Antisense strand to SEQ ID NO: 263824
acuucccuucuaaacaguc

SEQ ID NO: 263826 - RNA, 19 nt, Artificial Sequence
  Description of Artificial Sequence: Synthetic oligonucleotide
  Sense strand starting at position 3797 SEQ ID NO: 3391
ucuggucauccuuacaguu

SEQ ID NO: 263827 - RNA, 19 nt, Artificial Sequence
  Description of Artificial Sequence: Synthetic oligonucleotide
  Antisense strand to SEQ ID NO: 263826
aacuguaaggaugaccaga

SEQ ID NO: 263828 - RNA, 19 nt, Artificial Sequence
  Description of Artificial Sequence: Synthetic oligonucleotide
  Sense strand starting at position 3878 SEQ ID NO: 3391
caggcagaaaugugggaau

SEQ ID NO: 263829 - RNA, 19 nt, Artificial Sequence
  Description of Artificial Sequence: Synthetic oligonucleotide
  Antisense strand to SEQ ID NO: 263828
auucccacauuucugccug

SEQ ID NO: 263830 - RNA, 19 nt, Artificial Sequence
  Description of Artificial Sequence: Synthetic oligonucleotide
  Sense strand starting at position 3880 SEQ ID NO: 3391
ggcagaaaugugggaauga

SEQ ID NO: 263831 - RNA, 19 nt, Artificial Sequence
  Description of Artificial Sequence: Synthetic oligonucleotide
  Antisense strand to SEQ ID NO: 263830
ucauucccacauuucugcc

SEQ ID NO: 263832 - RNA, 19 nt, Artificial Sequence
  Description of Artificial Sequence: Synthetic oligonucleotide
  Sense strand starting at position 192 SEQ ID NO: 3392
uucuuauaguccucugaga

SEQ ID NO: 263833 - RNA, 19 nt, Artificial Sequence
  Description of Artificial Sequence: Synthetic oligonucleotide
  Antisense strand to SEQ ID NO: 263832
ucucagaggacuauaagaa

SEQ ID NO: 263834 - RNA, 19 nt, Artificial Sequence
  Description of Artificial Sequence: Synthetic oligonucleotide
  Sense strand starting at position 194 SEQ ID NO: 3392
cuuauaguccucugagaaa

SEQ ID NO: 263835 - RNA, 19 nt, Artificial Sequence
  Description of Artificial Sequence: Synthetic oligonucleotide
  Antisense strand to SEQ ID NO: 263834
uuucucagaggacuauaag

SEQ ID NO: 263836 - RNA, 19 nt, Artificial Sequence
  Description of Artificial Sequence: Synthetic oligonucleotide
  Sense strand starting at position 352 SEQ ID NO: 3392
gcagaaggauuauauaaca

SEQ ID NO: 263837 - RNA, 19 nt, Artificial Sequence
  Description of Artificial Sequence: Synthetic oligonucleotide
  Antisense strand to SEQ ID NO: 263836
uguuauauaauccuucugc

SEQ ID NO: 263838 - RNA, 19 nt, Artificial Sequence
  Description of Artificial Sequence: Synthetic oligonucleotide
  Sense strand starting at position 455 SEQ ID NO: 3392
ucaguaguggucuauguua

SEQ ID NO: 263839 - RNA, 19 nt, Artificial Sequence
  Description of Artificial Sequence: Synthetic oligonucleotide
  Antisense strand to SEQ ID NO: 263838
uaacauagaccacuacuga

SEQ ID NO: 263840 - RNA, 19 nt, Artificial Sequence
  Description of Artificial Sequence: Synthetic oligonucleotide
  Sense strand starting at position 605 SEQ ID NO: 3392
cuggaauguuucucuuagu

SEQ ID NO: 263841 - RNA, 19 nt, Artificial Sequence
  Description of Artificial Sequence: Synthetic oligonucleotide
  Antisense strand to SEQ ID NO: 263840
acuaagagaaacauuccag

SEQ ID NO: 263842 - RNA, 19 nt, Artificial Sequence
  Description of Artificial Sequence: Synthetic oligonucleotide
  Sense strand starting at position 606 SEQ ID NO: 3392
uggaauguuucucuuagua

SEQ ID NO: 263843 - RNA, 19 nt, Artificial Sequence
  Description of Artificial Sequence: Synthetic oligonucleotide
  Antisense strand to SEQ ID NO: 263842
uacuaagagaaacauucca

SEQ ID NO: 263844 - RNA, 19 nt, Artificial Sequence
  Description of Artificial Sequence: Synthetic oligonucleotide
  Sense strand starting at position 758 SEQ ID NO: 3392
uuuaucuguaugggagaca

SEQ ID NO: 263845 - RNA, 19 nt, Artificial Sequence
  Description of Artificial Sequence: Synthetic oligonucleotide
  Antisense strand to SEQ ID NO: 263844
ugucucccauacagauaaa

SEQ ID NO: 263846 - RNA, 19 nt, Artificial Sequence
  Description of Artificial Sequence: Synthetic oligonucleotide
  Sense strand starting at position 836 SEQ ID NO: 3392
cucauaugccaguaagggu

SEQ ID NO: 263847 - RNA, 19 nt, Artificial Sequence
  Description of Artificial Sequence: Synthetic oligonucleotide
  Antisense strand to SEQ ID NO: 263846
acccuuacuggcauaugag

SEQ ID NO: 263848 - RNA, 19 nt, Artificial Sequence
  Description of Artificial Sequence: Synthetic oligonucleotide
  Sense strand starting at position 972 SEQ ID NO: 3392
cuuauauagcuuugauggu

SEQ ID NO: 263849 - RNA, 19 nt, Artificial Sequence
  Description of Artificial Sequence: Synthetic oligonucleotide
  Antisense strand to SEQ ID NO: 263848
accaucaaagcuauauaag

SEQ ID NO: 263850 - RNA, 19 nt, Artificial Sequence
  Description of Artificial Sequence: Synthetic oligonucleotide
  Sense strand starting at position 976 SEQ ID NO: 3392
uauagcuuugaugguacaa

SEQ ID NO: 263851 - RNA, 19 nt, Artificial Sequence
  Description of Artificial Sequence: Synthetic oligonucleotide
  Antisense strand to SEQ ID NO: 263850
uuguaccaucaaagcuaua

SEQ ID NO: 263852 - RNA, 19 nt, Artificial Sequence
  Description of Artificial Sequence: Synthetic oligonucleotide
  Sense strand starting at position 988 SEQ ID NO: 3392
gguacaagaaauugucaug

SEQ ID NO: 263853 - RNA, 19 nt, Artificial Sequence
  Description of Artificial Sequence: Synthetic oligonucleotide
  Antisense strand to SEQ ID NO: 263852
caugacaauuucuuguacc

SEQ ID NO: 263854 - RNA, 19 nt, Artificial Sequence
  Description of Artificial Sequence: Synthetic oligonucleotide
  Sense strand starting at position 994 SEQ ID NO: 3392
agaaauugucaugguuaau

SEQ ID NO: 263855 - RNA, 19 nt, Artificial Sequence
  Description of Artificial Sequence: Synthetic oligonucleotide
  Antisense strand to SEQ ID NO: 263854
auuaaccaugacaauuucu

SEQ ID NO: 263856 - RNA, 19 nt, Artificial Sequence
  Description of Artificial Sequence: Synthetic oligonucleotide
  Sense strand starting at position 1106 SEQ ID NO: 3392
aacuaaaguguagaguuua

SEQ ID NO: 263857 - RNA, 19 nt, Artificial Sequence
  Description of Artificial Sequence: Synthetic oligonucleotide
  Antisense strand to SEQ ID NO: 263856
uaaacucuacacuuuaguu

SEQ ID NO: 263858 - RNA, 19 nt, Artificial Sequence
  Description of Artificial Sequence: Synthetic oligonucleotide
  Sense strand starting at position 1111 SEQ ID NO: 3392
aaguguagaguuuaaucuu

SEQ ID NO: 263859 - RNA, 19 nt, Artificial Sequence
  Description of Artificial Sequence: Synthetic oligonucleotide
  Antisense strand to SEQ ID NO: 263858
aagauuaaacucuacacuu

SEQ ID NO: 263860 - RNA, 19 nt, Artificial Sequence
  Description of Artificial Sequence: Synthetic oligonucleotide
  Sense strand starting at position 1365 SEQ ID NO: 3392
ccaguaaagucucugggaa

SEQ ID NO: 263861 - RNA, 19 nt, Artificial Sequence
  Description of Artificial Sequence: Synthetic oligonucleotide
  Antisense strand to SEQ ID NO: 263860
uucccagagacuuuacugg

SEQ ID NO: 263862 - RNA, 19 nt, Artificial Sequence
  Description of Artificial Sequence: Synthetic oligonucleotide
  Sense strand starting at position 1366 SEQ ID NO: 3392
caguaaagucucugggaag

SEQ ID NO: 263863 - RNA, 19 nt, Artificial Sequence
  Description of Artificial Sequence: Synthetic oligonucleotide
  Antisense strand to SEQ ID NO: 263862
cuucccagagacuuuacug

SEQ ID NO: 263864 - RNA, 19 nt, Artificial Sequence
  Description of Artificial Sequence: Synthetic oligonucleotide
  Sense strand starting at position 1538 SEQ ID NO: 3392
ccuccaguccaggaacauu

SEQ ID NO: 263865 - RNA, 19 nt, Artificial Sequence
  Description of Artificial Sequence: Synthetic oligonucleotide
  Antisense strand to SEQ ID NO: 263864
aauguuccuggacuggagg

SEQ ID NO: 263866 - RNA, 19 nt, Artificial Sequence
  Description of Artificial Sequence: Synthetic oligonucleotide
  Sense strand starting at position 1855 SEQ ID NO: 3392
ugucuucagugaguaugga

SEQ ID NO: 263867 - RNA, 19 nt, Artificial Sequence
  Description of Artificial Sequence: Synthetic oligonucleotide
  Antisense strand to SEQ ID NO: 263866
uccauacucacugaagaca

SEQ ID NO: 263868 - RNA, 19 nt, Artificial Sequence
  Description of Artificial Sequence: Synthetic oligonucleotide
  Sense strand starting at position 1856 SEQ ID NO: 3392
gucuucagugaguauggau

SEQ ID NO: 263869 - RNA, 19 nt, Artificial Sequence
  Description of Artificial Sequence: Synthetic oligonucleotide
  Antisense strand to SEQ ID NO: 263868
auccauacucacugaagac

SEQ ID NO: 263870 - RNA, 19 nt, Artificial Sequence
  Description of Artificial Sequence: Synthetic oligonucleotide
  Sense strand starting at position 1882 SEQ ID NO: 3392
cccauaguccagggaauga

SEQ ID NO: 263871 - RNA, 19 nt, Artificial Sequence
  Description of Artificial Sequence: Synthetic oligonucleotide
  Antisense strand to SEQ ID NO: 263870
ucauucccuggacuauggg

SEQ ID NO: 263872 - RNA, 19 nt, Artificial Sequence
  Description of Artificial Sequence: Synthetic oligonucleotide
  Sense strand starting at position 2059 SEQ ID NO: 3392
gccucagggaucuguuuga

SEQ ID NO: 263873 - RNA, 19 nt, Artificial Sequence
  Description of Artificial Sequence: Synthetic oligonucleotide
  Antisense strand to SEQ ID NO: 263872
ucaaacagaucccugaggc

SEQ ID NO: 263874 - RNA, 19 nt, Artificial Sequence
  Description of Artificial Sequence: Synthetic oligonucleotide
  Sense strand starting at position 2263 SEQ ID NO: 3392
agauaaugaugauggaaga

SEQ ID NO: 263875 - RNA, 19 nt, Artificial Sequence
  Description of Artificial Sequence: Synthetic oligonucleotide
  Antisense strand to SEQ ID NO: 263874
ucuuccaucaucauuaucu

SEQ ID NO: 263876 - RNA, 19 nt, Artificial Sequence
  Description of Artificial Sequence: Synthetic oligonucleotide
  Sense strand starting at position 2323 SEQ ID NO: 3392
agagcagaauaauaucaau

SEQ ID NO: 263877 - RNA, 19 nt, Artificial Sequence
  Description of Artificial Sequence: Synthetic oligonucleotide
  Antisense strand to SEQ ID NO: 263876
auugauauuauucugcucu

SEQ ID NO: 263878 - RNA, 19 nt, Artificial Sequence
  Description of Artificial Sequence: Synthetic oligonucleotide
  Sense strand starting at position 2354 SEQ ID NO: 3392
gcauaauaagguugucagu

SEQ ID NO: 263879 - RNA, 19 nt, Artificial Sequence
  Description of Artificial Sequence: Synthetic oligonucleotide
  Antisense strand to SEQ ID NO: 263878
acugacaaccuuauuaugc

SEQ ID NO: 263880 - RNA, 19 nt, Artificial Sequence
  Description of Artificial Sequence: Synthetic oligonucleotide
  Sense strand starting at position 2365 SEQ ID NO: 3392
uugucaguccuacaaauca

SEQ ID NO: 263881 - RNA, 19 nt, Artificial Sequence
  Description of Artificial Sequence: Synthetic oligonucleotide
  Antisense strand to SEQ ID NO: 263880
ugauuuguaggacugacaa

SEQ ID NO: 263882 - RNA, 19 nt, Artificial Sequence
  Description of Artificial Sequence: Synthetic oligonucleotide
  Sense strand starting at position 2476 SEQ ID NO: 3392
cacagaguggcuugaaauc

SEQ ID NO: 263883 - RNA, 19 nt, Artificial Sequence
  Description of Artificial Sequence: Synthetic oligonucleotide
  Antisense strand to SEQ ID NO: 263882
gauuucaagccacucugug

SEQ ID NO: 263884 - RNA, 19 nt, Artificial Sequence
  Description of Artificial Sequence: Synthetic oligonucleotide
  Sense strand starting at position 2558 SEQ ID NO: 3392
agagaauaguuggauaaug

SEQ ID NO: 263885 - RNA, 19 nt, Artificial Sequence
  Description of Artificial Sequence: Synthetic oligonucleotide
  Antisense strand to SEQ ID NO: 263884
cauuauccaacuauucucu

SEQ ID NO: 263886 - RNA, 19 nt, Artificial Sequence
  Description of Artificial Sequence: Synthetic oligonucleotide
  Sense strand starting at position 2727 SEQ ID NO: 3392
ucugaugugcugcauugau

SEQ ID NO: 263887 - RNA, 19 nt, Artificial Sequence
  Description of Artificial Sequence: Synthetic oligonucleotide
  Antisense strand to SEQ ID NO: 263886
aucaaugcagcacaucaga

SEQ ID NO: 263888 - RNA, 19 nt, Artificial Sequence
  Description of Artificial Sequence: Synthetic oligonucleotide
  Sense strand starting at position 2817 SEQ ID NO: 3392
uccugagcaggcugauuaa

SEQ ID NO: 263889 - RNA, 19 nt, Artificial Sequence
  Description of Artificial Sequence: Synthetic oligonucleotide
  Antisense strand to SEQ ID NO: 263888
uuaaucagccugcucagga

SEQ ID NO: 263890 - RNA, 19 nt, Artificial Sequence
  Description of Artificial Sequence: Synthetic oligonucleotide
  Sense strand starting at position 2894 SEQ ID NO: 3392
uggcaagcaugcucaauau

SEQ ID NO: 263891 - RNA, 19 nt, Artificial Sequence
  Description of Artificial Sequence: Synthetic oligonucleotide
  Antisense strand to SEQ ID NO: 263890
auauugagcaugcuugcca

SEQ ID NO: 263892 - RNA, 19 nt, Artificial Sequence
  Description of Artificial Sequence: Synthetic oligonucleotide
  Sense strand starting at position 3059 SEQ ID NO: 3392
acgagaauggaugguucua

SEQ ID NO: 263893 - RNA, 19 nt, Artificial Sequence
  Description of Artificial Sequence: Synthetic oligonucleotide
  Antisense strand to SEQ ID NO: 263892
uagaaccauccauucucgu

SEQ ID NO: 263894 - RNA, 19 nt, Artificial Sequence
  Description of Artificial Sequence: Synthetic oligonucleotide
  Sense strand starting at position 3061 SEQ ID NO: 3392
gagaauggaugguucuauu

SEQ ID NO: 263895 - RNA, 19 nt, Artificial Sequence
  Description of Artificial Sequence: Synthetic oligonucleotide
  Antisense strand to SEQ ID NO: 263894
aauagaaccauccauucuc

SEQ ID NO: 263896 - RNA, 19 nt, Artificial Sequence
  Description of Artificial Sequence: Synthetic oligonucleotide
  Sense strand starting at position 3115 SEQ ID NO: 3392
gccugacagcaccauuauu

SEQ ID NO: 263897 - RNA, 19 nt, Artificial Sequence
  Description of Artificial Sequence: Synthetic oligonucleotide
  Antisense strand to SEQ ID NO: 263896
aauaauggugcugucaggc

SEQ ID NO: 263898 - RNA, 19 nt, Artificial Sequence
  Description of Artificial Sequence: Synthetic oligonucleotide
  Sense strand starting at position 3401 SEQ ID NO: 3392
cuguuacuguauccuagau

SEQ ID NO: 263899 - RNA, 19 nt, Artificial Sequence
  Description of Artificial Sequence: Synthetic oligonucleotide
  Antisense strand to SEQ ID NO: 263898
aucuaggauacaguaacag

SEQ ID NO: 263900 - RNA, 19 nt, Artificial Sequence
  Description of Artificial Sequence: Synthetic oligonucleotide
  Sense strand starting at position 3566 SEQ ID NO: 3392
agcaccucugccgaguauu

SEQ ID NO: 263901 - RNA, 19 nt, Artificial Sequence
  Description of Artificial Sequence: Synthetic oligonucleotide
  Antisense strand to SEQ ID NO: 263900
aauacucggcagaggugcu

SEQ ID NO: 263902 - RNA, 19 nt, Artificial Sequence
  Description of Artificial Sequence: Synthetic oligonucleotide
  Sense strand starting at position 3758 SEQ ID NO: 3392
uuugguaacagaugcuuga

SEQ ID NO: 263903 - RNA, 19 nt, Artificial Sequence
  Description of Artificial Sequence: Synthetic oligonucleotide
  Antisense strand to SEQ ID NO: 263902
ucaagcaucuguuaccaaa

SEQ ID NO: 263904 - RNA, 19 nt, Artificial Sequence
  Description of Artificial Sequence: Synthetic oligonucleotide
  Sense strand starting at position 3815 SEQ ID NO: 3392
uguaauuccuguuucugag

SEQ ID NO: 263905 - RNA, 19 nt, Artificial Sequence
  Description of Artificial Sequence: Synthetic oligonucleotide
  Antisense strand to SEQ ID NO: 263904
cucagaaacaggaauuaca

SEQ ID NO: 263906 - RNA, 19 nt, Artificial Sequence
  Description of Artificial Sequence: Synthetic oligonucleotide
  Sense strand starting at position 3823 SEQ ID NO: 3392
cuguuucugagacgugauu

SEQ ID NO: 263907 - RNA, 19 nt, Artificial Sequence
  Description of Artificial Sequence: Synthetic oligonucleotide
  Antisense strand to SEQ ID NO: 263906
aaucacgucucagaaacag

SEQ ID NO: 263908 - RNA, 19 nt, Artificial Sequence
  Description of Artificial Sequence: Synthetic oligonucleotide
  Sense strand starting at position 3864 SEQ ID NO: 3392
ccuguugcugcagugugaa

SEQ ID NO: 263909 - RNA, 19 nt, Artificial Sequence
  Description of Artificial Sequence: Synthetic oligonucleotide
  Antisense strand to SEQ ID NO: 263908
uucacacugcagcaacagg

SEQ ID NO: 263910 - RNA, 19 nt, Artificial Sequence
  Description of Artificial Sequence: Synthetic oligonucleotide
  Sense strand starting at position 3872 SEQ ID NO: 3392
ugcagugugaaucagaaau

SEQ ID NO: 263911 - RNA, 19 nt, Artificial Sequence
  Description of Artificial Sequence: Synthetic oligonucleotide
  Antisense strand to SEQ ID NO: 263910
auuucugauucacacugca

SEQ ID NO: 263912 - RNA, 19 nt, Artificial Sequence
  Description of Artificial Sequence: Synthetic oligonucleotide
  Sense strand starting at position 70 SEQ ID NO: 3393
gaaauagugcccuguggcu

SEQ ID NO: 263913 - RNA, 19 nt, Artificial Sequence
  Description of Artificial Sequence: Synthetic oligonucleotide
  Antisense strand to SEQ ID NO: 263912
agccacagggcacuauuuc

SEQ ID NO: 263914 - RNA, 19 nt, Artificial Sequence
  Description of Artificial Sequence: Synthetic oligonucleotide
  Sense strand starting at position 112 SEQ ID NO: 3393
gcaugauccugcccuugca

SEQ ID NO: 263915 - RNA, 19 nt, Artificial Sequence
  Description of Artificial Sequence: Synthetic oligonucleotide
  Antisense strand to SEQ ID NO: 263914
ugcaagggcaggaucaugc

SEQ ID NO: 263916 - RNA, 19 nt, Artificial Sequence
  Description of Artificial Sequence: Synthetic oligonucleotide
  Sense strand starting at position 158 SEQ ID NO: 3393
ccaugcaguuuccaugaaa

SEQ ID NO: 263917 - RNA, 19 nt, Artificial Sequence
  Description of Artificial Sequence: Synthetic oligonucleotide
  Antisense strand to SEQ ID NO: 263916
uuucauggaaacugcaugg

SEQ ID NO: 263918 - RNA, 19 nt, Artificial Sequence
  Description of Artificial Sequence: Synthetic oligonucleotide
  Sense strand starting at position 554 SEQ ID NO: 3393
ucaugaugccugugagggu

SEQ ID NO: 263919 - RNA, 19 nt, Artificial Sequence
  Description of Artificial Sequence: Synthetic oligonucleotide
  Antisense strand to SEQ ID NO: 263918
acccucacaggcaucauga

SEQ ID NO: 263920 - RNA, 19 nt, Artificial Sequence
  Description of Artificial Sequence: Synthetic oligonucleotide
  Sense strand starting at position 795 SEQ ID NO: 3393
cugggaguuccgcgucuaa

SEQ ID NO: 263921 - RNA, 19 nt, Artificial Sequence
  Description of Artificial Sequence: Synthetic oligonucleotide
  Antisense strand to SEQ ID NO: 263920
uuagacgcggaacucccag

SEQ ID NO: 263922 - RNA, 19 nt, Artificial Sequence
  Description of Artificial Sequence: Synthetic oligonucleotide
  Sense strand starting at position 928 SEQ ID NO: 3393
agagaucgagacugucuuu

SEQ ID NO: 263923 - RNA, 19 nt, Artificial Sequence
  Description of Artificial Sequence: Synthetic oligonucleotide
  Antisense strand to SEQ ID NO: 263922
aaagacagucucgaucucu

SEQ ID NO: 263924 - RNA, 19 nt, Artificial Sequence
  Description of Artificial Sequence: Synthetic oligonucleotide
  Sense strand starting at position 1085 SEQ ID NO: 3393
cccgacuuuguaggaugaa

SEQ ID NO: 263925 - RNA, 19 nt, Artificial Sequence
  Description of Artificial Sequence: Synthetic oligonucleotide
  Antisense strand to SEQ ID NO: 263924
uucauccuacaaagucggg

SEQ ID NO: 263926 - RNA, 19 nt, Artificial Sequence
  Description of Artificial Sequence: Synthetic oligonucleotide
  Sense strand starting at position 2138 SEQ ID NO: 3393
gggcgucccugauagacuu

SEQ ID NO: 263927 - RNA, 19 nt, Artificial Sequence
  Description of Artificial Sequence: Synthetic oligonucleotide
  Antisense strand to SEQ ID NO: 263926
aagucuaucagggacgccc

SEQ ID NO: 263928 - RNA, 19 nt, Artificial Sequence
  Description of Artificial Sequence: Synthetic oligonucleotide
  Sense strand starting at position 2881 SEQ ID NO: 3393
ccgguagguguucguugaa

SEQ ID NO: 263929 - RNA, 19 nt, Artificial Sequence
  Description of Artificial Sequence: Synthetic oligonucleotide
  Antisense strand to SEQ ID NO: 263928
uucaacgaacaccuaccgg

SEQ ID NO: 263930 - RNA, 19 nt, Artificial Sequence
  Description of Artificial Sequence: Synthetic oligonucleotide
  Sense strand starting at position 2884 SEQ ID NO: 3393
guagguguucguugaaggu

SEQ ID NO: 263931 - RNA, 19 nt, Artificial Sequence
  Description of Artificial Sequence: Synthetic oligonucleotide
  Antisense strand to SEQ ID NO: 263930
accuucaacgaacaccuac

SEQ ID NO: 263932 - RNA, 19 nt, Artificial Sequence
  Description of Artificial Sequence: Synthetic oligonucleotide
  Sense strand starting at position 2886 SEQ ID NO: 3393
agguguucguugaagguua

SEQ ID NO: 263933 - RNA, 19 nt, Artificial Sequence
  Description of Artificial Sequence: Synthetic oligonucleotide
  Antisense strand to SEQ ID NO: 263932
uaaccuucaacgaacaccu

SEQ ID NO: 263934 - RNA, 19 nt, Artificial Sequence
  Description of Artificial Sequence: Synthetic oligonucleotide
  Sense strand starting at position 2898 SEQ ID NO: 3393
aagguuacccgucguugaa

SEQ ID NO: 263935 - RNA, 19 nt, Artificial Sequence
  Description of Artificial Sequence: Synthetic oligonucleotide
  Antisense strand to SEQ ID NO: 263934
uucaacgacggguaaccuu

SEQ ID NO: 263936 - RNA, 19 nt, Artificial Sequence
  Description of Artificial Sequence: Synthetic oligonucleotide
  Sense strand starting at position 2927 SEQ ID NO: 3393
gaaggagagcuuuguguug

SEQ ID NO: 263937 - RNA, 19 nt, Artificial Sequence
  Description of Artificial Sequence: Synthetic oligonucleotide
  Antisense strand to SEQ ID NO: 263936
caacacaaagcucuccuuc

SEQ ID NO: 263938 - RNA, 19 nt, Artificial Sequence
  Description of Artificial Sequence: Synthetic oligonucleotide
  Sense strand starting at position 2929 SEQ ID NO: 3393
aggagagcuuuguguugaa

SEQ ID NO: 263939 - RNA, 19 nt, Artificial Sequence
  Description of Artificial Sequence: Synthetic oligonucleotide
  Antisense strand to SEQ ID NO: 263938
uucaacacaaagcucuccu

SEQ ID NO: 263940 - RNA, 19 nt, Artificial Sequence
  Description of Artificial Sequence: Synthetic oligonucleotide
  Sense strand starting at position 2932 SEQ ID NO: 3393
agagcuuuguguugaaauu

SEQ ID NO: 263941 - RNA, 19 nt, Artificial Sequence
  Description of Artificial Sequence: Synthetic oligonucleotide
  Antisense strand to SEQ ID NO: 263940
aauuucaacacaaagcucu

SEQ ID NO: 263942 - RNA, 19 nt, Artificial Sequence
  Description of Artificial Sequence: Synthetic oligonucleotide
  Sense strand starting at position 2933 SEQ ID NO: 3393
gagcuuuguguugaaauug

SEQ ID NO: 263943 - RNA, 19 nt, Artificial Sequence
  Description of Artificial Sequence: Synthetic oligonucleotide
  Antisense strand to SEQ ID NO: 263942
caauuucaacacaaagcuc

SEQ ID NO: 263944 - RNA, 19 nt, Artificial Sequence
  Description of Artificial Sequence: Synthetic oligonucleotide
  Sense strand starting at position 3062 SEQ ID NO: 3393
gcccaauucgcaggagagu

SEQ ID NO: 263945 - RNA, 19 nt, Artificial Sequence
  Description of Artificial Sequence: Synthetic oligonucleotide
  Antisense strand to SEQ ID NO: 263944
acucuccugcgaauugggc

SEQ ID NO: 263946 - RNA, 19 nt, Artificial Sequence
  Description of Artificial Sequence: Synthetic oligonucleotide
  Sense strand starting at position 3063 SEQ ID NO: 3393
cccaauucgcaggagaguu

SEQ ID NO: 263947 - RNA, 19 nt, Artificial Sequence
  Description of Artificial Sequence: Synthetic oligonucleotide
  Antisense strand to SEQ ID NO: 263946
aacucuccugcgaauuggg

SEQ ID NO: 263948 - RNA, 19 nt, Artificial Sequence
  Description of Artificial Sequence: Synthetic oligonucleotide
  Sense strand starting at position 3071 SEQ ID NO: 3393
gcaggagaguuggaaacaa

SEQ ID NO: 263949 - RNA, 19 nt, Artificial Sequence
  Description of Artificial Sequence: Synthetic oligonucleotide
  Antisense strand to SEQ ID NO: 263948
uuguuuccaacucuccugc

SEQ ID NO: 263950 - RNA, 19 nt, Artificial Sequence
  Description of Artificial Sequence: Synthetic oligonucleotide
  Sense strand starting at position 3106 SEQ ID NO: 3393
aagggaggucuuggcauga

SEQ ID NO: 263951 - RNA, 19 nt, Artificial Sequence
  Description of Artificial Sequence: Synthetic oligonucleotide
  Antisense strand to SEQ ID NO: 263950
ucaugccaagaccucccuu

SEQ ID NO: 263952 - RNA, 19 nt, Artificial Sequence
  Description of Artificial Sequence: Synthetic oligonucleotide
  Sense strand starting at position 3110 SEQ ID NO: 3393
gaggucuuggcaugacaga

SEQ ID NO: 263953 - RNA, 19 nt, Artificial Sequence
  Description of Artificial Sequence: Synthetic oligonucleotide
  Antisense strand to SEQ ID NO: 263952
ucugucaugccaagaccuc

SEQ ID NO: 263954 - RNA, 19 nt, Artificial Sequence
  Description of Artificial Sequence: Synthetic oligonucleotide
  Sense strand starting at position 3126 SEQ ID NO: 3393
agaauuugcuuggaaugau

SEQ ID NO: 263955 - RNA, 19 nt, Artificial Sequence
  Description of Artificial Sequence: Synthetic oligonucleotide
  Antisense strand to SEQ ID NO: 263954
aucauuccaagcaaauucu

SEQ ID NO: 263956 - RNA, 19 nt, Artificial Sequence
  Description of Artificial Sequence: Synthetic oligonucleotide
  Sense strand starting at position 3139 SEQ ID NO: 3393
aaugauuagcguugcccaa

SEQ ID NO: 263957 - RNA, 19 nt, Artificial Sequence
  Description of Artificial Sequence: Synthetic oligonucleotide
  Antisense strand to SEQ ID NO: 263956
uugggcaacgcuaaucauu

SEQ ID NO: 263958 - RNA, 19 nt, Artificial Sequence
  Description of Artificial Sequence: Synthetic oligonucleotide
  Sense strand starting at position 3156 SEQ ID NO: 3393
aagggcugucgcugucaga

SEQ ID NO: 263959 - RNA, 19 nt, Artificial Sequence
  Description of Artificial Sequence: Synthetic oligonucleotide
  Antisense strand to SEQ ID NO: 263958
ucugacagcgacagcccuu

SEQ ID NO: 263960 - RNA, 19 nt, Artificial Sequence
  Description of Artificial Sequence: Synthetic oligonucleotide
  Sense strand starting at position 3336 SEQ ID NO: 3393
ggagacaccucuugggagu

SEQ ID NO: 263961 - RNA, 19 nt, Artificial Sequence
  Description of Artificial Sequence: Synthetic oligonucleotide
  Antisense strand to SEQ ID NO: 263960
acucccaagaggugucucc

SEQ ID NO: 263962 - RNA, 19 nt, Artificial Sequence
  Description of Artificial Sequence: Synthetic oligonucleotide
  Sense strand starting at position 3337 SEQ ID NO: 3393
gagacaccucuugggaguu

SEQ ID NO: 263963 - RNA, 19 nt, Artificial Sequence
  Description of Artificial Sequence: Synthetic oligonucleotide
  Antisense strand to SEQ ID NO: 263962
aacucccaagaggugucuc

SEQ ID NO: 263964 - RNA, 19 nt, Artificial Sequence
  Description of Artificial Sequence: Synthetic oligonucleotide
  Sense strand starting at position 3348 SEQ ID NO: 3393
ugggaguucucggguuuga

SEQ ID NO: 263965 - RNA, 19 nt, Artificial Sequence
  Description of Artificial Sequence: Synthetic oligonucleotide
  Antisense strand to SEQ ID NO: 263964
ucaaacccgagaacuccca

SEQ ID NO: 263966 - RNA, 19 nt, Artificial Sequence
  Description of Artificial Sequence: Synthetic oligonucleotide
  Sense strand starting at position 3352 SEQ ID NO: 3393
aguucucggguuugaauuu

SEQ ID NO: 263967 - RNA, 19 nt, Artificial Sequence
  Description of Artificial Sequence: Synthetic oligonucleotide
  Antisense strand to SEQ ID NO: 263966
aaauucaaacccgagaacu

SEQ ID NO: 263968 - RNA, 19 nt, Artificial Sequence
  Description of Artificial Sequence: Synthetic oligonucleotide
  Sense strand starting at position 3368 SEQ ID NO: 3393
uuuccucucuuggaaaguu

SEQ ID NO: 263969 - RNA, 19 nt, Artificial Sequence
  Description of Artificial Sequence: Synthetic oligonucleotide
  Antisense strand to SEQ ID NO: 263968
aacuuuccaagagaggaaa

SEQ ID NO: 263970 - RNA, 19 nt, Artificial Sequence
  Description of Artificial Sequence: Synthetic oligonucleotide
  Sense strand starting at position 3376 SEQ ID NO: 3393
cuuggaaaguuccuagaaa

SEQ ID NO: 263971 - RNA, 19 nt, Artificial Sequence
  Description of Artificial Sequence: Synthetic oligonucleotide
  Antisense strand to SEQ ID NO: 263970
uuucuaggaacuuuccaag

SEQ ID NO: 263972 - RNA, 19 nt, Artificial Sequence
  Description of Artificial Sequence: Synthetic oligonucleotide
  Sense strand starting at position 3377 SEQ ID NO: 3393
uuggaaaguuccuagaaau

SEQ ID NO: 263973 - RNA, 19 nt, Artificial Sequence
  Description of Artificial Sequence: Synthetic oligonucleotide
  Antisense strand to SEQ ID NO: 263972
auuucuaggaacuuuccaa

SEQ ID NO: 263974 - RNA, 19 nt, Artificial Sequence
  Description of Artificial Sequence: Synthetic oligonucleotide
  Sense strand starting at position 3471 SEQ ID NO: 3393
ucuagagcuccgcacuuau

SEQ ID NO: 263975 - RNA, 19 nt, Artificial Sequence
  Description of Artificial Sequence: Synthetic oligonucleotide
  Antisense strand to SEQ ID NO: 263974
auaagugcggagcucuaga

SEQ ID NO: 263976 - RNA, 19 nt, Artificial Sequence
  Description of Artificial Sequence: Synthetic oligonucleotide
  Sense strand starting at position 3482 SEQ ID NO: 3393
gcacuuauccagcagucca

SEQ ID NO: 263977 - RNA, 19 nt, Artificial Sequence
  Description of Artificial Sequence: Synthetic oligonucleotide
  Antisense strand to SEQ ID NO: 263976
uggacugcuggauaagugc

SEQ ID NO: 263978 - RNA, 19 nt, Artificial Sequence
  Description of Artificial Sequence: Synthetic oligonucleotide
  Sense strand starting at position 3503 SEQ ID NO: 3393
guuuaaugcugcuuugauc

SEQ ID NO: 263979 - RNA, 19 nt, Artificial Sequence
  Description of Artificial Sequence: Synthetic oligonucleotide
  Antisense strand to SEQ ID NO: 263978
gaucaaagcagcauuaaac

SEQ ID NO: 263980 - RNA, 19 nt, Artificial Sequence
  Description of Artificial Sequence: Synthetic oligonucleotide
  Sense strand starting at position 3587 SEQ ID NO: 3393
ugcaauugauagcuagguu

SEQ ID NO: 263981 - RNA, 19 nt, Artificial Sequence
  Description of Artificial Sequence: Synthetic oligonucleotide
  Antisense strand to SEQ ID NO: 263980
aaccuagcuaucaauugca

SEQ ID NO: 263982 - RNA, 19 nt, Artificial Sequence
  Description of Artificial Sequence: Synthetic oligonucleotide
  Sense strand starting at position 3588 SEQ ID NO: 3393
gcaauugauagcuagguua

SEQ ID NO: 263983 - RNA, 19 nt, Artificial Sequence
  Description of Artificial Sequence: Synthetic oligonucleotide
  Antisense strand to SEQ ID NO: 263982
uaaccuagcuaucaauugc

SEQ ID NO: 263984 - RNA, 19 nt, Artificial Sequence
  Description of Artificial Sequence: Synthetic oligonucleotide
  Sense strand starting at position 3590 SEQ ID NO: 3393
aauugauagcuagguuaag

SEQ ID NO: 263985 - RNA, 19 nt, Artificial Sequence
  Description of Artificial Sequence: Synthetic oligonucleotide
  Antisense strand to SEQ ID NO: 263984
cuuaaccuagcuaucaauu

SEQ ID NO: 263986 - RNA, 19 nt, Artificial Sequence
  Description of Artificial Sequence: Synthetic oligonucleotide
  Sense strand starting at position 3591 SEQ ID NO: 3393
auugauagcuagguuaaga

SEQ ID NO: 263987 - RNA, 19 nt, Artificial Sequence
  Description of Artificial Sequence: Synthetic oligonucleotide
  Antisense strand to SEQ ID NO: 263986
ucuuaaccuagcuaucaau

SEQ ID NO: 263988 - RNA, 19 nt, Artificial Sequence
  Description of Artificial Sequence: Synthetic oligonucleotide
  Sense strand starting at position 3596 SEQ ID NO: 3393
uagcuagguuaagaauuga

SEQ ID NO: 263989 - RNA, 19 nt, Artificial Sequence
  Description of Artificial Sequence: Synthetic oligonucleotide
  Antisense strand to SEQ ID NO: 263988
ucaauucuuaaccuagcua

SEQ ID NO: 263990 - RNA, 19 nt, Artificial Sequence
  Description of Artificial Sequence: Synthetic oligonucleotide
  Sense strand starting at position 3981 SEQ ID NO: 3393
cgggcuuaucacgaaguca

SEQ ID NO: 263991 - RNA, 19 nt, Artificial Sequence
  Description of Artificial Sequence: Synthetic oligonucleotide
  Antisense strand to SEQ ID NO: 263990
ugacuucgugauaagcccg

SEQ ID NO: 263992 - RNA, 19 nt, Artificial Sequence
  Description of Artificial Sequence: Synthetic oligonucleotide
  Sense strand starting at position 178 SEQ ID NO: 3394
gagcgaaggucagugaaga

SEQ ID NO: 263993 - RNA, 19 nt, Artificial Sequence
  Description of Artificial Sequence: Synthetic oligonucleotide
  Antisense strand to SEQ ID NO: 263992
ucuucacugaccuucgcuc

SEQ ID NO: 263994 - RNA, 19 nt, Artificial Sequence
  Description of Artificial Sequence: Synthetic oligonucleotide
  Sense strand starting at position 348 SEQ ID NO: 3394
gccuucuuccauuggccua

SEQ ID NO: 263995 - RNA, 19 nt, Artificial Sequence
  Description of Artificial Sequence: Synthetic oligonucleotide
  Antisense strand to SEQ ID NO: 263994
uaggccaauggaagaaggc

SEQ ID NO: 263996 - RNA, 19 nt, Artificial Sequence
  Description of Artificial Sequence: Synthetic oligonucleotide
  Sense strand starting at position 536 SEQ ID NO: 3394
cugggaguuccgcgucuga

SEQ ID NO: 263997 - RNA, 19 nt, Artificial Sequence
  Description of Artificial Sequence: Synthetic oligonucleotide
  Antisense strand to SEQ ID NO: 263996
ucagacgcggaacucccag

SEQ ID NO: 263998 - RNA, 19 nt, Artificial Sequence
  Description of Artificial Sequence: Synthetic oligonucleotide
  Sense strand starting at position 538 SEQ ID NO: 3394
gggaguuccgcgucugacu

SEQ ID NO: 263999 - RNA, 19 nt, Artificial Sequence
  Description of Artificial Sequence: Synthetic oligonucleotide
  Antisense strand to SEQ ID NO: 263998
agucagacgcggaacuccc

SEQ ID NO: 264000 - RNA, 19 nt, Artificial Sequence
  Description of Artificial Sequence: Synthetic oligonucleotide
  Sense strand starting at position 554 SEQ ID NO: 3394
acucucuuccugcagucau

SEQ ID NO: 264001 - RNA, 19 nt, Artificial Sequence
  Description of Artificial Sequence: Synthetic oligonucleotide
  Antisense strand to SEQ ID NO: 264000
augacugcaggaagagagu

SEQ ID NO: 264002 - RNA, 19 nt, Artificial Sequence
  Description of Artificial Sequence: Synthetic oligonucleotide
  Sense strand starting at position 565 SEQ ID NO: 3394
gcagucaucagagggaaag

SEQ ID NO: 264003 - RNA, 19 nt, Artificial Sequence
  Description of Artificial Sequence: Synthetic oligonucleotide
  Antisense strand to SEQ ID NO: 264002
cuuucccucugaugacugc

SEQ ID NO: 264004 - RNA, 19 nt, Artificial Sequence
  Description of Artificial Sequence: Synthetic oligonucleotide
  Sense strand starting at position 701 SEQ ID NO: 3394
agagaucgagacugucuuu

SEQ ID NO: 264005 - RNA, 19 nt, Artificial Sequence
  Description of Artificial Sequence: Synthetic oligonucleotide
  Antisense strand to SEQ ID NO: 264004
aaagacagucucgaucucu

SEQ ID NO: 264006 - RNA, 19 nt, Artificial Sequence
  Description of Artificial Sequence: Synthetic oligonucleotide
  Sense strand starting at position 851 SEQ ID NO: 3394
cuugauucccgacguugua

SEQ ID NO: 264007 - RNA, 19 nt, Artificial Sequence
  Description of Artificial Sequence: Synthetic oligonucleotide
  Antisense strand to SEQ ID NO: 264006
uacaacgucgggaaucaag

SEQ ID NO: 264008 - RNA, 19 nt, Artificial Sequence
  Description of Artificial Sequence: Synthetic oligonucleotide
  Sense strand starting at position 2553 SEQ ID NO: 3394
ccgguugagucuucugcca

SEQ ID NO: 264009 - RNA, 19 nt, Artificial Sequence
  Description of Artificial Sequence: Synthetic oligonucleotide
  Antisense strand to SEQ ID NO: 264008
uggcagaagacucaaccgg

SEQ ID NO: 264010 - RNA, 19 nt, Artificial Sequence
  Description of Artificial Sequence: Synthetic oligonucleotide
  Sense strand starting at position 2631 SEQ ID NO: 3394
ccgguagguguucgcugaa

SEQ ID NO: 264011 - RNA, 19 nt, Artificial Sequence
  Description of Artificial Sequence: Synthetic oligonucleotide
  Antisense strand to SEQ ID NO: 264010
uucagcgaacaccuaccgg

SEQ ID NO: 264012 - RNA, 19 nt, Artificial Sequence
  Description of Artificial Sequence: Synthetic oligonucleotide
  Sense strand starting at position 2634 SEQ ID NO: 3394
guagguguucgcugaaggu

SEQ ID NO: 264013 - RNA, 19 nt, Artificial Sequence
  Description of Artificial Sequence: Synthetic oligonucleotide
  Antisense strand to SEQ ID NO: 264012
accuucagcgaacaccuac

SEQ ID NO: 264014 - RNA, 19 nt, Artificial Sequence
  Description of Artificial Sequence: Synthetic oligonucleotide
  Sense strand starting at position 2637 SEQ ID NO: 3394
gguguucgcugaagguuaa

SEQ ID NO: 264015 - RNA, 19 nt, Artificial Sequence
  Description of Artificial Sequence: Synthetic oligonucleotide
  Antisense strand to SEQ ID NO: 264014
uuaaccuucagcgaacacc

SEQ ID NO: 264016 - RNA, 19 nt, Artificial Sequence
  Description of Artificial Sequence: Synthetic oligonucleotide
  Sense strand starting at position 2648 SEQ ID NO: 3394
aagguuaaccuucguugaa

SEQ ID NO: 264017 - RNA, 19 nt, Artificial Sequence
  Description of Artificial Sequence: Synthetic oligonucleotide
  Antisense strand to SEQ ID NO: 264016
uucaacgaagguuaaccuu

SEQ ID NO: 264018 - RNA, 19 nt, Artificial Sequence
  Description of Artificial Sequence: Synthetic oligonucleotide
  Sense strand starting at position 2649 SEQ ID NO: 3394
agguuaaccuucguugaag

SEQ ID NO: 264019 - RNA, 19 nt, Artificial Sequence
  Description of Artificial Sequence: Synthetic oligonucleotide
  Antisense strand to SEQ ID NO: 264018
cuucaacgaagguuaaccu

SEQ ID NO: 264020 - RNA, 19 nt, Artificial Sequence
  Description of Artificial Sequence: Synthetic oligonucleotide
  Sense strand starting at position 2651 SEQ ID NO: 3394
guuaaccuucguugaagga

SEQ ID NO: 264021 - RNA, 19 nt, Artificial Sequence
  Description of Artificial Sequence: Synthetic oligonucleotide
  Antisense strand to SEQ ID NO: 264020
uccuucaacgaagguuaac

SEQ ID NO: 264022 - RNA, 19 nt, Artificial Sequence
  Description of Artificial Sequence: Synthetic oligonucleotide
  Sense strand starting at position 2652 SEQ ID NO: 3394
uuaaccuucguugaaggaa

SEQ ID NO: 264023 - RNA, 19 nt, Artificial Sequence
  Description of Artificial Sequence: Synthetic oligonucleotide
  Antisense strand to SEQ ID NO: 264022
uuccuucaacgaagguuaa

SEQ ID NO: 264024 - RNA, 19 nt, Artificial Sequence
  Description of Artificial Sequence: Synthetic oligonucleotide
  Sense strand starting at position 2677 SEQ ID NO: 3394
gaaggagagcuuuguguug

SEQ ID NO: 264025 - RNA, 19 nt, Artificial Sequence
  Description of Artificial Sequence: Synthetic oligonucleotide
  Antisense strand to SEQ ID NO: 264024
caacacaaagcucuccuuc

SEQ ID NO: 264026 - RNA, 19 nt, Artificial Sequence
  Description of Artificial Sequence: Synthetic oligonucleotide
  Sense strand starting at position 2683 SEQ ID NO: 3394
gagcuuuguguugaaguug

SEQ ID NO: 264027 - RNA, 19 nt, Artificial Sequence
  Description of Artificial Sequence: Synthetic oligonucleotide
  Antisense strand to SEQ ID NO: 264026
caacuucaacacaaagcuc

SEQ ID NO: 264028 - RNA, 19 nt, Artificial Sequence
  Description of Artificial Sequence: Synthetic oligonucleotide
  Sense strand starting at position 2812 SEQ ID NO: 3394
gcccaauuggcaggagagu

SEQ ID NO: 264029 - RNA, 19 nt, Artificial Sequence
  Description of Artificial Sequence: Synthetic oligonucleotide
  Antisense strand to SEQ ID NO: 264028
acucuccugccaauugggc

SEQ ID NO: 264030 - RNA, 19 nt, Artificial Sequence
  Description of Artificial Sequence: Synthetic oligonucleotide
  Sense strand starting at position 2856 SEQ ID NO: 3394
aagggaggucuuggcauga

SEQ ID NO: 264031 - RNA, 19 nt, Artificial Sequence
  Description of Artificial Sequence: Synthetic oligonucleotide
  Antisense strand to SEQ ID NO: 264030
ucaugccaagaccucccuu

SEQ ID NO: 264032 - RNA, 19 nt, Artificial Sequence
  Description of Artificial Sequence: Synthetic oligonucleotide
  Sense strand starting at position 2860 SEQ ID NO: 3394
gaggucuuggcaugacaga

SEQ ID NO: 264033 - RNA, 19 nt, Artificial Sequence
  Description of Artificial Sequence: Synthetic oligonucleotide
  Antisense strand to SEQ ID NO: 264032
ucugucaugccaagaccuc

SEQ ID NO: 264034 - RNA, 19 nt, Artificial Sequence
  Description of Artificial Sequence: Synthetic oligonucleotide
  Sense strand starting at position 2876 SEQ ID NO: 3394
agaauuugcuuggaaugau

SEQ ID NO: 264035 - RNA, 19 nt, Artificial Sequence
  Description of Artificial Sequence: Synthetic oligonucleotide
  Antisense strand to SEQ ID NO: 264034
aucauuccaagcaaauucu

SEQ ID NO: 264036 - RNA, 19 nt, Artificial Sequence
  Description of Artificial Sequence: Synthetic oligonucleotide
  Sense strand starting at position 2889 SEQ ID NO: 3394
aaugauuagcguugcccaa

SEQ ID NO: 264037 - RNA, 19 nt, Artificial Sequence
  Description of Artificial Sequence: Synthetic oligonucleotide
  Antisense strand to SEQ ID NO: 264036
uugggcaacgcuaaucauu

SEQ ID NO: 264038 - RNA, 19 nt, Artificial Sequence
  Description of Artificial Sequence: Synthetic oligonucleotide
  Sense strand starting at position 2906 SEQ ID NO: 3394
aagggcugucgcugucaga

SEQ ID NO: 264039 - RNA, 19 nt, Artificial Sequence
  Description of Artificial Sequence: Synthetic oligonucleotide
  Antisense strand to SEQ ID NO: 264038
ucugacagcgacagcccuu

SEQ ID NO: 264040 - RNA, 19 nt, Artificial Sequence
  Description of Artificial Sequence: Synthetic oligonucleotide
  Sense strand starting at position 2958 SEQ ID NO: 3394
gaagcagcuccuggagaaa

SEQ ID NO: 264041 - RNA, 19 nt, Artificial Sequence
  Description of Artificial Sequence: Synthetic oligonucleotide
  Antisense strand to SEQ ID NO: 264040
uuucuccaggagcugcuuc

SEQ ID NO: 264042 - RNA, 19 nt, Artificial Sequence
  Description of Artificial Sequence: Synthetic oligonucleotide
  Sense strand starting at position 2983 SEQ ID NO: 3394
guuggagagucgccaugaa

SEQ ID NO: 264043 - RNA, 19 nt, Artificial Sequence
  Description of Artificial Sequence: Synthetic oligonucleotide
  Antisense strand to SEQ ID NO: 264042
uucauggcgacucuccaac

SEQ ID NO: 264044 - RNA, 19 nt, Artificial Sequence
  Description of Artificial Sequence: Synthetic oligonucleotide
  Sense strand starting at position 2986 SEQ ID NO: 3394
ggagagucgccaugaagug

SEQ ID NO: 264045 - RNA, 19 nt, Artificial Sequence
  Description of Artificial Sequence: Synthetic oligonucleotide
  Antisense strand to SEQ ID NO: 264044
cacuucauggcgacucucc

SEQ ID NO: 264046 - RNA, 19 nt, Artificial Sequence
  Description of Artificial Sequence: Synthetic oligonucleotide
  Sense strand starting at position 3053 SEQ ID NO: 3394
auggcagagucagauaaca

SEQ ID NO: 264047 - RNA, 19 nt, Artificial Sequence
  Description of Artificial Sequence: Synthetic oligonucleotide
  Antisense strand to SEQ ID NO: 264046
uguuaucugacucugccau

SEQ ID NO: 264048 - RNA, 19 nt, Artificial Sequence
  Description of Artificial Sequence: Synthetic oligonucleotide
  Sense strand starting at position 3080 SEQ ID NO: 3394
ggagacaccucuugggaau

SEQ ID NO: 264049 - RNA, 19 nt, Artificial Sequence
  Description of Artificial Sequence: Synthetic oligonucleotide
  Antisense strand to SEQ ID NO: 264048
auucccaagaggugucucc

SEQ ID NO: 264050 - RNA, 19 nt, Artificial Sequence
  Description of Artificial Sequence: Synthetic oligonucleotide
  Sense strand starting at position 3091 SEQ ID NO: 3394
uugggaauucucggguuug

SEQ ID NO: 264051 - RNA, 19 nt, Artificial Sequence
  Description of Artificial Sequence: Synthetic oligonucleotide
  Antisense strand to SEQ ID NO: 264050
caaacccgagaauucccaa

SEQ ID NO: 264052 - RNA, 19 nt, Artificial Sequence
  Description of Artificial Sequence: Synthetic oligonucleotide
  Sense strand starting at position 3121 SEQ ID NO: 3394
uuggaaauuuccuagaaau

SEQ ID NO: 264053 - RNA, 19 nt, Artificial Sequence
  Description of Artificial Sequence: Synthetic oligonucleotide
  Antisense strand to SEQ ID NO: 264052
auuucuaggaaauuuccaa

SEQ ID NO: 264054 - RNA, 19 nt, Artificial Sequence
  Description of Artificial Sequence: Synthetic oligonucleotide
  Sense strand starting at position 3177 SEQ ID NO: 3394
agcuucuucugagcagaga

SEQ ID NO: 264055 - RNA, 19 nt, Artificial Sequence
  Description of Artificial Sequence: Synthetic oligonucleotide
  Antisense strand to SEQ ID NO: 264054
ucucugcucagaagaagcu

SEQ ID NO: 264056 - RNA, 19 nt, Artificial Sequence
  Description of Artificial Sequence: Synthetic oligonucleotide
  Sense strand starting at position 3178 SEQ ID NO: 3394
gcuucuucugagcagagau

SEQ ID NO: 264057 - RNA, 19 nt, Artificial Sequence
  Description of Artificial Sequence: Synthetic oligonucleotide
  Antisense strand to SEQ ID NO: 264056
aucucugcucagaagaagc

SEQ ID NO: 264058 - RNA, 19 nt, Artificial Sequence
  Description of Artificial Sequence: Synthetic oligonucleotide
  Sense strand starting at position 3233 SEQ ID NO: 3394
ccgaacaguccacaguuua

SEQ ID NO: 264059 - RNA, 19 nt, Artificial Sequence
  Description of Artificial Sequence: Synthetic oligonucleotide
  Antisense strand to SEQ ID NO: 264058
uaaacuguggacuguucgg

SEQ ID NO: 264060 - RNA, 19 nt, Artificial Sequence
  Description of Artificial Sequence: Synthetic oligonucleotide
  Sense strand starting at position 3247 SEQ ID NO: 3394
guuuaaugcugcuuugauc

SEQ ID NO: 264061 - RNA, 19 nt, Artificial Sequence
  Description of Artificial Sequence: Synthetic oligonucleotide
  Antisense strand to SEQ ID NO: 264060
gaucaaagcagcauuaaac

SEQ ID NO: 264062 - RNA, 19 nt, Artificial Sequence
  Description of Artificial Sequence: Synthetic oligonucleotide
  Sense strand starting at position 3332 SEQ ID NO: 3394
gcaguugauagcuagguua

SEQ ID NO: 264063 - RNA, 19 nt, Artificial Sequence
  Description of Artificial Sequence: Synthetic oligonucleotide
  Antisense strand to SEQ ID NO: 264062
uaaccuagcuaucaacugc

SEQ ID NO: 264064 - RNA, 19 nt, Artificial Sequence
  Description of Artificial Sequence: Synthetic oligonucleotide
  Sense strand starting at position 3334 SEQ ID NO: 3394
aguugauagcuagguuaag

SEQ ID NO: 264065 - RNA, 19 nt, Artificial Sequence
  Description of Artificial Sequence: Synthetic oligonucleotide
  Antisense strand to SEQ ID NO: 264064
cuuaaccuagcuaucaacu

SEQ ID NO: 264066 - RNA, 19 nt, Artificial Sequence
  Description of Artificial Sequence: Synthetic oligonucleotide
  Sense strand starting at position 3335 SEQ ID NO: 3394
guugauagcuagguuaaga

SEQ ID NO: 264067 - RNA, 19 nt, Artificial Sequence
  Description of Artificial Sequence: Synthetic oligonucleotide
  Antisense strand to SEQ ID NO: 264066
ucuuaaccuagcuaucaac

SEQ ID NO: 264068 - RNA, 19 nt, Artificial Sequence
  Description of Artificial Sequence: Synthetic oligonucleotide
  Sense strand starting at position 3340 SEQ ID NO: 3394
uagcuagguuaagaauuga

SEQ ID NO: 264069 - RNA, 19 nt, Artificial Sequence
  Description of Artificial Sequence: Synthetic oligonucleotide
  Antisense strand to SEQ ID NO: 264068
ucaauucuuaaccuagcua

SEQ ID NO: 264070 - RNA, 19 nt, Artificial Sequence
  Description of Artificial Sequence: Synthetic oligonucleotide
  Sense strand starting at position 3535 SEQ ID NO: 3394
gaggcugaguaagagaauu

SEQ ID NO: 264071 - RNA, 19 nt, Artificial Sequence
  Description of Artificial Sequence: Synthetic oligonucleotide
  Antisense strand to SEQ ID NO: 264070
aauucucuuacucagccuc

SEQ ID NO: 264072 - RNA, 19 nt, Artificial Sequence
  Description of Artificial Sequence: Synthetic oligonucleotide
  Sense strand starting at position 76 SEQ ID NO: 3395
gaccaucagagucgggaaa

SEQ ID NO: 264073 - RNA, 19 nt, Artificial Sequence
  Description of Artificial Sequence: Synthetic oligonucleotide
  Antisense strand to SEQ ID NO: 264072
uuucccgacucugaugguc

SEQ ID NO: 264074 - RNA, 19 nt, Artificial Sequence
  Description of Artificial Sequence: Synthetic oligonucleotide
  Sense strand starting at position 109 SEQ ID NO: 3395
cucgaaauggcauauuaac

SEQ ID NO: 264075 - RNA, 19 nt, Artificial Sequence
  Description of Artificial Sequence: Synthetic oligonucleotide
  Antisense strand to SEQ ID NO: 264074
guuaauaugccauuucgag

SEQ ID NO: 264076 - RNA, 19 nt, Artificial Sequence
  Description of Artificial Sequence: Synthetic oligonucleotide
  Sense strand starting at position 118 SEQ ID NO: 3395
gcauauuaacuuuagugca

SEQ ID NO: 264077 - RNA, 19 nt, Artificial Sequence
  Description of Artificial Sequence: Synthetic oligonucleotide
  Antisense strand to SEQ ID NO: 264076
ugcacuaaaguuaauaugc

SEQ ID NO: 264078 - RNA, 19 nt, Artificial Sequence
  Description of Artificial Sequence: Synthetic oligonucleotide
  Sense strand starting at position 176 SEQ ID NO: 3395
uccagaaguuccuugaaau

SEQ ID NO: 264079 - RNA, 19 nt, Artificial Sequence
  Description of Artificial Sequence: Synthetic oligonucleotide
  Antisense strand to SEQ ID NO: 264078
auuucaaggaacuucugga

SEQ ID NO: 264080 - RNA, 19 nt, Artificial Sequence
  Description of Artificial Sequence: Synthetic oligonucleotide
  Sense strand starting at position 177 SEQ ID NO: 3395
ccagaaguuccuugaaauu

SEQ ID NO: 264081 - RNA, 19 nt, Artificial Sequence
  Description of Artificial Sequence: Synthetic oligonucleotide
  Antisense strand to SEQ ID NO: 264080
aauuucaaggaacuucugg

SEQ ID NO: 264082 - RNA, 19 nt, Artificial Sequence
  Description of Artificial Sequence: Synthetic oligonucleotide
  Sense strand starting at position 259 SEQ ID NO: 3395
gccagucaucuacaaagac

SEQ ID NO: 264083 - RNA, 19 nt, Artificial Sequence
  Description of Artificial Sequence: Synthetic oligonucleotide
  Antisense strand to SEQ ID NO: 264082
gucuuuguagaugacuggc

SEQ ID NO: 264084 - RNA, 19 nt, Artificial Sequence
  Description of Artificial Sequence: Synthetic oligonucleotide
  Sense strand starting at position 287 SEQ ID NO: 3395
cccuuauuuguauguuaau

SEQ ID NO: 264085 - RNA, 19 nt, Artificial Sequence
  Description of Artificial Sequence: Synthetic oligonucleotide
  Antisense strand to SEQ ID NO: 264084
auuaacauacaaauaaggg

SEQ ID NO: 264086 - RNA, 19 nt, Artificial Sequence
  Description of Artificial Sequence: Synthetic oligonucleotide
  Sense strand starting at position 605 SEQ ID NO: 3395
aagucauugcgugaacacu

SEQ ID NO: 264087 - RNA, 19 nt, Artificial Sequence
  Description of Artificial Sequence: Synthetic oligonucleotide
  Antisense strand to SEQ ID NO: 264086
aguguucacgcaaugacuu

SEQ ID NO: 264088 - RNA, 19 nt, Artificial Sequence
  Description of Artificial Sequence: Synthetic oligonucleotide
  Sense strand starting at position 636 SEQ ID NO: 3395
aagcauuuccuacgugacu

SEQ ID NO: 264089 - RNA, 19 nt, Artificial Sequence
  Description of Artificial Sequence: Synthetic oligonucleotide
  Antisense strand to SEQ ID NO: 264088
agucacguaggaaaugcuu

SEQ ID NO: 264090 - RNA, 19 nt, Artificial Sequence
  Description of Artificial Sequence: Synthetic oligonucleotide
  Sense strand starting at position 637 SEQ ID NO: 3395
agcauuuccuacgugacua

SEQ ID NO: 264091 - RNA, 19 nt, Artificial Sequence
  Description of Artificial Sequence: Synthetic oligonucleotide
  Antisense strand to SEQ ID NO: 264090
uagucacguaggaaaugcu

SEQ ID NO: 264092 - RNA, 19 nt, Artificial Sequence
  Description of Artificial Sequence: Synthetic oligonucleotide
  Sense strand starting at position 642 SEQ ID NO: 3395
uuccuacgugacuaaucua

SEQ ID NO: 264093 - RNA, 19 nt, Artificial Sequence
  Description of Artificial Sequence: Synthetic oligonucleotide
  Antisense strand to SEQ ID NO: 264092
uagauuagucacguaggaa

SEQ ID NO: 264094 - RNA, 19 nt, Artificial Sequence
  Description of Artificial Sequence: Synthetic oligonucleotide
  Sense strand starting at position 771 SEQ ID NO: 3395
cucuuugaguuggcagaca

SEQ ID NO: 264095 - RNA, 19 nt, Artificial Sequence
  Description of Artificial Sequence: Synthetic oligonucleotide
  Antisense strand to SEQ ID NO: 264094
ugucugccaacucaaagag

SEQ ID NO: 264096 - RNA, 19 nt, Artificial Sequence
  Description of Artificial Sequence: Synthetic oligonucleotide
  Sense strand starting at position 784 SEQ ID NO: 3395
cagacacgucacuggcaaa

SEQ ID NO: 264097 - RNA, 19 nt, Artificial Sequence
  Description of Artificial Sequence: Synthetic oligonucleotide
  Antisense strand to SEQ ID NO: 264096
uuugccagugacgugucug

SEQ ID NO: 264098 - RNA, 19 nt, Artificial Sequence
  Description of Artificial Sequence: Synthetic oligonucleotide
  Sense strand starting at position 812 SEQ ID NO: 3395
agugacaaguuacuccaaa

SEQ ID NO: 264099 - RNA, 19 nt, Artificial Sequence
  Description of Artificial Sequence: Synthetic oligonucleotide
  Antisense strand to SEQ ID NO: 264098
uuuggaguaacuugucacu

SEQ ID NO: 264100 - RNA, 19 nt, Artificial Sequence
  Description of Artificial Sequence: Synthetic oligonucleotide
  Sense strand starting at position 813 SEQ ID NO: 3395
gugacaaguuacuccaaau

SEQ ID NO: 264101 - RNA, 19 nt, Artificial Sequence
  Description of Artificial Sequence: Synthetic oligonucleotide
  Antisense strand to SEQ ID NO: 264100
auuuggaguaacuugucac

SEQ ID NO: 264102 - RNA, 19 nt, Artificial Sequence
  Description of Artificial Sequence: Synthetic oligonucleotide
  Sense strand starting at position 927 SEQ ID NO: 3395
acgauuccucccgaucacu

SEQ ID NO: 264103 - RNA, 19 nt, Artificial Sequence
  Description of Artificial Sequence: Synthetic oligonucleotide
  Antisense strand to SEQ ID NO: 264102
agugaucgggaggaaucgu

SEQ ID NO: 264104 - RNA, 19 nt, Artificial Sequence
  Description of Artificial Sequence: Synthetic oligonucleotide
  Sense strand starting at position 953 SEQ ID NO: 3395
aagcuuggucugcagaauc

SEQ ID NO: 264105 - RNA, 19 nt, Artificial Sequence
  Description of Artificial Sequence: Synthetic oligonucleotide
  Antisense strand to SEQ ID NO: 264104
gauucugcagaccaagcuu

SEQ ID NO: 264106 - RNA, 19 nt, Artificial Sequence
  Description of Artificial Sequence: Synthetic oligonucleotide
  Sense strand starting at position 960 SEQ ID NO: 3395
gucugcagaaucgacaaau

SEQ ID NO: 264107 - RNA, 19 nt, Artificial Sequence
  Description of Artificial Sequence: Synthetic oligonucleotide
  Antisense strand to SEQ ID NO: 264106
auuugucgauucugcagac

SEQ ID NO: 264108 - RNA, 19 nt, Artificial Sequence
  Description of Artificial Sequence: Synthetic oligonucleotide
  Sense strand starting at position 970 SEQ ID NO: 3395
ucgacaaauguauauucca

SEQ ID NO: 264109 - RNA, 19 nt, Artificial Sequence
  Description of Artificial Sequence: Synthetic oligonucleotide
  Antisense strand to SEQ ID NO: 264108
uggaauauacauuugucga

SEQ ID NO: 264110 - RNA, 19 nt, Artificial Sequence
  Description of Artificial Sequence: Synthetic oligonucleotide
  Sense strand starting at position 1074 SEQ ID NO: 3395
guuugcagaccacaaagau

SEQ ID NO: 264111 - RNA, 19 nt, Artificial Sequence
  Description of Artificial Sequence: Synthetic oligonucleotide
  Antisense strand to SEQ ID NO: 264110
aucuuuguggucugcaaac

SEQ ID NO: 264112 - RNA, 19 nt, Artificial Sequence
  Description of Artificial Sequence: Synthetic oligonucleotide
  Sense strand starting at position 1083 SEQ ID NO: 3395
ccacaaagauuugauagua

SEQ ID NO: 264113 - RNA, 19 nt, Artificial Sequence
  Description of Artificial Sequence: Synthetic oligonucleotide
  Antisense strand to SEQ ID NO: 264112
uacuaucaaaucuuugugg

SEQ ID NO: 264114 - RNA, 19 nt, Artificial Sequence
  Description of Artificial Sequence: Synthetic oligonucleotide
  Sense strand starting at position 1107 SEQ ID NO: 3395
aguguuucuccaugauaag

SEQ ID NO: 264115 - RNA, 19 nt, Artificial Sequence
  Description of Artificial Sequence: Synthetic oligonucleotide
  Antisense strand to SEQ ID NO: 264114
cuuaucauggagaaacacu

SEQ ID NO: 264116 - RNA, 19 nt, Artificial Sequence
  Description of Artificial Sequence: Synthetic oligonucleotide
  Sense strand starting at position 1108 SEQ ID NO: 3395
guguuucuccaugauaagg

SEQ ID NO: 264117 - RNA, 19 nt, Artificial Sequence
  Description of Artificial Sequence: Synthetic oligonucleotide
  Antisense strand to SEQ ID NO: 264116
ccuuaucauggagaaacac

SEQ ID NO: 264118 - RNA, 19 nt, Artificial Sequence
  Description of Artificial Sequence: Synthetic oligonucleotide
  Sense strand starting at position 1549 SEQ ID NO: 3395
cacagaaugucuccgggaa

SEQ ID NO: 264119 - RNA, 19 nt, Artificial Sequence
  Description of Artificial Sequence: Synthetic oligonucleotide
  Antisense strand to SEQ ID NO: 264118
uucccggagacauucugug

SEQ ID NO: 264120 - RNA, 19 nt, Artificial Sequence
  Description of Artificial Sequence: Synthetic oligonucleotide
  Sense strand starting at position 1550 SEQ ID NO: 3395
acagaaugucuccgggaau

SEQ ID NO: 264121 - RNA, 19 nt, Artificial Sequence
  Description of Artificial Sequence: Synthetic oligonucleotide
  Antisense strand to SEQ ID NO: 264120
auucccggagacauucugu

SEQ ID NO: 264122 - RNA, 19 nt, Artificial Sequence
  Description of Artificial Sequence: Synthetic oligonucleotide
  Sense strand starting at position 2479 SEQ ID NO: 3395
cugggaagguuugcaauua

SEQ ID NO: 264123 - RNA, 19 nt, Artificial Sequence
  Description of Artificial Sequence: Synthetic oligonucleotide
  Antisense strand to SEQ ID NO: 264122
uaauugcaaaccuucccag

SEQ ID NO: 264124 - RNA, 19 nt, Artificial Sequence
  Description of Artificial Sequence: Synthetic oligonucleotide
  Sense strand starting at position 2516 SEQ ID NO: 3395
ugagguucccgauauagua

SEQ ID NO: 264125 - RNA, 19 nt, Artificial Sequence
  Description of Artificial Sequence: Synthetic oligonucleotide
  Antisense strand to SEQ ID NO: 264124
uacuauaucgggaaccuca

SEQ ID NO: 264126 - RNA, 19 nt, Artificial Sequence
  Description of Artificial Sequence: Synthetic oligonucleotide
  Sense strand starting at position 2518 SEQ ID NO: 3395
agguucccgauauaguauu

SEQ ID NO: 264127 - RNA, 19 nt, Artificial Sequence
  Description of Artificial Sequence: Synthetic oligonucleotide
  Antisense strand to SEQ ID NO: 264126
aauacuauaucgggaaccu

SEQ ID NO: 264128 - RNA, 19 nt, Artificial Sequence
  Description of Artificial Sequence: Synthetic oligonucleotide
  Sense strand starting at position 2569 SEQ ID NO: 3395
cuaggaggcugacuuuaaa

SEQ ID NO: 264129 - RNA, 19 nt, Artificial Sequence
  Description of Artificial Sequence: Synthetic oligonucleotide
  Antisense strand to SEQ ID NO: 264128
uuuaaagucagccuccuag

SEQ ID NO: 264130 - RNA, 19 nt, Artificial Sequence
  Description of Artificial Sequence: Synthetic oligonucleotide
  Sense strand starting at position 3026 SEQ ID NO: 3395
uagaguucccaaggcacaa

SEQ ID NO: 264131 - RNA, 19 nt, Artificial Sequence
  Description of Artificial Sequence: Synthetic oligonucleotide
  Antisense strand to SEQ ID NO: 264130
uugugccuugggaacucua

SEQ ID NO: 264132 - RNA, 19 nt, Artificial Sequence
  Description of Artificial Sequence: Synthetic oligonucleotide
  Sense strand starting at position 3523 SEQ ID NO: 3395
cauuguguucuugaagauu

SEQ ID NO: 264133 - RNA, 19 nt, Artificial Sequence
  Description of Artificial Sequence: Synthetic oligonucleotide
  Antisense strand to SEQ ID NO: 264132
aaucuucaagaacacaaug

SEQ ID NO: 264134 - RNA, 19 nt, Artificial Sequence
  Description of Artificial Sequence: Synthetic oligonucleotide
  Sense strand starting at position 3526 SEQ ID NO: 3395
uguguucuugaagauuaga

SEQ ID NO: 264135 - RNA, 19 nt, Artificial Sequence
  Description of Artificial Sequence: Synthetic oligonucleotide
  Antisense strand to SEQ ID NO: 264134
ucuaaucuucaagaacaca

SEQ ID NO: 264136 - RNA, 19 nt, Artificial Sequence
  Description of Artificial Sequence: Synthetic oligonucleotide
  Sense strand starting at position 3684 SEQ ID NO: 3395
caaggcauucuuugagaug

SEQ ID NO: 264137 - RNA, 19 nt, Artificial Sequence
  Description of Artificial Sequence: Synthetic oligonucleotide
  Antisense strand to SEQ ID NO: 264136
caucucaaagaaugccuug

SEQ ID NO: 264138 - RNA, 19 nt, Artificial Sequence
  Description of Artificial Sequence: Synthetic oligonucleotide
  Sense strand starting at position 3831 SEQ ID NO: 3395
ugaguaaugccgcaaugga

SEQ ID NO: 264139 - RNA, 19 nt, Artificial Sequence
  Description of Artificial Sequence: Synthetic oligonucleotide
  Antisense strand to SEQ ID NO: 264138
uccauugcggcauuacuca

SEQ ID NO: 264140 - RNA, 19 nt, Artificial Sequence
  Description of Artificial Sequence: Synthetic oligonucleotide
  Sense strand starting at position 3839 SEQ ID NO: 3395
gccgcaauggaauacauau

SEQ ID NO: 264141 - RNA, 19 nt, Artificial Sequence
  Description of Artificial Sequence: Synthetic oligonucleotide
  Antisense strand to SEQ ID NO: 264140
auauguauuccauugcggc

SEQ ID NO: 264142 - RNA, 19 nt, Artificial Sequence
  Description of Artificial Sequence: Synthetic oligonucleotide
  Sense strand starting at position 3904 SEQ ID NO: 3395
uggaguaguugaguugaua

SEQ ID NO: 264143 - RNA, 19 nt, Artificial Sequence
  Description of Artificial Sequence: Synthetic oligonucleotide
  Antisense strand to SEQ ID NO: 264142
uaucaacucaacuacucca

SEQ ID NO: 264144 - RNA, 19 nt, Artificial Sequence
  Description of Artificial Sequence: Synthetic oligonucleotide
  Sense strand starting at position 3929 SEQ ID NO: 3395
augaauaagucugcuuaau

SEQ ID NO: 264145 - RNA, 19 nt, Artificial Sequence
  Description of Artificial Sequence: Synthetic oligonucleotide
  Antisense strand to SEQ ID NO: 264144
auuaagcagacuuauucau

SEQ ID NO: 264146 - RNA, 19 nt, Artificial Sequence
  Description of Artificial Sequence: Synthetic oligonucleotide
  Sense strand starting at position 3965 SEQ ID NO: 3395
ugcagaaaucacugcugga

SEQ ID NO: 264147 - RNA, 19 nt, Artificial Sequence
  Description of Artificial Sequence: Synthetic oligonucleotide
  Antisense strand to SEQ ID NO: 264146
uccagcagugauuucugca

SEQ ID NO: 264148 - RNA, 19 nt, Artificial Sequence
  Description of Artificial Sequence: Synthetic oligonucleotide
  Sense strand starting at position 3969 SEQ ID NO: 3395
gaaaucacugcuggaaguu

SEQ ID NO: 264149 - RNA, 19 nt, Artificial Sequence
  Description of Artificial Sequence: Synthetic oligonucleotide
  Antisense strand to SEQ ID NO: 264148
aacuuccagcagugauuuc

SEQ ID NO: 264150 - RNA, 19 nt, Artificial Sequence
  Description of Artificial Sequence: Synthetic oligonucleotide
  Sense strand starting at position 3970 SEQ ID NO: 3395
aaaucacugcuggaaguuu

SEQ ID NO: 264151 - RNA, 19 nt, Artificial Sequence
  Description of Artificial Sequence: Synthetic oligonucleotide
  Antisense strand to SEQ ID NO: 264150
aaacuuccagcagugauuu

SEQ ID NO: 264152 - RNA, 19 nt, Artificial Sequence
  Description of Artificial Sequence: Synthetic oligonucleotide
  Sense strand starting at position 2 SEQ ID NO: 3397
uuuggaugaagguauugua

SEQ ID NO: 264153 - RNA, 19 nt, Artificial Sequence
  Description of Artificial Sequence: Synthetic oligonucleotide
  Antisense strand to SEQ ID NO: 264152
uacaauaccuucauccaaa

SEQ ID NO: 264154 - RNA, 19 nt, Artificial Sequence
  Description of Artificial Sequence: Synthetic oligonucleotide
  Sense strand starting at position 11 SEQ ID NO: 3397
agguauuguagaugccuuu

SEQ ID NO: 264155 - RNA, 19 nt, Artificial Sequence
  Description of Artificial Sequence: Synthetic oligonucleotide
  Antisense strand to SEQ ID NO: 264154
aaaggcaucuacaauaccu

SEQ ID NO: 264156 - RNA, 19 nt, Artificial Sequence
  Description of Artificial Sequence: Synthetic oligonucleotide
  Sense strand starting at position 18 SEQ ID NO: 3397
guagaugccuuucugccaa

SEQ ID NO: 264157 - RNA, 19 nt, Artificial Sequence
  Description of Artificial Sequence: Synthetic oligonucleotide
  Antisense strand to SEQ ID NO: 264156
uuggcagaaaggcaucuac

SEQ ID NO: 264158 - RNA, 19 nt, Artificial Sequence
  Description of Artificial Sequence: Synthetic oligonucleotide
  Sense strand starting at position 366 SEQ ID NO: 3397
cucacugacucagaauaga

SEQ ID NO: 264159 - RNA, 19 nt, Artificial Sequence
  Description of Artificial Sequence: Synthetic oligonucleotide
  Antisense strand to SEQ ID NO: 264158
ucuauucugagucagugag

SEQ ID NO: 264160 - RNA, 19 nt, Artificial Sequence
  Description of Artificial Sequence: Synthetic oligonucleotide
  Sense strand starting at position 762 SEQ ID NO: 3397
acugcaaaggucuguuaca

SEQ ID NO: 264161 - RNA, 19 nt, Artificial Sequence
  Description of Artificial Sequence: Synthetic oligonucleotide
  Antisense strand to SEQ ID NO: 264160
uguaacagaccuuugcagu

SEQ ID NO: 264162 - RNA, 19 nt, Artificial Sequence
  Description of Artificial Sequence: Synthetic oligonucleotide
  Sense strand starting at position 763 SEQ ID NO: 3397
cugcaaaggucuguuacau

SEQ ID NO: 264163 - RNA, 19 nt, Artificial Sequence
  Description of Artificial Sequence: Synthetic oligonucleotide
  Antisense strand to SEQ ID NO: 264162
auguaacagaccuuugcag

SEQ ID NO: 264164 - RNA, 19 nt, Artificial Sequence
  Description of Artificial Sequence: Synthetic oligonucleotide
  Sense strand starting at position 2204 SEQ ID NO: 3397
gcagcaguucuguucgguu

SEQ ID NO: 264165 - RNA, 19 nt, Artificial Sequence
  Description of Artificial Sequence: Synthetic oligonucleotide
  Antisense strand to SEQ ID NO: 264164
aaccgaacagaacugcugc

SEQ ID NO: 264166 - RNA, 19 nt, Artificial Sequence
  Description of Artificial Sequence: Synthetic oligonucleotide
  Sense strand starting at position 2334 SEQ ID NO: 3397
cgaggaacgguagaguuua

SEQ ID NO: 264167 - RNA, 19 nt, Artificial Sequence
  Description of Artificial Sequence: Synthetic oligonucleotide
  Antisense strand to SEQ ID NO: 264166
uaaacucuaccguuccucg

SEQ ID NO: 264168 - RNA, 19 nt, Artificial Sequence
  Description of Artificial Sequence: Synthetic oligonucleotide
  Sense strand starting at position 2346 SEQ ID NO: 3397
gaguuuagaaccugugagu

SEQ ID NO: 264169 - RNA, 19 nt, Artificial Sequence
  Description of Artificial Sequence: Synthetic oligonucleotide
  Antisense strand to SEQ ID NO: 264168
acucacagguucuaaacuc

SEQ ID NO: 264170 - RNA, 19 nt, Artificial Sequence
  Description of Artificial Sequence: Synthetic oligonucleotide
  Sense strand starting at position 2352 SEQ ID NO: 3397
agaaccugugaguacguua

SEQ ID NO: 264171 - RNA, 19 nt, Artificial Sequence
  Description of Artificial Sequence: Synthetic oligonucleotide
  Antisense strand to SEQ ID NO: 264170
uaacguacucacagguucu

SEQ ID NO: 264172 - RNA, 19 nt, Artificial Sequence
  Description of Artificial Sequence: Synthetic oligonucleotide
  Sense strand starting at position 2355 SEQ ID NO: 3397
accugugaguacguuagaa

SEQ ID NO: 264173 - RNA, 19 nt, Artificial Sequence
  Description of Artificial Sequence: Synthetic oligonucleotide
  Antisense strand to SEQ ID NO: 264172
uucuaacguacucacaggu

SEQ ID NO: 264174 - RNA, 19 nt, Artificial Sequence
  Description of Artificial Sequence: Synthetic oligonucleotide
  Sense strand starting at position 2357 SEQ ID NO: 3397
cugugaguacguuagaaag

SEQ ID NO: 264175 - RNA, 19 nt, Artificial Sequence
  Description of Artificial Sequence: Synthetic oligonucleotide
  Antisense strand to SEQ ID NO: 264174
cuuucuaacguacucacag

SEQ ID NO: 264176 - RNA, 19 nt, Artificial Sequence
  Description of Artificial Sequence: Synthetic oligonucleotide
  Sense strand starting at position 2372 SEQ ID NO: 3397
aaaguucgcagucgaggaa

SEQ ID NO: 264177 - RNA, 19 nt, Artificial Sequence
  Description of Artificial Sequence: Synthetic oligonucleotide
  Antisense strand to SEQ ID NO: 264176
uuccucgacugcgaacuuu

SEQ ID NO: 264178 - RNA, 19 nt, Artificial Sequence
  Description of Artificial Sequence: Synthetic oligonucleotide
  Sense strand starting at position 2546 SEQ ID NO: 3397
ccagaaagaugagguaauu

SEQ ID NO: 264179 - RNA, 19 nt, Artificial Sequence
  Description of Artificial Sequence: Synthetic oligonucleotide
  Antisense strand to SEQ ID NO: 264178
aauuaccucaucuuucugg

SEQ ID NO: 264180 - RNA, 19 nt, Artificial Sequence
  Description of Artificial Sequence: Synthetic oligonucleotide
  Sense strand starting at position 2622 SEQ ID NO: 3397
gugggcuuccacuguguaa

SEQ ID NO: 264181 - RNA, 19 nt, Artificial Sequence
  Description of Artificial Sequence: Synthetic oligonucleotide
  Antisense strand to SEQ ID NO: 264180
uuacacaguggaagcccac

SEQ ID NO: 264182 - RNA, 19 nt, Artificial Sequence
  Description of Artificial Sequence: Synthetic oligonucleotide
  Sense strand starting at position 2624 SEQ ID NO: 3397
gggcuuccacuguguaaug

SEQ ID NO: 264183 - RNA, 19 nt, Artificial Sequence
  Description of Artificial Sequence: Synthetic oligonucleotide
  Antisense strand to SEQ ID NO: 264182
cauuacacaguggaagccc

SEQ ID NO: 264184 - RNA, 19 nt, Artificial Sequence
  Description of Artificial Sequence: Synthetic oligonucleotide
  Sense strand starting at position 2635 SEQ ID NO: 3397
guguaaugcuaagcagaua

SEQ ID NO: 264185 - RNA, 19 nt, Artificial Sequence
  Description of Artificial Sequence: Synthetic oligonucleotide
  Antisense strand to SEQ ID NO: 264184
uaucugcuuagcauuacac

SEQ ID NO: 264186 - RNA, 19 nt, Artificial Sequence
  Description of Artificial Sequence: Synthetic oligonucleotide
  Sense strand starting at position 2647 SEQ ID NO: 3397
gcagauaggacguaaauuc

SEQ ID NO: 264187 - RNA, 19 nt, Artificial Sequence
  Description of Artificial Sequence: Synthetic oligonucleotide
  Antisense strand to SEQ ID NO: 264186
gaauuuacguccuaucugc

SEQ ID NO: 264188 - RNA, 19 nt, Artificial Sequence
  Description of Artificial Sequence: Synthetic oligonucleotide
  Sense strand starting at position 2654 SEQ ID NO: 3397
ggacguaaauuccuuugca

SEQ ID NO: 264189 - RNA, 19 nt, Artificial Sequence
  Description of Artificial Sequence: Synthetic oligonucleotide
  Antisense strand to SEQ ID NO: 264188
ugcaaaggaauuuacgucc

SEQ ID NO: 264190 - RNA, 19 nt, Artificial Sequence
  Description of Artificial Sequence: Synthetic oligonucleotide
  Sense strand starting at position 2655 SEQ ID NO: 3397
gacguaaauuccuuugcag

SEQ ID NO: 264191 - RNA, 19 nt, Artificial Sequence
  Description of Artificial Sequence: Synthetic oligonucleotide
  Antisense strand to SEQ ID NO: 264190
cugcaaaggaauuuacguc

SEQ ID NO: 264192 - RNA, 19 nt, Artificial Sequence
  Description of Artificial Sequence: Synthetic oligonucleotide
  Sense strand starting at position 2657 SEQ ID NO: 3397
cguaaauuccuuugcagac

SEQ ID NO: 264193 - RNA, 19 nt, Artificial Sequence
  Description of Artificial Sequence: Synthetic oligonucleotide
  Antisense strand to SEQ ID NO: 264192
gucugcaaaggaauuuacg

SEQ ID NO: 264194 - RNA, 19 nt, Artificial Sequence
  Description of Artificial Sequence: Synthetic oligonucleotide
  Sense strand starting at position 2658 SEQ ID NO: 3397
guaaauuccuuugcagacu

SEQ ID NO: 264195 - RNA, 19 nt, Artificial Sequence
  Description of Artificial Sequence: Synthetic oligonucleotide
  Antisense strand to SEQ ID NO: 264194
agucugcaaaggaauuuac

SEQ ID NO: 264196 - RNA, 19 nt, Artificial Sequence
  Description of Artificial Sequence: Synthetic oligonucleotide
  Sense strand starting at position 2861 SEQ ID NO: 3397
gagcaugugcuuuagagac

SEQ ID NO: 264197 - RNA, 19 nt, Artificial Sequence
  Description of Artificial Sequence: Synthetic oligonucleotide
  Antisense strand to SEQ ID NO: 264196
gucucuaaagcacaugcuc

SEQ ID NO: 264198 - RNA, 19 nt, Artificial Sequence
  Description of Artificial Sequence: Synthetic oligonucleotide
  Sense strand starting at position 2895 SEQ ID NO: 3397
cuauuuacuugugagagcu

SEQ ID NO: 264199 - RNA, 19 nt, Artificial Sequence
  Description of Artificial Sequence: Synthetic oligonucleotide
  Antisense strand to SEQ ID NO: 264198
agcucucacaaguaaauag

SEQ ID NO: 264200 - RNA, 19 nt, Artificial Sequence
  Description of Artificial Sequence: Synthetic oligonucleotide
  Sense strand starting at position 2897 SEQ ID NO: 3397
auuuacuugugagagcuuu

SEQ ID NO: 264201 - RNA, 19 nt, Artificial Sequence
  Description of Artificial Sequence: Synthetic oligonucleotide
  Antisense strand to SEQ ID NO: 264200
aaagcucucacaaguaaau

SEQ ID NO: 264202 - RNA, 19 nt, Artificial Sequence
  Description of Artificial Sequence: Synthetic oligonucleotide
  Sense strand starting at position 2903 SEQ ID NO: 3397
uugugagagcuuuagguca

SEQ ID NO: 264203 - RNA, 19 nt, Artificial Sequence
  Description of Artificial Sequence: Synthetic oligonucleotide
  Antisense strand to SEQ ID NO: 264202
ugaccuaaagcucucacaa

SEQ ID NO: 264204 - RNA, 19 nt, Artificial Sequence
  Description of Artificial Sequence: Synthetic oligonucleotide
  Sense strand starting at position 2968 SEQ ID NO: 3397
ugccuagcagaagauugau

SEQ ID NO: 264205 - RNA, 19 nt, Artificial Sequence
  Description of Artificial Sequence: Synthetic oligonucleotide
  Antisense strand to SEQ ID NO: 264204
aucaaucuucugcuaggca

SEQ ID NO: 264206 - RNA, 19 nt, Artificial Sequence
  Description of Artificial Sequence: Synthetic oligonucleotide
  Sense strand starting at position 2971 SEQ ID NO: 3397
cuagcagaagauugauuaa

SEQ ID NO: 264207 - RNA, 19 nt, Artificial Sequence
  Description of Artificial Sequence: Synthetic oligonucleotide
  Antisense strand to SEQ ID NO: 264206
uuaaucaaucuucugcuag

SEQ ID NO: 264208 - RNA, 19 nt, Artificial Sequence
  Description of Artificial Sequence: Synthetic oligonucleotide
  Sense strand starting at position 3006 SEQ ID NO: 3397
ccaacuagugccuagcaaa

SEQ ID NO: 264209 - RNA, 19 nt, Artificial Sequence
  Description of Artificial Sequence: Synthetic oligonucleotide
  Antisense strand to SEQ ID NO: 264208
uuugcuaggcacuaguugg

SEQ ID NO: 264210 - RNA, 19 nt, Artificial Sequence
  Description of Artificial Sequence: Synthetic oligonucleotide
  Sense strand starting at position 3177 SEQ ID NO: 3397
uuaacuuccagugguguca

SEQ ID NO: 264211 - RNA, 19 nt, Artificial Sequence
  Description of Artificial Sequence: Synthetic oligonucleotide
  Antisense strand to SEQ ID NO: 264210
ugacaccacuggaaguuaa

SEQ ID NO: 264212 - RNA, 19 nt, Artificial Sequence
  Description of Artificial Sequence: Synthetic oligonucleotide
  Sense strand starting at position 3264 SEQ ID NO: 3397
ucuaguuaauucuugguga

SEQ ID NO: 264213 - RNA, 19 nt, Artificial Sequence
  Description of Artificial Sequence: Synthetic oligonucleotide
  Antisense strand to SEQ ID NO: 264212
ucaccaagaauuaacuaga

SEQ ID NO: 264214 - RNA, 19 nt, Artificial Sequence
  Description of Artificial Sequence: Synthetic oligonucleotide
  Sense strand starting at position 3266 SEQ ID NO: 3397
uaguuaauucuuggugaug

SEQ ID NO: 264215 - RNA, 19 nt, Artificial Sequence
  Description of Artificial Sequence: Synthetic oligonucleotide
  Antisense strand to SEQ ID NO: 264214
caucaccaagaauuaacua

SEQ ID NO: 264216 - RNA, 19 nt, Artificial Sequence
  Description of Artificial Sequence: Synthetic oligonucleotide
  Sense strand starting at position 3267 SEQ ID NO: 3397
aguuaauucuuggugauga

SEQ ID NO: 264217 - RNA, 19 nt, Artificial Sequence
  Description of Artificial Sequence: Synthetic oligonucleotide
  Antisense strand to SEQ ID NO: 264216
ucaucaccaagaauuaacu

SEQ ID NO: 264218 - RNA, 19 nt, Artificial Sequence
  Description of Artificial Sequence: Synthetic oligonucleotide
  Sense strand starting at position 3277 SEQ ID NO: 3397
uggugaugauaacagaaau

SEQ ID NO: 264219 - RNA, 19 nt, Artificial Sequence
  Description of Artificial Sequence: Synthetic oligonucleotide
  Antisense strand to SEQ ID NO: 264218
auuucuguuaucaucacca

SEQ ID NO: 264220 - RNA, 19 nt, Artificial Sequence
  Description of Artificial Sequence: Synthetic oligonucleotide
  Sense strand starting at position 3335 SEQ ID NO: 3397
cuuucugaguaucuuuaga

SEQ ID NO: 264221 - RNA, 19 nt, Artificial Sequence
  Description of Artificial Sequence: Synthetic oligonucleotide
  Antisense strand to SEQ ID NO: 264220
ucuaaagauacucagaaag

SEQ ID NO: 264222 - RNA, 19 nt, Artificial Sequence
  Description of Artificial Sequence: Synthetic oligonucleotide
  Sense strand starting at position 3337 SEQ ID NO: 3397
uucugaguaucuuuagauc

SEQ ID NO: 264223 - RNA, 19 nt, Artificial Sequence
  Description of Artificial Sequence: Synthetic oligonucleotide
  Antisense strand to SEQ ID NO: 264222
gaucuaaagauacucagaa

SEQ ID NO: 264224 - RNA, 19 nt, Artificial Sequence
  Description of Artificial Sequence: Synthetic oligonucleotide
  Sense strand starting at position 3517 SEQ ID NO: 3397
ugaugucauacuggaaagu

SEQ ID NO: 264225 - RNA, 19 nt, Artificial Sequence
  Description of Artificial Sequence: Synthetic oligonucleotide
  Antisense strand to SEQ ID NO: 264224
acuuuccaguaugacauca

SEQ ID NO: 264226 - RNA, 19 nt, Artificial Sequence
  Description of Artificial Sequence: Synthetic oligonucleotide
  Sense strand starting at position 3839 SEQ ID NO: 3397
aagaguuacggccaagagu

SEQ ID NO: 264227 - RNA, 19 nt, Artificial Sequence
  Description of Artificial Sequence: Synthetic oligonucleotide
  Antisense strand to SEQ ID NO: 264226
acucuuggccguaacucuu

SEQ ID NO: 264228 - RNA, 19 nt, Artificial Sequence
  Description of Artificial Sequence: Synthetic oligonucleotide
  Sense strand starting at position 3850 SEQ ID NO: 3397
ccaagaguuugggcaaaga

SEQ ID NO: 264229 - RNA, 19 nt, Artificial Sequence
  Description of Artificial Sequence: Synthetic oligonucleotide
  Antisense strand to SEQ ID NO: 264228
ucuuugcccaaacucuugg

SEQ ID NO: 264230 - RNA, 19 nt, Artificial Sequence
  Description of Artificial Sequence: Synthetic oligonucleotide
  Sense strand starting at position 3930 SEQ ID NO: 3397
ggcuaauuauaugaacauu

SEQ ID NO: 264231 - RNA, 19 nt, Artificial Sequence
  Description of Artificial Sequence: Synthetic oligonucleotide
  Antisense strand to SEQ ID NO: 264230
aauguucauauaauuagcc

SEQ ID NO: 264232 - RNA, 19 nt, Artificial Sequence
  Description of Artificial Sequence: Synthetic oligonucleotide
  Sense strand starting at position 65 SEQ ID NO: 3396
uuuggaugaagguauugua

SEQ ID NO: 264233 - RNA, 19 nt, Artificial Sequence
  Description of Artificial Sequence: Synthetic oligonucleotide
  Antisense strand to SEQ ID NO: 264232
uacaauaccuucauccaaa

SEQ ID NO: 264234 - RNA, 19 nt, Artificial Sequence
  Description of Artificial Sequence: Synthetic oligonucleotide
  Sense strand starting at position 74 SEQ ID NO: 3396
agguauuguagaugccuuu

SEQ ID NO: 264235 - RNA, 19 nt, Artificial Sequence
  Description of Artificial Sequence: Synthetic oligonucleotide
  Antisense strand to SEQ ID NO: 264234
aaaggcaucuacaauaccu

SEQ ID NO: 264236 - RNA, 19 nt, Artificial Sequence
  Description of Artificial Sequence: Synthetic oligonucleotide
  Sense strand starting at position 81 SEQ ID NO: 3396
guagaugccuuucugccaa

SEQ ID NO: 264237 - RNA, 19 nt, Artificial Sequence
  Description of Artificial Sequence: Synthetic oligonucleotide
  Antisense strand to SEQ ID NO: 264236
uuggcagaaaggcaucuac

SEQ ID NO: 264238 - RNA, 19 nt, Artificial Sequence
  Description of Artificial Sequence: Synthetic oligonucleotide
  Sense strand starting at position 429 SEQ ID NO: 3396
cucacugacucagaauaga

SEQ ID NO: 264239 - RNA, 19 nt, Artificial Sequence
  Description of Artificial Sequence: Synthetic oligonucleotide
  Antisense strand to SEQ ID NO: 264238
ucuauucugagucagugag

SEQ ID NO: 264240 - RNA, 19 nt, Artificial Sequence
  Description of Artificial Sequence: Synthetic oligonucleotide
  Sense strand starting at position 825 SEQ ID NO: 3396
acugcaaaggucuguuaca

SEQ ID NO: 264241 - RNA, 19 nt, Artificial Sequence
  Description of Artificial Sequence: Synthetic oligonucleotide
  Antisense strand to SEQ ID NO: 264240
uguaacagaccuuugcagu

SEQ ID NO: 264242 - RNA, 19 nt, Artificial Sequence
  Description of Artificial Sequence: Synthetic oligonucleotide
  Sense strand starting at position 826 SEQ ID NO: 3396
cugcaaaggucuguuacau

SEQ ID NO: 264243 - RNA, 19 nt, Artificial Sequence
  Description of Artificial Sequence: Synthetic oligonucleotide
  Antisense strand to SEQ ID NO: 264242
auguaacagaccuuugcag

SEQ ID NO: 264244 - RNA, 19 nt, Artificial Sequence
  Description of Artificial Sequence: Synthetic oligonucleotide
  Sense strand starting at position 2267 SEQ ID NO: 3396
gcagcaguucuguucgguu

SEQ ID NO: 264245 - RNA, 19 nt, Artificial Sequence
  Description of Artificial Sequence: Synthetic oligonucleotide
  Antisense strand to SEQ ID NO: 264244
aaccgaacagaacugcugc

SEQ ID NO: 264246 - RNA, 19 nt, Artificial Sequence
  Description of Artificial Sequence: Synthetic oligonucleotide
  Sense strand starting at position 2397 SEQ ID NO: 3396
cgaggaacgguagaguuua

SEQ ID NO: 264247 - RNA, 19 nt, Artificial Sequence
  Description of Artificial Sequence: Synthetic oligonucleotide
  Antisense strand to SEQ ID NO: 264246
uaaacucuaccguuccucg

SEQ ID NO: 264248 - RNA, 19 nt, Artificial Sequence
  Description of Artificial Sequence: Synthetic oligonucleotide
  Sense strand starting at position 2409 SEQ ID NO: 3396
gaguuuagaaccugugagu

SEQ ID NO: 264249 - RNA, 19 nt, Artificial Sequence
  Description of Artificial Sequence: Synthetic oligonucleotide
  Antisense strand to SEQ ID NO: 264248
acucacagguucuaaacuc

SEQ ID NO: 264250 - RNA, 19 nt, Artificial Sequence
  Description of Artificial Sequence: Synthetic oligonucleotide
  Sense strand starting at position 2415 SEQ ID NO: 3396
agaaccugugaguacguua

SEQ ID NO: 264251 - RNA, 19 nt, Artificial Sequence
  Description of Artificial Sequence: Synthetic oligonucleotide
  Antisense strand to SEQ ID NO: 264250
uaacguacucacagguucu

SEQ ID NO: 264252 - RNA, 19 nt, Artificial Sequence
  Description of Artificial Sequence: Synthetic oligonucleotide
  Sense strand starting at position 2418 SEQ ID NO: 3396
accugugaguacguuagaa

SEQ ID NO: 264253 - RNA, 19 nt, Artificial Sequence
  Description of Artificial Sequence: Synthetic oligonucleotide
  Antisense strand to SEQ ID NO: 264252
uucuaacguacucacaggu

SEQ ID NO: 264254 - RNA, 19 nt, Artificial Sequence
  Description of Artificial Sequence: Synthetic oligonucleotide
  Sense strand starting at position 2420 SEQ ID NO: 3396
cugugaguacguuagaaag

SEQ ID NO: 264255 - RNA, 19 nt, Artificial Sequence
  Description of Artificial Sequence: Synthetic oligonucleotide
  Antisense strand to SEQ ID NO: 264254
cuuucuaacguacucacag

SEQ ID NO: 264256 - RNA, 19 nt, Artificial Sequence
  Description of Artificial Sequence: Synthetic oligonucleotide
  Sense strand starting at position 2435 SEQ ID NO: 3396
aaaguucgcagucgaggaa

SEQ ID NO: 264257 - RNA, 19 nt, Artificial Sequence
  Description of Artificial Sequence: Synthetic oligonucleotide
  Antisense strand to SEQ ID NO: 264256
uuccucgacugcgaacuuu

SEQ ID NO: 264258 - RNA, 19 nt, Artificial Sequence
  Description of Artificial Sequence: Synthetic oligonucleotide
  Sense strand starting at position 2609 SEQ ID NO: 3396
ccagaaagaugagguaauu

SEQ ID NO: 264259 - RNA, 19 nt, Artificial Sequence
  Description of Artificial Sequence: Synthetic oligonucleotide
  Antisense strand to SEQ ID NO: 264258
aauuaccucaucuuucugg

SEQ ID NO: 264260 - RNA, 19 nt, Artificial Sequence
  Description of Artificial Sequence: Synthetic oligonucleotide
  Sense strand starting at position 2685 SEQ ID NO: 3396
gugggcuuccacuguguaa

SEQ ID NO: 264261 - RNA, 19 nt, Artificial Sequence
  Description of Artificial Sequence: Synthetic oligonucleotide
  Antisense strand to SEQ ID NO: 264260
uuacacaguggaagcccac

SEQ ID NO: 264262 - RNA, 19 nt, Artificial Sequence
  Description of Artificial Sequence: Synthetic oligonucleotide
  Sense strand starting at position 2687 SEQ ID NO: 3396
gggcuuccacuguguaaug

SEQ ID NO: 264263 - RNA, 19 nt, Artificial Sequence
  Description of Artificial Sequence: Synthetic oligonucleotide
  Antisense strand to SEQ ID NO: 264262
cauuacacaguggaagccc

SEQ ID NO: 264264 - RNA, 19 nt, Artificial Sequence
  Description of Artificial Sequence: Synthetic oligonucleotide
  Sense strand starting at position 2698 SEQ ID NO: 3396
guguaaugcuaagcagaua

SEQ ID NO: 264265 - RNA, 19 nt, Artificial Sequence
  Description of Artificial Sequence: Synthetic oligonucleotide
  Antisense strand to SEQ ID NO: 264264
uaucugcuuagcauuacac

SEQ ID NO: 264266 - RNA, 19 nt, Artificial Sequence
  Description of Artificial Sequence: Synthetic oligonucleotide
  Sense strand starting at position 2710 SEQ ID NO: 3396
gcagauaggacguaaauuc

SEQ ID NO: 264267 - RNA, 19 nt, Artificial Sequence
  Description of Artificial Sequence: Synthetic oligonucleotide
  Antisense strand to SEQ ID NO: 264266
gaauuuacguccuaucugc

SEQ ID NO: 264268 - RNA, 19 nt, Artificial Sequence
  Description of Artificial Sequence: Synthetic oligonucleotide
  Sense strand starting at position 2717 SEQ ID NO: 3396
ggacguaaauuccuuugca

SEQ ID NO: 264269 - RNA, 19 nt, Artificial Sequence
  Description of Artificial Sequence: Synthetic oligonucleotide
  Antisense strand to SEQ ID NO: 264268
ugcaaaggaauuuacgucc

SEQ ID NO: 264270 - RNA, 19 nt, Artificial Sequence
  Description of Artificial Sequence: Synthetic oligonucleotide
  Sense strand starting at position 2718 SEQ ID NO: 3396
gacguaaauuccuuugcag

SEQ ID NO: 264271 - RNA, 19 nt, Artificial Sequence
  Description of Artificial Sequence: Synthetic oligonucleotide
  Antisense strand to SEQ ID NO: 264270
cugcaaaggaauuuacguc

SEQ ID NO: 264272 - RNA, 19 nt, Artificial Sequence
  Description of Artificial Sequence: Synthetic oligonucleotide
  Sense strand starting at position 2720 SEQ ID NO: 3396
cguaaauuccuuugcagac

SEQ ID NO: 264273 - RNA, 19 nt, Artificial Sequence
  Description of Artificial Sequence: Synthetic oligonucleotide
  Antisense strand to SEQ ID NO: 264272
gucugcaaaggaauuuacg

SEQ ID NO: 264274 - RNA, 19 nt, Artificial Sequence
  Description of Artificial Sequence: Synthetic oligonucleotide
  Sense strand starting at position 2721 SEQ ID NO: 3396
guaaauuccuuugcagacu

SEQ ID NO: 264275 - RNA, 19 nt, Artificial Sequence
  Description of Artificial Sequence: Synthetic oligonucleotide
  Antisense strand to SEQ ID NO: 264274
agucugcaaaggaauuuac

SEQ ID NO: 264276 - RNA, 19 nt, Artificial Sequence
  Description of Artificial Sequence: Synthetic oligonucleotide
  Sense strand starting at position 2924 SEQ ID NO: 3396
gagcaugugcuuuagagac

SEQ ID NO: 264277 - RNA, 19 nt, Artificial Sequence
  Description of Artificial Sequence: Synthetic oligonucleotide
  Antisense strand to SEQ ID NO: 264276
gucucuaaagcacaugcuc

SEQ ID NO: 264278 - RNA, 19 nt, Artificial Sequence
  Description of Artificial Sequence: Synthetic oligonucleotide
  Sense strand starting at position 2958 SEQ ID NO: 3396
cuauuuacuugugagagcu

SEQ ID NO: 264279 - RNA, 19 nt, Artificial Sequence
  Description of Artificial Sequence: Synthetic oligonucleotide
  Antisense strand to SEQ ID NO: 264278
agcucucacaaguaaauag

SEQ ID NO: 264280 - RNA, 19 nt, Artificial Sequence
  Description of Artificial Sequence: Synthetic oligonucleotide
  Sense strand starting at position 2960 SEQ ID NO: 3396
auuuacuugugagagcuuu

SEQ ID NO: 264281 - RNA, 19 nt, Artificial Sequence
  Description of Artificial Sequence: Synthetic oligonucleotide
  Antisense strand to SEQ ID NO: 264280
aaagcucucacaaguaaau

SEQ ID NO: 264282 - RNA, 19 nt, Artificial Sequence
  Description of Artificial Sequence: Synthetic oligonucleotide
  Sense strand starting at position 2966 SEQ ID NO: 3396
uugugagagcuuuagguca

SEQ ID NO: 264283 - RNA, 19 nt, Artificial Sequence
  Description of Artificial Sequence: Synthetic oligonucleotide
  Antisense strand to SEQ ID NO: 264282
ugaccuaaagcucucacaa

SEQ ID NO: 264284 - RNA, 19 nt, Artificial Sequence
  Description of Artificial Sequence: Synthetic oligonucleotide
  Sense strand starting at position 3031 SEQ ID NO: 3396
ugccuagcagaagauugau

SEQ ID NO: 264285 - RNA, 19 nt, Artificial Sequence
  Description of Artificial Sequence: Synthetic oligonucleotide
  Antisense strand to SEQ ID NO: 264284
aucaaucuucugcuaggca

SEQ ID NO: 264286 - RNA, 19 nt, Artificial Sequence
  Description of Artificial Sequence: Synthetic oligonucleotide
  Sense strand starting at position 3034 SEQ ID NO: 3396
cuagcagaagauugauuaa

SEQ ID NO: 264287 - RNA, 19 nt, Artificial Sequence
  Description of Artificial Sequence: Synthetic oligonucleotide
  Antisense strand to SEQ ID NO: 264286
uuaaucaaucuucugcuag

SEQ ID NO: 264288 - RNA, 19 nt, Artificial Sequence
  Description of Artificial Sequence: Synthetic oligonucleotide
  Sense strand starting at position 3069 SEQ ID NO: 3396
ccaacuagugccuagcaaa

SEQ ID NO: 264289 - RNA, 19 nt, Artificial Sequence
  Description of Artificial Sequence: Synthetic oligonucleotide
  Antisense strand to SEQ ID NO: 264288
uuugcuaggcacuaguugg

SEQ ID NO: 264290 - RNA, 19 nt, Artificial Sequence
  Description of Artificial Sequence: Synthetic oligonucleotide
  Sense strand starting at position 3240 SEQ ID NO: 3396
uuaacuuccagugguguca

SEQ ID NO: 264291 - RNA, 19 nt, Artificial Sequence
  Description of Artificial Sequence: Synthetic oligonucleotide
  Antisense strand to SEQ ID NO: 264290
ugacaccacuggaaguuaa

SEQ ID NO: 264292 - RNA, 19 nt, Artificial Sequence
  Description of Artificial Sequence: Synthetic oligonucleotide
  Sense strand starting at position 3327 SEQ ID NO: 3396
ucuaguuaauucuugguga

SEQ ID NO: 264293 - RNA, 19 nt, Artificial Sequence
  Description of Artificial Sequence: Synthetic oligonucleotide
  Antisense strand to SEQ ID NO: 264292
ucaccaagaauuaacuaga

SEQ ID NO: 264294 - RNA, 19 nt, Artificial Sequence
  Description of Artificial Sequence: Synthetic oligonucleotide
  Sense strand starting at position 3329 SEQ ID NO: 3396
uaguuaauucuuggugaug

SEQ ID NO: 264295 - RNA, 19 nt, Artificial Sequence
  Description of Artificial Sequence: Synthetic oligonucleotide
  Antisense strand to SEQ ID NO: 264294
caucaccaagaauuaacua

SEQ ID NO: 264296 - RNA, 19 nt, Artificial Sequence
  Description of Artificial Sequence: Synthetic oligonucleotide
  Sense strand starting at position 3330 SEQ ID NO: 3396
aguuaauucuuggugauga

SEQ ID NO: 264297 - RNA, 19 nt, Artificial Sequence
  Description of Artificial Sequence: Synthetic oligonucleotide
  Antisense strand to SEQ ID NO: 264296
ucaucaccaagaauuaacu

SEQ ID NO: 264298 - RNA, 19 nt, Artificial Sequence
  Description of Artificial Sequence: Synthetic oligonucleotide
  Sense strand starting at position 3340 SEQ ID NO: 3396
uggugaugauaacagaaau

SEQ ID NO: 264299 - RNA, 19 nt, Artificial Sequence
  Description of Artificial Sequence: Synthetic oligonucleotide
  Antisense strand to SEQ ID NO: 264298
auuucuguuaucaucacca

SEQ ID NO: 264300 - RNA, 19 nt, Artificial Sequence
  Description of Artificial Sequence: Synthetic oligonucleotide
  Sense strand starting at position 3398 SEQ ID NO: 3396
cuuucugaguaucuuuaga

SEQ ID NO: 264301 - RNA, 19 nt, Artificial Sequence
  Description of Artificial Sequence: Synthetic oligonucleotide
  Antisense strand to SEQ ID NO: 264300
ucuaaagauacucagaaag

SEQ ID NO: 264302 - RNA, 19 nt, Artificial Sequence
  Description of Artificial Sequence: Synthetic oligonucleotide
  Sense strand starting at position 3400 SEQ ID NO: 3396
uucugaguaucuuuagauc

SEQ ID NO: 264303 - RNA, 19 nt, Artificial Sequence
  Description of Artificial Sequence: Synthetic oligonucleotide
  Antisense strand to SEQ ID NO: 264302
gaucuaaagauacucagaa

SEQ ID NO: 264304 - RNA, 19 nt, Artificial Sequence
  Description of Artificial Sequence: Synthetic oligonucleotide
  Sense strand starting at position 3403 SEQ ID NO: 3396
ugaguaucuuuagaucaac

SEQ ID NO: 264305 - RNA, 19 nt, Artificial Sequence
  Description of Artificial Sequence: Synthetic oligonucleotide
  Antisense strand to SEQ ID NO: 264304
guugaucuaaagauacuca

SEQ ID NO: 264306 - RNA, 19 nt, Artificial Sequence
  Description of Artificial Sequence: Synthetic oligonucleotide
  Sense strand starting at position 3580 SEQ ID NO: 3396
ugaugucauacuggaaagu

SEQ ID NO: 264307 - RNA, 19 nt, Artificial Sequence
  Description of Artificial Sequence: Synthetic oligonucleotide
  Antisense strand to SEQ ID NO: 264306
acuuuccaguaugacauca

SEQ ID NO: 264308 - RNA, 19 nt, Artificial Sequence
  Description of Artificial Sequence: Synthetic oligonucleotide
  Sense strand starting at position 3902 SEQ ID NO: 3396
aagaguuacggccaagagu

SEQ ID NO: 264309 - RNA, 19 nt, Artificial Sequence
  Description of Artificial Sequence: Synthetic oligonucleotide
  Antisense strand to SEQ ID NO: 264308
acucuuggccguaacucuu

SEQ ID NO: 264310 - RNA, 19 nt, Artificial Sequence
  Description of Artificial Sequence: Synthetic oligonucleotide
  Sense strand starting at position 3913 SEQ ID NO: 3396
ccaagaguuugggcaaaga

SEQ ID NO: 264311 - RNA, 19 nt, Artificial Sequence
  Description of Artificial Sequence: Synthetic oligonucleotide
  Antisense strand to SEQ ID NO: 264310
ucuuugcccaaacucuugg

SEQ ID NO: 264312 - RNA, 19 nt, Artificial Sequence
  Description of Artificial Sequence: Synthetic oligonucleotide
  Sense strand starting at position 185 SEQ ID NO: 3398
ggucaagcuccugaucacu

SEQ ID NO: 264313 - RNA, 19 nt, Artificial Sequence
  Description of Artificial Sequence: Synthetic oligonucleotide
  Antisense strand to SEQ ID NO: 264312
agugaucaggagcuugacc

SEQ ID NO: 264314 - RNA, 19 nt, Artificial Sequence
  Description of Artificial Sequence: Synthetic oligonucleotide
  Sense strand starting at position 240 SEQ ID NO: 3398
aggcaaugcucagcaaaca

SEQ ID NO: 264315 - RNA, 19 nt, Artificial Sequence
  Description of Artificial Sequence: Synthetic oligonucleotide
  Antisense strand to SEQ ID NO: 264314
uguuugcugagcauugccu

SEQ ID NO: 264316 - RNA, 19 nt, Artificial Sequence
  Description of Artificial Sequence: Synthetic oligonucleotide
  Sense strand starting at position 339 SEQ ID NO: 3398
ucaagacaccuuugcuaga

SEQ ID NO: 264317 - RNA, 19 nt, Artificial Sequence
  Description of Artificial Sequence: Synthetic oligonucleotide
  Antisense strand to SEQ ID NO: 264316
ucuagcaaaggugucuuga

SEQ ID NO: 264318 - RNA, 19 nt, Artificial Sequence
  Description of Artificial Sequence: Synthetic oligonucleotide
  Sense strand starting at position 352 SEQ ID NO: 3398
gcuagaaaugcugaccaga

SEQ ID NO: 264319 - RNA, 19 nt, Artificial Sequence
  Description of Artificial Sequence: Synthetic oligonucleotide
  Antisense strand to SEQ ID NO: 264318
ucuggucagcauuucuagc

SEQ ID NO: 264320 - RNA, 19 nt, Artificial Sequence
  Description of Artificial Sequence: Synthetic oligonucleotide
  Sense strand starting at position 354 SEQ ID NO: 3398
uagaaaugcugaccagaug

SEQ ID NO: 264321 - RNA, 19 nt, Artificial Sequence
  Description of Artificial Sequence: Synthetic oligonucleotide
  Antisense strand to SEQ ID NO: 264320
caucuggucagcauuucua

SEQ ID NO: 264322 - RNA, 19 nt, Artificial Sequence
  Description of Artificial Sequence: Synthetic oligonucleotide
  Sense strand starting at position 435 SEQ ID NO: 3398
aguaguucacagggagauc

SEQ ID NO: 264323 - RNA, 19 nt, Artificial Sequence
  Description of Artificial Sequence: Synthetic oligonucleotide
  Antisense strand to SEQ ID NO: 264322
gaucucccugugaacuacu

SEQ ID NO: 264324 - RNA, 19 nt, Artificial Sequence
  Description of Artificial Sequence: Synthetic oligonucleotide
  Sense strand starting at position 444 SEQ ID NO: 3398
cagggagaucuguggugau

SEQ ID NO: 264325 - RNA, 19 nt, Artificial Sequence
  Description of Artificial Sequence: Synthetic oligonucleotide
  Antisense strand to SEQ ID NO: 264324
aucaccacagaucucccug

SEQ ID NO: 264326 - RNA, 19 nt, Artificial Sequence
  Description of Artificial Sequence: Synthetic oligonucleotide
  Sense strand starting at position 451 SEQ ID NO: 3398
aucuguggugaugggauau

SEQ ID NO: 264327 - RNA, 19 nt, Artificial Sequence
  Description of Artificial Sequence: Synthetic oligonucleotide
  Antisense strand to SEQ ID NO: 264326
auaucccaucaccacagau

SEQ ID NO: 264328 - RNA, 19 nt, Artificial Sequence
  Description of Artificial Sequence: Synthetic oligonucleotide
  Sense strand starting at position 457 SEQ ID NO: 3398
ggugaugggauauauguuu

SEQ ID NO: 264329 - RNA, 19 nt, Artificial Sequence
  Description of Artificial Sequence: Synthetic oligonucleotide
  Antisense strand to SEQ ID NO: 264328
aaacauauaucccaucacc

SEQ ID NO: 264330 - RNA, 19 nt, Artificial Sequence
  Description of Artificial Sequence: Synthetic oligonucleotide
  Sense strand starting at position 462 SEQ ID NO: 3398
ugggauauauguuucuuua

SEQ ID NO: 264331 - RNA, 19 nt, Artificial Sequence
  Description of Artificial Sequence: Synthetic oligonucleotide
  Antisense strand to SEQ ID NO: 264330
uaaagaaacauauauccca

SEQ ID NO: 264332 - RNA, 19 nt, Artificial Sequence
  Description of Artificial Sequence: Synthetic oligonucleotide
  Sense strand starting at position 563 SEQ ID NO: 3398
guaguuaauacaugaggug

SEQ ID NO: 264333 - RNA, 19 nt, Artificial Sequence
  Description of Artificial Sequence: Synthetic oligonucleotide
  Antisense strand to SEQ ID NO: 264332
caccucauguauuaacuac

SEQ ID NO: 264334 - RNA, 19 nt, Artificial Sequence
  Description of Artificial Sequence: Synthetic oligonucleotide
  Sense strand starting at position 598 SEQ ID NO: 3398
aaagcaugucuugacgaac

SEQ ID NO: 264335 - RNA, 19 nt, Artificial Sequence
  Description of Artificial Sequence: Synthetic oligonucleotide
  Antisense strand to SEQ ID NO: 264334
guucgucaagacaugcuuu

SEQ ID NO: 264336 - RNA, 19 nt, Artificial Sequence
  Description of Artificial Sequence: Synthetic oligonucleotide
  Sense strand starting at position 616 SEQ ID NO: 3398
cuggaagaaacgggucaua

SEQ ID NO: 264337 - RNA, 19 nt, Artificial Sequence
  Description of Artificial Sequence: Synthetic oligonucleotide
  Antisense strand to SEQ ID NO: 264336
uaugacccguuucuuccag

SEQ ID NO: 264338 - RNA, 19 nt, Artificial Sequence
  Description of Artificial Sequence: Synthetic oligonucleotide
  Sense strand starting at position 641 SEQ ID NO: 3398
agaugacuauaacaaggau

SEQ ID NO: 264339 - RNA, 19 nt, Artificial Sequence
  Description of Artificial Sequence: Synthetic oligonucleotide
  Antisense strand to SEQ ID NO: 264338
auccuuguuauagucaucu

SEQ ID NO: 264340 - RNA, 19 nt, Artificial Sequence
  Description of Artificial Sequence: Synthetic oligonucleotide
  Sense strand starting at position 663 SEQ ID NO: 3398
ugcagacuccuauacuguu

SEQ ID NO: 264341 - RNA, 19 nt, Artificial Sequence
  Description of Artificial Sequence: Synthetic oligonucleotide
  Antisense strand to SEQ ID NO: 264340
aacaguauaggagucugca

SEQ ID NO: 264342 - RNA, 19 nt, Artificial Sequence
  Description of Artificial Sequence: Synthetic oligonucleotide
  Sense strand starting at position 748 SEQ ID NO: 3398
gggucugugaaucagcagu

SEQ ID NO: 264343 - RNA, 19 nt, Artificial Sequence
  Description of Artificial Sequence: Synthetic oligonucleotide
  Antisense strand to SEQ ID NO: 264342
acugcugauucacagaccc

SEQ ID NO: 264344 - RNA, 19 nt, Artificial Sequence
  Description of Artificial Sequence: Synthetic oligonucleotide
  Sense strand starting at position 1019 SEQ ID NO: 3398
acaagcuucugagcagaaa

SEQ ID NO: 264345 - RNA, 19 nt, Artificial Sequence
  Description of Artificial Sequence: Synthetic oligonucleotide
  Antisense strand to SEQ ID NO: 264344
uuucugcucagaagcuugu

SEQ ID NO: 264346 - RNA, 19 nt, Artificial Sequence
  Description of Artificial Sequence: Synthetic oligonucleotide
  Sense strand starting at position 1138 SEQ ID NO: 3398
cggauaaccucagccaaga

SEQ ID NO: 264347 - RNA, 19 nt, Artificial Sequence
  Description of Artificial Sequence: Synthetic oligonucleotide
  Antisense strand to SEQ ID NO: 264346
ucuuggcugagguuauccg

SEQ ID NO: 264348 - RNA, 19 nt, Artificial Sequence
  Description of Artificial Sequence: Synthetic oligonucleotide
  Sense strand starting at position 1298 SEQ ID NO: 3398
ggguguuucguggaagaaa

SEQ ID NO: 264349 - RNA, 19 nt, Artificial Sequence
  Description of Artificial Sequence: Synthetic oligonucleotide
  Antisense strand to SEQ ID NO: 264348
uuucuuccacgaaacaccc

SEQ ID NO: 264350 - RNA, 19 nt, Artificial Sequence
  Description of Artificial Sequence: Synthetic oligonucleotide
  Sense strand starting at position 2194 SEQ ID NO: 3398
guacggauccgggaggaau

SEQ ID NO: 264351 - RNA, 19 nt, Artificial Sequence
  Description of Artificial Sequence: Synthetic oligonucleotide
  Antisense strand to SEQ ID NO: 264350
auuccucccggauccguac

SEQ ID NO: 264352 - RNA, 19 nt, Artificial Sequence
  Description of Artificial Sequence: Synthetic oligonucleotide
  Sense strand starting at position 2295 SEQ ID NO: 3398
acuucuuguggaggauauu

SEQ ID NO: 264353 - RNA, 19 nt, Artificial Sequence
  Description of Artificial Sequence: Synthetic oligonucleotide
  Antisense strand to SEQ ID NO: 264352
aauauccuccacaagaagu

SEQ ID NO: 264354 - RNA, 19 nt, Artificial Sequence
  Description of Artificial Sequence: Synthetic oligonucleotide
  Sense strand starting at position 2344 SEQ ID NO: 3398
cagauacggcuuuacaagu

SEQ ID NO: 264355 - RNA, 19 nt, Artificial Sequence
  Description of Artificial Sequence: Synthetic oligonucleotide
  Antisense strand to SEQ ID NO: 264354
acuuguaaagccguaucug

SEQ ID NO: 264356 - RNA, 19 nt, Artificial Sequence
  Description of Artificial Sequence: Synthetic oligonucleotide
  Sense strand starting at position 2621 SEQ ID NO: 3398
ugccaucuucuggagaaac

SEQ ID NO: 264357 - RNA, 19 nt, Artificial Sequence
  Description of Artificial Sequence: Synthetic oligonucleotide
  Antisense strand to SEQ ID NO: 264356
guuucuccagaagauggca

SEQ ID NO: 264358 - RNA, 19 nt, Artificial Sequence
  Description of Artificial Sequence: Synthetic oligonucleotide
  Sense strand starting at position 2659 SEQ ID NO: 3398
cugguuaugcuuuagugag

SEQ ID NO: 264359 - RNA, 19 nt, Artificial Sequence
  Description of Artificial Sequence: Synthetic oligonucleotide
  Antisense strand to SEQ ID NO: 264358
cucacuaaagcauaaccag

SEQ ID NO: 264360 - RNA, 19 nt, Artificial Sequence
  Description of Artificial Sequence: Synthetic oligonucleotide
  Sense strand starting at position 2755 SEQ ID NO: 3398
augauagacucuguaucau

SEQ ID NO: 264361 - RNA, 19 nt, Artificial Sequence
  Description of Artificial Sequence: Synthetic oligonucleotide
  Antisense strand to SEQ ID NO: 264360
augauacagagucuaucau

SEQ ID NO: 264362 - RNA, 19 nt, Artificial Sequence
  Description of Artificial Sequence: Synthetic oligonucleotide
  Sense strand starting at position 2877 SEQ ID NO: 3398
gcacuuuagagcuggaaga

SEQ ID NO: 264363 - RNA, 19 nt, Artificial Sequence
  Description of Artificial Sequence: Synthetic oligonucleotide
  Antisense strand to SEQ ID NO: 264362
ucuuccagcucuaaagugc

SEQ ID NO: 264364 - RNA, 19 nt, Artificial Sequence
  Description of Artificial Sequence: Synthetic oligonucleotide
  Sense strand starting at position 2878 SEQ ID NO: 3398
cacuuuagagcuggaagau

SEQ ID NO: 264365 - RNA, 19 nt, Artificial Sequence
  Description of Artificial Sequence: Synthetic oligonucleotide
  Antisense strand to SEQ ID NO: 264364
aucuuccagcucuaaagug

SEQ ID NO: 264366 - RNA, 19 nt, Artificial Sequence
  Description of Artificial Sequence: Synthetic oligonucleotide
  Sense strand starting at position 2887 SEQ ID NO: 3398
gcuggaagauuauccaaca

SEQ ID NO: 264367 - RNA, 19 nt, Artificial Sequence
  Description of Artificial Sequence: Synthetic oligonucleotide
  Antisense strand to SEQ ID NO: 264366
uguuggauaaucuuccagc

SEQ ID NO: 264368 - RNA, 19 nt, Artificial Sequence
  Description of Artificial Sequence: Synthetic oligonucleotide
  Sense strand starting at position 2918 SEQ ID NO: 3398
gaauuacaguuaguagauu

SEQ ID NO: 264369 - RNA, 19 nt, Artificial Sequence
  Description of Artificial Sequence: Synthetic oligonucleotide
  Antisense strand to SEQ ID NO: 264368
aaucuacuaacuguaauuc

SEQ ID NO: 264370 - RNA, 19 nt, Artificial Sequence
  Description of Artificial Sequence: Synthetic oligonucleotide
  Sense strand starting at position 2931 SEQ ID NO: 3398
uagauuguggugcaauuaa

SEQ ID NO: 264371 - RNA, 19 nt, Artificial Sequence
  Description of Artificial Sequence: Synthetic oligonucleotide
  Antisense strand to SEQ ID NO: 264370
uuaauugcaccacaaucua

SEQ ID NO: 264372 - RNA, 19 nt, Artificial Sequence
  Description of Artificial Sequence: Synthetic oligonucleotide
  Sense strand starting at position 2943 SEQ ID NO: 3398
caauuaaacugggcaggau

SEQ ID NO: 264373 - RNA, 19 nt, Artificial Sequence
  Description of Artificial Sequence: Synthetic oligonucleotide
  Antisense strand to SEQ ID NO: 264372
auccugcccaguuuaauug

SEQ ID NO: 264374 - RNA, 19 nt, Artificial Sequence
  Description of Artificial Sequence: Synthetic oligonucleotide
  Sense strand starting at position 2970 SEQ ID NO: 3398
acuagauuguagguggauu

SEQ ID NO: 264375 - RNA, 19 nt, Artificial Sequence
  Description of Artificial Sequence: Synthetic oligonucleotide
  Antisense strand to SEQ ID NO: 264374
aauccaccuacaaucuagu

SEQ ID NO: 264376 - RNA, 19 nt, Artificial Sequence
  Description of Artificial Sequence: Synthetic oligonucleotide
  Sense strand starting at position 3033 SEQ ID NO: 3398
gacguauguguauaaauau

SEQ ID NO: 264377 - RNA, 19 nt, Artificial Sequence
  Description of Artificial Sequence: Synthetic oligonucleotide
  Antisense strand to SEQ ID NO: 264376
auauuuauacacauacguc

SEQ ID NO: 264378 - RNA, 19 nt, Artificial Sequence
  Description of Artificial Sequence: Synthetic oligonucleotide
  Sense strand starting at position 3144 SEQ ID NO: 3398
ggaugagcuugggugacuu

SEQ ID NO: 264379 - RNA, 19 nt, Artificial Sequence
  Description of Artificial Sequence: Synthetic oligonucleotide
  Antisense strand to SEQ ID NO: 264378
aagucacccaagcucaucc

SEQ ID NO: 264380 - RNA, 19 nt, Artificial Sequence
  Description of Artificial Sequence: Synthetic oligonucleotide
  Sense strand starting at position 3154 SEQ ID NO: 3398
gggugacuuacagguaauu

SEQ ID NO: 264381 - RNA, 19 nt, Artificial Sequence
  Description of Artificial Sequence: Synthetic oligonucleotide
  Antisense strand to SEQ ID NO: 264380
aauuaccuguaagucaccc

SEQ ID NO: 264382 - RNA, 19 nt, Artificial Sequence
  Description of Artificial Sequence: Synthetic oligonucleotide
  Sense strand starting at position 3313 SEQ ID NO: 3398
gugugugcuguccugcaca

SEQ ID NO: 264383 - RNA, 19 nt, Artificial Sequence
  Description of Artificial Sequence: Synthetic oligonucleotide
  Antisense strand to SEQ ID NO: 264382
ugugcaggacagcacacac

SEQ ID NO: 264384 - RNA, 19 nt, Artificial Sequence
  Description of Artificial Sequence: Synthetic oligonucleotide
  Sense strand starting at position 3315 SEQ ID NO: 3398
gugugcuguccugcacagu

SEQ ID NO: 264385 - RNA, 19 nt, Artificial Sequence
  Description of Artificial Sequence: Synthetic oligonucleotide
  Antisense strand to SEQ ID NO: 264384
acugugcaggacagcacac

SEQ ID NO: 264386 - RNA, 19 nt, Artificial Sequence
  Description of Artificial Sequence: Synthetic oligonucleotide
  Sense strand starting at position 3438 SEQ ID NO: 3398
aguguaagauaccucauua

SEQ ID NO: 264387 - RNA, 19 nt, Artificial Sequence
  Description of Artificial Sequence: Synthetic oligonucleotide
  Antisense strand to SEQ ID NO: 264386
uaaugagguaucuuacacu

SEQ ID NO: 264388 - RNA, 19 nt, Artificial Sequence
  Description of Artificial Sequence: Synthetic oligonucleotide
  Sense strand starting at position 3553 SEQ ID NO: 3398
gugucacuacuagaauauu

SEQ ID NO: 264389 - RNA, 19 nt, Artificial Sequence
  Description of Artificial Sequence: Synthetic oligonucleotide
  Antisense strand to SEQ ID NO: 264388
aauauucuaguagugacac

SEQ ID NO: 264390 - RNA, 19 nt, Artificial Sequence
  Description of Artificial Sequence: Synthetic oligonucleotide
  Sense strand starting at position 3611 SEQ ID NO: 3398
ugucucuaucuggaccaua

SEQ ID NO: 264391 - RNA, 19 nt, Artificial Sequence
  Description of Artificial Sequence: Synthetic oligonucleotide
  Antisense strand to SEQ ID NO: 264390
uaugguccagauagagaca

SEQ ID NO: 264392 - RNA, 19 nt, Artificial Sequence
  Description of Artificial Sequence: Synthetic oligonucleotide
  Sense strand starting at position 20 SEQ ID NO: 3399
gagacagguuccucuccuu

SEQ ID NO: 264393 - RNA, 19 nt, Artificial Sequence
  Description of Artificial Sequence: Synthetic oligonucleotide
  Antisense strand to SEQ ID NO: 264392
aaggagaggaaccugucuc

SEQ ID NO: 264394 - RNA, 19 nt, Artificial Sequence
  Description of Artificial Sequence: Synthetic oligonucleotide
  Sense strand starting at position 25 SEQ ID NO: 3399
agguuccucuccuugaguu

SEQ ID NO: 264395 - RNA, 19 nt, Artificial Sequence
  Description of Artificial Sequence: Synthetic oligonucleotide
  Antisense strand to SEQ ID NO: 264394
aacucaaggagaggaaccu

SEQ ID NO: 264396 - RNA, 19 nt, Artificial Sequence
  Description of Artificial Sequence: Synthetic oligonucleotide
  Sense strand starting at position 26 SEQ ID NO: 3399
gguuccucuccuugaguuu

SEQ ID NO: 264397 - RNA, 19 nt, Artificial Sequence
  Description of Artificial Sequence: Synthetic oligonucleotide
  Antisense strand to SEQ ID NO: 264396
aaacucaaggagaggaacc

SEQ ID NO: 264398 - RNA, 19 nt, Artificial Sequence
  Description of Artificial Sequence: Synthetic oligonucleotide
  Sense strand starting at position 125 SEQ ID NO: 3399
ugaaaccaugccugaggua

SEQ ID NO: 264399 - RNA, 19 nt, Artificial Sequence
  Description of Artificial Sequence: Synthetic oligonucleotide
  Antisense strand to SEQ ID NO: 264398
uaccucaggcaugguuuca

SEQ ID NO: 264400 - RNA, 19 nt, Artificial Sequence
  Description of Artificial Sequence: Synthetic oligonucleotide
  Sense strand starting at position 137 SEQ ID NO: 3399
ugagguagccugugggaaa

SEQ ID NO: 264401 - RNA, 19 nt, Artificial Sequence
  Description of Artificial Sequence: Synthetic oligonucleotide
  Antisense strand to SEQ ID NO: 264400
uuucccacaggcuaccuca

SEQ ID NO: 264402 - RNA, 19 nt, Artificial Sequence
  Description of Artificial Sequence: Synthetic oligonucleotide
  Sense strand starting at position 291 SEQ ID NO: 3399
guuucauuuggugguuguu

SEQ ID NO: 264403 - RNA, 19 nt, Artificial Sequence
  Description of Artificial Sequence: Synthetic oligonucleotide
  Antisense strand to SEQ ID NO: 264402
aacaaccaccaaaugaaac

SEQ ID NO: 264404 - RNA, 19 nt, Artificial Sequence
  Description of Artificial Sequence: Synthetic oligonucleotide
  Sense strand starting at position 303 SEQ ID NO: 3399
gguuguucuuaugcaacau

SEQ ID NO: 264405 - RNA, 19 nt, Artificial Sequence
  Description of Artificial Sequence: Synthetic oligonucleotide
  Antisense strand to SEQ ID NO: 264404
auguugcauaagaacaacc

SEQ ID NO: 264406 - RNA, 19 nt, Artificial Sequence
  Description of Artificial Sequence: Synthetic oligonucleotide
  Sense strand starting at position 307 SEQ ID NO: 3399
guucuuaugcaacauuaug

SEQ ID NO: 264407 - RNA, 19 nt, Artificial Sequence
  Description of Artificial Sequence: Synthetic oligonucleotide
  Antisense strand to SEQ ID NO: 264406
cauaauguugcauaagaac

SEQ ID NO: 264408 - RNA, 19 nt, Artificial Sequence
  Description of Artificial Sequence: Synthetic oligonucleotide
  Sense strand starting at position 318 SEQ ID NO: 3399
acauuaugcuggcacuaga

SEQ ID NO: 264409 - RNA, 19 nt, Artificial Sequence
  Description of Artificial Sequence: Synthetic oligonucleotide
  Antisense strand to SEQ ID NO: 264408
ucuagugccagcauaaugu

SEQ ID NO: 264410 - RNA, 19 nt, Artificial Sequence
  Description of Artificial Sequence: Synthetic oligonucleotide
  Sense strand starting at position 447 SEQ ID NO: 3399
auugaaaggucauugcagu

SEQ ID NO: 264411 - RNA, 19 nt, Artificial Sequence
  Description of Artificial Sequence: Synthetic oligonucleotide
  Antisense strand to SEQ ID NO: 264410
acugcaaugaccuuucaau

SEQ ID NO: 264412 - RNA, 19 nt, Artificial Sequence
  Description of Artificial Sequence: Synthetic oligonucleotide
  Sense strand starting at position 453 SEQ ID NO: 3399
aggucauugcagugaaagg

SEQ ID NO: 264413 - RNA, 19 nt, Artificial Sequence
  Description of Artificial Sequence: Synthetic oligonucleotide
  Antisense strand to SEQ ID NO: 264412
ccuuucacugcaaugaccu

SEQ ID NO: 264414 - RNA, 19 nt, Artificial Sequence
  Description of Artificial Sequence: Synthetic oligonucleotide
  Sense strand starting at position 454 SEQ ID NO: 3399
ggucauugcagugaaaggu

SEQ ID NO: 264415 - RNA, 19 nt, Artificial Sequence
  Description of Artificial Sequence: Synthetic oligonucleotide
  Antisense strand to SEQ ID NO: 264414
accuuucacugcaaugacc

SEQ ID NO: 264416 - RNA, 19 nt, Artificial Sequence
  Description of Artificial Sequence: Synthetic oligonucleotide
  Sense strand starting at position 685 SEQ ID NO: 3399
gccgguguccaggauaacu

SEQ ID NO: 264417 - RNA, 19 nt, Artificial Sequence
  Description of Artificial Sequence: Synthetic oligonucleotide
  Antisense strand to SEQ ID NO: 264416
aguuauccuggacaccggc

SEQ ID NO: 264418 - RNA, 19 nt, Artificial Sequence
  Description of Artificial Sequence: Synthetic oligonucleotide
  Sense strand starting at position 774 SEQ ID NO: 3399
ggugcucacuguccacaaa

SEQ ID NO: 264419 - RNA, 19 nt, Artificial Sequence
  Description of Artificial Sequence: Synthetic oligonucleotide
  Antisense strand to SEQ ID NO: 264418
uuuguggacagugagcacc

SEQ ID NO: 264420 - RNA, 19 nt, Artificial Sequence
  Description of Artificial Sequence: Synthetic oligonucleotide
  Sense strand starting at position 905 SEQ ID NO: 3399
cgcucacucagguaggauu

SEQ ID NO: 264421 - RNA, 19 nt, Artificial Sequence
  Description of Artificial Sequence: Synthetic oligonucleotide
  Antisense strand to SEQ ID NO: 264420
aauccuaccugagugagcg

SEQ ID NO: 264422 - RNA, 19 nt, Artificial Sequence
  Description of Artificial Sequence: Synthetic oligonucleotide
  Sense strand starting at position 918 SEQ ID NO: 3399
aggauuugguaaugucaga

SEQ ID NO: 264423 - RNA, 19 nt, Artificial Sequence
  Description of Artificial Sequence: Synthetic oligonucleotide
  Antisense strand to SEQ ID NO: 264422
ucugacauuaccaaauccu

SEQ ID NO: 264424 - RNA, 19 nt, Artificial Sequence
  Description of Artificial Sequence: Synthetic oligonucleotide
  Sense strand starting at position 925 SEQ ID NO: 3399
gguaaugucagacaugucu

SEQ ID NO: 264425 - RNA, 19 nt, Artificial Sequence
  Description of Artificial Sequence: Synthetic oligonucleotide
  Antisense strand to SEQ ID NO: 264424
agacaugucugacauuacc

SEQ ID NO: 264426 - RNA, 19 nt, Artificial Sequence
  Description of Artificial Sequence: Synthetic oligonucleotide
  Sense strand starting at position 932 SEQ ID NO: 3399
ucagacaugucugugcaca

SEQ ID NO: 264427 - RNA, 19 nt, Artificial Sequence
  Description of Artificial Sequence: Synthetic oligonucleotide
  Antisense strand to SEQ ID NO: 264426
ugugcacagacaugucuga

SEQ ID NO: 264428 - RNA, 19 nt, Artificial Sequence
  Description of Artificial Sequence: Synthetic oligonucleotide
  Sense strand starting at position 933 SEQ ID NO: 3399
cagacaugucugugcacaa

SEQ ID NO: 264429 - RNA, 19 nt, Artificial Sequence
  Description of Artificial Sequence: Synthetic oligonucleotide
  Antisense strand to SEQ ID NO: 264428
uugugcacagacaugucug

SEQ ID NO: 264430 - RNA, 19 nt, Artificial Sequence
  Description of Artificial Sequence: Synthetic oligonucleotide
  Sense strand starting at position 934 SEQ ID NO: 3399
agacaugucugugcacaau

SEQ ID NO: 264431 - RNA, 19 nt, Artificial Sequence
  Description of Artificial Sequence: Synthetic oligonucleotide
  Antisense strand to SEQ ID NO: 264430
auugugcacagacaugucu

SEQ ID NO: 264432 - RNA, 19 nt, Artificial Sequence
  Description of Artificial Sequence: Synthetic oligonucleotide
  Sense strand starting at position 1107 SEQ ID NO: 3399
ucagcaauugccggaaggu

SEQ ID NO: 264433 - RNA, 19 nt, Artificial Sequence
  Description of Artificial Sequence: Synthetic oligonucleotide
  Antisense strand to SEQ ID NO: 264432
accuuccggcaauugcuga

SEQ ID NO: 264434 - RNA, 19 nt, Artificial Sequence
  Description of Artificial Sequence: Synthetic oligonucleotide
  Sense strand starting at position 1191 SEQ ID NO: 3399
gguauuugcggaugugaca

SEQ ID NO: 264435 - RNA, 19 nt, Artificial Sequence
  Description of Artificial Sequence: Synthetic oligonucleotide
  Antisense strand to SEQ ID NO: 264434
ugucacauccgcaaauacc

SEQ ID NO: 264436 - RNA, 19 nt, Artificial Sequence
  Description of Artificial Sequence: Synthetic oligonucleotide
  Sense strand starting at position 1223 SEQ ID NO: 3399
agacuucugugucugaaau

SEQ ID NO: 264437 - RNA, 19 nt, Artificial Sequence
  Description of Artificial Sequence: Synthetic oligonucleotide
  Antisense strand to SEQ ID NO: 264436
auuucagacacagaagucu

SEQ ID NO: 264438 - RNA, 19 nt, Artificial Sequence
  Description of Artificial Sequence: Synthetic oligonucleotide
  Sense strand starting at position 1224 SEQ ID NO: 3399
gacuucugugucugaaauc

SEQ ID NO: 264439 - RNA, 19 nt, Artificial Sequence
  Description of Artificial Sequence: Synthetic oligonucleotide
  Antisense strand to SEQ ID NO: 264438
gauuucagacacagaaguc

SEQ ID NO: 264440 - RNA, 19 nt, Artificial Sequence
  Description of Artificial Sequence: Synthetic oligonucleotide
  Sense strand starting at position 1233 SEQ ID NO: 3399
gucugaaaucucuaagucc

SEQ ID NO: 264441 - RNA, 19 nt, Artificial Sequence
  Description of Artificial Sequence: Synthetic oligonucleotide
  Antisense strand to SEQ ID NO: 264440
ggacuuagagauuucagac

SEQ ID NO: 264442 - RNA, 19 nt, Artificial Sequence
  Description of Artificial Sequence: Synthetic oligonucleotide
  Sense strand starting at position 1241 SEQ ID NO: 3399
ucucuaaguccaggagaca

SEQ ID NO: 264443 - RNA, 19 nt, Artificial Sequence
  Description of Artificial Sequence: Synthetic oligonucleotide
  Antisense strand to SEQ ID NO: 264442
ugucuccuggacuuagaga

SEQ ID NO: 264444 - RNA, 19 nt, Artificial Sequence
  Description of Artificial Sequence: Synthetic oligonucleotide
  Sense strand starting at position 1428 SEQ ID NO: 3399
gucagaaagaccugcauug

SEQ ID NO: 264445 - RNA, 19 nt, Artificial Sequence
  Description of Artificial Sequence: Synthetic oligonucleotide
  Antisense strand to SEQ ID NO: 264444
caaugcaggucuuucugac

SEQ ID NO: 264446 - RNA, 19 nt, Artificial Sequence
  Description of Artificial Sequence: Synthetic oligonucleotide
  Sense strand starting at position 1443 SEQ ID NO: 3399
auuggaaucugguuccauc

SEQ ID NO: 264447 - RNA, 19 nt, Artificial Sequence
  Description of Artificial Sequence: Synthetic oligonucleotide
  Antisense strand to SEQ ID NO: 264446
gauggaaccagauuccaau

SEQ ID NO: 264448 - RNA, 19 nt, Artificial Sequence
  Description of Artificial Sequence: Synthetic oligonucleotide
  Sense strand starting at position 1476 SEQ ID NO: 3399
ugaccuuaggcaugucacu

SEQ ID NO: 264449 - RNA, 19 nt, Artificial Sequence
  Description of Artificial Sequence: Synthetic oligonucleotide
  Antisense strand to SEQ ID NO: 264448
agugacaugccuaagguca

SEQ ID NO: 264450 - RNA, 19 nt, Artificial Sequence
  Description of Artificial Sequence: Synthetic oligonucleotide
  Sense strand starting at position 1573 SEQ ID NO: 3399
ugaauaagaugccuucuau

SEQ ID NO: 264451 - RNA, 19 nt, Artificial Sequence
  Description of Artificial Sequence: Synthetic oligonucleotide
  Antisense strand to SEQ ID NO: 264450
auagaaggcaucuuauuca

SEQ ID NO: 264452 - RNA, 19 nt, Artificial Sequence
  Description of Artificial Sequence: Synthetic oligonucleotide
  Sense strand starting at position 1587 SEQ ID NO: 3399
ucuauaaagcccugguaga

SEQ ID NO: 264453 - RNA, 19 nt, Artificial Sequence
  Description of Artificial Sequence: Synthetic oligonucleotide
  Antisense strand to SEQ ID NO: 264452
ucuaccagggcuuuauaga

SEQ ID NO: 264454 - RNA, 19 nt, Artificial Sequence
  Description of Artificial Sequence: Synthetic oligonucleotide
  Sense strand starting at position 1588 SEQ ID NO: 3399
cuauaaagcccugguagau

SEQ ID NO: 264455 - RNA, 19 nt, Artificial Sequence
  Description of Artificial Sequence: Synthetic oligonucleotide
  Antisense strand to SEQ ID NO: 264454
aucuaccagggcuuuauag

SEQ ID NO: 264456 - RNA, 19 nt, Artificial Sequence
  Description of Artificial Sequence: Synthetic oligonucleotide
  Sense strand starting at position 2309 SEQ ID NO: 3399
gccugagaacuguaccauu

SEQ ID NO: 264457 - RNA, 19 nt, Artificial Sequence
  Description of Artificial Sequence: Synthetic oligonucleotide
  Antisense strand to SEQ ID NO: 264456
aaugguacaguucucaggc

SEQ ID NO: 264458 - RNA, 19 nt, Artificial Sequence
  Description of Artificial Sequence: Synthetic oligonucleotide
  Sense strand starting at position 2426 SEQ ID NO: 3399
ccacgaagcaucuguuguu

SEQ ID NO: 264459 - RNA, 19 nt, Artificial Sequence
  Description of Artificial Sequence: Synthetic oligonucleotide
  Antisense strand to SEQ ID NO: 264458
aacaacagaugcuucgugg

SEQ ID NO: 264460 - RNA, 19 nt, Artificial Sequence
  Description of Artificial Sequence: Synthetic oligonucleotide
  Sense strand starting at position 2501 SEQ ID NO: 3399
ucaacaguugugugucaug

SEQ ID NO: 264461 - RNA, 19 nt, Artificial Sequence
  Description of Artificial Sequence: Synthetic oligonucleotide
  Antisense strand to SEQ ID NO: 264460
caugacacacaacuguuga

SEQ ID NO: 264462 - RNA, 19 nt, Artificial Sequence
  Description of Artificial Sequence: Synthetic oligonucleotide
  Sense strand starting at position 2783 SEQ ID NO: 3399
agagcaagaucucucaacu

SEQ ID NO: 264463 - RNA, 19 nt, Artificial Sequence
  Description of Artificial Sequence: Synthetic oligonucleotide
  Antisense strand to SEQ ID NO: 264462
aguugagagaucuugcucu

SEQ ID NO: 264464 - RNA, 19 nt, Artificial Sequence
  Description of Artificial Sequence: Synthetic oligonucleotide
  Sense strand starting at position 3031 SEQ ID NO: 3399
acaguacaugagcaguuua

SEQ ID NO: 264465 - RNA, 19 nt, Artificial Sequence
  Description of Artificial Sequence: Synthetic oligonucleotide
  Antisense strand to SEQ ID NO: 264464
uaaacugcucauguacugu

SEQ ID NO: 264466 - RNA, 19 nt, Artificial Sequence
  Description of Artificial Sequence: Synthetic oligonucleotide
  Sense strand starting at position 3036 SEQ ID NO: 3399
acaugagcaguuuaucauu

SEQ ID NO: 264467 - RNA, 19 nt, Artificial Sequence
  Description of Artificial Sequence: Synthetic oligonucleotide
  Antisense strand to SEQ ID NO: 264466
aaugauaaacugcucaugu

SEQ ID NO: 264468 - RNA, 19 nt, Artificial Sequence
  Description of Artificial Sequence: Synthetic oligonucleotide
  Sense strand starting at position 3156 SEQ ID NO: 3399
ugguguggugcugaaaucu

SEQ ID NO: 264469 - RNA, 19 nt, Artificial Sequence
  Description of Artificial Sequence: Synthetic oligonucleotide
  Antisense strand to SEQ ID NO: 264468
agauuucagcaccacacca

SEQ ID NO: 264470 - RNA, 19 nt, Artificial Sequence
  Description of Artificial Sequence: Synthetic oligonucleotide
  Sense strand starting at position 3694 SEQ ID NO: 3399
guugcuugccugcuaaacu

SEQ ID NO: 264471 - RNA, 19 nt, Artificial Sequence
  Description of Artificial Sequence: Synthetic oligonucleotide
  Antisense strand to SEQ ID NO: 264470
aguuuagcaggcaagcaac

SEQ ID NO: 264472 - RNA, 19 nt, Artificial Sequence
  Description of Artificial Sequence: Synthetic oligonucleotide
  Sense strand starting at position 100 SEQ ID NO: 3400
cugagacauugggaaacua

SEQ ID NO: 264473 - RNA, 19 nt, Artificial Sequence
  Description of Artificial Sequence: Synthetic oligonucleotide
  Antisense strand to SEQ ID NO: 264472
uaguuucccaaugucucag

SEQ ID NO: 264474 - RNA, 19 nt, Artificial Sequence
  Description of Artificial Sequence: Synthetic oligonucleotide
  Sense strand starting at position 174 SEQ ID NO: 3400
gaggcagacugauauaguu

SEQ ID NO: 264475 - RNA, 19 nt, Artificial Sequence
  Description of Artificial Sequence: Synthetic oligonucleotide
  Antisense strand to SEQ ID NO: 264474
aacuauaucagucugccuc

SEQ ID NO: 264476 - RNA, 19 nt, Artificial Sequence
  Description of Artificial Sequence: Synthetic oligonucleotide
  Sense strand starting at position 181 SEQ ID NO: 3400
acugauauaguuuagaugu

SEQ ID NO: 264477 - RNA, 19 nt, Artificial Sequence
  Description of Artificial Sequence: Synthetic oligonucleotide
  Antisense strand to SEQ ID NO: 264476
acaucuaaacuauaucagu

SEQ ID NO: 264478 - RNA, 19 nt, Artificial Sequence
  Description of Artificial Sequence: Synthetic oligonucleotide
  Sense strand starting at position 304 SEQ ID NO: 3400
gugcucuguccaugguaau

SEQ ID NO: 264479 - RNA, 19 nt, Artificial Sequence
  Description of Artificial Sequence: Synthetic oligonucleotide
  Antisense strand to SEQ ID NO: 264478
auuaccauggacagagcac

SEQ ID NO: 264480 - RNA, 19 nt, Artificial Sequence
  Description of Artificial Sequence: Synthetic oligonucleotide
  Sense strand starting at position 305 SEQ ID NO: 3400
ugcucuguccaugguaaug

SEQ ID NO: 264481 - RNA, 19 nt, Artificial Sequence
  Description of Artificial Sequence: Synthetic oligonucleotide
  Antisense strand to SEQ ID NO: 264480
cauuaccauggacagagca

SEQ ID NO: 264482 - RNA, 19 nt, Artificial Sequence
  Description of Artificial Sequence: Synthetic oligonucleotide
  Sense strand starting at position 327 SEQ ID NO: 3400
gaguucuggcccuguuagu

SEQ ID NO: 264483 - RNA, 19 nt, Artificial Sequence
  Description of Artificial Sequence: Synthetic oligonucleotide
  Antisense strand to SEQ ID NO: 264482
acuaacagggccagaacuc

SEQ ID NO: 264484 - RNA, 19 nt, Artificial Sequence
  Description of Artificial Sequence: Synthetic oligonucleotide
  Sense strand starting at position 597 SEQ ID NO: 3400
aggucuagaccaugguaaa

SEQ ID NO: 264485 - RNA, 19 nt, Artificial Sequence
  Description of Artificial Sequence: Synthetic oligonucleotide
  Antisense strand to SEQ ID NO: 264484
uuuaccauggucuagaccu

SEQ ID NO: 264486 - RNA, 19 nt, Artificial Sequence
  Description of Artificial Sequence: Synthetic oligonucleotide
  Sense strand starting at position 598 SEQ ID NO: 3400
ggucuagaccaugguaaau

SEQ ID NO: 264487 - RNA, 19 nt, Artificial Sequence
  Description of Artificial Sequence: Synthetic oligonucleotide
  Antisense strand to SEQ ID NO: 264486
auuuaccauggucuagacc

SEQ ID NO: 264488 - RNA, 19 nt, Artificial Sequence
  Description of Artificial Sequence: Synthetic oligonucleotide
  Sense strand starting at position 1011 SEQ ID NO: 3400
ucagacucaugagcuaaau

SEQ ID NO: 264489 - RNA, 19 nt, Artificial Sequence
  Description of Artificial Sequence: Synthetic oligonucleotide
  Antisense strand to SEQ ID NO: 264488
auuuagcucaugagucuga

SEQ ID NO: 264490 - RNA, 19 nt, Artificial Sequence
  Description of Artificial Sequence: Synthetic oligonucleotide
  Sense strand starting at position 1046 SEQ ID NO: 3400
uuaugauuguucuuaugca

SEQ ID NO: 264491 - RNA, 19 nt, Artificial Sequence
  Description of Artificial Sequence: Synthetic oligonucleotide
  Antisense strand to SEQ ID NO: 264490
ugcauaagaacaaucauaa

SEQ ID NO: 264492 - RNA, 19 nt, Artificial Sequence
  Description of Artificial Sequence: Synthetic oligonucleotide
  Sense strand starting at position 1065 SEQ ID NO: 3400
acauuauccuggcacuaga

SEQ ID NO: 264493 - RNA, 19 nt, Artificial Sequence
  Description of Artificial Sequence: Synthetic oligonucleotide
  Antisense strand to SEQ ID NO: 264492
ucuagugccaggauaaugu

SEQ ID NO: 264494 - RNA, 19 nt, Artificial Sequence
  Description of Artificial Sequence: Synthetic oligonucleotide
  Sense strand starting at position 1155 SEQ ID NO: 3400
augggacucagauguuaau

SEQ ID NO: 264495 - RNA, 19 nt, Artificial Sequence
  Description of Artificial Sequence: Synthetic oligonucleotide
  Antisense strand to SEQ ID NO: 264494
auuaacaucugagucccau

SEQ ID NO: 264496 - RNA, 19 nt, Artificial Sequence
  Description of Artificial Sequence: Synthetic oligonucleotide
  Sense strand starting at position 1158 SEQ ID NO: 3400
ggacucagauguuaaugga

SEQ ID NO: 264497 - RNA, 19 nt, Artificial Sequence
  Description of Artificial Sequence: Synthetic oligonucleotide
  Antisense strand to SEQ ID NO: 264496
uccauuaacaucugagucc

SEQ ID NO: 264498 - RNA, 19 nt, Artificial Sequence
  Description of Artificial Sequence: Synthetic oligonucleotide
  Sense strand starting at position 1194 SEQ ID NO: 3400
acagaaaggucauugcagu

SEQ ID NO: 264499 - RNA, 19 nt, Artificial Sequence
  Description of Artificial Sequence: Synthetic oligonucleotide
  Antisense strand to SEQ ID NO: 264498
acugcaaugaccuuucugu

SEQ ID NO: 264500 - RNA, 19 nt, Artificial Sequence
  Description of Artificial Sequence: Synthetic oligonucleotide
  Sense strand starting at position 1195 SEQ ID NO: 3400
cagaaaggucauugcaguc

SEQ ID NO: 264501 - RNA, 19 nt, Artificial Sequence
  Description of Artificial Sequence: Synthetic oligonucleotide
  Antisense strand to SEQ ID NO: 264500
gacugcaaugaccuuucug

SEQ ID NO: 264502 - RNA, 19 nt, Artificial Sequence
  Description of Artificial Sequence: Synthetic oligonucleotide
  Sense strand starting at position 1201 SEQ ID NO: 3400
ggucauugcagucagaggu

SEQ ID NO: 264503 - RNA, 19 nt, Artificial Sequence
  Description of Artificial Sequence: Synthetic oligonucleotide
  Antisense strand to SEQ ID NO: 264502
accucugacugcaaugacc

SEQ ID NO: 264504 - RNA, 19 nt, Artificial Sequence
  Description of Artificial Sequence: Synthetic oligonucleotide
  Sense strand starting at position 1432 SEQ ID NO: 3400
gcugguguccaggacaacu

SEQ ID NO: 264505 - RNA, 19 nt, Artificial Sequence
  Description of Artificial Sequence: Synthetic oligonucleotide
  Antisense strand to SEQ ID NO: 264504
aguuguccuggacaccagc

SEQ ID NO: 264506 - RNA, 19 nt, Artificial Sequence
  Description of Artificial Sequence: Synthetic oligonucleotide
  Sense strand starting at position 1524 SEQ ID NO: 3400
gcucauuguccacagagag

SEQ ID NO: 264507 - RNA, 19 nt, Artificial Sequence
  Description of Artificial Sequence: Synthetic oligonucleotide
  Antisense strand to SEQ ID NO: 264506
cucucuguggacaaugagc

SEQ ID NO: 264508 - RNA, 19 nt, Artificial Sequence
  Description of Artificial Sequence: Synthetic oligonucleotide
  Sense strand starting at position 1665 SEQ ID NO: 3400
aggauuuggugaugucaga

SEQ ID NO: 264509 - RNA, 19 nt, Artificial Sequence
  Description of Artificial Sequence: Synthetic oligonucleotide
  Antisense strand to SEQ ID NO: 264508
ucugacaucaccaaauccu

SEQ ID NO: 264510 - RNA, 19 nt, Artificial Sequence
  Description of Artificial Sequence: Synthetic oligonucleotide
  Sense strand starting at position 1672 SEQ ID NO: 3400
ggugaugucagacaugucu

SEQ ID NO: 264511 - RNA, 19 nt, Artificial Sequence
  Description of Artificial Sequence: Synthetic oligonucleotide
  Antisense strand to SEQ ID NO: 264510
agacaugucugacaucacc

SEQ ID NO: 264512 - RNA, 19 nt, Artificial Sequence
  Description of Artificial Sequence: Synthetic oligonucleotide
  Sense strand starting at position 1674 SEQ ID NO: 3400
ugaugucagacaugucugu

SEQ ID NO: 264513 - RNA, 19 nt, Artificial Sequence
  Description of Artificial Sequence: Synthetic oligonucleotide
  Antisense strand to SEQ ID NO: 264512
acagacaugucugacauca

SEQ ID NO: 264514 - RNA, 19 nt, Artificial Sequence
  Description of Artificial Sequence: Synthetic oligonucleotide
  Sense strand starting at position 1680 SEQ ID NO: 3400
cagacaugucugugcgcaa

SEQ ID NO: 264515 - RNA, 19 nt, Artificial Sequence
  Description of Artificial Sequence: Synthetic oligonucleotide
  Antisense strand to SEQ ID NO: 264514
uugcgcacagacaugucug

SEQ ID NO: 264516 - RNA, 19 nt, Artificial Sequence
  Description of Artificial Sequence: Synthetic oligonucleotide
  Sense strand starting at position 1681 SEQ ID NO: 3400
agacaugucugugcgcaau

SEQ ID NO: 264517 - RNA, 19 nt, Artificial Sequence
  Description of Artificial Sequence: Synthetic oligonucleotide
  Antisense strand to SEQ ID NO: 264516
auugcgcacagacaugucu

SEQ ID NO: 264518 - RNA, 19 nt, Artificial Sequence
  Description of Artificial Sequence: Synthetic oligonucleotide
  Sense strand starting at position 1854 SEQ ID NO: 3400
ucaguaaucgccggaaggu

SEQ ID NO: 264519 - RNA, 19 nt, Artificial Sequence
  Description of Artificial Sequence: Synthetic oligonucleotide
  Antisense strand to SEQ ID NO: 264518
accuuccggcgauuacuga

SEQ ID NO: 264520 - RNA, 19 nt, Artificial Sequence
  Description of Artificial Sequence: Synthetic oligonucleotide
  Sense strand starting at position 1855 SEQ ID NO: 3400
caguaaucgccggaaggug

SEQ ID NO: 264521 - RNA, 19 nt, Artificial Sequence
  Description of Artificial Sequence: Synthetic oligonucleotide
  Antisense strand to SEQ ID NO: 264520
caccuuccggcgauuacug

SEQ ID NO: 264522 - RNA, 19 nt, Artificial Sequence
  Description of Artificial Sequence: Synthetic oligonucleotide
  Sense strand starting at position 1938 SEQ ID NO: 3400
gguauuugcggaugugaua

SEQ ID NO: 264523 - RNA, 19 nt, Artificial Sequence
  Description of Artificial Sequence: Synthetic oligonucleotide
  Antisense strand to SEQ ID NO: 264522
uaucacauccgcaaauacc

SEQ ID NO: 264524 - RNA, 19 nt, Artificial Sequence
  Description of Artificial Sequence: Synthetic oligonucleotide
  Sense strand starting at position 1970 SEQ ID NO: 3400
agacuucugugucugaagu

SEQ ID NO: 264525 - RNA, 19 nt, Artificial Sequence
  Description of Artificial Sequence: Synthetic oligonucleotide
  Antisense strand to SEQ ID NO: 264524
acuucagacacagaagucu

SEQ ID NO: 264526 - RNA, 19 nt, Artificial Sequence
  Description of Artificial Sequence: Synthetic oligonucleotide
  Sense strand starting at position 2299 SEQ ID NO: 3400
cuucuagaguuguuucgaa

SEQ ID NO: 264527 - RNA, 19 nt, Artificial Sequence
  Description of Artificial Sequence: Synthetic oligonucleotide
  Antisense strand to SEQ ID NO: 264526
uucgaaacaacucuagaag

SEQ ID NO: 264528 - RNA, 19 nt, Artificial Sequence
  Description of Artificial Sequence: Synthetic oligonucleotide
  Sense strand starting at position 2306 SEQ ID NO: 3400
aguuguuucgaagauugaa

SEQ ID NO: 264529 - RNA, 19 nt, Artificial Sequence
  Description of Artificial Sequence: Synthetic oligonucleotide
  Antisense strand to SEQ ID NO: 264528
uucaaucuucgaaacaacu

SEQ ID NO: 264530 - RNA, 19 nt, Artificial Sequence
  Description of Artificial Sequence: Synthetic oligonucleotide
  Sense strand starting at position 2309 SEQ ID NO: 3400
uguuucgaagauugaauaa

SEQ ID NO: 264531 - RNA, 19 nt, Artificial Sequence
  Description of Artificial Sequence: Synthetic oligonucleotide
  Antisense strand to SEQ ID NO: 264530
uuauucaaucuucgaaaca

SEQ ID NO: 264532 - RNA, 19 nt, Artificial Sequence
  Description of Artificial Sequence: Synthetic oligonucleotide
  Sense strand starting at position 2335 SEQ ID NO: 3400
ucuauaaagcccugauaga

SEQ ID NO: 264533 - RNA, 19 nt, Artificial Sequence
  Description of Artificial Sequence: Synthetic oligonucleotide
  Antisense strand to SEQ ID NO: 264532
ucuaucagggcuuuauaga

SEQ ID NO: 264534 - RNA, 19 nt, Artificial Sequence
  Description of Artificial Sequence: Synthetic oligonucleotide
  Sense strand starting at position 2460 SEQ ID NO: 3400
gugcuucuccagggaccau

SEQ ID NO: 264535 - RNA, 19 nt, Artificial Sequence
  Description of Artificial Sequence: Synthetic oligonucleotide
  Antisense strand to SEQ ID NO: 264534
auggucccuggagaagcac

SEQ ID NO: 264536 - RNA, 19 nt, Artificial Sequence
  Description of Artificial Sequence: Synthetic oligonucleotide
  Sense strand starting at position 2484 SEQ ID NO: 3400
gcagaaauccugugaccaa

SEQ ID NO: 264537 - RNA, 19 nt, Artificial Sequence
  Description of Artificial Sequence: Synthetic oligonucleotide
  Antisense strand to SEQ ID NO: 264536
uuggucacaggauuucugc

SEQ ID NO: 264538 - RNA, 19 nt, Artificial Sequence
  Description of Artificial Sequence: Synthetic oligonucleotide
  Sense strand starting at position 2485 SEQ ID NO: 3400
cagaaauccugugaccaag

SEQ ID NO: 264539 - RNA, 19 nt, Artificial Sequence
  Description of Artificial Sequence: Synthetic oligonucleotide
  Antisense strand to SEQ ID NO: 264538
cuuggucacaggauuucug

SEQ ID NO: 264540 - RNA, 19 nt, Artificial Sequence
  Description of Artificial Sequence: Synthetic oligonucleotide
  Sense strand starting at position 2990 SEQ ID NO: 3400
cuugauacucucugagauc

SEQ ID NO: 264541 - RNA, 19 nt, Artificial Sequence
  Description of Artificial Sequence: Synthetic oligonucleotide
  Antisense strand to SEQ ID NO: 264540
gaucucagagaguaucaag

SEQ ID NO: 264542 - RNA, 19 nt, Artificial Sequence
  Description of Artificial Sequence: Synthetic oligonucleotide
  Sense strand starting at position 3039 SEQ ID NO: 3400
gccugagaacugugccauu

SEQ ID NO: 264543 - RNA, 19 nt, Artificial Sequence
  Description of Artificial Sequence: Synthetic oligonucleotide
  Antisense strand to SEQ ID NO: 264542
aauggcacaguucucaggc

SEQ ID NO: 264544 - RNA, 19 nt, Artificial Sequence
  Description of Artificial Sequence: Synthetic oligonucleotide
  Sense strand starting at position 3143 SEQ ID NO: 3400
agguuucccugguccacaa

SEQ ID NO: 264545 - RNA, 19 nt, Artificial Sequence
  Description of Artificial Sequence: Synthetic oligonucleotide
  Antisense strand to SEQ ID NO: 264544
uuguggaccagggaaaccu

SEQ ID NO: 264546 - RNA, 19 nt, Artificial Sequence
  Description of Artificial Sequence: Synthetic oligonucleotide
  Sense strand starting at position 3288 SEQ ID NO: 3400
gguugacauucggcugaca

SEQ ID NO: 264547 - RNA, 19 nt, Artificial Sequence
  Description of Artificial Sequence: Synthetic oligonucleotide
  Antisense strand to SEQ ID NO: 264546
ugucagccgaaugucaacc

SEQ ID NO: 264548 - RNA, 19 nt, Artificial Sequence
  Description of Artificial Sequence: Synthetic oligonucleotide
  Sense strand starting at position 3765 SEQ ID NO: 3400
gcaugagcaguuuaucauu

SEQ ID NO: 264549 - RNA, 19 nt, Artificial Sequence
  Description of Artificial Sequence: Synthetic oligonucleotide
  Antisense strand to SEQ ID NO: 264548
aaugauaaacugcucaugc

SEQ ID NO: 264550 - RNA, 19 nt, Artificial Sequence
  Description of Artificial Sequence: Synthetic oligonucleotide
  Sense strand starting at position 3885 SEQ ID NO: 3400
ugguauggugcugaaaucu

SEQ ID NO: 264551 - RNA, 19 nt, Artificial Sequence
  Description of Artificial Sequence: Synthetic oligonucleotide
  Antisense strand to SEQ ID NO: 264550
agauuucagcaccauacca

SEQ ID NO: 264552 - RNA, 19 nt, Artificial Sequence
  Description of Artificial Sequence: Synthetic oligonucleotide
  Sense strand starting at position 32 SEQ ID NO: 3401
acagauacguaauugcuau

SEQ ID NO: 264553 - RNA, 19 nt, Artificial Sequence
  Description of Artificial Sequence: Synthetic oligonucleotide
  Antisense strand to SEQ ID NO: 264552
auagcaauuacguaucugu

SEQ ID NO: 264554 - RNA, 19 nt, Artificial Sequence
  Description of Artificial Sequence: Synthetic oligonucleotide
  Sense strand starting at position 220 SEQ ID NO: 3401
acaugaauugauuguugga

SEQ ID NO: 264555 - RNA, 19 nt, Artificial Sequence
  Description of Artificial Sequence: Synthetic oligonucleotide
  Antisense strand to SEQ ID NO: 264554
uccaacaaucaauucaugu

SEQ ID NO: 264556 - RNA, 19 nt, Artificial Sequence
  Description of Artificial Sequence: Synthetic oligonucleotide
  Sense strand starting at position 222 SEQ ID NO: 3401
augaauugauuguuggauu

SEQ ID NO: 264557 - RNA, 19 nt, Artificial Sequence
  Description of Artificial Sequence: Synthetic oligonucleotide
  Antisense strand to SEQ ID NO: 264556
aauccaacaaucaauucau

SEQ ID NO: 264558 - RNA, 19 nt, Artificial Sequence
  Description of Artificial Sequence: Synthetic oligonucleotide
  Sense strand starting at position 285 SEQ ID NO: 3401
ucagaugucugcccuccaa

SEQ ID NO: 264559 - RNA, 19 nt, Artificial Sequence
  Description of Artificial Sequence: Synthetic oligonucleotide
  Antisense strand to SEQ ID NO: 264558
uuggagggcagacaucuga

SEQ ID NO: 264560 - RNA, 19 nt, Artificial Sequence
  Description of Artificial Sequence: Synthetic oligonucleotide
  Sense strand starting at position 423 SEQ ID NO: 3401
uaaguuaauucugugguua

SEQ ID NO: 264561 - RNA, 19 nt, Artificial Sequence
  Description of Artificial Sequence: Synthetic oligonucleotide
  Antisense strand to SEQ ID NO: 264560
uaaccacagaauuaacuua

SEQ ID NO: 264562 - RNA, 19 nt, Artificial Sequence
  Description of Artificial Sequence: Synthetic oligonucleotide
  Sense strand starting at position 424 SEQ ID NO: 3401
aaguuaauucugugguuac

SEQ ID NO: 264563 - RNA, 19 nt, Artificial Sequence
  Description of Artificial Sequence: Synthetic oligonucleotide
  Antisense strand to SEQ ID NO: 264562
guaaccacagaauuaacuu

SEQ ID NO: 264564 - RNA, 19 nt, Artificial Sequence
  Description of Artificial Sequence: Synthetic oligonucleotide
  Sense strand starting at position 449 SEQ ID NO: 3401
ggaaucaauuuaugguaag

SEQ ID NO: 264565 - RNA, 19 nt, Artificial Sequence
  Description of Artificial Sequence: Synthetic oligonucleotide
  Antisense strand to SEQ ID NO: 264564
cuuaccauaaauugauucc

SEQ ID NO: 264566 - RNA, 19 nt, Artificial Sequence
  Description of Artificial Sequence: Synthetic oligonucleotide
  Sense strand starting at position 452 SEQ ID NO: 3401
aucaauuuaugguaagcau

SEQ ID NO: 264567 - RNA, 19 nt, Artificial Sequence
  Description of Artificial Sequence: Synthetic oligonucleotide
  Antisense strand to SEQ ID NO: 264566
augcuuaccauaaauugau

SEQ ID NO: 264568 - RNA, 19 nt, Artificial Sequence
  Description of Artificial Sequence: Synthetic oligonucleotide
  Sense strand starting at position 485 SEQ ID NO: 3401
gcaauuaaccaaugagugu

SEQ ID NO: 264569 - RNA, 19 nt, Artificial Sequence
  Description of Artificial Sequence: Synthetic oligonucleotide
  Antisense strand to SEQ ID NO: 264568
acacucauugguuaauugc

SEQ ID NO: 264570 - RNA, 19 nt, Artificial Sequence
  Description of Artificial Sequence: Synthetic oligonucleotide
  Sense strand starting at position 499 SEQ ID NO: 3401
aguguuaaggaguggaaac

SEQ ID NO: 264571 - RNA, 19 nt, Artificial Sequence
  Description of Artificial Sequence: Synthetic oligonucleotide
  Antisense strand to SEQ ID NO: 264570
guuuccacuccuuaacacu

SEQ ID NO: 264572 - RNA, 19 nt, Artificial Sequence
  Description of Artificial Sequence: Synthetic oligonucleotide
  Sense strand starting at position 510 SEQ ID NO: 3401
guggaaacuuaucuaacca

SEQ ID NO: 264573 - RNA, 19 nt, Artificial Sequence
  Description of Artificial Sequence: Synthetic oligonucleotide
  Antisense strand to SEQ ID NO: 264572
ugguuagauaaguuuccac

SEQ ID NO: 264574 - RNA, 19 nt, Artificial Sequence
  Description of Artificial Sequence: Synthetic oligonucleotide
  Sense strand starting at position 606 SEQ ID NO: 3401
acaguaauauaugcagauc

SEQ ID NO: 264575 - RNA, 19 nt, Artificial Sequence
  Description of Artificial Sequence: Synthetic oligonucleotide
  Antisense strand to SEQ ID NO: 264574
gaucugcauauauuacugu

SEQ ID NO: 264576 - RNA, 19 nt, Artificial Sequence
  Description of Artificial Sequence: Synthetic oligonucleotide
  Sense strand starting at position 609 SEQ ID NO: 3401
guaauauaugcagaucucu

SEQ ID NO: 264577 - RNA, 19 nt, Artificial Sequence
  Description of Artificial Sequence: Synthetic oligonucleotide
  Antisense strand to SEQ ID NO: 264576
agagaucugcauauauuac

SEQ ID NO: 264578 - RNA, 19 nt, Artificial Sequence
  Description of Artificial Sequence: Synthetic oligonucleotide
  Sense strand starting at position 724 SEQ ID NO: 3401
ucguuucuccagcaaagaa

SEQ ID NO: 264579 - RNA, 19 nt, Artificial Sequence
  Description of Artificial Sequence: Synthetic oligonucleotide
  Antisense strand to SEQ ID NO: 264578
uucuuugcuggagaaacga

SEQ ID NO: 264580 - RNA, 19 nt, Artificial Sequence
  Description of Artificial Sequence: Synthetic oligonucleotide
  Sense strand starting at position 1098 SEQ ID NO: 3401
ugcucacaucgcuaacuau

SEQ ID NO: 264581 - RNA, 19 nt, Artificial Sequence
  Description of Artificial Sequence: Synthetic oligonucleotide
  Antisense strand to SEQ ID NO: 264580
auaguuagcgaugugagca

SEQ ID NO: 264582 - RNA, 19 nt, Artificial Sequence
  Description of Artificial Sequence: Synthetic oligonucleotide
  Sense strand starting at position 1867 SEQ ID NO: 3401
gguguugaccaacaaguca

SEQ ID NO: 264583 - RNA, 19 nt, Artificial Sequence
  Description of Artificial Sequence: Synthetic oligonucleotide
  Antisense strand to SEQ ID NO: 264582
ugacuuguuggucaacacc

SEQ ID NO: 264584 - RNA, 19 nt, Artificial Sequence
  Description of Artificial Sequence: Synthetic oligonucleotide
  Sense strand starting at position 1979 SEQ ID NO: 3401
ggaggagugucucuacgga

SEQ ID NO: 264585 - RNA, 19 nt, Artificial Sequence
  Description of Artificial Sequence: Synthetic oligonucleotide
  Antisense strand to SEQ ID NO: 264584
uccguagagacacuccucc

SEQ ID NO: 264586 - RNA, 19 nt, Artificial Sequence
  Description of Artificial Sequence: Synthetic oligonucleotide
  Sense strand starting at position 2048 SEQ ID NO: 3401
aaggaaaugcuagguuaac

SEQ ID NO: 264587 - RNA, 19 nt, Artificial Sequence
  Description of Artificial Sequence: Synthetic oligonucleotide
  Antisense strand to SEQ ID NO: 264586
guuaaccuagcauuuccuu

SEQ ID NO: 264588 - RNA, 19 nt, Artificial Sequence
  Description of Artificial Sequence: Synthetic oligonucleotide
  Sense strand starting at position 2386 SEQ ID NO: 3401
gggauuuccuggaggacgu

SEQ ID NO: 264589 - RNA, 19 nt, Artificial Sequence
  Description of Artificial Sequence: Synthetic oligonucleotide
  Antisense strand to SEQ ID NO: 264588
acguccuccaggaaauccc

SEQ ID NO: 264590 - RNA, 19 nt, Artificial Sequence
  Description of Artificial Sequence: Synthetic oligonucleotide
  Sense strand starting at position 2552 SEQ ID NO: 3401
uuucucagugugggaguaa

SEQ ID NO: 264591 - RNA, 19 nt, Artificial Sequence
  Description of Artificial Sequence: Synthetic oligonucleotide
  Antisense strand to SEQ ID NO: 264590
uuacucccacacugagaaa

SEQ ID NO: 264592 - RNA, 19 nt, Artificial Sequence
  Description of Artificial Sequence: Synthetic oligonucleotide
  Sense strand starting at position 2623 SEQ ID NO: 3401
gaaaguucguugccaggga

SEQ ID NO: 264593 - RNA, 19 nt, Artificial Sequence
  Description of Artificial Sequence: Synthetic oligonucleotide
  Antisense strand to SEQ ID NO: 264592
ucccuggcaacgaacuuuc

SEQ ID NO: 264594 - RNA, 19 nt, Artificial Sequence
  Description of Artificial Sequence: Synthetic oligonucleotide
  Sense strand starting at position 2665 SEQ ID NO: 3401
aggagcucauugcuaggaa

SEQ ID NO: 264595 - RNA, 19 nt, Artificial Sequence
  Description of Artificial Sequence: Synthetic oligonucleotide
  Antisense strand to SEQ ID NO: 264594
uuccuagcaaugagcuccu

SEQ ID NO: 264596 - RNA, 19 nt, Artificial Sequence
  Description of Artificial Sequence: Synthetic oligonucleotide
  Sense strand starting at position 2668 SEQ ID NO: 3401
agcucauugcuaggaaaca

SEQ ID NO: 264597 - RNA, 19 nt, Artificial Sequence
  Description of Artificial Sequence: Synthetic oligonucleotide
  Antisense strand to SEQ ID NO: 264596
uguuuccuagcaaugagcu

SEQ ID NO: 264598 - RNA, 19 nt, Artificial Sequence
  Description of Artificial Sequence: Synthetic oligonucleotide
  Sense strand starting at position 2683 SEQ ID NO: 3401
aacaaaggcuuguugagaa

SEQ ID NO: 264599 - RNA, 19 nt, Artificial Sequence
  Description of Artificial Sequence: Synthetic oligonucleotide
  Antisense strand to SEQ ID NO: 264598
uucucaacaagccuuuguu

SEQ ID NO: 264600 - RNA, 19 nt, Artificial Sequence
  Description of Artificial Sequence: Synthetic oligonucleotide
  Sense strand starting at position 2712 SEQ ID NO: 3401
uggaacuuggagugauuga

SEQ ID NO: 264601 - RNA, 19 nt, Artificial Sequence
  Description of Artificial Sequence: Synthetic oligonucleotide
  Antisense strand to SEQ ID NO: 264600
ucaaucacuccaaguucca

SEQ ID NO: 264602 - RNA, 19 nt, Artificial Sequence
  Description of Artificial Sequence: Synthetic oligonucleotide
  Sense strand starting at position 2736 SEQ ID NO: 3401
ccagguagcagggaguuaa

SEQ ID NO: 264603 - RNA, 19 nt, Artificial Sequence
  Description of Artificial Sequence: Synthetic oligonucleotide
  Antisense strand to SEQ ID NO: 264602
uuaacucccugcuaccugg

SEQ ID NO: 264604 - RNA, 19 nt, Artificial Sequence
  Description of Artificial Sequence: Synthetic oligonucleotide
  Sense strand starting at position 2843 SEQ ID NO: 3401
ggaaguuugugaguuaagu

SEQ ID NO: 264605 - RNA, 19 nt, Artificial Sequence
  Description of Artificial Sequence: Synthetic oligonucleotide
  Antisense strand to SEQ ID NO: 264604
acuuaacucacaaacuucc

SEQ ID NO: 264606 - RNA, 19 nt, Artificial Sequence
  Description of Artificial Sequence: Synthetic oligonucleotide
  Sense strand starting at position 2861 SEQ ID NO: 3401
uacguuaucuggguagaag

SEQ ID NO: 264607 - RNA, 19 nt, Artificial Sequence
  Description of Artificial Sequence: Synthetic oligonucleotide
  Antisense strand to SEQ ID NO: 264606
cuucuacccagauaacgua

SEQ ID NO: 264608 - RNA, 19 nt, Artificial Sequence
  Description of Artificial Sequence: Synthetic oligonucleotide
  Sense strand starting at position 2862 SEQ ID NO: 3401
acguuaucuggguagaagg

SEQ ID NO: 264609 - RNA, 19 nt, Artificial Sequence
  Description of Artificial Sequence: Synthetic oligonucleotide
  Antisense strand to SEQ ID NO: 264608
ccuucuacccagauaacgu

SEQ ID NO: 264610 - RNA, 19 nt, Artificial Sequence
  Description of Artificial Sequence: Synthetic oligonucleotide
  Sense strand starting at position 2905 SEQ ID NO: 3401
aaaguagaccuauggcuua

SEQ ID NO: 264611 - RNA, 19 nt, Artificial Sequence
  Description of Artificial Sequence: Synthetic oligonucleotide
  Antisense strand to SEQ ID NO: 264610
uaagccauaggucuacuuu

SEQ ID NO: 264612 - RNA, 19 nt, Artificial Sequence
  Description of Artificial Sequence: Synthetic oligonucleotide
  Sense strand starting at position 2965 SEQ ID NO: 3401
aagacagacguauagcuaa

SEQ ID NO: 264613 - RNA, 19 nt, Artificial Sequence
  Description of Artificial Sequence: Synthetic oligonucleotide
  Antisense strand to SEQ ID NO: 264612
uuagcuauacgucugucuu

SEQ ID NO: 264614 - RNA, 19 nt, Artificial Sequence
  Description of Artificial Sequence: Synthetic oligonucleotide
  Sense strand starting at position 3094 SEQ ID NO: 3401
gggcaauaaaguugaaaua

SEQ ID NO: 264615 - RNA, 19 nt, Artificial Sequence
  Description of Artificial Sequence: Synthetic oligonucleotide
  Antisense strand to SEQ ID NO: 264614
uauuucaacuuuauugccc

SEQ ID NO: 264616 - RNA, 19 nt, Artificial Sequence
  Description of Artificial Sequence: Synthetic oligonucleotide
  Sense strand starting at position 3181 SEQ ID NO: 3401
acaaauaccucuuugugga

SEQ ID NO: 264617 - RNA, 19 nt, Artificial Sequence
  Description of Artificial Sequence: Synthetic oligonucleotide
  Antisense strand to SEQ ID NO: 264616
uccacaaagagguauuugu

SEQ ID NO: 264618 - RNA, 19 nt, Artificial Sequence
  Description of Artificial Sequence: Synthetic oligonucleotide
  Sense strand starting at position 3188 SEQ ID NO: 3401
ccucuuuguggacaguuau

SEQ ID NO: 264619 - RNA, 19 nt, Artificial Sequence
  Description of Artificial Sequence: Synthetic oligonucleotide
  Antisense strand to SEQ ID NO: 264618
auaacuguccacaaagagg

SEQ ID NO: 264620 - RNA, 19 nt, Artificial Sequence
  Description of Artificial Sequence: Synthetic oligonucleotide
  Sense strand starting at position 3200 SEQ ID NO: 3401
caguuauaagcagagccua

SEQ ID NO: 264621 - RNA, 19 nt, Artificial Sequence
  Description of Artificial Sequence: Synthetic oligonucleotide
  Antisense strand to SEQ ID NO: 264620
uaggcucugcuuauaacug

SEQ ID NO: 264622 - RNA, 19 nt, Artificial Sequence
  Description of Artificial Sequence: Synthetic oligonucleotide
  Sense strand starting at position 3286 SEQ ID NO: 3401
cugaauaucccuugagaua

SEQ ID NO: 264623 - RNA, 19 nt, Artificial Sequence
  Description of Artificial Sequence: Synthetic oligonucleotide
  Antisense strand to SEQ ID NO: 264622
uaucucaagggauauucag

SEQ ID NO: 264624 - RNA, 19 nt, Artificial Sequence
  Description of Artificial Sequence: Synthetic oligonucleotide
  Sense strand starting at position 3489 SEQ ID NO: 3401
ggcucuauuucugaacaca

SEQ ID NO: 264625 - RNA, 19 nt, Artificial Sequence
  Description of Artificial Sequence: Synthetic oligonucleotide
  Antisense strand to SEQ ID NO: 264624
uguguucagaaauagagcc

SEQ ID NO: 264626 - RNA, 19 nt, Artificial Sequence
  Description of Artificial Sequence: Synthetic oligonucleotide
  Sense strand starting at position 3562 SEQ ID NO: 3401
ggcuuucuaccagauguuu

SEQ ID NO: 264627 - RNA, 19 nt, Artificial Sequence
  Description of Artificial Sequence: Synthetic oligonucleotide
  Antisense strand to SEQ ID NO: 264626
aaacaucugguagaaagcc

SEQ ID NO: 264628 - RNA, 19 nt, Artificial Sequence
  Description of Artificial Sequence: Synthetic oligonucleotide
  Sense strand starting at position 3570 SEQ ID NO: 3401
accagauguuuaccugguu

SEQ ID NO: 264629 - RNA, 19 nt, Artificial Sequence
  Description of Artificial Sequence: Synthetic oligonucleotide
  Antisense strand to SEQ ID NO: 264628
aaccagguaaacaucuggu

SEQ ID NO: 264630 - RNA, 19 nt, Artificial Sequence
  Description of Artificial Sequence: Synthetic oligonucleotide
  Sense strand starting at position 3736 SEQ ID NO: 3401
cuuaaauggcuauacagua

SEQ ID NO: 264631 - RNA, 19 nt, Artificial Sequence
  Description of Artificial Sequence: Synthetic oligonucleotide
  Antisense strand to SEQ ID NO: 264630
uacuguauagccauuuaag

SEQ ID NO: 264632 - RNA, 19 nt, Artificial Sequence
  Description of Artificial Sequence: Synthetic oligonucleotide
  Sense strand starting at position 109 SEQ ID NO: 3402
cacucacuugugggagaaa

SEQ ID NO: 264633 - RNA, 19 nt, Artificial Sequence
  Description of Artificial Sequence: Synthetic oligonucleotide
  Antisense strand to SEQ ID NO: 264632
uuucucccacaagugagug

SEQ ID NO: 264634 - RNA, 19 nt, Artificial Sequence
  Description of Artificial Sequence: Synthetic oligonucleotide
  Sense strand starting at position 164 SEQ ID NO: 3402
uucucuuaagggcauaauu

SEQ ID NO: 264635 - RNA, 19 nt, Artificial Sequence
  Description of Artificial Sequence: Synthetic oligonucleotide
  Antisense strand to SEQ ID NO: 264634
aauuaugcccuuaagagaa

SEQ ID NO: 264636 - RNA, 19 nt, Artificial Sequence
  Description of Artificial Sequence: Synthetic oligonucleotide
  Sense strand starting at position 250 SEQ ID NO: 3402
acaguaugccaauauugua

SEQ ID NO: 264637 - RNA, 19 nt, Artificial Sequence
  Description of Artificial Sequence: Synthetic oligonucleotide
  Antisense strand to SEQ ID NO: 264636
uacaauauuggcauacugu

SEQ ID NO: 264638 - RNA, 19 nt, Artificial Sequence
  Description of Artificial Sequence: Synthetic oligonucleotide
  Sense strand starting at position 902 SEQ ID NO: 3402
guauguccaccauagaauc

SEQ ID NO: 264639 - RNA, 19 nt, Artificial Sequence
  Description of Artificial Sequence: Synthetic oligonucleotide
  Antisense strand to SEQ ID NO: 264638
gauucuaugguggacauac

SEQ ID NO: 264640 - RNA, 19 nt, Artificial Sequence
  Description of Artificial Sequence: Synthetic oligonucleotide
  Sense strand starting at position 914 SEQ ID NO: 3402
uagaauccucuagggcaga

SEQ ID NO: 264641 - RNA, 19 nt, Artificial Sequence
  Description of Artificial Sequence: Synthetic oligonucleotide
  Antisense strand to SEQ ID NO: 264640
ucugcccuagaggauucua

SEQ ID NO: 264642 - RNA, 19 nt, Artificial Sequence
  Description of Artificial Sequence: Synthetic oligonucleotide
  Sense strand starting at position 929 SEQ ID NO: 3402
cagacagacuccuagagau

SEQ ID NO: 264643 - RNA, 19 nt, Artificial Sequence
  Description of Artificial Sequence: Synthetic oligonucleotide
  Antisense strand to SEQ ID NO: 264642
aucucuaggagucugucug

SEQ ID NO: 264644 - RNA, 19 nt, Artificial Sequence
  Description of Artificial Sequence: Synthetic oligonucleotide
  Sense strand starting at position 937 SEQ ID NO: 3402
cuccuagagauggguacau

SEQ ID NO: 264645 - RNA, 19 nt, Artificial Sequence
  Description of Artificial Sequence: Synthetic oligonucleotide
  Antisense strand to SEQ ID NO: 264644
auguacccaucucuaggag

SEQ ID NO: 264646 - RNA, 19 nt, Artificial Sequence
  Description of Artificial Sequence: Synthetic oligonucleotide
  Sense strand starting at position 939 SEQ ID NO: 3402
ccuagagauggguacaugu

SEQ ID NO: 264647 - RNA, 19 nt, Artificial Sequence
  Description of Artificial Sequence: Synthetic oligonucleotide
  Antisense strand to SEQ ID NO: 264646
acauguacccaucucuagg

SEQ ID NO: 264648 - RNA, 19 nt, Artificial Sequence
  Description of Artificial Sequence: Synthetic oligonucleotide
  Sense strand starting at position 968 SEQ ID NO: 3402
gaaugcguccagugagaau

SEQ ID NO: 264649 - RNA, 19 nt, Artificial Sequence
  Description of Artificial Sequence: Synthetic oligonucleotide
  Antisense strand to SEQ ID NO: 264648
auucucacuggacgcauuc

SEQ ID NO: 264650 - RNA, 19 nt, Artificial Sequence
  Description of Artificial Sequence: Synthetic oligonucleotide
  Sense strand starting at position 1073 SEQ ID NO: 3402
cucuuagaauguucuuguu

SEQ ID NO: 264651 - RNA, 19 nt, Artificial Sequence
  Description of Artificial Sequence: Synthetic oligonucleotide
  Antisense strand to SEQ ID NO: 264650
aacaagaacauucuaagag

SEQ ID NO: 264652 - RNA, 19 nt, Artificial Sequence
  Description of Artificial Sequence: Synthetic oligonucleotide
  Sense strand starting at position 1489 SEQ ID NO: 3402
uucuaacaauccucggaga

SEQ ID NO: 264653 - RNA, 19 nt, Artificial Sequence
  Description of Artificial Sequence: Synthetic oligonucleotide
  Antisense strand to SEQ ID NO: 264652
ucuccgaggauuguuagaa

SEQ ID NO: 264654 - RNA, 19 nt, Artificial Sequence
  Description of Artificial Sequence: Synthetic oligonucleotide
  Sense strand starting at position 1491 SEQ ID NO: 3402
cuaacaauccucggagagu

SEQ ID NO: 264655 - RNA, 19 nt, Artificial Sequence
  Description of Artificial Sequence: Synthetic oligonucleotide
  Antisense strand to SEQ ID NO: 264654
acucuccgaggauuguuag

SEQ ID NO: 264656 - RNA, 19 nt, Artificial Sequence
  Description of Artificial Sequence: Synthetic oligonucleotide
  Sense strand starting at position 1577 SEQ ID NO: 3402
cgaggaacuucccaaagaa

SEQ ID NO: 264657 - RNA, 19 nt, Artificial Sequence
  Description of Artificial Sequence: Synthetic oligonucleotide
  Antisense strand to SEQ ID NO: 264656
uucuuugggaaguuccucg

SEQ ID NO: 264658 - RNA, 19 nt, Artificial Sequence
  Description of Artificial Sequence: Synthetic oligonucleotide
  Sense strand starting at position 2312 SEQ ID NO: 3402
ggcgucauuuccgugaguc

SEQ ID NO: 264659 - RNA, 19 nt, Artificial Sequence
  Description of Artificial Sequence: Synthetic oligonucleotide
  Antisense strand to SEQ ID NO: 264658
gacucacggaaaugacgcc

SEQ ID NO: 264660 - RNA, 19 nt, Artificial Sequence
  Description of Artificial Sequence: Synthetic oligonucleotide
  Sense strand starting at position 2313 SEQ ID NO: 3402
gcgucauuuccgugaguca

SEQ ID NO: 264661 - RNA, 19 nt, Artificial Sequence
  Description of Artificial Sequence: Synthetic oligonucleotide
  Antisense strand to SEQ ID NO: 264660
ugacucacggaaaugacgc

SEQ ID NO: 264662 - RNA, 19 nt, Artificial Sequence
  Description of Artificial Sequence: Synthetic oligonucleotide
  Sense strand starting at position 2314 SEQ ID NO: 3402
cgucauuuccgugagucau

SEQ ID NO: 264663 - RNA, 19 nt, Artificial Sequence
  Description of Artificial Sequence: Synthetic oligonucleotide
  Antisense strand to SEQ ID NO: 264662
augacucacggaaaugacg

SEQ ID NO: 264664 - RNA, 19 nt, Artificial Sequence
  Description of Artificial Sequence: Synthetic oligonucleotide
  Sense strand starting at position 2316 SEQ ID NO: 3402
ucauuuccgugagucaucu

SEQ ID NO: 264665 - RNA, 19 nt, Artificial Sequence
  Description of Artificial Sequence: Synthetic oligonucleotide
  Antisense strand to SEQ ID NO: 264664
agaugacucacggaaauga

SEQ ID NO: 264666 - RNA, 19 nt, Artificial Sequence
  Description of Artificial Sequence: Synthetic oligonucleotide
  Sense strand starting at position 2324 SEQ ID NO: 3402
gugagucaucugagggcgu

SEQ ID NO: 264667 - RNA, 19 nt, Artificial Sequence
  Description of Artificial Sequence: Synthetic oligonucleotide
  Antisense strand to SEQ ID NO: 264666
acgcccucagaugacucac

SEQ ID NO: 264668 - RNA, 19 nt, Artificial Sequence
  Description of Artificial Sequence: Synthetic oligonucleotide
  Sense strand starting at position 2326 SEQ ID NO: 3402
gagucaucugagggcguga

SEQ ID NO: 264669 - RNA, 19 nt, Artificial Sequence
  Description of Artificial Sequence: Synthetic oligonucleotide
  Antisense strand to SEQ ID NO: 264668
ucacgcccucagaugacuc

SEQ ID NO: 264670 - RNA, 19 nt, Artificial Sequence
  Description of Artificial Sequence: Synthetic oligonucleotide
  Sense strand starting at position 2343 SEQ ID NO: 3402
gagacccuacgguguuaaa

SEQ ID NO: 264671 - RNA, 19 nt, Artificial Sequence
  Description of Artificial Sequence: Synthetic oligonucleotide
  Antisense strand to SEQ ID NO: 264670
uuuaacaccguagggucuc

SEQ ID NO: 264672 - RNA, 19 nt, Artificial Sequence
  Description of Artificial Sequence: Synthetic oligonucleotide
  Sense strand starting at position 2484 SEQ ID NO: 3402
cgucgucaccgagugucau

SEQ ID NO: 264673 - RNA, 19 nt, Artificial Sequence
  Description of Artificial Sequence: Synthetic oligonucleotide
  Antisense strand to SEQ ID NO: 264672
augacacucggugacgacg

SEQ ID NO: 264674 - RNA, 19 nt, Artificial Sequence
  Description of Artificial Sequence: Synthetic oligonucleotide
  Sense strand starting at position 2572 SEQ ID NO: 3402
aggcuuuacuaacuauaga

SEQ ID NO: 264675 - RNA, 19 nt, Artificial Sequence
  Description of Artificial Sequence: Synthetic oligonucleotide
  Antisense strand to SEQ ID NO: 264674
ucuauaguuaguaaagccu

SEQ ID NO: 264676 - RNA, 19 nt, Artificial Sequence
  Description of Artificial Sequence: Synthetic oligonucleotide
  Sense strand starting at position 2795 SEQ ID NO: 3402
uccacaaauugccugugaa

SEQ ID NO: 264677 - RNA, 19 nt, Artificial Sequence
  Description of Artificial Sequence: Synthetic oligonucleotide
  Antisense strand to SEQ ID NO: 264676
uucacaggcaauuugugga

SEQ ID NO: 264678 - RNA, 19 nt, Artificial Sequence
  Description of Artificial Sequence: Synthetic oligonucleotide
  Sense strand starting at position 2796 SEQ ID NO: 3402
ccacaaauugccugugaag

SEQ ID NO: 264679 - RNA, 19 nt, Artificial Sequence
  Description of Artificial Sequence: Synthetic oligonucleotide
  Antisense strand to SEQ ID NO: 264678
cuucacaggcaauuugugg

SEQ ID NO: 264680 - RNA, 19 nt, Artificial Sequence
  Description of Artificial Sequence: Synthetic oligonucleotide
  Sense strand starting at position 2798 SEQ ID NO: 3402
acaaauugccugugaagag

SEQ ID NO: 264681 - RNA, 19 nt, Artificial Sequence
  Description of Artificial Sequence: Synthetic oligonucleotide
  Antisense strand to SEQ ID NO: 264680
cucuucacaggcaauuugu

SEQ ID NO: 264682 - RNA, 19 nt, Artificial Sequence
  Description of Artificial Sequence: Synthetic oligonucleotide
  Sense strand starting at position 3161 SEQ ID NO: 3402
uugcaacuugcuuaacgaa

SEQ ID NO: 264683 - RNA, 19 nt, Artificial Sequence
  Description of Artificial Sequence: Synthetic oligonucleotide
  Antisense strand to SEQ ID NO: 264682
uucguuaagcaaguugcaa

SEQ ID NO: 264684 - RNA, 19 nt, Artificial Sequence
  Description of Artificial Sequence: Synthetic oligonucleotide
  Sense strand starting at position 3269 SEQ ID NO: 3402
ugcccauuccuuuaguauu

SEQ ID NO: 264685 - RNA, 19 nt, Artificial Sequence
  Description of Artificial Sequence: Synthetic oligonucleotide
  Antisense strand to SEQ ID NO: 264684
aauacuaaaggaaugggca

SEQ ID NO: 264686 - RNA, 19 nt, Artificial Sequence
  Description of Artificial Sequence: Synthetic oligonucleotide
  Sense strand starting at position 3279 SEQ ID NO: 3402
uuuaguauugccuauagcu

SEQ ID NO: 264687 - RNA, 19 nt, Artificial Sequence
  Description of Artificial Sequence: Synthetic oligonucleotide
  Antisense strand to SEQ ID NO: 264686
agcuauaggcaauacuaaa

SEQ ID NO: 264688 - RNA, 19 nt, Artificial Sequence
  Description of Artificial Sequence: Synthetic oligonucleotide
  Sense strand starting at position 3323 SEQ ID NO: 3402
gagaguaguugcuugcaaa

SEQ ID NO: 264689 - RNA, 19 nt, Artificial Sequence
  Description of Artificial Sequence: Synthetic oligonucleotide
  Antisense strand to SEQ ID NO: 264688
uuugcaagcaacuacucuc

SEQ ID NO: 264690 - RNA, 19 nt, Artificial Sequence
  Description of Artificial Sequence: Synthetic oligonucleotide
  Sense strand starting at position 3395 SEQ ID NO: 3402
uugguuguccauuaggcau

SEQ ID NO: 264691 - RNA, 19 nt, Artificial Sequence
  Description of Artificial Sequence: Synthetic oligonucleotide
  Antisense strand to SEQ ID NO: 264690
augccuaauggacaaccaa

SEQ ID NO: 264692 - RNA, 19 nt, Artificial Sequence
  Description of Artificial Sequence: Synthetic oligonucleotide
  Sense strand starting at position 3401 SEQ ID NO: 3402
guccauuaggcaugugaaa

SEQ ID NO: 264693 - RNA, 19 nt, Artificial Sequence
  Description of Artificial Sequence: Synthetic oligonucleotide
  Antisense strand to SEQ ID NO: 264692
uuucacaugccuaauggac

SEQ ID NO: 264694 - RNA, 19 nt, Artificial Sequence
  Description of Artificial Sequence: Synthetic oligonucleotide
  Sense strand starting at position 3496 SEQ ID NO: 3402
cuuguacuugcucaguaca

SEQ ID NO: 264695 - RNA, 19 nt, Artificial Sequence
  Description of Artificial Sequence: Synthetic oligonucleotide
  Antisense strand to SEQ ID NO: 264694
uguacugagcaaguacaag

SEQ ID NO: 264696 - RNA, 19 nt, Artificial Sequence
  Description of Artificial Sequence: Synthetic oligonucleotide
  Sense strand starting at position 3498 SEQ ID NO: 3402
uguacuugcucaguacaag

SEQ ID NO: 264697 - RNA, 19 nt, Artificial Sequence
  Description of Artificial Sequence: Synthetic oligonucleotide
  Antisense strand to SEQ ID NO: 264696
cuuguacugagcaaguaca

SEQ ID NO: 264698 - RNA, 19 nt, Artificial Sequence
  Description of Artificial Sequence: Synthetic oligonucleotide
  Sense strand starting at position 3499 SEQ ID NO: 3402
guacuugcucaguacaaga

SEQ ID NO: 264699 - RNA, 19 nt, Artificial Sequence
  Description of Artificial Sequence: Synthetic oligonucleotide
  Antisense strand to SEQ ID NO: 264698
ucuuguacugagcaaguac

SEQ ID NO: 264700 - RNA, 19 nt, Artificial Sequence
  Description of Artificial Sequence: Synthetic oligonucleotide
  Sense strand starting at position 3523 SEQ ID NO: 3402
ggaagugugcuugcugucu

SEQ ID NO: 264701 - RNA, 19 nt, Artificial Sequence
  Description of Artificial Sequence: Synthetic oligonucleotide
  Antisense strand to SEQ ID NO: 264700
agacagcaagcacacuucc

SEQ ID NO: 264702 - RNA, 19 nt, Artificial Sequence
  Description of Artificial Sequence: Synthetic oligonucleotide
  Sense strand starting at position 3621 SEQ ID NO: 3402
ccuuaaauggaugguggua

SEQ ID NO: 264703 - RNA, 19 nt, Artificial Sequence
  Description of Artificial Sequence: Synthetic oligonucleotide
  Antisense strand to SEQ ID NO: 264702
uaccaccauccauuuaagg

SEQ ID NO: 264704 - RNA, 19 nt, Artificial Sequence
  Description of Artificial Sequence: Synthetic oligonucleotide
  Sense strand starting at position 3644 SEQ ID NO: 3402
aguaguaaccacuaucuuu

SEQ ID NO: 264705 - RNA, 19 nt, Artificial Sequence
  Description of Artificial Sequence: Synthetic oligonucleotide
  Antisense strand to SEQ ID NO: 264704
aaagauagugguuacuacu

SEQ ID NO: 264706 - RNA, 19 nt, Artificial Sequence
  Description of Artificial Sequence: Synthetic oligonucleotide
  Sense strand starting at position 3909 SEQ ID NO: 3402
cccaaauccguggauuauu

SEQ ID NO: 264707 - RNA, 19 nt, Artificial Sequence
  Description of Artificial Sequence: Synthetic oligonucleotide
  Antisense strand to SEQ ID NO: 264706
aauaauccacggauuuggg

SEQ ID NO: 264708 - RNA, 19 nt, Artificial Sequence
  Description of Artificial Sequence: Synthetic oligonucleotide
  Sense strand starting at position 3917 SEQ ID NO: 3402
cguggauuauucucaacau

SEQ ID NO: 264709 - RNA, 19 nt, Artificial Sequence
  Description of Artificial Sequence: Synthetic oligonucleotide
  Antisense strand to SEQ ID NO: 264708
auguugagaauaauccacg

SEQ ID NO: 264710 - RNA, 19 nt, Artificial Sequence
  Description of Artificial Sequence: Synthetic oligonucleotide
  Sense strand starting at position 3968 SEQ ID NO: 3402
agaugucacuucucugcua

SEQ ID NO: 264711 - RNA, 19 nt, Artificial Sequence
  Description of Artificial Sequence: Synthetic oligonucleotide
  Antisense strand to SEQ ID NO: 264710
uagcagagaagugacaucu

SEQ ID NO: 264712 - RNA, 19 nt, Artificial Sequence
  Description of Artificial Sequence: Synthetic oligonucleotide
  Sense strand starting at position 459 SEQ ID NO: 3403
aggauaccuuaacagaaau

SEQ ID NO: 264713 - RNA, 19 nt, Artificial Sequence
  Description of Artificial Sequence: Synthetic oligonucleotide
  Antisense strand to SEQ ID NO: 264712
auuucuguuaagguauccu

SEQ ID NO: 264714 - RNA, 19 nt, Artificial Sequence
  Description of Artificial Sequence: Synthetic oligonucleotide
  Sense strand starting at position 522 SEQ ID NO: 3403
uggaauuagaggcaugcuu

SEQ ID NO: 264715 - RNA, 19 nt, Artificial Sequence
  Description of Artificial Sequence: Synthetic oligonucleotide
  Antisense strand to SEQ ID NO: 264714
aagcaugccucuaauucca

SEQ ID NO: 264716 - RNA, 19 nt, Artificial Sequence
  Description of Artificial Sequence: Synthetic oligonucleotide
  Sense strand starting at position 524 SEQ ID NO: 3403
gaauuagaggcaugcuuua

SEQ ID NO: 264717 - RNA, 19 nt, Artificial Sequence
  Description of Artificial Sequence: Synthetic oligonucleotide
  Antisense strand to SEQ ID NO: 264716
uaaagcaugccucuaauuc

SEQ ID NO: 264718 - RNA, 19 nt, Artificial Sequence
  Description of Artificial Sequence: Synthetic oligonucleotide
  Sense strand starting at position 529 SEQ ID NO: 3403
agaggcaugcuuuaauucu

SEQ ID NO: 264719 - RNA, 19 nt, Artificial Sequence
  Description of Artificial Sequence: Synthetic oligonucleotide
  Antisense strand to SEQ ID NO: 264718
agaauuaaagcaugccucu

SEQ ID NO: 264720 - RNA, 19 nt, Artificial Sequence
  Description of Artificial Sequence: Synthetic oligonucleotide
  Sense strand starting at position 610 SEQ ID NO: 3403
gaugguuacugagcucaaa

SEQ ID NO: 264721 - RNA, 19 nt, Artificial Sequence
  Description of Artificial Sequence: Synthetic oligonucleotide
  Antisense strand to SEQ ID NO: 264720
uuugagcucaguaaccauc

SEQ ID NO: 264722 - RNA, 19 nt, Artificial Sequence
  Description of Artificial Sequence: Synthetic oligonucleotide
  Sense strand starting at position 720 SEQ ID NO: 3403
cgugaucaucuauaacuuc

SEQ ID NO: 264723 - RNA, 19 nt, Artificial Sequence
  Description of Artificial Sequence: Synthetic oligonucleotide
  Antisense strand to SEQ ID NO: 264722
gaaguuauagaugaucacg

SEQ ID NO: 264724 - RNA, 19 nt, Artificial Sequence
  Description of Artificial Sequence: Synthetic oligonucleotide
  Sense strand starting at position 745 SEQ ID NO: 3403
gccuaaacccuauggucau

SEQ ID NO: 264725 - RNA, 19 nt, Artificial Sequence
  Description of Artificial Sequence: Synthetic oligonucleotide
  Antisense strand to SEQ ID NO: 264724
augaccauaggguuuaggc

SEQ ID NO: 264726 - RNA, 19 nt, Artificial Sequence
  Description of Artificial Sequence: Synthetic oligonucleotide
  Sense strand starting at position 778 SEQ ID NO: 3403
cuuggaauccagcagcauu

SEQ ID NO: 264727 - RNA, 19 nt, Artificial Sequence
  Description of Artificial Sequence: Synthetic oligonucleotide
  Antisense strand to SEQ ID NO: 264726
aaugcugcuggauuccaag

SEQ ID NO: 264728 - RNA, 19 nt, Artificial Sequence
  Description of Artificial Sequence: Synthetic oligonucleotide
  Sense strand starting at position 957 SEQ ID NO: 3403
auggucuaauggucuauau

SEQ ID NO: 264729 - RNA, 19 nt, Artificial Sequence
  Description of Artificial Sequence: Synthetic oligonucleotide
  Antisense strand to SEQ ID NO: 264728
auauagaccauuagaccau

SEQ ID NO: 264730 - RNA, 19 nt, Artificial Sequence
  Description of Artificial Sequence: Synthetic oligonucleotide
  Sense strand starting at position 959 SEQ ID NO: 3403
ggucuaauggucuauauga

SEQ ID NO: 264731 - RNA, 19 nt, Artificial Sequence
  Description of Artificial Sequence: Synthetic oligonucleotide
  Antisense strand to SEQ ID NO: 264730
ucauauagaccauuagacc

SEQ ID NO: 264732 - RNA, 19 nt, Artificial Sequence
  Description of Artificial Sequence: Synthetic oligonucleotide
  Sense strand starting at position 975 SEQ ID NO: 3403
ugauaaugguauccaaauu

SEQ ID NO: 264733 - RNA, 19 nt, Artificial Sequence
  Description of Artificial Sequence: Synthetic oligonucleotide
  Antisense strand to SEQ ID NO: 264732
aauuuggauaccauuauca

SEQ ID NO: 264734 - RNA, 19 nt, Artificial Sequence
  Description of Artificial Sequence: Synthetic oligonucleotide
  Sense strand starting at position 996 SEQ ID NO: 3403
uuucucaauccauggguca

SEQ ID NO: 264735 - RNA, 19 nt, Artificial Sequence
  Description of Artificial Sequence: Synthetic oligonucleotide
  Antisense strand to SEQ ID NO: 264734
ugacccauggauugagaaa

SEQ ID NO: 264736 - RNA, 19 nt, Artificial Sequence
  Description of Artificial Sequence: Synthetic oligonucleotide
  Sense strand starting at position 1018 SEQ ID NO: 3403
cccugagugguccauauaa

SEQ ID NO: 264737 - RNA, 19 nt, Artificial Sequence
  Description of Artificial Sequence: Synthetic oligonucleotide
  Antisense strand to SEQ ID NO: 264736
uuauauggaccacucaggg

SEQ ID NO: 264738 - RNA, 19 nt, Artificial Sequence
  Description of Artificial Sequence: Synthetic oligonucleotide
  Sense strand starting at position 1020 SEQ ID NO: 3403
cugagugguccauauaacu

SEQ ID NO: 264739 - RNA, 19 nt, Artificial Sequence
  Description of Artificial Sequence: Synthetic oligonucleotide
  Antisense strand to SEQ ID NO: 264738
aguuauauggaccacucag

SEQ ID NO: 264740 - RNA, 19 nt, Artificial Sequence
  Description of Artificial Sequence: Synthetic oligonucleotide
  Sense strand starting at position 1057 SEQ ID NO: 3403
ucaccuaagugauuauaga

SEQ ID NO: 264741 - RNA, 19 nt, Artificial Sequence
  Description of Artificial Sequence: Synthetic oligonucleotide
  Antisense strand to SEQ ID NO: 264740
ucuauaaucacuuagguga

SEQ ID NO: 264742 - RNA, 19 nt, Artificial Sequence
  Description of Artificial Sequence: Synthetic oligonucleotide
  Sense strand starting at position 1184 SEQ ID NO: 3403
ucacuaagcuuggucacaa

SEQ ID NO: 264743 - RNA, 19 nt, Artificial Sequence
  Description of Artificial Sequence: Synthetic oligonucleotide
  Antisense strand to SEQ ID NO: 264742
uugugaccaagcuuaguga

SEQ ID NO: 264744 - RNA, 19 nt, Artificial Sequence
  Description of Artificial Sequence: Synthetic oligonucleotide
  Sense strand starting at position 1271 SEQ ID NO: 3403
ugaaacacguucccuagua

SEQ ID NO: 264745 - RNA, 19 nt, Artificial Sequence
  Description of Artificial Sequence: Synthetic oligonucleotide
  Antisense strand to SEQ ID NO: 264744
uacuagggaacguguuuca

SEQ ID NO: 264746 - RNA, 19 nt, Artificial Sequence
  Description of Artificial Sequence: Synthetic oligonucleotide
  Sense strand starting at position 1272 SEQ ID NO: 3403
gaaacacguucccuaguau

SEQ ID NO: 264747 - RNA, 19 nt, Artificial Sequence
  Description of Artificial Sequence: Synthetic oligonucleotide
  Antisense strand to SEQ ID NO: 264746
auacuagggaacguguuuc

SEQ ID NO: 264748 - RNA, 19 nt, Artificial Sequence
  Description of Artificial Sequence: Synthetic oligonucleotide
  Sense strand starting at position 1283 SEQ ID NO: 3403
ccuaguaucugccuaaaga

SEQ ID NO: 264749 - RNA, 19 nt, Artificial Sequence
  Description of Artificial Sequence: Synthetic oligonucleotide
  Antisense strand to SEQ ID NO: 264748
ucuuuaggcagauacuagg

SEQ ID NO: 264750 - RNA, 19 nt, Artificial Sequence
  Description of Artificial Sequence: Synthetic oligonucleotide
  Sense strand starting at position 1284 SEQ ID NO: 3403
cuaguaucugccuaaagau

SEQ ID NO: 264751 - RNA, 19 nt, Artificial Sequence
  Description of Artificial Sequence: Synthetic oligonucleotide
  Antisense strand to SEQ ID NO: 264750
aucuuuaggcagauacuag

SEQ ID NO: 264752 - RNA, 19 nt, Artificial Sequence
  Description of Artificial Sequence: Synthetic oligonucleotide
  Sense strand starting at position 1676 SEQ ID NO: 3403
gccgaagccgcuuucugau

SEQ ID NO: 264753 - RNA, 19 nt, Artificial Sequence
  Description of Artificial Sequence: Synthetic oligonucleotide
  Antisense strand to SEQ ID NO: 264752
aucagaaagcggcuucggc

SEQ ID NO: 264754 - RNA, 19 nt, Artificial Sequence
  Description of Artificial Sequence: Synthetic oligonucleotide
  Sense strand starting at position 2196 SEQ ID NO: 3403
cccgucuuucguggaauuu

SEQ ID NO: 264755 - RNA, 19 nt, Artificial Sequence
  Description of Artificial Sequence: Synthetic oligonucleotide
  Antisense strand to SEQ ID NO: 264754
aaauuccacgaaagacggg

SEQ ID NO: 264756 - RNA, 19 nt, Artificial Sequence
  Description of Artificial Sequence: Synthetic oligonucleotide
  Sense strand starting at position 2197 SEQ ID NO: 3403
ccgucuuucguggaauuua

SEQ ID NO: 264757 - RNA, 19 nt, Artificial Sequence
  Description of Artificial Sequence: Synthetic oligonucleotide
  Antisense strand to SEQ ID NO: 264756
uaaauuccacgaaagacgg

SEQ ID NO: 264758 - RNA, 19 nt, Artificial Sequence
  Description of Artificial Sequence: Synthetic oligonucleotide
  Sense strand starting at position 2205 SEQ ID NO: 3403
cguggaauuuacuuucuuu

SEQ ID NO: 264759 - RNA, 19 nt, Artificial Sequence
  Description of Artificial Sequence: Synthetic oligonucleotide
  Antisense strand to SEQ ID NO: 264758
aaagaaaguaaauuccacg

SEQ ID NO: 264760 - RNA, 19 nt, Artificial Sequence
  Description of Artificial Sequence: Synthetic oligonucleotide
  Sense strand starting at position 2903 SEQ ID NO: 3403
gaguaaaggccagggugau

SEQ ID NO: 264761 - RNA, 19 nt, Artificial Sequence
  Description of Artificial Sequence: Synthetic oligonucleotide
  Antisense strand to SEQ ID NO: 264760
aucacccuggccuuuacuc

SEQ ID NO: 264762 - RNA, 19 nt, Artificial Sequence
  Description of Artificial Sequence: Synthetic oligonucleotide
  Sense strand starting at position 2904 SEQ ID NO: 3403
aguaaaggccagggugauu

SEQ ID NO: 264763 - RNA, 19 nt, Artificial Sequence
  Description of Artificial Sequence: Synthetic oligonucleotide
  Antisense strand to SEQ ID NO: 264762
aaucacccuggccuuuacu

SEQ ID NO: 264764 - RNA, 19 nt, Artificial Sequence
  Description of Artificial Sequence: Synthetic oligonucleotide
  Sense strand starting at position 2913 SEQ ID NO: 3403
cagggugauucccuggaau

SEQ ID NO: 264765 - RNA, 19 nt, Artificial Sequence
  Description of Artificial Sequence: Synthetic oligonucleotide
  Antisense strand to SEQ ID NO: 264764
auuccagggaaucacccug

SEQ ID NO: 264766 - RNA, 19 nt, Artificial Sequence
  Description of Artificial Sequence: Synthetic oligonucleotide
  Sense strand starting at position 2915 SEQ ID NO: 3403
gggugauucccuggaauau

SEQ ID NO: 264767 - RNA, 19 nt, Artificial Sequence
  Description of Artificial Sequence: Synthetic oligonucleotide
  Antisense strand to SEQ ID NO: 264766
auauuccagggaaucaccc

SEQ ID NO: 264768 - RNA, 19 nt, Artificial Sequence
  Description of Artificial Sequence: Synthetic oligonucleotide
  Sense strand starting at position 3007 SEQ ID NO: 3403
guuggcauucagggugaaa

SEQ ID NO: 264769 - RNA, 19 nt, Artificial Sequence
  Description of Artificial Sequence: Synthetic oligonucleotide
  Antisense strand to SEQ ID NO: 264768
uuucacccugaaugccaac

SEQ ID NO: 264770 - RNA, 19 nt, Artificial Sequence
  Description of Artificial Sequence: Synthetic oligonucleotide
  Sense strand starting at position 3009 SEQ ID NO: 3403
uggcauucagggugaaaca

SEQ ID NO: 264771 - RNA, 19 nt, Artificial Sequence
  Description of Artificial Sequence: Synthetic oligonucleotide
  Antisense strand to SEQ ID NO: 264770
uguuucacccugaaugcca

SEQ ID NO: 264772 - RNA, 19 nt, Artificial Sequence
  Description of Artificial Sequence: Synthetic oligonucleotide
  Sense strand starting at position 3020 SEQ ID NO: 3403
gugaaacaauccuuggcau

SEQ ID NO: 264773 - RNA, 19 nt, Artificial Sequence
  Description of Artificial Sequence: Synthetic oligonucleotide
  Antisense strand to SEQ ID NO: 264772
augccaaggauuguuucac

SEQ ID NO: 264774 - RNA, 19 nt, Artificial Sequence
  Description of Artificial Sequence: Synthetic oligonucleotide
  Sense strand starting at position 3104 SEQ ID NO: 3403
aucagugcugucgcucauu

SEQ ID NO: 264775 - RNA, 19 nt, Artificial Sequence
  Description of Artificial Sequence: Synthetic oligonucleotide
  Antisense strand to SEQ ID NO: 264774
aaugagcgacagcacugau

SEQ ID NO: 264776 - RNA, 19 nt, Artificial Sequence
  Description of Artificial Sequence: Synthetic oligonucleotide
  Sense strand starting at position 3477 SEQ ID NO: 3403
agccuaucuguuguucgua

SEQ ID NO: 264777 - RNA, 19 nt, Artificial Sequence
  Description of Artificial Sequence: Synthetic oligonucleotide
  Antisense strand to SEQ ID NO: 264776
uacgaacaacagauaggcu

SEQ ID NO: 264778 - RNA, 19 nt, Artificial Sequence
  Description of Artificial Sequence: Synthetic oligonucleotide
  Sense strand starting at position 3493 SEQ ID NO: 3403
guauaaacuuguucuucua

SEQ ID NO: 264779 - RNA, 19 nt, Artificial Sequence
  Description of Artificial Sequence: Synthetic oligonucleotide
  Antisense strand to SEQ ID NO: 264778
uagaagaacaaguuuauac

SEQ ID NO: 264780 - RNA, 19 nt, Artificial Sequence
  Description of Artificial Sequence: Synthetic oligonucleotide
  Sense strand starting at position 3495 SEQ ID NO: 3403
auaaacuuguucuucuagu

SEQ ID NO: 264781 - RNA, 19 nt, Artificial Sequence
  Description of Artificial Sequence: Synthetic oligonucleotide
  Antisense strand to SEQ ID NO: 264780
acuagaagaacaaguuuau

SEQ ID NO: 264782 - RNA, 19 nt, Artificial Sequence
  Description of Artificial Sequence: Synthetic oligonucleotide
  Sense strand starting at position 3539 SEQ ID NO: 3403
ggcuguguggguuagagaa

SEQ ID NO: 264783 - RNA, 19 nt, Artificial Sequence
  Description of Artificial Sequence: Synthetic oligonucleotide
  Antisense strand to SEQ ID NO: 264782
uucucuaacccacacagcc

SEQ ID NO: 264784 - RNA, 19 nt, Artificial Sequence
  Description of Artificial Sequence: Synthetic oligonucleotide
  Sense strand starting at position 3559 SEQ ID NO: 3403
acagguugacacuguuuau

SEQ ID NO: 264785 - RNA, 19 nt, Artificial Sequence
  Description of Artificial Sequence: Synthetic oligonucleotide
  Antisense strand to SEQ ID NO: 264784
auaaacagugucaaccugu

SEQ ID NO: 264786 - RNA, 19 nt, Artificial Sequence
  Description of Artificial Sequence: Synthetic oligonucleotide
  Sense strand starting at position 3570 SEQ ID NO: 3403
cuguuuaucucagcaaaug

SEQ ID NO: 264787 - RNA, 19 nt, Artificial Sequence
  Description of Artificial Sequence: Synthetic oligonucleotide
  Antisense strand to SEQ ID NO: 264786
cauuugcugagauaaacag

SEQ ID NO: 264788 - RNA, 19 nt, Artificial Sequence
  Description of Artificial Sequence: Synthetic oligonucleotide
  Sense strand starting at position 3571 SEQ ID NO: 3403
uguuuaucucagcaaauga

SEQ ID NO: 264789 - RNA, 19 nt, Artificial Sequence
  Description of Artificial Sequence: Synthetic oligonucleotide
  Antisense strand to SEQ ID NO: 264788
ucauuugcugagauaaaca

SEQ ID NO: 264790 - RNA, 19 nt, Artificial Sequence
  Description of Artificial Sequence: Synthetic oligonucleotide
  Sense strand starting at position 3831 SEQ ID NO: 3403
cacuuccucccggaaguau

SEQ ID NO: 264791 - RNA, 19 nt, Artificial Sequence
  Description of Artificial Sequence: Synthetic oligonucleotide
  Antisense strand to SEQ ID NO: 264790
auacuuccgggaggaagug

SEQ ID NO: 264792 - RNA, 19 nt, Artificial Sequence
  Description of Artificial Sequence: Synthetic oligonucleotide
  Sense strand starting at position 43 SEQ ID NO: 3405
acucuuccugauggcaauu

SEQ ID NO: 264793 - RNA, 19 nt, Artificial Sequence
  Description of Artificial Sequence: Synthetic oligonucleotide
  Antisense strand to SEQ ID NO: 264792
aauugccaucaggaagagu

SEQ ID NO: 264794 - RNA, 19 nt, Artificial Sequence
  Description of Artificial Sequence: Synthetic oligonucleotide
  Sense strand starting at position 53 SEQ ID NO: 3405
auggcaauuugugacccaa

SEQ ID NO: 264795 - RNA, 19 nt, Artificial Sequence
  Description of Artificial Sequence: Synthetic oligonucleotide
  Antisense strand to SEQ ID NO: 264794
uugggucacaaauugccau

SEQ ID NO: 264796 - RNA, 19 nt, Artificial Sequence
  Description of Artificial Sequence: Synthetic oligonucleotide
  Sense strand starting at position 107 SEQ ID NO: 3405
guuuaugaagcaggaaaga

SEQ ID NO: 264797 - RNA, 19 nt, Artificial Sequence
  Description of Artificial Sequence: Synthetic oligonucleotide
  Antisense strand to SEQ ID NO: 264796
ucuuuccugcuucauaaac

SEQ ID NO: 264798 - RNA, 19 nt, Artificial Sequence
  Description of Artificial Sequence: Synthetic oligonucleotide
  Sense strand starting at position 181 SEQ ID NO: 3405
gcuuccuaugccuaaaguu

SEQ ID NO: 264799 - RNA, 19 nt, Artificial Sequence
  Description of Artificial Sequence: Synthetic oligonucleotide
  Antisense strand to SEQ ID NO: 264798
aacuuuaggcauaggaagc

SEQ ID NO: 264800 - RNA, 19 nt, Artificial Sequence
  Description of Artificial Sequence: Synthetic oligonucleotide
  Sense strand starting at position 397 SEQ ID NO: 3405
gcccaaucuccaggugaag

SEQ ID NO: 264801 - RNA, 19 nt, Artificial Sequence
  Description of Artificial Sequence: Synthetic oligonucleotide
  Antisense strand to SEQ ID NO: 264800
cuucaccuggagauugggc

SEQ ID NO: 264802 - RNA, 19 nt, Artificial Sequence
  Description of Artificial Sequence: Synthetic oligonucleotide
  Sense strand starting at position 415 SEQ ID NO: 3405
gucaauuucuucuccacgu

SEQ ID NO: 264803 - RNA, 19 nt, Artificial Sequence
  Description of Artificial Sequence: Synthetic oligonucleotide
  Antisense strand to SEQ ID NO: 264802
acguggagaagaaauugac

SEQ ID NO: 264804 - RNA, 19 nt, Artificial Sequence
  Description of Artificial Sequence: Synthetic oligonucleotide
  Sense strand starting at position 444 SEQ ID NO: 3405
ugccauucucuuuacguaa

SEQ ID NO: 264805 - RNA, 19 nt, Artificial Sequence
  Description of Artificial Sequence: Synthetic oligonucleotide
  Antisense strand to SEQ ID NO: 264804
uuacguaaagagaauggca

SEQ ID NO: 264806 - RNA, 19 nt, Artificial Sequence
  Description of Artificial Sequence: Synthetic oligonucleotide
  Sense strand starting at position 496 SEQ ID NO: 3405
ccugcuuaucuaugaagcu

SEQ ID NO: 264807 - RNA, 19 nt, Artificial Sequence
  Description of Artificial Sequence: Synthetic oligonucleotide
  Antisense strand to SEQ ID NO: 264806
agcuucauagauaagcagg

SEQ ID NO: 264808 - RNA, 19 nt, Artificial Sequence
  Description of Artificial Sequence: Synthetic oligonucleotide
  Sense strand starting at position 519 SEQ ID NO: 3405
aagugaauugagggagugu

SEQ ID NO: 264809 - RNA, 19 nt, Artificial Sequence
  Description of Artificial Sequence: Synthetic oligonucleotide
  Antisense strand to SEQ ID NO: 264808
acacucccucaauucacuu

SEQ ID NO: 264810 - RNA, 19 nt, Artificial Sequence
  Description of Artificial Sequence: Synthetic oligonucleotide
  Sense strand starting at position 520 SEQ ID NO: 3405
agugaauugagggaguguu

SEQ ID NO: 264811 - RNA, 19 nt, Artificial Sequence
  Description of Artificial Sequence: Synthetic oligonucleotide
  Antisense strand to SEQ ID NO: 264810
aacacucccucaauucacu

SEQ ID NO: 264812 - RNA, 19 nt, Artificial Sequence
  Description of Artificial Sequence: Synthetic oligonucleotide
  Sense strand starting at position 845 SEQ ID NO: 3405
ucccauuaugcagaugcaa

SEQ ID NO: 264813 - RNA, 19 nt, Artificial Sequence
  Description of Artificial Sequence: Synthetic oligonucleotide
  Antisense strand to SEQ ID NO: 264812
uugcaucugcauaauggga

SEQ ID NO: 264814 - RNA, 19 nt, Artificial Sequence
  Description of Artificial Sequence: Synthetic oligonucleotide
  Sense strand starting at position 930 SEQ ID NO: 3405
accugaauugugugaagug

SEQ ID NO: 264815 - RNA, 19 nt, Artificial Sequence
  Description of Artificial Sequence: Synthetic oligonucleotide
  Antisense strand to SEQ ID NO: 264814
cacuucacacaauucaggu

SEQ ID NO: 264816 - RNA, 19 nt, Artificial Sequence
  Description of Artificial Sequence: Synthetic oligonucleotide
  Sense strand starting at position 1129 SEQ ID NO: 3405
agcuaacugugcucauaag

SEQ ID NO: 264817 - RNA, 19 nt, Artificial Sequence
  Description of Artificial Sequence: Synthetic oligonucleotide
  Antisense strand to SEQ ID NO: 264816
cuuaugagcacaguuagcu

SEQ ID NO: 264818 - RNA, 19 nt, Artificial Sequence
  Description of Artificial Sequence: Synthetic oligonucleotide
  Sense strand starting at position 1193 SEQ ID NO: 3405
aaagcacucggugauuaaa

SEQ ID NO: 264819 - RNA, 19 nt, Artificial Sequence
  Description of Artificial Sequence: Synthetic oligonucleotide
  Antisense strand to SEQ ID NO: 264818
uuuaaucaccgagugcuuu

SEQ ID NO: 264820 - RNA, 19 nt, Artificial Sequence
  Description of Artificial Sequence: Synthetic oligonucleotide
  Sense strand starting at position 1195 SEQ ID NO: 3405
agcacucggugauuaaauc

SEQ ID NO: 264821 - RNA, 19 nt, Artificial Sequence
  Description of Artificial Sequence: Synthetic oligonucleotide
  Antisense strand to SEQ ID NO: 264820
gauuuaaucaccgagugcu

SEQ ID NO: 264822 - RNA, 19 nt, Artificial Sequence
  Description of Artificial Sequence: Synthetic oligonucleotide
  Sense strand starting at position 1203 SEQ ID NO: 3405
gugauuaaaucgcccugaa

SEQ ID NO: 264823 - RNA, 19 nt, Artificial Sequence
  Description of Artificial Sequence: Synthetic oligonucleotide
  Antisense strand to SEQ ID NO: 264822
uucagggcgauuuaaucac

SEQ ID NO: 264824 - RNA, 19 nt, Artificial Sequence
  Description of Artificial Sequence: Synthetic oligonucleotide
  Sense strand starting at position 1227 SEQ ID NO: 3405
ccgagagagccgagcgauu

SEQ ID NO: 264825 - RNA, 19 nt, Artificial Sequence
  Description of Artificial Sequence: Synthetic oligonucleotide
  Antisense strand to SEQ ID NO: 264824
aaucgcucggcucucucgg

SEQ ID NO: 264826 - RNA, 19 nt, Artificial Sequence
  Description of Artificial Sequence: Synthetic oligonucleotide
  Sense strand starting at position 1275 SEQ ID NO: 3405
guuagaguccuguaaaucu

SEQ ID NO: 264827 - RNA, 19 nt, Artificial Sequence
  Description of Artificial Sequence: Synthetic oligonucleotide
  Antisense strand to SEQ ID NO: 264826
agauuuacaggacucuaac

SEQ ID NO: 264828 - RNA, 19 nt, Artificial Sequence
  Description of Artificial Sequence: Synthetic oligonucleotide
  Sense strand starting at position 1353 SEQ ID NO: 3405
uccuuuaugcaaugugaca

SEQ ID NO: 264829 - RNA, 19 nt, Artificial Sequence
  Description of Artificial Sequence: Synthetic oligonucleotide
  Antisense strand to SEQ ID NO: 264828
ugucacauugcauaaagga

SEQ ID NO: 264830 - RNA, 19 nt, Artificial Sequence
  Description of Artificial Sequence: Synthetic oligonucleotide
  Sense strand starting at position 2672 SEQ ID NO: 3405
aggccuguuguccaucaga

SEQ ID NO: 264831 - RNA, 19 nt, Artificial Sequence
  Description of Artificial Sequence: Synthetic oligonucleotide
  Antisense strand to SEQ ID NO: 264830
ucugauggacaacaggccu

SEQ ID NO: 264832 - RNA, 19 nt, Artificial Sequence
  Description of Artificial Sequence: Synthetic oligonucleotide
  Sense strand starting at position 2711 SEQ ID NO: 3405
gucacuuccucccuguaau

SEQ ID NO: 264833 - RNA, 19 nt, Artificial Sequence
  Description of Artificial Sequence: Synthetic oligonucleotide
  Antisense strand to SEQ ID NO: 264832
auuacagggaggaagugac

SEQ ID NO: 264834 - RNA, 19 nt, Artificial Sequence
  Description of Artificial Sequence: Synthetic oligonucleotide
  Sense strand starting at position 2882 SEQ ID NO: 3405
guggaauccugguugcaca

SEQ ID NO: 264835 - RNA, 19 nt, Artificial Sequence
  Description of Artificial Sequence: Synthetic oligonucleotide
  Antisense strand to SEQ ID NO: 264834
ugugcaaccaggauuccac

SEQ ID NO: 264836 - RNA, 19 nt, Artificial Sequence
  Description of Artificial Sequence: Synthetic oligonucleotide
  Sense strand starting at position 2947 SEQ ID NO: 3405
gaaggagugucgcuaauga

SEQ ID NO: 264837 - RNA, 19 nt, Artificial Sequence
  Description of Artificial Sequence: Synthetic oligonucleotide
  Antisense strand to SEQ ID NO: 264836
ucauuagcgacacuccuuc

SEQ ID NO: 264838 - RNA, 19 nt, Artificial Sequence
  Description of Artificial Sequence: Synthetic oligonucleotide
  Sense strand starting at position 2997 SEQ ID NO: 3405
guggcuagccuauaaacaa

SEQ ID NO: 264839 - RNA, 19 nt, Artificial Sequence
  Description of Artificial Sequence: Synthetic oligonucleotide
  Antisense strand to SEQ ID NO: 264838
uuguuuauaggcuagccac

SEQ ID NO: 264840 - RNA, 19 nt, Artificial Sequence
  Description of Artificial Sequence: Synthetic oligonucleotide
  Sense strand starting at position 3143 SEQ ID NO: 3405
cugauuuccuggcaggaua

SEQ ID NO: 264841 - RNA, 19 nt, Artificial Sequence
  Description of Artificial Sequence: Synthetic oligonucleotide
  Antisense strand to SEQ ID NO: 264840
uauccugccaggaaaucag

SEQ ID NO: 264842 - RNA, 19 nt, Artificial Sequence
  Description of Artificial Sequence: Synthetic oligonucleotide
  Sense strand starting at position 3199 SEQ ID NO: 3405
cuggucucugcuuacuauu

SEQ ID NO: 264843 - RNA, 19 nt, Artificial Sequence
  Description of Artificial Sequence: Synthetic oligonucleotide
  Antisense strand to SEQ ID NO: 264842
aauaguaagcagagaccag

SEQ ID NO: 264844 - RNA, 19 nt, Artificial Sequence
  Description of Artificial Sequence: Synthetic oligonucleotide
  Sense strand starting at position 3201 SEQ ID NO: 3405
ggucucugcuuacuauuaa

SEQ ID NO: 264845 - RNA, 19 nt, Artificial Sequence
  Description of Artificial Sequence: Synthetic oligonucleotide
  Antisense strand to SEQ ID NO: 264844
uuaauaguaagcagagacc

SEQ ID NO: 264846 - RNA, 19 nt, Artificial Sequence
  Description of Artificial Sequence: Synthetic oligonucleotide
  Sense strand starting at position 3239 SEQ ID NO: 3405
agguuacaaggcuguauua

SEQ ID NO: 264847 - RNA, 19 nt, Artificial Sequence
  Description of Artificial Sequence: Synthetic oligonucleotide
  Antisense strand to SEQ ID NO: 264846
uaauacagccuuguaaccu

SEQ ID NO: 264848 - RNA, 19 nt, Artificial Sequence
  Description of Artificial Sequence: Synthetic oligonucleotide
  Sense strand starting at position 3241 SEQ ID NO: 3405
guuacaaggcuguauuauu

SEQ ID NO: 264849 - RNA, 19 nt, Artificial Sequence
  Description of Artificial Sequence: Synthetic oligonucleotide
  Antisense strand to SEQ ID NO: 264848
aauaauacagccuuguaac

SEQ ID NO: 264850 - RNA, 19 nt, Artificial Sequence
  Description of Artificial Sequence: Synthetic oligonucleotide
  Sense strand starting at position 3338 SEQ ID NO: 3405
cagacaggugaguguuuga

SEQ ID NO: 264851 - RNA, 19 nt, Artificial Sequence
  Description of Artificial Sequence: Synthetic oligonucleotide
  Antisense strand to SEQ ID NO: 264850
ucaaacacucaccugucug

SEQ ID NO: 264852 - RNA, 19 nt, Artificial Sequence
  Description of Artificial Sequence: Synthetic oligonucleotide
  Sense strand starting at position 3358 SEQ ID NO: 3405
uguugacuuccugaacugu

SEQ ID NO: 264853 - RNA, 19 nt, Artificial Sequence
  Description of Artificial Sequence: Synthetic oligonucleotide
  Antisense strand to SEQ ID NO: 264852
acaguucaggaagucaaca

SEQ ID NO: 264854 - RNA, 19 nt, Artificial Sequence
  Description of Artificial Sequence: Synthetic oligonucleotide
  Sense strand starting at position 3366 SEQ ID NO: 3405
uccugaacuguguaacguu

SEQ ID NO: 264855 - RNA, 19 nt, Artificial Sequence
  Description of Artificial Sequence: Synthetic oligonucleotide
  Antisense strand to SEQ ID NO: 264854
aacguuacacaguucagga

SEQ ID NO: 264856 - RNA, 19 nt, Artificial Sequence
  Description of Artificial Sequence: Synthetic oligonucleotide
  Sense strand starting at position 3652 SEQ ID NO: 3405
gaagaauucuagucaucag

SEQ ID NO: 264857 - RNA, 19 nt, Artificial Sequence
  Description of Artificial Sequence: Synthetic oligonucleotide
  Antisense strand to SEQ ID NO: 264856
cugaugacuagaauucuuc

SEQ ID NO: 264858 - RNA, 19 nt, Artificial Sequence
  Description of Artificial Sequence: Synthetic oligonucleotide
  Sense strand starting at position 3662 SEQ ID NO: 3405
agucaucagucugcccaau

SEQ ID NO: 264859 - RNA, 19 nt, Artificial Sequence
  Description of Artificial Sequence: Synthetic oligonucleotide
  Antisense strand to SEQ ID NO: 264858
auugggcagacugaugacu

SEQ ID NO: 264860 - RNA, 19 nt, Artificial Sequence
  Description of Artificial Sequence: Synthetic oligonucleotide
  Sense strand starting at position 3784 SEQ ID NO: 3405
uucucugauucuuuagaag

SEQ ID NO: 264861 - RNA, 19 nt, Artificial Sequence
  Description of Artificial Sequence: Synthetic oligonucleotide
  Antisense strand to SEQ ID NO: 264860
cuucuaaagaaucagagaa

SEQ ID NO: 264862 - RNA, 19 nt, Artificial Sequence
  Description of Artificial Sequence: Synthetic oligonucleotide
  Sense strand starting at position 3796 SEQ ID NO: 3405
uuagaagucaccgauguca

SEQ ID NO: 264863 - RNA, 19 nt, Artificial Sequence
  Description of Artificial Sequence: Synthetic oligonucleotide
  Antisense strand to SEQ ID NO: 264862
ugacaucggugacuucuaa

SEQ ID NO: 264864 - RNA, 19 nt, Artificial Sequence
  Description of Artificial Sequence: Synthetic oligonucleotide
  Sense strand starting at position 3798 SEQ ID NO: 3405
agaagucaccgaugucauu

SEQ ID NO: 264865 - RNA, 19 nt, Artificial Sequence
  Description of Artificial Sequence: Synthetic oligonucleotide
  Antisense strand to SEQ ID NO: 264864
aaugacaucggugacuucu

SEQ ID NO: 264866 - RNA, 19 nt, Artificial Sequence
  Description of Artificial Sequence: Synthetic oligonucleotide
  Sense strand starting at position 3807 SEQ ID NO: 3405
cgaugucauucucuaucua

SEQ ID NO: 264867 - RNA, 19 nt, Artificial Sequence
  Description of Artificial Sequence: Synthetic oligonucleotide
  Antisense strand to SEQ ID NO: 264866
uagauagagaaugacaucg

SEQ ID NO: 264868 - RNA, 19 nt, Artificial Sequence
  Description of Artificial Sequence: Synthetic oligonucleotide
  Sense strand starting at position 3846 SEQ ID NO: 3405
aucuuuauccuguggaguu

SEQ ID NO: 264869 - RNA, 19 nt, Artificial Sequence
  Description of Artificial Sequence: Synthetic oligonucleotide
  Antisense strand to SEQ ID NO: 264868
aacuccacaggauaaagau

SEQ ID NO: 264870 - RNA, 19 nt, Artificial Sequence
  Description of Artificial Sequence: Synthetic oligonucleotide
  Sense strand starting at position 3868 SEQ ID NO: 3405
ugaaauauguggcauuucu

SEQ ID NO: 264871 - RNA, 19 nt, Artificial Sequence
  Description of Artificial Sequence: Synthetic oligonucleotide
  Antisense strand to SEQ ID NO: 264870
agaaaugccacauauuuca

SEQ ID NO: 264872 - RNA, 19 nt, Artificial Sequence
  Description of Artificial Sequence: Synthetic oligonucleotide
  Sense strand starting at position 245 SEQ ID NO: 3404
gugaaacuacucugcucaa

SEQ ID NO: 264873 - RNA, 19 nt, Artificial Sequence
  Description of Artificial Sequence: Synthetic oligonucleotide
  Antisense strand to SEQ ID NO: 264872
uugagcagaguaguuucac

SEQ ID NO: 264874 - RNA, 19 nt, Artificial Sequence
  Description of Artificial Sequence: Synthetic oligonucleotide
  Sense strand starting at position 276 SEQ ID NO: 3404
ggacaccugucauuauaca

SEQ ID NO: 264875 - RNA, 19 nt, Artificial Sequence
  Description of Artificial Sequence: Synthetic oligonucleotide
  Antisense strand to SEQ ID NO: 264874
uguauaaugacaggugucc

SEQ ID NO: 264876 - RNA, 19 nt, Artificial Sequence
  Description of Artificial Sequence: Synthetic oligonucleotide
  Sense strand starting at position 377 SEQ ID NO: 3404
aauagaugcguguauuaua

SEQ ID NO: 264877 - RNA, 19 nt, Artificial Sequence
  Description of Artificial Sequence: Synthetic oligonucleotide
  Antisense strand to SEQ ID NO: 264876
uauaauacacgcaucuauu

SEQ ID NO: 264878 - RNA, 19 nt, Artificial Sequence
  Description of Artificial Sequence: Synthetic oligonucleotide
  Sense strand starting at position 391 SEQ ID NO: 3404
uuauauauccaguaaaguc

SEQ ID NO: 264879 - RNA, 19 nt, Artificial Sequence
  Description of Artificial Sequence: Synthetic oligonucleotide
  Antisense strand to SEQ ID NO: 264878
gacuuuacuggauauauaa

SEQ ID NO: 264880 - RNA, 19 nt, Artificial Sequence
  Description of Artificial Sequence: Synthetic oligonucleotide
  Sense strand starting at position 478 SEQ ID NO: 3404
acucucuacuucuuaggua

SEQ ID NO: 264881 - RNA, 19 nt, Artificial Sequence
  Description of Artificial Sequence: Synthetic oligonucleotide
  Antisense strand to SEQ ID NO: 264880
uaccuaagaaguagagagu

SEQ ID NO: 264882 - RNA, 19 nt, Artificial Sequence
  Description of Artificial Sequence: Synthetic oligonucleotide
  Sense strand starting at position 482 SEQ ID NO: 3404
ucuacuucuuagguagaag

SEQ ID NO: 264883 - RNA, 19 nt, Artificial Sequence
  Description of Artificial Sequence: Synthetic oligonucleotide
  Antisense strand to SEQ ID NO: 264882
cuucuaccuaagaaguaga

SEQ ID NO: 264884 - RNA, 19 nt, Artificial Sequence
  Description of Artificial Sequence: Synthetic oligonucleotide
  Sense strand starting at position 628 SEQ ID NO: 3404
agaaguucucauuauugua

SEQ ID NO: 264885 - RNA, 19 nt, Artificial Sequence
  Description of Artificial Sequence: Synthetic oligonucleotide
  Antisense strand to SEQ ID NO: 264884
uacaauaaugagaacuucu

SEQ ID NO: 264886 - RNA, 19 nt, Artificial Sequence
  Description of Artificial Sequence: Synthetic oligonucleotide
  Sense strand starting at position 641 SEQ ID NO: 3404
auuguauagggaugacuuu

SEQ ID NO: 264887 - RNA, 19 nt, Artificial Sequence
  Description of Artificial Sequence: Synthetic oligonucleotide
  Antisense strand to SEQ ID NO: 264886
aaagucaucccuauacaau

SEQ ID NO: 264888 - RNA, 19 nt, Artificial Sequence
  Description of Artificial Sequence: Synthetic oligonucleotide
  Sense strand starting at position 821 SEQ ID NO: 3404
gaggaaagccucugcauaa

SEQ ID NO: 264889 - RNA, 19 nt, Artificial Sequence
  Description of Artificial Sequence: Synthetic oligonucleotide
  Antisense strand to SEQ ID NO: 264888
uuaugcagaggcuuuccuc

SEQ ID NO: 264890 - RNA, 19 nt, Artificial Sequence
  Description of Artificial Sequence: Synthetic oligonucleotide
  Sense strand starting at position 822 SEQ ID NO: 3404
aggaaagccucugcauaau

SEQ ID NO: 264891 - RNA, 19 nt, Artificial Sequence
  Description of Artificial Sequence: Synthetic oligonucleotide
  Antisense strand to SEQ ID NO: 264890
auuaugcagaggcuuuccu

SEQ ID NO: 264892 - RNA, 19 nt, Artificial Sequence
  Description of Artificial Sequence: Synthetic oligonucleotide
  Sense strand starting at position 926 SEQ ID NO: 3404
aagugcauaccauguagaa

SEQ ID NO: 264893 - RNA, 19 nt, Artificial Sequence
  Description of Artificial Sequence: Synthetic oligonucleotide
  Antisense strand to SEQ ID NO: 264892
uucuacaugguaugcacuu

SEQ ID NO: 264894 - RNA, 19 nt, Artificial Sequence
  Description of Artificial Sequence: Synthetic oligonucleotide
  Sense strand starting at position 1137 SEQ ID NO: 3404
ucaagaucucgccaaucaa

SEQ ID NO: 264895 - RNA, 19 nt, Artificial Sequence
  Description of Artificial Sequence: Synthetic oligonucleotide
  Antisense strand to SEQ ID NO: 264894
uugauuggcgagaucuuga

SEQ ID NO: 264896 - RNA, 19 nt, Artificial Sequence
  Description of Artificial Sequence: Synthetic oligonucleotide
  Sense strand starting at position 1178 SEQ ID NO: 3404
cugcaugaaggguaguuaa

SEQ ID NO: 264897 - RNA, 19 nt, Artificial Sequence
  Description of Artificial Sequence: Synthetic oligonucleotide
  Antisense strand to SEQ ID NO: 264896
uuaacuacccuucaugcag

SEQ ID NO: 264898 - RNA, 19 nt, Artificial Sequence
  Description of Artificial Sequence: Synthetic oligonucleotide
  Sense strand starting at position 1181 SEQ ID NO: 3404
caugaaggguaguuaagua

SEQ ID NO: 264899 - RNA, 19 nt, Artificial Sequence
  Description of Artificial Sequence: Synthetic oligonucleotide
  Antisense strand to SEQ ID NO: 264898
uacuuaacuacccuucaug

SEQ ID NO: 264900 - RNA, 19 nt, Artificial Sequence
  Description of Artificial Sequence: Synthetic oligonucleotide
  Sense strand starting at position 1185 SEQ ID NO: 3404
aaggguaguuaaguaaaga

SEQ ID NO: 264901 - RNA, 19 nt, Artificial Sequence
  Description of Artificial Sequence: Synthetic oligonucleotide
  Antisense strand to SEQ ID NO: 264900
ucuuuacuuaacuacccuu

SEQ ID NO: 264902 - RNA, 19 nt, Artificial Sequence
  Description of Artificial Sequence: Synthetic oligonucleotide
  Sense strand starting at position 1319 SEQ ID NO: 3404
cugagcauccaaggaguuu

SEQ ID NO: 264903 - RNA, 19 nt, Artificial Sequence
  Description of Artificial Sequence: Synthetic oligonucleotide
  Antisense strand to SEQ ID NO: 264902
aaacuccuuggaugcucag

SEQ ID NO: 264904 - RNA, 19 nt, Artificial Sequence
  Description of Artificial Sequence: Synthetic oligonucleotide
  Sense strand starting at position 1360 SEQ ID NO: 3404
ccgagccuuagaugggaaa

SEQ ID NO: 264905 - RNA, 19 nt, Artificial Sequence
  Description of Artificial Sequence: Synthetic oligonucleotide
  Antisense strand to SEQ ID NO: 264904
uuucccaucuaaggcucgg

SEQ ID NO: 264906 - RNA, 19 nt, Artificial Sequence
  Description of Artificial Sequence: Synthetic oligonucleotide
  Sense strand starting at position 1464 SEQ ID NO: 3404
gaaguaaauguugagcagu

SEQ ID NO: 264907 - RNA, 19 nt, Artificial Sequence
  Description of Artificial Sequence: Synthetic oligonucleotide
  Antisense strand to SEQ ID NO: 264906
acugcucaacauuuacuuc

SEQ ID NO: 264908 - RNA, 19 nt, Artificial Sequence
  Description of Artificial Sequence: Synthetic oligonucleotide
  Sense strand starting at position 1467 SEQ ID NO: 3404
guaaauguugagcagugau

SEQ ID NO: 264909 - RNA, 19 nt, Artificial Sequence
  Description of Artificial Sequence: Synthetic oligonucleotide
  Antisense strand to SEQ ID NO: 264908
aucacugcucaacauuuac

SEQ ID NO: 264910 - RNA, 19 nt, Artificial Sequence
  Description of Artificial Sequence: Synthetic oligonucleotide
  Sense strand starting at position 1543 SEQ ID NO: 3404
ggugucauccuuuaggaga

SEQ ID NO: 264911 - RNA, 19 nt, Artificial Sequence
  Description of Artificial Sequence: Synthetic oligonucleotide
  Antisense strand to SEQ ID NO: 264910
ucuccuaaaggaugacacc

SEQ ID NO: 264912 - RNA, 19 nt, Artificial Sequence
  Description of Artificial Sequence: Synthetic oligonucleotide
  Sense strand starting at position 1671 SEQ ID NO: 3404
uugauaggcuuauuccaac

SEQ ID NO: 264913 - RNA, 19 nt, Artificial Sequence
  Description of Artificial Sequence: Synthetic oligonucleotide
  Antisense strand to SEQ ID NO: 264912
guuggaauaagccuaucaa

SEQ ID NO: 264914 - RNA, 19 nt, Artificial Sequence
  Description of Artificial Sequence: Synthetic oligonucleotide
  Sense strand starting at position 1740 SEQ ID NO: 3404
cuaggaaaugacugccuau

SEQ ID NO: 264915 - RNA, 19 nt, Artificial Sequence
  Description of Artificial Sequence: Synthetic oligonucleotide
  Antisense strand to SEQ ID NO: 264914
auaggcagucauuuccuag

SEQ ID NO: 264916 - RNA, 19 nt, Artificial Sequence
  Description of Artificial Sequence: Synthetic oligonucleotide
  Sense strand starting at position 1757 SEQ ID NO: 3404
auugguuagccauagcaau

SEQ ID NO: 264917 - RNA, 19 nt, Artificial Sequence
  Description of Artificial Sequence: Synthetic oligonucleotide
  Antisense strand to SEQ ID NO: 264916
auugcuauggcuaaccaau

SEQ ID NO: 264918 - RNA, 19 nt, Artificial Sequence
  Description of Artificial Sequence: Synthetic oligonucleotide
  Sense strand starting at position 2079 SEQ ID NO: 3404
ggcguaaucacgccucagu

SEQ ID NO: 264919 - RNA, 19 nt, Artificial Sequence
  Description of Artificial Sequence: Synthetic oligonucleotide
  Antisense strand to SEQ ID NO: 264918
acugaggcgugauuacgcc

SEQ ID NO: 264920 - RNA, 19 nt, Artificial Sequence
  Description of Artificial Sequence: Synthetic oligonucleotide
  Sense strand starting at position 2080 SEQ ID NO: 3404
gcguaaucacgccucagua

SEQ ID NO: 264921 - RNA, 19 nt, Artificial Sequence
  Description of Artificial Sequence: Synthetic oligonucleotide
  Antisense strand to SEQ ID NO: 264920
uacugaggcgugauuacgc

SEQ ID NO: 264922 - RNA, 19 nt, Artificial Sequence
  Description of Artificial Sequence: Synthetic oligonucleotide
  Sense strand starting at position 2556 SEQ ID NO: 3404
uguucugaagcugaguuau

SEQ ID NO: 264923 - RNA, 19 nt, Artificial Sequence
  Description of Artificial Sequence: Synthetic oligonucleotide
  Antisense strand to SEQ ID NO: 264922
auaacucagcuucagaaca

SEQ ID NO: 264924 - RNA, 19 nt, Artificial Sequence
  Description of Artificial Sequence: Synthetic oligonucleotide
  Sense strand starting at position 2758 SEQ ID NO: 3404
ucuuguuggccgagaguug

SEQ ID NO: 264925 - RNA, 19 nt, Artificial Sequence
  Description of Artificial Sequence: Synthetic oligonucleotide
  Antisense strand to SEQ ID NO: 264924
caacucucggccaacaaga

SEQ ID NO: 264926 - RNA, 19 nt, Artificial Sequence
  Description of Artificial Sequence: Synthetic oligonucleotide
  Sense strand starting at position 2841 SEQ ID NO: 3404
aguaauuugcuauggugca

SEQ ID NO: 264927 - RNA, 19 nt, Artificial Sequence
  Description of Artificial Sequence: Synthetic oligonucleotide
  Antisense strand to SEQ ID NO: 264926
ugcaccauagcaaauuacu

SEQ ID NO: 264928 - RNA, 19 nt, Artificial Sequence
  Description of Artificial Sequence: Synthetic oligonucleotide
  Sense strand starting at position 3014 SEQ ID NO: 3404
cagagaugguauucugauu

SEQ ID NO: 264929 - RNA, 19 nt, Artificial Sequence
  Description of Artificial Sequence: Synthetic oligonucleotide
  Antisense strand to SEQ ID NO: 264928
aaucagaauaccaucucug

SEQ ID NO: 264930 - RNA, 19 nt, Artificial Sequence
  Description of Artificial Sequence: Synthetic oligonucleotide
  Sense strand starting at position 3138 SEQ ID NO: 3404
gcuaguuaaguuuauuacu

SEQ ID NO: 264931 - RNA, 19 nt, Artificial Sequence
  Description of Artificial Sequence: Synthetic oligonucleotide
  Antisense strand to SEQ ID NO: 264930
aguaauaaacuuaacuagc

SEQ ID NO: 264932 - RNA, 19 nt, Artificial Sequence
  Description of Artificial Sequence: Synthetic oligonucleotide
  Sense strand starting at position 3180 SEQ ID NO: 3404
ggcuacaaauuugauauua

SEQ ID NO: 264933 - RNA, 19 nt, Artificial Sequence
  Description of Artificial Sequence: Synthetic oligonucleotide
  Antisense strand to SEQ ID NO: 264932
uaauaucaaauuuguagcc

SEQ ID NO: 264934 - RNA, 19 nt, Artificial Sequence
  Description of Artificial Sequence: Synthetic oligonucleotide
  Sense strand starting at position 3220 SEQ ID NO: 3404
augucaugugaccacucua

SEQ ID NO: 264935 - RNA, 19 nt, Artificial Sequence
  Description of Artificial Sequence: Synthetic oligonucleotide
  Antisense strand to SEQ ID NO: 264934
uagaguggucacaugacau

SEQ ID NO: 264936 - RNA, 19 nt, Artificial Sequence
  Description of Artificial Sequence: Synthetic oligonucleotide
  Sense strand starting at position 3313 SEQ ID NO: 3404
ucaagucuuggaugggaau

SEQ ID NO: 264937 - RNA, 19 nt, Artificial Sequence
  Description of Artificial Sequence: Synthetic oligonucleotide
  Antisense strand to SEQ ID NO: 264936
auucccauccaagacuuga

SEQ ID NO: 264938 - RNA, 19 nt, Artificial Sequence
  Description of Artificial Sequence: Synthetic oligonucleotide
  Sense strand starting at position 3578 SEQ ID NO: 3404
gaguuaagggucugagauu

SEQ ID NO: 264939 - RNA, 19 nt, Artificial Sequence
  Description of Artificial Sequence: Synthetic oligonucleotide
  Antisense strand to SEQ ID NO: 264938
aaucucagacccuuaacuc

SEQ ID NO: 264940 - RNA, 19 nt, Artificial Sequence
  Description of Artificial Sequence: Synthetic oligonucleotide
  Sense strand starting at position 3605 SEQ ID NO: 3404
gcugaaccauuuguauguu

SEQ ID NO: 264941 - RNA, 19 nt, Artificial Sequence
  Description of Artificial Sequence: Synthetic oligonucleotide
  Antisense strand to SEQ ID NO: 264940
aacauacaaaugguucagc

SEQ ID NO: 264942 - RNA, 19 nt, Artificial Sequence
  Description of Artificial Sequence: Synthetic oligonucleotide
  Sense strand starting at position 3617 SEQ ID NO: 3404
guauguucuccuuggauuu

SEQ ID NO: 264943 - RNA, 19 nt, Artificial Sequence
  Description of Artificial Sequence: Synthetic oligonucleotide
  Antisense strand to SEQ ID NO: 264942
aaauccaaggagaacauac

SEQ ID NO: 264944 - RNA, 19 nt, Artificial Sequence
  Description of Artificial Sequence: Synthetic oligonucleotide
  Sense strand starting at position 3671 SEQ ID NO: 3404
cucggaagauacuucugau

SEQ ID NO: 264945 - RNA, 19 nt, Artificial Sequence
  Description of Artificial Sequence: Synthetic oligonucleotide
  Antisense strand to SEQ ID NO: 264944
aucagaaguaucuuccgag

SEQ ID NO: 264946 - RNA, 19 nt, Artificial Sequence
  Description of Artificial Sequence: Synthetic oligonucleotide
  Sense strand starting at position 3785 SEQ ID NO: 3404
ucaauagcccaggguaaua

SEQ ID NO: 264947 - RNA, 19 nt, Artificial Sequence
  Description of Artificial Sequence: Synthetic oligonucleotide
  Antisense strand to SEQ ID NO: 264946
uauuacccugggcuauuga

SEQ ID NO: 264948 - RNA, 19 nt, Artificial Sequence
  Description of Artificial Sequence: Synthetic oligonucleotide
  Sense strand starting at position 3806 SEQ ID NO: 3404
ucaugaggagcuuguaaac

SEQ ID NO: 264949 - RNA, 19 nt, Artificial Sequence
  Description of Artificial Sequence: Synthetic oligonucleotide
  Antisense strand to SEQ ID NO: 264948
guuuacaagcuccucauga

SEQ ID NO: 264950 - RNA, 19 nt, Artificial Sequence
  Description of Artificial Sequence: Synthetic oligonucleotide
  Sense strand starting at position 3841 SEQ ID NO: 3404
augugccagcauuaagaga

SEQ ID NO: 264951 - RNA, 19 nt, Artificial Sequence
  Description of Artificial Sequence: Synthetic oligonucleotide
  Antisense strand to SEQ ID NO: 264950
ucucuuaaugcuggcacau

SEQ ID NO: 264952 - RNA, 19 nt, Artificial Sequence
  Description of Artificial Sequence: Synthetic oligonucleotide
  Sense strand starting at position 54 SEQ ID NO: 3406
gccaacaaauaguuaugaa

SEQ ID NO: 264953 - RNA, 19 nt, Artificial Sequence
  Description of Artificial Sequence: Synthetic oligonucleotide
  Antisense strand to SEQ ID NO: 264952
uucauaacuauuuguuggc

SEQ ID NO: 264954 - RNA, 19 nt, Artificial Sequence
  Description of Artificial Sequence: Synthetic oligonucleotide
  Sense strand starting at position 61 SEQ ID NO: 3406
aauaguuaugaagguauga

SEQ ID NO: 264955 - RNA, 19 nt, Artificial Sequence
  Description of Artificial Sequence: Synthetic oligonucleotide
  Antisense strand to SEQ ID NO: 264954
ucauaccuucauaacuauu

SEQ ID NO: 264956 - RNA, 19 nt, Artificial Sequence
  Description of Artificial Sequence: Synthetic oligonucleotide
  Sense strand starting at position 93 SEQ ID NO: 3406
uuggaaacucgauggaucu

SEQ ID NO: 264957 - RNA, 19 nt, Artificial Sequence
  Description of Artificial Sequence: Synthetic oligonucleotide
  Antisense strand to SEQ ID NO: 264956
agauccaucgaguuuccaa

SEQ ID NO: 264958 - RNA, 19 nt, Artificial Sequence
  Description of Artificial Sequence: Synthetic oligonucleotide
  Sense strand starting at position 94 SEQ ID NO: 3406
uggaaacucgauggaucua

SEQ ID NO: 264959 - RNA, 19 nt, Artificial Sequence
  Description of Artificial Sequence: Synthetic oligonucleotide
  Antisense strand to SEQ ID NO: 264958
uagauccaucgaguuucca

SEQ ID NO: 264960 - RNA, 19 nt, Artificial Sequence
  Description of Artificial Sequence: Synthetic oligonucleotide
  Sense strand starting at position 194 SEQ ID NO: 3406
uuuguccuacgauaaugaa

SEQ ID NO: 264961 - RNA, 19 nt, Artificial Sequence
  Description of Artificial Sequence: Synthetic oligonucleotide
  Antisense strand to SEQ ID NO: 264960
uucauuaucguaggacaaa

SEQ ID NO: 264962 - RNA, 19 nt, Artificial Sequence
  Description of Artificial Sequence: Synthetic oligonucleotide
  Sense strand starting at position 221 SEQ ID NO: 3406
uuuguucuaucuuuacaug

SEQ ID NO: 264963 - RNA, 19 nt, Artificial Sequence
  Description of Artificial Sequence: Synthetic oligonucleotide
  Antisense strand to SEQ ID NO: 264962
cauguaaagauagaacaaa

SEQ ID NO: 264964 - RNA, 19 nt, Artificial Sequence
  Description of Artificial Sequence: Synthetic oligonucleotide
  Sense strand starting at position 247 SEQ ID NO: 3406
cuaaacuuccaguggucuu

SEQ ID NO: 264965 - RNA, 19 nt, Artificial Sequence
  Description of Artificial Sequence: Synthetic oligonucleotide
  Antisense strand to SEQ ID NO: 264964
aagaccacuggaaguuuag

SEQ ID NO: 264966 - RNA, 19 nt, Artificial Sequence
  Description of Artificial Sequence: Synthetic oligonucleotide
  Sense strand starting at position 307 SEQ ID NO: 3406
gggccuauuagcuauaguu

SEQ ID NO: 264967 - RNA, 19 nt, Artificial Sequence
  Description of Artificial Sequence: Synthetic oligonucleotide
  Antisense strand to SEQ ID NO: 264966
aacuauagcuaauaggccc

SEQ ID NO: 264968 - RNA, 19 nt, Artificial Sequence
  Description of Artificial Sequence: Synthetic oligonucleotide
  Sense strand starting at position 317 SEQ ID NO: 3406
gcuauaguugcucaaauua

SEQ ID NO: 264969 - RNA, 19 nt, Artificial Sequence
  Description of Artificial Sequence: Synthetic oligonucleotide
  Antisense strand to SEQ ID NO: 264968
uaauuugagcaacuauagc

SEQ ID NO: 264970 - RNA, 19 nt, Artificial Sequence
  Description of Artificial Sequence: Synthetic oligonucleotide
  Sense strand starting at position 344 SEQ ID NO: 3406
ugcuauaaaucagcagcaa

SEQ ID NO: 264971 - RNA, 19 nt, Artificial Sequence
  Description of Artificial Sequence: Synthetic oligonucleotide
  Antisense strand to SEQ ID NO: 264970
uugcugcugauuuauagca

SEQ ID NO: 264972 - RNA, 19 nt, Artificial Sequence
  Description of Artificial Sequence: Synthetic oligonucleotide
  Sense strand starting at position 345 SEQ ID NO: 3406
gcuauaaaucagcagcaau

SEQ ID NO: 264973 - RNA, 19 nt, Artificial Sequence
  Description of Artificial Sequence: Synthetic oligonucleotide
  Antisense strand to SEQ ID NO: 264972
auugcugcugauuuauagc

SEQ ID NO: 264974 - RNA, 19 nt, Artificial Sequence
  Description of Artificial Sequence: Synthetic oligonucleotide
  Sense strand starting at position 454 SEQ ID NO: 3406
agaguagaagguuguuauu

SEQ ID NO: 264975 - RNA, 19 nt, Artificial Sequence
  Description of Artificial Sequence: Synthetic oligonucleotide
  Antisense strand to SEQ ID NO: 264974
aauaacaaccuucuacucu

SEQ ID NO: 264976 - RNA, 19 nt, Artificial Sequence
  Description of Artificial Sequence: Synthetic oligonucleotide
  Sense strand starting at position 717 SEQ ID NO: 3406
cugccaucuccguaagaau

SEQ ID NO: 264977 - RNA, 19 nt, Artificial Sequence
  Description of Artificial Sequence: Synthetic oligonucleotide
  Antisense strand to SEQ ID NO: 264976
auucuuacggagauggcag

SEQ ID NO: 264978 - RNA, 19 nt, Artificial Sequence
  Description of Artificial Sequence: Synthetic oligonucleotide
  Sense strand starting at position 725 SEQ ID NO: 3406
uccguaagaauauggaaca

SEQ ID NO: 264979 - RNA, 19 nt, Artificial Sequence
  Description of Artificial Sequence: Synthetic oligonucleotide
  Antisense strand to SEQ ID NO: 264978
uguuccauauucuuacgga

SEQ ID NO: 264980 - RNA, 19 nt, Artificial Sequence
  Description of Artificial Sequence: Synthetic oligonucleotide
  Sense strand starting at position 1807 SEQ ID NO: 3406
uugugugcucuuuccacuu

SEQ ID NO: 264981 - RNA, 19 nt, Artificial Sequence
  Description of Artificial Sequence: Synthetic oligonucleotide
  Antisense strand to SEQ ID NO: 264980
aaguggaaagagcacacaa

SEQ ID NO: 264982 - RNA, 19 nt, Artificial Sequence
  Description of Artificial Sequence: Synthetic oligonucleotide
  Sense strand starting at position 1892 SEQ ID NO: 3406
ggcagaaacucugcuggga

SEQ ID NO: 264983 - RNA, 19 nt, Artificial Sequence
  Description of Artificial Sequence: Synthetic oligonucleotide
  Antisense strand to SEQ ID NO: 264982
ucccagcagaguuucugcc

SEQ ID NO: 264984 - RNA, 19 nt, Artificial Sequence
  Description of Artificial Sequence: Synthetic oligonucleotide
  Sense strand starting at position 2351 SEQ ID NO: 3406
aggcuacucccuugucaaa

SEQ ID NO: 264985 - RNA, 19 nt, Artificial Sequence
  Description of Artificial Sequence: Synthetic oligonucleotide
  Antisense strand to SEQ ID NO: 264984
uuugacaagggaguagccu

SEQ ID NO: 264986 - RNA, 19 nt, Artificial Sequence
  Description of Artificial Sequence: Synthetic oligonucleotide
  Sense strand starting at position 2353 SEQ ID NO: 3406
gcuacucccuugucaaaug

SEQ ID NO: 264987 - RNA, 19 nt, Artificial Sequence
  Description of Artificial Sequence: Synthetic oligonucleotide
  Antisense strand to SEQ ID NO: 264986
cauuugacaagggaguagc

SEQ ID NO: 264988 - RNA, 19 nt, Artificial Sequence
  Description of Artificial Sequence: Synthetic oligonucleotide
  Sense strand starting at position 2405 SEQ ID NO: 3406
ggacuuacguaauugaggu

SEQ ID NO: 264989 - RNA, 19 nt, Artificial Sequence
  Description of Artificial Sequence: Synthetic oligonucleotide
  Antisense strand to SEQ ID NO: 264988
accucaauuacguaagucc

SEQ ID NO: 264990 - RNA, 19 nt, Artificial Sequence
  Description of Artificial Sequence: Synthetic oligonucleotide
  Sense strand starting at position 2411 SEQ ID NO: 3406
acguaauugaggugagaaa

SEQ ID NO: 264991 - RNA, 19 nt, Artificial Sequence
  Description of Artificial Sequence: Synthetic oligonucleotide
  Antisense strand to SEQ ID NO: 264990
uuucucaccucaauuacgu

SEQ ID NO: 264992 - RNA, 19 nt, Artificial Sequence
  Description of Artificial Sequence: Synthetic oligonucleotide
  Sense strand starting at position 2412 SEQ ID NO: 3406
cguaauugaggugagaaac

SEQ ID NO: 264993 - RNA, 19 nt, Artificial Sequence
  Description of Artificial Sequence: Synthetic oligonucleotide
  Antisense strand to SEQ ID NO: 264992
guuucucaccucaauuacg

SEQ ID NO: 264994 - RNA, 19 nt, Artificial Sequence
  Description of Artificial Sequence: Synthetic oligonucleotide
  Sense strand starting at position 2564 SEQ ID NO: 3406
guaauaagccaucacugga

SEQ ID NO: 264995 - RNA, 19 nt, Artificial Sequence
  Description of Artificial Sequence: Synthetic oligonucleotide
  Antisense strand to SEQ ID NO: 264994
uccagugauggcuuauuac

SEQ ID NO: 264996 - RNA, 19 nt, Artificial Sequence
  Description of Artificial Sequence: Synthetic oligonucleotide
  Sense strand starting at position 2821 SEQ ID NO: 3406
gaaugaaugcuuuguaccu

SEQ ID NO: 264997 - RNA, 19 nt, Artificial Sequence
  Description of Artificial Sequence: Synthetic oligonucleotide
  Antisense strand to SEQ ID NO: 264996
agguacaaagcauucauuc

SEQ ID NO: 264998 - RNA, 19 nt, Artificial Sequence
  Description of Artificial Sequence: Synthetic oligonucleotide
  Sense strand starting at position 2826 SEQ ID NO: 3406
aaugcuuuguaccuagaga

SEQ ID NO: 264999 - RNA, 19 nt, Artificial Sequence
  Description of Artificial Sequence: Synthetic oligonucleotide
  Antisense strand to SEQ ID NO: 264998
ucucuagguacaaagcauu

SEQ ID NO: 265000 - RNA, 19 nt, Artificial Sequence
  Description of Artificial Sequence: Synthetic oligonucleotide
  Sense strand starting at position 2827 SEQ ID NO: 3406
augcuuuguaccuagagag

SEQ ID NO: 265001 - RNA, 19 nt, Artificial Sequence
  Description of Artificial Sequence: Synthetic oligonucleotide
  Antisense strand to SEQ ID NO: 265000
cucucuagguacaaagcau

SEQ ID NO: 265002 - RNA, 19 nt, Artificial Sequence
  Description of Artificial Sequence: Synthetic oligonucleotide
  Sense strand starting at position 2868 SEQ ID NO: 3406
gagagaucaucugucgagc

SEQ ID NO: 265003 - RNA, 19 nt, Artificial Sequence
  Description of Artificial Sequence: Synthetic oligonucleotide
  Antisense strand to SEQ ID NO: 265002
gcucgacagaugaucucuc

SEQ ID NO: 265004 - RNA, 19 nt, Artificial Sequence
  Description of Artificial Sequence: Synthetic oligonucleotide
  Sense strand starting at position 2871 SEQ ID NO: 3406
agaucaucugucgagcuau

SEQ ID NO: 265005 - RNA, 19 nt, Artificial Sequence
  Description of Artificial Sequence: Synthetic oligonucleotide
  Antisense strand to SEQ ID NO: 265004
auagcucgacagaugaucu

SEQ ID NO: 265006 - RNA, 19 nt, Artificial Sequence
  Description of Artificial Sequence: Synthetic oligonucleotide
  Sense strand starting at position 2895 SEQ ID NO: 3406
gucauuaacuggucaagga

SEQ ID NO: 265007 - RNA, 19 nt, Artificial Sequence
  Description of Artificial Sequence: Synthetic oligonucleotide
  Antisense strand to SEQ ID NO: 265006
uccuugaccaguuaaugac

SEQ ID NO: 265008 - RNA, 19 nt, Artificial Sequence
  Description of Artificial Sequence: Synthetic oligonucleotide
  Sense strand starting at position 2927 SEQ ID NO: 3406
gguuacuucucagccugau

SEQ ID NO: 265009 - RNA, 19 nt, Artificial Sequence
  Description of Artificial Sequence: Synthetic oligonucleotide
  Antisense strand to SEQ ID NO: 265008
aucaggcugagaaguaacc

SEQ ID NO: 265010 - RNA, 19 nt, Artificial Sequence
  Description of Artificial Sequence: Synthetic oligonucleotide
  Sense strand starting at position 2931 SEQ ID NO: 3406
acuucucagccugauaguu

SEQ ID NO: 265011 - RNA, 19 nt, Artificial Sequence
  Description of Artificial Sequence: Synthetic oligonucleotide
  Antisense strand to SEQ ID NO: 265010
aacuaucaggcugagaagu

SEQ ID NO: 265012 - RNA, 19 nt, Artificial Sequence
  Description of Artificial Sequence: Synthetic oligonucleotide
  Sense strand starting at position 2936 SEQ ID NO: 3406
ucagccugauaguuaacau

SEQ ID NO: 265013 - RNA, 19 nt, Artificial Sequence
  Description of Artificial Sequence: Synthetic oligonucleotide
  Antisense strand to SEQ ID NO: 265012
auguuaacuaucaggcuga

SEQ ID NO: 265014 - RNA, 19 nt, Artificial Sequence
  Description of Artificial Sequence: Synthetic oligonucleotide
  Sense strand starting at position 3076 SEQ ID NO: 3406
ggaaauaugugcuccuuua

SEQ ID NO: 265015 - RNA, 19 nt, Artificial Sequence
  Description of Artificial Sequence: Synthetic oligonucleotide
  Antisense strand to SEQ ID NO: 265014
uaaaggagcacauauuucc

SEQ ID NO: 265016 - RNA, 19 nt, Artificial Sequence
  Description of Artificial Sequence: Synthetic oligonucleotide
  Sense strand starting at position 3251 SEQ ID NO: 3406
acuaucauguugccauaua

SEQ ID NO: 265017 - RNA, 19 nt, Artificial Sequence
  Description of Artificial Sequence: Synthetic oligonucleotide
  Antisense strand to SEQ ID NO: 265016
uauauggcaacaugauagu

SEQ ID NO: 265018 - RNA, 19 nt, Artificial Sequence
  Description of Artificial Sequence: Synthetic oligonucleotide
  Sense strand starting at position 3280 SEQ ID NO: 3406
cuaguagcugcuuauaacu

SEQ ID NO: 265019 - RNA, 19 nt, Artificial Sequence
  Description of Artificial Sequence: Synthetic oligonucleotide
  Antisense strand to SEQ ID NO: 265018
aguuauaagcagcuacuag

SEQ ID NO: 265020 - RNA, 19 nt, Artificial Sequence
  Description of Artificial Sequence: Synthetic oligonucleotide
  Sense strand starting at position 3312 SEQ ID NO: 3406
auaggagaacgcuguagau

SEQ ID NO: 265021 - RNA, 19 nt, Artificial Sequence
  Description of Artificial Sequence: Synthetic oligonucleotide
  Antisense strand to SEQ ID NO: 265020
aucuacagcguucuccuau

SEQ ID NO: 265022 - RNA, 19 nt, Artificial Sequence
  Description of Artificial Sequence: Synthetic oligonucleotide
  Sense strand starting at position 3316 SEQ ID NO: 3406
gagaacgcuguagauagua

SEQ ID NO: 265023 - RNA, 19 nt, Artificial Sequence
  Description of Artificial Sequence: Synthetic oligonucleotide
  Antisense strand to SEQ ID NO: 265022
uacuaucuacagcguucuc

SEQ ID NO: 265024 - RNA, 19 nt, Artificial Sequence
  Description of Artificial Sequence: Synthetic oligonucleotide
  Sense strand starting at position 3324 SEQ ID NO: 3406
uguagauaguagucucauu

SEQ ID NO: 265025 - RNA, 19 nt, Artificial Sequence
  Description of Artificial Sequence: Synthetic oligonucleotide
  Antisense strand to SEQ ID NO: 265024
aaugagacuacuaucuaca

SEQ ID NO: 265026 - RNA, 19 nt, Artificial Sequence
  Description of Artificial Sequence: Synthetic oligonucleotide
  Sense strand starting at position 3379 SEQ ID NO: 3406
ggcccuagacuguaaugaa

SEQ ID NO: 265027 - RNA, 19 nt, Artificial Sequence
  Description of Artificial Sequence: Synthetic oligonucleotide
  Antisense strand to SEQ ID NO: 265026
uucauuacagucuagggcc

SEQ ID NO: 265028 - RNA, 19 nt, Artificial Sequence
  Description of Artificial Sequence: Synthetic oligonucleotide
  Sense strand starting at position 3474 SEQ ID NO: 3406
agaacaaguguacgggaau

SEQ ID NO: 265029 - RNA, 19 nt, Artificial Sequence
  Description of Artificial Sequence: Synthetic oligonucleotide
  Antisense strand to SEQ ID NO: 265028
auucccguacacuuguucu

SEQ ID NO: 265030 - RNA, 19 nt, Artificial Sequence
  Description of Artificial Sequence: Synthetic oligonucleotide
  Sense strand starting at position 3619 SEQ ID NO: 3406
aggauuguuugaguccuga

SEQ ID NO: 265031 - RNA, 19 nt, Artificial Sequence
  Description of Artificial Sequence: Synthetic oligonucleotide
  Antisense strand to SEQ ID NO: 265030
ucaggacucaaacaauccu

SEQ ID NO: 265032 - RNA, 19 nt, Artificial Sequence
  Description of Artificial Sequence: Synthetic oligonucleotide
  Sense strand starting at position 187 SEQ ID NO: 3407
gggacacaugcuggaauga

SEQ ID NO: 265033 - RNA, 19 nt, Artificial Sequence
  Description of Artificial Sequence: Synthetic oligonucleotide
  Antisense strand to SEQ ID NO: 265032
ucauuccagcauguguccc

SEQ ID NO: 265034 - RNA, 19 nt, Artificial Sequence
  Description of Artificial Sequence: Synthetic oligonucleotide
  Sense strand starting at position 208 SEQ ID NO: 3407
acaggaagcucaguuucua

SEQ ID NO: 265035 - RNA, 19 nt, Artificial Sequence
  Description of Artificial Sequence: Synthetic oligonucleotide
  Antisense strand to SEQ ID NO: 265034
uagaaacugagcuuccugu

SEQ ID NO: 265036 - RNA, 19 nt, Artificial Sequence
  Description of Artificial Sequence: Synthetic oligonucleotide
  Sense strand starting at position 318 SEQ ID NO: 3407
ugaugaauaguuugaaauc

SEQ ID NO: 265037 - RNA, 19 nt, Artificial Sequence
  Description of Artificial Sequence: Synthetic oligonucleotide
  Antisense strand to SEQ ID NO: 265036
gauuucaaacuauucauca

SEQ ID NO: 265038 - RNA, 19 nt, Artificial Sequence
  Description of Artificial Sequence: Synthetic oligonucleotide
  Sense strand starting at position 563 SEQ ID NO: 3407
gaaggcugucaccauguuu

SEQ ID NO: 265039 - RNA, 19 nt, Artificial Sequence
  Description of Artificial Sequence: Synthetic oligonucleotide
  Antisense strand to SEQ ID NO: 265038
aaacauggugacagccuuc

SEQ ID NO: 265040 - RNA, 19 nt, Artificial Sequence
  Description of Artificial Sequence: Synthetic oligonucleotide
  Sense strand starting at position 720 SEQ ID NO: 3407
gcaggaaucagcugggauu

SEQ ID NO: 265041 - RNA, 19 nt, Artificial Sequence
  Description of Artificial Sequence: Synthetic oligonucleotide
  Antisense strand to SEQ ID NO: 265040
aaucccagcugauuccugc

SEQ ID NO: 265042 - RNA, 19 nt, Artificial Sequence
  Description of Artificial Sequence: Synthetic oligonucleotide
  Sense strand starting at position 1054 SEQ ID NO: 3407
acauuaacuuggguuccaa

SEQ ID NO: 265043 - RNA, 19 nt, Artificial Sequence
  Description of Artificial Sequence: Synthetic oligonucleotide
  Antisense strand to SEQ ID NO: 265042
uuggaacccaaguuaaugu

SEQ ID NO: 265044 - RNA, 19 nt, Artificial Sequence
  Description of Artificial Sequence: Synthetic oligonucleotide
  Sense strand starting at position 1403 SEQ ID NO: 3407
ucuagaucagccuaauagu

SEQ ID NO: 265045 - RNA, 19 nt, Artificial Sequence
  Description of Artificial Sequence: Synthetic oligonucleotide
  Antisense strand to SEQ ID NO: 265044
acuauuaggcugaucuaga

SEQ ID NO: 265046 - RNA, 19 nt, Artificial Sequence
  Description of Artificial Sequence: Synthetic oligonucleotide
  Sense strand starting at position 1429 SEQ ID NO: 3407
uugguuguaucucuuuaaa

SEQ ID NO: 265047 - RNA, 19 nt, Artificial Sequence
  Description of Artificial Sequence: Synthetic oligonucleotide
  Antisense strand to SEQ ID NO: 265046
uuuaaagagauacaaccaa

SEQ ID NO: 265048 - RNA, 19 nt, Artificial Sequence
  Description of Artificial Sequence: Synthetic oligonucleotide
  Sense strand starting at position 1496 SEQ ID NO: 3407
gcaaaugaggauuagccau

SEQ ID NO: 265049 - RNA, 19 nt, Artificial Sequence
  Description of Artificial Sequence: Synthetic oligonucleotide
  Antisense strand to SEQ ID NO: 265048
auggcuaauccucauuugc

SEQ ID NO: 265050 - RNA, 19 nt, Artificial Sequence
  Description of Artificial Sequence: Synthetic oligonucleotide
  Sense strand starting at position 1590 SEQ ID NO: 3407
acuuuagggcccuauaguu

SEQ ID NO: 265051 - RNA, 19 nt, Artificial Sequence
  Description of Artificial Sequence: Synthetic oligonucleotide
  Antisense strand to SEQ ID NO: 265050
aacuauagggcccuaaagu

SEQ ID NO: 265052 - RNA, 19 nt, Artificial Sequence
  Description of Artificial Sequence: Synthetic oligonucleotide
  Sense strand starting at position 1598 SEQ ID NO: 3407
gcccuauaguuacuuagaa

SEQ ID NO: 265053 - RNA, 19 nt, Artificial Sequence
  Description of Artificial Sequence: Synthetic oligonucleotide
  Antisense strand to SEQ ID NO: 265052
uucuaaguaacuauagggc

SEQ ID NO: 265054 - RNA, 19 nt, Artificial Sequence
  Description of Artificial Sequence: Synthetic oligonucleotide
  Sense strand starting at position 1782 SEQ ID NO: 3407
uaucacaguccuggagaca

SEQ ID NO: 265055 - RNA, 19 nt, Artificial Sequence
  Description of Artificial Sequence: Synthetic oligonucleotide
  Antisense strand to SEQ ID NO: 265054
ugucuccaggacugugaua

SEQ ID NO: 265056 - RNA, 19 nt, Artificial Sequence
  Description of Artificial Sequence: Synthetic oligonucleotide
  Sense strand starting at position 1942 SEQ ID NO: 3407
ccgugaaugcggagcaagu

SEQ ID NO: 265057 - RNA, 19 nt, Artificial Sequence
  Description of Artificial Sequence: Synthetic oligonucleotide
  Antisense strand to SEQ ID NO: 265056
acuugcuccgcauucacgg

SEQ ID NO: 265058 - RNA, 19 nt, Artificial Sequence
  Description of Artificial Sequence: Synthetic oligonucleotide
  Sense strand starting at position 1955 SEQ ID NO: 3407
gcaaguuugcggagacuug

SEQ ID NO: 265059 - RNA, 19 nt, Artificial Sequence
  Description of Artificial Sequence: Synthetic oligonucleotide
  Antisense strand to SEQ ID NO: 265058
caagucuccgcaaacuugc

SEQ ID NO: 265060 - RNA, 19 nt, Artificial Sequence
  Description of Artificial Sequence: Synthetic oligonucleotide
  Sense strand starting at position 1995 SEQ ID NO: 3407
aguugcuucgagcuuguaa

SEQ ID NO: 265061 - RNA, 19 nt, Artificial Sequence
  Description of Artificial Sequence: Synthetic oligonucleotide
  Antisense strand to SEQ ID NO: 265060
uuacaagcucgaagcaacu

SEQ ID NO: 265062 - RNA, 19 nt, Artificial Sequence
  Description of Artificial Sequence: Synthetic oligonucleotide
  Sense strand starting at position 1996 SEQ ID NO: 3407
guugcuucgagcuuguaaa

SEQ ID NO: 265063 - RNA, 19 nt, Artificial Sequence
  Description of Artificial Sequence: Synthetic oligonucleotide
  Antisense strand to SEQ ID NO: 265062
uuuacaagcucgaagcaac

SEQ ID NO: 265064 - RNA, 19 nt, Artificial Sequence
  Description of Artificial Sequence: Synthetic oligonucleotide
  Sense strand starting at position 2116 SEQ ID NO: 3407
aagaguaucucuucugcag

SEQ ID NO: 265065 - RNA, 19 nt, Artificial Sequence
  Description of Artificial Sequence: Synthetic oligonucleotide
  Antisense strand to SEQ ID NO: 265064
cugcagaagagauacucuu

SEQ ID NO: 265066 - RNA, 19 nt, Artificial Sequence
  Description of Artificial Sequence: Synthetic oligonucleotide
  Sense strand starting at position 2163 SEQ ID NO: 3407
guuauacaugcguaaauaa

SEQ ID NO: 265067 - RNA, 19 nt, Artificial Sequence
  Description of Artificial Sequence: Synthetic oligonucleotide
  Antisense strand to SEQ ID NO: 265066
uuauuuacgcauguauaac

SEQ ID NO: 265068 - RNA, 19 nt, Artificial Sequence
  Description of Artificial Sequence: Synthetic oligonucleotide
  Sense strand starting at position 2249 SEQ ID NO: 3407
accagcuuacacuggaaua

SEQ ID NO: 265069 - RNA, 19 nt, Artificial Sequence
  Description of Artificial Sequence: Synthetic oligonucleotide
  Antisense strand to SEQ ID NO: 265068
uauuccaguguaagcuggu

SEQ ID NO: 265070 - RNA, 19 nt, Artificial Sequence
  Description of Artificial Sequence: Synthetic oligonucleotide
  Sense strand starting at position 2442 SEQ ID NO: 3407
uagauagauugucuugggu

SEQ ID NO: 265071 - RNA, 19 nt, Artificial Sequence
  Description of Artificial Sequence: Synthetic oligonucleotide
  Antisense strand to SEQ ID NO: 265070
acccaagacaaucuaucua

SEQ ID NO: 265072 - RNA, 19 nt, Artificial Sequence
  Description of Artificial Sequence: Synthetic oligonucleotide
  Sense strand starting at position 2536 SEQ ID NO: 3407
uugugugcauuugcaaaua

SEQ ID NO: 265073 - RNA, 19 nt, Artificial Sequence
  Description of Artificial Sequence: Synthetic oligonucleotide
  Antisense strand to SEQ ID NO: 265072
uauuugcaaaugcacacaa

SEQ ID NO: 265074 - RNA, 19 nt, Artificial Sequence
  Description of Artificial Sequence: Synthetic oligonucleotide
  Sense strand starting at position 2658 SEQ ID NO: 3407
auaagaaucugugccaagu

SEQ ID NO: 265075 - RNA, 19 nt, Artificial Sequence
  Description of Artificial Sequence: Synthetic oligonucleotide
  Antisense strand to SEQ ID NO: 265074
acuuggcacagauucuuau

SEQ ID NO: 265076 - RNA, 19 nt, Artificial Sequence
  Description of Artificial Sequence: Synthetic oligonucleotide
  Sense strand starting at position 2917 SEQ ID NO: 3407
ucuggacugcuauaacgau

SEQ ID NO: 265077 - RNA, 19 nt, Artificial Sequence
  Description of Artificial Sequence: Synthetic oligonucleotide
  Antisense strand to SEQ ID NO: 265076
aucguuauagcaguccaga

SEQ ID NO: 265078 - RNA, 19 nt, Artificial Sequence
  Description of Artificial Sequence: Synthetic oligonucleotide
  Sense strand starting at position 2926 SEQ ID NO: 3407
cuauaacgaugcuuacuau

SEQ ID NO: 265079 - RNA, 19 nt, Artificial Sequence
  Description of Artificial Sequence: Synthetic oligonucleotide
  Antisense strand to SEQ ID NO: 265078
auaguaagcaucguuauag

SEQ ID NO: 265080 - RNA, 19 nt, Artificial Sequence
  Description of Artificial Sequence: Synthetic oligonucleotide
  Sense strand starting at position 3148 SEQ ID NO: 3407
ggaacaagguuagcugauu

SEQ ID NO: 265081 - RNA, 19 nt, Artificial Sequence
  Description of Artificial Sequence: Synthetic oligonucleotide
  Antisense strand to SEQ ID NO: 265080
aaucagcuaaccuuguucc

SEQ ID NO: 265082 - RNA, 19 nt, Artificial Sequence
  Description of Artificial Sequence: Synthetic oligonucleotide
  Sense strand starting at position 3173 SEQ ID NO: 3407
cauggaguguauguuuaga

SEQ ID NO: 265083 - RNA, 19 nt, Artificial Sequence
  Description of Artificial Sequence: Synthetic oligonucleotide
  Antisense strand to SEQ ID NO: 265082
ucuaaacauacacuccaug

SEQ ID NO: 265084 - RNA, 19 nt, Artificial Sequence
  Description of Artificial Sequence: Synthetic oligonucleotide
  Sense strand starting at position 3175 SEQ ID NO: 3407
uggaguguauguuuagauu

SEQ ID NO: 265085 - RNA, 19 nt, Artificial Sequence
  Description of Artificial Sequence: Synthetic oligonucleotide
  Antisense strand to SEQ ID NO: 265084
aaucuaaacauacacucca

SEQ ID NO: 265086 - RNA, 19 nt, Artificial Sequence
  Description of Artificial Sequence: Synthetic oligonucleotide
  Sense strand starting at position 3181 SEQ ID NO: 3407
guauguuuagauuaagcuc

SEQ ID NO: 265087 - RNA, 19 nt, Artificial Sequence
  Description of Artificial Sequence: Synthetic oligonucleotide
  Antisense strand to SEQ ID NO: 265086
gagcuuaaucuaaacauac

SEQ ID NO: 265088 - RNA, 19 nt, Artificial Sequence
  Description of Artificial Sequence: Synthetic oligonucleotide
  Sense strand starting at position 3284 SEQ ID NO: 3407
agaguagcaauugguuauu

SEQ ID NO: 265089 - RNA, 19 nt, Artificial Sequence
  Description of Artificial Sequence: Synthetic oligonucleotide
  Antisense strand to SEQ ID NO: 265088
aauaaccaauugcuacucu

SEQ ID NO: 265090 - RNA, 19 nt, Artificial Sequence
  Description of Artificial Sequence: Synthetic oligonucleotide
  Sense strand starting at position 3286 SEQ ID NO: 3407
aguagcaauugguuauuga

SEQ ID NO: 265091 - RNA, 19 nt, Artificial Sequence
  Description of Artificial Sequence: Synthetic oligonucleotide
  Antisense strand to SEQ ID NO: 265090
ucaauaaccaauugcuacu

SEQ ID NO: 265092 - RNA, 19 nt, Artificial Sequence
  Description of Artificial Sequence: Synthetic oligonucleotide
  Sense strand starting at position 3287 SEQ ID NO: 3407
guagcaauugguuauugau

SEQ ID NO: 265093 - RNA, 19 nt, Artificial Sequence
  Description of Artificial Sequence: Synthetic oligonucleotide
  Antisense strand to SEQ ID NO: 265092
aucaauaaccaauugcuac

SEQ ID NO: 265094 - RNA, 19 nt, Artificial Sequence
  Description of Artificial Sequence: Synthetic oligonucleotide
  Sense strand starting at position 3365 SEQ ID NO: 3407
acacaaauuguguauguca

SEQ ID NO: 265095 - RNA, 19 nt, Artificial Sequence
  Description of Artificial Sequence: Synthetic oligonucleotide
  Antisense strand to SEQ ID NO: 265094
ugacauacacaauuugugu

SEQ ID NO: 265096 - RNA, 19 nt, Artificial Sequence
  Description of Artificial Sequence: Synthetic oligonucleotide
  Sense strand starting at position 3374 SEQ ID NO: 3407
guguaugucacugaugggu

SEQ ID NO: 265097 - RNA, 19 nt, Artificial Sequence
  Description of Artificial Sequence: Synthetic oligonucleotide
  Antisense strand to SEQ ID NO: 265096
acccaucagugacauacac

SEQ ID NO: 265098 - RNA, 19 nt, Artificial Sequence
  Description of Artificial Sequence: Synthetic oligonucleotide
  Sense strand starting at position 3480 SEQ ID NO: 3407
uuuccauagugaucccaca

SEQ ID NO: 265099 - RNA, 19 nt, Artificial Sequence
  Description of Artificial Sequence: Synthetic oligonucleotide
  Antisense strand to SEQ ID NO: 265098
ugugggaucacuauggaaa

SEQ ID NO: 265100 - RNA, 19 nt, Artificial Sequence
  Description of Artificial Sequence: Synthetic oligonucleotide
  Sense strand starting at position 3648 SEQ ID NO: 3407
uugcuuacugaguggauaa

SEQ ID NO: 265101 - RNA, 19 nt, Artificial Sequence
  Description of Artificial Sequence: Synthetic oligonucleotide
  Antisense strand to SEQ ID NO: 265100
uuauccacucaguaagcaa

SEQ ID NO: 265102 - RNA, 19 nt, Artificial Sequence
  Description of Artificial Sequence: Synthetic oligonucleotide
  Sense strand starting at position 3649 SEQ ID NO: 3407
ugcuuacugaguggauaaa

SEQ ID NO: 265103 - RNA, 19 nt, Artificial Sequence
  Description of Artificial Sequence: Synthetic oligonucleotide
  Antisense strand to SEQ ID NO: 265102
uuuauccacucaguaagca

SEQ ID NO: 265104 - RNA, 19 nt, Artificial Sequence
  Description of Artificial Sequence: Synthetic oligonucleotide
  Sense strand starting at position 3750 SEQ ID NO: 3407
agugguuacccucgggaaa

SEQ ID NO: 265105 - RNA, 19 nt, Artificial Sequence
  Description of Artificial Sequence: Synthetic oligonucleotide
  Antisense strand to SEQ ID NO: 265104
uuucccgaggguaaccacu

SEQ ID NO: 265106 - RNA, 19 nt, Artificial Sequence
  Description of Artificial Sequence: Synthetic oligonucleotide
  Sense strand starting at position 3866 SEQ ID NO: 3407
aagacuuggugguacauuu

SEQ ID NO: 265107 - RNA, 19 nt, Artificial Sequence
  Description of Artificial Sequence: Synthetic oligonucleotide
  Antisense strand to SEQ ID NO: 265106
aaauguaccaccaagucuu

SEQ ID NO: 265108 - RNA, 19 nt, Artificial Sequence
  Description of Artificial Sequence: Synthetic oligonucleotide
  Sense strand starting at position 3924 SEQ ID NO: 3407
cuaaaugucugaccuauag

SEQ ID NO: 265109 - RNA, 19 nt, Artificial Sequence
  Description of Artificial Sequence: Synthetic oligonucleotide
  Antisense strand to SEQ ID NO: 265108
cuauaggucagacauuuag

SEQ ID NO: 265110 - RNA, 19 nt, Artificial Sequence
  Description of Artificial Sequence: Synthetic oligonucleotide
  Sense strand starting at position 3981 SEQ ID NO: 3407
gaugaaguuucucccagga

SEQ ID NO: 265111 - RNA, 19 nt, Artificial Sequence
  Description of Artificial Sequence: Synthetic oligonucleotide
  Antisense strand to SEQ ID NO: 265110
uccugggagaaacuucauc

SEQ ID NO: 265112 - RNA, 19 nt, Artificial Sequence
  Description of Artificial Sequence: Synthetic oligonucleotide
  Sense strand starting at position 41 SEQ ID NO: 3408
aagagugugcaugguaguu

SEQ ID NO: 265113 - RNA, 19 nt, Artificial Sequence
  Description of Artificial Sequence: Synthetic oligonucleotide
  Antisense strand to SEQ ID NO: 265112
aacuaccaugcacacucuu

SEQ ID NO: 265114 - RNA, 19 nt, Artificial Sequence
  Description of Artificial Sequence: Synthetic oligonucleotide
  Sense strand starting at position 46 SEQ ID NO: 3408
ugugcaugguaguuugaua

SEQ ID NO: 265115 - RNA, 19 nt, Artificial Sequence
  Description of Artificial Sequence: Synthetic oligonucleotide
  Antisense strand to SEQ ID NO: 265114
uaucaaacuaccaugcaca

SEQ ID NO: 265116 - RNA, 19 nt, Artificial Sequence
  Description of Artificial Sequence: Synthetic oligonucleotide
  Sense strand starting at position 106 SEQ ID NO: 3408
aggcaauguguggaagagu

SEQ ID NO: 265117 - RNA, 19 nt, Artificial Sequence
  Description of Artificial Sequence: Synthetic oligonucleotide
  Antisense strand to SEQ ID NO: 265116
acucuuccacacauugccu

SEQ ID NO: 265118 - RNA, 19 nt, Artificial Sequence
  Description of Artificial Sequence: Synthetic oligonucleotide
  Sense strand starting at position 107 SEQ ID NO: 3408
ggcaauguguggaagagua

SEQ ID NO: 265119 - RNA, 19 nt, Artificial Sequence
  Description of Artificial Sequence: Synthetic oligonucleotide
  Antisense strand to SEQ ID NO: 265118
uacucuuccacacauugcc

SEQ ID NO: 265120 - RNA, 19 nt, Artificial Sequence
  Description of Artificial Sequence: Synthetic oligonucleotide
  Sense strand starting at position 147 SEQ ID NO: 3408
cgagaaaccugagcacaau

SEQ ID NO: 265121 - RNA, 19 nt, Artificial Sequence
  Description of Artificial Sequence: Synthetic oligonucleotide
  Antisense strand to SEQ ID NO: 265120
auugugcucagguuucucg

SEQ ID NO: 265122 - RNA, 19 nt, Artificial Sequence
  Description of Artificial Sequence: Synthetic oligonucleotide
  Sense strand starting at position 168 SEQ ID NO: 3408
agugcucagcugucuuuau

SEQ ID NO: 265123 - RNA, 19 nt, Artificial Sequence
  Description of Artificial Sequence: Synthetic oligonucleotide
  Antisense strand to SEQ ID NO: 265122
auaaagacagcugagcacu

SEQ ID NO: 265124 - RNA, 19 nt, Artificial Sequence
  Description of Artificial Sequence: Synthetic oligonucleotide
  Sense strand starting at position 180 SEQ ID NO: 3408
ucuuuauagugagcaaaua

SEQ ID NO: 265125 - RNA, 19 nt, Artificial Sequence
  Description of Artificial Sequence: Synthetic oligonucleotide
  Antisense strand to SEQ ID NO: 265124
uauuugcucacuauaaaga

SEQ ID NO: 265126 - RNA, 19 nt, Artificial Sequence
  Description of Artificial Sequence: Synthetic oligonucleotide
  Sense strand starting at position 181 SEQ ID NO: 3408
cuuuauagugagcaaauaa

SEQ ID NO: 265127 - RNA, 19 nt, Artificial Sequence
  Description of Artificial Sequence: Synthetic oligonucleotide
  Antisense strand to SEQ ID NO: 265126
uuauuugcucacuauaaag

SEQ ID NO: 265128 - RNA, 19 nt, Artificial Sequence
  Description of Artificial Sequence: Synthetic oligonucleotide
  Sense strand starting at position 279 SEQ ID NO: 3408
aaacacagugaguaguauu

SEQ ID NO: 265129 - RNA, 19 nt, Artificial Sequence
  Description of Artificial Sequence: Synthetic oligonucleotide
  Antisense strand to SEQ ID NO: 265128
aauacuacucacuguguuu

SEQ ID NO: 265130 - RNA, 19 nt, Artificial Sequence
  Description of Artificial Sequence: Synthetic oligonucleotide
  Sense strand starting at position 366 SEQ ID NO: 3408
agguuauccucagcucuga

SEQ ID NO: 265131 - RNA, 19 nt, Artificial Sequence
  Description of Artificial Sequence: Synthetic oligonucleotide
  Antisense strand to SEQ ID NO: 265130
ucagagcugaggauaaccu

SEQ ID NO: 265132 - RNA, 19 nt, Artificial Sequence
  Description of Artificial Sequence: Synthetic oligonucleotide
  Sense strand starting at position 561 SEQ ID NO: 3408
caaugaagagcuugugaaa

SEQ ID NO: 265133 - RNA, 19 nt, Artificial Sequence
  Description of Artificial Sequence: Synthetic oligonucleotide
  Antisense strand to SEQ ID NO: 265132
uuucacaagcucuucauug

SEQ ID NO: 265134 - RNA, 19 nt, Artificial Sequence
  Description of Artificial Sequence: Synthetic oligonucleotide
  Sense strand starting at position 682 SEQ ID NO: 3408
cugcauuaaguuggauaaa

SEQ ID NO: 265135 - RNA, 19 nt, Artificial Sequence
  Description of Artificial Sequence: Synthetic oligonucleotide
  Antisense strand to SEQ ID NO: 265134
uuuauccaacuuaaugcag

SEQ ID NO: 265136 - RNA, 19 nt, Artificial Sequence
  Description of Artificial Sequence: Synthetic oligonucleotide
  Sense strand starting at position 968 SEQ ID NO: 3408
uccugauggcaaugcaaga

SEQ ID NO: 265137 - RNA, 19 nt, Artificial Sequence
  Description of Artificial Sequence: Synthetic oligonucleotide
  Antisense strand to SEQ ID NO: 265136
ucuugcauugccaucagga

SEQ ID NO: 265138 - RNA, 19 nt, Artificial Sequence
  Description of Artificial Sequence: Synthetic oligonucleotide
  Sense strand starting at position 1085 SEQ ID NO: 3408
ccguuaccuuaguuaagca

SEQ ID NO: 265139 - RNA, 19 nt, Artificial Sequence
  Description of Artificial Sequence: Synthetic oligonucleotide
  Antisense strand to SEQ ID NO: 265138
ugcuuaacuaagguaacgg

SEQ ID NO: 265140 - RNA, 19 nt, Artificial Sequence
  Description of Artificial Sequence: Synthetic oligonucleotide
  Sense strand starting at position 1119 SEQ ID NO: 3408
acuacaaaucccgguacuu

SEQ ID NO: 265141 - RNA, 19 nt, Artificial Sequence
  Description of Artificial Sequence: Synthetic oligonucleotide
  Antisense strand to SEQ ID NO: 265140
aaguaccgggauuuguagu

SEQ ID NO: 265142 - RNA, 19 nt, Artificial Sequence
  Description of Artificial Sequence: Synthetic oligonucleotide
  Sense strand starting at position 1161 SEQ ID NO: 3408
ccaaauuaacggugaagau

SEQ ID NO: 265143 - RNA, 19 nt, Artificial Sequence
  Description of Artificial Sequence: Synthetic oligonucleotide
  Antisense strand to SEQ ID NO: 265142
aucuucaccguuaauuugg

SEQ ID NO: 265144 - RNA, 19 nt, Artificial Sequence
  Description of Artificial Sequence: Synthetic oligonucleotide
  Sense strand starting at position 1229 SEQ ID NO: 3408
ugccuuucccagcgagaca

SEQ ID NO: 265145 - RNA, 19 nt, Artificial Sequence
  Description of Artificial Sequence: Synthetic oligonucleotide
  Antisense strand to SEQ ID NO: 265144
ugucucgcugggaaaggca

SEQ ID NO: 265146 - RNA, 19 nt, Artificial Sequence
  Description of Artificial Sequence: Synthetic oligonucleotide
  Sense strand starting at position 1230 SEQ ID NO: 3408
gccuuucccagcgagacaa

SEQ ID NO: 265147 - RNA, 19 nt, Artificial Sequence
  Description of Artificial Sequence: Synthetic oligonucleotide
  Antisense strand to SEQ ID NO: 265146
uugucucgcugggaaaggc

SEQ ID NO: 265148 - RNA, 19 nt, Artificial Sequence
  Description of Artificial Sequence: Synthetic oligonucleotide
  Sense strand starting at position 1702 SEQ ID NO: 3408
cacuaaucgcgcgagacuu

SEQ ID NO: 265149 - RNA, 19 nt, Artificial Sequence
  Description of Artificial Sequence: Synthetic oligonucleotide
  Antisense strand to SEQ ID NO: 265148
aagucucgcgcgauuagug

SEQ ID NO: 265150 - RNA, 19 nt, Artificial Sequence
  Description of Artificial Sequence: Synthetic oligonucleotide
  Sense strand starting at position 1712 SEQ ID NO: 3408
gcgagacuucccgcagcau

SEQ ID NO: 265151 - RNA, 19 nt, Artificial Sequence
  Description of Artificial Sequence: Synthetic oligonucleotide
  Antisense strand to SEQ ID NO: 265150
augcugcgggaagucucgc

SEQ ID NO: 265152 - RNA, 19 nt, Artificial Sequence
  Description of Artificial Sequence: Synthetic oligonucleotide
  Sense strand starting at position 1891 SEQ ID NO: 3408
cgcagaugaguccagaaga

SEQ ID NO: 265153 - RNA, 19 nt, Artificial Sequence
  Description of Artificial Sequence: Synthetic oligonucleotide
  Antisense strand to SEQ ID NO: 265152
ucuucuggacucaucugcg

SEQ ID NO: 265154 - RNA, 19 nt, Artificial Sequence
  Description of Artificial Sequence: Synthetic oligonucleotide
  Sense strand starting at position 2012 SEQ ID NO: 3408
ccaguaaucgccuguggaa

SEQ ID NO: 265155 - RNA, 19 nt, Artificial Sequence
  Description of Artificial Sequence: Synthetic oligonucleotide
  Antisense strand to SEQ ID NO: 265154
uuccacaggcgauuacugg

SEQ ID NO: 265156 - RNA, 19 nt, Artificial Sequence
  Description of Artificial Sequence: Synthetic oligonucleotide
  Sense strand starting at position 2014 SEQ ID NO: 3408
aguaaucgccuguggaaag

SEQ ID NO: 265157 - RNA, 19 nt, Artificial Sequence
  Description of Artificial Sequence: Synthetic oligonucleotide
  Antisense strand to SEQ ID NO: 265156
cuuuccacaggcgauuacu

SEQ ID NO: 265158 - RNA, 19 nt, Artificial Sequence
  Description of Artificial Sequence: Synthetic oligonucleotide
  Sense strand starting at position 2608 SEQ ID NO: 3408
gugagaaaugcacgaaccu

SEQ ID NO: 265159 - RNA, 19 nt, Artificial Sequence
  Description of Artificial Sequence: Synthetic oligonucleotide
  Antisense strand to SEQ ID NO: 265158
agguucgugcauuucucac

SEQ ID NO: 265160 - RNA, 19 nt, Artificial Sequence
  Description of Artificial Sequence: Synthetic oligonucleotide
  Sense strand starting at position 2640 SEQ ID NO: 3408
gaaccucaagcgggagaua

SEQ ID NO: 265161 - RNA, 19 nt, Artificial Sequence
  Description of Artificial Sequence: Synthetic oligonucleotide
  Antisense strand to SEQ ID NO: 265160
uaucucccgcuugagguuc

SEQ ID NO: 265162 - RNA, 19 nt, Artificial Sequence
  Description of Artificial Sequence: Synthetic oligonucleotide
  Sense strand starting at position 2652 SEQ ID NO: 3408
ggagauauuucucgacaug

SEQ ID NO: 265163 - RNA, 19 nt, Artificial Sequence
  Description of Artificial Sequence: Synthetic oligonucleotide
  Antisense strand to SEQ ID NO: 265162
caugucgagaaauaucucc

SEQ ID NO: 265164 - RNA, 19 nt, Artificial Sequence
  Description of Artificial Sequence: Synthetic oligonucleotide
  Sense strand starting at position 2689 SEQ ID NO: 3408
guaacuuucuggccucaca

SEQ ID NO: 265165 - RNA, 19 nt, Artificial Sequence
  Description of Artificial Sequence: Synthetic oligonucleotide
  Antisense strand to SEQ ID NO: 265164
ugugaggccagaaaguuac

SEQ ID NO: 265166 - RNA, 19 nt, Artificial Sequence
  Description of Artificial Sequence: Synthetic oligonucleotide
  Sense strand starting at position 2764 SEQ ID NO: 3408
cagguucccugguuauuau

SEQ ID NO: 265167 - RNA, 19 nt, Artificial Sequence
  Description of Artificial Sequence: Synthetic oligonucleotide
  Antisense strand to SEQ ID NO: 265166
auaauaaccagggaaccug

SEQ ID NO: 265168 - RNA, 19 nt, Artificial Sequence
  Description of Artificial Sequence: Synthetic oligonucleotide
  Sense strand starting at position 2765 SEQ ID NO: 3408
agguucccugguuauuauu

SEQ ID NO: 265169 - RNA, 19 nt, Artificial Sequence
  Description of Artificial Sequence: Synthetic oligonucleotide
  Antisense strand to SEQ ID NO: 265168
aauaauaaccagggaaccu

SEQ ID NO: 265170 - RNA, 19 nt, Artificial Sequence
  Description of Artificial Sequence: Synthetic oligonucleotide
  Sense strand starting at position 2786 SEQ ID NO: 3408
ggucgaaugcgccaauuaa

SEQ ID NO: 265171 - RNA, 19 nt, Artificial Sequence
  Description of Artificial Sequence: Synthetic oligonucleotide
  Antisense strand to SEQ ID NO: 265170
uuaauuggcgcauucgacc

SEQ ID NO: 265172 - RNA, 19 nt, Artificial Sequence
  Description of Artificial Sequence: Synthetic oligonucleotide
  Sense strand starting at position 3030 SEQ ID NO: 3408
accucauuguuccuacaga

SEQ ID NO: 265173 - RNA, 19 nt, Artificial Sequence
  Description of Artificial Sequence: Synthetic oligonucleotide
  Antisense strand to SEQ ID NO: 265172
ucuguaggaacaaugaggu

SEQ ID NO: 265174 - RNA, 19 nt, Artificial Sequence
  Description of Artificial Sequence: Synthetic oligonucleotide
  Sense strand starting at position 3478 SEQ ID NO: 3408
ccgagaucgcgucauugaa

SEQ ID NO: 265175 - RNA, 19 nt, Artificial Sequence
  Description of Artificial Sequence: Synthetic oligonucleotide
  Antisense strand to SEQ ID NO: 265174
uucaaugacgcgaucucgg

SEQ ID NO: 265176 - RNA, 19 nt, Artificial Sequence
  Description of Artificial Sequence: Synthetic oligonucleotide
  Sense strand starting at position 3700 SEQ ID NO: 3408
gcgcucuuccagcucuuua

SEQ ID NO: 265177 - RNA, 19 nt, Artificial Sequence
  Description of Artificial Sequence: Synthetic oligonucleotide
  Antisense strand to SEQ ID NO: 265176
uaaagagcuggaagagcgc

SEQ ID NO: 265178 - RNA, 19 nt, Artificial Sequence
  Description of Artificial Sequence: Synthetic oligonucleotide
  Sense strand starting at position 3796 SEQ ID NO: 3408
aaauuaacuuguccagggu

SEQ ID NO: 265179 - RNA, 19 nt, Artificial Sequence
  Description of Artificial Sequence: Synthetic oligonucleotide
  Antisense strand to SEQ ID NO: 265178
acccuggacaaguuaauuu

SEQ ID NO: 265180 - RNA, 19 nt, Artificial Sequence
  Description of Artificial Sequence: Synthetic oligonucleotide
  Sense strand starting at position 3825 SEQ ID NO: 3408
gcaguggaggcguaggaua

SEQ ID NO: 265181 - RNA, 19 nt, Artificial Sequence
  Description of Artificial Sequence: Synthetic oligonucleotide
  Antisense strand to SEQ ID NO: 265180
uauccuacgccuccacugc

SEQ ID NO: 265182 - RNA, 19 nt, Artificial Sequence
  Description of Artificial Sequence: Synthetic oligonucleotide
  Sense strand starting at position 3827 SEQ ID NO: 3408
aguggaggcguaggauaua

SEQ ID NO: 265183 - RNA, 19 nt, Artificial Sequence
  Description of Artificial Sequence: Synthetic oligonucleotide
  Antisense strand to SEQ ID NO: 265182
uauauccuacgccuccacu

SEQ ID NO: 265184 - RNA, 19 nt, Artificial Sequence
  Description of Artificial Sequence: Synthetic oligonucleotide
  Sense strand starting at position 3830 SEQ ID NO: 3408
ggaggcguaggauauaagu

SEQ ID NO: 265185 - RNA, 19 nt, Artificial Sequence
  Description of Artificial Sequence: Synthetic oligonucleotide
  Antisense strand to SEQ ID NO: 265184
acuuauauccuacgccucc

SEQ ID NO: 265186 - RNA, 19 nt, Artificial Sequence
  Description of Artificial Sequence: Synthetic oligonucleotide
  Sense strand starting at position 3832 SEQ ID NO: 3408
aggcguaggauauaaguga

SEQ ID NO: 265187 - RNA, 19 nt, Artificial Sequence
  Description of Artificial Sequence: Synthetic oligonucleotide
  Antisense strand to SEQ ID NO: 265186
ucacuuauauccuacgccu

SEQ ID NO: 265188 - RNA, 19 nt, Artificial Sequence
  Description of Artificial Sequence: Synthetic oligonucleotide
  Sense strand starting at position 3833 SEQ ID NO: 3408
ggcguaggauauaagugaa

SEQ ID NO: 265189 - RNA, 19 nt, Artificial Sequence
  Description of Artificial Sequence: Synthetic oligonucleotide
  Antisense strand to SEQ ID NO: 265188
uucacuuauauccuacgcc

SEQ ID NO: 265190 - RNA, 19 nt, Artificial Sequence
  Description of Artificial Sequence: Synthetic oligonucleotide
  Sense strand starting at position 3857 SEQ ID NO: 3408
ugcugugucaucccaguuu

SEQ ID NO: 265191 - RNA, 19 nt, Artificial Sequence
  Description of Artificial Sequence: Synthetic oligonucleotide
  Antisense strand to SEQ ID NO: 265190
aaacugggaugacacagca

SEQ ID NO: 265192 - RNA, 19 nt, Artificial Sequence
  Description of Artificial Sequence: Synthetic oligonucleotide
  Sense strand starting at position 657 SEQ ID NO: 3409
auaauuaugcugugacaga

SEQ ID NO: 265193 - RNA, 19 nt, Artificial Sequence
  Description of Artificial Sequence: Synthetic oligonucleotide
  Antisense strand to SEQ ID NO: 265192
ucugucacagcauaauuau

SEQ ID NO: 265194 - RNA, 19 nt, Artificial Sequence
  Description of Artificial Sequence: Synthetic oligonucleotide
  Sense strand starting at position 664 SEQ ID NO: 3409
ugcugugacagauaauuag

SEQ ID NO: 265195 - RNA, 19 nt, Artificial Sequence
  Description of Artificial Sequence: Synthetic oligonucleotide
  Antisense strand to SEQ ID NO: 265194
cuaauuaucugucacagca

SEQ ID NO: 265196 - RNA, 19 nt, Artificial Sequence
  Description of Artificial Sequence: Synthetic oligonucleotide
  Sense strand starting at position 709 SEQ ID NO: 3409
gaaauauacguguauauga

SEQ ID NO: 265197 - RNA, 19 nt, Artificial Sequence
  Description of Artificial Sequence: Synthetic oligonucleotide
  Antisense strand to SEQ ID NO: 265196
ucauauacacguauauuuc

SEQ ID NO: 265198 - RNA, 19 nt, Artificial Sequence
  Description of Artificial Sequence: Synthetic oligonucleotide
  Sense strand starting at position 730 SEQ ID NO: 3409
aucuuacauuggguaaacu

SEQ ID NO: 265199 - RNA, 19 nt, Artificial Sequence
  Description of Artificial Sequence: Synthetic oligonucleotide
  Antisense strand to SEQ ID NO: 265198
aguuuacccaauguaagau

SEQ ID NO: 265200 - RNA, 19 nt, Artificial Sequence
  Description of Artificial Sequence: Synthetic oligonucleotide
  Sense strand starting at position 953 SEQ ID NO: 3409
uuagauugccauuauguua

SEQ ID NO: 265201 - RNA, 19 nt, Artificial Sequence
  Description of Artificial Sequence: Synthetic oligonucleotide
  Antisense strand to SEQ ID NO: 265200
uaacauaauggcaaucuaa

SEQ ID NO: 265202 - RNA, 19 nt, Artificial Sequence
  Description of Artificial Sequence: Synthetic oligonucleotide
  Sense strand starting at position 1001 SEQ ID NO: 3409
cauugagauguaugaagca

SEQ ID NO: 265203 - RNA, 19 nt, Artificial Sequence
  Description of Artificial Sequence: Synthetic oligonucleotide
  Antisense strand to SEQ ID NO: 265202
ugcuucauacaucucaaug

SEQ ID NO: 265204 - RNA, 19 nt, Artificial Sequence
  Description of Artificial Sequence: Synthetic oligonucleotide
  Sense strand starting at position 1404 SEQ ID NO: 3409
ggagcaauuugacauauua

SEQ ID NO: 265205 - RNA, 19 nt, Artificial Sequence
  Description of Artificial Sequence: Synthetic oligonucleotide
  Antisense strand to SEQ ID NO: 265204
uaauaugucaaauugcucc

SEQ ID NO: 265206 - RNA, 19 nt, Artificial Sequence
  Description of Artificial Sequence: Synthetic oligonucleotide
  Sense strand starting at position 1651 SEQ ID NO: 3409
cccaauggucugugaacuu

SEQ ID NO: 265207 - RNA, 19 nt, Artificial Sequence
  Description of Artificial Sequence: Synthetic oligonucleotide
  Antisense strand to SEQ ID NO: 265206
aaguucacagaccauuggg

SEQ ID NO: 265208 - RNA, 19 nt, Artificial Sequence
  Description of Artificial Sequence: Synthetic oligonucleotide
  Sense strand starting at position 1658 SEQ ID NO: 3409
gucugugaacuuuaggaag

SEQ ID NO: 265209 - RNA, 19 nt, Artificial Sequence
  Description of Artificial Sequence: Synthetic oligonucleotide
  Antisense strand to SEQ ID NO: 265208
cuuccuaaaguucacagac

SEQ ID NO: 265210 - RNA, 19 nt, Artificial Sequence
  Description of Artificial Sequence: Synthetic oligonucleotide
  Sense strand starting at position 1699 SEQ ID NO: 3409
gacugaacaugugugaaug

SEQ ID NO: 265211 - RNA, 19 nt, Artificial Sequence
  Description of Artificial Sequence: Synthetic oligonucleotide
  Antisense strand to SEQ ID NO: 265210
cauucacacauguucaguc

SEQ ID NO: 265212 - RNA, 19 nt, Artificial Sequence
  Description of Artificial Sequence: Synthetic oligonucleotide
  Sense strand starting at position 1700 SEQ ID NO: 3409
acugaacaugugugaaugu

SEQ ID NO: 265213 - RNA, 19 nt, Artificial Sequence
  Description of Artificial Sequence: Synthetic oligonucleotide
  Antisense strand to SEQ ID NO: 265212
acauucacacauguucagu

SEQ ID NO: 265214 - RNA, 19 nt, Artificial Sequence
  Description of Artificial Sequence: Synthetic oligonucleotide
  Sense strand starting at position 2033 SEQ ID NO: 3409
uuggaucuacuuggaucaa

SEQ ID NO: 265215 - RNA, 19 nt, Artificial Sequence
  Description of Artificial Sequence: Synthetic oligonucleotide
  Antisense strand to SEQ ID NO: 265214
uugauccaaguagauccaa

SEQ ID NO: 265216 - RNA, 19 nt, Artificial Sequence
  Description of Artificial Sequence: Synthetic oligonucleotide
  Sense strand starting at position 2043 SEQ ID NO: 3409
uuggaucaaucacaugaaa

SEQ ID NO: 265217 - RNA, 19 nt, Artificial Sequence
  Description of Artificial Sequence: Synthetic oligonucleotide
  Antisense strand to SEQ ID NO: 265216
uuucaugugauugauccaa

SEQ ID NO: 265218 - RNA, 19 nt, Artificial Sequence
  Description of Artificial Sequence: Synthetic oligonucleotide
  Sense strand starting at position 2064 SEQ ID NO: 3409
aaugcagucuacuuuggaa

SEQ ID NO: 265219 - RNA, 19 nt, Artificial Sequence
  Description of Artificial Sequence: Synthetic oligonucleotide
  Antisense strand to SEQ ID NO: 265218
uuccaaaguagacugcauu

SEQ ID NO: 265220 - RNA, 19 nt, Artificial Sequence
  Description of Artificial Sequence: Synthetic oligonucleotide
  Sense strand starting at position 2407 SEQ ID NO: 3409
caucaucuuuguguuagga

SEQ ID NO: 265221 - RNA, 19 nt, Artificial Sequence
  Description of Artificial Sequence: Synthetic oligonucleotide
  Antisense strand to SEQ ID NO: 265220
uccuaacacaaagaugaug

SEQ ID NO: 265222 - RNA, 19 nt, Artificial Sequence
  Description of Artificial Sequence: Synthetic oligonucleotide
  Sense strand starting at position 2667 SEQ ID NO: 3409
gugcuauauuugucuuucu

SEQ ID NO: 265223 - RNA, 19 nt, Artificial Sequence
  Description of Artificial Sequence: Synthetic oligonucleotide
  Antisense strand to SEQ ID NO: 265222
agaaagacaaauauagcac

SEQ ID NO: 265224 - RNA, 19 nt, Artificial Sequence
  Description of Artificial Sequence: Synthetic oligonucleotide
  Sense strand starting at position 2861 SEQ ID NO: 3409
ugugauaugcugcaauaaa

SEQ ID NO: 265225 - RNA, 19 nt, Artificial Sequence
  Description of Artificial Sequence: Synthetic oligonucleotide
  Antisense strand to SEQ ID NO: 265224
uuuauugcagcauaucaca

SEQ ID NO: 265226 - RNA, 19 nt, Artificial Sequence
  Description of Artificial Sequence: Synthetic oligonucleotide
  Sense strand starting at position 2908 SEQ ID NO: 3409
acuguuauccuuuauguug

SEQ ID NO: 265227 - RNA, 19 nt, Artificial Sequence
  Description of Artificial Sequence: Synthetic oligonucleotide
  Antisense strand to SEQ ID NO: 265226
caacauaaaggauaacagu

SEQ ID NO: 265228 - RNA, 19 nt, Artificial Sequence
  Description of Artificial Sequence: Synthetic oligonucleotide
  Sense strand starting at position 2914 SEQ ID NO: 3409
auccuuuauguuggguaaa

SEQ ID NO: 265229 - RNA, 19 nt, Artificial Sequence
  Description of Artificial Sequence: Synthetic oligonucleotide
  Antisense strand to SEQ ID NO: 265228
uuuacccaacauaaaggau

SEQ ID NO: 265230 - RNA, 19 nt, Artificial Sequence
  Description of Artificial Sequence: Synthetic oligonucleotide
  Sense strand starting at position 2916 SEQ ID NO: 3409
ccuuuauguuggguaaaua

SEQ ID NO: 265231 - RNA, 19 nt, Artificial Sequence
  Description of Artificial Sequence: Synthetic oligonucleotide
  Antisense strand to SEQ ID NO: 265230
uauuuacccaacauaaagg

SEQ ID NO: 265232 - RNA, 19 nt, Artificial Sequence
  Description of Artificial Sequence: Synthetic oligonucleotide
  Sense strand starting at position 2917 SEQ ID NO: 3409
cuuuauguuggguaaauac

SEQ ID NO: 265233 - RNA, 19 nt, Artificial Sequence
  Description of Artificial Sequence: Synthetic oligonucleotide
  Antisense strand to SEQ ID NO: 265232
guauuuacccaacauaaag

SEQ ID NO: 265234 - RNA, 19 nt, Artificial Sequence
  Description of Artificial Sequence: Synthetic oligonucleotide
  Sense strand starting at position 2991 SEQ ID NO: 3409
uccacacugguuugcauaa

SEQ ID NO: 265235 - RNA, 19 nt, Artificial Sequence
  Description of Artificial Sequence: Synthetic oligonucleotide
  Antisense strand to SEQ ID NO: 265234
uuaugcaaaccagugugga

SEQ ID NO: 265236 - RNA, 19 nt, Artificial Sequence
  Description of Artificial Sequence: Synthetic oligonucleotide
  Sense strand starting at position 2992 SEQ ID NO: 3409
ccacacugguuugcauaau

SEQ ID NO: 265237 - RNA, 19 nt, Artificial Sequence
  Description of Artificial Sequence: Synthetic oligonucleotide
  Antisense strand to SEQ ID NO: 265236
auuaugcaaaccagugugg

SEQ ID NO: 265238 - RNA, 19 nt, Artificial Sequence
  Description of Artificial Sequence: Synthetic oligonucleotide
  Sense strand starting at position 3004 SEQ ID NO: 3409
gcauaauggugguucuaau

SEQ ID NO: 265239 - RNA, 19 nt, Artificial Sequence
  Description of Artificial Sequence: Synthetic oligonucleotide
  Antisense strand to SEQ ID NO: 265238
auuagaaccaccauuaugc

SEQ ID NO: 265240 - RNA, 19 nt, Artificial Sequence
  Description of Artificial Sequence: Synthetic oligonucleotide
  Sense strand starting at position 3031 SEQ ID NO: 3409
cuacaaauaguguaugagu

SEQ ID NO: 265241 - RNA, 19 nt, Artificial Sequence
  Description of Artificial Sequence: Synthetic oligonucleotide
  Antisense strand to SEQ ID NO: 265240
acucauacacuauuuguag

SEQ ID NO: 265242 - RNA, 19 nt, Artificial Sequence
  Description of Artificial Sequence: Synthetic oligonucleotide
  Sense strand starting at position 3102 SEQ ID NO: 3409
gccauucugaggugaaaua

SEQ ID NO: 265243 - RNA, 19 nt, Artificial Sequence
  Description of Artificial Sequence: Synthetic oligonucleotide
  Antisense strand to SEQ ID NO: 265242
uauuucaccucagaauggc

SEQ ID NO: 265244 - RNA, 19 nt, Artificial Sequence
  Description of Artificial Sequence: Synthetic oligonucleotide
  Sense strand starting at position 3149 SEQ ID NO: 3409
cccuaaugauuacugaagu

SEQ ID NO: 265245 - RNA, 19 nt, Artificial Sequence
  Description of Artificial Sequence: Synthetic oligonucleotide
  Antisense strand to SEQ ID NO: 265244
acuucaguaaucauuaggg

SEQ ID NO: 265246 - RNA, 19 nt, Artificial Sequence
  Description of Artificial Sequence: Synthetic oligonucleotide
  Sense strand starting at position 3226 SEQ ID NO: 3409
gucagaucauuagccuauu

SEQ ID NO: 265247 - RNA, 19 nt, Artificial Sequence
  Description of Artificial Sequence: Synthetic oligonucleotide
  Antisense strand to SEQ ID NO: 265246
aauaggcuaaugaucugac

SEQ ID NO: 265248 - RNA, 19 nt, Artificial Sequence
  Description of Artificial Sequence: Synthetic oligonucleotide
  Sense strand starting at position 3450 SEQ ID NO: 3409
aagucuuagccaggaaauc

SEQ ID NO: 265249 - RNA, 19 nt, Artificial Sequence
  Description of Artificial Sequence: Synthetic oligonucleotide
  Antisense strand to SEQ ID NO: 265248
gauuuccuggcuaagacuu

SEQ ID NO: 265250 - RNA, 19 nt, Artificial Sequence
  Description of Artificial Sequence: Synthetic oligonucleotide
  Sense strand starting at position 3451 SEQ ID NO: 3409
agucuuagccaggaaaucu

SEQ ID NO: 265251 - RNA, 19 nt, Artificial Sequence
  Description of Artificial Sequence: Synthetic oligonucleotide
  Antisense strand to SEQ ID NO: 265250
agauuuccuggcuaagacu

SEQ ID NO: 265252 - RNA, 19 nt, Artificial Sequence
  Description of Artificial Sequence: Synthetic oligonucleotide
  Sense strand starting at position 3461 SEQ ID NO: 3409
aggaaaucuuugcccagau

SEQ ID NO: 265253 - RNA, 19 nt, Artificial Sequence
  Description of Artificial Sequence: Synthetic oligonucleotide
  Antisense strand to SEQ ID NO: 265252
aucugggcaaagauuuccu

SEQ ID NO: 265254 - RNA, 19 nt, Artificial Sequence
  Description of Artificial Sequence: Synthetic oligonucleotide
  Sense strand starting at position 3462 SEQ ID NO: 3409
ggaaaucuuugcccagaua

SEQ ID NO: 265255 - RNA, 19 nt, Artificial Sequence
  Description of Artificial Sequence: Synthetic oligonucleotide
  Antisense strand to SEQ ID NO: 265254
uaucugggcaaagauuucc

SEQ ID NO: 265256 - RNA, 19 nt, Artificial Sequence
  Description of Artificial Sequence: Synthetic oligonucleotide
  Sense strand starting at position 3606 SEQ ID NO: 3409
auugaagaggcuugucuuu

SEQ ID NO: 265257 - RNA, 19 nt, Artificial Sequence
  Description of Artificial Sequence: Synthetic oligonucleotide
  Antisense strand to SEQ ID NO: 265256
aaagacaagccucuucaau

SEQ ID NO: 265258 - RNA, 19 nt, Artificial Sequence
  Description of Artificial Sequence: Synthetic oligonucleotide
  Sense strand starting at position 3637 SEQ ID NO: 3409
guucuuggugccucuguua

SEQ ID NO: 265259 - RNA, 19 nt, Artificial Sequence
  Description of Artificial Sequence: Synthetic oligonucleotide
  Antisense strand to SEQ ID NO: 265258
uaacagaggcaccaagaac

SEQ ID NO: 265260 - RNA, 19 nt, Artificial Sequence
  Description of Artificial Sequence: Synthetic oligonucleotide
  Sense strand starting at position 3758 SEQ ID NO: 3409
acugcuuugcaguauauuu

SEQ ID NO: 265261 - RNA, 19 nt, Artificial Sequence
  Description of Artificial Sequence: Synthetic oligonucleotide
  Antisense strand to SEQ ID NO: 265260
aaauauacugcaaagcagu

SEQ ID NO: 265262 - RNA, 19 nt, Artificial Sequence
  Description of Artificial Sequence: Synthetic oligonucleotide
  Sense strand starting at position 3789 SEQ ID NO: 3409
augugaugccuccaagguc

SEQ ID NO: 265263 - RNA, 19 nt, Artificial Sequence
  Description of Artificial Sequence: Synthetic oligonucleotide
  Antisense strand to SEQ ID NO: 265262
gaccuuggaggcaucacau

SEQ ID NO: 265264 - RNA, 19 nt, Artificial Sequence
  Description of Artificial Sequence: Synthetic oligonucleotide
  Sense strand starting at position 3820 SEQ ID NO: 3409
ucaggaauucuuugccuau

SEQ ID NO: 265265 - RNA, 19 nt, Artificial Sequence
  Description of Artificial Sequence: Synthetic oligonucleotide
  Antisense strand to SEQ ID NO: 265264
auaggcaaagaauuccuga

SEQ ID NO: 265266 - RNA, 19 nt, Artificial Sequence
  Description of Artificial Sequence: Synthetic oligonucleotide
  Sense strand starting at position 3969 SEQ ID NO: 3409
auauuagcucuuuguugau

SEQ ID NO: 265267 - RNA, 19 nt, Artificial Sequence
  Description of Artificial Sequence: Synthetic oligonucleotide
  Antisense strand to SEQ ID NO: 265266
aucaacaaagagcuaauau

SEQ ID NO: 265268 - RNA, 19 nt, Artificial Sequence
  Description of Artificial Sequence: Synthetic oligonucleotide
  Sense strand starting at position 3975 SEQ ID NO: 3409
gcucuuuguugauccauga

SEQ ID NO: 265269 - RNA, 19 nt, Artificial Sequence
  Description of Artificial Sequence: Synthetic oligonucleotide
  Antisense strand to SEQ ID NO: 265268
ucauggaucaacaaagagc

SEQ ID NO: 265270 - RNA, 19 nt, Artificial Sequence
  Description of Artificial Sequence: Synthetic oligonucleotide
  Sense strand starting at position 3979 SEQ ID NO: 3409
uuuguugauccaugaacau

SEQ ID NO: 265271 - RNA, 19 nt, Artificial Sequence
  Description of Artificial Sequence: Synthetic oligonucleotide
  Antisense strand to SEQ ID NO: 265270
auguucauggaucaacaaa

SEQ ID NO: 265272 - RNA, 19 nt, Artificial Sequence
  Description of Artificial Sequence: Synthetic oligonucleotide
  Sense strand starting at position 89 SEQ ID NO: 3410
ggucuacagcauuaggaau

SEQ ID NO: 265273 - RNA, 19 nt, Artificial Sequence
  Description of Artificial Sequence: Synthetic oligonucleotide
  Antisense strand to SEQ ID NO: 265272
auuccuaaugcuguagacc

SEQ ID NO: 265274 - RNA, 19 nt, Artificial Sequence
  Description of Artificial Sequence: Synthetic oligonucleotide
  Sense strand starting at position 138 SEQ ID NO: 3410
cuauaaggaugcucaauga

SEQ ID NO: 265275 - RNA, 19 nt, Artificial Sequence
  Description of Artificial Sequence: Synthetic oligonucleotide
  Antisense strand to SEQ ID NO: 265274
ucauugagcauccuuauag

SEQ ID NO: 265276 - RNA, 19 nt, Artificial Sequence
  Description of Artificial Sequence: Synthetic oligonucleotide
  Sense strand starting at position 142 SEQ ID NO: 3410
aaggaugcucaaugaagua

SEQ ID NO: 265277 - RNA, 19 nt, Artificial Sequence
  Description of Artificial Sequence: Synthetic oligonucleotide
  Antisense strand to SEQ ID NO: 265276
uacuucauugagcauccuu

SEQ ID NO: 265278 - RNA, 19 nt, Artificial Sequence
  Description of Artificial Sequence: Synthetic oligonucleotide
  Sense strand starting at position 149 SEQ ID NO: 3410
cucaaugaaguaugaugua

SEQ ID NO: 265279 - RNA, 19 nt, Artificial Sequence
  Description of Artificial Sequence: Synthetic oligonucleotide
  Antisense strand to SEQ ID NO: 265278
uacaucauacuucauugag

SEQ ID NO: 265280 - RNA, 19 nt, Artificial Sequence
  Description of Artificial Sequence: Synthetic oligonucleotide
  Sense strand starting at position 313 SEQ ID NO: 3410
acaggagaauaugaaauau

SEQ ID NO: 265281 - RNA, 19 nt, Artificial Sequence
  Description of Artificial Sequence: Synthetic oligonucleotide
  Antisense strand to SEQ ID NO: 265280
auauuucauauucuccugu

SEQ ID NO: 265282 - RNA, 19 nt, Artificial Sequence
  Description of Artificial Sequence: Synthetic oligonucleotide
  Sense strand starting at position 344 SEQ ID NO: 3410
cgaucuugauuugauaacu

SEQ ID NO: 265283 - RNA, 19 nt, Artificial Sequence
  Description of Artificial Sequence: Synthetic oligonucleotide
  Antisense strand to SEQ ID NO: 265282
aguuaucaaaucaagaucg

SEQ ID NO: 265284 - RNA, 19 nt, Artificial Sequence
  Description of Artificial Sequence: Synthetic oligonucleotide
  Sense strand starting at position 453 SEQ ID NO: 3410
gaaauuaacgcagauagca

SEQ ID NO: 265285 - RNA, 19 nt, Artificial Sequence
  Description of Artificial Sequence: Synthetic oligonucleotide
  Antisense strand to SEQ ID NO: 265284
ugcuaucugcguuaauuuc

SEQ ID NO: 265286 - RNA, 19 nt, Artificial Sequence
  Description of Artificial Sequence: Synthetic oligonucleotide
  Sense strand starting at position 542 SEQ ID NO: 3410
cagcuaucagaauggauag

SEQ ID NO: 265287 - RNA, 19 nt, Artificial Sequence
  Description of Artificial Sequence: Synthetic oligonucleotide
  Antisense strand to SEQ ID NO: 265286
cuauccauucugauagcug

SEQ ID NO: 265288 - RNA, 19 nt, Artificial Sequence
  Description of Artificial Sequence: Synthetic oligonucleotide
  Sense strand starting at position 687 SEQ ID NO: 3410
cuagucuuacuacaugagu

SEQ ID NO: 265289 - RNA, 19 nt, Artificial Sequence
  Description of Artificial Sequence: Synthetic oligonucleotide
  Antisense strand to SEQ ID NO: 265288
acucauguaguaagacuag

SEQ ID NO: 265290 - RNA, 19 nt, Artificial Sequence
  Description of Artificial Sequence: Synthetic oligonucleotide
  Sense strand starting at position 690 SEQ ID NO: 3410
gucuuacuacaugaguaau

SEQ ID NO: 265291 - RNA, 19 nt, Artificial Sequence
  Description of Artificial Sequence: Synthetic oligonucleotide
  Antisense strand to SEQ ID NO: 265290
auuacucauguaguaagac

SEQ ID NO: 265292 - RNA, 19 nt, Artificial Sequence
  Description of Artificial Sequence: Synthetic oligonucleotide
  Sense strand starting at position 762 SEQ ID NO: 3410
cugcauguacacgauuaca

SEQ ID NO: 265293 - RNA, 19 nt, Artificial Sequence
  Description of Artificial Sequence: Synthetic oligonucleotide
  Antisense strand to SEQ ID NO: 265292
uguaaucguguacaugcag

SEQ ID NO: 265294 - RNA, 19 nt, Artificial Sequence
  Description of Artificial Sequence: Synthetic oligonucleotide
  Sense strand starting at position 834 SEQ ID NO: 3410
ugcugaaugaauugaagua

SEQ ID NO: 265295 - RNA, 19 nt, Artificial Sequence
  Description of Artificial Sequence: Synthetic oligonucleotide
  Antisense strand to SEQ ID NO: 265294
uacuucaauucauucagca

SEQ ID NO: 265296 - RNA, 19 nt, Artificial Sequence
  Description of Artificial Sequence: Synthetic oligonucleotide
  Sense strand starting at position 847 SEQ ID NO: 3410
gaaguacauccaugcaaug

SEQ ID NO: 265297 - RNA, 19 nt, Artificial Sequence
  Description of Artificial Sequence: Synthetic oligonucleotide
  Antisense strand to SEQ ID NO: 265296
cauugcauggauguacuuc

SEQ ID NO: 265298 - RNA, 19 nt, Artificial Sequence
  Description of Artificial Sequence: Synthetic oligonucleotide
  Sense strand starting at position 852 SEQ ID NO: 3410
acauccaugcaaugagaua

SEQ ID NO: 265299 - RNA, 19 nt, Artificial Sequence
  Description of Artificial Sequence: Synthetic oligonucleotide
  Antisense strand to SEQ ID NO: 265298
uaucucauugcauggaugu

SEQ ID NO: 265300 - RNA, 19 nt, Artificial Sequence
  Description of Artificial Sequence: Synthetic oligonucleotide
  Sense strand starting at position 863 SEQ ID NO: 3410
augagauauuacucaguga

SEQ ID NO: 265301 - RNA, 19 nt, Artificial Sequence
  Description of Artificial Sequence: Synthetic oligonucleotide
  Antisense strand to SEQ ID NO: 265300
ucacugaguaauaucucau

SEQ ID NO: 265302 - RNA, 19 nt, Artificial Sequence
  Description of Artificial Sequence: Synthetic oligonucleotide
  Sense strand starting at position 866 SEQ ID NO: 3410
agauauuacucagugauua

SEQ ID NO: 265303 - RNA, 19 nt, Artificial Sequence
  Description of Artificial Sequence: Synthetic oligonucleotide
  Antisense strand to SEQ ID NO: 265302
uaaucacugaguaauaucu

SEQ ID NO: 265304 - RNA, 19 nt, Artificial Sequence
  Description of Artificial Sequence: Synthetic oligonucleotide
  Sense strand starting at position 908 SEQ ID NO: 3410
cgaagacauaagugaaucu

SEQ ID NO: 265305 - RNA, 19 nt, Artificial Sequence
  Description of Artificial Sequence: Synthetic oligonucleotide
  Antisense strand to SEQ ID NO: 265304
agauucacuuaugucuucg

SEQ ID NO: 265306 - RNA, 19 nt, Artificial Sequence
  Description of Artificial Sequence: Synthetic oligonucleotide
  Sense strand starting at position 1022 SEQ ID NO: 3410
guuaaugagaucugugguu

SEQ ID NO: 265307 - RNA, 19 nt, Artificial Sequence
  Description of Artificial Sequence: Synthetic oligonucleotide
  Antisense strand to SEQ ID NO: 265306
aaccacagaucucauuaac

SEQ ID NO: 265308 - RNA, 19 nt, Artificial Sequence
  Description of Artificial Sequence: Synthetic oligonucleotide
  Sense strand starting at position 1024 SEQ ID NO: 3410
uaaugagaucugugguugu

SEQ ID NO: 265309 - RNA, 19 nt, Artificial Sequence
  Description of Artificial Sequence: Synthetic oligonucleotide
  Antisense strand to SEQ ID NO: 265308
acaaccacagaucucauua

SEQ ID NO: 265310 - RNA, 19 nt, Artificial Sequence
  Description of Artificial Sequence: Synthetic oligonucleotide
  Sense strand starting at position 1063 SEQ ID NO: 3410
ggguuuaauagguaaagca

SEQ ID NO: 265311 - RNA, 19 nt, Artificial Sequence
  Description of Artificial Sequence: Synthetic oligonucleotide
  Antisense strand to SEQ ID NO: 265310
ugcuuuaccuauuaaaccc

SEQ ID NO: 265312 - RNA, 19 nt, Artificial Sequence
  Description of Artificial Sequence: Synthetic oligonucleotide
  Sense strand starting at position 1103 SEQ ID NO: 3410
ugaagcuacucuguacgaa

SEQ ID NO: 265313 - RNA, 19 nt, Artificial Sequence
  Description of Artificial Sequence: Synthetic oligonucleotide
  Antisense strand to SEQ ID NO: 265312
uucguacagaguagcuuca

SEQ ID NO: 265314 - RNA, 19 nt, Artificial Sequence
  Description of Artificial Sequence: Synthetic oligonucleotide
  Sense strand starting at position 1212 SEQ ID NO: 3410
aaagaaugcgcucaaugua

SEQ ID NO: 265315 - RNA, 19 nt, Artificial Sequence
  Description of Artificial Sequence: Synthetic oligonucleotide
  Antisense strand to SEQ ID NO: 265314
uacauugagcgcauucuuu

SEQ ID NO: 265316 - RNA, 19 nt, Artificial Sequence
  Description of Artificial Sequence: Synthetic oligonucleotide
  Sense strand starting at position 1246 of SEQ ID NO: 3410
acgcauuagguagaaggau

SEQ ID NO: 265317 - RNA, 19 nt, Artificial Sequence
  Description of Artificial Sequence: Synthetic oligonucleotide
  Antisense strand to SEQ ID NO: 265316
auccuucuaccuaaugcgu

SEQ ID NO: 265318 - RNA, 19 nt, Artificial Sequence
  Description of Artificial Sequence: Synthetic oligonucleotide
  Sense strand starting at position 1293 of SEQ ID NO: 3410
gcaauccaacuguguuaca

SEQ ID NO: 265319 - RNA, 19 nt, Artificial Sequence
  Description of Artificial Sequence: Synthetic oligonucleotide
  Antisense strand to SEQ ID NO: 265318
uguaacacaguuggauugc

SEQ ID NO: 265320 - RNA, 19 nt, Artificial Sequence
  Description of Artificial Sequence: Synthetic oligonucleotide
  Sense strand starting at position 1359 of SEQ ID NO: 3410
aaaugagaguagucaguca

SEQ ID NO: 265321 - RNA, 19 nt, Artificial Sequence
  Description of Artificial Sequence: Synthetic oligonucleotide
  Antisense strand to SEQ ID NO: 265320
ugacugacuacucucauuu

SEQ ID NO: 265322 - RNA, 19 nt, Artificial Sequence
  Description of Artificial Sequence: Synthetic oligonucleotide
  Sense strand starting at position 1364 of SEQ ID NO: 3410
agaguagucagucagagua

SEQ ID NO: 265323 - RNA, 19 nt, Artificial Sequence
  Description of Artificial Sequence: Synthetic oligonucleotide
  Antisense strand to SEQ ID NO: 265322
uacucugacugacuacucu

SEQ ID NO: 265324 - RNA, 19 nt, Artificial Sequence
  Description of Artificial Sequence: Synthetic oligonucleotide
  Sense strand starting at position 1489 of SEQ ID NO: 3410
cuacgugaauuaucuaaug

SEQ ID NO: 265325 - RNA, 19 nt, Artificial Sequence
  Description of Artificial Sequence: Synthetic oligonucleotide
  Antisense strand to SEQ ID NO: 265324
cauuagauaauucacguag

SEQ ID NO: 265326 - RNA, 19 nt, Artificial Sequence
  Description of Artificial Sequence: Synthetic oligonucleotide
  Sense strand starting at position 1600 of SEQ ID NO: 3410
uugcuuaaagcugagauaa

SEQ ID NO: 265327 - RNA, 19 nt, Artificial Sequence
  Description of Artificial Sequence: Synthetic oligonucleotide
  Antisense strand to SEQ ID NO: 265326
uuaucucagcuuuaagcaa

SEQ ID NO: 265328 - RNA, 19 nt, Artificial Sequence
  Description of Artificial Sequence: Synthetic oligonucleotide
  Sense strand starting at position 1647 of SEQ ID NO: 3410
gaggucuguccacgaccaa

SEQ ID NO: 265329 - RNA, 19 nt, Artificial Sequence
  Description of Artificial Sequence: Synthetic oligonucleotide
  Antisense strand to SEQ ID NO: 265328
uuggucguggacagaccuc

SEQ ID NO: 265330 - RNA, 19 nt, Artificial Sequence
  Description of Artificial Sequence: Synthetic oligonucleotide
  Sense strand starting at position 1648 of SEQ ID NO: 3410
aggucuguccacgaccaaa

SEQ ID NO: 265331 - RNA, 19 nt, Artificial Sequence
  Description of Artificial Sequence: Synthetic oligonucleotide
  Antisense strand to SEQ ID NO: 265330
uuuggucguggacagaccu

SEQ ID NO: 265332 - RNA, 19 nt, Artificial Sequence
  Description of Artificial Sequence: Synthetic oligonucleotide
  Sense strand starting at position 2489 of SEQ ID NO: 3410
cugugaacacauugaauag

SEQ ID NO: 265333 - RNA, 19 nt, Artificial Sequence
  Description of Artificial Sequence: Synthetic oligonucleotide
  Antisense strand to SEQ ID NO: 265332
cuauucaauguguucacag

SEQ ID NO: 265334 - RNA, 19 nt, Artificial Sequence
  Description of Artificial Sequence: Synthetic oligonucleotide
  Sense strand starting at position 2928 of SEQ ID NO: 3410
augugagguuuccuuccaa

SEQ ID NO: 265335 - RNA, 19 nt, Artificial Sequence
  Description of Artificial Sequence: Synthetic oligonucleotide
  Antisense strand to SEQ ID NO: 265334
uuggaaggaaaccucacau

SEQ ID NO: 265336 - RNA, 19 nt, Artificial Sequence
  Description of Artificial Sequence: Synthetic oligonucleotide
  Sense strand starting at position 3078 of SEQ ID NO: 3410
aaugcagcuguguaaacua

SEQ ID NO: 265337 - RNA, 19 nt, Artificial Sequence
  Description of Artificial Sequence: Synthetic oligonucleotide
  Antisense strand to SEQ ID NO: 265336
uaguuuacacagcugcauu

SEQ ID NO: 265338 - RNA, 19 nt, Artificial Sequence
  Description of Artificial Sequence: Synthetic oligonucleotide
  Sense strand starting at position 3332 of SEQ ID NO: 3410
uugauuuacugauaauguc

SEQ ID NO: 265339 - RNA, 19 nt, Artificial Sequence
  Description of Artificial Sequence: Synthetic oligonucleotide
  Antisense strand to SEQ ID NO: 265338
gacauuaucaguaaaucaa

SEQ ID NO: 265340 - RNA, 19 nt, Artificial Sequence
  Description of Artificial Sequence: Synthetic oligonucleotide
  Sense strand starting at position 3338 of SEQ ID NO: 3410
uacugauaaugucuuggga

SEQ ID NO: 265341 - RNA, 19 nt, Artificial Sequence
  Description of Artificial Sequence: Synthetic oligonucleotide
  Antisense strand to SEQ ID NO: 265340
ucccaagacauuaucagua

SEQ ID NO: 265342 - RNA, 19 nt, Artificial Sequence
  Description of Artificial Sequence: Synthetic oligonucleotide
  Sense strand starting at position 3341 of SEQ ID NO: 3410
ugauaaugucuugggaaau

SEQ ID NO: 265343 - RNA, 19 nt, Artificial Sequence
  Description of Artificial Sequence: Synthetic oligonucleotide
  Antisense strand to SEQ ID NO: 265342
auuucccaagacauuauca

SEQ ID NO: 265344 - RNA, 19 nt, Artificial Sequence
  Description of Artificial Sequence: Synthetic oligonucleotide
  Sense strand starting at position 3352 of SEQ ID NO: 3410
ugggaaauaucauuaugua

SEQ ID NO: 265345 - RNA, 19 nt, Artificial Sequence
  Description of Artificial Sequence: Synthetic oligonucleotide
  Antisense strand to SEQ ID NO: 265344
uacauaaugauauuuccca

SEQ ID NO: 265346 - RNA, 19 nt, Artificial Sequence
  Description of Artificial Sequence: Synthetic oligonucleotide
  Sense strand starting at position 3409 of SEQ ID NO: 3410
agacguaacuucucacaac

SEQ ID NO: 265347 - RNA, 19 nt, Artificial Sequence
  Description of Artificial Sequence: Synthetic oligonucleotide
  Antisense strand to SEQ ID NO: 265346
guugugagaaguuacgucu

SEQ ID NO: 265348 - RNA, 19 nt, Artificial Sequence
  Description of Artificial Sequence: Synthetic oligonucleotide
  Sense strand starting at position 3731 of SEQ ID NO: 3410
ggcguuaucaaucggacaa

SEQ ID NO: 265349 - RNA, 19 nt, Artificial Sequence
  Description of Artificial Sequence: Synthetic oligonucleotide
  Antisense strand to SEQ ID NO: 265348
uuguccgauugauaacgcc

SEQ ID NO: 265350 - RNA, 19 nt, Artificial Sequence
  Description of Artificial Sequence: Synthetic oligonucleotide
  Sense strand starting at position 3732 of SEQ ID NO: 3410
gcguuaucaaucggacaaa

SEQ ID NO: 265351 - RNA, 19 nt, Artificial Sequence
  Description of Artificial Sequence: Synthetic oligonucleotide
  Antisense strand to SEQ ID NO: 265350
uuuguccgauugauaacgc

SEQ ID NO: 265352 - RNA, 19 nt, Artificial Sequence
  Description of Artificial Sequence: Synthetic oligonucleotide
  Sense strand starting at position 606 of SEQ ID NO: 3411
ccggcaucgaaagaaagau

SEQ ID NO: 265353 - RNA, 19 nt, Artificial Sequence
  Description of Artificial Sequence: Synthetic oligonucleotide
  Antisense strand to SEQ ID NO: 265352
aucuuucuuucgaugccgg

SEQ ID NO: 265354 - RNA, 19 nt, Artificial Sequence
  Description of Artificial Sequence: Synthetic oligonucleotide
  Sense strand starting at position 632 of SEQ ID NO: 3411
uuggguaaaccucgacacu

SEQ ID NO: 265355 - RNA, 19 nt, Artificial Sequence
  Description of Artificial Sequence: Synthetic oligonucleotide
  Antisense strand to SEQ ID NO: 265354
agugucgagguuuacccaa

SEQ ID NO: 265356 - RNA, 19 nt, Artificial Sequence
  Description of Artificial Sequence: Synthetic oligonucleotide
  Sense strand starting at position 633 of SEQ ID NO: 3411
uggguaaaccucgacacua

SEQ ID NO: 265357 - RNA, 19 nt, Artificial Sequence
  Description of Artificial Sequence: Synthetic oligonucleotide
  Antisense strand to SEQ ID NO: 265356
uagugucgagguuuaccca

SEQ ID NO: 265358 - RNA, 19 nt, Artificial Sequence
  Description of Artificial Sequence: Synthetic oligonucleotide
  Sense strand starting at position 767 of SEQ ID NO: 3411
accaaauggcucuguagaa

SEQ ID NO: 265359 - RNA, 19 nt, Artificial Sequence
  Description of Artificial Sequence: Synthetic oligonucleotide
  Antisense strand to SEQ ID NO: 265358
uucuacagagccauuuggu

SEQ ID NO: 265360 - RNA, 19 nt, Artificial Sequence
  Description of Artificial Sequence: Synthetic oligonucleotide
  Sense strand starting at position 768 of SEQ ID NO: 3411
ccaaauggcucuguagaac

SEQ ID NO: 265361 - RNA, 19 nt, Artificial Sequence
  Description of Artificial Sequence: Synthetic oligonucleotide
  Antisense strand to SEQ ID NO: 265360
guucuacagagccauuugg

SEQ ID NO: 265362 - RNA, 19 nt, Artificial Sequence
  Description of Artificial Sequence: Synthetic oligonucleotide
  Sense strand starting at position 790 of SEQ ID NO: 3411
caaggaaacgugggucaga

SEQ ID NO: 265363 - RNA, 19 nt, Artificial Sequence
  Description of Artificial Sequence: Synthetic oligonucleotide
  Antisense strand to SEQ ID NO: 265362
ucugacccacguuuccuug

SEQ ID NO: 265364 - RNA, 19 nt, Artificial Sequence
  Description of Artificial Sequence: Synthetic oligonucleotide
  Sense strand starting at position 791 of SEQ ID NO: 3411
aaggaaacgugggucagaa

SEQ ID NO: 265365 - RNA, 19 nt, Artificial Sequence
  Description of Artificial Sequence: Synthetic oligonucleotide
  Antisense strand to SEQ ID NO: 265364
uucugacccacguuuccuu

SEQ ID NO: 265366 - RNA, 19 nt, Artificial Sequence
  Description of Artificial Sequence: Synthetic oligonucleotide
  Sense strand starting at position 801 of SEQ ID NO: 3411
gggucagaaagcugugacu

SEQ ID NO: 265367 - RNA, 19 nt, Artificial Sequence
  Description of Artificial Sequence: Synthetic oligonucleotide
  Antisense strand to SEQ ID NO: 265366
agucacagcuuucugaccc

SEQ ID NO: 265368 - RNA, 19 nt, Artificial Sequence
  Description of Artificial Sequence: Synthetic oligonucleotide
  Sense strand starting at position 816 of SEQ ID NO: 3411
gacugugccuaauccuaga

SEQ ID NO: 265369 - RNA, 19 nt, Artificial Sequence
  Description of Artificial Sequence: Synthetic oligonucleotide
  Antisense strand to SEQ ID NO: 265368
ucuaggauuaggcacaguc

SEQ ID NO: 265370 - RNA, 19 nt, Artificial Sequence
  Description of Artificial Sequence: Synthetic oligonucleotide
  Sense strand starting at position 821 of SEQ ID NO: 3411
ugccuaauccuagaacagu

SEQ ID NO: 265371 - RNA, 19 nt, Artificial Sequence
  Description of Artificial Sequence: Synthetic oligonucleotide
  Antisense strand to SEQ ID NO: 265370
acuguucuaggauuaggca

SEQ ID NO: 265372 - RNA, 19 nt, Artificial Sequence
  Description of Artificial Sequence: Synthetic oligonucleotide
  Sense strand starting at position 926 of SEQ ID NO: 3411
gacgacuuuccaggcagua

SEQ ID NO: 265373 - RNA, 19 nt, Artificial Sequence
  Description of Artificial Sequence: Synthetic oligonucleotide
  Antisense strand to SEQ ID NO: 265372
uacugccuggaaagucguc

SEQ ID NO: 265374 - RNA, 19 nt, Artificial Sequence
  Description of Artificial Sequence: Synthetic oligonucleotide
  Sense strand starting at position 928 of SEQ ID NO: 3411
cgacuuuccaggcaguaau

SEQ ID NO: 265375 - RNA, 19 nt, Artificial Sequence
  Description of Artificial Sequence: Synthetic oligonucleotide
  Antisense strand to SEQ ID NO: 265374
auuacugccuggaaagucg

SEQ ID NO: 265376 - RNA, 19 nt, Artificial Sequence
  Description of Artificial Sequence: Synthetic oligonucleotide
  Sense strand starting at position 965 of SEQ ID NO: 3411
guuggagauuucuaccuaa

SEQ ID NO: 265377 - RNA, 19 nt, Artificial Sequence
  Description of Artificial Sequence: Synthetic oligonucleotide
  Antisense strand to SEQ ID NO: 265376
uuagguagaaaucuccaac

SEQ ID NO: 265378 - RNA, 19 nt, Artificial Sequence
  Description of Artificial Sequence: Synthetic oligonucleotide
  Sense strand starting at position 1360 of SEQ ID NO: 3411
ccauaccuuggcuggauua

SEQ ID NO: 265379 - RNA, 19 nt, Artificial Sequence
  Description of Artificial Sequence: Synthetic oligonucleotide
  Antisense strand to SEQ ID NO: 265378
uaauccagccaagguaugg

SEQ ID NO: 265380 - RNA, 19 nt, Artificial Sequence
  Description of Artificial Sequence: Synthetic oligonucleotide
  Sense strand starting at position 1362 of SEQ ID NO: 3411
auaccuuggcuggauuagu

SEQ ID NO: 265381 - RNA, 19 nt, Artificial Sequence
  Description of Artificial Sequence: Synthetic oligonucleotide
  Antisense strand to SEQ ID NO: 265380
acuaauccagccaagguau

SEQ ID NO: 265382 - RNA, 19 nt, Artificial Sequence
  Description of Artificial Sequence: Synthetic oligonucleotide
  Sense strand starting at position 2085 of SEQ ID NO: 3411
uuuggaguuccaugccaag

SEQ ID NO: 265383 - RNA, 19 nt, Artificial Sequence
  Description of Artificial Sequence: Synthetic oligonucleotide
  Antisense strand to SEQ ID NO: 265382
cuuggcauggaacuccaaa

SEQ ID NO: 265384 - RNA, 19 nt, Artificial Sequence
  Description of Artificial Sequence: Synthetic oligonucleotide
  Sense strand starting at position 2177 of SEQ ID NO: 3411
auggguucucccuggagga

SEQ ID NO: 265385 - RNA, 19 nt, Artificial Sequence
  Description of Artificial Sequence: Synthetic oligonucleotide
  Antisense strand to SEQ ID NO: 265384
uccuccagggagaacccau

SEQ ID NO: 265386 - RNA, 19 nt, Artificial Sequence
  Description of Artificial Sequence: Synthetic oligonucleotide
  Sense strand starting at position 2178 of SEQ ID NO: 3411
uggguucucccuggaggaa

SEQ ID NO: 265387 - RNA, 19 nt, Artificial Sequence
  Description of Artificial Sequence: Synthetic oligonucleotide
  Antisense strand to SEQ ID NO: 265386
uuccuccagggagaaccca

SEQ ID NO: 265388 - RNA, 19 nt, Artificial Sequence
  Description of Artificial Sequence: Synthetic oligonucleotide
  Sense strand starting at position 2247 of SEQ ID NO: 3411
ggaucaggcguggagaguu

SEQ ID NO: 265389 - RNA, 19 nt, Artificial Sequence
  Description of Artificial Sequence: Synthetic oligonucleotide
  Antisense strand to SEQ ID NO: 265388
aacucuccacgccugaucc

SEQ ID NO: 265390 - RNA, 19 nt, Artificial Sequence
  Description of Artificial Sequence: Synthetic oligonucleotide
  Sense strand starting at position 2421 of SEQ ID NO: 3411
guauucucuggcuauucuu

SEQ ID NO: 265391 - RNA, 19 nt, Artificial Sequence
  Description of Artificial Sequence: Synthetic oligonucleotide
  Antisense strand to SEQ ID NO: 265390
aagaauagccagagaauac

SEQ ID NO: 265392 - RNA, 19 nt, Artificial Sequence
  Description of Artificial Sequence: Synthetic oligonucleotide
  Sense strand starting at position 2540 of SEQ ID NO: 3411
uuugaacaccagugguauu

SEQ ID NO: 265393 - RNA, 19 nt, Artificial Sequence
  Description of Artificial Sequence: Synthetic oligonucleotide
  Antisense strand to SEQ ID NO: 265392
aauaccacugguguucaaa

SEQ ID NO: 265394 - RNA, 19 nt, Artificial Sequence
  Description of Artificial Sequence: Synthetic oligonucleotide
  Sense strand starting at position 2737 of SEQ ID NO: 3411
agugggagcgcguuaguau

SEQ ID NO: 265395 - RNA, 19 nt, Artificial Sequence
  Description of Artificial Sequence: Synthetic oligonucleotide
  Antisense strand to SEQ ID NO: 265394
auacuaacgcgcucccacu

SEQ ID NO: 265396 - RNA, 19 nt, Artificial Sequence
  Description of Artificial Sequence: Synthetic oligonucleotide
  Sense strand starting at position 2748 of SEQ ID NO: 3411
guuaguauuaaaugagaug

SEQ ID NO: 265397 - RNA, 19 nt, Artificial Sequence
  Description of Artificial Sequence: Synthetic oligonucleotide
  Antisense strand to SEQ ID NO: 265396
caucucauuuaauacuaac

SEQ ID NO: 265398 - RNA, 19 nt, Artificial Sequence
  Description of Artificial Sequence: Synthetic oligonucleotide
  Sense strand starting at position 2784 of SEQ ID NO: 3411
ggaaauguuugagcagaau

SEQ ID NO: 265399 - RNA, 19 nt, Artificial Sequence
  Description of Artificial Sequence: Synthetic oligonucleotide
  Antisense strand to SEQ ID NO: 265398
auucugcucaaacauuucc

SEQ ID NO: 265400 - RNA, 19 nt, Artificial Sequence
  Description of Artificial Sequence: Synthetic oligonucleotide
  Sense strand starting at position 2936 of SEQ ID NO: 3411
ggagaauaguaagaaagga

SEQ ID NO: 265401 - RNA, 19 nt, Artificial Sequence
  Description of Artificial Sequence: Synthetic oligonucleotide
  Antisense strand to SEQ ID NO: 265400
uccuuucuuacuauucucc

SEQ ID NO: 265402 - RNA, 19 nt, Artificial Sequence
  Description of Artificial Sequence: Synthetic oligonucleotide
  Sense strand starting at position 3078 of SEQ ID NO: 3411
uuucaagguggaggaguua

SEQ ID NO: 265403 - RNA, 19 nt, Artificial Sequence
  Description of Artificial Sequence: Synthetic oligonucleotide
  Antisense strand to SEQ ID NO: 265402
uaacuccuccaccuugaaa

SEQ ID NO: 265404 - RNA, 19 nt, Artificial Sequence
  Description of Artificial Sequence: Synthetic oligonucleotide
  Sense strand starting at position 3090 of SEQ ID NO: 3411
ggaguuaguuagagauagg

SEQ ID NO: 265405 - RNA, 19 nt, Artificial Sequence
  Description of Artificial Sequence: Synthetic oligonucleotide
  Antisense strand to SEQ ID NO: 265404
ccuaucucuaacuaacucc

SEQ ID NO: 265406 - RNA, 19 nt, Artificial Sequence
  Description of Artificial Sequence: Synthetic oligonucleotide
  Sense strand starting at position 3122 of SEQ ID NO: 3411
ugcucugugcuuguguaua

SEQ ID NO: 265407 - RNA, 19 nt, Artificial Sequence
  Description of Artificial Sequence: Synthetic oligonucleotide
  Antisense strand to SEQ ID NO: 265406
uauacacaagcacagagca

SEQ ID NO: 265408 - RNA, 19 nt, Artificial Sequence
  Description of Artificial Sequence: Synthetic oligonucleotide
  Sense strand starting at position 3127 of SEQ ID NO: 3411
ugugcuuguguauauuuaa

SEQ ID NO: 265409 - RNA, 19 nt, Artificial Sequence
  Description of Artificial Sequence: Synthetic oligonucleotide
  Antisense strand to SEQ ID NO: 265408
uuaaauauacacaagcaca

SEQ ID NO: 265410 - RNA, 19 nt, Artificial Sequence
  Description of Artificial Sequence: Synthetic oligonucleotide
  Sense strand starting at position 3130 of SEQ ID NO: 3411
gcuuguguauauuuaaguu

SEQ ID NO: 265411 - RNA, 19 nt, Artificial Sequence
  Description of Artificial Sequence: Synthetic oligonucleotide
  Antisense strand to SEQ ID NO: 265410
aacuuaaauauacacaagc

SEQ ID NO: 265412 - RNA, 19 nt, Artificial Sequence
  Description of Artificial Sequence: Synthetic oligonucleotide
  Sense strand starting at position 3210 of SEQ ID NO: 3411
gucaaauuguuuccacuuu

SEQ ID NO: 265413 - RNA, 19 nt, Artificial Sequence
  Description of Artificial Sequence: Synthetic oligonucleotide
  Antisense strand to SEQ ID NO: 265412
aaaguggaaacaauuugac

SEQ ID NO: 265414 - RNA, 19 nt, Artificial Sequence
  Description of Artificial Sequence: Synthetic oligonucleotide
  Sense strand starting at position 3340 of SEQ ID NO: 3411
guaugaaauacggguguau

SEQ ID NO: 265415 - RNA, 19 nt, Artificial Sequence
  Description of Artificial Sequence: Synthetic oligonucleotide
  Antisense strand to SEQ ID NO: 265414
auacacccguauuucauac

SEQ ID NO: 265416 - RNA, 19 nt, Artificial Sequence
  Description of Artificial Sequence: Synthetic oligonucleotide
  Sense strand starting at position 3342 of SEQ ID NO: 3411
augaaauacggguguaucu

SEQ ID NO: 265417 - RNA, 19 nt, Artificial Sequence
  Description of Artificial Sequence: Synthetic oligonucleotide
  Antisense strand to SEQ ID NO: 265416
agauacacccguauuucau

SEQ ID NO: 265418 - RNA, 19 nt, Artificial Sequence
  Description of Artificial Sequence: Synthetic oligonucleotide
  Sense strand starting at position 3344 of SEQ ID NO: 3411
gaaauacggguguaucuuu

SEQ ID NO: 265419 - RNA, 19 nt, Artificial Sequence
  Description of Artificial Sequence: Synthetic oligonucleotide
  Antisense strand to SEQ ID NO: 265418
aaagauacacccguauuuc

SEQ ID NO: 265420 - RNA, 19 nt, Artificial Sequence
  Description of Artificial Sequence: Synthetic oligonucleotide
  Sense strand starting at position 3430 of SEQ ID NO: 3411
ccuucuauaucagugcaua

SEQ ID NO: 265421 - RNA, 19 nt, Artificial Sequence
  Description of Artificial Sequence: Synthetic oligonucleotide
  Antisense strand to SEQ ID NO: 265420
uaugcacugauauagaagg

SEQ ID NO: 265422 - RNA, 19 nt, Artificial Sequence
  Description of Artificial Sequence: Synthetic oligonucleotide
  Sense strand starting at position 3462 of SEQ ID NO: 3411
uugcuauggcugcauaaau

SEQ ID NO: 265423 - RNA, 19 nt, Artificial Sequence
  Description of Artificial Sequence: Synthetic oligonucleotide
  Antisense strand to SEQ ID NO: 265422
auuuaugcagccauagcaa

SEQ ID NO: 265424 - RNA, 19 nt, Artificial Sequence
  Description of Artificial Sequence: Synthetic oligonucleotide
  Sense strand starting at position 3569 of SEQ ID NO: 3411
aguuaauaaccuuaaucgu

SEQ ID NO: 265425 - RNA, 19 nt, Artificial Sequence
  Description of Artificial Sequence: Synthetic oligonucleotide
  Antisense strand to SEQ ID NO: 265424
acgauuaagguuauuaacu

SEQ ID NO: 265426 - RNA, 19 nt, Artificial Sequence
  Description of Artificial Sequence: Synthetic oligonucleotide
  Sense strand starting at position 3904 of SEQ ID NO: 3411
cucaaucaguuaguuaauu

SEQ ID NO: 265427 - RNA, 19 nt, Artificial Sequence
  Description of Artificial Sequence: Synthetic oligonucleotide
  Antisense strand to SEQ ID NO: 265426
aauuaacuaacugauugag

SEQ ID NO: 265428 - RNA, 19 nt, Artificial Sequence
  Description of Artificial Sequence: Synthetic oligonucleotide
  Sense strand starting at position 3968 of SEQ ID NO: 3411
aauaguugugauuggaguu

SEQ ID NO: 265429 - RNA, 19 nt, Artificial Sequence
  Description of Artificial Sequence: Synthetic oligonucleotide
  Antisense strand to SEQ ID NO: 265428
aacuccaaucacaacuauu

SEQ ID NO: 265430 - RNA, 19 nt, Artificial Sequence
  Description of Artificial Sequence: Synthetic oligonucleotide
  Sense strand starting at position 3974 of SEQ ID NO: 3411
ugugauuggaguugacaaa

SEQ ID NO: 265431 - RNA, 19 nt, Artificial Sequence
  Description of Artificial Sequence: Synthetic oligonucleotide
  Antisense strand to SEQ ID NO: 265430
uuugucaacuccaaucaca

SEQ ID NO: 265432 - RNA, 19 nt, Artificial Sequence
  Description of Artificial Sequence: Synthetic oligonucleotide
  Sense strand starting at position 277 of SEQ ID NO: 3412
ccuuuauagccacauuguu

SEQ ID NO: 265433 - RNA, 19 nt, Artificial Sequence
  Description of Artificial Sequence: Synthetic oligonucleotide
  Antisense strand to SEQ ID NO: 265432
aacaauguggcuauaaagg

SEQ ID NO: 265434 - RNA, 19 nt, Artificial Sequence
  Description of Artificial Sequence: Synthetic oligonucleotide
  Sense strand starting at position 345 of SEQ ID NO: 3412
gggauuaugguauagucac

SEQ ID NO: 265435 - RNA, 19 nt, Artificial Sequence
  Description of Artificial Sequence: Synthetic oligonucleotide
  Antisense strand to SEQ ID NO: 265434
gugacuauaccauaauccc

SEQ ID NO: 265436 - RNA, 19 nt, Artificial Sequence
  Description of Artificial Sequence: Synthetic oligonucleotide
  Sense strand starting at position 358 of SEQ ID NO: 3412
agucacacuguagaauauu

SEQ ID NO: 265437 - RNA, 19 nt, Artificial Sequence
  Description of Artificial Sequence: Synthetic oligonucleotide
  Antisense strand to SEQ ID NO: 265436
aauauucuacagugugacu

SEQ ID NO: 265438 - RNA, 19 nt, Artificial Sequence
  Description of Artificial Sequence: Synthetic oligonucleotide
  Sense strand starting at position 404 of SEQ ID NO: 3412
gugauugaaucuccacaaa

SEQ ID NO: 265439 - RNA, 19 nt, Artificial Sequence
  Description of Artificial Sequence: Synthetic oligonucleotide
  Antisense strand to SEQ ID NO: 265438
uuuguggagauucaaucac

SEQ ID NO: 265440 - RNA, 19 nt, Artificial Sequence
  Description of Artificial Sequence: Synthetic oligonucleotide
  Sense strand starting at position 625 of SEQ ID NO: 3412
gagauucuaaggcaguguu

SEQ ID NO: 265441 - RNA, 19 nt, Artificial Sequence
  Description of Artificial Sequence: Synthetic oligonucleotide
  Antisense strand to SEQ ID NO: 265440
aacacugccuuagaaucuc

SEQ ID NO: 265442 - RNA, 19 nt, Artificial Sequence
  Description of Artificial Sequence: Synthetic oligonucleotide
  Sense strand starting at position 659 of SEQ ID NO: 3412
aacuauugucccuguaagg

SEQ ID NO: 265443 - RNA, 19 nt, Artificial Sequence
  Description of Artificial Sequence: Synthetic oligonucleotide
  Antisense strand to SEQ ID NO: 265442
ccuuacagggacaauaguu

SEQ ID NO: 265444 - RNA, 19 nt, Artificial Sequence
  Description of Artificial Sequence: Synthetic oligonucleotide
  Sense strand starting at position 778 of SEQ ID NO: 3412
ggacacaaaucauuguagu

SEQ ID NO: 265445 - RNA, 19 nt, Artificial Sequence
  Description of Artificial Sequence: Synthetic oligonucleotide
  Antisense strand to SEQ ID NO: 265444
acuacaaugauuugugucc

SEQ ID NO: 265446 - RNA, 19 nt, Artificial Sequence
  Description of Artificial Sequence: Synthetic oligonucleotide
  Sense strand starting at position 899 of SEQ ID NO: 3412
ucuaaucuaagagguggau

SEQ ID NO: 265447 - RNA, 19 nt, Artificial Sequence
  Description of Artificial Sequence: Synthetic oligonucleotide
  Antisense strand to SEQ ID NO: 265446
auccaccucuuagauuaga

SEQ ID NO: 265448 - RNA, 19 nt, Artificial Sequence
  Description of Artificial Sequence: Synthetic oligonucleotide
  Sense strand starting at position 1022 of SEQ ID NO: 3412
uuaaauugugcugaggacu

SEQ ID NO: 265449 - RNA, 19 nt, Artificial Sequence
  Description of Artificial Sequence: Synthetic oligonucleotide
  Antisense strand to SEQ ID NO: 265448
aguccucagcacaauuuaa

SEQ ID NO: 265450 - RNA, 19 nt, Artificial Sequence
  Description of Artificial Sequence: Synthetic oligonucleotide
  Sense strand starting at position 1049 of SEQ ID NO: 3412
gugguuauuuccguuucag

SEQ ID NO: 265451 - RNA, 19 nt, Artificial Sequence
  Description of Artificial Sequence: Synthetic oligonucleotide
  Antisense strand to SEQ ID NO: 265450
cugaaacggaaauaaccac

SEQ ID NO: 265452 - RNA, 19 nt, Artificial Sequence
  Description of Artificial Sequence: Synthetic oligonucleotide
  Sense strand starting at position 1218 of SEQ ID NO: 3412
ugguauccuuucccuaaga

SEQ ID NO: 265453 - RNA, 19 nt, Artificial Sequence
  Description of Artificial Sequence: Synthetic oligonucleotide
  Antisense strand to SEQ ID NO: 265452
ucuuagggaaaggauacca

SEQ ID NO: 265454 - RNA, 19 nt, Artificial Sequence
  Description of Artificial Sequence: Synthetic oligonucleotide
  Sense strand starting at position 1219 of SEQ ID NO: 3412
gguauccuuucccuaagaa

SEQ ID NO: 265455 - RNA, 19 nt, Artificial Sequence
  Description of Artificial Sequence: Synthetic oligonucleotide
  Antisense strand to SEQ ID NO: 265454
uucuuagggaaaggauacc

SEQ ID NO: 265456 - RNA, 19 nt, Artificial Sequence
  Description of Artificial Sequence: Synthetic oligonucleotide
  Sense strand starting at position 1392 of SEQ ID NO: 3412
guucuucugccuuugcgau

SEQ ID NO: 265457 - RNA, 19 nt, Artificial Sequence
  Description of Artificial Sequence: Synthetic oligonucleotide
  Antisense strand to SEQ ID NO: 265456
aucgcaaaggcagaagaac

SEQ ID NO: 265458 - RNA, 19 nt, Artificial Sequence
  Description of Artificial Sequence: Synthetic oligonucleotide
  Sense strand starting at position 2032 of SEQ ID NO: 3412
cguguucucacccaaugag

SEQ ID NO: 265459 - RNA, 19 nt, Artificial Sequence
  Description of Artificial Sequence: Synthetic oligonucleotide
  Antisense strand to SEQ ID NO: 265458
cucauugggugagaacacg

SEQ ID NO: 265460 - RNA, 19 nt, Artificial Sequence
  Description of Artificial Sequence: Synthetic oligonucleotide
  Sense strand starting at position 2158 of SEQ ID NO: 3412
ggcaaagugcuagaugaag

SEQ ID NO: 265461 - RNA, 19 nt, Artificial Sequence
  Description of Artificial Sequence: Synthetic oligonucleotide
  Antisense strand to SEQ ID NO: 265460
cuucaucuagcacuuugcc

SEQ ID NO: 265462 - RNA, 19 nt, Artificial Sequence
  Description of Artificial Sequence: Synthetic oligonucleotide
  Sense strand starting at position 2488 of SEQ ID NO: 3412
cggcauugaagacaguuaa

SEQ ID NO: 265463 - RNA, 19 nt, Artificial Sequence
  Description of Artificial Sequence: Synthetic oligonucleotide
  Antisense strand to SEQ ID NO: 265462
uuaacugucuucaaugccg

SEQ ID NO: 265464 - RNA, 19 nt, Artificial Sequence
  Description of Artificial Sequence: Synthetic oligonucleotide
  Sense strand starting at position 2507 of SEQ ID NO: 3412
gagaaaucccagugauugc

SEQ ID NO: 265465 - RNA, 19 nt, Artificial Sequence
  Description of Artificial Sequence: Synthetic oligonucleotide
  Antisense strand to SEQ ID NO: 265464
gcaaucacugggauuucuc

SEQ ID NO: 265466 - RNA, 19 nt, Artificial Sequence
  Description of Artificial Sequence: Synthetic oligonucleotide
  Sense strand starting at position 2603 of SEQ ID NO: 3412
ucauuauugcuguacauua

SEQ ID NO: 265467 - RNA, 19 nt, Artificial Sequence
  Description of Artificial Sequence: Synthetic oligonucleotide
  Antisense strand to SEQ ID NO: 265466
uaauguacagcaauaauga

SEQ ID NO: 265468 - RNA, 19 nt, Artificial Sequence
  Description of Artificial Sequence: Synthetic oligonucleotide
  Sense strand starting at position 2608 of SEQ ID NO: 3412
auugcuguacauuauguaa

SEQ ID NO: 265469 - RNA, 19 nt, Artificial Sequence
  Description of Artificial Sequence: Synthetic oligonucleotide
  Antisense strand to SEQ ID NO: 265468
uuacauaauguacagcaau

SEQ ID NO: 265470 - RNA, 19 nt, Artificial Sequence
  Description of Artificial Sequence: Synthetic oligonucleotide
  Sense strand starting at position 2687 of SEQ ID NO: 3412
accuauuaauguguuagaa

SEQ ID NO: 265471 - RNA, 19 nt, Artificial Sequence
  Description of Artificial Sequence: Synthetic oligonucleotide
  Antisense strand to SEQ ID NO: 265470
uucuaacacauuaauaggu

SEQ ID NO: 265472 - RNA, 19 nt, Artificial Sequence
  Description of Artificial Sequence: Synthetic oligonucleotide
  Sense strand starting at position 2760 of SEQ ID NO: 3412
ggugguagcauggaggaua

SEQ ID NO: 265473 - RNA, 19 nt, Artificial Sequence
  Description of Artificial Sequence: Synthetic oligonucleotide
  Antisense strand to SEQ ID NO: 265472
uauccuccaugcuaccacc

SEQ ID NO: 265474 - RNA, 19 nt, Artificial Sequence
  Description of Artificial Sequence: Synthetic oligonucleotide
  Sense strand starting at position 2773 of SEQ ID NO: 3412
aggauagaguagucacgaa

SEQ ID NO: 265475 - RNA, 19 nt, Artificial Sequence
  Description of Artificial Sequence: Synthetic oligonucleotide
  Antisense strand to SEQ ID NO: 265474
uucgugacuacucuauccu

SEQ ID NO: 265476 - RNA, 19 nt, Artificial Sequence
  Description of Artificial Sequence: Synthetic oligonucleotide
  Sense strand starting at position 2780 of SEQ ID NO: 3412
aguagucacgaagagcuua

SEQ ID NO: 265477 - RNA, 19 nt, Artificial Sequence
  Description of Artificial Sequence: Synthetic oligonucleotide
  Antisense strand to SEQ ID NO: 265476
uaagcucuucgugacuacu

SEQ ID NO: 265478 - RNA, 19 nt, Artificial Sequence
  Description of Artificial Sequence: Synthetic oligonucleotide
  Sense strand starting at position 2785 of SEQ ID NO: 3412
ucacgaagagcuuauccca

SEQ ID NO: 265479 - RNA, 19 nt, Artificial Sequence
  Description of Artificial Sequence: Synthetic oligonucleotide
  Antisense strand to SEQ ID NO: 265478
ugggauaagcucuucguga

SEQ ID NO: 265480 - RNA, 19 nt, Artificial Sequence
  Description of Artificial Sequence: Synthetic oligonucleotide
  Sense strand starting at position 2788 of SEQ ID NO: 3412
cgaagagcuuaucccaauu

SEQ ID NO: 265481 - RNA, 19 nt, Artificial Sequence
  Description of Artificial Sequence: Synthetic oligonucleotide
  Antisense strand to SEQ ID NO: 265480
aauugggauaagcucuucg

SEQ ID NO: 265482 - RNA, 19 nt, Artificial Sequence
  Description of Artificial Sequence: Synthetic oligonucleotide
  Sense strand starting at position 2815 of SEQ ID NO: 3412
gacagauacuaguuugcga

SEQ ID NO: 265483 - RNA, 19 nt, Artificial Sequence
  Description of Artificial Sequence: Synthetic oligonucleotide
  Antisense strand to SEQ ID NO: 265482
ucgcaaacuaguaucuguc

SEQ ID NO: 265484 - RNA, 19 nt, Artificial Sequence
  Description of Artificial Sequence: Synthetic oligonucleotide
  Sense strand starting at position 3019 of SEQ ID NO: 3412
gaaguuagggacugugcaa

SEQ ID NO: 265485 - RNA, 19 nt, Artificial Sequence
  Description of Artificial Sequence: Synthetic oligonucleotide
  Antisense strand to SEQ ID NO: 265484
uugcacagucccuaacuuc

SEQ ID NO: 265486 - RNA, 19 nt, Artificial Sequence
  Description of Artificial Sequence: Synthetic oligonucleotide
  Sense strand starting at position 3411 of SEQ ID NO: 3412
cugagaagcuacuuaugaa

SEQ ID NO: 265487 - RNA, 19 nt, Artificial Sequence
  Description of Artificial Sequence: Synthetic oligonucleotide
  Antisense strand to SEQ ID NO: 265486
uucauaaguagcuucucag

SEQ ID NO: 265488 - RNA, 19 nt, Artificial Sequence
  Description of Artificial Sequence: Synthetic oligonucleotide
  Sense strand starting at position 3586 of SEQ ID NO: 3412
uguguuauggaagggcaaa

SEQ ID NO: 265489 - RNA, 19 nt, Artificial Sequence
  Description of Artificial Sequence: Synthetic oligonucleotide
  Antisense strand to SEQ ID NO: 265488
uuugcccuuccauaacaca

SEQ ID NO: 265490 - RNA, 19 nt, Artificial Sequence
  Description of Artificial Sequence: Synthetic oligonucleotide
  Sense strand starting at position 3697 of SEQ ID NO: 3412
aauguaagguguuugaaau

SEQ ID NO: 265491 - RNA, 19 nt, Artificial Sequence
  Description of Artificial Sequence: Synthetic oligonucleotide
  Antisense strand to SEQ ID NO: 265490
auuucaaacaccuuacauu

SEQ ID NO: 265492 - RNA, 19 nt, Artificial Sequence
  Description of Artificial Sequence: Synthetic oligonucleotide
  Sense strand starting at position 3698 of SEQ ID NO: 3412
auguaagguguuugaaaua

SEQ ID NO: 265493 - RNA, 19 nt, Artificial Sequence
  Description of Artificial Sequence: Synthetic oligonucleotide
  Antisense strand to SEQ ID NO: 265492
uauuucaaacaccuuacau

SEQ ID NO: 265494 - RNA, 19 nt, Artificial Sequence
  Description of Artificial Sequence: Synthetic oligonucleotide
  Sense strand starting at position 3708 of SEQ ID NO: 3412
uuugaaauauugccuuuag

SEQ ID NO: 265495 - RNA, 19 nt, Artificial Sequence
  Description of Artificial Sequence: Synthetic oligonucleotide
  Antisense strand to SEQ ID NO: 265494
cuaaaggcaauauuucaaa

SEQ ID NO: 265496 - RNA, 19 nt, Artificial Sequence
  Description of Artificial Sequence: Synthetic oligonucleotide
  Sense strand starting at position 3717 of SEQ ID NO: 3412
uugccuuuagcuuaggaga

SEQ ID NO: 265497 - RNA, 19 nt, Artificial Sequence
  Description of Artificial Sequence: Synthetic oligonucleotide
  Antisense strand to SEQ ID NO: 265496
ucuccuaagcuaaaggcaa

SEQ ID NO: 265498 - RNA, 19 nt, Artificial Sequence
  Description of Artificial Sequence: Synthetic oligonucleotide
  Sense strand starting at position 3773 of SEQ ID NO: 3412
cuaaauuuauuucgguacu

SEQ ID NO: 265499 - RNA, 19 nt, Artificial Sequence
  Description of Artificial Sequence: Synthetic oligonucleotide
  Antisense strand to SEQ ID NO: 265498
aguaccgaaauaaauuuag

SEQ ID NO: 265500 - RNA, 19 nt, Artificial Sequence
  Description of Artificial Sequence: Synthetic oligonucleotide
  Sense strand starting at position 3904 of SEQ ID NO: 3412
agaggugcaucauuaaagu

SEQ ID NO: 265501 - RNA, 19 nt, Artificial Sequence
  Description of Artificial Sequence: Synthetic oligonucleotide
  Antisense strand to SEQ ID NO: 265500
acuuuaaugaugcaccucu

SEQ ID NO: 265502 - RNA, 19 nt, Artificial Sequence
  Description of Artificial Sequence: Synthetic oligonucleotide
  Sense strand starting at position 3934 of SEQ ID NO: 3412
agauguucucaguacugag

SEQ ID NO: 265503 - RNA, 19 nt, Artificial Sequence
  Description of Artificial Sequence: Synthetic oligonucleotide
  Antisense strand to SEQ ID NO: 265502
cucaguacugagaacaucu

SEQ ID NO: 265504 - RNA, 19 nt, Artificial Sequence
  Description of Artificial Sequence: Synthetic oligonucleotide
  Sense strand starting at position 3951 of SEQ ID NO: 3412
agacauuugucagugcuuu

SEQ ID NO: 265505 - RNA, 19 nt, Artificial Sequence
  Description of Artificial Sequence: Synthetic oligonucleotide
  Antisense strand to SEQ ID NO: 265504
aaagcacugacaaaugucu

SEQ ID NO: 265506 - RNA, 19 nt, Artificial Sequence
  Description of Artificial Sequence: Synthetic oligonucleotide
  Sense strand starting at position 3952 of SEQ ID NO: 3412
gacauuugucagugcuuua

SEQ ID NO: 265507 - RNA, 19 nt, Artificial Sequence
  Description of Artificial Sequence: Synthetic oligonucleotide
  Antisense strand to SEQ ID NO: 265506
uaaagcacugacaaauguc

SEQ ID NO: 265508 - RNA, 19 nt, Artificial Sequence
  Description of Artificial Sequence: Synthetic oligonucleotide
  Sense strand starting at position 3955 of SEQ ID NO: 3412
auuugucagugcuuuagau

SEQ ID NO: 265509 - RNA, 19 nt, Artificial Sequence
  Description of Artificial Sequence: Synthetic oligonucleotide
  Antisense strand to SEQ ID NO: 265508
aucuaaagcacugacaaau

SEQ ID NO: 265510 - RNA, 19 nt, Artificial Sequence
  Description of Artificial Sequence: Synthetic oligonucleotide
  Sense strand starting at position 3957 of SEQ ID NO: 3412
uugucagugcuuuagauaa

SEQ ID NO: 265511 - RNA, 19 nt, Artificial Sequence
  Description of Artificial Sequence: Synthetic oligonucleotide
  Antisense strand to SEQ ID NO: 265510
uuaucuaaagcacugacaa

SEQ ID NO: 265512 - RNA, 19 nt, Artificial Sequence
  Description of Artificial Sequence: Synthetic oligonucleotide
  Sense strand starting at position 107 of SEQ ID NO: 3414
aguacacacuguguagaua

SEQ ID NO: 265513 - RNA, 19 nt, Artificial Sequence
  Description of Artificial Sequence: Synthetic oligonucleotide
  Antisense strand to SEQ ID NO: 265512
uaucuacacaguguguacu

SEQ ID NO: 265514 - RNA, 19 nt, Artificial Sequence
  Description of Artificial Sequence: Synthetic oligonucleotide
  Sense strand starting at position 108 of SEQ ID NO: 3414
guacacacuguguagauau

SEQ ID NO: 265515 - RNA, 19 nt, Artificial Sequence
  Description of Artificial Sequence: Synthetic oligonucleotide
  Antisense strand to SEQ ID NO: 265514
auaucuacacaguguguac

SEQ ID NO: 265516 - RNA, 19 nt, Artificial Sequence
  Description of Artificial Sequence: Synthetic oligonucleotide
  Sense strand starting at position 137 of SEQ ID NO: 3414
cuuacuaaacuguagguua

SEQ ID NO: 265517 - RNA, 19 nt, Artificial Sequence
  Description of Artificial Sequence: Synthetic oligonucleotide
  Antisense strand to SEQ ID NO: 265516
uaaccuacaguuuaguaag

SEQ ID NO: 265518 - RNA, 19 nt, Artificial Sequence
  Description of Artificial Sequence: Synthetic oligonucleotide
  Sense strand starting at position 140 of SEQ ID NO: 3414
acuaaacuguagguuagua

SEQ ID NO: 265519 - RNA, 19 nt, Artificial Sequence
  Description of Artificial Sequence: Synthetic oligonucleotide
  Antisense strand to SEQ ID NO: 265518
uacuaaccuacaguuuagu

SEQ ID NO: 265520 - RNA, 19 nt, Artificial Sequence
  Description of Artificial Sequence: Synthetic oligonucleotide
  Sense strand starting at position 142 of SEQ ID NO: 3414
uaaacuguagguuaguaau

SEQ ID NO: 265521 - RNA, 19 nt, Artificial Sequence
  Description of Artificial Sequence: Synthetic oligonucleotide
  Antisense strand to SEQ ID NO: 265520
auuacuaaccuacaguuua

SEQ ID NO: 265522 - RNA, 19 nt, Artificial Sequence
  Description of Artificial Sequence: Synthetic oligonucleotide
  Sense strand starting at position 144 of SEQ ID NO: 3414
aacuguagguuaguaauca

SEQ ID NO: 265523 - RNA, 19 nt, Artificial Sequence
  Description of Artificial Sequence: Synthetic oligonucleotide
  Antisense strand to SEQ ID NO: 265522
ugauuacuaaccuacaguu

SEQ ID NO: 265524 - RNA, 19 nt, Artificial Sequence
  Description of Artificial Sequence: Synthetic oligonucleotide
  Sense strand starting at position 351 of SEQ ID NO: 3414
ccauuagagcacugacaga

SEQ ID NO: 265525 - RNA, 19 nt, Artificial Sequence
  Description of Artificial Sequence: Synthetic oligonucleotide
  Antisense strand to SEQ ID NO: 265524
ucugucagugcucuaaugg

SEQ ID NO: 265526 - RNA, 19 nt, Artificial Sequence
  Description of Artificial Sequence: Synthetic oligonucleotide
  Sense strand starting at position 361 of SEQ ID NO: 3414
acugacagauuugaaauca

SEQ ID NO: 265527 - RNA, 19 nt, Artificial Sequence
  Description of Artificial Sequence: Synthetic oligonucleotide
  Antisense strand to SEQ ID NO: 265526
ugauuucaaaucugucagu

SEQ ID NO: 265528 - RNA, 19 nt, Artificial Sequence
  Description of Artificial Sequence: Synthetic oligonucleotide
  Sense strand starting at position 484 of SEQ ID NO: 3414
guugacauccagcaacaaa

SEQ ID NO: 265529 - RNA, 19 nt, Artificial Sequence
  Description of Artificial Sequence: Synthetic oligonucleotide
  Antisense strand to SEQ ID NO: 265528
uuuguugcuggaugucaac

SEQ ID NO: 265530 - RNA, 19 nt, Artificial Sequence
  Description of Artificial Sequence: Synthetic oligonucleotide
  Sense strand starting at position 545 of SEQ ID NO: 3414
augugcuuugaacauugau

SEQ ID NO: 265531 - RNA, 19 nt, Artificial Sequence
  Description of Artificial Sequence: Synthetic oligonucleotide
  Antisense strand to SEQ ID NO: 265530
aucaauguucaaagcacau

SEQ ID NO: 265532 - RNA, 19 nt, Artificial Sequence
  Description of Artificial Sequence: Synthetic oligonucleotide
  Sense strand starting at position 554 of SEQ ID NO: 3414
gaacauugauaugccaagu

SEQ ID NO: 265533 - RNA, 19 nt, Artificial Sequence
  Description of Artificial Sequence: Synthetic oligonucleotide
  Antisense strand to SEQ ID NO: 265532
acuuggcauaucaauguuc

SEQ ID NO: 265534 - RNA, 19 nt, Artificial Sequence
  Description of Artificial Sequence: Synthetic oligonucleotide
  Sense strand starting at position 583 of SEQ ID NO: 3414
auaauuaucucuuuggaug

SEQ ID NO: 265535 - RNA, 19 nt, Artificial Sequence
  Description of Artificial Sequence: Synthetic oligonucleotide
  Antisense strand to SEQ ID NO: 265534
cauccaaagagauaauuau

SEQ ID NO: 265536 - RNA, 19 nt, Artificial Sequence
  Description of Artificial Sequence: Synthetic oligonucleotide
  Sense strand starting at position 671 of SEQ ID NO: 3414
cacguucuccaacauggau

SEQ ID NO: 265537 - RNA, 19 nt, Artificial Sequence
  Description of Artificial Sequence: Synthetic oligonucleotide
  Antisense strand to SEQ ID NO: 265536
auccauguuggagaacgug

SEQ ID NO: 265538 - RNA, 19 nt, Artificial Sequence
  Description of Artificial Sequence: Synthetic oligonucleotide
  Sense strand starting at position 1218 of SEQ ID NO: 3414
ugaccaggcuaucuaacau

SEQ ID NO: 265539 - RNA, 19 nt, Artificial Sequence
  Description of Artificial Sequence: Synthetic oligonucleotide
  Antisense strand to SEQ ID NO: 265538
auguuagauagccugguca

SEQ ID NO: 265540 - RNA, 19 nt, Artificial Sequence
  Description of Artificial Sequence: Synthetic oligonucleotide
  Sense strand starting at position 1315 of SEQ ID NO: 3414
gguuaagugaacugaaucu

SEQ ID NO: 265541 - RNA, 19 nt, Artificial Sequence
  Description of Artificial Sequence: Synthetic oligonucleotide
  Antisense strand to SEQ ID NO: 265540
agauucaguucacuuaacc

SEQ ID NO: 265542 - RNA, 19 nt, Artificial Sequence
  Description of Artificial Sequence: Synthetic oligonucleotide
  Sense strand starting at position 1333 of SEQ ID NO: 3414
ucuaauuucuggucguuaa

SEQ ID NO: 265543 - RNA, 19 nt, Artificial Sequence
  Description of Artificial Sequence: Synthetic oligonucleotide
  Antisense strand to SEQ ID NO: 265542
uuaacgaccagaaauuaga

SEQ ID NO: 265544 - RNA, 19 nt, Artificial Sequence
  Description of Artificial Sequence: Synthetic oligonucleotide
  Sense strand starting at position 1334 of SEQ ID NO: 3414
cuaauuucuggucguuaau

SEQ ID NO: 265545 - RNA, 19 nt, Artificial Sequence
  Description of Artificial Sequence: Synthetic oligonucleotide
  Antisense strand to SEQ ID NO: 265544
auuaacgaccagaaauuag

SEQ ID NO: 265546 - RNA, 19 nt, Artificial Sequence
  Description of Artificial Sequence: Synthetic oligonucleotide
  Sense strand starting at position 1343 of SEQ ID NO: 3414
ggucguuaauuuguagaga

SEQ ID NO: 265547 - RNA, 19 nt, Artificial Sequence
  Description of Artificial Sequence: Synthetic oligonucleotide
  Antisense strand to SEQ ID NO: 265546
ucucuacaaauuaacgacc

SEQ ID NO: 265548 - RNA, 19 nt, Artificial Sequence
  Description of Artificial Sequence: Synthetic oligonucleotide
  Sense strand starting at position 1486 of SEQ ID NO: 3414
ccgucaauucgugugugaa

SEQ ID NO: 265549 - RNA, 19 nt, Artificial Sequence
  Description of Artificial Sequence: Synthetic oligonucleotide
  Antisense strand to SEQ ID NO: 265548
uucacacacgaauugacgg

SEQ ID NO: 265550 - RNA, 19 nt, Artificial Sequence
  Description of Artificial Sequence: Synthetic oligonucleotide
  Sense strand starting at position 1492 of SEQ ID NO: 3414
auucgugugugaacagagu

SEQ ID NO: 265551 - RNA, 19 nt, Artificial Sequence
  Description of Artificial Sequence: Synthetic oligonucleotide
  Antisense strand to SEQ ID NO: 265550
acucuguucacacacgaau

SEQ ID NO: 265552 - RNA, 19 nt, Artificial Sequence
  Description of Artificial Sequence: Synthetic oligonucleotide
  Sense strand starting at position 1573 of SEQ ID NO: 3414
uguuauuugcaaugcaauc

SEQ ID NO: 265553 - RNA, 19 nt, Artificial Sequence
  Description of Artificial Sequence: Synthetic oligonucleotide
  Antisense strand to SEQ ID NO: 265552
gauugcauugcaaauaaca

SEQ ID NO: 265554 - RNA, 19 nt, Artificial Sequence
  Description of Artificial Sequence: Synthetic oligonucleotide
  Sense strand starting at position 1629 of SEQ ID NO: 3414
ccguuaguuaaaggaauaa

SEQ ID NO: 265555 - RNA, 19 nt, Artificial Sequence
  Description of Artificial Sequence: Synthetic oligonucleotide
  Antisense strand to SEQ ID NO: 265554
uuauuccuuuaacuaacgg

SEQ ID NO: 265556 - RNA, 19 nt, Artificial Sequence
  Description of Artificial Sequence: Synthetic oligonucleotide
  Sense strand starting at position 1703 of SEQ ID NO: 3414
gcgugagccauugcuaaca

SEQ ID NO: 265557 - RNA, 19 nt, Artificial Sequence
  Description of Artificial Sequence: Synthetic oligonucleotide
  Antisense strand to SEQ ID NO: 265556
uguuagcaauggcucacgc

SEQ ID NO: 265558 - RNA, 19 nt, Artificial Sequence
  Description of Artificial Sequence: Synthetic oligonucleotide
  Sense strand starting at position 1783 of SEQ ID NO: 3414
agucuuaaggccuaaguca

SEQ ID NO: 265559 - RNA, 19 nt, Artificial Sequence
  Description of Artificial Sequence: Synthetic oligonucleotide
  Antisense strand to SEQ ID NO: 265558
ugacuuaggccuuaagacu

SEQ ID NO: 265560 - RNA, 19 nt, Artificial Sequence
  Description of Artificial Sequence: Synthetic oligonucleotide
  Sense strand starting at position 2284 of SEQ ID NO: 3414
ggacuagaauccuugcauu

SEQ ID NO: 265561 - RNA, 19 nt, Artificial Sequence
  Description of Artificial Sequence: Synthetic oligonucleotide
  Antisense strand to SEQ ID NO: 265560
aaugcaaggauucuagucc

SEQ ID NO: 265562 - RNA, 19 nt, Artificial Sequence
  Description of Artificial Sequence: Synthetic oligonucleotide
  Sense strand starting at position 2305 of SEQ ID NO: 3414
acaaguuugucggcaauuu

SEQ ID NO: 265563 - RNA, 19 nt, Artificial Sequence
  Description of Artificial Sequence: Synthetic oligonucleotide
  Antisense strand to SEQ ID NO: 265562
aaauugccgacaaacuugu

SEQ ID NO: 265564 - RNA, 19 nt, Artificial Sequence
  Description of Artificial Sequence: Synthetic oligonucleotide
  Sense strand starting at position 2306 of SEQ ID NO: 3414
caaguuugucggcaauuuc

SEQ ID NO: 265565 - RNA, 19 nt, Artificial Sequence
  Description of Artificial Sequence: Synthetic oligonucleotide
  Antisense strand to SEQ ID NO: 265564
gaaauugccgacaaacuug

SEQ ID NO: 265566 - RNA, 19 nt, Artificial Sequence
  Description of Artificial Sequence: Synthetic oligonucleotide
  Sense strand starting at position 2316 of SEQ ID NO: 3414
ggcaauuuccgucagccga

SEQ ID NO: 265567 - RNA, 19 nt, Artificial Sequence
  Description of Artificial Sequence: Synthetic oligonucleotide
  Antisense strand to SEQ ID NO: 265566
ucggcugacggaaauugcc

SEQ ID NO: 265568 - RNA, 19 nt, Artificial Sequence
  Description of Artificial Sequence: Synthetic oligonucleotide
  Sense strand starting at position 3139 of SEQ ID NO: 3414
cauguuaagcuguagauag

SEQ ID NO: 265569 - RNA, 19 nt, Artificial Sequence
  Description of Artificial Sequence: Synthetic oligonucleotide
  Antisense strand to SEQ ID NO: 265568
cuaucuacagcuuaacaug

SEQ ID NO: 265570 - RNA, 19 nt, Artificial Sequence
  Description of Artificial Sequence: Synthetic oligonucleotide
  Sense strand starting at position 3227 of SEQ ID NO: 3414
ccaaacauaugguuugauu

SEQ ID NO: 265571 - RNA, 19 nt, Artificial Sequence
  Description of Artificial Sequence: Synthetic oligonucleotide
  Antisense strand to SEQ ID NO: 265570
aaucaaaccauauguuugg

SEQ ID NO: 265572 - RNA, 19 nt, Artificial Sequence
  Description of Artificial Sequence: Synthetic oligonucleotide
  Sense strand starting at position 3230 of SEQ ID NO: 3414
aacauaugguuugauuuga

SEQ ID NO: 265573 - RNA, 19 nt, Artificial Sequence
  Description of Artificial Sequence: Synthetic oligonucleotide
  Antisense strand to SEQ ID NO: 265572
ucaaaucaaaccauauguu

SEQ ID NO: 265574 - RNA, 19 nt, Artificial Sequence
  Description of Artificial Sequence: Synthetic oligonucleotide
  Sense strand starting at position 3293 of SEQ ID NO: 3414
guuagugcccacuaauuaa

SEQ ID NO: 265575 - RNA, 19 nt, Artificial Sequence
  Description of Artificial Sequence: Synthetic oligonucleotide
  Antisense strand to SEQ ID NO: 265574
uuaauuagugggcacuaac

SEQ ID NO: 265576 - RNA, 19 nt, Artificial Sequence
  Description of Artificial Sequence: Synthetic oligonucleotide
  Sense strand starting at position 3317 of SEQ ID NO: 3414
ugcauacgguauuuauuau

SEQ ID NO: 265577 - RNA, 19 nt, Artificial Sequence
  Description of Artificial Sequence: Synthetic oligonucleotide
  Antisense strand to SEQ ID NO: 265576
auaauaaauaccguaugca

SEQ ID NO: 265578 - RNA, 19 nt, Artificial Sequence
  Description of Artificial Sequence: Synthetic oligonucleotide
  Sense strand starting at position 3528 of SEQ ID NO: 3414
uuuguauagagcugaagaa

SEQ ID NO: 265579 - RNA, 19 nt, Artificial Sequence
  Description of Artificial Sequence: Synthetic oligonucleotide
  Antisense strand to SEQ ID NO: 265578
uucuucagcucuauacaaa

SEQ ID NO: 265580 - RNA, 19 nt, Artificial Sequence
  Description of Artificial Sequence: Synthetic oligonucleotide
  Sense strand starting at position 3544 of SEQ ID NO: 3414
gaauaagacugcucucgaa

SEQ ID NO: 265581 - RNA, 19 nt, Artificial Sequence
  Description of Artificial Sequence: Synthetic oligonucleotide
  Antisense strand to SEQ ID NO: 265580
uucgagagcagucuuauuc

SEQ ID NO: 265582 - RNA, 19 nt, Artificial Sequence
  Description of Artificial Sequence: Synthetic oligonucleotide
  Sense strand starting at position 3556 of SEQ ID NO: 3414
ucucgaaguuuaucaggau

SEQ ID NO: 265583 - RNA, 19 nt, Artificial Sequence
  Description of Artificial Sequence: Synthetic oligonucleotide
  Antisense strand to SEQ ID NO: 265582
auccugauaaacuucgaga

SEQ ID NO: 265584 - RNA, 19 nt, Artificial Sequence
  Description of Artificial Sequence: Synthetic oligonucleotide
  Sense strand starting at position 3617 of SEQ ID NO: 3414
gggauauuguaagcuaaau

SEQ ID NO: 265585 - RNA, 19 nt, Artificial Sequence
  Description of Artificial Sequence: Synthetic oligonucleotide
  Antisense strand to SEQ ID NO: 265584
auuuagcuuacaauauccc

SEQ ID NO: 265586 - RNA, 19 nt, Artificial Sequence
  Description of Artificial Sequence: Synthetic oligonucleotide
  Sense strand starting at position 3929 of SEQ ID NO: 3414
guaaaucauagugaguauu

SEQ ID NO: 265587 - RNA, 19 nt, Artificial Sequence
  Description of Artificial Sequence: Synthetic oligonucleotide
  Antisense strand to SEQ ID NO: 265586
aauacucacuaugauuuac

SEQ ID NO: 265588 - RNA, 19 nt, Artificial Sequence
  Description of Artificial Sequence: Synthetic oligonucleotide
  Sense strand starting at position 3931 of SEQ ID NO: 3414
aaaucauagugaguauuga

SEQ ID NO: 265589 - RNA, 19 nt, Artificial Sequence
  Description of Artificial Sequence: Synthetic oligonucleotide
  Antisense strand to SEQ ID NO: 265588
ucaauacucacuaugauuu

SEQ ID NO: 265590 - RNA, 19 nt, Artificial Sequence
  Description of Artificial Sequence: Synthetic oligonucleotide
  Sense strand starting at position 3975 of SEQ ID NO: 3414
gcuugucgggugaggaguu

SEQ ID NO: 265591 - RNA, 19 nt, Artificial Sequence
  Description of Artificial Sequence: Synthetic oligonucleotide
  Antisense strand to SEQ ID NO: 265590
aacuccucacccgacaagc

SEQ ID NO: 265592 - RNA, 19 nt, Artificial Sequence
  Description of Artificial Sequence: Synthetic oligonucleotide
  Sense strand starting at position 26 of SEQ ID NO: 3413
ccauuagagcacugacaga

SEQ ID NO: 265593 - RNA, 19 nt, Artificial Sequence
  Description of Artificial Sequence: Synthetic oligonucleotide
  Antisense strand to SEQ ID NO: 265592
ucugucagugcucuaaugg

SEQ ID NO: 265594 - RNA, 19 nt, Artificial Sequence
  Description of Artificial Sequence: Synthetic oligonucleotide
  Sense strand starting at position 36 of SEQ ID NO: 3413
acugacagauuugaaauca

SEQ ID NO: 265595 - RNA, 19 nt, Artificial Sequence
  Description of Artificial Sequence: Synthetic oligonucleotide
  Antisense strand to SEQ ID NO: 265594
ugauuucaaaucugucagu

SEQ ID NO: 265596 - RNA, 19 nt, Artificial Sequence
  Description of Artificial Sequence: Synthetic oligonucleotide
  Sense strand starting at position 159 of SEQ ID NO: 3413
guugacauccagcaacaaa

SEQ ID NO: 265597 - RNA, 19 nt, Artificial Sequence
  Description of Artificial Sequence: Synthetic oligonucleotide
  Antisense strand to SEQ ID NO: 265596
uuuguugcuggaugucaac

SEQ ID NO: 265598 - RNA, 19 nt, Artificial Sequence
  Description of Artificial Sequence: Synthetic oligonucleotide
  Sense strand starting at position 220 of SEQ ID NO: 3413
augugcuuugaacauugau

SEQ ID NO: 265599 - RNA, 19 nt, Artificial Sequence
  Description of Artificial Sequence: Synthetic oligonucleotide
  Antisense strand to SEQ ID NO: 265598
aucaauguucaaagcacau

SEQ ID NO: 265600 - RNA, 19 nt, Artificial Sequence
  Description of Artificial Sequence: Synthetic oligonucleotide
  Sense strand starting at position 229 of SEQ ID NO: 3413
gaacauugauaugccaagu

SEQ ID NO: 265601 - RNA, 19 nt, Artificial Sequence
  Description of Artificial Sequence: Synthetic oligonucleotide
  Antisense strand to SEQ ID NO: 265600
acuuggcauaucaauguuc

SEQ ID NO: 265602 - RNA, 19 nt, Artificial Sequence
  Description of Artificial Sequence: Synthetic oligonucleotide
  Sense strand starting at position 258 of SEQ ID NO: 3413
auaauuaucucuuuggaug

SEQ ID NO: 265603 - RNA, 19 nt, Artificial Sequence
  Description of Artificial Sequence: Synthetic oligonucleotide
  Antisense strand to SEQ ID NO: 265602
cauccaaagagauaauuau

SEQ ID NO: 265604 - RNA, 19 nt, Artificial Sequence
  Description of Artificial Sequence: Synthetic oligonucleotide
  Sense strand starting at position 346 of SEQ ID NO: 3413
cacguucuccaacauggau

SEQ ID NO: 265605 - RNA, 19 nt, Artificial Sequence
  Description of Artificial Sequence: Synthetic oligonucleotide
  Antisense strand to SEQ ID NO: 265604
auccauguuggagaacgug

SEQ ID NO: 265606 - RNA, 19 nt, Artificial Sequence
  Description of Artificial Sequence: Synthetic oligonucleotide
  Sense strand starting at position 893 of SEQ ID NO: 3413
ugaccaggcuaucuaacau

SEQ ID NO: 265607 - RNA, 19 nt, Artificial Sequence
  Description of Artificial Sequence: Synthetic oligonucleotide
  Antisense strand to SEQ ID NO: 265606
auguuagauagccugguca

SEQ ID NO: 265608 - RNA, 19 nt, Artificial Sequence
  Description of Artificial Sequence: Synthetic oligonucleotide
  Sense strand starting at position 990 of SEQ ID NO: 3413
gguuaagugaacugaaucu

SEQ ID NO: 265609 - RNA, 19 nt, Artificial Sequence
  Description of Artificial Sequence: Synthetic oligonucleotide
  Antisense strand to SEQ ID NO: 265608
agauucaguucacuuaacc

SEQ ID NO: 265610 - RNA, 19 nt, Artificial Sequence
  Description of Artificial Sequence: Synthetic oligonucleotide
  Sense strand starting at position 1008 of SEQ ID NO: 3413
ucuaauuucuggucguuaa

SEQ ID NO: 265611 - RNA, 19 nt, Artificial Sequence
  Description of Artificial Sequence: Synthetic oligonucleotide
  Antisense strand to SEQ ID NO: 265610
uuaacgaccagaaauuaga

SEQ ID NO: 265612 - RNA, 19 nt, Artificial Sequence
  Description of Artificial Sequence: Synthetic oligonucleotide
  Sense strand starting at position 1009 of SEQ ID NO: 3413
cuaauuucuggucguuaau

SEQ ID NO: 265613 - RNA, 19 nt, Artificial Sequence
  Description of Artificial Sequence: Synthetic oligonucleotide
  Antisense strand to SEQ ID NO: 265612
auuaacgaccagaaauuag

SEQ ID NO: 265614 - RNA, 19 nt, Artificial Sequence
  Description of Artificial Sequence: Synthetic oligonucleotide
  Sense strand starting at position 1018 of SEQ ID NO: 3413
ggucguuaauuuguagaga

SEQ ID NO: 265615 - RNA, 19 nt, Artificial Sequence
  Description of Artificial Sequence: Synthetic oligonucleotide
  Antisense strand to SEQ ID NO: 265614
ucucuacaaauuaacgacc

SEQ ID NO: 265616 - RNA, 19 nt, Artificial Sequence
  Description of Artificial Sequence: Synthetic oligonucleotide
  Sense strand starting at position 1161 of SEQ ID NO: 3413
ccgucaauucgugugugaa

SEQ ID NO: 265617 - RNA, 19 nt, Artificial Sequence
  Description of Artificial Sequence: Synthetic oligonucleotide
  Antisense strand to SEQ ID NO: 265616
uucacacacgaauugacgg

SEQ ID NO: 265618 - RNA, 19 nt, Artificial Sequence
  Description of Artificial Sequence: Synthetic oligonucleotide
  Sense strand starting at position 1167 of SEQ ID NO: 3413
auucgugugugaacagagu

SEQ ID NO: 265619 - RNA, 19 nt, Artificial Sequence
  Description of Artificial Sequence: Synthetic oligonucleotide
  Antisense strand to SEQ ID NO: 265618
acucuguucacacacgaau

SEQ ID NO: 265620 - RNA, 19 nt, Artificial Sequence
  Description of Artificial Sequence: Synthetic oligonucleotide
  Sense strand starting at position 1248 of SEQ ID NO: 3413
uguuauuugcaaugcaauc

SEQ ID NO: 265621 - RNA, 19 nt, Artificial Sequence
  Description of Artificial Sequence: Synthetic oligonucleotide
  Antisense strand to SEQ ID NO: 265620
gauugcauugcaaauaaca

SEQ ID NO: 265622 - RNA, 19 nt, Artificial Sequence
  Description of Artificial Sequence: Synthetic oligonucleotide
  Sense strand starting at position 1261 of SEQ ID NO: 3413
gcaauccugggcuaacuuu

SEQ ID NO: 265623 - RNA, 19 nt, Artificial Sequence
  Description of Artificial Sequence: Synthetic oligonucleotide
  Antisense strand to SEQ ID NO: 265622
aaaguuagcccaggauugc

SEQ ID NO: 265624 - RNA, 19 nt, Artificial Sequence
  Description of Artificial Sequence: Synthetic oligonucleotide
  Sense strand starting at position 1304 of SEQ ID NO: 3413
ccguuaguuaaaggaauaa

SEQ ID NO: 265625 - RNA, 19 nt, Artificial Sequence
  Description of Artificial Sequence: Synthetic oligonucleotide
  Antisense strand to SEQ ID NO: 265624
uuauuccuuuaacuaacgg

SEQ ID NO: 265626 - RNA, 19 nt, Artificial Sequence
  Description of Artificial Sequence: Synthetic oligonucleotide
  Sense strand starting at position 1378 of SEQ ID NO: 3413
gcgugagccauugcuaaca

SEQ ID NO: 265627 - RNA, 19 nt, Artificial Sequence
  Description of Artificial Sequence: Synthetic oligonucleotide
  Antisense strand to SEQ ID NO: 265626
uguuagcaauggcucacgc

SEQ ID NO: 265628 - RNA, 19 nt, Artificial Sequence
  Description of Artificial Sequence: Synthetic oligonucleotide
  Sense strand starting at position 1458 of SEQ ID NO: 3413
agucuuaaggccuaaguca

SEQ ID NO: 265629 - RNA, 19 nt, Artificial Sequence
  Description of Artificial Sequence: Synthetic oligonucleotide
  Antisense strand to SEQ ID NO: 265628
ugacuuaggccuuaagacu

SEQ ID NO: 265630 - RNA, 19 nt, Artificial Sequence
  Description of Artificial Sequence: Synthetic oligonucleotide
  Sense strand starting at position 1635 of SEQ ID NO: 3413
accagagaccguggcuaaa

SEQ ID NO: 265631 - RNA, 19 nt, Artificial Sequence
  Description of Artificial Sequence: Synthetic oligonucleotide
  Antisense strand to SEQ ID NO: 265630
uuuagccacggucucuggu

SEQ ID NO: 265632 - RNA, 19 nt, Artificial Sequence
  Description of Artificial Sequence: Synthetic oligonucleotide
  Sense strand starting at position 1959 of SEQ ID NO: 3413
ggacuagaauccuugcauu

SEQ ID NO: 265633 - RNA, 19 nt, Artificial Sequence
  Description of Artificial Sequence: Synthetic oligonucleotide
  Antisense strand to SEQ ID NO: 265632
aaugcaaggauucuagucc

SEQ ID NO: 265634 - RNA, 19 nt, Artificial Sequence
  Description of Artificial Sequence: Synthetic oligonucleotide
  Sense strand starting at position 1980 of SEQ ID NO: 3413
acaaguuugucggcaauuu

SEQ ID NO: 265635 - RNA, 19 nt, Artificial Sequence
  Description of Artificial Sequence: Synthetic oligonucleotide
  Antisense strand to SEQ ID NO: 265634
aaauugccgacaaacuugu

SEQ ID NO: 265636 - RNA, 19 nt, Artificial Sequence
  Description of Artificial Sequence: Synthetic oligonucleotide
  Sense strand starting at position 1981 of SEQ ID NO: 3413
caaguuugucggcaauuuc

SEQ ID NO: 265637 - RNA, 19 nt, Artificial Sequence
  Description of Artificial Sequence: Synthetic oligonucleotide
  Antisense strand to SEQ ID NO: 265636
gaaauugccgacaaacuug

SEQ ID NO: 265638 - RNA, 19 nt, Artificial Sequence
  Description of Artificial Sequence: Synthetic oligonucleotide
  Sense strand starting at position 1991 of SEQ ID NO: 3413
ggcaauuuccgucagccga

SEQ ID NO: 265639 - RNA, 19 nt, Artificial Sequence
  Description of Artificial Sequence: Synthetic oligonucleotide
  Antisense strand to SEQ ID NO: 265638
ucggcugacggaaauugcc

SEQ ID NO: 265640 - RNA, 19 nt, Artificial Sequence
  Description of Artificial Sequence: Synthetic oligonucleotide
  Sense strand starting at position 2814 of SEQ ID NO: 3413
cauguuaagcuguagauag

SEQ ID NO: 265641 - RNA, 19 nt, Artificial Sequence
  Description of Artificial Sequence: Synthetic oligonucleotide
  Antisense strand to SEQ ID NO: 265640
cuaucuacagcuuaacaug

SEQ ID NO: 265642 - RNA, 19 nt, Artificial Sequence
  Description of Artificial Sequence: Synthetic oligonucleotide
  Sense strand starting at position 2902 of SEQ ID NO: 3413
ccaaacauaugguuugauu

SEQ ID NO: 265643 - RNA, 19 nt, Artificial Sequence
  Description of Artificial Sequence: Synthetic oligonucleotide
  Antisense strand to SEQ ID NO: 265642
aaucaaaccauauguuugg

SEQ ID NO: 265644 - RNA, 19 nt, Artificial Sequence
  Description of Artificial Sequence: Synthetic oligonucleotide
  Sense strand starting at position 2905 of SEQ ID NO: 3413
aacauaugguuugauuuga

SEQ ID NO: 265645 - RNA, 19 nt, Artificial Sequence
  Description of Artificial Sequence: Synthetic oligonucleotide
  Antisense strand to SEQ ID NO: 265644
ucaaaucaaaccauauguu

SEQ ID NO: 265646 - RNA, 19 nt, Artificial Sequence
  Description of Artificial Sequence: Synthetic oligonucleotide
  Sense strand starting at position 2968 of SEQ ID NO: 3413
guuagugcccacuaauuaa

SEQ ID NO: 265647 - RNA, 19 nt, Artificial Sequence
  Description of Artificial Sequence: Synthetic oligonucleotide
  Antisense strand to SEQ ID NO: 265646
uuaauuagugggcacuaac

SEQ ID NO: 265648 - RNA, 19 nt, Artificial Sequence
  Description of Artificial Sequence: Synthetic oligonucleotide
  Sense strand starting at position 2992 of SEQ ID NO: 3413
ugcauacgguauuuauuau

SEQ ID NO: 265649 - RNA, 19 nt, Artificial Sequence
  Description of Artificial Sequence: Synthetic oligonucleotide
  Antisense strand to SEQ ID NO: 265648
auaauaaauaccguaugca

SEQ ID NO: 265650 - RNA, 19 nt, Artificial Sequence
  Description of Artificial Sequence: Synthetic oligonucleotide
  Sense strand starting at position 3203 of SEQ ID NO: 3413
uuuguauagagcugaagaa

SEQ ID NO: 265651 - RNA, 19 nt, Artificial Sequence
  Description of Artificial Sequence: Synthetic oligonucleotide
  Antisense strand to SEQ ID NO: 265650
uucuucagcucuauacaaa

SEQ ID NO: 265652 - RNA, 19 nt, Artificial Sequence
  Description of Artificial Sequence: Synthetic oligonucleotide
  Sense strand starting at position 3219 of SEQ ID NO: 3413
gaauaagacugcucucgaa

SEQ ID NO: 265653 - RNA, 19 nt, Artificial Sequence
  Description of Artificial Sequence: Synthetic oligonucleotide
  Antisense strand to SEQ ID NO: 265652
uucgagagcagucuuauuc

SEQ ID NO: 265654 - RNA, 19 nt, Artificial Sequence
  Description of Artificial Sequence: Synthetic oligonucleotide
  Sense strand starting at position 3223 of SEQ ID NO: 3413
aagacugcucucgaaguuu

SEQ ID NO: 265655 - RNA, 19 nt, Artificial Sequence
  Description of Artificial Sequence: Synthetic oligonucleotide
  Antisense strand to SEQ ID NO: 265654
aaacuucgagagcagucuu

SEQ ID NO: 265656 - RNA, 19 nt, Artificial Sequence
  Description of Artificial Sequence: Synthetic oligonucleotide
  Sense strand starting at position 3231 of SEQ ID NO: 3413
ucucgaaguuuaucaggau

SEQ ID NO: 265657 - RNA, 19 nt, Artificial Sequence
  Description of Artificial Sequence: Synthetic oligonucleotide
  Antisense strand to SEQ ID NO: 265656
auccugauaaacuucgaga

SEQ ID NO: 265658 - RNA, 19 nt, Artificial Sequence
  Description of Artificial Sequence: Synthetic oligonucleotide
  Sense strand starting at position 3292 of SEQ ID NO: 3413
gggauauuguaagcuaaau

SEQ ID NO: 265659 - RNA, 19 nt, Artificial Sequence
  Description of Artificial Sequence: Synthetic oligonucleotide
  Antisense strand to SEQ ID NO: 265658
auuuagcuuacaauauccc

SEQ ID NO: 265660 - RNA, 19 nt, Artificial Sequence
  Description of Artificial Sequence: Synthetic oligonucleotide
  Sense strand starting at position 3604 of SEQ ID NO: 3413
guaaaucauagugaguauu

SEQ ID NO: 265661 - RNA, 19 nt, Artificial Sequence
  Description of Artificial Sequence: Synthetic oligonucleotide
  Antisense strand to SEQ ID NO: 265660
aauacucacuaugauuuac

SEQ ID NO: 265662 - RNA, 19 nt, Artificial Sequence
  Description of Artificial Sequence: Synthetic oligonucleotide
  Sense strand starting at position 3606 of SEQ ID NO: 3413
aaaucauagugaguauuga

SEQ ID NO: 265663 - RNA, 19 nt, Artificial Sequence
  Description of Artificial Sequence: Synthetic oligonucleotide
  Antisense strand to SEQ ID NO: 265662
ucaauacucacuaugauuu

SEQ ID NO: 265664 - RNA, 19 nt, Artificial Sequence
  Description of Artificial Sequence: Synthetic oligonucleotide
  Sense strand starting at position 3650 of SEQ ID NO: 3413
gcuugucgggugaggaguu

SEQ ID NO: 265665 - RNA, 19 nt, Artificial Sequence
  Description of Artificial Sequence: Synthetic oligonucleotide
  Antisense strand to SEQ ID NO: 265664
aacuccucacccgacaagc

SEQ ID NO: 265666 - RNA, 19 nt, Artificial Sequence
  Description of Artificial Sequence: Synthetic oligonucleotide
  Sense strand starting at position 3730 of SEQ ID NO: 3413
ucuagugauaaguagugau

SEQ ID NO: 265667 - RNA, 19 nt, Artificial Sequence
  Description of Artificial Sequence: Synthetic oligonucleotide
  Antisense strand to SEQ ID NO: 265666
aucacuacuuaucacuaga

SEQ ID NO: 265668 - RNA, 19 nt, Artificial Sequence
  Description of Artificial Sequence: Synthetic oligonucleotide
  Sense strand starting at position 3784 of SEQ ID NO: 3413
guuauacuagcucaauagu

SEQ ID NO: 265669 - RNA, 19 nt, Artificial Sequence
  Description of Artificial Sequence: Synthetic oligonucleotide
  Antisense strand to SEQ ID NO: 265668
acuauugagcuaguauaac

SEQ ID NO: 265670 - RNA, 19 nt, Artificial Sequence
  Description of Artificial Sequence: Synthetic oligonucleotide
  Sense strand starting at position 3957 of SEQ ID NO: 3413
uggcgucuucuauaaagaa

SEQ ID NO: 265671 - RNA, 19 nt, Artificial Sequence
  Description of Artificial Sequence: Synthetic oligonucleotide
  Antisense strand to SEQ ID NO: 265670
uucuuuauagaagacgcca

SEQ ID NO: 265672 - RNA, 19 nt, Artificial Sequence
  Description of Artificial Sequence: Synthetic oligonucleotide
  Sense strand starting at position 200 of SEQ ID NO: 3415
cccuauagaugauuagcua

SEQ ID NO: 265673 - RNA, 19 nt, Artificial Sequence
  Description of Artificial Sequence: Synthetic oligonucleotide
  Antisense strand to SEQ ID NO: 265672
uagcuaaucaucuauaggg

SEQ ID NO: 265674 - RNA, 19 nt, Artificial Sequence
  Description of Artificial Sequence: Synthetic oligonucleotide
  Sense strand starting at position 203 of SEQ ID NO: 3415
uauagaugauuagcuaguu

SEQ ID NO: 265675 - RNA, 19 nt, Artificial Sequence
  Description of Artificial Sequence: Synthetic oligonucleotide
  Antisense strand to SEQ ID NO: 265674
aacuagcuaaucaucuaua

SEQ ID NO: 265676 - RNA, 19 nt, Artificial Sequence
  Description of Artificial Sequence: Synthetic oligonucleotide
  Sense strand starting at position 505 of SEQ ID NO: 3415
gcuuuaaaugaugacucuu

SEQ ID NO: 265677 - RNA, 19 nt, Artificial Sequence
  Description of Artificial Sequence: Synthetic oligonucleotide
  Antisense strand to SEQ ID NO: 265676
aagagucaucauuuaaagc

SEQ ID NO: 265678 - RNA, 19 nt, Artificial Sequence
  Description of Artificial Sequence: Synthetic oligonucleotide
  Sense strand starting at position 511 of SEQ ID NO: 3415
aaugaugacucuuugugaa

SEQ ID NO: 265679 - RNA, 19 nt, Artificial Sequence
  Description of Artificial Sequence: Synthetic oligonucleotide
  Antisense strand to SEQ ID NO: 265678
uucacaaagagucaucauu

SEQ ID NO: 265680 - RNA, 19 nt, Artificial Sequence
  Description of Artificial Sequence: Synthetic oligonucleotide
  Sense strand starting at position 513 of SEQ ID NO: 3415
ugaugacucuuugugaagu

SEQ ID NO: 265681 - RNA, 19 nt, Artificial Sequence
  Description of Artificial Sequence: Synthetic oligonucleotide
  Antisense strand to SEQ ID NO: 265680
acuucacaaagagucauca

SEQ ID NO: 265682 - RNA, 19 nt, Artificial Sequence
  Description of Artificial Sequence: Synthetic oligonucleotide
  Sense strand starting at position 577 of SEQ ID NO: 3415
cuuugauugucacuacaua

SEQ ID NO: 265683 - RNA, 19 nt, Artificial Sequence
  Description of Artificial Sequence: Synthetic oligonucleotide
  Antisense strand to SEQ ID NO: 265682
uauguagugacaaucaaag

SEQ ID NO: 265684 - RNA, 19 nt, Artificial Sequence
  Description of Artificial Sequence: Synthetic oligonucleotide
  Sense strand starting at position 734 of SEQ ID NO: 3415
gucuauucccagcacagaa

SEQ ID NO: 265685 - RNA, 19 nt, Artificial Sequence
  Description of Artificial Sequence: Synthetic oligonucleotide
  Antisense strand to SEQ ID NO: 265684
uucugugcugggaauagac

SEQ ID NO: 265686 - RNA, 19 nt, Artificial Sequence
  Description of Artificial Sequence: Synthetic oligonucleotide
  Sense strand starting at position 902 of SEQ ID NO: 3415
gggaauugcuacuucuaca

SEQ ID NO: 265687 - RNA, 19 nt, Artificial Sequence
  Description of Artificial Sequence: Synthetic oligonucleotide
  Antisense strand to SEQ ID NO: 265686
uguagaaguagcaauuccc

SEQ ID NO: 265688 - RNA, 19 nt, Artificial Sequence
  Description of Artificial Sequence: Synthetic oligonucleotide
  Sense strand starting at position 915 of SEQ ID NO: 3415
ucuacauaaucaguuuagu

SEQ ID NO: 265689 - RNA, 19 nt, Artificial Sequence
  Description of Artificial Sequence: Synthetic oligonucleotide
  Antisense strand to SEQ ID NO: 265688
acuaaacugauuauguaga

SEQ ID NO: 265690 - RNA, 19 nt, Artificial Sequence
  Description of Artificial Sequence: Synthetic oligonucleotide
  Sense strand starting at position 1102 of SEQ ID NO: 3415
uucuaagagggcugacuua

SEQ ID NO: 265691 - RNA, 19 nt, Artificial Sequence
  Description of Artificial Sequence: Synthetic oligonucleotide
  Antisense strand to SEQ ID NO: 265690
uaagucagcccucuuagaa

SEQ ID NO: 265692 - RNA, 19 nt, Artificial Sequence
  Description of Artificial Sequence: Synthetic oligonucleotide
  Sense strand starting at position 1328 of SEQ ID NO: 3415
uaaagcauugauugaggua

SEQ ID NO: 265693 - RNA, 19 nt, Artificial Sequence
  Description of Artificial Sequence: Synthetic oligonucleotide
  Antisense strand to SEQ ID NO: 265692
uaccucaaucaaugcuuua

SEQ ID NO: 265694 - RNA, 19 nt, Artificial Sequence
  Description of Artificial Sequence: Synthetic oligonucleotide
  Sense strand starting at position 1345 of SEQ ID NO: 3415
uacauauaggauugucagu

SEQ ID NO: 265695 - RNA, 19 nt, Artificial Sequence
  Description of Artificial Sequence: Synthetic oligonucleotide
  Antisense strand to SEQ ID NO: 265694
acugacaauccuauaugua

SEQ ID NO: 265696 - RNA, 19 nt, Artificial Sequence
  Description of Artificial Sequence: Synthetic oligonucleotide
  Sense strand starting at position 1350 of SEQ ID NO: 3415
auaggauugucaguccuua

SEQ ID NO: 265697 - RNA, 19 nt, Artificial Sequence
  Description of Artificial Sequence: Synthetic oligonucleotide
  Antisense strand to SEQ ID NO: 265696
uaaggacugacaauccuau

SEQ ID NO: 265698 - RNA, 19 nt, Artificial Sequence
  Description of Artificial Sequence: Synthetic oligonucleotide
  Sense strand starting at position 1454 of SEQ ID NO: 3415
aguggaugaugaguuggaa

SEQ ID NO: 265699 - RNA, 19 nt, Artificial Sequence
  Description of Artificial Sequence: Synthetic oligonucleotide
  Antisense strand to SEQ ID NO: 265698
uuccaacucaucauccacu

SEQ ID NO: 265700 - RNA, 19 nt, Artificial Sequence
  Description of Artificial Sequence: Synthetic oligonucleotide
  Sense strand starting at position 1735 of SEQ ID NO: 3415
cgguacauagcagauauua

SEQ ID NO: 265701 - RNA, 19 nt, Artificial Sequence
  Description of Artificial Sequence: Synthetic oligonucleotide
  Antisense strand to SEQ ID NO: 265700
uaauaucugcuauguaccg

SEQ ID NO: 265702 - RNA, 19 nt, Artificial Sequence
  Description of Artificial Sequence: Synthetic oligonucleotide
  Sense strand starting at position 1816 of SEQ ID NO: 3415
ucaguuauggcccaaaccu

SEQ ID NO: 265703 - RNA, 19 nt, Artificial Sequence
  Description of Artificial Sequence: Synthetic oligonucleotide
  Antisense strand to SEQ ID NO: 265702
agguuugggccauaacuga

SEQ ID NO: 265704 - RNA, 19 nt, Artificial Sequence
  Description of Artificial Sequence: Synthetic oligonucleotide
  Sense strand starting at position 1840 of SEQ ID NO: 3415
aaauacuucgagggaaguu

SEQ ID NO: 265705 - RNA, 19 nt, Artificial Sequence
  Description of Artificial Sequence: Synthetic oligonucleotide
  Antisense strand to SEQ ID NO: 265704
aacuucccucgaaguauuu

SEQ ID NO: 265706 - RNA, 19 nt, Artificial Sequence
  Description of Artificial Sequence: Synthetic oligonucleotide
  Sense strand starting at position 1858 of SEQ ID NO: 3415
uguggagcaucuccugaaa

SEQ ID NO: 265707 - RNA, 19 nt, Artificial Sequence
  Description of Artificial Sequence: Synthetic oligonucleotide
  Antisense strand to SEQ ID NO: 265706
uuucaggagaugcuccaca

SEQ ID NO: 265708 - RNA, 19 nt, Artificial Sequence
  Description of Artificial Sequence: Synthetic oligonucleotide
  Sense strand starting at position 2130 of SEQ ID NO: 3415
acaaauugcuugcuuagaa

SEQ ID NO: 265709 - RNA, 19 nt, Artificial Sequence
  Description of Artificial Sequence: Synthetic oligonucleotide
  Antisense strand to SEQ ID NO: 265708
uucuaagcaagcaauuugu

SEQ ID NO: 265710 - RNA, 19 nt, Artificial Sequence
  Description of Artificial Sequence: Synthetic oligonucleotide
  Sense strand starting at position 2276 of SEQ ID NO: 3415
augacuuugagaggcuuua

SEQ ID NO: 265711 - RNA, 19 nt, Artificial Sequence
  Description of Artificial Sequence: Synthetic oligonucleotide
  Antisense strand to SEQ ID NO: 265710
uaaagccucucaaagucau

SEQ ID NO: 265712 - RNA, 19 nt, Artificial Sequence
  Description of Artificial Sequence: Synthetic oligonucleotide
  Sense strand starting at position 2317 of SEQ ID NO: 3415
caugucauuuguccaguca

SEQ ID NO: 265713 - RNA, 19 nt, Artificial Sequence
  Description of Artificial Sequence: Synthetic oligonucleotide
  Antisense strand to SEQ ID NO: 265712
ugacuggacaaaugacaug

SEQ ID NO: 265714 - RNA, 19 nt, Artificial Sequence
  Description of Artificial Sequence: Synthetic oligonucleotide
  Sense strand starting at position 2373 of SEQ ID NO: 3415
gugagcuacagguaaguua

SEQ ID NO: 265715 - RNA, 19 nt, Artificial Sequence
  Description of Artificial Sequence: Synthetic oligonucleotide
  Antisense strand to SEQ ID NO: 265714
uaacuuaccuguagcucac

SEQ ID NO: 265716 - RNA, 19 nt, Artificial Sequence
  Description of Artificial Sequence: Synthetic oligonucleotide
  Sense strand starting at position 2388 of SEQ ID NO: 3415
guuacuggugcuaguguga

SEQ ID NO: 265717 - RNA, 19 nt, Artificial Sequence
  Description of Artificial Sequence: Synthetic oligonucleotide
  Antisense strand to SEQ ID NO: 265716
ucacacuagcaccaguaac

SEQ ID NO: 265718 - RNA, 19 nt, Artificial Sequence
  Description of Artificial Sequence: Synthetic oligonucleotide
  Sense strand starting at position 2462 of SEQ ID NO: 3415
aaaugugaugagugaaguu

SEQ ID NO: 265719 - RNA, 19 nt, Artificial Sequence
  Description of Artificial Sequence: Synthetic oligonucleotide
  Antisense strand to SEQ ID NO: 265718
aacuucacucaucacauuu

SEQ ID NO: 265720 - RNA, 19 nt, Artificial Sequence
  Description of Artificial Sequence: Synthetic oligonucleotide
  Sense strand starting at position 2472 of SEQ ID NO: 3415
agugaaguuaaaggugaaa

SEQ ID NO: 265721 - RNA, 19 nt, Artificial Sequence
  Description of Artificial Sequence: Synthetic oligonucleotide
  Antisense strand to SEQ ID NO: 265720
uuucaccuuuaacuucacu

SEQ ID NO: 265722 - RNA, 19 nt, Artificial Sequence
  Description of Artificial Sequence: Synthetic oligonucleotide
  Sense strand starting at position 2516 of SEQ ID NO: 3415
auauccacaggguguaauu

SEQ ID NO: 265723 - RNA, 19 nt, Artificial Sequence
  Description of Artificial Sequence: Synthetic oligonucleotide
  Antisense strand to SEQ ID NO: 265722
aauuacacccuguggauau

SEQ ID NO: 265724 - RNA, 19 nt, Artificial Sequence
  Description of Artificial Sequence: Synthetic oligonucleotide
  Sense strand starting at position 2651 of SEQ ID NO: 3415
ucauauguaaccgaguuag

SEQ ID NO: 265725 - RNA, 19 nt, Artificial Sequence
  Description of Artificial Sequence: Synthetic oligonucleotide
  Antisense strand to SEQ ID NO: 265724
cuaacucgguuacauauga

SEQ ID NO: 265726 - RNA, 19 nt, Artificial Sequence
  Description of Artificial Sequence: Synthetic oligonucleotide
  Sense strand starting at position 2655 of SEQ ID NO: 3415
auguaaccgaguuagugau

SEQ ID NO: 265727 - RNA, 19 nt, Artificial Sequence
  Description of Artificial Sequence: Synthetic oligonucleotide
  Antisense strand to SEQ ID NO: 265726
aucacuaacucgguuacau

SEQ ID NO: 265728 - RNA, 19 nt, Artificial Sequence
  Description of Artificial Sequence: Synthetic oligonucleotide
  Sense strand starting at position 2657 of SEQ ID NO: 3415
guaaccgaguuagugauuu

SEQ ID NO: 265729 - RNA, 19 nt, Artificial Sequence
  Description of Artificial Sequence: Synthetic oligonucleotide
  Antisense strand to SEQ ID NO: 265728
aaaucacuaacucgguuac

SEQ ID NO: 265730 - RNA, 19 nt, Artificial Sequence
  Description of Artificial Sequence: Synthetic oligonucleotide
  Sense strand starting at position 2989 of SEQ ID NO: 3415
gugacagagaacugcucuu

SEQ ID NO: 265731 - RNA, 19 nt, Artificial Sequence
  Description of Artificial Sequence: Synthetic oligonucleotide
  Antisense strand to SEQ ID NO: 265730
aagagcaguucucugucac

SEQ ID NO: 265732 - RNA, 19 nt, Artificial Sequence
  Description of Artificial Sequence: Synthetic oligonucleotide
  Sense strand starting at position 3042 of SEQ ID NO: 3415
gugagucaccuauaucuug

SEQ ID NO: 265733 - RNA, 19 nt, Artificial Sequence
  Description of Artificial Sequence: Synthetic oligonucleotide
  Antisense strand to SEQ ID NO: 265732
caagauauaggugacucac

SEQ ID NO: 265734 - RNA, 19 nt, Artificial Sequence
  Description of Artificial Sequence: Synthetic oligonucleotide
  Sense strand starting at position 3045 of SEQ ID NO: 3415
agucaccuauaucuugaua

SEQ ID NO: 265735 - RNA, 19 nt, Artificial Sequence
  Description of Artificial Sequence: Synthetic oligonucleotide
  Antisense strand to SEQ ID NO: 265734
uaucaagauauaggugacu

SEQ ID NO: 265736 - RNA, 19 nt, Artificial Sequence
  Description of Artificial Sequence: Synthetic oligonucleotide
  Sense strand starting at position 3059 of SEQ ID NO: 3415
ugauauggauuugagauua

SEQ ID NO: 265737 - RNA, 19 nt, Artificial Sequence
  Description of Artificial Sequence: Synthetic oligonucleotide
  Antisense strand to SEQ ID NO: 265736
uaaucucaaauccauauca

SEQ ID NO: 265738 - RNA, 19 nt, Artificial Sequence
  Description of Artificial Sequence: Synthetic oligonucleotide
  Sense strand starting at position 3369 of SEQ ID NO: 3415
ugagaucacucacuuggua

SEQ ID NO: 265739 - RNA, 19 nt, Artificial Sequence
  Description of Artificial Sequence: Synthetic oligonucleotide
  Antisense strand to SEQ ID NO: 265738
uaccaagugagugaucuca

SEQ ID NO: 265740 - RNA, 19 nt, Artificial Sequence
  Description of Artificial Sequence: Synthetic oligonucleotide
  Sense strand starting at position 3396 of SEQ ID NO: 3415
cuagaauugugacuuacua

SEQ ID NO: 265741 - RNA, 19 nt, Artificial Sequence
  Description of Artificial Sequence: Synthetic oligonucleotide
  Antisense strand to SEQ ID NO: 265740
uaguaagucacaauucuag

SEQ ID NO: 265742 - RNA, 19 nt, Artificial Sequence
  Description of Artificial Sequence: Synthetic oligonucleotide
  Sense strand starting at position 3407 of SEQ ID NO: 3415
acuuacuagucauuacaug

SEQ ID NO: 265743 - RNA, 19 nt, Artificial Sequence
  Description of Artificial Sequence: Synthetic oligonucleotide
  Antisense strand to SEQ ID NO: 265742
cauguaaugacuaguaagu

SEQ ID NO: 265744 - RNA, 19 nt, Artificial Sequence
  Description of Artificial Sequence: Synthetic oligonucleotide
  Sense strand starting at position 3796 of SEQ ID NO: 3415
uaugaaauguaucuguaag

SEQ ID NO: 265745 - RNA, 19 nt, Artificial Sequence
  Description of Artificial Sequence: Synthetic oligonucleotide
  Antisense strand to SEQ ID NO: 265744
cuuacagauacauuucaua

SEQ ID NO: 265746 - RNA, 19 nt, Artificial Sequence
  Description of Artificial Sequence: Synthetic oligonucleotide
  Sense strand starting at position 3797 of SEQ ID NO: 3415
augaaauguaucuguaagg

SEQ ID NO: 265747 - RNA, 19 nt, Artificial Sequence
  Description of Artificial Sequence: Synthetic oligonucleotide
  Antisense strand to SEQ ID NO: 265746
ccuuacagauacauuucau

SEQ ID NO: 265748 - RNA, 19 nt, Artificial Sequence
  Description of Artificial Sequence: Synthetic oligonucleotide
  Sense strand starting at position 3932 of SEQ ID NO: 3415
gaaugaggguuccuaugua

SEQ ID NO: 265749 - RNA, 19 nt, Artificial Sequence
  Description of Artificial Sequence: Synthetic oligonucleotide
  Antisense strand to SEQ ID NO: 265748
uacauaggaacccucauuc

SEQ ID NO: 265750 - RNA, 19 nt, Artificial Sequence
  Description of Artificial Sequence: Synthetic oligonucleotide
  Sense strand starting at position 3936 of SEQ ID NO: 3415
gaggguuccuauguauaca

SEQ ID NO: 265751 - RNA, 19 nt, Artificial Sequence
  Description of Artificial Sequence: Synthetic oligonucleotide
  Antisense strand to SEQ ID NO: 265750
uguauacauaggaacccuc

SEQ ID NO: 265752 - RNA, 19 nt, Artificial Sequence
  Description of Artificial Sequence: Synthetic oligonucleotide
  Sense strand starting at position 779 of SEQ ID NO: 3416
cugagugauucuguuccuu

SEQ ID NO: 265753 - RNA, 19 nt, Artificial Sequence
  Description of Artificial Sequence: Synthetic oligonucleotide
  Antisense strand to SEQ ID NO: 265752
aaggaacagaaucacucag

SEQ ID NO: 265754 - RNA, 19 nt, Artificial Sequence
  Description of Artificial Sequence: Synthetic oligonucleotide
  Sense strand starting at position 784 of SEQ ID NO: 3416
ugauucuguuccuuccauu

SEQ ID NO: 265755 - RNA, 19 nt, Artificial Sequence
  Description of Artificial Sequence: Synthetic oligonucleotide
  Antisense strand to SEQ ID NO: 265754
aauggaaggaacagaauca

SEQ ID NO: 265756 - RNA, 19 nt, Artificial Sequence
  Description of Artificial Sequence: Synthetic oligonucleotide
  Sense strand starting at position 954 of SEQ ID NO: 3416
gugcaauaaccugaccagu

SEQ ID NO: 265757 - RNA, 19 nt, Artificial Sequence
  Description of Artificial Sequence: Synthetic oligonucleotide
  Antisense strand to SEQ ID NO: 265756
acuggucagguuauugcac

SEQ ID NO: 265758 - RNA, 19 nt, Artificial Sequence
  Description of Artificial Sequence: Synthetic oligonucleotide
  Sense strand starting at position 1120 of SEQ ID NO: 3416
gggcaauucuaagcacaga

SEQ ID NO: 265759 - RNA, 19 nt, Artificial Sequence
  Description of Artificial Sequence: Synthetic oligonucleotide
  Antisense strand to SEQ ID NO: 265758
ucugugcuuagaauugccc

SEQ ID NO: 265760 - RNA, 19 nt, Artificial Sequence
  Description of Artificial Sequence: Synthetic oligonucleotide
  Sense strand starting at position 1211 of SEQ ID NO: 3416
ccauuauuacagugagcaa

SEQ ID NO: 265761 - RNA, 19 nt, Artificial Sequence
  Description of Artificial Sequence: Synthetic oligonucleotide
  Antisense strand to SEQ ID NO: 265760
uugcucacuguaauaaugg

SEQ ID NO: 265762 - RNA, 19 nt, Artificial Sequence
  Description of Artificial Sequence: Synthetic oligonucleotide
  Sense strand starting at position 1246 of SEQ ID NO: 3416
ggaggaguugccuaggcca

SEQ ID NO: 265763 - RNA, 19 nt, Artificial Sequence
  Description of Artificial Sequence: Synthetic oligonucleotide
  Antisense strand to SEQ ID NO: 265762
uggccuaggcaacuccucc

SEQ ID NO: 265764 - RNA, 19 nt, Artificial Sequence
  Description of Artificial Sequence: Synthetic oligonucleotide
  Sense strand starting at position 1248 of SEQ ID NO: 3416
aggaguugccuaggccaca

SEQ ID NO: 265765 - RNA, 19 nt, Artificial Sequence
  Description of Artificial Sequence: Synthetic oligonucleotide
  Antisense strand to SEQ ID NO: 265764
uguggccuaggcaacuccu

SEQ ID NO: 265766 - RNA, 19 nt, Artificial Sequence
  Description of Artificial Sequence: Synthetic oligonucleotide
  Sense strand starting at position 1328 of SEQ ID NO: 3416
uugaacagcuguguaguaa

SEQ ID NO: 265767 - RNA, 19 nt, Artificial Sequence
  Description of Artificial Sequence: Synthetic oligonucleotide
  Antisense strand to SEQ ID NO: 265766
uuacuacacagcuguucaa

SEQ ID NO: 265768 - RNA, 19 nt, Artificial Sequence
  Description of Artificial Sequence: Synthetic oligonucleotide
  Sense strand starting at position 1329 of SEQ ID NO: 3416
ugaacagcuguguaguaau

SEQ ID NO: 265769 - RNA, 19 nt, Artificial Sequence
  Description of Artificial Sequence: Synthetic oligonucleotide
  Antisense strand to SEQ ID NO: 265768
auuacuacacagcuguuca

SEQ ID NO: 265770 - RNA, 19 nt, Artificial Sequence
  Description of Artificial Sequence: Synthetic oligonucleotide
  Sense strand starting at position 1403 of SEQ ID NO: 3416
gggugcugucaucaggauu

SEQ ID NO: 265771 - RNA, 19 nt, Artificial Sequence
  Description of Artificial Sequence: Synthetic oligonucleotide
  Antisense strand to SEQ ID NO: 265770
aauccugaugacagcaccc

SEQ ID NO: 265772 - RNA, 19 nt, Artificial Sequence
  Description of Artificial Sequence: Synthetic oligonucleotide
  Sense strand starting at position 1406 of SEQ ID NO: 3416
ugcugucaucaggauuaau

SEQ ID NO: 265773 - RNA, 19 nt, Artificial Sequence
  Description of Artificial Sequence: Synthetic oligonucleotide
  Antisense strand to SEQ ID NO: 265772
auuaauccugaugacagca

SEQ ID NO: 265774 - RNA, 19 nt, Artificial Sequence
  Description of Artificial Sequence: Synthetic oligonucleotide
  Sense strand starting at position 1526 of SEQ ID NO: 3416
cugaacuauuccuccguga

SEQ ID NO: 265775 - RNA, 19 nt, Artificial Sequence
  Description of Artificial Sequence: Synthetic oligonucleotide
  Antisense strand to SEQ ID NO: 265774
ucacggaggaauaguucag

SEQ ID NO: 265776 - RNA, 19 nt, Artificial Sequence
  Description of Artificial Sequence: Synthetic oligonucleotide
  Sense strand starting at position 1528 of SEQ ID NO: 3416
gaacuauuccuccgugagg

SEQ ID NO: 265777 - RNA, 19 nt, Artificial Sequence
  Description of Artificial Sequence: Synthetic oligonucleotide
  Antisense strand to SEQ ID NO: 265776
ccucacggaggaauaguuc

SEQ ID NO: 265778 - RNA, 19 nt, Artificial Sequence
  Description of Artificial Sequence: Synthetic oligonucleotide
  Sense strand starting at position 1529 of SEQ ID NO: 3416
aacuauuccuccgugaggu

SEQ ID NO: 265779 - RNA, 19 nt, Artificial Sequence
  Description of Artificial Sequence: Synthetic oligonucleotide
  Antisense strand to SEQ ID NO: 265778
accucacggaggaauaguu

SEQ ID NO: 265780 - RNA, 19 nt, Artificial Sequence
  Description of Artificial Sequence: Synthetic oligonucleotide
  Sense strand starting at position 1539 of SEQ ID NO: 3416
ccgugaggucaucacggau

SEQ ID NO: 265781 - RNA, 19 nt, Artificial Sequence
  Description of Artificial Sequence: Synthetic oligonucleotide
  Antisense strand to SEQ ID NO: 265780
auccgugaugaccucacgg

SEQ ID NO: 265782 - RNA, 19 nt, Artificial Sequence
  Description of Artificial Sequence: Synthetic oligonucleotide
  Sense strand starting at position 1663 of SEQ ID NO: 3416
cuaucucuccuccggagua

SEQ ID NO: 265783 - RNA, 19 nt, Artificial Sequence
  Description of Artificial Sequence: Synthetic oligonucleotide
  Antisense strand to SEQ ID NO: 265782
uacuccggaggagagauag

SEQ ID NO: 265784 - RNA, 19 nt, Artificial Sequence
  Description of Artificial Sequence: Synthetic oligonucleotide
  Sense strand starting at position 1690 of SEQ ID NO: 3416
gagggauaaaguugucccu

SEQ ID NO: 265785 - RNA, 19 nt, Artificial Sequence
  Description of Artificial Sequence: Synthetic oligonucleotide
  Antisense strand to SEQ ID NO: 265784
agggacaacuuuaucccuc

SEQ ID NO: 265786 - RNA, 19 nt, Artificial Sequence
  Description of Artificial Sequence: Synthetic oligonucleotide
  Sense strand starting at position 1692 of SEQ ID NO: 3416
gggauaaaguugucccugu

SEQ ID NO: 265787 - RNA, 19 nt, Artificial Sequence
  Description of Artificial Sequence: Synthetic oligonucleotide
  Antisense strand to SEQ ID NO: 265786
acagggacaacuuuauccc

SEQ ID NO: 265788 - RNA, 19 nt, Artificial Sequence
  Description of Artificial Sequence: Synthetic oligonucleotide
  Sense strand starting at position 1693 of SEQ ID NO: 3416
ggauaaaguugucccugua

SEQ ID NO: 265789 - RNA, 19 nt, Artificial Sequence
  Description of Artificial Sequence: Synthetic oligonucleotide
  Antisense strand to SEQ ID NO: 265788
uacagggacaacuuuaucc

SEQ ID NO: 265790 - RNA, 19 nt, Artificial Sequence
  Description of Artificial Sequence: Synthetic oligonucleotide
  Sense strand starting at position 1708 of SEQ ID NO: 3416
uguauuucuugagauccag

SEQ ID NO: 265791 - RNA, 19 nt, Artificial Sequence
  Description of Artificial Sequence: Synthetic oligonucleotide
  Antisense strand to SEQ ID NO: 265790
cuggaucucaagaaauaca

SEQ ID NO: 265792 - RNA, 19 nt, Artificial Sequence
  Description of Artificial Sequence: Synthetic oligonucleotide
  Sense strand starting at position 2425 of SEQ ID NO: 3416
uccagagcccuagaaaguu

SEQ ID NO: 265793 - RNA, 19 nt, Artificial Sequence
  Description of Artificial Sequence: Synthetic oligonucleotide
  Antisense strand to SEQ ID NO: 265792
aacuuucuagggcucugga

SEQ ID NO: 265794 - RNA, 19 nt, Artificial Sequence
  Description of Artificial Sequence: Synthetic oligonucleotide
  Sense strand starting at position 2627 of SEQ ID NO: 3416
gggugcuccagaggucuaa

SEQ ID NO: 265795 - RNA, 19 nt, Artificial Sequence
  Description of Artificial Sequence: Synthetic oligonucleotide
  Antisense strand to SEQ ID NO: 265794
uuagaccucuggagcaccc

SEQ ID NO: 265796 - RNA, 19 nt, Artificial Sequence
  Description of Artificial Sequence: Synthetic oligonucleotide
  Sense strand starting at position 2825 of SEQ ID NO: 3416
guuguucccagaugaagaa

SEQ ID NO: 265797 - RNA, 19 nt, Artificial Sequence
  Description of Artificial Sequence: Synthetic oligonucleotide
  Antisense strand to SEQ ID NO: 265796
uucuucaucugggaacaac

SEQ ID NO: 265798 - RNA, 19 nt, Artificial Sequence
  Description of Artificial Sequence: Synthetic oligonucleotide
  Sense strand starting at position 2873 of SEQ ID NO: 3416
gcuugaugauugguccacu

SEQ ID NO: 265799 - RNA, 19 nt, Artificial Sequence
  Description of Artificial Sequence: Synthetic oligonucleotide
  Antisense strand to SEQ ID NO: 265798
aguggaccaaucaucaagc

SEQ ID NO: 265800 - RNA, 19 nt, Artificial Sequence
  Description of Artificial Sequence: Synthetic oligonucleotide
  Sense strand starting at position 2899 of SEQ ID NO: 3416
ugaagacccucuuccugaa

SEQ ID NO: 265801 - RNA, 19 nt, Artificial Sequence
  Description of Artificial Sequence: Synthetic oligonucleotide
  Antisense strand to SEQ ID NO: 265800
uucaggaagagggucuuca

SEQ ID NO: 265802 - RNA, 19 nt, Artificial Sequence
  Description of Artificial Sequence: Synthetic oligonucleotide
  Sense strand starting at position 3183 of SEQ ID NO: 3416
augcaugcguuaucuauuu

SEQ ID NO: 265803 - RNA, 19 nt, Artificial Sequence
  Description of Artificial Sequence: Synthetic oligonucleotide
  Antisense strand to SEQ ID NO: 265802
aaauagauaacgcaugcau

SEQ ID NO: 265804 - RNA, 19 nt, Artificial Sequence
  Description of Artificial Sequence: Synthetic oligonucleotide
  Sense strand starting at position 3268 of SEQ ID NO: 3416
auauuaggacgaugugaga

SEQ ID NO: 265805 - RNA, 19 nt, Artificial Sequence
  Description of Artificial Sequence: Synthetic oligonucleotide
  Antisense strand to SEQ ID NO: 265804
ucucacaucguccuaauau

SEQ ID NO: 265806 - RNA, 19 nt, Artificial Sequence
  Description of Artificial Sequence: Synthetic oligonucleotide
  Sense strand starting at position 3326 of SEQ ID NO: 3416
augugcuauucccugaacu

SEQ ID NO: 265807 - RNA, 19 nt, Artificial Sequence
  Description of Artificial Sequence: Synthetic oligonucleotide
  Antisense strand to SEQ ID NO: 265806
aguucagggaauagcacau

SEQ ID NO: 265808 - RNA, 19 nt, Artificial Sequence
  Description of Artificial Sequence: Synthetic oligonucleotide
  Sense strand starting at position 3328 of SEQ ID NO: 3416
gugcuauucccugaacuuc

SEQ ID NO: 265809 - RNA, 19 nt, Artificial Sequence
  Description of Artificial Sequence: Synthetic oligonucleotide
  Antisense strand to SEQ ID NO: 265808
gaaguucagggaauagcac

SEQ ID NO: 265810 - RNA, 19 nt, Artificial Sequence
  Description of Artificial Sequence: Synthetic oligonucleotide
  Sense strand starting at position 3339 of SEQ ID NO: 3416
ugaacuucggugggagauu

SEQ ID NO: 265811 - RNA, 19 nt, Artificial Sequence
  Description of Artificial Sequence: Synthetic oligonucleotide
  Antisense strand to SEQ ID NO: 265810
aaucucccaccgaaguuca

SEQ ID NO: 265812 - RNA, 19 nt, Artificial Sequence
  Description of Artificial Sequence: Synthetic oligonucleotide
  Sense strand starting at position 3353 of SEQ ID NO: 3416
agauucauggcuuggugau

SEQ ID NO: 265813 - RNA, 19 nt, Artificial Sequence
  Description of Artificial Sequence: Synthetic oligonucleotide
  Antisense strand to SEQ ID NO: 265812
aucaccaagccaugaaucu

SEQ ID NO: 265814 - RNA, 19 nt, Artificial Sequence
  Description of Artificial Sequence: Synthetic oligonucleotide
  Sense strand starting at position 3410 of SEQ ID NO: 3416
uagguaucgggaggccuau

SEQ ID NO: 265815 - RNA, 19 nt, Artificial Sequence
  Description of Artificial Sequence: Synthetic oligonucleotide
  Antisense strand to SEQ ID NO: 265814
auaggccucccgauaccua

SEQ ID NO: 265816 - RNA, 19 nt, Artificial Sequence
  Description of Artificial Sequence: Synthetic oligonucleotide
  Sense strand starting at position 3492 of SEQ ID NO: 3416
aauggagaacugugcaguu

SEQ ID NO: 265817 - RNA, 19 nt, Artificial Sequence
  Description of Artificial Sequence: Synthetic oligonucleotide
  Antisense strand to SEQ ID NO: 265816
aacugcacaguucuccauu

SEQ ID NO: 265818 - RNA, 19 nt, Artificial Sequence
  Description of Artificial Sequence: Synthetic oligonucleotide
  Sense strand starting at position 3567 of SEQ ID NO: 3416
ucuggaaaguguccuugau

SEQ ID NO: 265819 - RNA, 19 nt, Artificial Sequence
  Description of Artificial Sequence: Synthetic oligonucleotide
  Antisense strand to SEQ ID NO: 265818
aucaaggacacuuuccaga

SEQ ID NO: 265820 - RNA, 19 nt, Artificial Sequence
  Description of Artificial Sequence: Synthetic oligonucleotide
  Sense strand starting at position 3574 of SEQ ID NO: 3416
aguguccuugauggaaauu

SEQ ID NO: 265821 - RNA, 19 nt, Artificial Sequence
  Description of Artificial Sequence: Synthetic oligonucleotide
  Antisense strand to SEQ ID NO: 265820
aauuuccaucaaggacacu

SEQ ID NO: 265822 - RNA, 19 nt, Artificial Sequence
  Description of Artificial Sequence: Synthetic oligonucleotide
  Sense strand starting at position 3592 of SEQ ID NO: 3416
ucagcagaguugguauaau

SEQ ID NO: 265823 - RNA, 19 nt, Artificial Sequence
  Description of Artificial Sequence: Synthetic oligonucleotide
  Antisense strand to SEQ ID NO: 265822
auuauaccaacucugcuga

SEQ ID NO: 265824 - RNA, 19 nt, Artificial Sequence
  Description of Artificial Sequence: Synthetic oligonucleotide
  Sense strand starting at position 3634 of SEQ ID NO: 3416
aaauguccucagggccaaa

SEQ ID NO: 265825 - RNA, 19 nt, Artificial Sequence
  Description of Artificial Sequence: Synthetic oligonucleotide
  Antisense strand to SEQ ID NO: 265824
uuuggcccugaggacauuu

SEQ ID NO: 265826 - RNA, 19 nt, Artificial Sequence
  Description of Artificial Sequence: Synthetic oligonucleotide
  Sense strand starting at position 3710 of SEQ ID NO: 3416
gaagaaguuuagcugagga

SEQ ID NO: 265827 - RNA, 19 nt, Artificial Sequence
  Description of Artificial Sequence: Synthetic oligonucleotide
  Antisense strand to SEQ ID NO: 265826
uccucagcuaaacuucuuc

SEQ ID NO: 265828 - RNA, 19 nt, Artificial Sequence
  Description of Artificial Sequence: Synthetic oligonucleotide
  Sense strand starting at position 3715 of SEQ ID NO: 3416
aguuuagcugaggaaaucu

SEQ ID NO: 265829 - RNA, 19 nt, Artificial Sequence
  Description of Artificial Sequence: Synthetic oligonucleotide
  Antisense strand to SEQ ID NO: 265828
agauuuccucagcuaaacu

SEQ ID NO: 265830 - RNA, 19 nt, Artificial Sequence
  Description of Artificial Sequence: Synthetic oligonucleotide
  Sense strand starting at position 3851 of SEQ ID NO: 3416
ccucaagcucccgauuaca

SEQ ID NO: 265831 - RNA, 19 nt, Artificial Sequence
  Description of Artificial Sequence: Synthetic oligonucleotide
  Antisense strand to SEQ ID NO: 265830
uguaaucgggagcuugagg

SEQ ID NO: 265832 - RNA, 19 nt, Artificial Sequence
  Description of Artificial Sequence: Synthetic oligonucleotide
  Sense strand starting at position 401 of SEQ ID NO: 3418
cuugguaaccaaugcucaa

SEQ ID NO: 265833 - RNA, 19 nt, Artificial Sequence
  Description of Artificial Sequence: Synthetic oligonucleotide
  Antisense strand to SEQ ID NO: 265832
uugagcauugguuaccaag

SEQ ID NO: 265834 - RNA, 19 nt, Artificial Sequence
  Description of Artificial Sequence: Synthetic oligonucleotide
  Sense strand starting at position 405 of SEQ ID NO: 3418
guaaccaaugcucaaauga

SEQ ID NO: 265835 - RNA, 19 nt, Artificial Sequence
  Description of Artificial Sequence: Synthetic oligonucleotide
  Antisense strand to SEQ ID NO: 265834
ucauuugagcauugguuac

SEQ ID NO: 265836 - RNA, 19 nt, Artificial Sequence
  Description of Artificial Sequence: Synthetic oligonucleotide
  Sense strand starting at position 613 of SEQ ID NO: 3418
uuuccaggcugagaugaua

SEQ ID NO: 265837 - RNA, 19 nt, Artificial Sequence
  Description of Artificial Sequence: Synthetic oligonucleotide
  Antisense strand to SEQ ID NO: 265836
uaucaucucagccuggaaa

SEQ ID NO: 265838 - RNA, 19 nt, Artificial Sequence
  Description of Artificial Sequence: Synthetic oligonucleotide
  Sense strand starting at position 779 of SEQ ID NO: 3418
cgugaagacgguuaaggaa

SEQ ID NO: 265839 - RNA, 19 nt, Artificial Sequence
  Description of Artificial Sequence: Synthetic oligonucleotide
  Antisense strand to SEQ ID NO: 265838
uuccuuaaccgucuucacg

SEQ ID NO: 265840 - RNA, 19 nt, Artificial Sequence
  Description of Artificial Sequence: Synthetic oligonucleotide
  Sense strand starting at position 1366 of SEQ ID NO: 3418
gggcaucucugccuggaca

SEQ ID NO: 265841 - RNA, 19 nt, Artificial Sequence
  Description of Artificial Sequence: Synthetic oligonucleotide
  Antisense strand to SEQ ID NO: 265840
uguccaggcagagaugccc

SEQ ID NO: 265842 - RNA, 19 nt, Artificial Sequence
  Description of Artificial Sequence: Synthetic oligonucleotide
  Sense strand starting at position 1367 of SEQ ID NO: 3418
ggcaucucugccuggacaa

SEQ ID NO: 265843 - RNA, 19 nt, Artificial Sequence
  Description of Artificial Sequence: Synthetic oligonucleotide
  Antisense strand to SEQ ID NO: 265842
uuguccaggcagagaugcc

SEQ ID NO: 265844 - RNA, 19 nt, Artificial Sequence
  Description of Artificial Sequence: Synthetic oligonucleotide
  Sense strand starting at position 1390 of SEQ ID NO: 3418
ccgucuacccaggguauau

SEQ ID NO: 265845 - RNA, 19 nt, Artificial Sequence
  Description of Artificial Sequence: Synthetic oligonucleotide
  Antisense strand to SEQ ID NO: 265844
auauacccuggguagacgg

SEQ ID NO: 265846 - RNA, 19 nt, Artificial Sequence
  Description of Artificial Sequence: Synthetic oligonucleotide
  Sense strand starting at position 1519 of SEQ ID NO: 3418
ggaagcuuuccuuaaccgu

SEQ ID NO: 265847 - RNA, 19 nt, Artificial Sequence
  Description of Artificial Sequence: Synthetic oligonucleotide
  Antisense strand to SEQ ID NO: 265846
acgguuaaggaaagcuucc

SEQ ID NO: 265848 - RNA, 19 nt, Artificial Sequence
  Description of Artificial Sequence: Synthetic oligonucleotide
  Sense strand starting at position 2132 of SEQ ID NO: 3418
gccugaugcucagagggua

SEQ ID NO: 265849 - RNA, 19 nt, Artificial Sequence
  Description of Artificial Sequence: Synthetic oligonucleotide
  Antisense strand to SEQ ID NO: 265848
uacccucugagcaucaggc

SEQ ID NO: 265850 - RNA, 19 nt, Artificial Sequence
  Description of Artificial Sequence: Synthetic oligonucleotide
  Sense strand starting at position 2304 of SEQ ID NO: 3418
agggcugggacguaacaaa

SEQ ID NO: 265851 - RNA, 19 nt, Artificial Sequence
  Description of Artificial Sequence: Synthetic oligonucleotide
  Antisense strand to SEQ ID NO: 265850
uuuguuacgucccagcccu

SEQ ID NO: 265852 - RNA, 19 nt, Artificial Sequence
  Description of Artificial Sequence: Synthetic oligonucleotide
  Sense strand starting at position 2376 of SEQ ID NO: 3418
ccaggacccguuuaggauu

SEQ ID NO: 265853 - RNA, 19 nt, Artificial Sequence
  Description of Artificial Sequence: Synthetic oligonucleotide
  Antisense strand to SEQ ID NO: 265852
aauccuaaacggguccugg

SEQ ID NO: 265854 - RNA, 19 nt, Artificial Sequence
  Description of Artificial Sequence: Synthetic oligonucleotide
  Sense strand starting at position 2564 of SEQ ID NO: 3418
agaccucaguuagagauga

SEQ ID NO: 265855 - RNA, 19 nt, Artificial Sequence
  Description of Artificial Sequence: Synthetic oligonucleotide
  Antisense strand to SEQ ID NO: 265854
ucaucucuaacugaggucu

SEQ ID NO: 265856 - RNA, 19 nt, Artificial Sequence
  Description of Artificial Sequence: Synthetic oligonucleotide
  Sense strand starting at position 2600 of SEQ ID NO: 3418
acgucuuuagacgaaugca

SEQ ID NO: 265857 - RNA, 19 nt, Artificial Sequence
  Description of Artificial Sequence: Synthetic oligonucleotide
  Antisense strand to SEQ ID NO: 265856
ugcauucgucuaaagacgu

SEQ ID NO: 265858 - RNA, 19 nt, Artificial Sequence
  Description of Artificial Sequence: Synthetic oligonucleotide
  Sense strand starting at position 2637 of SEQ ID NO: 3418
gagcuuagaagguguguaa

SEQ ID NO: 265859 - RNA, 19 nt, Artificial Sequence
  Description of Artificial Sequence: Synthetic oligonucleotide
  Antisense strand to SEQ ID NO: 265858
uuacacaccuucuaagcuc

SEQ ID NO: 265860 - RNA, 19 nt, Artificial Sequence
  Description of Artificial Sequence: Synthetic oligonucleotide
  Sense strand starting at position 2675 of SEQ ID NO: 3418
cuggaguuggucuggcgau

SEQ ID NO: 265861 - RNA, 19 nt, Artificial Sequence
  Description of Artificial Sequence: Synthetic oligonucleotide
  Antisense strand to SEQ ID NO: 265860
aucgccagaccaacuccag

SEQ ID NO: 265862 - RNA, 19 nt, Artificial Sequence
  Description of Artificial Sequence: Synthetic oligonucleotide
  Sense strand starting at position 2801 of SEQ ID NO: 3418
ggguuugguccgggaacgu

SEQ ID NO: 265863 - RNA, 19 nt, Artificial Sequence
  Description of Artificial Sequence: Synthetic oligonucleotide
  Antisense strand to SEQ ID NO: 265862
acguucccggaccaaaccc

SEQ ID NO: 265864 - RNA, 19 nt, Artificial Sequence
  Description of Artificial Sequence: Synthetic oligonucleotide
  Sense strand starting at position 2802 of SEQ ID NO: 3418
gguuugguccgggaacguu

SEQ ID NO: 265865 - RNA, 19 nt, Artificial Sequence
  Description of Artificial Sequence: Synthetic oligonucleotide
  Antisense strand to SEQ ID NO: 265864
aacguucccggaccaaacc

SEQ ID NO: 265866 - RNA, 19 nt, Artificial Sequence
  Description of Artificial Sequence: Synthetic oligonucleotide
  Sense strand starting at position 2820 of SEQ ID NO: 3418
uuuguucucugcgugaacu

SEQ ID NO: 265867 - RNA, 19 nt, Artificial Sequence
  Description of Artificial Sequence: Synthetic oligonucleotide
  Antisense strand to SEQ ID NO: 265866
aguucacgcagagaacaaa

SEQ ID NO: 265868 - RNA, 19 nt, Artificial Sequence
  Description of Artificial Sequence: Synthetic oligonucleotide
  Sense strand starting at position 2830 of SEQ ID NO: 3418
gcgugaacugcuuucucau

SEQ ID NO: 265869 - RNA, 19 nt, Artificial Sequence
  Description of Artificial Sequence: Synthetic oligonucleotide
  Antisense strand to SEQ ID NO: 265868
augagaaagcaguucacgc

SEQ ID NO: 265870 - RNA, 19 nt, Artificial Sequence
  Description of Artificial Sequence: Synthetic oligonucleotide
  Sense strand starting at position 20 of SEQ ID NO: 3417
gcaagacauucucucugca

SEQ ID NO: 265871 - RNA, 19 nt, Artificial Sequence
  Description of Artificial Sequence: Synthetic oligonucleotide
  Antisense strand to SEQ ID NO: 265870
ugcagagagaaugucuugc

SEQ ID NO: 265872 - RNA, 19 nt, Artificial Sequence
  Description of Artificial Sequence: Synthetic oligonucleotide
  Sense strand starting at position 525 of SEQ ID NO: 3417
acagccauguccuggacau

SEQ ID NO: 265873 - RNA, 19 nt, Artificial Sequence
  Description of Artificial Sequence: Synthetic oligonucleotide
  Antisense strand to SEQ ID NO: 265872
auguccaggacauggcugu

SEQ ID NO: 265874 - RNA, 19 nt, Artificial Sequence
  Description of Artificial Sequence: Synthetic oligonucleotide
  Sense strand starting at position 527 of SEQ ID NO: 3417
agccauguccuggacauua

SEQ ID NO: 265875 - RNA, 19 nt, Artificial Sequence
  Description of Artificial Sequence: Synthetic oligonucleotide
  Antisense strand to SEQ ID NO: 265874
uaauguccaggacauggcu

SEQ ID NO: 265876 - RNA, 19 nt, Artificial Sequence
  Description of Artificial Sequence: Synthetic oligonucleotide
  Sense strand starting at position 880 of SEQ ID NO: 3417
cacuucuugucgugggaag

SEQ ID NO: 265877 - RNA, 19 nt, Artificial Sequence
  Description of Artificial Sequence: Synthetic oligonucleotide
  Antisense strand to SEQ ID NO: 265876
cuucccacgacaagaagug

SEQ ID NO: 265878 - RNA, 19 nt, Artificial Sequence
  Description of Artificial Sequence: Synthetic oligonucleotide
  Sense strand starting at position 881 of SEQ ID NO: 3417
acuucuugucgugggaagu

SEQ ID NO: 265879 - RNA, 19 nt, Artificial Sequence
  Description of Artificial Sequence: Synthetic oligonucleotide
  Antisense strand to SEQ ID NO: 265878
acuucccacgacaagaagu

SEQ ID NO: 265880 - RNA, 19 nt, Artificial Sequence
  Description of Artificial Sequence: Synthetic oligonucleotide
  Sense strand starting at position 1232 of SEQ ID NO: 3417
aagugucccauugggagau

SEQ ID NO: 265881 - RNA, 19 nt, Artificial Sequence
  Description of Artificial Sequence: Synthetic oligonucleotide
  Antisense strand to SEQ ID NO: 265880
aucucccaaugggacacuu

SEQ ID NO: 265882 - RNA, 19 nt, Artificial Sequence
  Description of Artificial Sequence: Synthetic oligonucleotide
  Sense strand starting at position 1236 of SEQ ID NO: 3417
gucccauugggagaugcau

SEQ ID NO: 265883 - RNA, 19 nt, Artificial Sequence
  Description of Artificial Sequence: Synthetic oligonucleotide
  Antisense strand to SEQ ID NO: 265882
augcaucucccaaugggac

SEQ ID NO: 265884 - RNA, 19 nt, Artificial Sequence
  Description of Artificial Sequence: Synthetic oligonucleotide
  Sense strand starting at position 2268 of SEQ ID NO: 3417
cuugguaaccaaugcucaa

SEQ ID NO: 265885 - RNA, 19 nt, Artificial Sequence
  Description of Artificial Sequence: Synthetic oligonucleotide
  Antisense strand to SEQ ID NO: 265884
uugagcauugguuaccaag

SEQ ID NO: 265886 - RNA, 19 nt, Artificial Sequence
  Description of Artificial Sequence: Synthetic oligonucleotide
  Sense strand starting at position 2272 of SEQ ID NO: 3417
guaaccaaugcucaaauga

SEQ ID NO: 265887 - RNA, 19 nt, Artificial Sequence
  Description of Artificial Sequence: Synthetic oligonucleotide
  Antisense strand to SEQ ID NO: 265886
ucauuugagcauugguuac

SEQ ID NO: 265888 - RNA, 19 nt, Artificial Sequence
  Description of Artificial Sequence: Synthetic oligonucleotide
  Sense strand starting at position 2480 of SEQ ID NO: 3417
uuuccaggcugagaugaua

SEQ ID NO: 265889 - RNA, 19 nt, Artificial Sequence
  Description of Artificial Sequence: Synthetic oligonucleotide
  Antisense strand to SEQ ID NO: 265888
uaucaucucagccuggaaa

SEQ ID NO: 265890 - RNA, 19 nt, Artificial Sequence
  Description of Artificial Sequence: Synthetic oligonucleotide
  Sense strand starting at position 2646 of SEQ ID NO: 3417
cgugaagacgguuaaggaa

SEQ ID NO: 265891 - RNA, 19 nt, Artificial Sequence
  Description of Artificial Sequence: Synthetic oligonucleotide
  Antisense strand to SEQ ID NO: 265890
uuccuuaaccgucuucacg

SEQ ID NO: 265892 - RNA, 19 nt, Artificial Sequence
  Description of Artificial Sequence: Synthetic oligonucleotide
  Sense strand starting at position 3233 of SEQ ID NO: 3417
gggcaucucugccuggaca

SEQ ID NO: 265893 - RNA, 19 nt, Artificial Sequence
  Description of Artificial Sequence: Synthetic oligonucleotide
  Antisense strand to SEQ ID NO: 265892
uguccaggcagagaugccc

SEQ ID NO: 265894 - RNA, 19 nt, Artificial Sequence
  Description of Artificial Sequence: Synthetic oligonucleotide
  Sense strand starting at position 3234 of SEQ ID NO: 3417
ggcaucucugccuggacaa

SEQ ID NO: 265895 - RNA, 19 nt, Artificial Sequence
  Description of Artificial Sequence: Synthetic oligonucleotide
  Antisense strand to SEQ ID NO: 265894
uuguccaggcagagaugcc

SEQ ID NO: 265896 - RNA, 19 nt, Artificial Sequence
  Description of Artificial Sequence: Synthetic oligonucleotide
  Sense strand starting at position 3257 of SEQ ID NO: 3417
ccgucuacccaggguauau

SEQ ID NO: 265897 - RNA, 19 nt, Artificial Sequence
  Description of Artificial Sequence: Synthetic oligonucleotide
  Antisense strand to SEQ ID NO: 265896
auauacccuggguagacgg

SEQ ID NO: 265898 - RNA, 19 nt, Artificial Sequence
  Description of Artificial Sequence: Synthetic oligonucleotide
  Sense strand starting at position 3386 of SEQ ID NO: 3417
ggaagcuuuccuuaaccgu

SEQ ID NO: 265899 - RNA, 19 nt, Artificial Sequence
  Description of Artificial Sequence: Synthetic oligonucleotide
  Antisense strand to SEQ ID NO: 265898
acgguuaaggaaagcuucc

SEQ ID NO: 265900 - RNA, 19 nt, Artificial Sequence
  Description of Artificial Sequence: Synthetic oligonucleotide
  Sense strand starting at position 129 of SEQ ID NO: 3419
gccucucaucuaugaagac

SEQ ID NO: 265901 - RNA, 19 nt, Artificial Sequence
  Description of Artificial Sequence: Synthetic oligonucleotide
  Antisense strand to SEQ ID NO: 265900
gucuucauagaugagaggc

SEQ ID NO: 265902 - RNA, 19 nt, Artificial Sequence
  Description of Artificial Sequence: Synthetic oligonucleotide
  Sense strand starting at position 612 of SEQ ID NO: 3419
gggcgaucgcuccaauuac

SEQ ID NO: 265903 - RNA, 19 nt, Artificial Sequence
  Description of Artificial Sequence: Synthetic oligonucleotide
  Antisense strand to SEQ ID NO: 265902
guaauuggagcgaucgccc

SEQ ID NO: 265904 - RNA, 19 nt, Artificial Sequence
  Description of Artificial Sequence: Synthetic oligonucleotide
  Sense strand starting at position 696 of SEQ ID NO: 3419
gggugucucuacuccagga

SEQ ID NO: 265905 - RNA, 19 nt, Artificial Sequence
  Description of Artificial Sequence: Synthetic oligonucleotide
  Antisense strand to SEQ ID NO: 265904
uccuggaguagagacaccc

SEQ ID NO: 265906 - RNA, 19 nt, Artificial Sequence
  Description of Artificial Sequence: Synthetic oligonucleotide
  Sense strand starting at position 738 of SEQ ID NO: 3419
cucuaagaucuuggaaucu

SEQ ID NO: 265907 - RNA, 19 nt, Artificial Sequence
  Description of Artificial Sequence: Synthetic oligonucleotide
  Antisense strand to SEQ ID NO: 265906
agauuccaagaucuuagag

SEQ ID NO: 265908 - RNA, 19 nt, Artificial Sequence
  Description of Artificial Sequence: Synthetic oligonucleotide
  Sense strand starting at position 911 of SEQ ID NO: 3419
gcuugagaaggcugugcua

SEQ ID NO: 265909 - RNA, 19 nt, Artificial Sequence
  Description of Artificial Sequence: Synthetic oligonucleotide
  Antisense strand to SEQ ID NO: 265908
uagcacagccuucucaagc

SEQ ID NO: 265910 - RNA, 19 nt, Artificial Sequence
  Description of Artificial Sequence: Synthetic oligonucleotide
  Sense strand starting at position 913 of SEQ ID NO: 3419
uugagaaggcugugcuagu

SEQ ID NO: 265911 - RNA, 19 nt, Artificial Sequence
  Description of Artificial Sequence: Synthetic oligonucleotide
  Antisense strand to SEQ ID NO: 265910
acuagcacagccuucucaa

SEQ ID NO: 265912 - RNA, 19 nt, Artificial Sequence
  Description of Artificial Sequence: Synthetic oligonucleotide
  Sense strand starting at position 923 of SEQ ID NO: 3419
ugugcuagucaucuguguu

SEQ ID NO: 265913 - RNA, 19 nt, Artificial Sequence
  Description of Artificial Sequence: Synthetic oligonucleotide
  Antisense strand to SEQ ID NO: 265912
aacacagaugacuagcaca

SEQ ID NO: 265914 - RNA, 19 nt, Artificial Sequence
  Description of Artificial Sequence: Synthetic oligonucleotide
  Sense strand starting at position 1070 of SEQ ID NO: 3419
gccaacuacuagucuguga

SEQ ID NO: 265915 - RNA, 19 nt, Artificial Sequence
  Description of Artificial Sequence: Synthetic oligonucleotide
  Antisense strand to SEQ ID NO: 265914
ucacagacuaguaguuggc

SEQ ID NO: 265916 - RNA, 19 nt, Artificial Sequence
  Description of Artificial Sequence: Synthetic oligonucleotide
  Sense strand starting at position 1587 of SEQ ID NO: 3419
cagagaaccuuugugccua

SEQ ID NO: 265917 - RNA, 19 nt, Artificial Sequence
  Description of Artificial Sequence: Synthetic oligonucleotide
  Antisense strand to SEQ ID NO: 265916
uaggcacaaagguucucug

SEQ ID NO: 265918 - RNA, 19 nt, Artificial Sequence
  Description of Artificial Sequence: Synthetic oligonucleotide
  Sense strand starting at position 1613 of SEQ ID NO: 3419
uuugauuugugcguuugau

SEQ ID NO: 265919 - RNA, 19 nt, Artificial Sequence
  Description of Artificial Sequence: Synthetic oligonucleotide
  Antisense strand to SEQ ID NO: 265918
aucaaacgcacaaaucaaa

SEQ ID NO: 265920 - RNA, 19 nt, Artificial Sequence
  Description of Artificial Sequence: Synthetic oligonucleotide
  Sense strand starting at position 1633 of SEQ ID NO: 3419
uuauaaagaucccuguaag

SEQ ID NO: 265921 - RNA, 19 nt, Artificial Sequence
  Description of Artificial Sequence: Synthetic oligonucleotide
  Antisense strand to SEQ ID NO: 265920
cuuacagggaucuuuauaa

SEQ ID NO: 265922 - RNA, 19 nt, Artificial Sequence
  Description of Artificial Sequence: Synthetic oligonucleotide
  Sense strand starting at position 1963 of SEQ ID NO: 3419
uggacagguuaccaaagau

SEQ ID NO: 265923 - RNA, 19 nt, Artificial Sequence
  Description of Artificial Sequence: Synthetic oligonucleotide
  Antisense strand to SEQ ID NO: 265922
aucuuugguaaccugucca

SEQ ID NO: 265924 - RNA, 19 nt, Artificial Sequence
  Description of Artificial Sequence: Synthetic oligonucleotide
  Sense strand starting at position 2014 of SEQ ID NO: 3419
acguuacaaaguugaugau

SEQ ID NO: 265925 - RNA, 19 nt, Artificial Sequence
  Description of Artificial Sequence: Synthetic oligonucleotide
  Antisense strand to SEQ ID NO: 265924
aucaucaacuuuguaacgu

SEQ ID NO: 265926 - RNA, 19 nt, Artificial Sequence
  Description of Artificial Sequence: Synthetic oligonucleotide
  Sense strand starting at position 2047 of SEQ ID NO: 3419
ugucauguguuacuauauc

SEQ ID NO: 265927 - RNA, 19 nt, Artificial Sequence
  Description of Artificial Sequence: Synthetic oligonucleotide
  Antisense strand to SEQ ID NO: 265926
gauauaguaacacaugaca

SEQ ID NO: 265928 - RNA, 19 nt, Artificial Sequence
  Description of Artificial Sequence: Synthetic oligonucleotide
  Sense strand starting at position 2206 of SEQ ID NO: 3419
gcuggcugugcauuguaau

SEQ ID NO: 265929 - RNA, 19 nt, Artificial Sequence
  Description of Artificial Sequence: Synthetic oligonucleotide
  Antisense strand to SEQ ID NO: 265928
auuacaaugcacagccagc

SEQ ID NO: 265930 - RNA, 19 nt, Artificial Sequence
  Description of Artificial Sequence: Synthetic oligonucleotide
  Sense strand starting at position 2213 of SEQ ID NO: 3419
gugcauuguaaugguccaa

SEQ ID NO: 265931 - RNA, 19 nt, Artificial Sequence
  Description of Artificial Sequence: Synthetic oligonucleotide
  Antisense strand to SEQ ID NO: 265930
uuggaccauuacaaugcac

SEQ ID NO: 265932 - RNA, 19 nt, Artificial Sequence
  Description of Artificial Sequence: Synthetic oligonucleotide
  Sense strand starting at position 2217 of SEQ ID NO: 3419
auuguaaugguccaagcau

SEQ ID NO: 265933 - RNA, 19 nt, Artificial Sequence
  Description of Artificial Sequence: Synthetic oligonucleotide
  Antisense strand to SEQ ID NO: 265932
augcuuggaccauuacaau

SEQ ID NO: 265934 - RNA, 19 nt, Artificial Sequence
  Description of Artificial Sequence: Synthetic oligonucleotide
  Sense strand starting at position 2223 of SEQ ID NO: 3419
augguccaagcauguuaau

SEQ ID NO: 265935 - RNA, 19 nt, Artificial Sequence
  Description of Artificial Sequence: Synthetic oligonucleotide
  Antisense strand to SEQ ID NO: 265934
auuaacaugcuuggaccau

SEQ ID NO: 265936 - RNA, 19 nt, Artificial Sequence
  Description of Artificial Sequence: Synthetic oligonucleotide
  Sense strand starting at position 2319 of SEQ ID NO: 3419
cagagcaacgcagaugauu

SEQ ID NO: 265937 - RNA, 19 nt, Artificial Sequence
  Description of Artificial Sequence: Synthetic oligonucleotide
  Antisense strand to SEQ ID NO: 265936
aaucaucugcguugcucug

SEQ ID NO: 265938 - RNA, 19 nt, Artificial Sequence
  Description of Artificial Sequence: Synthetic oligonucleotide
  Sense strand starting at position 2391 of SEQ ID NO: 3419
gaacucaaucuguguugcu

SEQ ID NO: 265939 - RNA, 19 nt, Artificial Sequence
  Description of Artificial Sequence: Synthetic oligonucleotide
  Antisense strand to SEQ ID NO: 265938
agcaacacagauugaguuc

SEQ ID NO: 265940 - RNA, 19 nt, Artificial Sequence
  Description of Artificial Sequence: Synthetic oligonucleotide
  Sense strand starting at position 2520 of SEQ ID NO: 3419
agccuuucucacuggaauu

SEQ ID NO: 265941 - RNA, 19 nt, Artificial Sequence
  Description of Artificial Sequence: Synthetic oligonucleotide
  Antisense strand to SEQ ID NO: 265940
aauuccagugagaaaggcu

SEQ ID NO: 265942 - RNA, 19 nt, Artificial Sequence
  Description of Artificial Sequence: Synthetic oligonucleotide
  Sense strand starting at position 2530 of SEQ ID NO: 3419
acuggaauuucugggaauu

SEQ ID NO: 265943 - RNA, 19 nt, Artificial Sequence
  Description of Artificial Sequence: Synthetic oligonucleotide
  Antisense strand to SEQ ID NO: 265942
aauucccagaaauuccagu

SEQ ID NO: 265944 - RNA, 19 nt, Artificial Sequence
  Description of Artificial Sequence: Synthetic oligonucleotide
  Sense strand starting at position 2607 of SEQ ID NO: 3419
ucuagcucccaauguguua

SEQ ID NO: 265945 - RNA, 19 nt, Artificial Sequence
  Description of Artificial Sequence: Synthetic oligonucleotide
  Antisense strand to SEQ ID NO: 265944
uaacacauugggagcuaga

SEQ ID NO: 265946 - RNA, 19 nt, Artificial Sequence
  Description of Artificial Sequence: Synthetic oligonucleotide
  Sense strand starting at position 2644 of SEQ ID NO: 3419
aagguauucuagcccguca

SEQ ID NO: 265947 - RNA, 19 nt, Artificial Sequence
  Description of Artificial Sequence: Synthetic oligonucleotide
  Antisense strand to SEQ ID NO: 265946
ugacgggcuagaauaccuu

SEQ ID NO: 265948 - RNA, 19 nt, Artificial Sequence
  Description of Artificial Sequence: Synthetic oligonucleotide
  Sense strand starting at position 2649 of SEQ ID NO: 3419
auucuagcccgucaauauu

SEQ ID NO: 265949 - RNA, 19 nt, Artificial Sequence
  Description of Artificial Sequence: Synthetic oligonucleotide
  Antisense strand to SEQ ID NO: 265948
aauauugacgggcuagaau

SEQ ID NO: 265950 - RNA, 19 nt, Artificial Sequence
  Description of Artificial Sequence: Synthetic oligonucleotide
  Sense strand starting at position 2704 of SEQ ID NO: 3419
gguggcuuacucuaaccua

SEQ ID NO: 265951 - RNA, 19 nt, Artificial Sequence
  Description of Artificial Sequence: Synthetic oligonucleotide
  Antisense strand to SEQ ID NO: 265950
uagguuagaguaagccacc

SEQ ID NO: 265952 - RNA, 19 nt, Artificial Sequence
  Description of Artificial Sequence: Synthetic oligonucleotide
  Sense strand starting at position 2800 of SEQ ID NO: 3419
ugaggcccuaccugagaua

SEQ ID NO: 265953 - RNA, 19 nt, Artificial Sequence
  Description of Artificial Sequence: Synthetic oligonucleotide
  Antisense strand to SEQ ID NO: 265952
uaucucagguagggccuca

SEQ ID NO: 265954 - RNA, 19 nt, Artificial Sequence
  Description of Artificial Sequence: Synthetic oligonucleotide
  Sense strand starting at position 2983 of SEQ ID NO: 3419
gcuaauauuucugauauug

SEQ ID NO: 265955 - RNA, 19 nt, Artificial Sequence
  Description of Artificial Sequence: Synthetic oligonucleotide
  Antisense strand to SEQ ID NO: 265954
caauaucagaaauauuagc

SEQ ID NO: 265956 - RNA, 19 nt, Artificial Sequence
  Description of Artificial Sequence: Synthetic oligonucleotide
  Sense strand starting at position 2988 of SEQ ID NO: 3419
uauuucugauauugugaag

SEQ ID NO: 265957 - RNA, 19 nt, Artificial Sequence
  Description of Artificial Sequence: Synthetic oligonucleotide
  Antisense strand to SEQ ID NO: 265956
cuucacaauaucagaaaua

SEQ ID NO: 265958 - RNA, 19 nt, Artificial Sequence
  Description of Artificial Sequence: Synthetic oligonucleotide
  Sense strand starting at position 3002 of SEQ ID NO: 3419
ugaagacaggucuagcuau

SEQ ID NO: 265959 - RNA, 19 nt, Artificial Sequence
  Description of Artificial Sequence: Synthetic oligonucleotide
  Antisense strand to SEQ ID NO: 265958
auagcuagaccugucuuca

SEQ ID NO: 265960 - RNA, 19 nt, Artificial Sequence
  Description of Artificial Sequence: Synthetic oligonucleotide
  Sense strand starting at position 3347 of SEQ ID NO: 3419
ucucaugagagguauguau

SEQ ID NO: 265961 - RNA, 19 nt, Artificial Sequence
  Description of Artificial Sequence: Synthetic oligonucleotide
  Antisense strand to SEQ ID NO: 265960
auacauaccucucaugaga

SEQ ID NO: 265962 - RNA, 19 nt, Artificial Sequence
  Description of Artificial Sequence: Synthetic oligonucleotide
  Sense strand starting at position 3351 of SEQ ID NO: 3419
augagagguauguauggca

SEQ ID NO: 265963 - RNA, 19 nt, Artificial Sequence
  Description of Artificial Sequence: Synthetic oligonucleotide
  Antisense strand to SEQ ID NO: 265962
ugccauacauaccucucau

SEQ ID NO: 265964 - RNA, 19 nt, Artificial Sequence
  Description of Artificial Sequence: Synthetic oligonucleotide
  Sense strand starting at position 3363 of SEQ ID NO: 3419
uauggcaucuuauuaggga

SEQ ID NO: 265965 - RNA, 19 nt, Artificial Sequence
  Description of Artificial Sequence: Synthetic oligonucleotide
  Antisense strand to SEQ ID NO: 265964
ucccuaauaagaugccaua

SEQ ID NO: 265966 - RNA, 19 nt, Artificial Sequence
  Description of Artificial Sequence: Synthetic oligonucleotide
  Sense strand starting at position 3394 of SEQ ID NO: 3419
gccucagacugucuggaaa

SEQ ID NO: 265967 - RNA, 19 nt, Artificial Sequence
  Description of Artificial Sequence: Synthetic oligonucleotide
  Antisense strand to SEQ ID NO: 265966
uuuccagacagucugaggc

SEQ ID NO: 265968 - RNA, 19 nt, Artificial Sequence
  Description of Artificial Sequence: Synthetic oligonucleotide
  Sense strand starting at position 3519 of SEQ ID NO: 3419
ggucauucugaggagcuaa

SEQ ID NO: 265969 - RNA, 19 nt, Artificial Sequence
  Description of Artificial Sequence: Synthetic oligonucleotide
  Antisense strand to SEQ ID NO: 265968
uuagcuccucagaaugacc

SEQ ID NO: 265970 - RNA, 19 nt, Artificial Sequence
  Description of Artificial Sequence: Synthetic oligonucleotide
  Sense strand starting at position 3584 of SEQ ID NO: 3419
cacacucuguguuuguuua

SEQ ID NO: 265971 - RNA, 19 nt, Artificial Sequence
  Description of Artificial Sequence: Synthetic oligonucleotide
  Antisense strand to SEQ ID NO: 265970
uaaacaaacacagagugug

SEQ ID NO: 265972 - RNA, 19 nt, Artificial Sequence
  Description of Artificial Sequence: Synthetic oligonucleotide
  Sense strand starting at position 3585 of SEQ ID NO: 3419
acacucuguguuuguuuau

SEQ ID NO: 265973 - RNA, 19 nt, Artificial Sequence
  Description of Artificial Sequence: Synthetic oligonucleotide
  Antisense strand to SEQ ID NO: 265972
auaaacaaacacagagugu

SEQ ID NO: 265974 - RNA, 19 nt, Artificial Sequence
  Description of Artificial Sequence: Synthetic oligonucleotide
  Sense strand starting at position 3588 of SEQ ID NO: 3419
cucuguguuuguuuauuga

SEQ ID NO: 265975 - RNA, 19 nt, Artificial Sequence
  Description of Artificial Sequence: Synthetic oligonucleotide
  Antisense strand to SEQ ID NO: 265974
ucaauaaacaaacacagag

SEQ ID NO: 265976 - RNA, 19 nt, Artificial Sequence
  Description of Artificial Sequence: Synthetic oligonucleotide
  Sense strand starting at position 3644 of SEQ ID NO: 3419
auggcacuuuggcauuuaa

SEQ ID NO: 265977 - RNA, 19 nt, Artificial Sequence
  Description of Artificial Sequence: Synthetic oligonucleotide
  Antisense strand to SEQ ID NO: 265976
uuaaaugccaaagugccau

SEQ ID NO: 265978 - RNA, 19 nt, Artificial Sequence
  Description of Artificial Sequence: Synthetic oligonucleotide
  Sense strand starting at position 3861 of SEQ ID NO: 3419
ucaugaaaccaacgcauaa

SEQ ID NO: 265979 - RNA, 19 nt, Artificial Sequence
  Description of Artificial Sequence: Synthetic oligonucleotide
  Antisense strand to SEQ ID NO: 265978
uuaugcguugguuucauga

SEQ ID NO: 265980 - RNA, 19 nt, Artificial Sequence
  Description of Artificial Sequence: Synthetic oligonucleotide
  Sense strand starting at position 102 of SEQ ID NO: 3420
cguccugagaacugagaca

SEQ ID NO: 265981 - RNA, 19 nt, Artificial Sequence
  Description of Artificial Sequence: Synthetic oligonucleotide
  Antisense strand to SEQ ID NO: 265980
ugucucaguucucaggacg

SEQ ID NO: 265982 - RNA, 19 nt, Artificial Sequence
  Description of Artificial Sequence: Synthetic oligonucleotide
  Sense strand starting at position 181 of SEQ ID NO: 3420
guacgauuuggucauguuu

SEQ ID NO: 265983 - RNA, 19 nt, Artificial Sequence
  Description of Artificial Sequence: Synthetic oligonucleotide
  Antisense strand to SEQ ID NO: 265982
aaacaugaccaaaucguac

SEQ ID NO: 265984 - RNA, 19 nt, Artificial Sequence
  Description of Artificial Sequence: Synthetic oligonucleotide
  Sense strand starting at position 195 of SEQ ID NO: 3420
uguuucgauuuccuacauu

SEQ ID NO: 265985 - RNA, 19 nt, Artificial Sequence
  Description of Artificial Sequence: Synthetic oligonucleotide
  Antisense strand to SEQ ID NO: 265984
aauguaggaaaucgaaaca

SEQ ID NO: 265986 - RNA, 19 nt, Artificial Sequence
  Description of Artificial Sequence: Synthetic oligonucleotide
  Sense strand starting at position 430 of SEQ ID NO: 3420
gaggguagugaauauguau

SEQ ID NO: 265987 - RNA, 19 nt, Artificial Sequence
  Description of Artificial Sequence: Synthetic oligonucleotide
  Antisense strand to SEQ ID NO: 265986
auacauauucacuacccuc

SEQ ID NO: 265988 - RNA, 19 nt, Artificial Sequence
  Description of Artificial Sequence: Synthetic oligonucleotide
  Sense strand starting at position 436 of SEQ ID NO: 3420
agugaauauguauaugugu

SEQ ID NO: 265989 - RNA, 19 nt, Artificial Sequence
  Description of Artificial Sequence: Synthetic oligonucleotide
  Antisense strand to SEQ ID NO: 265988
acacauauacauauucacu

SEQ ID NO: 265990 - RNA, 19 nt, Artificial Sequence
  Description of Artificial Sequence: Synthetic oligonucleotide
  Sense strand starting at position 463 of SEQ ID NO: 3420
cacgcauauguguuuguau

SEQ ID NO: 265991 - RNA, 19 nt, Artificial Sequence
  Description of Artificial Sequence: Synthetic oligonucleotide
  Antisense strand to SEQ ID NO: 265990
auacaaacacauaugcgug

SEQ ID NO: 265992 - RNA, 19 nt, Artificial Sequence
  Description of Artificial Sequence: Synthetic oligonucleotide
  Sense strand starting at position 478 of SEQ ID NO: 3420
guauccuagugauuaacuu

SEQ ID NO: 265993 - RNA, 19 nt, Artificial Sequence
  Description of Artificial Sequence: Synthetic oligonucleotide
  Antisense strand to SEQ ID NO: 265992
aaguuaaucacuaggauac

SEQ ID NO: 265994 - RNA, 19 nt, Artificial Sequence
  Description of Artificial Sequence: Synthetic oligonucleotide
  Sense strand starting at position 534 of SEQ ID NO: 3420
uguggaaaugacuguacau

SEQ ID NO: 265995 - RNA, 19 nt, Artificial Sequence
  Description of Artificial Sequence: Synthetic oligonucleotide
  Antisense strand to SEQ ID NO: 265994
auguacagucauuuccaca

SEQ ID NO: 265996 - RNA, 19 nt, Artificial Sequence
  Description of Artificial Sequence: Synthetic oligonucleotide
  Sense strand starting at position 686 of SEQ ID NO: 3420
acagccauugcguaauuua

SEQ ID NO: 265997 - RNA, 19 nt, Artificial Sequence
  Description of Artificial Sequence: Synthetic oligonucleotide
  Antisense strand to SEQ ID NO: 265996
uaaauuacgcaauggcugu

SEQ ID NO: 265998 - RNA, 19 nt, Artificial Sequence
  Description of Artificial Sequence: Synthetic oligonucleotide
  Sense strand starting at position 689 of SEQ ID NO: 3420
gccauugcguaauuuacua

SEQ ID NO: 265999 - RNA, 19 nt, Artificial Sequence
  Description of Artificial Sequence: Synthetic oligonucleotide
  Antisense strand to SEQ ID NO: 265998
uaguaaauuacgcaauggc

SEQ ID NO: 266000 - RNA, 19 nt, Artificial Sequence
  Description of Artificial Sequence: Synthetic oligonucleotide
  Sense strand starting at position 693 of SEQ ID NO: 3420
uugcguaauuuacuaauac

SEQ ID NO: 266001 - RNA, 19 nt, Artificial Sequence
  Description of Artificial Sequence: Synthetic oligonucleotide
  Antisense strand to SEQ ID NO: 266000
guauuaguaaauuacgcaa

SEQ ID NO: 266002 - RNA, 19 nt, Artificial Sequence
  Description of Artificial Sequence: Synthetic oligonucleotide
  Sense strand starting at position 730 of SEQ ID NO: 3420
agauuacaucgacgggaua

SEQ ID NO: 266003 - RNA, 19 nt, Artificial Sequence
  Description of Artificial Sequence: Synthetic oligonucleotide
  Antisense strand to SEQ ID NO: 266002
uaucccgucgauguaaucu

SEQ ID NO: 266004 - RNA, 19 nt, Artificial Sequence
  Description of Artificial Sequence: Synthetic oligonucleotide
  Sense strand starting at position 732 of SEQ ID NO: 3420
auuacaucgacgggauacu

SEQ ID NO: 266005 - RNA, 19 nt, Artificial Sequence
  Description of Artificial Sequence: Synthetic oligonucleotide
  Antisense strand to SEQ ID NO: 266004
aguaucccgucgauguaau

SEQ ID NO: 266006 - RNA, 19 nt, Artificial Sequence
  Description of Artificial Sequence: Synthetic oligonucleotide
  Sense strand starting at position 1081 of SEQ ID NO: 3420
uaauuauaauggucagcga

SEQ ID NO: 266007 - RNA, 19 nt, Artificial Sequence
  Description of Artificial Sequence: Synthetic oligonucleotide
  Antisense strand to SEQ ID NO: 266006
ucgcugaccauuauaauua

SEQ ID NO: 266008 - RNA, 19 nt, Artificial Sequence
  Description of Artificial Sequence: Synthetic oligonucleotide
  Sense strand starting at position 1082 of SEQ ID NO: 3420
aauuauaauggucagcgau

SEQ ID NO: 266009 - RNA, 19 nt, Artificial Sequence
  Description of Artificial Sequence: Synthetic oligonucleotide
  Antisense strand to SEQ ID NO: 266008
aucgcugaccauuauaauu

SEQ ID NO: 266010 - RNA, 19 nt, Artificial Sequence
  Description of Artificial Sequence: Synthetic oligonucleotide
  Sense strand starting at position 1111 of SEQ ID NO: 3420
gaaguugccgcuucuagua

SEQ ID NO: 266011 - RNA, 19 nt, Artificial Sequence
  Description of Artificial Sequence: Synthetic oligonucleotide
  Antisense strand to SEQ ID NO: 266010
uacuagaagcggcaacuuc

SEQ ID NO: 266012 - RNA, 19 nt, Artificial Sequence
  Description of Artificial Sequence: Synthetic oligonucleotide
  Sense strand starting at position 1159 of SEQ ID NO: 3420
cugaauuucuggcuccagu

SEQ ID NO: 266013 - RNA, 19 nt, Artificial Sequence
  Description of Artificial Sequence: Synthetic oligonucleotide
  Antisense strand to SEQ ID NO: 266012
acuggagccagaaauucag

SEQ ID NO: 266014 - RNA, 19 nt, Artificial Sequence
  Description of Artificial Sequence: Synthetic oligonucleotide
  Sense strand starting at position 1299 of SEQ ID NO: 3420
uggugugaauacucaaggu

SEQ ID NO: 266015 - RNA, 19 nt, Artificial Sequence
  Description of Artificial Sequence: Synthetic oligonucleotide
  Antisense strand to SEQ ID NO: 266014
accuugaguauucacacca

SEQ ID NO: 266016 - RNA, 19 nt, Artificial Sequence
  Description of Artificial Sequence: Synthetic oligonucleotide
  Sense strand starting at position 1437 of SEQ ID NO: 3420
aagugaagucauuauugcu

SEQ ID NO: 266017 - RNA, 19 nt, Artificial Sequence
  Description of Artificial Sequence: Synthetic oligonucleotide
  Antisense strand to SEQ ID NO: 266016
agcaauaaugacuucacuu

SEQ ID NO: 266018 - RNA, 19 nt, Artificial Sequence
  Description of Artificial Sequence: Synthetic oligonucleotide
  Sense strand starting at position 1482 of SEQ ID NO: 3420
agauaaucauaguuaccgu

SEQ ID NO: 266019 - RNA, 19 nt, Artificial Sequence
  Description of Artificial Sequence: Synthetic oligonucleotide
  Antisense strand to SEQ ID NO: 266018
acgguaacuaugauuaucu

SEQ ID NO: 266020 - RNA, 19 nt, Artificial Sequence
  Description of Artificial Sequence: Synthetic oligonucleotide
  Sense strand starting at position 1617 of SEQ ID NO: 3420
ugaguacuuaugggcaauu

SEQ ID NO: 266021 - RNA, 19 nt, Artificial Sequence
  Description of Artificial Sequence: Synthetic oligonucleotide
  Antisense strand to SEQ ID NO: 266020
aauugcccauaaguacuca

SEQ ID NO: 266022 - RNA, 19 nt, Artificial Sequence
  Description of Artificial Sequence: Synthetic oligonucleotide
  Sense strand starting at position 1618 of SEQ ID NO: 3420
gaguacuuaugggcaauua

SEQ ID NO: 266023 - RNA, 19 nt, Artificial Sequence
  Description of Artificial Sequence: Synthetic oligonucleotide
  Antisense strand to SEQ ID NO: 266022
uaauugcccauaaguacuc

SEQ ID NO: 266024 - RNA, 19 nt, Artificial Sequence
  Description of Artificial Sequence: Synthetic oligonucleotide
  Sense strand starting at position 1619 of SEQ ID NO: 3420
aguacuuaugggcaauuau

SEQ ID NO: 266025 - RNA, 19 nt, Artificial Sequence
  Description of Artificial Sequence: Synthetic oligonucleotide
  Antisense strand to SEQ ID NO: 266024
auaauugcccauaaguacu

SEQ ID NO: 266026 - RNA, 19 nt, Artificial Sequence
  Description of Artificial Sequence: Synthetic oligonucleotide
  Sense strand starting at position 1864 of SEQ ID NO: 3420
gcgggcgcucagguuauau

SEQ ID NO: 266027 - RNA, 19 nt, Artificial Sequence
  Description of Artificial Sequence: Synthetic oligonucleotide
  Antisense strand to SEQ ID NO: 266026
auauaaccugagcgcccgc

SEQ ID NO: 266028 - RNA, 19 nt, Artificial Sequence
  Description of Artificial Sequence: Synthetic oligonucleotide
  Sense strand starting at position 2334 of SEQ ID NO: 3420
aauguuaacuaggucuaga

SEQ ID NO: 266029 - RNA, 19 nt, Artificial Sequence
  Description of Artificial Sequence: Synthetic oligonucleotide
  Antisense strand to SEQ ID NO: 266028
ucuagaccuaguuaacauu

SEQ ID NO: 266030 - RNA, 19 nt, Artificial Sequence
  Description of Artificial Sequence: Synthetic oligonucleotide
  Sense strand starting at position 2337 of SEQ ID NO: 3420
guuaacuaggucuagauca

SEQ ID NO: 266031 - RNA, 19 nt, Artificial Sequence
  Description of Artificial Sequence: Synthetic oligonucleotide
  Antisense strand to SEQ ID NO: 266030
ugaucuagaccuaguuaac

SEQ ID NO: 266032 - RNA, 19 nt, Artificial Sequence
  Description of Artificial Sequence: Synthetic oligonucleotide
  Sense strand starting at position 2451 of SEQ ID NO: 3420
ucgauuucuuguccugaca

SEQ ID NO: 266033 - RNA, 19 nt, Artificial Sequence
  Description of Artificial Sequence: Synthetic oligonucleotide
  Antisense strand to SEQ ID NO: 266032
ugucaggacaagaaaucga

SEQ ID NO: 266034 - RNA, 19 nt, Artificial Sequence
  Description of Artificial Sequence: Synthetic oligonucleotide
  Sense strand starting at position 2548 of SEQ ID NO: 3420
gaucauuggcgccaaagga

SEQ ID NO: 266035 - RNA, 19 nt, Artificial Sequence
  Description of Artificial Sequence: Synthetic oligonucleotide
  Antisense strand to SEQ ID NO: 266034
uccuuuggcgccaaugauc

SEQ ID NO: 266036 - RNA, 19 nt, Artificial Sequence
  Description of Artificial Sequence: Synthetic oligonucleotide
  Sense strand starting at position 2819 of SEQ ID NO: 3420
ccaggaucuuguccucaaa

SEQ ID NO: 266037 - RNA, 19 nt, Artificial Sequence
  Description of Artificial Sequence: Synthetic oligonucleotide
  Antisense strand to SEQ ID NO: 266036
uuugaggacaagauccugg

SEQ ID NO: 266038 - RNA, 19 nt, Artificial Sequence
  Description of Artificial Sequence: Synthetic oligonucleotide
  Sense strand starting at position 2873 of SEQ ID NO: 3420
uggccuuugcgcucucuua

SEQ ID NO: 266039 - RNA, 19 nt, Artificial Sequence
  Description of Artificial Sequence: Synthetic oligonucleotide
  Antisense strand to SEQ ID NO: 266038
uaagagagcgcaaaggcca

SEQ ID NO: 266040 - RNA, 19 nt, Artificial Sequence
  Description of Artificial Sequence: Synthetic oligonucleotide
  Sense strand starting at position 2874 of SEQ ID NO: 3420
ggccuuugcgcucucuuau

SEQ ID NO: 266041 - RNA, 19 nt, Artificial Sequence
  Description of Artificial Sequence: Synthetic oligonucleotide
  Antisense strand to SEQ ID NO: 266040
auaagagagcgcaaaggcc

SEQ ID NO: 266042 - RNA, 19 nt, Artificial Sequence
  Description of Artificial Sequence: Synthetic oligonucleotide
  Sense strand starting at position 3118 of SEQ ID NO: 3420
uguauaagauacuugauuc

SEQ ID NO: 266043 - RNA, 19 nt, Artificial Sequence
  Description of Artificial Sequence: Synthetic oligonucleotide
  Antisense strand to SEQ ID NO: 266042
gaaucaaguaucuuauaca

SEQ ID NO: 266044 - RNA, 19 nt, Artificial Sequence
  Description of Artificial Sequence: Synthetic oligonucleotide
  Sense strand starting at position 3189 of SEQ ID NO: 3420
uccgaucucuuucuagaaa

SEQ ID NO: 266045 - RNA, 19 nt, Artificial Sequence
  Description of Artificial Sequence: Synthetic oligonucleotide
  Antisense strand to SEQ ID NO: 266044
uuucuagaaagagaucgga

SEQ ID NO: 266046 - RNA, 19 nt, Artificial Sequence
  Description of Artificial Sequence: Synthetic oligonucleotide
  Sense strand starting at position 3228 of SEQ ID NO: 3420
aaggauuaauggcugcgaa

SEQ ID NO: 266047 - RNA, 19 nt, Artificial Sequence
  Description of Artificial Sequence: Synthetic oligonucleotide
  Antisense strand to SEQ ID NO: 266046
uucgcagccauuaauccuu

SEQ ID NO: 266048 - RNA, 19 nt, Artificial Sequence
  Description of Artificial Sequence: Synthetic oligonucleotide
  Sense strand starting at position 3241 of SEQ ID NO: 3420
ugcgaacuccuccagacuu

SEQ ID NO: 266049 - RNA, 19 nt, Artificial Sequence
  Description of Artificial Sequence: Synthetic oligonucleotide
  Antisense strand to SEQ ID NO: 266048
aagucuggaggaguucgca

SEQ ID NO: 266050 - RNA, 19 nt, Artificial Sequence
  Description of Artificial Sequence: Synthetic oligonucleotide
  Sense strand starting at position 3307 of SEQ ID NO: 3420
acagaaauucucgaccagu

SEQ ID NO: 266051 - RNA, 19 nt, Artificial Sequence
  Description of Artificial Sequence: Synthetic oligonucleotide
  Antisense strand to SEQ ID NO: 266050
acuggucgagaauuucugu

SEQ ID NO: 266052 - RNA, 19 nt, Artificial Sequence
  Description of Artificial Sequence: Synthetic oligonucleotide
  Sense strand starting at position 3310 of SEQ ID NO: 3420
gaaauucucgaccaguucu

SEQ ID NO: 266053 - RNA, 19 nt, Artificial Sequence
  Description of Artificial Sequence: Synthetic oligonucleotide
  Antisense strand to SEQ ID NO: 266052
agaacuggucgagaauuuc

SEQ ID NO: 266054 - RNA, 19 nt, Artificial Sequence
  Description of Artificial Sequence: Synthetic oligonucleotide
  Sense strand starting at position 3521 of SEQ ID NO: 3420
uuacgugaauugcuuauuu

SEQ ID NO: 266055 - RNA, 19 nt, Artificial Sequence
  Description of Artificial Sequence: Synthetic oligonucleotide
  Antisense strand to SEQ ID NO: 266054
aaauaagcaauucacguaa

SEQ ID NO: 266056 - RNA, 19 nt, Artificial Sequence
  Description of Artificial Sequence: Synthetic oligonucleotide
  Sense strand starting at position 3542 of SEQ ID NO: 3420
aggcaauugcacuaaacau

SEQ ID NO: 266057 - RNA, 19 nt, Artificial Sequence
  Description of Artificial Sequence: Synthetic oligonucleotide
  Antisense strand to SEQ ID NO: 266056
auguuuagugcaauugccu

SEQ ID NO: 266058 - RNA, 19 nt, Artificial Sequence
  Description of Artificial Sequence: Synthetic oligonucleotide
  Sense strand starting at position 3925 of SEQ ID NO: 3420
aguacuagcccuuagaaga

SEQ ID NO: 266059 - RNA, 19 nt, Artificial Sequence
  Description of Artificial Sequence: Synthetic oligonucleotide
  Antisense strand to SEQ ID NO: 266058
ucuucuaagggcuaguacu

SEQ ID NO: 266060 - RNA, 19 nt, Artificial Sequence
  Description of Artificial Sequence: Synthetic oligonucleotide
  Sense strand starting at position 214 of SEQ ID NO: 3421
acugaugugaguuaugcau

SEQ ID NO: 266061 - RNA, 19 nt, Artificial Sequence
  Description of Artificial Sequence: Synthetic oligonucleotide
  Antisense strand to SEQ ID NO: 266060
augcauaacucacaucagu

SEQ ID NO: 266062 - RNA, 19 nt, Artificial Sequence
  Description of Artificial Sequence: Synthetic oligonucleotide
  Sense strand starting at position 292 of SEQ ID NO: 3421
ucaaguuguucuuugcuua

SEQ ID NO: 266063 - RNA, 19 nt, Artificial Sequence
  Description of Artificial Sequence: Synthetic oligonucleotide
  Antisense strand to SEQ ID NO: 266062
uaagcaaagaacaacuuga

SEQ ID NO: 266064 - RNA, 19 nt, Artificial Sequence
  Description of Artificial Sequence: Synthetic oligonucleotide
  Sense strand starting at position 295 of SEQ ID NO: 3421
aguuguucuuugcuuaaca

SEQ ID NO: 266065 - RNA, 19 nt, Artificial Sequence
  Description of Artificial Sequence: Synthetic oligonucleotide
  Antisense strand to SEQ ID NO: 266064
uguuaagcaaagaacaacu

SEQ ID NO: 266066 - RNA, 19 nt, Artificial Sequence
  Description of Artificial Sequence: Synthetic oligonucleotide
  Sense strand starting at position 324 of SEQ ID NO: 3421
agaugagaggccuguccua

SEQ ID NO: 266067 - RNA, 19 nt, Artificial Sequence
  Description of Artificial Sequence: Synthetic oligonucleotide
  Antisense strand to SEQ ID NO: 266066
uaggacaggccucucaucu

SEQ ID NO: 266068 - RNA, 19 nt, Artificial Sequence
  Description of Artificial Sequence: Synthetic oligonucleotide
  Sense strand starting at position 366 of SEQ ID NO: 3421
auaaucucaucggucuauu

SEQ ID NO: 266069 - RNA, 19 nt, Artificial Sequence
  Description of Artificial Sequence: Synthetic oligonucleotide
  Antisense strand to SEQ ID NO: 266068
aauagaccgaugagauuau

SEQ ID NO: 266070 - RNA, 19 nt, Artificial Sequence
  Description of Artificial Sequence: Synthetic oligonucleotide
  Sense strand starting at position 399 of SEQ ID NO: 3421
aucccucaucuaggaaagu

SEQ ID NO: 266071 - RNA, 19 nt, Artificial Sequence
  Description of Artificial Sequence: Synthetic oligonucleotide
  Antisense strand to SEQ ID NO: 266070
acuuuccuagaugagggau

SEQ ID NO: 266072 - RNA, 19 nt, Artificial Sequence
  Description of Artificial Sequence: Synthetic oligonucleotide
  Sense strand starting at position 408 of SEQ ID NO: 3421
cuaggaaagugcuuuaucu

SEQ ID NO: 266073 - RNA, 19 nt, Artificial Sequence
  Description of Artificial Sequence: Synthetic oligonucleotide
  Antisense strand to SEQ ID NO: 266072
agauaaagcacuuuccuag

SEQ ID NO: 266074 - RNA, 19 nt, Artificial Sequence
  Description of Artificial Sequence: Synthetic oligonucleotide
  Sense strand starting at position 410 of SEQ ID NO: 3421
aggaaagugcuuuaucucu

SEQ ID NO: 266075 - RNA, 19 nt, Artificial Sequence
  Description of Artificial Sequence: Synthetic oligonucleotide
  Antisense strand to SEQ ID NO: 266074
agagauaaagcacuuuccu

SEQ ID NO: 266076 - RNA, 19 nt, Artificial Sequence
  Description of Artificial Sequence: Synthetic oligonucleotide
  Sense strand starting at position 415 of SEQ ID NO: 3421
agugcuuuaucucuccaag

SEQ ID NO: 266077 - RNA, 19 nt, Artificial Sequence
  Description of Artificial Sequence: Synthetic oligonucleotide
  Antisense strand to SEQ ID NO: 266076
cuuggagagauaaagcacu

SEQ ID NO: 266078 - RNA, 19 nt, Artificial Sequence
  Description of Artificial Sequence: Synthetic oligonucleotide
  Sense strand starting at position 702 of SEQ ID NO: 3421
uaugcaaaucgaugucuga

SEQ ID NO: 266079 - RNA, 19 nt, Artificial Sequence
  Description of Artificial Sequence: Synthetic oligonucleotide
  Antisense strand to SEQ ID NO: 266078
ucagacaucgauuugcaua

SEQ ID NO: 266080 - RNA, 19 nt, Artificial Sequence
  Description of Artificial Sequence: Synthetic oligonucleotide
  Sense strand starting at position 705 of SEQ ID NO: 3421
gcaaaucgaugucugauua

SEQ ID NO: 266081 - RNA, 19 nt, Artificial Sequence
  Description of Artificial Sequence: Synthetic oligonucleotide
  Antisense strand to SEQ ID NO: 266080
uaaucagacaucgauuugc

SEQ ID NO: 266082 - RNA, 19 nt, Artificial Sequence
  Description of Artificial Sequence: Synthetic oligonucleotide
  Sense strand starting at position 709 of SEQ ID NO: 3421
aucgaugucugauuacaaa

SEQ ID NO: 266083 - RNA, 19 nt, Artificial Sequence
  Description of Artificial Sequence: Synthetic oligonucleotide
  Antisense strand to SEQ ID NO: 266082
uuuguaaucagacaucgau

SEQ ID NO: 266084 - RNA, 19 nt, Artificial Sequence
  Description of Artificial Sequence: Synthetic oligonucleotide
  Sense strand starting at position 772 of SEQ ID NO: 3421
cacuuaaugcgguacauau

SEQ ID NO: 266085 - RNA, 19 nt, Artificial Sequence
  Description of Artificial Sequence: Synthetic oligonucleotide
  Antisense strand to SEQ ID NO: 266084
auauguaccgcauuaagug

SEQ ID NO: 266086 - RNA, 19 nt, Artificial Sequence
  Description of Artificial Sequence: Synthetic oligonucleotide
  Sense strand starting at position 963 of SEQ ID NO: 3421
uuaaauaaaucggaaggua

SEQ ID NO: 266087 - RNA, 19 nt, Artificial Sequence
  Description of Artificial Sequence: Synthetic oligonucleotide
  Antisense strand to SEQ ID NO: 266086
uaccuuccgauuuauuuaa

SEQ ID NO: 266088 - RNA, 19 nt, Artificial Sequence
  Description of Artificial Sequence: Synthetic oligonucleotide
  Sense strand starting at position 1153 of SEQ ID NO: 3421
gcauaaacguauuuacugu

SEQ ID NO: 266089 - RNA, 19 nt, Artificial Sequence
  Description of Artificial Sequence: Synthetic oligonucleotide
  Antisense strand to SEQ ID NO: 266088
acaguaaauacguuuaugc

SEQ ID NO: 266090 - RNA, 19 nt, Artificial Sequence
  Description of Artificial Sequence: Synthetic oligonucleotide
  Sense strand starting at position 1370 of SEQ ID NO: 3421
ggaacauguuaagaaauug

SEQ ID NO: 266091 - RNA, 19 nt, Artificial Sequence
  Description of Artificial Sequence: Synthetic oligonucleotide
  Antisense strand to SEQ ID NO: 266090
caauuucuuaacauguucc

SEQ ID NO: 266092 - RNA, 19 nt, Artificial Sequence
  Description of Artificial Sequence: Synthetic oligonucleotide
  Sense strand starting at position 1375 of SEQ ID NO: 3421
auguuaagaaauugaggca

SEQ ID NO: 266093 - RNA, 19 nt, Artificial Sequence
  Description of Artificial Sequence: Synthetic oligonucleotide
  Antisense strand to SEQ ID NO: 266092
ugccucaauuucuuaacau

SEQ ID NO: 266094 - RNA, 19 nt, Artificial Sequence
  Description of Artificial Sequence: Synthetic oligonucleotide
  Sense strand starting at position 1607 of SEQ ID NO: 3421
auagcaauugcgcaacaga

SEQ ID NO: 266095 - RNA, 19 nt, Artificial Sequence
  Description of Artificial Sequence: Synthetic oligonucleotide
  Antisense strand to SEQ ID NO: 266094
ucuguugcgcaauugcuau

SEQ ID NO: 266096 - RNA, 19 nt, Artificial Sequence
  Description of Artificial Sequence: Synthetic oligonucleotide
  Sense strand starting at position 1610 of SEQ ID NO: 3421
gcaauugcgcaacagauca

SEQ ID NO: 266097 - RNA, 19 nt, Artificial Sequence
  Description of Artificial Sequence: Synthetic oligonucleotide
  Antisense strand to SEQ ID NO: 266096
ugaucuguugcgcaauugc

SEQ ID NO: 266098 - RNA, 19 nt, Artificial Sequence
  Description of Artificial Sequence: Synthetic oligonucleotide
  Sense strand starting at position 1664 of SEQ ID NO: 3421
agguuugcacgcuauaaag

SEQ ID NO: 266099 - RNA, 19 nt, Artificial Sequence
  Description of Artificial Sequence: Synthetic oligonucleotide
  Antisense strand to SEQ ID NO: 266098
cuuuauagcgugcaaaccu

SEQ ID NO: 266100 - RNA, 19 nt, Artificial Sequence
  Description of Artificial Sequence: Synthetic oligonucleotide
  Sense strand starting at position 2019 of SEQ ID NO: 3421
gccagagagugauccgaga

SEQ ID NO: 266101 - RNA, 19 nt, Artificial Sequence
  Description of Artificial Sequence: Synthetic oligonucleotide
  Antisense strand to SEQ ID NO: 266100
ucucggaucacucucuggc

SEQ ID NO: 266102 - RNA, 19 nt, Artificial Sequence
  Description of Artificial Sequence: Synthetic oligonucleotide
  Sense strand starting at position 2021 of SEQ ID NO: 3421
cagagagugauccgagaga

SEQ ID NO: 266103 - RNA, 19 nt, Artificial Sequence
  Description of Artificial Sequence: Synthetic oligonucleotide
  Antisense strand to SEQ ID NO: 266102
ucucucggaucacucucug

SEQ ID NO: 266104 - RNA, 19 nt, Artificial Sequence
  Description of Artificial Sequence: Synthetic oligonucleotide
  Sense strand starting at position 2038 of SEQ ID NO: 3421
gauggaugacuucgcaaag

SEQ ID NO: 266105 - RNA, 19 nt, Artificial Sequence
  Description of Artificial Sequence: Synthetic oligonucleotide
  Antisense strand to SEQ ID NO: 266104
cuuugcgaagucauccauc

SEQ ID NO: 266106 - RNA, 19 nt, Artificial Sequence
  Description of Artificial Sequence: Synthetic oligonucleotide
  Sense strand starting at position 3121 of SEQ ID NO: 3421
gauaaagaguuguuugcga

SEQ ID NO: 266107 - RNA, 19 nt, Artificial Sequence
  Description of Artificial Sequence: Synthetic oligonucleotide
  Antisense strand to SEQ ID NO: 266106
ucgcaaacaacucuuuauc

SEQ ID NO: 266108 - RNA, 19 nt, Artificial Sequence
  Description of Artificial Sequence: Synthetic oligonucleotide
  Sense strand starting at position 3123 of SEQ ID NO: 3421
uaaagaguuguuugcgaag

SEQ ID NO: 266109 - RNA, 19 nt, Artificial Sequence
  Description of Artificial Sequence: Synthetic oligonucleotide
  Antisense strand to SEQ ID NO: 266108
cuucgcaaacaacucuuua

SEQ ID NO: 266110 - RNA, 19 nt, Artificial Sequence
  Description of Artificial Sequence: Synthetic oligonucleotide
  Sense strand starting at position 3170 of SEQ ID NO: 3421
guuuaaacaguuggaacaa

SEQ ID NO: 266111 - RNA, 19 nt, Artificial Sequence
  Description of Artificial Sequence: Synthetic oligonucleotide
  Antisense strand to SEQ ID NO: 266110
uuguuccaacuguuuaaac

SEQ ID NO: 266112 - RNA, 19 nt, Artificial Sequence
  Description of Artificial Sequence: Synthetic oligonucleotide
  Sense strand starting at position 3274 of SEQ ID NO: 3421
cacuuuaccgcccgagaau

SEQ ID NO: 266113 - RNA, 19 nt, Artificial Sequence
  Description of Artificial Sequence: Synthetic oligonucleotide
  Antisense strand to SEQ ID NO: 266112
auucucgggcgguaaagug

SEQ ID NO: 266114 - RNA, 19 nt, Artificial Sequence
  Description of Artificial Sequence: Synthetic oligonucleotide
  Sense strand starting at position 3486 of SEQ ID NO: 3421
cuaagcucaggucgucaaa

SEQ ID NO: 266115 - RNA, 19 nt, Artificial Sequence
  Description of Artificial Sequence: Synthetic oligonucleotide
  Antisense strand to SEQ ID NO: 266114
uuugacgaccugagcuuag

SEQ ID NO: 266116 - RNA, 19 nt, Artificial Sequence
  Description of Artificial Sequence: Synthetic oligonucleotide
  Sense strand starting at position 3528 of SEQ ID NO: 3421
gucggagaguggucaguau

SEQ ID NO: 266117 - RNA, 19 nt, Artificial Sequence
  Description of Artificial Sequence: Synthetic oligonucleotide
  Antisense strand to SEQ ID NO: 266116
auacugaccacucuccgac

SEQ ID NO: 266118 - RNA, 19 nt, Artificial Sequence
  Description of Artificial Sequence: Synthetic oligonucleotide
  Sense strand starting at position 3641 of SEQ ID NO: 3421
uguguaauaccacaacaug

SEQ ID NO: 266119 - RNA, 19 nt, Artificial Sequence
  Description of Artificial Sequence: Synthetic oligonucleotide
  Antisense strand to SEQ ID NO: 266118
cauguugugguauuacaca

SEQ ID NO: 266120 - RNA, 19 nt, Artificial Sequence
  Description of Artificial Sequence: Synthetic oligonucleotide
  Sense strand starting at position 3659 of SEQ ID NO: 3421
gcuguaaucguuuacucuu

SEQ ID NO: 266121 - RNA, 19 nt, Artificial Sequence
  Description of Artificial Sequence: Synthetic oligonucleotide
  Antisense strand to SEQ ID NO: 266120
aagaguaaacgauuacagc

SEQ ID NO: 266122 - RNA, 19 nt, Artificial Sequence
  Description of Artificial Sequence: Synthetic oligonucleotide
  Sense strand starting at position 3661 of SEQ ID NO: 3421
uguaaucguuuacucuuua

SEQ ID NO: 266123 - RNA, 19 nt, Artificial Sequence
  Description of Artificial Sequence: Synthetic oligonucleotide
  Antisense strand to SEQ ID NO: 266122
uaaagaguaaacgauuaca

SEQ ID NO: 266124 - RNA, 19 nt, Artificial Sequence
  Description of Artificial Sequence: Synthetic oligonucleotide
  Sense strand starting at position 3740 of SEQ ID NO: 3421
uguauaguauuggcucauu

SEQ ID NO: 266125 - RNA, 19 nt, Artificial Sequence
  Description of Artificial Sequence: Synthetic oligonucleotide
  Antisense strand to SEQ ID NO: 266124
aaugagccaauacuauaca

SEQ ID NO: 266126 - RNA, 19 nt, Artificial Sequence
  Description of Artificial Sequence: Synthetic oligonucleotide
  Sense strand starting at position 3783 of SEQ ID NO: 3421
auugaagguuaccaauaua

SEQ ID NO: 266127 - RNA, 19 nt, Artificial Sequence
  Description of Artificial Sequence: Synthetic oligonucleotide
  Antisense strand to SEQ ID NO: 266126
uauauugguaaccuucaau

SEQ ID NO: 266128 - RNA, 19 nt, Artificial Sequence
  Description of Artificial Sequence: Synthetic oligonucleotide
  Sense strand starting at position 3800 of SEQ ID NO: 3421
uauuaaaugcuguggaauc

SEQ ID NO: 266129 - RNA, 19 nt, Artificial Sequence
  Description of Artificial Sequence: Synthetic oligonucleotide
  Antisense strand to SEQ ID NO: 266128
gauuccacagcauuuaaua

SEQ ID NO: 266130 - RNA, 19 nt, Artificial Sequence
  Description of Artificial Sequence: Synthetic oligonucleotide
  Sense strand starting at position 3802 of SEQ ID NO: 3421
uuaaaugcuguggaaucaa

SEQ ID NO: 266131 - RNA, 19 nt, Artificial Sequence
  Description of Artificial Sequence: Synthetic oligonucleotide
  Antisense strand to SEQ ID NO: 266130
uugauuccacagcauuuaa

SEQ ID NO: 266132 - RNA, 19 nt, Artificial Sequence
  Description of Artificial Sequence: Synthetic oligonucleotide
  Sense strand starting at position 3827 of SEQ ID NO: 3421
uuauguuucuccuuguuac

SEQ ID NO: 266133 - RNA, 19 nt, Artificial Sequence
  Description of Artificial Sequence: Synthetic oligonucleotide
  Antisense strand to SEQ ID NO: 266132
guaacaaggagaaacauaa

SEQ ID NO: 266134 - RNA, 19 nt, Artificial Sequence
  Description of Artificial Sequence: Synthetic oligonucleotide
  Sense strand starting at position 3858 of SEQ ID NO: 3421
uuuaaaucugcagugcgua

SEQ ID NO: 266135 - RNA, 19 nt, Artificial Sequence
  Description of Artificial Sequence: Synthetic oligonucleotide
  Antisense strand to SEQ ID NO: 266134
uacgcacugcagauuuaaa

SEQ ID NO: 266136 - RNA, 19 nt, Artificial Sequence
  Description of Artificial Sequence: Synthetic oligonucleotide
  Sense strand starting at position 3913 of SEQ ID NO: 3421
auuaaucauugcccagaga

SEQ ID NO: 266137 - RNA, 19 nt, Artificial Sequence
  Description of Artificial Sequence: Synthetic oligonucleotide
  Antisense strand to SEQ ID NO: 266136
ucucugggcaaugauuaau

SEQ ID NO: 266138 - RNA, 19 nt, Artificial Sequence
  Description of Artificial Sequence: Synthetic oligonucleotide
  Sense strand starting at position 3952 of SEQ ID NO: 3421
gaggaauauugugaacucu

SEQ ID NO: 266139 - RNA, 19 nt, Artificial Sequence
  Description of Artificial Sequence: Synthetic oligonucleotide
  Antisense strand to SEQ ID NO: 266138
agaguucacaauauuccuc

SEQ ID NO: 266140 - RNA, 19 nt, Artificial Sequence
  Description of Artificial Sequence: Synthetic oligonucleotide
  Sense strand starting at position 133 of SEQ ID NO: 3422
auguuaagaaauugaggca

SEQ ID NO: 266141 - RNA, 19 nt, Artificial Sequence
  Description of Artificial Sequence: Synthetic oligonucleotide
  Antisense strand to SEQ ID NO: 266140
ugccucaauuucuuaacau

SEQ ID NO: 266142 - RNA, 19 nt, Artificial Sequence
  Description of Artificial Sequence: Synthetic oligonucleotide
  Sense strand starting at position 365 of SEQ ID NO: 3422
auagcaauugcgcaacaga

SEQ ID NO: 266143 - RNA, 19 nt, Artificial Sequence
  Description of Artificial Sequence: Synthetic oligonucleotide
  Antisense strand to SEQ ID NO: 266142
ucuguugcgcaauugcuau

SEQ ID NO: 266144 - RNA, 19 nt, Artificial Sequence
  Description of Artificial Sequence: Synthetic oligonucleotide
  Sense strand starting at position 368 of SEQ ID NO: 3422
gcaauugcgcaacagauca

SEQ ID NO: 266145 - RNA, 19 nt, Artificial Sequence
  Description of Artificial Sequence: Synthetic oligonucleotide
  Antisense strand to SEQ ID NO: 266144
ugaucuguugcgcaauugc

SEQ ID NO: 266146 - RNA, 19 nt, Artificial Sequence
  Description of Artificial Sequence: Synthetic oligonucleotide
  Sense strand starting at position 422 of SEQ ID NO: 3422
agguuugcacgcuauaaag

SEQ ID NO: 266147 - RNA, 19 nt, Artificial Sequence
  Description of Artificial Sequence: Synthetic oligonucleotide
  Antisense strand to SEQ ID NO: 266146
cuuuauagcgugcaaaccu

SEQ ID NO: 266148 - RNA, 19 nt, Artificial Sequence
  Description of Artificial Sequence: Synthetic oligonucleotide
  Sense strand starting at position 777 of SEQ ID NO: 3422
gccagagagugauccgaga

SEQ ID NO: 266149 - RNA, 19 nt, Artificial Sequence
  Description of Artificial Sequence: Synthetic oligonucleotide
  Antisense strand to SEQ ID NO: 266148
ucucggaucacucucuggc

SEQ ID NO: 266150 - RNA, 19 nt, Artificial Sequence
  Description of Artificial Sequence: Synthetic oligonucleotide
  Sense strand starting at position 779 of SEQ ID NO: 3422
cagagagugauccgagaga

SEQ ID NO: 266151 - RNA, 19 nt, Artificial Sequence
  Description of Artificial Sequence: Synthetic oligonucleotide
  Antisense strand to SEQ ID NO: 266150
ucucucggaucacucucug

SEQ ID NO: 266152 - RNA, 19 nt, Artificial Sequence
  Description of Artificial Sequence: Synthetic oligonucleotide
  Sense strand starting at position 796 of SEQ ID NO: 3422
gauggaugacuucgcaaag

SEQ ID NO: 266153 - RNA, 19 nt, Artificial Sequence
  Description of Artificial Sequence: Synthetic oligonucleotide
  Antisense strand to SEQ ID NO: 266152
cuuugcgaagucauccauc

SEQ ID NO: 266154 - RNA, 19 nt, Artificial Sequence
  Description of Artificial Sequence: Synthetic oligonucleotide
  Sense strand starting at position 1879 of SEQ ID NO: 3422
gauaaagaguuguuugcga

SEQ ID NO: 266155 - RNA, 19 nt, Artificial Sequence
  Description of Artificial Sequence: Synthetic oligonucleotide
  Antisense strand to SEQ ID NO: 266154
ucgcaaacaacucuuuauc

SEQ ID NO: 266156 - RNA, 19 nt, Artificial Sequence
  Description of Artificial Sequence: Synthetic oligonucleotide
  Sense strand starting at position 1928 of SEQ ID NO: 3422
guuuaaacaguuggaacaa

SEQ ID NO: 266157 - RNA, 19 nt, Artificial Sequence
  Description of Artificial Sequence: Synthetic oligonucleotide
  Antisense strand to SEQ ID NO: 266156
uuguuccaacuguuuaaac

SEQ ID NO: 266158 - RNA, 19 nt, Artificial Sequence
  Description of Artificial Sequence: Synthetic oligonucleotide
  Sense strand starting at position 2399 of SEQ ID NO: 3422
uguguaauaccacaacaug

SEQ ID NO: 266159 - RNA, 19 nt, Artificial Sequence
  Description of Artificial Sequence: Synthetic oligonucleotide
  Antisense strand to SEQ ID NO: 266158
cauguugugguauuacaca

SEQ ID NO: 266160 - RNA, 19 nt, Artificial Sequence
  Description of Artificial Sequence: Synthetic oligonucleotide
  Sense strand starting at position 2558 of SEQ ID NO: 3422
uauuaaaugcuguggaauc

SEQ ID NO: 266161 - RNA, 19 nt, Artificial Sequence
  Description of Artificial Sequence: Synthetic oligonucleotide
  Antisense strand to SEQ ID NO: 266160
gauuccacagcauuuaaua

SEQ ID NO: 266162 - RNA, 19 nt, Artificial Sequence
  Description of Artificial Sequence: Synthetic oligonucleotide
  Sense strand starting at position 2560 of SEQ ID NO: 3422
uuaaaugcuguggaaucaa

SEQ ID NO: 266163 - RNA, 19 nt, Artificial Sequence
  Description of Artificial Sequence: Synthetic oligonucleotide
  Antisense strand to SEQ ID NO: 266162
uugauuccacagcauuuaa

SEQ ID NO: 266164 - RNA, 19 nt, Artificial Sequence
  Description of Artificial Sequence: Synthetic oligonucleotide
  Sense strand starting at position 2616 of SEQ ID NO: 3422
uuuaaaucugcagugcgua

SEQ ID NO: 266165 - RNA, 19 nt, Artificial Sequence
  Description of Artificial Sequence: Synthetic oligonucleotide
  Antisense strand to SEQ ID NO: 266164
uacgcacugcagauuuaaa

SEQ ID NO: 266166 - RNA, 19 nt, Artificial Sequence
  Description of Artificial Sequence: Synthetic oligonucleotide
  Sense strand starting at position 2671 of SEQ ID NO: 3422
auuaaucauugcccagaga

SEQ ID NO: 266167 - RNA, 19 nt, Artificial Sequence
  Description of Artificial Sequence: Synthetic oligonucleotide
  Antisense strand to SEQ ID NO: 266166
ucucugggcaaugauuaau

SEQ ID NO: 266168 - RNA, 19 nt, Artificial Sequence
  Description of Artificial Sequence: Synthetic oligonucleotide
  Sense strand starting at position 2831 of SEQ ID NO: 3422
ucuagcuuccuggaauuau

SEQ ID NO: 266169 - RNA, 19 nt, Artificial Sequence
  Description of Artificial Sequence: Synthetic oligonucleotide
  Antisense strand to SEQ ID NO: 266168
auaauuccaggaagcuaga

SEQ ID NO: 266170 - RNA, 19 nt, Artificial Sequence
  Description of Artificial Sequence: Synthetic oligonucleotide
  Sense strand starting at position 2978 of SEQ ID NO: 3422
auuugacacucccaggauu

SEQ ID NO: 266171 - RNA, 19 nt, Artificial Sequence
  Description of Artificial Sequence: Synthetic oligonucleotide
  Antisense strand to SEQ ID NO: 266170
aauccugggagugucaaau

SEQ ID NO: 266172 - RNA, 19 nt, Artificial Sequence
  Description of Artificial Sequence: Synthetic oligonucleotide
  Sense strand starting at position 3016 of SEQ ID NO: 3422
ucagauauuccuugagaua

SEQ ID NO: 266173 - RNA, 19 nt, Artificial Sequence
  Description of Artificial Sequence: Synthetic oligonucleotide
  Antisense strand to SEQ ID NO: 266172
uaucucaaggaauaucuga

SEQ ID NO: 266174 - RNA, 19 nt, Artificial Sequence
  Description of Artificial Sequence: Synthetic oligonucleotide
  Sense strand starting at position 3119 of SEQ ID NO: 3422
gcaacaugaucugcacaau

SEQ ID NO: 266175 - RNA, 19 nt, Artificial Sequence
  Description of Artificial Sequence: Synthetic oligonucleotide
  Antisense strand to SEQ ID NO: 266174
auugugcagaucauguugc

SEQ ID NO: 266176 - RNA, 19 nt, Artificial Sequence
  Description of Artificial Sequence: Synthetic oligonucleotide
  Sense strand starting at position 3324 of SEQ ID NO: 3422
gucauaugacaugguuacu

SEQ ID NO: 266177 - RNA, 19 nt, Artificial Sequence
  Description of Artificial Sequence: Synthetic oligonucleotide
  Antisense strand to SEQ ID NO: 266176
aguaaccaugucauaugac

SEQ ID NO: 266178 - RNA, 19 nt, Artificial Sequence
  Description of Artificial Sequence: Synthetic oligonucleotide
  Sense strand starting at position 3333 of SEQ ID NO: 3422
caugguuacugcucuaaag

SEQ ID NO: 266179 - RNA, 19 nt, Artificial Sequence
  Description of Artificial Sequence: Synthetic oligonucleotide
  Antisense strand to SEQ ID NO: 266178
cuuuagagcaguaaccaug

SEQ ID NO: 266180 - RNA, 19 nt, Artificial Sequence
  Description of Artificial Sequence: Synthetic oligonucleotide
  Sense strand starting at position 3335 of SEQ ID NO: 3422
ugguuacugcucuaaagga

SEQ ID NO: 266181 - RNA, 19 nt, Artificial Sequence
  Description of Artificial Sequence: Synthetic oligonucleotide
  Antisense strand to SEQ ID NO: 266180
uccuuuagagcaguaacca

SEQ ID NO: 266182 - RNA, 19 nt, Artificial Sequence
  Description of Artificial Sequence: Synthetic oligonucleotide
  Sense strand starting at position 3400 of SEQ ID NO: 3422
uugaguuuagacugaauga

SEQ ID NO: 266183 - RNA, 19 nt, Artificial Sequence
  Description of Artificial Sequence: Synthetic oligonucleotide
  Antisense strand to SEQ ID NO: 266182
ucauucagucuaaacucaa

SEQ ID NO: 266184 - RNA, 19 nt, Artificial Sequence
  Description of Artificial Sequence: Synthetic oligonucleotide
  Sense strand starting at position 3446 of SEQ ID NO: 3422
auuugcugagaguguguua

SEQ ID NO: 266185 - RNA, 19 nt, Artificial Sequence
  Description of Artificial Sequence: Synthetic oligonucleotide
  Antisense strand to SEQ ID NO: 266184
uaacacacucucagcaaau

SEQ ID NO: 266186 - RNA, 19 nt, Artificial Sequence
  Description of Artificial Sequence: Synthetic oligonucleotide
  Sense strand starting at position 3449 of SEQ ID NO: 3422
ugcugagaguguguuauuu

SEQ ID NO: 266187 - RNA, 19 nt, Artificial Sequence
  Description of Artificial Sequence: Synthetic oligonucleotide
  Antisense strand to SEQ ID NO: 266186
aaauaacacacucucagca

SEQ ID NO: 266188 - RNA, 19 nt, Artificial Sequence
  Description of Artificial Sequence: Synthetic oligonucleotide
  Sense strand starting at position 3468 of SEQ ID NO: 3422
caggcaucugcagaguaca

SEQ ID NO: 266189 - RNA, 19 nt, Artificial Sequence
  Description of Artificial Sequence: Synthetic oligonucleotide
  Antisense strand to SEQ ID NO: 266188
uguacucugcagaugccug

SEQ ID NO: 266190 - RNA, 19 nt, Artificial Sequence
  Description of Artificial Sequence: Synthetic oligonucleotide
  Sense strand starting at position 3471 of SEQ ID NO: 3422
gcaucugcagaguacauau

SEQ ID NO: 266191 - RNA, 19 nt, Artificial Sequence
  Description of Artificial Sequence: Synthetic oligonucleotide
  Antisense strand to SEQ ID NO: 266190
auauguacucugcagaugc

SEQ ID NO: 266192 - RNA, 19 nt, Artificial Sequence
  Description of Artificial Sequence: Synthetic oligonucleotide
  Sense strand starting at position 3511 of SEQ ID NO: 3422
augauaagaguuugaacuu

SEQ ID NO: 266193 - RNA, 19 nt, Artificial Sequence
  Description of Artificial Sequence: Synthetic oligonucleotide
  Antisense strand to SEQ ID NO: 266192
aaguucaaacucuuaucau

SEQ ID NO: 266194 - RNA, 19 nt, Artificial Sequence
  Description of Artificial Sequence: Synthetic oligonucleotide
  Sense strand starting at position 3520 of SEQ ID NO: 3422
guuugaacuuguuuaagaa

SEQ ID NO: 266195 - RNA, 19 nt, Artificial Sequence
  Description of Artificial Sequence: Synthetic oligonucleotide
  Antisense strand to SEQ ID NO: 266194
uucuuaaacaaguucaaac

SEQ ID NO: 266196 - RNA, 19 nt, Artificial Sequence
  Description of Artificial Sequence: Synthetic oligonucleotide
  Sense strand starting at position 3566 of SEQ ID NO: 3422
gcauuugguuuagccaaau

SEQ ID NO: 266197 - RNA, 19 nt, Artificial Sequence
  Description of Artificial Sequence: Synthetic oligonucleotide
  Antisense strand to SEQ ID NO: 266196
auuuggcuaaaccaaaugc

SEQ ID NO: 266198 - RNA, 19 nt, Artificial Sequence
  Description of Artificial Sequence: Synthetic oligonucleotide
  Sense strand starting at position 3617 of SEQ ID NO: 3422
caaggaggugcccaaucuu

SEQ ID NO: 266199 - RNA, 19 nt, Artificial Sequence
  Description of Artificial Sequence: Synthetic oligonucleotide
  Antisense strand to SEQ ID NO: 266198
aagauugggcaccuccuug

SEQ ID NO: 266200 - RNA, 19 nt, Artificial Sequence
  Description of Artificial Sequence: Synthetic oligonucleotide
  Sense strand starting at position 3638 of SEQ ID NO: 3422
cagacucuggaaugugauu

SEQ ID NO: 266201 - RNA, 19 nt, Artificial Sequence
  Description of Artificial Sequence: Synthetic oligonucleotide
  Antisense strand to SEQ ID NO: 266200
aaucacauuccagagucug

SEQ ID NO: 266202 - RNA, 19 nt, Artificial Sequence
  Description of Artificial Sequence: Synthetic oligonucleotide
  Sense strand starting at position 3643 of SEQ ID NO: 3422
ucuggaaugugauugucuu

SEQ ID NO: 266203 - RNA, 19 nt, Artificial Sequence
  Description of Artificial Sequence: Synthetic oligonucleotide
  Antisense strand to SEQ ID NO: 266202
aagacaaucacauuccaga

SEQ ID NO: 266204 - RNA, 19 nt, Artificial Sequence
  Description of Artificial Sequence: Synthetic oligonucleotide
  Sense strand starting at position 3644 of SEQ ID NO: 3422
cuggaaugugauugucuuc

SEQ ID NO: 266205 - RNA, 19 nt, Artificial Sequence
  Description of Artificial Sequence: Synthetic oligonucleotide
  Antisense strand to SEQ ID NO: 266204
gaagacaaucacauuccag

SEQ ID NO: 266206 - RNA, 19 nt, Artificial Sequence
  Description of Artificial Sequence: Synthetic oligonucleotide
  Sense strand starting at position 3942 of SEQ ID NO: 3422
uucccuacaugcuugagau

SEQ ID NO: 266207 - RNA, 19 nt, Artificial Sequence
  Description of Artificial Sequence: Synthetic oligonucleotide
  Antisense strand to SEQ ID NO: 266206
aucucaagcauguagggaa

SEQ ID NO: 266208 - RNA, 19 nt, Artificial Sequence
  Description of Artificial Sequence: Synthetic oligonucleotide
  Sense strand starting at position 3943 of SEQ ID NO: 3422
ucccuacaugcuugagaug

SEQ ID NO: 266209 - RNA, 19 nt, Artificial Sequence
  Description of Artificial Sequence: Synthetic oligonucleotide
  Antisense strand to SEQ ID NO: 266208
caucucaagcauguaggga

SEQ ID NO: 266210 - RNA, 19 nt, Artificial Sequence
  Description of Artificial Sequence: Synthetic oligonucleotide
  Sense strand starting at position 3957 of SEQ ID NO: 3422
agaugugucaauugugaua

SEQ ID NO: 266211 - RNA, 19 nt, Artificial Sequence
  Description of Artificial Sequence: Synthetic oligonucleotide
  Antisense strand to SEQ ID NO: 266210
uaucacaauugacacaucu

SEQ ID NO: 266212 - RNA, 19 nt, Artificial Sequence
  Description of Artificial Sequence: Synthetic oligonucleotide
  Sense strand starting at position 3969 of SEQ ID NO: 3422
ugugauaccuugcuccaga

SEQ ID NO: 266213 - RNA, 19 nt, Artificial Sequence
  Description of Artificial Sequence: Synthetic oligonucleotide
  Antisense strand to SEQ ID NO: 266212
ucuggagcaagguaucaca

SEQ ID NO: 266214 - RNA, 19 nt, Artificial Sequence
  Description of Artificial Sequence: Synthetic oligonucleotide
  Sense strand starting at position 3970 of SEQ ID NO: 3422
gugauaccuugcuccagau

SEQ ID NO: 266215 - RNA, 19 nt, Artificial Sequence
  Description of Artificial Sequence: Synthetic oligonucleotide
  Antisense strand to SEQ ID NO: 266214
aucuggagcaagguaucac

SEQ ID NO: 266216 - RNA, 19 nt, Artificial Sequence
  Description of Artificial Sequence: Synthetic oligonucleotide
  Sense strand starting at position 3979 of SEQ ID NO: 3422
ugcuccagauugcucauaa

SEQ ID NO: 266217 - RNA, 19 nt, Artificial Sequence
  Description of Artificial Sequence: Synthetic oligonucleotide
  Antisense strand to SEQ ID NO: 266216
uuaugagcaaucuggagca

SEQ ID NO: 266218 - RNA, 19 nt, Artificial Sequence
  Description of Artificial Sequence: Synthetic oligonucleotide
  Sense strand starting at position 3980 of SEQ ID NO: 3422
gcuccagauugcucauaaa

SEQ ID NO: 266219 - RNA, 19 nt, Artificial Sequence
  Description of Artificial Sequence: Synthetic oligonucleotide
  Antisense strand to SEQ ID NO: 266218
uuuaugagcaaucuggagc

SEQ ID NO: 266220 - RNA, 19 nt, Artificial Sequence
  Description of Artificial Sequence: Synthetic oligonucleotide
  Sense strand starting at position 45 of SEQ ID NO: 3423
aucaaauaaucugugaagu

SEQ ID NO: 266221 - RNA, 19 nt, Artificial Sequence
  Description of Artificial Sequence: Synthetic oligonucleotide
  Antisense strand to SEQ ID NO: 266220
acuucacagauuauuugau

SEQ ID NO: 266222 - RNA, 19 nt, Artificial Sequence
  Description of Artificial Sequence: Synthetic oligonucleotide
  Sense strand starting at position 46 of SEQ ID NO: 3423
ucaaauaaucugugaaguc

SEQ ID NO: 266223 - RNA, 19 nt, Artificial Sequence
  Description of Artificial Sequence: Synthetic oligonucleotide
  Antisense strand to SEQ ID NO: 266222
gacuucacagauuauuuga

SEQ ID NO: 266224 - RNA, 19 nt, Artificial Sequence
  Description of Artificial Sequence: Synthetic oligonucleotide
  Sense strand starting at position 89 of SEQ ID NO: 3423
uccaguguugaucacagua

SEQ ID NO: 266225 - RNA, 19 nt, Artificial Sequence
  Description of Artificial Sequence: Synthetic oligonucleotide
  Antisense strand to SEQ ID NO: 266224
uacugugaucaacacugga

SEQ ID NO: 266226 - RNA, 19 nt, Artificial Sequence
  Description of Artificial Sequence: Synthetic oligonucleotide
  Sense strand starting at position 445 of SEQ ID NO: 3423
agcacucaugacugucauu

SEQ ID NO: 266227 - RNA, 19 nt, Artificial Sequence
  Description of Artificial Sequence: Synthetic oligonucleotide
  Antisense strand to SEQ ID NO: 266226
aaugacagucaugagugcu

SEQ ID NO: 266228 - RNA, 19 nt, Artificial Sequence
  Description of Artificial Sequence: Synthetic oligonucleotide
  Sense strand starting at position 537 of SEQ ID NO: 3423
gcacaauggccucaguucu

SEQ ID NO: 266229 - RNA, 19 nt, Artificial Sequence
  Description of Artificial Sequence: Synthetic oligonucleotide
  Antisense strand to SEQ ID NO: 266228
agaacugaggccauugugc

SEQ ID NO: 266230 - RNA, 19 nt, Artificial Sequence
  Description of Artificial Sequence: Synthetic oligonucleotide
  Sense strand starting at position 612 of SEQ ID NO: 3423
auguaaagugcuuaaacca

SEQ ID NO: 266231 - RNA, 19 nt, Artificial Sequence
  Description of Artificial Sequence: Synthetic oligonucleotide
  Antisense strand to SEQ ID NO: 266230
ugguuuaagcacuuuacau

SEQ ID NO: 266232 - RNA, 19 nt, Artificial Sequence
  Description of Artificial Sequence: Synthetic oligonucleotide
  Sense strand starting at position 680 of SEQ ID NO: 3423
uuuaauuggugcccaauaa

SEQ ID NO: 266233 - RNA, 19 nt, Artificial Sequence
  Description of Artificial Sequence: Synthetic oligonucleotide
  Antisense strand to SEQ ID NO: 266232
uuauugggcaccaauuaaa

SEQ ID NO: 266234 - RNA, 19 nt, Artificial Sequence
  Description of Artificial Sequence: Synthetic oligonucleotide
  Sense strand starting at position 681 of SEQ ID NO: 3423
uuaauuggugcccaauaau

SEQ ID NO: 266235 - RNA, 19 nt, Artificial Sequence
  Description of Artificial Sequence: Synthetic oligonucleotide
  Antisense strand to SEQ ID NO: 266234
auuauugggcaccaauuaa

SEQ ID NO: 266236 - RNA, 19 nt, Artificial Sequence
  Description of Artificial Sequence: Synthetic oligonucleotide
  Sense strand starting at position 699 of SEQ ID NO: 3423
uuacuaauugagugcaguu

SEQ ID NO: 266237 - RNA, 19 nt, Artificial Sequence
  Description of Artificial Sequence: Synthetic oligonucleotide
  Antisense strand to SEQ ID NO: 266236
aacugcacucaauuaguaa

SEQ ID NO: 266238 - RNA, 19 nt, Artificial Sequence
  Description of Artificial Sequence: Synthetic oligonucleotide
  Sense strand starting at position 743 of SEQ ID NO: 3423
uucuauagcucaguaucua

SEQ ID NO: 266239 - RNA, 19 nt, Artificial Sequence
  Description of Artificial Sequence: Synthetic oligonucleotide
  Antisense strand to SEQ ID NO: 266238
uagauacugagcuauagaa

SEQ ID NO: 266240 - RNA, 19 nt, Artificial Sequence
  Description of Artificial Sequence: Synthetic oligonucleotide
  Sense strand starting at position 755 of SEQ ID NO: 3423
guaucuaaaucugugaaua

SEQ ID NO: 266241 - RNA, 19 nt, Artificial Sequence
  Description of Artificial Sequence: Synthetic oligonucleotide
  Antisense strand to SEQ ID NO: 266240
uauucacagauuuagauac

SEQ ID NO: 266242 - RNA, 19 nt, Artificial Sequence
  Description of Artificial Sequence: Synthetic oligonucleotide
  Sense strand starting at position 763 of SEQ ID NO: 3423
aucugugaauacucuggaa

SEQ ID NO: 266243 - RNA, 19 nt, Artificial Sequence
  Description of Artificial Sequence: Synthetic oligonucleotide
  Antisense strand to SEQ ID NO: 266242
uuccagaguauucacagau

SEQ ID NO: 266244 - RNA, 19 nt, Artificial Sequence
  Description of Artificial Sequence: Synthetic oligonucleotide
  Sense strand starting at position 765 of SEQ ID NO: 3423
cugugaauacucuggaauu

SEQ ID NO: 266245 - RNA, 19 nt, Artificial Sequence
  Description of Artificial Sequence: Synthetic oligonucleotide
  Antisense strand to SEQ ID NO: 266244
aauuccagaguauucacag

SEQ ID NO: 266246 - RNA, 19 nt, Artificial Sequence
  Description of Artificial Sequence: Synthetic oligonucleotide
  Sense strand starting at position 766 of SEQ ID NO: 3423
ugugaauacucuggaauuu

SEQ ID NO: 266247 - RNA, 19 nt, Artificial Sequence
  Description of Artificial Sequence: Synthetic oligonucleotide
  Antisense strand to SEQ ID NO: 266246
aaauuccagaguauucaca

SEQ ID NO: 266248 - RNA, 19 nt, Artificial Sequence
  Description of Artificial Sequence: Synthetic oligonucleotide
  Sense strand starting at position 901 of SEQ ID NO: 3423
aagaguggauuacauuauu

SEQ ID NO: 266249 - RNA, 19 nt, Artificial Sequence
  Description of Artificial Sequence: Synthetic oligonucleotide
  Antisense strand to SEQ ID NO: 266248
aauaauguaauccacucuu

SEQ ID NO: 266250 - RNA, 19 nt, Artificial Sequence
  Description of Artificial Sequence: Synthetic oligonucleotide
  Sense strand starting at position 1128 of SEQ ID NO: 3423
gucuuugaaaggugaaacu

SEQ ID NO: 266251 - RNA, 19 nt, Artificial Sequence
  Description of Artificial Sequence: Synthetic oligonucleotide
  Antisense strand to SEQ ID NO: 266250
aguuucaccuuucaaagac

SEQ ID NO: 266252 - RNA, 19 nt, Artificial Sequence
  Description of Artificial Sequence: Synthetic oligonucleotide
  Sense strand starting at position 1181 of SEQ ID NO: 3423
ggaacagagugggcuuaau

SEQ ID NO: 266253 - RNA, 19 nt, Artificial Sequence
  Description of Artificial Sequence: Synthetic oligonucleotide
  Antisense strand to SEQ ID NO: 266252
auuaagcccacucuguucc

SEQ ID NO: 266254 - RNA, 19 nt, Artificial Sequence
  Description of Artificial Sequence: Synthetic oligonucleotide
  Sense strand starting at position 1238 of SEQ ID NO: 3423
ucggaauuccaucacuuag

SEQ ID NO: 266255 - RNA, 19 nt, Artificial Sequence
  Description of Artificial Sequence: Synthetic oligonucleotide
  Antisense strand to SEQ ID NO: 266254
cuaagugauggaauuccga

SEQ ID NO: 266256 - RNA, 19 nt, Artificial Sequence
  Description of Artificial Sequence: Synthetic oligonucleotide
  Sense strand starting at position 1252 of SEQ ID NO: 3423
cuuagaaacuguguaaccu

SEQ ID NO: 266257 - RNA, 19 nt, Artificial Sequence
  Description of Artificial Sequence: Synthetic oligonucleotide
  Antisense strand to SEQ ID NO: 266256
agguuacacaguuucuaag

SEQ ID NO: 266258 - RNA, 19 nt, Artificial Sequence
  Description of Artificial Sequence: Synthetic oligonucleotide
  Sense strand starting at position 1353 of SEQ ID NO: 3423
uucugauucugcguuuaga

SEQ ID NO: 266259 - RNA, 19 nt, Artificial Sequence
  Description of Artificial Sequence: Synthetic oligonucleotide
  Antisense strand to SEQ ID NO: 266258
ucuaaacgcagaaucagaa

SEQ ID NO: 266260 - RNA, 19 nt, Artificial Sequence
  Description of Artificial Sequence: Synthetic oligonucleotide
  Sense strand starting at position 1356 of SEQ ID NO: 3423
ugauucugcguuuagaaga

SEQ ID NO: 266261 - RNA, 19 nt, Artificial Sequence
  Description of Artificial Sequence: Synthetic oligonucleotide
  Antisense strand to SEQ ID NO: 266260
ucuucuaaacgcagaauca

SEQ ID NO: 266262 - RNA, 19 nt, Artificial Sequence
  Description of Artificial Sequence: Synthetic oligonucleotide
  Sense strand starting at position 1910 of SEQ ID NO: 3423
gguccugcugcggauaagu

SEQ ID NO: 266263 - RNA, 19 nt, Artificial Sequence
  Description of Artificial Sequence: Synthetic oligonucleotide
  Antisense strand to SEQ ID NO: 266262
acuuauccgcagcaggacc

SEQ ID NO: 266264 - RNA, 19 nt, Artificial Sequence
  Description of Artificial Sequence: Synthetic oligonucleotide
  Sense strand starting at position 2204 of SEQ ID NO: 3423
ccuggagcauuccuucuaa

SEQ ID NO: 266265 - RNA, 19 nt, Artificial Sequence
  Description of Artificial Sequence: Synthetic oligonucleotide
  Antisense strand to SEQ ID NO: 266264
uuagaaggaaugcuccagg

SEQ ID NO: 266266 - RNA, 19 nt, Artificial Sequence
  Description of Artificial Sequence: Synthetic oligonucleotide
  Sense strand starting at position 2309 of SEQ ID NO: 3423
gccacuuggucaucuugga

SEQ ID NO: 266267 - RNA, 19 nt, Artificial Sequence
  Description of Artificial Sequence: Synthetic oligonucleotide
  Antisense strand to SEQ ID NO: 266266
uccaagaugaccaaguggc

SEQ ID NO: 266268 - RNA, 19 nt, Artificial Sequence
  Description of Artificial Sequence: Synthetic oligonucleotide
  Sense strand starting at position 2313 of SEQ ID NO: 3423
cuuggucaucuuggaccaa

SEQ ID NO: 266269 - RNA, 19 nt, Artificial Sequence
  Description of Artificial Sequence: Synthetic oligonucleotide
  Antisense strand to SEQ ID NO: 266268
uugguccaagaugaccaag

SEQ ID NO: 266270 - RNA, 19 nt, Artificial Sequence
  Description of Artificial Sequence: Synthetic oligonucleotide
  Sense strand starting at position 2339 of SEQ ID NO: 3423
agaggauguaucugguaca

SEQ ID NO: 266271 - RNA, 19 nt, Artificial Sequence
  Description of Artificial Sequence: Synthetic oligonucleotide
  Antisense strand to SEQ ID NO: 266270
uguaccagauacauccucu

SEQ ID NO: 266272 - RNA, 19 nt, Artificial Sequence
  Description of Artificial Sequence: Synthetic oligonucleotide
  Sense strand starting at position 2372 of SEQ ID NO: 3423
cgauuaacaugagacuuga

SEQ ID NO: 266273 - RNA, 19 nt, Artificial Sequence
  Description of Artificial Sequence: Synthetic oligonucleotide
  Antisense strand to SEQ ID NO: 266272
ucaagucucauguuaaucg

SEQ ID NO: 266274 - RNA, 19 nt, Artificial Sequence
  Description of Artificial Sequence: Synthetic oligonucleotide
  Sense strand starting at position 2434 of SEQ ID NO: 3423
cagaaccuuccuggaguau

SEQ ID NO: 266275 - RNA, 19 nt, Artificial Sequence
  Description of Artificial Sequence: Synthetic oligonucleotide
  Antisense strand to SEQ ID NO: 266274
auacuccaggaagguucug

SEQ ID NO: 266276 - RNA, 19 nt, Artificial Sequence
  Description of Artificial Sequence: Synthetic oligonucleotide
  Sense strand starting at position 2466 of SEQ ID NO: 3423
ggacaacgguucucaaagu

SEQ ID NO: 266277 - RNA, 19 nt, Artificial Sequence
  Description of Artificial Sequence: Synthetic oligonucleotide
  Antisense strand to SEQ ID NO: 266276
acuuugagaaccguugucc

SEQ ID NO: 266278 - RNA, 19 nt, Artificial Sequence
  Description of Artificial Sequence: Synthetic oligonucleotide
  Sense strand starting at position 2517 of SEQ ID NO: 3423
acguuagaaaugcacguua

SEQ ID NO: 266279 - RNA, 19 nt, Artificial Sequence
  Description of Artificial Sequence: Synthetic oligonucleotide
  Antisense strand to SEQ ID NO: 266278
uaacgugcauuucuaacgu

SEQ ID NO: 266280 - RNA, 19 nt, Artificial Sequence
  Description of Artificial Sequence: Synthetic oligonucleotide
  Sense strand starting at position 2519 of SEQ ID NO: 3423
guuagaaaugcacguuaga

SEQ ID NO: 266281 - RNA, 19 nt, Artificial Sequence
  Description of Artificial Sequence: Synthetic oligonucleotide
  Antisense strand to SEQ ID NO: 266280
ucuaacgugcauuucuaac

SEQ ID NO: 266282 - RNA, 19 nt, Artificial Sequence
  Description of Artificial Sequence: Synthetic oligonucleotide
  Sense strand starting at position 2522 of SEQ ID NO: 3423
agaaaugcacguuagaaca

SEQ ID NO: 266283 - RNA, 19 nt, Artificial Sequence
  Description of Artificial Sequence: Synthetic oligonucleotide
  Antisense strand to SEQ ID NO: 266282
uguucuaacgugcauuucu

SEQ ID NO: 266284 - RNA, 19 nt, Artificial Sequence
  Description of Artificial Sequence: Synthetic oligonucleotide
  Sense strand starting at position 2686 of SEQ ID NO: 3423
gcgaucauagcucaccaaa

SEQ ID NO: 266285 - RNA, 19 nt, Artificial Sequence
  Description of Artificial Sequence: Synthetic oligonucleotide
  Antisense strand to SEQ ID NO: 266284
uuuggugagcuaugaucgc

SEQ ID NO: 266286 - RNA, 19 nt, Artificial Sequence
  Description of Artificial Sequence: Synthetic oligonucleotide
  Sense strand starting at position 2981 of SEQ ID NO: 3423
gagaaucacuguucuggaa

SEQ ID NO: 266287 - RNA, 19 nt, Artificial Sequence
  Description of Artificial Sequence: Synthetic oligonucleotide
  Antisense strand to SEQ ID NO: 266286
uuccagaacagugauucuc

SEQ ID NO: 266288 - RNA, 19 nt, Artificial Sequence
  Description of Artificial Sequence: Synthetic oligonucleotide
  Sense strand starting at position 3004 of SEQ ID NO: 3423
gaggacugguuuccagaau

SEQ ID NO: 266289 - RNA, 19 nt, Artificial Sequence
  Description of Artificial Sequence: Synthetic oligonucleotide
  Antisense strand to SEQ ID NO: 266288
auucuggaaaccaguccuc

SEQ ID NO: 266290 - RNA, 19 nt, Artificial Sequence
  Description of Artificial Sequence: Synthetic oligonucleotide
  Sense strand starting at position 3010 of SEQ ID NO: 3423
ugguuuccagaauggaaac

SEQ ID NO: 266291 - RNA, 19 nt, Artificial Sequence
  Description of Artificial Sequence: Synthetic oligonucleotide
  Antisense strand to SEQ ID NO: 266290
guuuccauucuggaaacca

SEQ ID NO: 266292 - RNA, 19 nt, Artificial Sequence
  Description of Artificial Sequence: Synthetic oligonucleotide
  Sense strand starting at position 3371 of SEQ ID NO: 3423
gaacaaucguucuucucag

SEQ ID NO: 266293 - RNA, 19 nt, Artificial Sequence
  Description of Artificial Sequence: Synthetic oligonucleotide
  Antisense strand to SEQ ID NO: 266292
cugagaagaacgauuguuc

SEQ ID NO: 266294 - RNA, 19 nt, Artificial Sequence
  Description of Artificial Sequence: Synthetic oligonucleotide
  Sense strand starting at position 3407 of SEQ ID NO: 3423
ucugauggauuccuuauca

SEQ ID NO: 266295 - RNA, 19 nt, Artificial Sequence
  Description of Artificial Sequence: Synthetic oligonucleotide
  Antisense strand to SEQ ID NO: 266294
ugauaaggaauccaucaga

SEQ ID NO: 266296 - RNA, 19 nt, Artificial Sequence
  Description of Artificial Sequence: Synthetic oligonucleotide
  Sense strand starting at position 3412 of SEQ ID NO: 3423
uggauuccuuaucauaaga

SEQ ID NO: 266297 - RNA, 19 nt, Artificial Sequence
  Description of Artificial Sequence: Synthetic oligonucleotide
  Antisense strand to SEQ ID NO: 266296
ucuuaugauaaggaaucca

SEQ ID NO: 266298 - RNA, 19 nt, Artificial Sequence
  Description of Artificial Sequence: Synthetic oligonucleotide
  Sense strand starting at position 3711 of SEQ ID NO: 3423
ugguguguccagagucugu

SEQ ID NO: 266299 - RNA, 19 nt, Artificial Sequence
  Description of Artificial Sequence: Synthetic oligonucleotide
  Antisense strand to SEQ ID NO: 266298
acagacucuggacacacca

SEQ ID NO: 266300 - RNA, 19 nt, Artificial Sequence
  Description of Artificial Sequence: Synthetic oligonucleotide
  Sense strand starting at position 2 of SEQ ID NO: 3424
uuauauaucuagggaagaa

SEQ ID NO: 266301 - RNA, 19 nt, Artificial Sequence
  Description of Artificial Sequence: Synthetic oligonucleotide
  Antisense strand to SEQ ID NO: 266300
uucuucccuagauauauaa

SEQ ID NO: 266302 - RNA, 19 nt, Artificial Sequence
  Description of Artificial Sequence: Synthetic oligonucleotide
  Sense strand starting at position 161 of SEQ ID NO: 3424
ugagaacuagcuugauguc

SEQ ID NO: 266303 - RNA, 19 nt, Artificial Sequence
  Description of Artificial Sequence: Synthetic oligonucleotide
  Antisense strand to SEQ ID NO: 266302
gacaucaagcuaguucuca

SEQ ID NO: 266304 - RNA, 19 nt, Artificial Sequence
  Description of Artificial Sequence: Synthetic oligonucleotide
  Sense strand starting at position 162 of SEQ ID NO: 3424
gagaacuagcuugauguca

SEQ ID NO: 266305 - RNA, 19 nt, Artificial Sequence
  Description of Artificial Sequence: Synthetic oligonucleotide
  Antisense strand to SEQ ID NO: 266304
ugacaucaagcuaguucuc

SEQ ID NO: 266306 - RNA, 19 nt, Artificial Sequence
  Description of Artificial Sequence: Synthetic oligonucleotide
  Sense strand starting at position 170 of SEQ ID NO: 3424
gcuugaugucacuagcgau

SEQ ID NO: 266307 - RNA, 19 nt, Artificial Sequence
  Description of Artificial Sequence: Synthetic oligonucleotide
  Antisense strand to SEQ ID NO: 266306
aucgcuagugacaucaagc

SEQ ID NO: 266308 - RNA, 19 nt, Artificial Sequence
  Description of Artificial Sequence: Synthetic oligonucleotide
  Sense strand starting at position 213 of SEQ ID NO: 3424
ugaaguucuugggucacua

SEQ ID NO: 266309 - RNA, 19 nt, Artificial Sequence
  Description of Artificial Sequence: Synthetic oligonucleotide
  Antisense strand to SEQ ID NO: 266308
uagugacccaagaacuuca

SEQ ID NO: 266310 - RNA, 19 nt, Artificial Sequence
  Description of Artificial Sequence: Synthetic oligonucleotide
  Sense strand starting at position 215 of SEQ ID NO: 3424
aaguucuugggucacuauu

SEQ ID NO: 266311 - RNA, 19 nt, Artificial Sequence
  Description of Artificial Sequence: Synthetic oligonucleotide
  Antisense strand to SEQ ID NO: 266310
aauagugacccaagaacuu

SEQ ID NO: 266312 - RNA, 19 nt, Artificial Sequence
  Description of Artificial Sequence: Synthetic oligonucleotide
  Sense strand starting at position 319 of SEQ ID NO: 3424
ggccauauuccuggagagg

SEQ ID NO: 266313 - RNA, 19 nt, Artificial Sequence
  Description of Artificial Sequence: Synthetic oligonucleotide
  Antisense strand to SEQ ID NO: 266312
ccucuccaggaauauggcc

SEQ ID NO: 266314 - RNA, 19 nt, Artificial Sequence
  Description of Artificial Sequence: Synthetic oligonucleotide
  Sense strand starting at position 393 of SEQ ID NO: 3424
uuccuuucccugugcaaag

SEQ ID NO: 266315 - RNA, 19 nt, Artificial Sequence
  Description of Artificial Sequence: Synthetic oligonucleotide
  Antisense strand to SEQ ID NO: 266314
cuuugcacagggaaaggaa

SEQ ID NO: 266316 - RNA, 19 nt, Artificial Sequence
  Description of Artificial Sequence: Synthetic oligonucleotide
  Sense strand starting at position 587 of SEQ ID NO: 3424
uucuuucuggcagaaguga

SEQ ID NO: 266317 - RNA, 19 nt, Artificial Sequence
  Description of Artificial Sequence: Synthetic oligonucleotide
  Antisense strand to SEQ ID NO: 266316
ucacuucugccagaaagaa

SEQ ID NO: 266318 - RNA, 19 nt, Artificial Sequence
  Description of Artificial Sequence: Synthetic oligonucleotide
  Sense strand starting at position 631 of SEQ ID NO: 3424
agacaagagcugggcaaau

SEQ ID NO: 266319 - RNA, 19 nt, Artificial Sequence
  Description of Artificial Sequence: Synthetic oligonucleotide
  Antisense strand to SEQ ID NO: 266318
auuugcccagcucuugucu

SEQ ID NO: 266320 - RNA, 19 nt, Artificial Sequence
  Description of Artificial Sequence: Synthetic oligonucleotide
  Sense strand starting at position 672 of SEQ ID NO: 3424
acagaaauguuugcuaaag

SEQ ID NO: 266321 - RNA, 19 nt, Artificial Sequence
  Description of Artificial Sequence: Synthetic oligonucleotide
  Antisense strand to SEQ ID NO: 266320
cuuuagcaaacauuucugu

SEQ ID NO: 266322 - RNA, 19 nt, Artificial Sequence
  Description of Artificial Sequence: Synthetic oligonucleotide
  Sense strand starting at position 673 of SEQ ID NO: 3424
cagaaauguuugcuaaagc

SEQ ID NO: 266323 - RNA, 19 nt, Artificial Sequence
  Description of Artificial Sequence: Synthetic oligonucleotide
  Antisense strand to SEQ ID NO: 266322
gcuuuagcaaacauuucug

SEQ ID NO: 266324 - RNA, 19 nt, Artificial Sequence
  Description of Artificial Sequence: Synthetic oligonucleotide
  Sense strand starting at position 694 of SEQ ID NO: 3424
acuugugcagcgcuauuaa

SEQ ID NO: 266325 - RNA, 19 nt, Artificial Sequence
  Description of Artificial Sequence: Synthetic oligonucleotide
  Antisense strand to SEQ ID NO: 266324
uuaauagcgcugcacaagu

SEQ ID NO: 266326 - RNA, 19 nt, Artificial Sequence
  Description of Artificial Sequence: Synthetic oligonucleotide
  Sense strand starting at position 764 of SEQ ID NO: 3424
uuuccuuacccaugucaga

SEQ ID NO: 266327 - RNA, 19 nt, Artificial Sequence
  Description of Artificial Sequence: Synthetic oligonucleotide
  Antisense strand to SEQ ID NO: 266326
ucugacauggguaaggaaa

SEQ ID NO: 266328 - RNA, 19 nt, Artificial Sequence
  Description of Artificial Sequence: Synthetic oligonucleotide
  Sense strand starting at position 785 of SEQ ID NO: 3424
caguccuucguaugaaaca

SEQ ID NO: 266329 - RNA, 19 nt, Artificial Sequence
  Description of Artificial Sequence: Synthetic oligonucleotide
  Antisense strand to SEQ ID NO: 266328
uguuucauacgaaggacug

SEQ ID NO: 266330 - RNA, 19 nt, Artificial Sequence
  Description of Artificial Sequence: Synthetic oligonucleotide
  Sense strand starting at position 1776 of SEQ ID NO: 3424
cgucgcuuuccgaggugga

SEQ ID NO: 266331 - RNA, 19 nt, Artificial Sequence
  Description of Artificial Sequence: Synthetic oligonucleotide
  Antisense strand to SEQ ID NO: 266330
uccaccucggaaagcgacg

SEQ ID NO: 266332 - RNA, 19 nt, Artificial Sequence
  Description of Artificial Sequence: Synthetic oligonucleotide
  Sense strand starting at position 2805 of SEQ ID NO: 3424
cccucugcucagggaucau

SEQ ID NO: 266333 - RNA, 19 nt, Artificial Sequence
  Description of Artificial Sequence: Synthetic oligonucleotide
  Antisense strand to SEQ ID NO: 266332
augaucccugagcagaggg

SEQ ID NO: 266334 - RNA, 19 nt, Artificial Sequence
  Description of Artificial Sequence: Synthetic oligonucleotide
  Sense strand starting at position 2817 of SEQ ID NO: 3424
ggaucaugcugucugcuca

SEQ ID NO: 266335 - RNA, 19 nt, Artificial Sequence
  Description of Artificial Sequence: Synthetic oligonucleotide
  Antisense strand to SEQ ID NO: 266334
ugagcagacagcaugaucc

SEQ ID NO: 266336 - RNA, 19 nt, Artificial Sequence
  Description of Artificial Sequence: Synthetic oligonucleotide
  Sense strand starting at position 2832 of SEQ ID NO: 3424
cucagguguggcgaggaua

SEQ ID NO: 266337 - RNA, 19 nt, Artificial Sequence
  Description of Artificial Sequence: Synthetic oligonucleotide
  Antisense strand to SEQ ID NO: 266336
uauccucgccacaccugag

SEQ ID NO: 266338 - RNA, 19 nt, Artificial Sequence
  Description of Artificial Sequence: Synthetic oligonucleotide
  Sense strand starting at position 2840 of SEQ ID NO: 3424
uggcgaggauaucuagcaa

SEQ ID NO: 266339 - RNA, 19 nt, Artificial Sequence
  Description of Artificial Sequence: Synthetic oligonucleotide
  Antisense strand to SEQ ID NO: 266338
uugcuagauauccucgcca

SEQ ID NO: 266340 - RNA, 19 nt, Artificial Sequence
  Description of Artificial Sequence: Synthetic oligonucleotide
  Sense strand starting at position 2844 of SEQ ID NO: 3424
gaggauaucuagcaagaug

SEQ ID NO: 266341 - RNA, 19 nt, Artificial Sequence
  Description of Artificial Sequence: Synthetic oligonucleotide
  Antisense strand to SEQ ID NO: 266340
caucuugcuagauauccuc

SEQ ID NO: 266342 - RNA, 19 nt, Artificial Sequence
  Description of Artificial Sequence: Synthetic oligonucleotide
  Sense strand starting at position 3058 of SEQ ID NO: 3424
cccggcauuuguuuaaauu

SEQ ID NO: 266343 - RNA, 19 nt, Artificial Sequence
  Description of Artificial Sequence: Synthetic oligonucleotide
  Antisense strand to SEQ ID NO: 266342
aauuuaaacaaaugccggg

SEQ ID NO: 266344 - RNA, 19 nt, Artificial Sequence
  Description of Artificial Sequence: Synthetic oligonucleotide
  Sense strand starting at position 3101 of SEQ ID NO: 3424
gcaaacauuccugguggca

SEQ ID NO: 266345 - RNA, 19 nt, Artificial Sequence
  Description of Artificial Sequence: Synthetic oligonucleotide
  Antisense strand to SEQ ID NO: 266344
ugccaccaggaauguuugc

SEQ ID NO: 266346 - RNA, 19 nt, Artificial Sequence
  Description of Artificial Sequence: Synthetic oligonucleotide
  Sense strand starting at position 3124 of SEQ ID NO: 3424
ugcaguuacucguuaauug

SEQ ID NO: 266347 - RNA, 19 nt, Artificial Sequence
  Description of Artificial Sequence: Synthetic oligonucleotide
  Antisense strand to SEQ ID NO: 266346
caauuaacgaguaacugca

SEQ ID NO: 266348 - RNA, 19 nt, Artificial Sequence
  Description of Artificial Sequence: Synthetic oligonucleotide
  Sense strand starting at position 3125 of SEQ ID NO: 3424
gcaguuacucguuaauugu

SEQ ID NO: 266349 - RNA, 19 nt, Artificial Sequence
  Description of Artificial Sequence: Synthetic oligonucleotide
  Antisense strand to SEQ ID NO: 266348
acaauuaacgaguaacugc

SEQ ID NO: 266350 - RNA, 19 nt, Artificial Sequence
  Description of Artificial Sequence: Synthetic oligonucleotide
  Sense strand starting at position 3135 of SEQ ID NO: 3424
guuaauuguuuggcuuuaa

SEQ ID NO: 266351 - RNA, 19 nt, Artificial Sequence
  Description of Artificial Sequence: Synthetic oligonucleotide
  Antisense strand to SEQ ID NO: 266350
uuaaagccaaacaauuaac

SEQ ID NO: 266352 - RNA, 19 nt, Artificial Sequence
  Description of Artificial Sequence: Synthetic oligonucleotide
  Sense strand starting at position 3139 of SEQ ID NO: 3424
auuguuuggcuuuaaugga

SEQ ID NO: 266353 - RNA, 19 nt, Artificial Sequence
  Description of Artificial Sequence: Synthetic oligonucleotide
  Antisense strand to SEQ ID NO: 266352
uccauuaaagccaaacaau

SEQ ID NO: 266354 - RNA, 19 nt, Artificial Sequence
  Description of Artificial Sequence: Synthetic oligonucleotide
  Sense strand starting at position 3164 of SEQ ID NO: 3424
accagucuugaauaaggca

SEQ ID NO: 266355 - RNA, 19 nt, Artificial Sequence
  Description of Artificial Sequence: Synthetic oligonucleotide
  Antisense strand to SEQ ID NO: 266354
ugccuuauucaagacuggu

SEQ ID NO: 266356 - RNA, 19 nt, Artificial Sequence
  Description of Artificial Sequence: Synthetic oligonucleotide
  Sense strand starting at position 3173 of SEQ ID NO: 3424
gaauaaggcaggugugauc

SEQ ID NO: 266357 - RNA, 19 nt, Artificial Sequence
  Description of Artificial Sequence: Synthetic oligonucleotide
  Antisense strand to SEQ ID NO: 266356
gaucacaccugccuuauuc

SEQ ID NO: 266358 - RNA, 19 nt, Artificial Sequence
  Description of Artificial Sequence: Synthetic oligonucleotide
  Sense strand starting at position 3179 of SEQ ID NO: 3424
ggcaggugugaucaaggga

SEQ ID NO: 266359 - RNA, 19 nt, Artificial Sequence
  Description of Artificial Sequence: Synthetic oligonucleotide
  Antisense strand to SEQ ID NO: 266358
ucccuugaucacaccugcc

SEQ ID NO: 266360 - RNA, 19 nt, Artificial Sequence
  Description of Artificial Sequence: Synthetic oligonucleotide
  Sense strand starting at position 3184 of SEQ ID NO: 3424
gugugaucaagggaggguu

SEQ ID NO: 266361 - RNA, 19 nt, Artificial Sequence
  Description of Artificial Sequence: Synthetic oligonucleotide
  Antisense strand to SEQ ID NO: 266360
aacccucccuugaucacac

SEQ ID NO: 266362 - RNA, 19 nt, Artificial Sequence
  Description of Artificial Sequence: Synthetic oligonucleotide
  Sense strand starting at position 3205 of SEQ ID NO: 3424
ggaggaagcugagaagcau

SEQ ID NO: 266363 - RNA, 19 nt, Artificial Sequence
  Description of Artificial Sequence: Synthetic oligonucleotide
  Antisense strand to SEQ ID NO: 266362
augcuucucagcuuccucc

SEQ ID NO: 266364 - RNA, 19 nt, Artificial Sequence
  Description of Artificial Sequence: Synthetic oligonucleotide
  Sense strand starting at position 3295 of SEQ ID NO: 3424
gguguucagguagacucaa

SEQ ID NO: 266365 - RNA, 19 nt, Artificial Sequence
  Description of Artificial Sequence: Synthetic oligonucleotide
  Antisense strand to SEQ ID NO: 266364
uugagucuaccugaacacc

SEQ ID NO: 266366 - RNA, 19 nt, Artificial Sequence
  Description of Artificial Sequence: Synthetic oligonucleotide
  Sense strand starting at position 3415 of SEQ ID NO: 3424
gcccuuaaggccugagaau

SEQ ID NO: 266367 - RNA, 19 nt, Artificial Sequence
  Description of Artificial Sequence: Synthetic oligonucleotide
  Antisense strand to SEQ ID NO: 266366
auucucaggccuuaagggc

SEQ ID NO: 266368 - RNA, 19 nt, Artificial Sequence
  Description of Artificial Sequence: Synthetic oligonucleotide
  Sense strand starting at position 3424 of SEQ ID NO: 3424
gccugagaauauucgagac

SEQ ID NO: 266369 - RNA, 19 nt, Artificial Sequence
  Description of Artificial Sequence: Synthetic oligonucleotide
  Antisense strand to SEQ ID NO: 266368
gucucgaauauucucaggc

SEQ ID NO: 266370 - RNA, 19 nt, Artificial Sequence
  Description of Artificial Sequence: Synthetic oligonucleotide
  Sense strand starting at position 3426 of SEQ ID NO: 3424
cugagaauauucgagacaa

SEQ ID NO: 266371 - RNA, 19 nt, Artificial Sequence
  Description of Artificial Sequence: Synthetic oligonucleotide
  Antisense strand to SEQ ID NO: 266370
uugucucgaauauucucag

SEQ ID NO: 266372 - RNA, 19 nt, Artificial Sequence
  Description of Artificial Sequence: Synthetic oligonucleotide
  Sense strand starting at position 3611 of SEQ ID NO: 3424
accauagacugggugugau

SEQ ID NO: 266373 - RNA, 19 nt, Artificial Sequence
  Description of Artificial Sequence: Synthetic oligonucleotide
  Antisense strand to SEQ ID NO: 266372
aucacacccagucuauggu

SEQ ID NO: 266374 - RNA, 19 nt, Artificial Sequence
  Description of Artificial Sequence: Synthetic oligonucleotide
  Sense strand starting at position 3961 of SEQ ID NO: 3424
gcgugagagcggaguaaua

SEQ ID NO: 266375 - RNA, 19 nt, Artificial Sequence
  Description of Artificial Sequence: Synthetic oligonucleotide
  Antisense strand to SEQ ID NO: 266374
uauuacuccgcucucacgc

SEQ ID NO: 266376 - RNA, 19 nt, Artificial Sequence
  Description of Artificial Sequence: Synthetic oligonucleotide
  Sense strand starting at position 3963 of SEQ ID NO: 3424
gugagagcggaguaauaca

SEQ ID NO: 266377 - RNA, 19 nt, Artificial Sequence
  Description of Artificial Sequence: Synthetic oligonucleotide
  Antisense strand to SEQ ID NO: 266376
uguauuacuccgcucucac

SEQ ID NO: 266378 - RNA, 19 nt, Artificial Sequence
  Description of Artificial Sequence: Synthetic oligonucleotide
  Sense strand starting at position 3971 of SEQ ID NO: 3424
ggaguaauacaggguguca

SEQ ID NO: 266379 - RNA, 19 nt, Artificial Sequence
  Description of Artificial Sequence: Synthetic oligonucleotide
  Antisense strand to SEQ ID NO: 266378
ugacacccuguauuacucc

SEQ ID NO: 266380 - RNA, 19 nt, Artificial Sequence
  Description of Artificial Sequence: Synthetic oligonucleotide
  Sense strand starting at position 5 of SEQ ID NO: 3425
agcaauuaucuaugaagga

SEQ ID NO: 266381 - RNA, 19 nt, Artificial Sequence
  Description of Artificial Sequence: Synthetic oligonucleotide
  Antisense strand to SEQ ID NO: 266380
uccuucauagauaauugcu

SEQ ID NO: 266382 - RNA, 19 nt, Artificial Sequence
  Description of Artificial Sequence: Synthetic oligonucleotide
  Sense strand starting at position 84 of SEQ ID NO: 3425
cuccuuacucgggaagcaa

SEQ ID NO: 266383 - RNA, 19 nt, Artificial Sequence
  Description of Artificial Sequence: Synthetic oligonucleotide
  Antisense strand to SEQ ID NO: 266382
uugcuucccgaguaaggag

SEQ ID NO: 266384 - RNA, 19 nt, Artificial Sequence
  Description of Artificial Sequence: Synthetic oligonucleotide
  Sense strand starting at position 235 of SEQ ID NO: 3425
uagguuuggucuccucuga

SEQ ID NO: 266385 - RNA, 19 nt, Artificial Sequence
  Description of Artificial Sequence: Synthetic oligonucleotide
  Antisense strand to SEQ ID NO: 266384
ucagaggagaccaaaccua

SEQ ID NO: 266386 - RNA, 19 nt, Artificial Sequence
  Description of Artificial Sequence: Synthetic oligonucleotide
  Sense strand starting at position 270 of SEQ ID NO: 3425
ccacaacaucugggcuauu

SEQ ID NO: 266387 - RNA, 19 nt, Artificial Sequence
  Description of Artificial Sequence: Synthetic oligonucleotide
  Antisense strand to SEQ ID NO: 266386
aauagcccagauguugugg

SEQ ID NO: 266388 - RNA, 19 nt, Artificial Sequence
  Description of Artificial Sequence: Synthetic oligonucleotide
  Sense strand starting at position 429 of SEQ ID NO: 3425
gcaugacuucugggcucaa

SEQ ID NO: 266389 - RNA, 19 nt, Artificial Sequence
  Description of Artificial Sequence: Synthetic oligonucleotide
  Antisense strand to SEQ ID NO: 266388
uugagcccagaagucaugc

SEQ ID NO: 266390 - RNA, 19 nt, Artificial Sequence
  Description of Artificial Sequence: Synthetic oligonucleotide
  Sense strand starting at position 564 of SEQ ID NO: 3425
ggcagaaagcuguggaaug

SEQ ID NO: 266391 - RNA, 19 nt, Artificial Sequence
  Description of Artificial Sequence: Synthetic oligonucleotide
  Antisense strand to SEQ ID NO: 266390
cauuccacagcuuucugcc

SEQ ID NO: 266392 - RNA, 19 nt, Artificial Sequence
  Description of Artificial Sequence: Synthetic oligonucleotide
  Sense strand starting at position 566 of SEQ ID NO: 3425
cagaaagcuguggaauguu

SEQ ID NO: 266393 - RNA, 19 nt, Artificial Sequence
  Description of Artificial Sequence: Synthetic oligonucleotide
  Antisense strand to SEQ ID NO: 266392
aacauuccacagcuuucug

SEQ ID NO: 266394 - RNA, 19 nt, Artificial Sequence
  Description of Artificial Sequence: Synthetic oligonucleotide
  Sense strand starting at position 575 of SEQ ID NO: 3425
guggaauguuacucacacu

SEQ ID NO: 266395 - RNA, 19 nt, Artificial Sequence
  Description of Artificial Sequence: Synthetic oligonucleotide
  Antisense strand to SEQ ID NO: 266394
agugugaguaacauuccac

SEQ ID NO: 266396 - RNA, 19 nt, Artificial Sequence
  Description of Artificial Sequence: Synthetic oligonucleotide
  Sense strand starting at position 581 of SEQ ID NO: 3425
uguuacucacacugucauu

SEQ ID NO: 266397 - RNA, 19 nt, Artificial Sequence
  Description of Artificial Sequence: Synthetic oligonucleotide
  Antisense strand to SEQ ID NO: 266396
aaugacagugugaguaaca

SEQ ID NO: 266398 - RNA, 19 nt, Artificial Sequence
  Description of Artificial Sequence: Synthetic oligonucleotide
  Sense strand starting at position 587 of SEQ ID NO: 3425
ucacacugucauuggauca

SEQ ID NO: 266399 - RNA, 19 nt, Artificial Sequence
  Description of Artificial Sequence: Synthetic oligonucleotide
  Antisense strand to SEQ ID NO: 266398
ugauccaaugacaguguga

SEQ ID NO: 266400 - RNA, 19 nt, Artificial Sequence
  Description of Artificial Sequence: Synthetic oligonucleotide
  Sense strand starting at position 921 of SEQ ID NO: 3425
gccuuauugcauuaaggau

SEQ ID NO: 266401 - RNA, 19 nt, Artificial Sequence
  Description of Artificial Sequence: Synthetic oligonucleotide
  Antisense strand to SEQ ID NO: 266400
auccuuaaugcaauaaggc

SEQ ID NO: 266402 - RNA, 19 nt, Artificial Sequence
  Description of Artificial Sequence: Synthetic oligonucleotide
  Sense strand starting at position 951 of SEQ ID NO: 3425
gcagaaauacacugauagu

SEQ ID NO: 266403 - RNA, 19 nt, Artificial Sequence
  Description of Artificial Sequence: Synthetic oligonucleotide
  Antisense strand to SEQ ID NO: 266402
acuaucaguguauuucugc

SEQ ID NO: 266404 - RNA, 19 nt, Artificial Sequence
  Description of Artificial Sequence: Synthetic oligonucleotide
  Sense strand starting at position 1036 of SEQ ID NO: 3425
cugugugacugucccaaau

SEQ ID NO: 266405 - RNA, 19 nt, Artificial Sequence
  Description of Artificial Sequence: Synthetic oligonucleotide
  Antisense strand to SEQ ID NO: 266404
auuugggacagucacacag

SEQ ID NO: 266406 - RNA, 19 nt, Artificial Sequence
  Description of Artificial Sequence: Synthetic oligonucleotide
  Sense strand starting at position 1190 of SEQ ID NO: 3425
ccuucugucuuucugaaag

SEQ ID NO: 266407 - RNA, 19 nt, Artificial Sequence
  Description of Artificial Sequence: Synthetic oligonucleotide
  Antisense strand to SEQ ID NO: 266406
cuuucagaaagacagaagg

SEQ ID NO: 266408 - RNA, 19 nt, Artificial Sequence
  Description of Artificial Sequence: Synthetic oligonucleotide
  Sense strand starting at position 1296 of SEQ ID NO: 3425
acuuccugacccugagauu

SEQ ID NO: 266409 - RNA, 19 nt, Artificial Sequence
  Description of Artificial Sequence: Synthetic oligonucleotide
  Antisense strand to SEQ ID NO: 266408
aaucucagggucaggaagu

SEQ ID NO: 266410 - RNA, 19 nt, Artificial Sequence
  Description of Artificial Sequence: Synthetic oligonucleotide
  Sense strand starting at position 1310 of SEQ ID NO: 3425
agauuugugccauggcaca

SEQ ID NO: 266411 - RNA, 19 nt, Artificial Sequence
  Description of Artificial Sequence: Synthetic oligonucleotide
  Antisense strand to SEQ ID NO: 266410
ugugccauggcacaaaucu

SEQ ID NO: 266412 - RNA, 19 nt, Artificial Sequence
  Description of Artificial Sequence: Synthetic oligonucleotide
  Sense strand starting at position 1339 of SEQ ID NO: 3425
ggcacuuccguuuacauau

SEQ ID NO: 266413 - RNA, 19 nt, Artificial Sequence
  Description of Artificial Sequence: Synthetic oligonucleotide
  Antisense strand to SEQ ID NO: 266412
auauguaaacggaagugcc

SEQ ID NO: 266414 - RNA, 19 nt, Artificial Sequence
  Description of Artificial Sequence: Synthetic oligonucleotide
  Sense strand starting at position 1587 of SEQ ID NO: 3425
aggaguccuuauccugauu

SEQ ID NO: 266415 - RNA, 19 nt, Artificial Sequence
  Description of Artificial Sequence: Synthetic oligonucleotide
  Antisense strand to SEQ ID NO: 266414
aaucaggauaaggacuccu

SEQ ID NO: 266416 - RNA, 19 nt, Artificial Sequence
  Description of Artificial Sequence: Synthetic oligonucleotide
  Sense strand starting at position 1600 of SEQ ID NO: 3425
cugauucccagauggugaa

SEQ ID NO: 266417 - RNA, 19 nt, Artificial Sequence
  Description of Artificial Sequence: Synthetic oligonucleotide
  Antisense strand to SEQ ID NO: 266416
uucaccaucugggaaucag

SEQ ID NO: 266418 - RNA, 19 nt, Artificial Sequence
  Description of Artificial Sequence: Synthetic oligonucleotide
  Sense strand starting at position 1726 of SEQ ID NO: 3425
gugguaaucuccuuuccua

SEQ ID NO: 266419 - RNA, 19 nt, Artificial Sequence
  Description of Artificial Sequence: Synthetic oligonucleotide
  Antisense strand to SEQ ID NO: 266418
uaggaaaggagauuaccac

SEQ ID NO: 266420 - RNA, 19 nt, Artificial Sequence
  Description of Artificial Sequence: Synthetic oligonucleotide
  Sense strand starting at position 1854 of SEQ ID NO: 3425
ggcuuccucagagaguguu

SEQ ID NO: 266421 - RNA, 19 nt, Artificial Sequence
  Description of Artificial Sequence: Synthetic oligonucleotide
  Antisense strand to SEQ ID NO: 266420
aacacucucugaggaagcc

SEQ ID NO: 266422 - RNA, 19 nt, Artificial Sequence
  Description of Artificial Sequence: Synthetic oligonucleotide
  Sense strand starting at position 2007 of SEQ ID NO: 3425
guaagcauucccgaccuuu

SEQ ID NO: 266423 - RNA, 19 nt, Artificial Sequence
  Description of Artificial Sequence: Synthetic oligonucleotide
  Antisense strand to SEQ ID NO: 266422
aaaggucgggaaugcuuac

SEQ ID NO: 266424 - RNA, 19 nt, Artificial Sequence
  Description of Artificial Sequence: Synthetic oligonucleotide
  Sense strand starting at position 2300 of SEQ ID NO: 3425
gcccucaaaucugagauuu

SEQ ID NO: 266425 - RNA, 19 nt, Artificial Sequence
  Description of Artificial Sequence: Synthetic oligonucleotide
  Antisense strand to SEQ ID NO: 266424
aaaucucagauuugagggc

SEQ ID NO: 266426 - RNA, 19 nt, Artificial Sequence
  Description of Artificial Sequence: Synthetic oligonucleotide
  Sense strand starting at position 2366 of SEQ ID NO: 3425
gccaucuggccuuaacuca

SEQ ID NO: 266427 - RNA, 19 nt, Artificial Sequence
  Description of Artificial Sequence: Synthetic oligonucleotide
  Antisense strand to SEQ ID NO: 266426
ugaguuaaggccagauggc

SEQ ID NO: 266428 - RNA, 19 nt, Artificial Sequence
  Description of Artificial Sequence: Synthetic oligonucleotide
  Sense strand starting at position 2421 of SEQ ID NO: 3425
ggcaucuugcuccauuauu

SEQ ID NO: 266429 - RNA, 19 nt, Artificial Sequence
  Description of Artificial Sequence: Synthetic oligonucleotide
  Antisense strand to SEQ ID NO: 266428
aauaauggagcaagaugcc

SEQ ID NO: 266430 - RNA, 19 nt, Artificial Sequence
  Description of Artificial Sequence: Synthetic oligonucleotide
  Sense strand starting at position 2525 of SEQ ID NO: 3425
ggcuaaguacauuacauaa

SEQ ID NO: 266431 - RNA, 19 nt, Artificial Sequence
  Description of Artificial Sequence: Synthetic oligonucleotide
  Antisense strand to SEQ ID NO: 266430
uuauguaauguacuuagcc

SEQ ID NO: 266432 - RNA, 19 nt, Artificial Sequence
  Description of Artificial Sequence: Synthetic oligonucleotide
  Sense strand starting at position 2617 of SEQ ID NO: 3425
agaaauugaucaucuugcu

SEQ ID NO: 266433 - RNA, 19 nt, Artificial Sequence
  Description of Artificial Sequence: Synthetic oligonucleotide
  Antisense strand to SEQ ID NO: 266432
agcaagaugaucaauuucu

SEQ ID NO: 266434 - RNA, 19 nt, Artificial Sequence
  Description of Artificial Sequence: Synthetic oligonucleotide
  Sense strand starting at position 2771 of SEQ ID NO: 3425
uuagcuaucuguucuggaa

SEQ ID NO: 266435 - RNA, 19 nt, Artificial Sequence
  Description of Artificial Sequence: Synthetic oligonucleotide
  Antisense strand to SEQ ID NO: 266434
uuccagaacagauagcuaa

SEQ ID NO: 266436 - RNA, 19 nt, Artificial Sequence
  Description of Artificial Sequence: Synthetic oligonucleotide
  Sense strand starting at position 2801 of SEQ ID NO: 3425
caaaguguguggcuugaaa

SEQ ID NO: 266437 - RNA, 19 nt, Artificial Sequence
  Description of Artificial Sequence: Synthetic oligonucleotide
  Antisense strand to SEQ ID NO: 266436
uuucaagccacacacuuug

SEQ ID NO: 266438 - RNA, 19 nt, Artificial Sequence
  Description of Artificial Sequence: Synthetic oligonucleotide
  Sense strand starting at position 2803 of SEQ ID NO: 3425
aaguguguggcuugaaaua

SEQ ID NO: 266439 - RNA, 19 nt, Artificial Sequence
  Description of Artificial Sequence: Synthetic oligonucleotide
  Antisense strand to SEQ ID NO: 266438
uauuucaagccacacacuu

SEQ ID NO: 266440 - RNA, 19 nt, Artificial Sequence
  Description of Artificial Sequence: Synthetic oligonucleotide
  Sense strand starting at position 2840 of SEQ ID NO: 3425
aguuucuguggcuagaagu

SEQ ID NO: 266441 - RNA, 19 nt, Artificial Sequence
  Description of Artificial Sequence: Synthetic oligonucleotide
  Antisense strand to SEQ ID NO: 266440
acuucuagccacagaaacu

SEQ ID NO: 266442 - RNA, 19 nt, Artificial Sequence
  Description of Artificial Sequence: Synthetic oligonucleotide
  Sense strand starting at position 2884 of SEQ ID NO: 3425
ugcucaggguuucucauaa

SEQ ID NO: 266443 - RNA, 19 nt, Artificial Sequence
  Description of Artificial Sequence: Synthetic oligonucleotide
  Antisense strand to SEQ ID NO: 266442
uuaugagaaacccugagca

SEQ ID NO: 266444 - RNA, 19 nt, Artificial Sequence
  Description of Artificial Sequence: Synthetic oligonucleotide
  Sense strand starting at position 2995 of SEQ ID NO: 3425
guuucuuagggcuguagga

SEQ ID NO: 266445 - RNA, 19 nt, Artificial Sequence
  Description of Artificial Sequence: Synthetic oligonucleotide
  Antisense strand to SEQ ID NO: 266444
uccuacagcccuaagaaac

SEQ ID NO: 266446 - RNA, 19 nt, Artificial Sequence
  Description of Artificial Sequence: Synthetic oligonucleotide
  Sense strand starting at position 3146 of SEQ ID NO: 3425
uuuguaauauacucaagga

SEQ ID NO: 266447 - RNA, 19 nt, Artificial Sequence
  Description of Artificial Sequence: Synthetic oligonucleotide
  Antisense strand to SEQ ID NO: 266446
uccuugaguauauuacaaa

SEQ ID NO: 266448 - RNA, 19 nt, Artificial Sequence
  Description of Artificial Sequence: Synthetic oligonucleotide
  Sense strand starting at position 3153 of SEQ ID NO: 3425
uauacucaaggaugugaua

SEQ ID NO: 266449 - RNA, 19 nt, Artificial Sequence
  Description of Artificial Sequence: Synthetic oligonucleotide
  Antisense strand to SEQ ID NO: 266448
uaucacauccuugaguaua

SEQ ID NO: 266450 - RNA, 19 nt, Artificial Sequence
  Description of Artificial Sequence: Synthetic oligonucleotide
  Sense strand starting at position 3188 of SEQ ID NO: 3425
auauucuacucguuagaag

SEQ ID NO: 266451 - RNA, 19 nt, Artificial Sequence
  Description of Artificial Sequence: Synthetic oligonucleotide
  Antisense strand to SEQ ID NO: 266450
cuucuaacgaguagaauau

SEQ ID NO: 266452 - RNA, 19 nt, Artificial Sequence
  Description of Artificial Sequence: Synthetic oligonucleotide
  Sense strand starting at position 3189 of SEQ ID NO: 3425
uauucuacucguuagaagg

SEQ ID NO: 266453 - RNA, 19 nt, Artificial Sequence
  Description of Artificial Sequence: Synthetic oligonucleotide
  Antisense strand to SEQ ID NO: 266452
ccuucuaacgaguagaaua

SEQ ID NO: 266454 - RNA, 19 nt, Artificial Sequence
  Description of Artificial Sequence: Synthetic oligonucleotide
  Sense strand starting at position 3280 of SEQ ID NO: 3425
gagggccaucuuugaaagu

SEQ ID NO: 266455 - RNA, 19 nt, Artificial Sequence
  Description of Artificial Sequence: Synthetic oligonucleotide
  Antisense strand to SEQ ID NO: 266454
acuuucaaagauggcccuc

SEQ ID NO: 266456 - RNA, 19 nt, Artificial Sequence
  Description of Artificial Sequence: Synthetic oligonucleotide
  Sense strand starting at position 3306 of SEQ ID NO: 3425
gccaucugauugccacaaa

SEQ ID NO: 266457 - RNA, 19 nt, Artificial Sequence
  Description of Artificial Sequence: Synthetic oligonucleotide
  Antisense strand to SEQ ID NO: 266456
uuuguggcaaucagauggc

SEQ ID NO: 266458 - RNA, 19 nt, Artificial Sequence
  Description of Artificial Sequence: Synthetic oligonucleotide
  Sense strand starting at position 3362 of SEQ ID NO: 3425
aguagucucucaucuauuc

SEQ ID NO: 266459 - RNA, 19 nt, Artificial Sequence
  Description of Artificial Sequence: Synthetic oligonucleotide
  Antisense strand to SEQ ID NO: 266458
gaauagaugagagacuacu

SEQ ID NO: 266460 - RNA, 19 nt, Artificial Sequence
  Description of Artificial Sequence: Synthetic oligonucleotide
  Sense strand starting at position 30 of SEQ ID NO: 3426
acagguucuuaaucuagag

SEQ ID NO: 266461 - RNA, 19 nt, Artificial Sequence
  Description of Artificial Sequence: Synthetic oligonucleotide
  Antisense strand to SEQ ID NO: 266460
cucuagauuaagaaccugu

SEQ ID NO: 266462 - RNA, 19 nt, Artificial Sequence
  Description of Artificial Sequence: Synthetic oligonucleotide
  Sense strand starting at position 34 of SEQ ID NO: 3426
guucuuaaucuagagucaa

SEQ ID NO: 266463 - RNA, 19 nt, Artificial Sequence
  Description of Artificial Sequence: Synthetic oligonucleotide
  Antisense strand to SEQ ID NO: 266462
uugacucuagauuaagaac

SEQ ID NO: 266464 - RNA, 19 nt, Artificial Sequence
  Description of Artificial Sequence: Synthetic oligonucleotide
  Sense strand starting at position 45 of SEQ ID NO: 3426
agagucaaugcaugugaau

SEQ ID NO: 266465 - RNA, 19 nt, Artificial Sequence
  Description of Artificial Sequence: Synthetic oligonucleotide
  Antisense strand to SEQ ID NO: 266464
auucacaugcauugacucu

SEQ ID NO: 266466 - RNA, 19 nt, Artificial Sequence
  Description of Artificial Sequence: Synthetic oligonucleotide
  Sense strand starting at position 54 of SEQ ID NO: 3426
gcaugugaauccucuagaa

SEQ ID NO: 266467 - RNA, 19 nt, Artificial Sequence
  Description of Artificial Sequence: Synthetic oligonucleotide
  Antisense strand to SEQ ID NO: 266466
uucuagaggauucacaugc

SEQ ID NO: 266468 - RNA, 19 nt, Artificial Sequence
  Description of Artificial Sequence: Synthetic oligonucleotide
  Sense strand starting at position 83 of SEQ ID NO: 3426
auguuauguguacacgcau

SEQ ID NO: 266469 - RNA, 19 nt, Artificial Sequence
  Description of Artificial Sequence: Synthetic oligonucleotide
  Antisense strand to SEQ ID NO: 266468
augcguguacacauaacau

SEQ ID NO: 266470 - RNA, 19 nt, Artificial Sequence
  Description of Artificial Sequence: Synthetic oligonucleotide
  Sense strand starting at position 264 of SEQ ID NO: 3426
gcacaucacagagguaaag

SEQ ID NO: 266471 - RNA, 19 nt, Artificial Sequence
  Description of Artificial Sequence: Synthetic oligonucleotide
  Antisense strand to SEQ ID NO: 266470
cuuuaccucugugaugugc

SEQ ID NO: 266472 - RNA, 19 nt, Artificial Sequence
  Description of Artificial Sequence: Synthetic oligonucleotide
  Sense strand starting at position 395 of SEQ ID NO: 3426
gcuaaaguaguaggcuuaa

SEQ ID NO: 266473 - RNA, 19 nt, Artificial Sequence
  Description of Artificial Sequence: Synthetic oligonucleotide
  Antisense strand to SEQ ID NO: 266472
uuaagccuacuacuuuagc

SEQ ID NO: 266474 - RNA, 19 nt, Artificial Sequence
  Description of Artificial Sequence: Synthetic oligonucleotide
  Sense strand starting at position 404 of SEQ ID NO: 3426
guaggcuuaaccuaguaga

SEQ ID NO: 266475 - RNA, 19 nt, Artificial Sequence
  Description of Artificial Sequence: Synthetic oligonucleotide
  Antisense strand to SEQ ID NO: 266474
ucuacuagguuaagccuac

SEQ ID NO: 266476 - RNA, 19 nt, Artificial Sequence
  Description of Artificial Sequence: Synthetic oligonucleotide
  Sense strand starting at position 441 of SEQ ID NO: 3426
cuugacagagaaugugauu

SEQ ID NO: 266477 - RNA, 19 nt, Artificial Sequence
  Description of Artificial Sequence: Synthetic oligonucleotide
  Antisense strand to SEQ ID NO: 266476
aaucacauucucugucaag

SEQ ID NO: 266478 - RNA, 19 nt, Artificial Sequence
  Description of Artificial Sequence: Synthetic oligonucleotide
  Sense strand starting at position 624 of SEQ ID NO: 3426
gcccuugugacuugugaca

SEQ ID NO: 266479 - RNA, 19 nt, Artificial Sequence
  Description of Artificial Sequence: Synthetic oligonucleotide
  Antisense strand to SEQ ID NO: 266478
ugucacaagucacaagggc

SEQ ID NO: 266480 - RNA, 19 nt, Artificial Sequence
  Description of Artificial Sequence: Synthetic oligonucleotide
  Sense strand starting at position 744 of SEQ ID NO: 3426
auacauauacguggugauc

SEQ ID NO: 266481 - RNA, 19 nt, Artificial Sequence
  Description of Artificial Sequence: Synthetic oligonucleotide
  Antisense strand to SEQ ID NO: 266480
gaucaccacguauauguau

SEQ ID NO: 266482 - RNA, 19 nt, Artificial Sequence
  Description of Artificial Sequence: Synthetic oligonucleotide
  Sense strand starting at position 757 of SEQ ID NO: 3426
gugaucuuucuuuauggca

SEQ ID NO: 266483 - RNA, 19 nt, Artificial Sequence
  Description of Artificial Sequence: Synthetic oligonucleotide
  Antisense strand to SEQ ID NO: 266482
ugccauaaagaaagaucac

SEQ ID NO: 266484 - RNA, 19 nt, Artificial Sequence
  Description of Artificial Sequence: Synthetic oligonucleotide
  Sense strand starting at position 782 of SEQ ID NO: 3426
aagccuuguguuuggagga

SEQ ID NO: 266485 - RNA, 19 nt, Artificial Sequence
  Description of Artificial Sequence: Synthetic oligonucleotide
  Antisense strand to SEQ ID NO: 266484
uccuccaaacacaaggcuu

SEQ ID NO: 266486 - RNA, 19 nt, Artificial Sequence
  Description of Artificial Sequence: Synthetic oligonucleotide
  Sense strand starting at position 801 of SEQ ID NO: 3426
ugguguuuccgucacauuu

SEQ ID NO: 266487 - RNA, 19 nt, Artificial Sequence
  Description of Artificial Sequence: Synthetic oligonucleotide
  Antisense strand to SEQ ID NO: 266486
aaaugugacggaaacacca

SEQ ID NO: 266488 - RNA, 19 nt, Artificial Sequence
  Description of Artificial Sequence: Synthetic oligonucleotide
  Sense strand starting at position 844 of SEQ ID NO: 3426
agaaguggucaugggauga

SEQ ID NO: 266489 - RNA, 19 nt, Artificial Sequence
  Description of Artificial Sequence: Synthetic oligonucleotide
  Antisense strand to SEQ ID NO: 266488
ucaucccaugaccacuucu

SEQ ID NO: 266490 - RNA, 19 nt, Artificial Sequence
  Description of Artificial Sequence: Synthetic oligonucleotide
  Sense strand starting at position 857 of SEQ ID NO: 3426
ggaugauuaagcuaguccu

SEQ ID NO: 266491 - RNA, 19 nt, Artificial Sequence
  Description of Artificial Sequence: Synthetic oligonucleotide
  Antisense strand to SEQ ID NO: 266490
aggacuagcuuaaucaucc

SEQ ID NO: 266492 - RNA, 19 nt, Artificial Sequence
  Description of Artificial Sequence: Synthetic oligonucleotide
  Sense strand starting at position 904 of SEQ ID NO: 3426
ggucacaaacgcgaauaaa

SEQ ID NO: 266493 - RNA, 19 nt, Artificial Sequence
  Description of Artificial Sequence: Synthetic oligonucleotide
  Antisense strand to SEQ ID NO: 266492
uuuauucgcguuugugacc

SEQ ID NO: 266494 - RNA, 19 nt, Artificial Sequence
  Description of Artificial Sequence: Synthetic oligonucleotide
  Sense strand starting at position 998 of SEQ ID NO: 3426
agcccauuccuucggaaag

SEQ ID NO: 266495 - RNA, 19 nt, Artificial Sequence
  Description of Artificial Sequence: Synthetic oligonucleotide
  Antisense strand to SEQ ID NO: 266494
cuuuccgaaggaaugggcu

SEQ ID NO: 266496 - RNA, 19 nt, Artificial Sequence
  Description of Artificial Sequence: Synthetic oligonucleotide
  Sense strand starting at position 1919 of SEQ ID NO: 3426
aaccgaaaggccuagagua

SEQ ID NO: 266497 - RNA, 19 nt, Artificial Sequence
  Description of Artificial Sequence: Synthetic oligonucleotide
  Antisense strand to SEQ ID NO: 266496
uacucuaggccuuucgguu

SEQ ID NO: 266498 - RNA, 19 nt, Artificial Sequence
  Description of Artificial Sequence: Synthetic oligonucleotide
  Sense strand starting at position 2250 of SEQ ID NO: 3426
gauugaacuucuguagaug

SEQ ID NO: 266499 - RNA, 19 nt, Artificial Sequence
  Description of Artificial Sequence: Synthetic oligonucleotide
  Antisense strand to SEQ ID NO: 266498
caucuacagaaguucaauc

SEQ ID NO: 266500 - RNA, 19 nt, Artificial Sequence
  Description of Artificial Sequence: Synthetic oligonucleotide
  Sense strand starting at position 2261 of SEQ ID NO: 3426
uguagaugaucucucaggu

SEQ ID NO: 266501 - RNA, 19 nt, Artificial Sequence
  Description of Artificial Sequence: Synthetic oligonucleotide
  Antisense strand to SEQ ID NO: 266500
accugagagaucaucuaca

SEQ ID NO: 266502 - RNA, 19 nt, Artificial Sequence
  Description of Artificial Sequence: Synthetic oligonucleotide
  Sense strand starting at position 2309 of SEQ ID NO: 3426
aggagucucccaggcauaa

SEQ ID NO: 266503 - RNA, 19 nt, Artificial Sequence
  Description of Artificial Sequence: Synthetic oligonucleotide
  Antisense strand to SEQ ID NO: 266502
uuaugccugggagacuccu

SEQ ID NO: 266504 - RNA, 19 nt, Artificial Sequence
  Description of Artificial Sequence: Synthetic oligonucleotide
  Sense strand starting at position 2637 of SEQ ID NO: 3426
cugcuuucugcuuugcauu

SEQ ID NO: 266505 - RNA, 19 nt, Artificial Sequence
  Description of Artificial Sequence: Synthetic oligonucleotide
  Antisense strand to SEQ ID NO: 266504
aaugcaaagcagaaagcag

SEQ ID NO: 266506 - RNA, 19 nt, Artificial Sequence
  Description of Artificial Sequence: Synthetic oligonucleotide
  Sense strand starting at position 2684 of SEQ ID NO: 3426
aaccguaaaugccuugaga

SEQ ID NO: 266507 - RNA, 19 nt, Artificial Sequence
  Description of Artificial Sequence: Synthetic oligonucleotide
  Antisense strand to SEQ ID NO: 266506
ucucaaggcauuuacgguu

SEQ ID NO: 266508 - RNA, 19 nt, Artificial Sequence
  Description of Artificial Sequence: Synthetic oligonucleotide
  Sense strand starting at position 2749 of SEQ ID NO: 3426
gggagaugcucaguaagua

SEQ ID NO: 266509 - RNA, 19 nt, Artificial Sequence
  Description of Artificial Sequence: Synthetic oligonucleotide
  Antisense strand to SEQ ID NO: 266508
uacuuacugagcaucuccc

SEQ ID NO: 266510 - RNA, 19 nt, Artificial Sequence
  Description of Artificial Sequence: Synthetic oligonucleotide
  Sense strand starting at position 2750 of SEQ ID NO: 3426
ggagaugcucaguaaguau

SEQ ID NO: 266511 - RNA, 19 nt, Artificial Sequence
  Description of Artificial Sequence: Synthetic oligonucleotide
  Antisense strand to SEQ ID NO: 266510
auacuuacugagcaucucc

SEQ ID NO: 266512 - RNA, 19 nt, Artificial Sequence
  Description of Artificial Sequence: Synthetic oligonucleotide
  Sense strand starting at position 2787 of SEQ ID NO: 3426
ucaaguggcauugauagua

SEQ ID NO: 266513 - RNA, 19 nt, Artificial Sequence
  Description of Artificial Sequence: Synthetic oligonucleotide
  Antisense strand to SEQ ID NO: 266512
uacuaucaaugccacuuga

SEQ ID NO: 266514 - RNA, 19 nt, Artificial Sequence
  Description of Artificial Sequence: Synthetic oligonucleotide
  Sense strand starting at position 3011 of SEQ ID NO: 3426
cuaaauuaaccagggcaga

SEQ ID NO: 266515 - RNA, 19 nt, Artificial Sequence
  Description of Artificial Sequence: Synthetic oligonucleotide
  Antisense strand to SEQ ID NO: 266514
ucugcccugguuaauuuag

SEQ ID NO: 266516 - RNA, 19 nt, Artificial Sequence
  Description of Artificial Sequence: Synthetic oligonucleotide
  Sense strand starting at position 3042 of SEQ ID NO: 3426
ggucauuucugggaccuaa

SEQ ID NO: 266517 - RNA, 19 nt, Artificial Sequence
  Description of Artificial Sequence: Synthetic oligonucleotide
  Antisense strand to SEQ ID NO: 266516
uuaggucccagaaaugacc

SEQ ID NO: 266518 - RNA, 19 nt, Artificial Sequence
  Description of Artificial Sequence: Synthetic oligonucleotide
  Sense strand starting at position 3300 of SEQ ID NO: 3426
gaugguagcccuugaccua

SEQ ID NO: 266519 - RNA, 19 nt, Artificial Sequence
  Description of Artificial Sequence: Synthetic oligonucleotide
  Antisense strand to SEQ ID NO: 266518
uaggucaagggcuaccauc

SEQ ID NO: 266520 - RNA, 19 nt, Artificial Sequence
  Description of Artificial Sequence: Synthetic oligonucleotide
  Sense strand starting at position 3346 of SEQ ID NO: 3426
aagagagguuugucaggcu

SEQ ID NO: 266521 - RNA, 19 nt, Artificial Sequence
  Description of Artificial Sequence: Synthetic oligonucleotide
  Antisense strand to SEQ ID NO: 266520
agccugacaaaccucucuu

SEQ ID NO: 266522 - RNA, 19 nt, Artificial Sequence
  Description of Artificial Sequence: Synthetic oligonucleotide
  Sense strand starting at position 3425 of SEQ ID NO: 3426
ucaacuuaccaggaaucgu

SEQ ID NO: 266523 - RNA, 19 nt, Artificial Sequence
  Description of Artificial Sequence: Synthetic oligonucleotide
  Antisense strand to SEQ ID NO: 266522
acgauuccugguaaguuga

SEQ ID NO: 266524 - RNA, 19 nt, Artificial Sequence
  Description of Artificial Sequence: Synthetic oligonucleotide
  Sense strand starting at position 3434 of SEQ ID NO: 3426
caggaaucguguucucuag

SEQ ID NO: 266525 - RNA, 19 nt, Artificial Sequence
  Description of Artificial Sequence: Synthetic oligonucleotide
  Antisense strand to SEQ ID NO: 266524
cuagagaacacgauuccug

SEQ ID NO: 266526 - RNA, 19 nt, Artificial Sequence
  Description of Artificial Sequence: Synthetic oligonucleotide
  Sense strand starting at position 3436 of SEQ ID NO: 3426
ggaaucguguucucuagua

SEQ ID NO: 266527 - RNA, 19 nt, Artificial Sequence
  Description of Artificial Sequence: Synthetic oligonucleotide
  Antisense strand to SEQ ID NO: 266526
uacuagagaacacgauucc

SEQ ID NO: 266528 - RNA, 19 nt, Artificial Sequence
  Description of Artificial Sequence: Synthetic oligonucleotide
  Sense strand starting at position 3495 of SEQ ID NO: 3426
cagugagugcaguaauaca

SEQ ID NO: 266529 - RNA, 19 nt, Artificial Sequence
  Description of Artificial Sequence: Synthetic oligonucleotide
  Antisense strand to SEQ ID NO: 266528
uguauuacugcacucacug

SEQ ID NO: 266530 - RNA, 19 nt, Artificial Sequence
  Description of Artificial Sequence: Synthetic oligonucleotide
  Sense strand starting at position 3698 of SEQ ID NO: 3426
aggccuuucccacaggauu

SEQ ID NO: 266531 - RNA, 19 nt, Artificial Sequence
  Description of Artificial Sequence: Synthetic oligonucleotide
  Antisense strand to SEQ ID NO: 266530
aauccugugggaaaggccu

SEQ ID NO: 266532 - RNA, 19 nt, Artificial Sequence
  Description of Artificial Sequence: Synthetic oligonucleotide
  Sense strand starting at position 3778 of SEQ ID NO: 3426
agguucccuuucucuagaa

SEQ ID NO: 266533 - RNA, 19 nt, Artificial Sequence
  Description of Artificial Sequence: Synthetic oligonucleotide
  Antisense strand to SEQ ID NO: 266532
uucuagagaaagggaaccu

SEQ ID NO: 266534 - RNA, 19 nt, Artificial Sequence
  Description of Artificial Sequence: Synthetic oligonucleotide
  Sense strand starting at position 3779 of SEQ ID NO: 3426
gguucccuuucucuagaaa

SEQ ID NO: 266535 - RNA, 19 nt, Artificial Sequence
  Description of Artificial Sequence: Synthetic oligonucleotide
  Antisense strand to SEQ ID NO: 266534
uuucuagagaaagggaacc

SEQ ID NO: 266536 - RNA, 19 nt, Artificial Sequence
  Description of Artificial Sequence: Synthetic oligonucleotide
  Sense strand starting at position 3780 of SEQ ID NO: 3426
guucccuuucucuagaaag

SEQ ID NO: 266537 - RNA, 19 nt, Artificial Sequence
  Description of Artificial Sequence: Synthetic oligonucleotide
  Antisense strand to SEQ ID NO: 266536
cuuucuagagaaagggaac

SEQ ID NO: 266538 - RNA, 19 nt, Artificial Sequence
  Description of Artificial Sequence: Synthetic oligonucleotide
  Sense strand starting at position 3926 of SEQ ID NO: 3426
ggauguccuguacagugua

SEQ ID NO: 266539 - RNA, 19 nt, Artificial Sequence
  Description of Artificial Sequence: Synthetic oligonucleotide
  Antisense strand to SEQ ID NO: 266538
uacacuguacaggacaucc

SEQ ID NO: 266540 - RNA, 19 nt, Artificial Sequence
  Description of Artificial Sequence: Synthetic oligonucleotide
  Sense strand starting at position 7 of SEQ ID NO: 3427
cccugauugcaacagaauu

SEQ ID NO: 266541 - RNA, 19 nt, Artificial Sequence
  Description of Artificial Sequence: Synthetic oligonucleotide
  Antisense strand to SEQ ID NO: 266540
aauucuguugcaaucaggg

SEQ ID NO: 266542 - RNA, 19 nt, Artificial Sequence
  Description of Artificial Sequence: Synthetic oligonucleotide
  Sense strand starting at position 36 of SEQ ID NO: 3427
gugguauauacuggcauua

SEQ ID NO: 266543 - RNA, 19 nt, Artificial Sequence
  Description of Artificial Sequence: Synthetic oligonucleotide
  Antisense strand to SEQ ID NO: 266542
uaaugccaguauauaccac

SEQ ID NO: 266544 - RNA, 19 nt, Artificial Sequence
  Description of Artificial Sequence: Synthetic oligonucleotide
  Sense strand starting at position 386 of SEQ ID NO: 3427
ugucaagugcuuuaucaga

SEQ ID NO: 266545 - RNA, 19 nt, Artificial Sequence
  Description of Artificial Sequence: Synthetic oligonucleotide
  Antisense strand to SEQ ID NO: 266544
ucugauaaagcacuugaca

SEQ ID NO: 266546 - RNA, 19 nt, Artificial Sequence
  Description of Artificial Sequence: Synthetic oligonucleotide
  Sense strand starting at position 388 of SEQ ID NO: 3427
ucaagugcuuuaucagaau

SEQ ID NO: 266547 - RNA, 19 nt, Artificial Sequence
  Description of Artificial Sequence: Synthetic oligonucleotide
  Antisense strand to SEQ ID NO: 266546
auucugauaaagcacuuga

SEQ ID NO: 266548 - RNA, 19 nt, Artificial Sequence
  Description of Artificial Sequence: Synthetic oligonucleotide
  Sense strand starting at position 864 of SEQ ID NO: 3427
ucuauuuaaugagaugaag

SEQ ID NO: 266549 - RNA, 19 nt, Artificial Sequence
  Description of Artificial Sequence: Synthetic oligonucleotide
  Antisense strand to SEQ ID NO: 266548
cuucaucucauuaaauaga

SEQ ID NO: 266550 - RNA, 19 nt, Artificial Sequence
  Description of Artificial Sequence: Synthetic oligonucleotide
  Sense strand starting at position 875 of SEQ ID NO: 3427
agaugaagaugcuuguuua

SEQ ID NO: 266551 - RNA, 19 nt, Artificial Sequence
  Description of Artificial Sequence: Synthetic oligonucleotide
  Antisense strand to SEQ ID NO: 266550
uaaacaagcaucuucaucu

SEQ ID NO: 266552 - RNA, 19 nt, Artificial Sequence
  Description of Artificial Sequence: Synthetic oligonucleotide
  Sense strand starting at position 876 of SEQ ID NO: 3427
gaugaagaugcuuguuuaa

SEQ ID NO: 266553 - RNA, 19 nt, Artificial Sequence
  Description of Artificial Sequence: Synthetic oligonucleotide
  Antisense strand to SEQ ID NO: 266552
uuaaacaagcaucuucauc

SEQ ID NO: 266554 - RNA, 19 nt, Artificial Sequence
  Description of Artificial Sequence: Synthetic oligonucleotide
  Sense strand starting at position 878 of SEQ ID NO: 3427
ugaagaugcuuguuuaaca

SEQ ID NO: 266555 - RNA, 19 nt, Artificial Sequence
  Description of Artificial Sequence: Synthetic oligonucleotide
  Antisense strand to SEQ ID NO: 266554
uguuaaacaagcaucuuca

SEQ ID NO: 266556 - RNA, 19 nt, Artificial Sequence
  Description of Artificial Sequence: Synthetic oligonucleotide
  Sense strand starting at position 879 of SEQ ID NO: 3427
gaagaugcuuguuuaacac

SEQ ID NO: 266557 - RNA, 19 nt, Artificial Sequence
  Description of Artificial Sequence: Synthetic oligonucleotide
  Antisense strand to SEQ ID NO: 266556
guguuaaacaagcaucuuc

SEQ ID NO: 266558 - RNA, 19 nt, Artificial Sequence
  Description of Artificial Sequence: Synthetic oligonucleotide
  Sense strand starting at position 931 of SEQ ID NO: 3427
acucgaggucuuggaaguu

SEQ ID NO: 266559 - RNA, 19 nt, Artificial Sequence
  Description of Artificial Sequence: Synthetic oligonucleotide
  Antisense strand to SEQ ID NO: 266558
aacuuccaagaccucgagu

SEQ ID NO: 266560 - RNA, 19 nt, Artificial Sequence
  Description of Artificial Sequence: Synthetic oligonucleotide
  Sense strand starting at position 934 of SEQ ID NO: 3427
cgaggucuuggaaguuugu

SEQ ID NO: 266561 - RNA, 19 nt, Artificial Sequence
  Description of Artificial Sequence: Synthetic oligonucleotide
  Antisense strand to SEQ ID NO: 266560
acaaacuuccaagaccucg

SEQ ID NO: 266562 - RNA, 19 nt, Artificial Sequence
  Description of Artificial Sequence: Synthetic oligonucleotide
  Sense strand starting at position 1210 of SEQ ID NO: 3427
ccaagaguaccgggauuac

SEQ ID NO: 266563 - RNA, 19 nt, Artificial Sequence
  Description of Artificial Sequence: Synthetic oligonucleotide
  Antisense strand to SEQ ID NO: 266562
guaaucccgguacucuugg

SEQ ID NO: 266564 - RNA, 19 nt, Artificial Sequence
  Description of Artificial Sequence: Synthetic oligonucleotide
  Sense strand starting at position 1263 of SEQ ID NO: 3427
uucuaaugguccucauagu

SEQ ID NO: 266565 - RNA, 19 nt, Artificial Sequence
  Description of Artificial Sequence: Synthetic oligonucleotide
  Antisense strand to SEQ ID NO: 266564
acuaugaggaccauuagaa

SEQ ID NO: 266566 - RNA, 19 nt, Artificial Sequence
  Description of Artificial Sequence: Synthetic oligonucleotide
  Sense strand starting at position 1264 of SEQ ID NO: 3427
ucuaaugguccucauagua

SEQ ID NO: 266567 - RNA, 19 nt, Artificial Sequence
  Description of Artificial Sequence: Synthetic oligonucleotide
  Antisense strand to SEQ ID NO: 266566
uacuaugaggaccauuaga

SEQ ID NO: 266568 - RNA, 19 nt, Artificial Sequence
  Description of Artificial Sequence: Synthetic oligonucleotide
  Sense strand starting at position 1599 of SEQ ID NO: 3427
uagaguaagcacuguuuac

SEQ ID NO: 266569 - RNA, 19 nt, Artificial Sequence
  Description of Artificial Sequence: Synthetic oligonucleotide
  Antisense strand to SEQ ID NO: 266568
guaaacagugcuuacucua

SEQ ID NO: 266570 - RNA, 19 nt, Artificial Sequence
  Description of Artificial Sequence: Synthetic oligonucleotide
  Sense strand starting at position 1603 of SEQ ID NO: 3427
guaagcacuguuuacuauu

SEQ ID NO: 266571 - RNA, 19 nt, Artificial Sequence
  Description of Artificial Sequence: Synthetic oligonucleotide
  Antisense strand to SEQ ID NO: 266570
aauaguaaacagugcuuac

SEQ ID NO: 266572 - RNA, 19 nt, Artificial Sequence
  Description of Artificial Sequence: Synthetic oligonucleotide
  Sense strand starting at position 1933 of SEQ ID NO: 3427
ucaccagucccggaaacuu

SEQ ID NO: 266573 - RNA, 19 nt, Artificial Sequence
  Description of Artificial Sequence: Synthetic oligonucleotide
  Antisense strand to SEQ ID NO: 266572
aaguuuccgggacugguga

SEQ ID NO: 266574 - RNA, 19 nt, Artificial Sequence
  Description of Artificial Sequence: Synthetic oligonucleotide
  Sense strand starting at position 2307 of SEQ ID NO: 3427
uggcaucugcgauugcauu

SEQ ID NO: 266575 - RNA, 19 nt, Artificial Sequence
  Description of Artificial Sequence: Synthetic oligonucleotide
  Antisense strand to SEQ ID NO: 266574
aaugcaaucgcagaugcca

SEQ ID NO: 266576 - RNA, 19 nt, Artificial Sequence
  Description of Artificial Sequence: Synthetic oligonucleotide
  Sense strand starting at position 2308 of SEQ ID NO: 3427
ggcaucugcgauugcauuu

SEQ ID NO: 266577 - RNA, 19 nt, Artificial Sequence
  Description of Artificial Sequence: Synthetic oligonucleotide
  Antisense strand to SEQ ID NO: 266576
aaaugcaaucgcagaugcc

SEQ ID NO: 266578 - RNA, 19 nt, Artificial Sequence
  Description of Artificial Sequence: Synthetic oligonucleotide
  Sense strand starting at position 2358 of SEQ ID NO: 3427
aguggugaagcccaaguau

SEQ ID NO: 266579 - RNA, 19 nt, Artificial Sequence
  Description of Artificial Sequence: Synthetic oligonucleotide
  Antisense strand to SEQ ID NO: 266578
auacuugggcuucaccacu

SEQ ID NO: 266580 - RNA, 19 nt, Artificial Sequence
  Description of Artificial Sequence: Synthetic oligonucleotide
  Sense strand starting at position 2377 of SEQ ID NO: 3427
ggaguaacgucauuaauuc

SEQ ID NO: 266581 - RNA, 19 nt, Artificial Sequence
  Description of Artificial Sequence: Synthetic oligonucleotide
  Antisense strand to SEQ ID NO: 266580
gaauuaaugacguuacucc

SEQ ID NO: 266582 - RNA, 19 nt, Artificial Sequence
  Description of Artificial Sequence: Synthetic oligonucleotide
  Sense strand starting at position 2378 of SEQ ID NO: 3427
gaguaacgucauuaauucu

SEQ ID NO: 266583 - RNA, 19 nt, Artificial Sequence
  Description of Artificial Sequence: Synthetic oligonucleotide
  Antisense strand to SEQ ID NO: 266582
agaauuaaugacguuacuc

SEQ ID NO: 266584 - RNA, 19 nt, Artificial Sequence
  Description of Artificial Sequence: Synthetic oligonucleotide
  Sense strand starting at position 2439 of SEQ ID NO: 3427
cugguuuaguucuugggau

SEQ ID NO: 266585 - RNA, 19 nt, Artificial Sequence
  Description of Artificial Sequence: Synthetic oligonucleotide
  Antisense strand to SEQ ID NO: 266584
aucccaagaacuaaaccag

SEQ ID NO: 266586 - RNA, 19 nt, Artificial Sequence
  Description of Artificial Sequence: Synthetic oligonucleotide
  Sense strand starting at position 2441 of SEQ ID NO: 3427
gguuuaguucuugggauac

SEQ ID NO: 266587 - RNA, 19 nt, Artificial Sequence
  Description of Artificial Sequence: Synthetic oligonucleotide
  Antisense strand to SEQ ID NO: 266586
guaucccaagaacuaaacc

SEQ ID NO: 266588 - RNA, 19 nt, Artificial Sequence
  Description of Artificial Sequence: Synthetic oligonucleotide
  Sense strand starting at position 2487 of SEQ ID NO: 3427
guuguugcaacgucagagu

SEQ ID NO: 266589 - RNA, 19 nt, Artificial Sequence
  Description of Artificial Sequence: Synthetic oligonucleotide
  Antisense strand to SEQ ID NO: 266588
acucugacguugcaacaac

SEQ ID NO: 266590 - RNA, 19 nt, Artificial Sequence
  Description of Artificial Sequence: Synthetic oligonucleotide
  Sense strand starting at position 2948 of SEQ ID NO: 3427
aggaauguccuagggcuga

SEQ ID NO: 266591 - RNA, 19 nt, Artificial Sequence
  Description of Artificial Sequence: Synthetic oligonucleotide
  Antisense strand to SEQ ID NO: 266590
ucagcccuaggacauuccu

SEQ ID NO: 266592 - RNA, 19 nt, Artificial Sequence
  Description of Artificial Sequence: Synthetic oligonucleotide
  Sense strand starting at position 2975 of SEQ ID NO: 3427
agcaguucuguguaggauu

SEQ ID NO: 266593 - RNA, 19 nt, Artificial Sequence
  Description of Artificial Sequence: Synthetic oligonucleotide
  Antisense strand to SEQ ID NO: 266592
aauccuacacagaacugcu

SEQ ID NO: 266594 - RNA, 19 nt, Artificial Sequence
  Description of Artificial Sequence: Synthetic oligonucleotide
  Sense strand starting at position 3036 of SEQ ID NO: 3427
ugaggaaauuagccguaga

SEQ ID NO: 266595 - RNA, 19 nt, Artificial Sequence
  Description of Artificial Sequence: Synthetic oligonucleotide
  Antisense strand to SEQ ID NO: 266594
ucuacggcuaauuuccuca

SEQ ID NO: 266596 - RNA, 19 nt, Artificial Sequence
  Description of Artificial Sequence: Synthetic oligonucleotide
  Sense strand starting at position 3037 of SEQ ID NO: 3427
gaggaaauuagccguagag

SEQ ID NO: 266597 - RNA, 19 nt, Artificial Sequence
  Description of Artificial Sequence: Synthetic oligonucleotide
  Antisense strand to SEQ ID NO: 266596
cucuacggcuaauuuccuc

SEQ ID NO: 266598 - RNA, 19 nt, Artificial Sequence
  Description of Artificial Sequence: Synthetic oligonucleotide
  Sense strand starting at position 3039 of SEQ ID NO: 3427
ggaaauuagccguagagau

SEQ ID NO: 266599 - RNA, 19 nt, Artificial Sequence
  Description of Artificial Sequence: Synthetic oligonucleotide
  Antisense strand to SEQ ID NO: 266598
aucucuacggcuaauuucc

SEQ ID NO: 266600 - RNA, 19 nt, Artificial Sequence
  Description of Artificial Sequence: Synthetic oligonucleotide
  Sense strand starting at position 3041 of SEQ ID NO: 3427
aaauuagccguagagaugu

SEQ ID NO: 266601 - RNA, 19 nt, Artificial Sequence
  Description of Artificial Sequence: Synthetic oligonucleotide
  Antisense strand to SEQ ID NO: 266600
acaucucuacggcuaauuu

SEQ ID NO: 266602 - RNA, 19 nt, Artificial Sequence
  Description of Artificial Sequence: Synthetic oligonucleotide
  Sense strand starting at position 3052 of SEQ ID NO: 3427
agagaugucugaguauaag

SEQ ID NO: 266603 - RNA, 19 nt, Artificial Sequence
  Description of Artificial Sequence: Synthetic oligonucleotide
  Antisense strand to SEQ ID NO: 266602
cuuauacucagacaucucu

SEQ ID NO: 266604 - RNA, 19 nt, Artificial Sequence
  Description of Artificial Sequence: Synthetic oligonucleotide
  Sense strand starting at position 3112 of SEQ ID NO: 3427
gaagguaucuggguuauug

SEQ ID NO: 266605 - RNA, 19 nt, Artificial Sequence
  Description of Artificial Sequence: Synthetic oligonucleotide
  Antisense strand to SEQ ID NO: 266604
caauaacccagauaccuuc

SEQ ID NO: 266606 - RNA, 19 nt, Artificial Sequence
  Description of Artificial Sequence: Synthetic oligonucleotide
  Sense strand starting at position 3189 of SEQ ID NO: 3427
gcuugaaucggguaggaua

SEQ ID NO: 266607 - RNA, 19 nt, Artificial Sequence
  Description of Artificial Sequence: Synthetic oligonucleotide
  Antisense strand to SEQ ID NO: 266606
uauccuacccgauucaagc

SEQ ID NO: 266608 - RNA, 19 nt, Artificial Sequence
  Description of Artificial Sequence: Synthetic oligonucleotide
  Sense strand starting at position 3197 of SEQ ID NO: 3427
cggguaggauaucuucuau

SEQ ID NO: 266609 - RNA, 19 nt, Artificial Sequence
  Description of Artificial Sequence: Synthetic oligonucleotide
  Antisense strand to SEQ ID NO: 266608
auagaagauauccuacccg

SEQ ID NO: 266610 - RNA, 19 nt, Artificial Sequence
  Description of Artificial Sequence: Synthetic oligonucleotide
  Sense strand starting at position 3660 of SEQ ID NO: 3427
cgcuguaagacugagaaau

SEQ ID NO: 266611 - RNA, 19 nt, Artificial Sequence
  Description of Artificial Sequence: Synthetic oligonucleotide
  Antisense strand to SEQ ID NO: 266610
auuucucagucuuacagcg

SEQ ID NO: 266612 - RNA, 19 nt, Artificial Sequence
  Description of Artificial Sequence: Synthetic oligonucleotide
  Sense strand starting at position 3671 of SEQ ID NO: 3427
ugagaaaucacguaguccu

SEQ ID NO: 266613 - RNA, 19 nt, Artificial Sequence
  Description of Artificial Sequence: Synthetic oligonucleotide
  Antisense strand to SEQ ID NO: 266612
aggacuacgugauuucuca

SEQ ID NO: 266614 - RNA, 19 nt, Artificial Sequence
  Description of Artificial Sequence: Synthetic oligonucleotide
  Sense strand starting at position 3682 of SEQ ID NO: 3427
guaguccuuccugaaacca

SEQ ID NO: 266615 - RNA, 19 nt, Artificial Sequence
  Description of Artificial Sequence: Synthetic oligonucleotide
  Antisense strand to SEQ ID NO: 266614
ugguuucaggaaggacuac

SEQ ID NO: 266616 - RNA, 19 nt, Artificial Sequence
  Description of Artificial Sequence: Synthetic oligonucleotide
  Sense strand starting at position 3797 of SEQ ID NO: 3427
ggaaauugcaguggcaaga

SEQ ID NO: 266617 - RNA, 19 nt, Artificial Sequence
  Description of Artificial Sequence: Synthetic oligonucleotide
  Antisense strand to SEQ ID NO: 266616
ucuugccacugcaauuucc

SEQ ID NO: 266618 - RNA, 19 nt, Artificial Sequence
  Description of Artificial Sequence: Synthetic oligonucleotide
  Sense strand starting at position 3891 of SEQ ID NO: 3427
ucuuuaauguugucacuua

SEQ ID NO: 266619 - RNA, 19 nt, Artificial Sequence
  Description of Artificial Sequence: Synthetic oligonucleotide
  Antisense strand to SEQ ID NO: 266618
uaagugacaacauuaaaga

SEQ ID NO: 266620 - RNA, 19 nt, Artificial Sequence
  Description of Artificial Sequence: Synthetic oligonucleotide
  Sense strand starting at position 25 of SEQ ID NO: 3429
gcacuaaaugcuuacugca

SEQ ID NO: 266621 - RNA, 19 nt, Artificial Sequence
  Description of Artificial Sequence: Synthetic oligonucleotide
  Antisense strand to SEQ ID NO: 266620
ugcaguaagcauuuagugc

SEQ ID NO: 266622 - RNA, 19 nt, Artificial Sequence
  Description of Artificial Sequence: Synthetic oligonucleotide
  Sense strand starting at position 32 of SEQ ID NO: 3429
augcuuacugcauagaaug

SEQ ID NO: 266623 - RNA, 19 nt, Artificial Sequence
  Description of Artificial Sequence: Synthetic oligonucleotide
  Antisense strand to SEQ ID NO: 266622
cauucuaugcaguaagcau

SEQ ID NO: 266624 - RNA, 19 nt, Artificial Sequence
  Description of Artificial Sequence: Synthetic oligonucleotide
  Sense strand starting at position 65 of SEQ ID NO: 3429
cccugauugcaacagaauu

SEQ ID NO: 266625 - RNA, 19 nt, Artificial Sequence
  Description of Artificial Sequence: Synthetic oligonucleotide
  Antisense strand to SEQ ID NO: 266624
aauucuguugcaaucaggg

SEQ ID NO: 266626 - RNA, 19 nt, Artificial Sequence
  Description of Artificial Sequence: Synthetic oligonucleotide
  Sense strand starting at position 444 of SEQ ID NO: 3429
ugucaagugcuuuaucaga

SEQ ID NO: 266627 - RNA, 19 nt, Artificial Sequence
  Description of Artificial Sequence: Synthetic oligonucleotide
  Antisense strand to SEQ ID NO: 266626
ucugauaaagcacuugaca

SEQ ID NO: 266628 - RNA, 19 nt, Artificial Sequence
  Description of Artificial Sequence: Synthetic oligonucleotide
  Sense strand starting at position 446 of SEQ ID NO: 3429
ucaagugcuuuaucagaau

SEQ ID NO: 266629 - RNA, 19 nt, Artificial Sequence
  Description of Artificial Sequence: Synthetic oligonucleotide
  Antisense strand to SEQ ID NO: 266628
auucugauaaagcacuuga

SEQ ID NO: 266630 - RNA, 19 nt, Artificial Sequence
  Description of Artificial Sequence: Synthetic oligonucleotide
  Sense strand starting at position 922 of SEQ ID NO: 3429
ucuauuuaaugagaugaag

SEQ ID NO: 266631 - RNA, 19 nt, Artificial Sequence
  Description of Artificial Sequence: Synthetic oligonucleotide
  Antisense strand to SEQ ID NO: 266630
cuucaucucauuaaauaga

SEQ ID NO: 266632 - RNA, 19 nt, Artificial Sequence
  Description of Artificial Sequence: Synthetic oligonucleotide
  Sense strand starting at position 933 of SEQ ID NO: 3429
agaugaagaugcuuguuua

SEQ ID NO: 266633 - RNA, 19 nt, Artificial Sequence
  Description of Artificial Sequence: Synthetic oligonucleotide
  Antisense strand to SEQ ID NO: 266632
uaaacaagcaucuucaucu

SEQ ID NO: 266634 - RNA, 19 nt, Artificial Sequence
  Description of Artificial Sequence: Synthetic oligonucleotide
  Sense strand starting at position 934 of SEQ ID NO: 3429
gaugaagaugcuuguuuaa

SEQ ID NO: 266635 - RNA, 19 nt, Artificial Sequence
  Description of Artificial Sequence: Synthetic oligonucleotide
  Antisense strand to SEQ ID NO: 266634
uuaaacaagcaucuucauc

SEQ ID NO: 266636 - RNA, 19 nt, Artificial Sequence
  Description of Artificial Sequence: Synthetic oligonucleotide
  Sense strand starting at position 936 of SEQ ID NO: 3429
ugaagaugcuuguuuaaca

SEQ ID NO: 266637 - RNA, 19 nt, Artificial Sequence
  Description of Artificial Sequence: Synthetic oligonucleotide
  Antisense strand to SEQ ID NO: 266636
uguuaaacaagcaucuuca

SEQ ID NO: 266638 - RNA, 19 nt, Artificial Sequence
  Description of Artificial Sequence: Synthetic oligonucleotide
  Sense strand starting at position 937 of SEQ ID NO: 3429
gaagaugcuuguuuaacac

SEQ ID NO: 266639 - RNA, 19 nt, Artificial Sequence
  Description of Artificial Sequence: Synthetic oligonucleotide
  Antisense strand to SEQ ID NO: 266638
guguuaaacaagcaucuuc

SEQ ID NO: 266640 - RNA, 19 nt, Artificial Sequence
  Description of Artificial Sequence: Synthetic oligonucleotide
  Sense strand starting at position 989 of SEQ ID NO: 3429
acucgaggucuuggaaguu

SEQ ID NO: 266641 - RNA, 19 nt, Artificial Sequence
  Description of Artificial Sequence: Synthetic oligonucleotide
  Antisense strand to SEQ ID NO: 266640
aacuuccaagaccucgagu

SEQ ID NO: 266642 - RNA, 19 nt, Artificial Sequence
  Description of Artificial Sequence: Synthetic oligonucleotide
  Sense strand starting at position 992 of SEQ ID NO: 3429
cgaggucuuggaaguuugu

SEQ ID NO: 266643 - RNA, 19 nt, Artificial Sequence
  Description of Artificial Sequence: Synthetic oligonucleotide
  Antisense strand to SEQ ID NO: 266642
acaaacuuccaagaccucg

SEQ ID NO: 266644 - RNA, 19 nt, Artificial Sequence
  Description of Artificial Sequence: Synthetic oligonucleotide
  Sense strand starting at position 1268 of SEQ ID NO: 3429
ccaagaguaccgggauuac

SEQ ID NO: 266645 - RNA, 19 nt, Artificial Sequence
  Description of Artificial Sequence: Synthetic oligonucleotide
  Antisense strand to SEQ ID NO: 266644
guaaucccgguacucuugg

SEQ ID NO: 266646 - RNA, 19 nt, Artificial Sequence
  Description of Artificial Sequence: Synthetic oligonucleotide
  Sense strand starting at position 1321 of SEQ ID NO: 3429
uucuaaugguccucauagu

SEQ ID NO: 266647 - RNA, 19 nt, Artificial Sequence
  Description of Artificial Sequence: Synthetic oligonucleotide
  Antisense strand to SEQ ID NO: 266646
acuaugaggaccauuagaa

SEQ ID NO: 266648 - RNA, 19 nt, Artificial Sequence
  Description of Artificial Sequence: Synthetic oligonucleotide
  Sense strand starting at position 1322 of SEQ ID NO: 3429
ucuaaugguccucauagua

SEQ ID NO: 266649 - RNA, 19 nt, Artificial Sequence
  Description of Artificial Sequence: Synthetic oligonucleotide
  Antisense strand to SEQ ID NO: 266648
uacuaugaggaccauuaga

SEQ ID NO: 266650 - RNA, 19 nt, Artificial Sequence
  Description of Artificial Sequence: Synthetic oligonucleotide
  Sense strand starting at position 1657 of SEQ ID NO: 3429
uagaguaagcacuguuuac

SEQ ID NO: 266651 - RNA, 19 nt, Artificial Sequence
  Description of Artificial Sequence: Synthetic oligonucleotide
  Antisense strand to SEQ ID NO: 266650
guaaacagugcuuacucua

SEQ ID NO: 266652 - RNA, 19 nt, Artificial Sequence
  Description of Artificial Sequence: Synthetic oligonucleotide
  Sense strand starting at position 1661 of SEQ ID NO: 3429
guaagcacuguuuacuauu

SEQ ID NO: 266653 - RNA, 19 nt, Artificial Sequence
  Description of Artificial Sequence: Synthetic oligonucleotide
  Antisense strand to SEQ ID NO: 266652
aauaguaaacagugcuuac

SEQ ID NO: 266654 - RNA, 19 nt, Artificial Sequence
  Description of Artificial Sequence: Synthetic oligonucleotide
  Sense strand starting at position 1991 of SEQ ID NO: 3429
ucaccagucccggaaacuu

SEQ ID NO: 266655 - RNA, 19 nt, Artificial Sequence
  Description of Artificial Sequence: Synthetic oligonucleotide
  Antisense strand to SEQ ID NO: 266654
aaguuuccgggacugguga

SEQ ID NO: 266656 - RNA, 19 nt, Artificial Sequence
  Description of Artificial Sequence: Synthetic oligonucleotide
  Sense strand starting at position 2365 of SEQ ID NO: 3429
uggcaucugcgauugcauu

SEQ ID NO: 266657 - RNA, 19 nt, Artificial Sequence
  Description of Artificial Sequence: Synthetic oligonucleotide
  Antisense strand to SEQ ID NO: 266656
aaugcaaucgcagaugcca

SEQ ID NO: 266658 - RNA, 19 nt, Artificial Sequence
  Description of Artificial Sequence: Synthetic oligonucleotide
  Sense strand starting at position 2366 of SEQ ID NO: 3429
ggcaucugcgauugcauuu

SEQ ID NO: 266659 - RNA, 19 nt, Artificial Sequence
  Description of Artificial Sequence: Synthetic oligonucleotide
  Antisense strand to SEQ ID NO: 266658
aaaugcaaucgcagaugcc

SEQ ID NO: 266660 - RNA, 19 nt, Artificial Sequence
  Description of Artificial Sequence: Synthetic oligonucleotide
  Sense strand starting at position 2416 of SEQ ID NO: 3429
aguggugaagcccaaguau

SEQ ID NO: 266661 - RNA, 19 nt, Artificial Sequence
  Description of Artificial Sequence: Synthetic oligonucleotide
  Antisense strand to SEQ ID NO: 266660
auacuugggcuucaccacu

SEQ ID NO: 266662 - RNA, 19 nt, Artificial Sequence
  Description of Artificial Sequence: Synthetic oligonucleotide
  Sense strand starting at position 2435 of SEQ ID NO: 3429
ggaguaacgucauuaauuc

SEQ ID NO: 266663 - RNA, 19 nt, Artificial Sequence
  Description of Artificial Sequence: Synthetic oligonucleotide
  Antisense strand to SEQ ID NO: 266662
gaauuaaugacguuacucc

SEQ ID NO: 266664 - RNA, 19 nt, Artificial Sequence
  Description of Artificial Sequence: Synthetic oligonucleotide
  Sense strand starting at position 2436 of SEQ ID NO: 3429
gaguaacgucauuaauucu

SEQ ID NO: 266665 - RNA, 19 nt, Artificial Sequence
  Description of Artificial Sequence: Synthetic oligonucleotide
  Antisense strand to SEQ ID NO: 266664
agaauuaaugacguuacuc

SEQ ID NO: 266666 - RNA, 19 nt, Artificial Sequence
  Description of Artificial Sequence: Synthetic oligonucleotide
  Sense strand starting at position 2497 of SEQ ID NO: 3429
cugguuuaguucuugggau

SEQ ID NO: 266667 - RNA, 19 nt, Artificial Sequence
  Description of Artificial Sequence: Synthetic oligonucleotide
  Antisense strand to SEQ ID NO: 266666
aucccaagaacuaaaccag

SEQ ID NO: 266668 - RNA, 19 nt, Artificial Sequence
  Description of Artificial Sequence: Synthetic oligonucleotide
  Sense strand starting at position 2499 of SEQ ID NO: 3429
gguuuaguucuugggauac

SEQ ID NO: 266669 - RNA, 19 nt, Artificial Sequence
  Description of Artificial Sequence: Synthetic oligonucleotide
  Antisense strand to SEQ ID NO: 266668
guaucccaagaacuaaacc

SEQ ID NO: 266670 - RNA, 19 nt, Artificial Sequence
  Description of Artificial Sequence: Synthetic oligonucleotide
  Sense strand starting at position 2545 of SEQ ID NO: 3429
guuguugcaacgucagagu

SEQ ID NO: 266671 - RNA, 19 nt, Artificial Sequence
  Description of Artificial Sequence: Synthetic oligonucleotide
  Antisense strand to SEQ ID NO: 266670
acucugacguugcaacaac

SEQ ID NO: 266672 - RNA, 19 nt, Artificial Sequence
  Description of Artificial Sequence: Synthetic oligonucleotide
  Sense strand starting at position 3006 of SEQ ID NO: 3429
aggaauguccuagggcuga

SEQ ID NO: 266673 - RNA, 19 nt, Artificial Sequence
  Description of Artificial Sequence: Synthetic oligonucleotide
  Antisense strand to SEQ ID NO: 266672
ucagcccuaggacauuccu

SEQ ID NO: 266674 - RNA, 19 nt, Artificial Sequence
  Description of Artificial Sequence: Synthetic oligonucleotide
  Sense strand starting at position 3033 of SEQ ID NO: 3429
agcaguucuguguaggauu

SEQ ID NO: 266675 - RNA, 19 nt, Artificial Sequence
  Description of Artificial Sequence: Synthetic oligonucleotide
  Antisense strand to SEQ ID NO: 266674
aauccuacacagaacugcu

SEQ ID NO: 266676 - RNA, 19 nt, Artificial Sequence
  Description of Artificial Sequence: Synthetic oligonucleotide
  Sense strand starting at position 3094 of SEQ ID NO: 3429
ugaggaaauuagccguaga

SEQ ID NO: 266677 - RNA, 19 nt, Artificial Sequence
  Description of Artificial Sequence: Synthetic oligonucleotide
  Antisense strand to SEQ ID NO: 266676
ucuacggcuaauuuccuca

SEQ ID NO: 266678 - RNA, 19 nt, Artificial Sequence
  Description of Artificial Sequence: Synthetic oligonucleotide
  Sense strand starting at position 3095 of SEQ ID NO: 3429
gaggaaauuagccguagag

SEQ ID NO: 266679 - RNA, 19 nt, Artificial Sequence
  Description of Artificial Sequence: Synthetic oligonucleotide
  Antisense strand to SEQ ID NO: 266678
cucuacggcuaauuuccuc

SEQ ID NO: 266680 - RNA, 19 nt, Artificial Sequence
  Description of Artificial Sequence: Synthetic oligonucleotide
  Sense strand starting at position 3097 of SEQ ID NO: 3429
ggaaauuagccguagagau

SEQ ID NO: 266681 - RNA, 19 nt, Artificial Sequence
  Description of Artificial Sequence: Synthetic oligonucleotide
  Antisense strand to SEQ ID NO: 266680
aucucuacggcuaauuucc

SEQ ID NO: 266682 - RNA, 19 nt, Artificial Sequence
  Description of Artificial Sequence: Synthetic oligonucleotide
  Sense strand starting at position 3099 of SEQ ID NO: 3429
aaauuagccguagagaugu

SEQ ID NO: 266683 - RNA, 19 nt, Artificial Sequence
  Description of Artificial Sequence: Synthetic oligonucleotide
  Antisense strand to SEQ ID NO: 266682
acaucucuacggcuaauuu

SEQ ID NO: 266684 - RNA, 19 nt, Artificial Sequence
  Description of Artificial Sequence: Synthetic oligonucleotide
  Sense strand starting at position 3110 of SEQ ID NO: 3429
agagaugucugaguauaag

SEQ ID NO: 266685 - RNA, 19 nt, Artificial Sequence
  Description of Artificial Sequence: Synthetic oligonucleotide
  Antisense strand to SEQ ID NO: 266684
cuuauacucagacaucucu

SEQ ID NO: 266686 - RNA, 19 nt, Artificial Sequence
  Description of Artificial Sequence: Synthetic oligonucleotide
  Sense strand starting at position 3170 of SEQ ID NO: 3429
gaagguaucuggguuauug

SEQ ID NO: 266687 - RNA, 19 nt, Artificial Sequence
  Description of Artificial Sequence: Synthetic oligonucleotide
  Antisense strand to SEQ ID NO: 266686
caauaacccagauaccuuc

SEQ ID NO: 266688 - RNA, 19 nt, Artificial Sequence
  Description of Artificial Sequence: Synthetic oligonucleotide
  Sense strand starting at position 3247 of SEQ ID NO: 3429
gcuugaaucggguaggaua

SEQ ID NO: 266689 - RNA, 19 nt, Artificial Sequence
  Description of Artificial Sequence: Synthetic oligonucleotide
  Antisense strand to SEQ ID NO: 266688
uauccuacccgauucaagc

SEQ ID NO: 266690 - RNA, 19 nt, Artificial Sequence
  Description of Artificial Sequence: Synthetic oligonucleotide
  Sense strand starting at position 3255 of SEQ ID NO: 3429
cggguaggauaucuucuau

SEQ ID NO: 266691 - RNA, 19 nt, Artificial Sequence
  Description of Artificial Sequence: Synthetic oligonucleotide
  Antisense strand to SEQ ID NO: 266690
auagaagauauccuacccg

SEQ ID NO: 266692 - RNA, 19 nt, Artificial Sequence
  Description of Artificial Sequence: Synthetic oligonucleotide
  Sense strand starting at position 3718 of SEQ ID NO: 3429
cgcuguaagacugagaaau

SEQ ID NO: 266693 - RNA, 19 nt, Artificial Sequence
  Description of Artificial Sequence: Synthetic oligonucleotide
  Antisense strand to SEQ ID NO: 266692
auuucucagucuuacagcg

SEQ ID NO: 266694 - RNA, 19 nt, Artificial Sequence
  Description of Artificial Sequence: Synthetic oligonucleotide
  Sense strand starting at position 3729 of SEQ ID NO: 3429
ugagaaaucacguaguccu

SEQ ID NO: 266695 - RNA, 19 nt, Artificial Sequence
  Description of Artificial Sequence: Synthetic oligonucleotide
  Antisense strand to SEQ ID NO: 266694
aggacuacgugauuucuca

SEQ ID NO: 266696 - RNA, 19 nt, Artificial Sequence
  Description of Artificial Sequence: Synthetic oligonucleotide
  Sense strand starting at position 3740 of SEQ ID NO: 3429
guaguccuuccugaaacca

SEQ ID NO: 266697 - RNA, 19 nt, Artificial Sequence
  Description of Artificial Sequence: Synthetic oligonucleotide
  Antisense strand to SEQ ID NO: 266696
ugguuucaggaaggacuac

SEQ ID NO: 266698 - RNA, 19 nt, Artificial Sequence
  Description of Artificial Sequence: Synthetic oligonucleotide
  Sense strand starting at position 3855 of SEQ ID NO: 3429
ggaaauugcaguggcaaga

SEQ ID NO: 266699 - RNA, 19 nt, Artificial Sequence
  Description of Artificial Sequence: Synthetic oligonucleotide
  Antisense strand to SEQ ID NO: 266698
ucuugccacugcaauuucc

SEQ ID NO: 266700 - RNA, 19 nt, Artificial Sequence
  Description of Artificial Sequence: Synthetic oligonucleotide
  Sense strand starting at position 159 of SEQ ID NO: 3428
cugauuugcugggaaccaa

SEQ ID NO: 266701 - RNA, 19 nt, Artificial Sequence
  Description of Artificial Sequence: Synthetic oligonucleotide
  Antisense strand to SEQ ID NO: 266700
uugguucccagcaaaucag

SEQ ID NO: 266702 - RNA, 19 nt, Artificial Sequence
  Description of Artificial Sequence: Synthetic oligonucleotide
  Sense strand starting at position 209 of SEQ ID NO: 3428
aucuguauucucuaaagua

SEQ ID NO: 266703 - RNA, 19 nt, Artificial Sequence
  Description of Artificial Sequence: Synthetic oligonucleotide
  Antisense strand to SEQ ID NO: 266702
uacuuuagagaauacagau

SEQ ID NO: 266704 - RNA, 19 nt, Artificial Sequence
  Description of Artificial Sequence: Synthetic oligonucleotide
  Sense strand starting at position 345 of SEQ ID NO: 3428
auuccauaguucuccagga

SEQ ID NO: 266705 - RNA, 19 nt, Artificial Sequence
  Description of Artificial Sequence: Synthetic oligonucleotide
  Antisense strand to SEQ ID NO: 266704
uccuggagaacuauggaau

SEQ ID NO: 266706 - RNA, 19 nt, Artificial Sequence
  Description of Artificial Sequence: Synthetic oligonucleotide
  Sense strand starting at position 379 of SEQ ID NO: 3428
ggaguaugcuacuuuguaa

SEQ ID NO: 266707 - RNA, 19 nt, Artificial Sequence
  Description of Artificial Sequence: Synthetic oligonucleotide
  Antisense strand to SEQ ID NO: 266706
uuacaaaguagcauacucc

SEQ ID NO: 266708 - RNA, 19 nt, Artificial Sequence
  Description of Artificial Sequence: Synthetic oligonucleotide
  Sense strand starting at position 382 of SEQ ID NO: 3428
guaugcuacuuuguaaauc

SEQ ID NO: 266709 - RNA, 19 nt, Artificial Sequence
  Description of Artificial Sequence: Synthetic oligonucleotide
  Antisense strand to SEQ ID NO: 266708
gauuuacaaaguagcauac

SEQ ID NO: 266710 - RNA, 19 nt, Artificial Sequence
  Description of Artificial Sequence: Synthetic oligonucleotide
  Sense strand starting at position 428 of SEQ ID NO: 3428
gccuaaauaccaggguuau

SEQ ID NO: 266711 - RNA, 19 nt, Artificial Sequence
  Description of Artificial Sequence: Synthetic oligonucleotide
  Antisense strand to SEQ ID NO: 266710
auaacccugguauuuaggc

SEQ ID NO: 266712 - RNA, 19 nt, Artificial Sequence
  Description of Artificial Sequence: Synthetic oligonucleotide
  Sense strand starting at position 429 of SEQ ID NO: 3428
ccuaaauaccaggguuaua

SEQ ID NO: 266713 - RNA, 19 nt, Artificial Sequence
  Description of Artificial Sequence: Synthetic oligonucleotide
  Antisense strand to SEQ ID NO: 266712
uauaacccugguauuuagg

SEQ ID NO: 266714 - RNA, 19 nt, Artificial Sequence
  Description of Artificial Sequence: Synthetic oligonucleotide
  Sense strand starting at position 441 of SEQ ID NO: 3428
gguuauagacuuuguaagg

SEQ ID NO: 266715 - RNA, 19 nt, Artificial Sequence
  Description of Artificial Sequence: Synthetic oligonucleotide
  Antisense strand to SEQ ID NO: 266714
ccuuacaaagucuauaacc

SEQ ID NO: 266716 - RNA, 19 nt, Artificial Sequence
  Description of Artificial Sequence: Synthetic oligonucleotide
  Sense strand starting at position 442 of SEQ ID NO: 3428
guuauagacuuuguaagga

SEQ ID NO: 266717 - RNA, 19 nt, Artificial Sequence
  Description of Artificial Sequence: Synthetic oligonucleotide
  Antisense strand to SEQ ID NO: 266716
uccuuacaaagucuauaac

SEQ ID NO: 266718 - RNA, 19 nt, Artificial Sequence
  Description of Artificial Sequence: Synthetic oligonucleotide
  Sense strand starting at position 712 of SEQ ID NO: 3428
gugagagauuaagauuuaa

SEQ ID NO: 266719 - RNA, 19 nt, Artificial Sequence
  Description of Artificial Sequence: Synthetic oligonucleotide
  Antisense strand to SEQ ID NO: 266718
uuaaaucuuaaucucucac

SEQ ID NO: 266720 - RNA, 19 nt, Artificial Sequence
  Description of Artificial Sequence: Synthetic oligonucleotide
  Sense strand starting at position 845 of SEQ ID NO: 3428
agggcuuuggcauggacau

SEQ ID NO: 266721 - RNA, 19 nt, Artificial Sequence
  Description of Artificial Sequence: Synthetic oligonucleotide
  Antisense strand to SEQ ID NO: 266720
auguccaugccaaagcccu

SEQ ID NO: 266722 - RNA, 19 nt, Artificial Sequence
  Description of Artificial Sequence: Synthetic oligonucleotide
  Sense strand starting at position 846 of SEQ ID NO: 3428
gggcuuuggcauggacaua

SEQ ID NO: 266723 - RNA, 19 nt, Artificial Sequence
  Description of Artificial Sequence: Synthetic oligonucleotide
  Antisense strand to SEQ ID NO: 266722
uauguccaugccaaagccc

SEQ ID NO: 266724 - RNA, 19 nt, Artificial Sequence
  Description of Artificial Sequence: Synthetic oligonucleotide
  Sense strand starting at position 967 of SEQ ID NO: 3428
auggucuacugcuugguaa

SEQ ID NO: 266725 - RNA, 19 nt, Artificial Sequence
  Description of Artificial Sequence: Synthetic oligonucleotide
  Antisense strand to SEQ ID NO: 266724
uuaccaagcaguagaccau

SEQ ID NO: 266726 - RNA, 19 nt, Artificial Sequence
  Description of Artificial Sequence: Synthetic oligonucleotide
  Sense strand starting at position 968 of SEQ ID NO: 3428
uggucuacugcuugguaaa

SEQ ID NO: 266727 - RNA, 19 nt, Artificial Sequence
  Description of Artificial Sequence: Synthetic oligonucleotide
  Antisense strand to SEQ ID NO: 266726
uuuaccaagcaguagacca

SEQ ID NO: 266728 - RNA, 19 nt, Artificial Sequence
  Description of Artificial Sequence: Synthetic oligonucleotide
  Sense strand starting at position 969 of SEQ ID NO: 3428
ggucuacugcuugguaaau

SEQ ID NO: 266729 - RNA, 19 nt, Artificial Sequence
  Description of Artificial Sequence: Synthetic oligonucleotide
  Antisense strand to SEQ ID NO: 266728
auuuaccaagcaguagacc

SEQ ID NO: 266730 - RNA, 19 nt, Artificial Sequence
  Description of Artificial Sequence: Synthetic oligonucleotide
  Sense strand starting at position 980 of SEQ ID NO: 3428
ugguaaaucuagccaugua

SEQ ID NO: 266731 - RNA, 19 nt, Artificial Sequence
  Description of Artificial Sequence: Synthetic oligonucleotide
  Antisense strand to SEQ ID NO: 266730
uacauggcuagauuuacca

SEQ ID NO: 266732 - RNA, 19 nt, Artificial Sequence
  Description of Artificial Sequence: Synthetic oligonucleotide
  Sense strand starting at position 1012 of SEQ ID NO: 3428
guugcaaaugcucauacuu

SEQ ID NO: 266733 - RNA, 19 nt, Artificial Sequence
  Description of Artificial Sequence: Synthetic oligonucleotide
  Antisense strand to SEQ ID NO: 266732
aaguaugagcauuugcaac

SEQ ID NO: 266734 - RNA, 19 nt, Artificial Sequence
  Description of Artificial Sequence: Synthetic oligonucleotide
  Sense strand starting at position 1135 of SEQ ID NO: 3428
uugugcuaggcauaaguaa

SEQ ID NO: 266735 - RNA, 19 nt, Artificial Sequence
  Description of Artificial Sequence: Synthetic oligonucleotide
  Antisense strand to SEQ ID NO: 266734
uuacuuaugccuagcacaa

SEQ ID NO: 266736 - RNA, 19 nt, Artificial Sequence
  Description of Artificial Sequence: Synthetic oligonucleotide
  Sense strand starting at position 1306 of SEQ ID NO: 3428
agcucaguccaguaaggaa

SEQ ID NO: 266737 - RNA, 19 nt, Artificial Sequence
  Description of Artificial Sequence: Synthetic oligonucleotide
  Antisense strand to SEQ ID NO: 266736
uuccuuacuggacugagcu

SEQ ID NO: 266738 - RNA, 19 nt, Artificial Sequence
  Description of Artificial Sequence: Synthetic oligonucleotide
  Sense strand starting at position 2079 of SEQ ID NO: 3428
aagagcugucgucauagag

SEQ ID NO: 266739 - RNA, 19 nt, Artificial Sequence
  Description of Artificial Sequence: Synthetic oligonucleotide
  Antisense strand to SEQ ID NO: 266738
cucuaugacgacagcucuu

SEQ ID NO: 266740 - RNA, 19 nt, Artificial Sequence
  Description of Artificial Sequence: Synthetic oligonucleotide
  Sense strand starting at position 2083 of SEQ ID NO: 3428
gcugucgucauagagaucu

SEQ ID NO: 266741 - RNA, 19 nt, Artificial Sequence
  Description of Artificial Sequence: Synthetic oligonucleotide
  Antisense strand to SEQ ID NO: 266740
agaucucuaugacgacagc

SEQ ID NO: 266742 - RNA, 19 nt, Artificial Sequence
  Description of Artificial Sequence: Synthetic oligonucleotide
  Sense strand starting at position 2089 of SEQ ID NO: 3428
gucauagagaucuggguuc

SEQ ID NO: 266743 - RNA, 19 nt, Artificial Sequence
  Description of Artificial Sequence: Synthetic oligonucleotide
  Antisense strand to SEQ ID NO: 266742
gaacccagaucucuaugac

SEQ ID NO: 266744 - RNA, 19 nt, Artificial Sequence
  Description of Artificial Sequence: Synthetic oligonucleotide
  Sense strand starting at position 2236 of SEQ ID NO: 3428
ugaauuauguaaccuagca

SEQ ID NO: 266745 - RNA, 19 nt, Artificial Sequence
  Description of Artificial Sequence: Synthetic oligonucleotide
  Antisense strand to SEQ ID NO: 266744
ugcuagguuacauaauuca

SEQ ID NO: 266746 - RNA, 19 nt, Artificial Sequence
  Description of Artificial Sequence: Synthetic oligonucleotide
  Sense strand starting at position 2249 of SEQ ID NO: 3428
cuagcaaagccugguacau

SEQ ID NO: 266747 - RNA, 19 nt, Artificial Sequence
  Description of Artificial Sequence: Synthetic oligonucleotide
  Antisense strand to SEQ ID NO: 266746
auguaccaggcuuugcuag

SEQ ID NO: 266748 - RNA, 19 nt, Artificial Sequence
  Description of Artificial Sequence: Synthetic oligonucleotide
  Sense strand starting at position 2558 of SEQ ID NO: 3428
gcacuaaaugcuuacugca

SEQ ID NO: 266749 - RNA, 19 nt, Artificial Sequence
  Description of Artificial Sequence: Synthetic oligonucleotide
  Antisense strand to SEQ ID NO: 266748
ugcaguaagcauuuagugc

SEQ ID NO: 266750 - RNA, 19 nt, Artificial Sequence
  Description of Artificial Sequence: Synthetic oligonucleotide
  Sense strand starting at position 2565 of SEQ ID NO: 3428
augcuuacugcauagaaug

SEQ ID NO: 266751 - RNA, 19 nt, Artificial Sequence
  Description of Artificial Sequence: Synthetic oligonucleotide
  Antisense strand to SEQ ID NO: 266750
cauucuaugcaguaagcau

SEQ ID NO: 266752 - RNA, 19 nt, Artificial Sequence
  Description of Artificial Sequence: Synthetic oligonucleotide
  Sense strand starting at position 2598 of SEQ ID NO: 3428
cccugauugcaacagaauu

SEQ ID NO: 266753 - RNA, 19 nt, Artificial Sequence
  Description of Artificial Sequence: Synthetic oligonucleotide
  Antisense strand to SEQ ID NO: 266752
aauucuguugcaaucaggg

SEQ ID NO: 266754 - RNA, 19 nt, Artificial Sequence
  Description of Artificial Sequence: Synthetic oligonucleotide
  Sense strand starting at position 2627 of SEQ ID NO: 3428
gugguauauacuggcauua

SEQ ID NO: 266755 - RNA, 19 nt, Artificial Sequence
  Description of Artificial Sequence: Synthetic oligonucleotide
  Antisense strand to SEQ ID NO: 266754
uaaugccaguauauaccac

SEQ ID NO: 266756 - RNA, 19 nt, Artificial Sequence
  Description of Artificial Sequence: Synthetic oligonucleotide
  Sense strand starting at position 2977 of SEQ ID NO: 3428
ugucaagugcuuuaucaga

SEQ ID NO: 266757 - RNA, 19 nt, Artificial Sequence
  Description of Artificial Sequence: Synthetic oligonucleotide
  Antisense strand to SEQ ID NO: 266756
ucugauaaagcacuugaca

SEQ ID NO: 266758 - RNA, 19 nt, Artificial Sequence
  Description of Artificial Sequence: Synthetic oligonucleotide
  Sense strand starting at position 2979 of SEQ ID NO: 3428
ucaagugcuuuaucagaau

SEQ ID NO: 266759 - RNA, 19 nt, Artificial Sequence
  Description of Artificial Sequence: Synthetic oligonucleotide
  Antisense strand to SEQ ID NO: 266758
auucugauaaagcacuuga

SEQ ID NO: 266760 - RNA, 19 nt, Artificial Sequence
  Description of Artificial Sequence: Synthetic oligonucleotide
  Sense strand starting at position 3455 of SEQ ID NO: 3428
ucuauuuaaugagaugaag

SEQ ID NO: 266761 - RNA, 19 nt, Artificial Sequence
  Description of Artificial Sequence: Synthetic oligonucleotide
  Antisense strand to SEQ ID NO: 266760
cuucaucucauuaaauaga

SEQ ID NO: 266762 - RNA, 19 nt, Artificial Sequence
  Description of Artificial Sequence: Synthetic oligonucleotide
  Sense strand starting at position 3466 of SEQ ID NO: 3428
agaugaagaugcuuguuua

SEQ ID NO: 266763 - RNA, 19 nt, Artificial Sequence
  Description of Artificial Sequence: Synthetic oligonucleotide
  Antisense strand to SEQ ID NO: 266762
uaaacaagcaucuucaucu

SEQ ID NO: 266764 - RNA, 19 nt, Artificial Sequence
  Description of Artificial Sequence: Synthetic oligonucleotide
  Sense strand starting at position 3467 of SEQ ID NO: 3428
gaugaagaugcuuguuuaa

SEQ ID NO: 266765 - RNA, 19 nt, Artificial Sequence
  Description of Artificial Sequence: Synthetic oligonucleotide
  Antisense strand to SEQ ID NO: 266764
uuaaacaagcaucuucauc

SEQ ID NO: 266766 - RNA, 19 nt, Artificial Sequence
  Description of Artificial Sequence: Synthetic oligonucleotide
  Sense strand starting at position 3469 of SEQ ID NO: 3428
ugaagaugcuuguuuaaca

SEQ ID NO: 266767 - RNA, 19 nt, Artificial Sequence
  Description of Artificial Sequence: Synthetic oligonucleotide
  Antisense strand to SEQ ID NO: 266766
uguuaaacaagcaucuuca

SEQ ID NO: 266768 - RNA, 19 nt, Artificial Sequence
  Description of Artificial Sequence: Synthetic oligonucleotide
  Sense strand starting at position 3470 of SEQ ID NO: 3428
gaagaugcuuguuuaacac

SEQ ID NO: 266769 - RNA, 19 nt, Artificial Sequence
  Description of Artificial Sequence: Synthetic oligonucleotide
  Antisense strand to SEQ ID NO: 266768
guguuaaacaagcaucuuc

SEQ ID NO: 266770 - RNA, 19 nt, Artificial Sequence
  Description of Artificial Sequence: Synthetic oligonucleotide
  Sense strand starting at position 3522 of SEQ ID NO: 3428
acucgaggucuuggaaguu

SEQ ID NO: 266771 - RNA, 19 nt, Artificial Sequence
  Description of Artificial Sequence: Synthetic oligonucleotide
  Antisense strand to SEQ ID NO: 266770
aacuuccaagaccucgagu

SEQ ID NO: 266772 - RNA, 19 nt, Artificial Sequence
  Description of Artificial Sequence: Synthetic oligonucleotide
  Sense strand starting at position 3525 of SEQ ID NO: 3428
cgaggucuuggaaguuugu

SEQ ID NO: 266773 - RNA, 19 nt, Artificial Sequence
  Description of Artificial Sequence: Synthetic oligonucleotide
  Antisense strand to SEQ ID NO: 266772
acaaacuuccaagaccucg

SEQ ID NO: 266774 - RNA, 19 nt, Artificial Sequence
  Description of Artificial Sequence: Synthetic oligonucleotide
  Sense strand starting at position 3801 of SEQ ID NO: 3428
ccaagaguaccgggauuac

SEQ ID NO: 266775 - RNA, 19 nt, Artificial Sequence
  Description of Artificial Sequence: Synthetic oligonucleotide
  Antisense strand to SEQ ID NO: 266774
guaaucccgguacucuugg

SEQ ID NO: 266776 - RNA, 19 nt, Artificial Sequence
  Description of Artificial Sequence: Synthetic oligonucleotide
  Sense strand starting at position 3854 of SEQ ID NO: 3428
uucuaaugguccucauagu

SEQ ID NO: 266777 - RNA, 19 nt, Artificial Sequence
  Description of Artificial Sequence: Synthetic oligonucleotide
  Antisense strand to SEQ ID NO: 266776
acuaugaggaccauuagaa

SEQ ID NO: 266778 - RNA, 19 nt, Artificial Sequence
  Description of Artificial Sequence: Synthetic oligonucleotide
  Sense strand starting at position 3855 of SEQ ID NO: 3428
ucuaaugguccucauagua

SEQ ID NO: 266779 - RNA, 19 nt, Artificial Sequence
  Description of Artificial Sequence: Synthetic oligonucleotide
  Antisense strand to SEQ ID NO: 266778
uacuaugaggaccauuaga

SEQ ID NO: 266780 - RNA, 19 nt, Artificial Sequence
  Description of Artificial Sequence: Synthetic oligonucleotide
  Sense strand starting at position 81 of SEQ ID NO: 3430
gugggucacuccuccacua

SEQ ID NO: 266781 - RNA, 19 nt, Artificial Sequence
  Description of Artificial Sequence: Synthetic oligonucleotide
  Antisense strand to SEQ ID NO: 266780
uaguggaggagugacccac

SEQ ID NO: 266782 - RNA, 19 nt, Artificial Sequence
  Description of Artificial Sequence: Synthetic oligonucleotide
  Sense strand starting at position 83 of SEQ ID NO: 3430
gggucacuccuccacuauu

SEQ ID NO: 266783 - RNA, 19 nt, Artificial Sequence
  Description of Artificial Sequence: Synthetic oligonucleotide
  Antisense strand to SEQ ID NO: 266782
aauaguggaggagugaccc

SEQ ID NO: 266784 - RNA, 19 nt, Artificial Sequence
  Description of Artificial Sequence: Synthetic oligonucleotide
  Sense strand starting at position 172 of SEQ ID NO: 3430
guguuuauuguguaccaag

SEQ ID NO: 266785 - RNA, 19 nt, Artificial Sequence
  Description of Artificial Sequence: Synthetic oligonucleotide
  Antisense strand to SEQ ID NO: 266784
cuugguacacaauaaacac

SEQ ID NO: 266786 - RNA, 19 nt, Artificial Sequence
  Description of Artificial Sequence: Synthetic oligonucleotide
  Sense strand starting at position 223 of SEQ ID NO: 3430
acuaaauacucccaggaag

SEQ ID NO: 266787 - RNA, 19 nt, Artificial Sequence
  Description of Artificial Sequence: Synthetic oligonucleotide
  Antisense strand to SEQ ID NO: 266786
cuuccugggaguauuuagu

SEQ ID NO: 266788 - RNA, 19 nt, Artificial Sequence
  Description of Artificial Sequence: Synthetic oligonucleotide
  Sense strand starting at position 427 of SEQ ID NO: 3430
guauaaaccugggccucau

SEQ ID NO: 266789 - RNA, 19 nt, Artificial Sequence
  Description of Artificial Sequence: Synthetic oligonucleotide
  Antisense strand to SEQ ID NO: 266788
augaggcccagguuuauac

SEQ ID NO: 266790 - RNA, 19 nt, Artificial Sequence
  Description of Artificial Sequence: Synthetic oligonucleotide
  Sense strand starting at position 478 of SEQ ID NO: 3430
auguaaggauuuggagaaa

SEQ ID NO: 266791 - RNA, 19 nt, Artificial Sequence
  Description of Artificial Sequence: Synthetic oligonucleotide
  Antisense strand to SEQ ID NO: 266790
uuucuccaaauccuuacau

SEQ ID NO: 266792 - RNA, 19 nt, Artificial Sequence
  Description of Artificial Sequence: Synthetic oligonucleotide
  Sense strand starting at position 588 of SEQ ID NO: 3430
ucugauaagcaauaaugua

SEQ ID NO: 266793 - RNA, 19 nt, Artificial Sequence
  Description of Artificial Sequence: Synthetic oligonucleotide
  Antisense strand to SEQ ID NO: 266792
uacauuauugcuuaucaga

SEQ ID NO: 266794 - RNA, 19 nt, Artificial Sequence
  Description of Artificial Sequence: Synthetic oligonucleotide
  Sense strand starting at position 609 of SEQ ID NO: 3430
cgugaacgugcucuuuaau

SEQ ID NO: 266795 - RNA, 19 nt, Artificial Sequence
  Description of Artificial Sequence: Synthetic oligonucleotide
  Antisense strand to SEQ ID NO: 266794
auuaaagagcacguucacg

SEQ ID NO: 266796 - RNA, 19 nt, Artificial Sequence
  Description of Artificial Sequence: Synthetic oligonucleotide
  Sense strand starting at position 621 of SEQ ID NO: 3430
cuuuaaugucaaggauaau

SEQ ID NO: 266797 - RNA, 19 nt, Artificial Sequence
  Description of Artificial Sequence: Synthetic oligonucleotide
  Antisense strand to SEQ ID NO: 266796
auuauccuugacauuaaag

SEQ ID NO: 266798 - RNA, 19 nt, Artificial Sequence
  Description of Artificial Sequence: Synthetic oligonucleotide
  Sense strand starting at position 752 of SEQ ID NO: 3430
gguuucgucaaguagguua

SEQ ID NO: 266799 - RNA, 19 nt, Artificial Sequence
  Description of Artificial Sequence: Synthetic oligonucleotide
  Antisense strand to SEQ ID NO: 266798
uaaccuacuugacgaaacc

SEQ ID NO: 266800 - RNA, 19 nt, Artificial Sequence
  Description of Artificial Sequence: Synthetic oligonucleotide
  Sense strand starting at position 830 of SEQ ID NO: 3430
acguaaagaccagguaaau

SEQ ID NO: 266801 - RNA, 19 nt, Artificial Sequence
  Description of Artificial Sequence: Synthetic oligonucleotide
  Antisense strand to SEQ ID NO: 266800
auuuaccuggucuuuacgu

SEQ ID NO: 266802 - RNA, 19 nt, Artificial Sequence
  Description of Artificial Sequence: Synthetic oligonucleotide
  Sense strand starting at position 1056 of SEQ ID NO: 3430
augucaaucaacggauaag

SEQ ID NO: 266803 - RNA, 19 nt, Artificial Sequence
  Description of Artificial Sequence: Synthetic oligonucleotide
  Antisense strand to SEQ ID NO: 266802
cuuauccguugauugacau

SEQ ID NO: 266804 - RNA, 19 nt, Artificial Sequence
  Description of Artificial Sequence: Synthetic oligonucleotide
  Sense strand starting at position 1099 of SEQ ID NO: 3430
uuuagaucuucugcccaga

SEQ ID NO: 266805 - RNA, 19 nt, Artificial Sequence
  Description of Artificial Sequence: Synthetic oligonucleotide
  Antisense strand to SEQ ID NO: 266804
ucugggcagaagaucuaaa

SEQ ID NO: 266806 - RNA, 19 nt, Artificial Sequence
  Description of Artificial Sequence: Synthetic oligonucleotide
  Sense strand starting at position 1101 of SEQ ID NO: 3430
uagaucuucugcccagaga

SEQ ID NO: 266807 - RNA, 19 nt, Artificial Sequence
  Description of Artificial Sequence: Synthetic oligonucleotide
  Antisense strand to SEQ ID NO: 266806
ucucugggcagaagaucua

SEQ ID NO: 266808 - RNA, 19 nt, Artificial Sequence
  Description of Artificial Sequence: Synthetic oligonucleotide
  Sense strand starting at position 1104 of SEQ ID NO: 3430
aucuucugcccagagaacu

SEQ ID NO: 266809 - RNA, 19 nt, Artificial Sequence
  Description of Artificial Sequence: Synthetic oligonucleotide
  Antisense strand to SEQ ID NO: 266808
aguucucugggcagaagau

SEQ ID NO: 266810 - RNA, 19 nt, Artificial Sequence
  Description of Artificial Sequence: Synthetic oligonucleotide
  Sense strand starting at position 1202 of SEQ ID NO: 3430
uaacucucacgguacagau

SEQ ID NO: 266811 - RNA, 19 nt, Artificial Sequence
  Description of Artificial Sequence: Synthetic oligonucleotide
  Antisense strand to SEQ ID NO: 266810
aucuguaccgugagaguua

SEQ ID NO: 266812 - RNA, 19 nt, Artificial Sequence
  Description of Artificial Sequence: Synthetic oligonucleotide
  Sense strand starting at position 1400 of SEQ ID NO: 3430
aaacuucccgaauguguua

SEQ ID NO: 266813 - RNA, 19 nt, Artificial Sequence
  Description of Artificial Sequence: Synthetic oligonucleotide
  Antisense strand to SEQ ID NO: 266812
uaacacauucgggaaguuu

SEQ ID NO: 266814 - RNA, 19 nt, Artificial Sequence
  Description of Artificial Sequence: Synthetic oligonucleotide
  Sense strand starting at position 1459 of SEQ ID NO: 3430
acagcucuaacccggagau

SEQ ID NO: 266815 - RNA, 19 nt, Artificial Sequence
  Description of Artificial Sequence: Synthetic oligonucleotide
  Antisense strand to SEQ ID NO: 266814
aucuccggguuagagcugu

SEQ ID NO: 266816 - RNA, 19 nt, Artificial Sequence
  Description of Artificial Sequence: Synthetic oligonucleotide
  Sense strand starting at position 1460 of SEQ ID NO: 3430
cagcucuaacccggagaua

SEQ ID NO: 266817 - RNA, 19 nt, Artificial Sequence
  Description of Artificial Sequence: Synthetic oligonucleotide
  Antisense strand to SEQ ID NO: 266816
uaucuccggguuagagcug

SEQ ID NO: 266818 - RNA, 19 nt, Artificial Sequence
  Description of Artificial Sequence: Synthetic oligonucleotide
  Sense strand starting at position 1461 of SEQ ID NO: 3430
agcucuaacccggagauaa

SEQ ID NO: 266819 - RNA, 19 nt, Artificial Sequence
  Description of Artificial Sequence: Synthetic oligonucleotide
  Antisense strand to SEQ ID NO: 266818
uuaucuccggguuagagcu

SEQ ID NO: 266820 - RNA, 19 nt, Artificial Sequence
  Description of Artificial Sequence: Synthetic oligonucleotide
  Sense strand starting at position 1472 of SEQ ID NO: 3430
ggagauaaccugugguaua

SEQ ID NO: 266821 - RNA, 19 nt, Artificial Sequence
  Description of Artificial Sequence: Synthetic oligonucleotide
  Antisense strand to SEQ ID NO: 266820
uauaccacagguuaucucc

SEQ ID NO: 266822 - RNA, 19 nt, Artificial Sequence
  Description of Artificial Sequence: Synthetic oligonucleotide
  Sense strand starting at position 1665 of SEQ ID NO: 3430
ccugauucggucgaaucca

SEQ ID NO: 266823 - RNA, 19 nt, Artificial Sequence
  Description of Artificial Sequence: Synthetic oligonucleotide
  Antisense strand to SEQ ID NO: 266822
uggauucgaccgaaucagg

SEQ ID NO: 266824 - RNA, 19 nt, Artificial Sequence
  Description of Artificial Sequence: Synthetic oligonucleotide
  Sense strand starting at position 1674 of SEQ ID NO: 3430
gucgaauccacuugggaga

SEQ ID NO: 266825 - RNA, 19 nt, Artificial Sequence
  Description of Artificial Sequence: Synthetic oligonucleotide
  Antisense strand to SEQ ID NO: 266824
ucucccaaguggauucgac

SEQ ID NO: 266826 - RNA, 19 nt, Artificial Sequence
  Description of Artificial Sequence: Synthetic oligonucleotide
  Sense strand starting at position 1687 of SEQ ID NO: 3430
gggagacccuggagguaau

SEQ ID NO: 266827 - RNA, 19 nt, Artificial Sequence
  Description of Artificial Sequence: Synthetic oligonucleotide
  Antisense strand to SEQ ID NO: 266826
auuaccuccagggucuccc

SEQ ID NO: 266828 - RNA, 19 nt, Artificial Sequence
  Description of Artificial Sequence: Synthetic oligonucleotide
  Sense strand starting at position 1819 of SEQ ID NO: 3430
cuggguuaugcgcuugcga

SEQ ID NO: 266829 - RNA, 19 nt, Artificial Sequence
  Description of Artificial Sequence: Synthetic oligonucleotide
  Antisense strand to SEQ ID NO: 266828
ucgcaagcgcauaacccag

SEQ ID NO: 266830 - RNA, 19 nt, Artificial Sequence
  Description of Artificial Sequence: Synthetic oligonucleotide
  Sense strand starting at position 1820 of SEQ ID NO: 3430
uggguuaugcgcuugcgaa

SEQ ID NO: 266831 - RNA, 19 nt, Artificial Sequence
  Description of Artificial Sequence: Synthetic oligonucleotide
  Antisense strand to SEQ ID NO: 266830
uucgcaagcgcauaaccca

SEQ ID NO: 266832 - RNA, 19 nt, Artificial Sequence
  Description of Artificial Sequence: Synthetic oligonucleotide
  Sense strand starting at position 1864 of SEQ ID NO: 3430
gacaucuuccugcggauua

SEQ ID NO: 266833 - RNA, 19 nt, Artificial Sequence
  Description of Artificial Sequence: Synthetic oligonucleotide
  Antisense strand to SEQ ID NO: 266832
uaauccgcaggaagauguc

SEQ ID NO: 266834 - RNA, 19 nt, Artificial Sequence
  Description of Artificial Sequence: Synthetic oligonucleotide
  Sense strand starting at position 1876 of SEQ ID NO: 3430
cggauuaagcgacaggauu

SEQ ID NO: 266835 - RNA, 19 nt, Artificial Sequence
  Description of Artificial Sequence: Synthetic oligonucleotide
  Antisense strand to SEQ ID NO: 266834
aauccugucgcuuaauccg

SEQ ID NO: 266836 - RNA, 19 nt, Artificial Sequence
  Description of Artificial Sequence: Synthetic oligonucleotide
  Sense strand starting at position 2385 of SEQ ID NO: 3430
gcuuaagagugccugaaac

SEQ ID NO: 266837 - RNA, 19 nt, Artificial Sequence
  Description of Artificial Sequence: Synthetic oligonucleotide
  Antisense strand to SEQ ID NO: 266836
guuucaggcacucuuaagc

SEQ ID NO: 266838 - RNA, 19 nt, Artificial Sequence
  Description of Artificial Sequence: Synthetic oligonucleotide
  Sense strand starting at position 2632 of SEQ ID NO: 3430
uuccgaguagcugauuaca

SEQ ID NO: 266839 - RNA, 19 nt, Artificial Sequence
  Description of Artificial Sequence: Synthetic oligonucleotide
  Antisense strand to SEQ ID NO: 266838
uguaaucagcuacucggaa

SEQ ID NO: 266840 - RNA, 19 nt, Artificial Sequence
  Description of Artificial Sequence: Synthetic oligonucleotide
  Sense strand starting at position 2697 of SEQ ID NO: 3430
gcuuaauuuguauguuuag

SEQ ID NO: 266841 - RNA, 19 nt, Artificial Sequence
  Description of Artificial Sequence: Synthetic oligonucleotide
  Antisense strand to SEQ ID NO: 266840
cuaaacauacaaauuaagc

SEQ ID NO: 266842 - RNA, 19 nt, Artificial Sequence
  Description of Artificial Sequence: Synthetic oligonucleotide
  Sense strand starting at position 2831 of SEQ ID NO: 3430
gcccuaauuugguuauucu

SEQ ID NO: 266843 - RNA, 19 nt, Artificial Sequence
  Description of Artificial Sequence: Synthetic oligonucleotide
  Antisense strand to SEQ ID NO: 266842
agaauaaccaaauuagggc

SEQ ID NO: 266844 - RNA, 19 nt, Artificial Sequence
  Description of Artificial Sequence: Synthetic oligonucleotide
  Sense strand starting at position 3091 of SEQ ID NO: 3430
caguguuccuaggucuaga

SEQ ID NO: 266845 - RNA, 19 nt, Artificial Sequence
  Description of Artificial Sequence: Synthetic oligonucleotide
  Antisense strand to SEQ ID NO: 266844
ucuagaccuaggaacacug

SEQ ID NO: 266846 - RNA, 19 nt, Artificial Sequence
  Description of Artificial Sequence: Synthetic oligonucleotide
  Sense strand starting at position 3094 of SEQ ID NO: 3430
uguuccuaggucuagaaag

SEQ ID NO: 266847 - RNA, 19 nt, Artificial Sequence
  Description of Artificial Sequence: Synthetic oligonucleotide
  Antisense strand to SEQ ID NO: 266846
cuuucuagaccuaggaaca

SEQ ID NO: 266848 - RNA, 19 nt, Artificial Sequence
  Description of Artificial Sequence: Synthetic oligonucleotide
  Sense strand starting at position 3180 of SEQ ID NO: 3430
ccaugacugugugucaaag

SEQ ID NO: 266849 - RNA, 19 nt, Artificial Sequence
  Description of Artificial Sequence: Synthetic oligonucleotide
  Antisense strand to SEQ ID NO: 266848
cuuugacacacagucaugg

SEQ ID NO: 266850 - RNA, 19 nt, Artificial Sequence
  Description of Artificial Sequence: Synthetic oligonucleotide
  Sense strand starting at position 3189 of SEQ ID NO: 3430
ugugucaaaguaugaaacu

SEQ ID NO: 266851 - RNA, 19 nt, Artificial Sequence
  Description of Artificial Sequence: Synthetic oligonucleotide
  Antisense strand to SEQ ID NO: 266850
aguuucauacuuugacaca

SEQ ID NO: 266852 - RNA, 19 nt, Artificial Sequence
  Description of Artificial Sequence: Synthetic oligonucleotide
  Sense strand starting at position 3461 of SEQ ID NO: 3430
aaacgagguuucgccauuu

SEQ ID NO: 266853 - RNA, 19 nt, Artificial Sequence
  Description of Artificial Sequence: Synthetic oligonucleotide
  Antisense strand to SEQ ID NO: 266852
aaauggcgaaaccucguuu

SEQ ID NO: 266854 - RNA, 19 nt, Artificial Sequence
  Description of Artificial Sequence: Synthetic oligonucleotide
  Sense strand starting at position 3606 of SEQ ID NO: 3430
gugaguaacugaguggaga

SEQ ID NO: 266855 - RNA, 19 nt, Artificial Sequence
  Description of Artificial Sequence: Synthetic oligonucleotide
  Antisense strand to SEQ ID NO: 266854
ucuccacucaguuacucac

SEQ ID NO: 266856 - RNA, 19 nt, Artificial Sequence
  Description of Artificial Sequence: Synthetic oligonucleotide
  Sense strand starting at position 3816 of SEQ ID NO: 3430
gcccacuuccucugacaga

SEQ ID NO: 266857 - RNA, 19 nt, Artificial Sequence
  Description of Artificial Sequence: Synthetic oligonucleotide
  Antisense strand to SEQ ID NO: 266856
ucugucagaggaagugggc

SEQ ID NO: 266858 - RNA, 19 nt, Artificial Sequence
  Description of Artificial Sequence: Synthetic oligonucleotide
  Sense strand starting at position 3955 of SEQ ID NO: 3430
gcugucuucccauuguguu

SEQ ID NO: 266859 - RNA, 19 nt, Artificial Sequence
  Description of Artificial Sequence: Synthetic oligonucleotide
  Antisense strand to SEQ ID NO: 266858
aacacaaugggaagacagc

SEQ ID NO: 266860 - RNA, 19 nt, Artificial Sequence
  Description of Artificial Sequence: Synthetic oligonucleotide
  Sense strand starting at position 210 of SEQ ID NO: 3431
gaaguuucucuggacccau

SEQ ID NO: 266861 - RNA, 19 nt, Artificial Sequence
  Description of Artificial Sequence: Synthetic oligonucleotide
  Antisense strand to SEQ ID NO: 266860
auggguccagagaaacuuc

SEQ ID NO: 266862 - RNA, 19 nt, Artificial Sequence
  Description of Artificial Sequence: Synthetic oligonucleotide
  Sense strand starting at position 245 of SEQ ID NO: 3431
gggucauucccacaccuca

SEQ ID NO: 266863 - RNA, 19 nt, Artificial Sequence
  Description of Artificial Sequence: Synthetic oligonucleotide
  Antisense strand to SEQ ID NO: 266862
ugaggugugggaaugaccc

SEQ ID NO: 266864 - RNA, 19 nt, Artificial Sequence
  Description of Artificial Sequence: Synthetic oligonucleotide
  Sense strand starting at position 384 of SEQ ID NO: 3431
ugagguaaguaucccuaga

SEQ ID NO: 266865 - RNA, 19 nt, Artificial Sequence
  Description of Artificial Sequence: Synthetic oligonucleotide
  Antisense strand to SEQ ID NO: 266864
ucuagggauacuuaccuca

SEQ ID NO: 266866 - RNA, 19 nt, Artificial Sequence
  Description of Artificial Sequence: Synthetic oligonucleotide
  Sense strand starting at position 386 of SEQ ID NO: 3431
agguaaguaucccuagaca

SEQ ID NO: 266867 - RNA, 19 nt, Artificial Sequence
  Description of Artificial Sequence: Synthetic oligonucleotide
  Antisense strand to SEQ ID NO: 266866
ugucuagggauacuuaccu

SEQ ID NO: 266868 - RNA, 19 nt, Artificial Sequence
  Description of Artificial Sequence: Synthetic oligonucleotide
  Sense strand starting at position 499 of SEQ ID NO: 3431
caaagauggucagugggua

SEQ ID NO: 266869 - RNA, 19 nt, Artificial Sequence
  Description of Artificial Sequence: Synthetic oligonucleotide
  Antisense strand to SEQ ID NO: 266868
uacccacugaccaucuuug

SEQ ID NO: 266870 - RNA, 19 nt, Artificial Sequence
  Description of Artificial Sequence: Synthetic oligonucleotide
  Sense strand starting at position 500 of SEQ ID NO: 3431
aaagauggucaguggguau

SEQ ID NO: 266871 - RNA, 19 nt, Artificial Sequence
  Description of Artificial Sequence: Synthetic oligonucleotide
  Antisense strand to SEQ ID NO: 266870
auacccacugaccaucuuu

SEQ ID NO: 266872 - RNA, 19 nt, Artificial Sequence
  Description of Artificial Sequence: Synthetic oligonucleotide
  Sense strand starting at position 503 of SEQ ID NO: 3431
gauggucaguggguauuau

SEQ ID NO: 266873 - RNA, 19 nt, Artificial Sequence
  Description of Artificial Sequence: Synthetic oligonucleotide
  Antisense strand to SEQ ID NO: 266872
auaauacccacugaccauc

SEQ ID NO: 266874 - RNA, 19 nt, Artificial Sequence
  Description of Artificial Sequence: Synthetic oligonucleotide
  Sense strand starting at position 544 of SEQ ID NO: 3431
ggcucuagacuagaauguu

SEQ ID NO: 266875 - RNA, 19 nt, Artificial Sequence
  Description of Artificial Sequence: Synthetic oligonucleotide
  Antisense strand to SEQ ID NO: 266874
aacauucuagucuagagcc

SEQ ID NO: 266876 - RNA, 19 nt, Artificial Sequence
  Description of Artificial Sequence: Synthetic oligonucleotide
  Sense strand starting at position 552 of SEQ ID NO: 3431
acuagaauguucuuagguc

SEQ ID NO: 266877 - RNA, 19 nt, Artificial Sequence
  Description of Artificial Sequence: Synthetic oligonucleotide
  Antisense strand to SEQ ID NO: 266876
gaccuaagaacauucuagu

SEQ ID NO: 266878 - RNA, 19 nt, Artificial Sequence
  Description of Artificial Sequence: Synthetic oligonucleotide
  Sense strand starting at position 556 of SEQ ID NO: 3431
gaauguucuuaggucuuua

SEQ ID NO: 266879 - RNA, 19 nt, Artificial Sequence
  Description of Artificial Sequence: Synthetic oligonucleotide
  Antisense strand to SEQ ID NO: 266878
uaaagaccuaagaacauuc

SEQ ID NO: 266880 - RNA, 19 nt, Artificial Sequence
  Description of Artificial Sequence: Synthetic oligonucleotide
  Sense strand starting at position 694 of SEQ ID NO: 3431
uaaagaggucauuaagcuc

SEQ ID NO: 266881 - RNA, 19 nt, Artificial Sequence
  Description of Artificial Sequence: Synthetic oligonucleotide
  Antisense strand to SEQ ID NO: 266880
gagcuuaaugaccucuuua

SEQ ID NO: 266882 - RNA, 19 nt, Artificial Sequence
  Description of Artificial Sequence: Synthetic oligonucleotide
  Sense strand starting at position 697 of SEQ ID NO: 3431
agaggucauuaagcucaaa

SEQ ID NO: 266883 - RNA, 19 nt, Artificial Sequence
  Description of Artificial Sequence: Synthetic oligonucleotide
  Antisense strand to SEQ ID NO: 266882
uuugagcuuaaugaccucu

SEQ ID NO: 266884 - RNA, 19 nt, Artificial Sequence
  Description of Artificial Sequence: Synthetic oligonucleotide
  Sense strand starting at position 700 of SEQ ID NO: 3431
ggucauuaagcucaaauga

SEQ ID NO: 266885 - RNA, 19 nt, Artificial Sequence
  Description of Artificial Sequence: Synthetic oligonucleotide
  Antisense strand to SEQ ID NO: 266884
ucauuugagcuuaaugacc

SEQ ID NO: 266886 - RNA, 19 nt, Artificial Sequence
  Description of Artificial Sequence: Synthetic oligonucleotide
  Sense strand starting at position 710 of SEQ ID NO: 3431
cucaaaugaggcuguuaug

SEQ ID NO: 266887 - RNA, 19 nt, Artificial Sequence
  Description of Artificial Sequence: Synthetic oligonucleotide
  Antisense strand to SEQ ID NO: 266886
cauaacagccucauuugag

SEQ ID NO: 266888 - RNA, 19 nt, Artificial Sequence
  Description of Artificial Sequence: Synthetic oligonucleotide
  Sense strand starting at position 991 of SEQ ID NO: 3431
gacaauuagcagugugaug

SEQ ID NO: 266889 - RNA, 19 nt, Artificial Sequence
  Description of Artificial Sequence: Synthetic oligonucleotide
  Antisense strand to SEQ ID NO: 266888
caucacacugcuaauuguc

SEQ ID NO: 266890 - RNA, 19 nt, Artificial Sequence
  Description of Artificial Sequence: Synthetic oligonucleotide
  Sense strand starting at position 1157 of SEQ ID NO: 3431
ucagguuucucaucaguaa

SEQ ID NO: 266891 - RNA, 19 nt, Artificial Sequence
  Description of Artificial Sequence: Synthetic oligonucleotide
  Antisense strand to SEQ ID NO: 266890
uuacugaugagaaaccuga

SEQ ID NO: 266892 - RNA, 19 nt, Artificial Sequence
  Description of Artificial Sequence: Synthetic oligonucleotide
  Sense strand starting at position 1166 of SEQ ID NO: 3431
ucaucaguaacuugggaga

SEQ ID NO: 266893 - RNA, 19 nt, Artificial Sequence
  Description of Artificial Sequence: Synthetic oligonucleotide
  Antisense strand to SEQ ID NO: 266892
ucucccaaguuacugauga

SEQ ID NO: 266894 - RNA, 19 nt, Artificial Sequence
  Description of Artificial Sequence: Synthetic oligonucleotide
  Sense strand starting at position 1221 of SEQ ID NO: 3431
cuuugaucaucugugauuc

SEQ ID NO: 266895 - RNA, 19 nt, Artificial Sequence
  Description of Artificial Sequence: Synthetic oligonucleotide
  Antisense strand to SEQ ID NO: 266894
gaaucacagaugaucaaag

SEQ ID NO: 266896 - RNA, 19 nt, Artificial Sequence
  Description of Artificial Sequence: Synthetic oligonucleotide
  Sense strand starting at position 1246 of SEQ ID NO: 3431
cagucuuagcaacaagagu

SEQ ID NO: 266897 - RNA, 19 nt, Artificial Sequence
  Description of Artificial Sequence: Synthetic oligonucleotide
  Antisense strand to SEQ ID NO: 266896
acucuuguugcuaagacug

SEQ ID NO: 266898 - RNA, 19 nt, Artificial Sequence
  Description of Artificial Sequence: Synthetic oligonucleotide
  Sense strand starting at position 1953 of SEQ ID NO: 3431
cgaguucuuguagaccaga

SEQ ID NO: 266899 - RNA, 19 nt, Artificial Sequence
  Description of Artificial Sequence: Synthetic oligonucleotide
  Antisense strand to SEQ ID NO: 266898
ucuggucuacaagaacucg

SEQ ID NO: 266900 - RNA, 19 nt, Artificial Sequence
  Description of Artificial Sequence: Synthetic oligonucleotide
  Sense strand starting at position 2048 of SEQ ID NO: 3431
caguaagagugguuuggac

SEQ ID NO: 266901 - RNA, 19 nt, Artificial Sequence
  Description of Artificial Sequence: Synthetic oligonucleotide
  Antisense strand to SEQ ID NO: 266900
guccaaaccacucuuacug

SEQ ID NO: 266902 - RNA, 19 nt, Artificial Sequence
  Description of Artificial Sequence: Synthetic oligonucleotide
  Sense strand starting at position 2050 of SEQ ID NO: 3431
guaagagugguuuggacac

SEQ ID NO: 266903 - RNA, 19 nt, Artificial Sequence
  Description of Artificial Sequence: Synthetic oligonucleotide
  Antisense strand to SEQ ID NO: 266902
guguccaaaccacucuuac

SEQ ID NO: 266904 - RNA, 19 nt, Artificial Sequence
  Description of Artificial Sequence: Synthetic oligonucleotide
  Sense strand starting at position 2154 of SEQ ID NO: 3431
gcuagaaauuccgucaaga

SEQ ID NO: 266905 - RNA, 19 nt, Artificial Sequence
  Description of Artificial Sequence: Synthetic oligonucleotide
  Antisense strand to SEQ ID NO: 266904
ucuugacggaauuucuagc

SEQ ID NO: 266906 - RNA, 19 nt, Artificial Sequence
  Description of Artificial Sequence: Synthetic oligonucleotide
  Sense strand starting at position 2163 of SEQ ID NO: 3431
uccgucaagaaaggaauua

SEQ ID NO: 266907 - RNA, 19 nt, Artificial Sequence
  Description of Artificial Sequence: Synthetic oligonucleotide
  Antisense strand to SEQ ID NO: 266906
uaauuccuuucuugacgga

SEQ ID NO: 266908 - RNA, 19 nt, Artificial Sequence
  Description of Artificial Sequence: Synthetic oligonucleotide
  Sense strand starting at position 2227 of SEQ ID NO: 3431
ugaguuacuuauucuauac

SEQ ID NO: 266909 - RNA, 19 nt, Artificial Sequence
  Description of Artificial Sequence: Synthetic oligonucleotide
  Antisense strand to SEQ ID NO: 266908
guauagaauaaguaacuca

SEQ ID NO: 266910 - RNA, 19 nt, Artificial Sequence
  Description of Artificial Sequence: Synthetic oligonucleotide
  Sense strand starting at position 2616 of SEQ ID NO: 3431
aaugcuuaaccaugggaga

SEQ ID NO: 266911 - RNA, 19 nt, Artificial Sequence
  Description of Artificial Sequence: Synthetic oligonucleotide
  Antisense strand to SEQ ID NO: 266910
ucucccaugguuaagcauu

SEQ ID NO: 266912 - RNA, 19 nt, Artificial Sequence
  Description of Artificial Sequence: Synthetic oligonucleotide
  Sense strand starting at position 2617 of SEQ ID NO: 3431
augcuuaaccaugggagau

SEQ ID NO: 266913 - RNA, 19 nt, Artificial Sequence
  Description of Artificial Sequence: Synthetic oligonucleotide
  Antisense strand to SEQ ID NO: 266912
aucucccaugguuaagcau

SEQ ID NO: 266914 - RNA, 19 nt, Artificial Sequence
  Description of Artificial Sequence: Synthetic oligonucleotide
  Sense strand starting at position 2618 of SEQ ID NO: 3431
ugcuuaaccaugggagaua

SEQ ID NO: 266915 - RNA, 19 nt, Artificial Sequence
  Description of Artificial Sequence: Synthetic oligonucleotide
  Antisense strand to SEQ ID NO: 266914
uaucucccaugguuaagca

SEQ ID NO: 266916 - RNA, 19 nt, Artificial Sequence
  Description of Artificial Sequence: Synthetic oligonucleotide
  Sense strand starting at position 2629 of SEQ ID NO: 3431
gggagauagagcgguaaau

SEQ ID NO: 266917 - RNA, 19 nt, Artificial Sequence
  Description of Artificial Sequence: Synthetic oligonucleotide
  Antisense strand to SEQ ID NO: 266916
auuuaccgcucuaucuccc

SEQ ID NO: 266918 - RNA, 19 nt, Artificial Sequence
  Description of Artificial Sequence: Synthetic oligonucleotide
  Sense strand starting at position 2726 of SEQ ID NO: 3431
gaggacuuccagcagaugu

SEQ ID NO: 266919 - RNA, 19 nt, Artificial Sequence
  Description of Artificial Sequence: Synthetic oligonucleotide
  Antisense strand to SEQ ID NO: 266918
acaucugcuggaaguccuc

SEQ ID NO: 266920 - RNA, 19 nt, Artificial Sequence
  Description of Artificial Sequence: Synthetic oligonucleotide
  Sense strand starting at position 2785 of SEQ ID NO: 3431
gcaaacagaucaccaguuu

SEQ ID NO: 266921 - RNA, 19 nt, Artificial Sequence
  Description of Artificial Sequence: Synthetic oligonucleotide
  Antisense strand to SEQ ID NO: 266920
aaacuggugaucuguuugc

SEQ ID NO: 266922 - RNA, 19 nt, Artificial Sequence
  Description of Artificial Sequence: Synthetic oligonucleotide
  Sense strand starting at position 2830 of SEQ ID NO: 3431
ggacacccuccggaguaua

SEQ ID NO: 266923 - RNA, 19 nt, Artificial Sequence
  Description of Artificial Sequence: Synthetic oligonucleotide
  Antisense strand to SEQ ID NO: 266922
uauacuccggagggugucc

SEQ ID NO: 266924 - RNA, 19 nt, Artificial Sequence
  Description of Artificial Sequence: Synthetic oligonucleotide
  Sense strand starting at position 2954 of SEQ ID NO: 3431
uucccuugaggaugacauu

SEQ ID NO: 266925 - RNA, 19 nt, Artificial Sequence
  Description of Artificial Sequence: Synthetic oligonucleotide
  Antisense strand to SEQ ID NO: 266924
aaugucauccucaagggaa

SEQ ID NO: 266926 - RNA, 19 nt, Artificial Sequence
  Description of Artificial Sequence: Synthetic oligonucleotide
  Sense strand starting at position 3165 of SEQ ID NO: 3431
ugagguggguuucucugaa

SEQ ID NO: 266927 - RNA, 19 nt, Artificial Sequence
  Description of Artificial Sequence: Synthetic oligonucleotide
  Antisense strand to SEQ ID NO: 266926
uucagagaaacccaccuca

SEQ ID NO: 266928 - RNA, 19 nt, Artificial Sequence
  Description of Artificial Sequence: Synthetic oligonucleotide
  Sense strand starting at position 3173 of SEQ ID NO: 3431
guuucucugaagugagauu

SEQ ID NO: 266929 - RNA, 19 nt, Artificial Sequence
  Description of Artificial Sequence: Synthetic oligonucleotide
  Antisense strand to SEQ ID NO: 266928
aaucucacuucagagaaac

SEQ ID NO: 266930 - RNA, 19 nt, Artificial Sequence
  Description of Artificial Sequence: Synthetic oligonucleotide
  Sense strand starting at position 3345 of SEQ ID NO: 3431
ggcuuaucuguauauucua

SEQ ID NO: 266931 - RNA, 19 nt, Artificial Sequence
  Description of Artificial Sequence: Synthetic oligonucleotide
  Antisense strand to SEQ ID NO: 266930
uagaauauacagauaagcc

SEQ ID NO: 266932 - RNA, 19 nt, Artificial Sequence
  Description of Artificial Sequence: Synthetic oligonucleotide
  Sense strand starting at position 3797 of SEQ ID NO: 3431
uagaaauaugguuguagua

SEQ ID NO: 266933 - RNA, 19 nt, Artificial Sequence
  Description of Artificial Sequence: Synthetic oligonucleotide
  Antisense strand to SEQ ID NO: 266932
uacuacaaccauauuucua

SEQ ID NO: 266934 - RNA, 19 nt, Artificial Sequence
  Description of Artificial Sequence: Synthetic oligonucleotide
  Sense strand starting at position 3818 of SEQ ID NO: 3431
cugaauaguggcuacccaa

SEQ ID NO: 266935 - RNA, 19 nt, Artificial Sequence
  Description of Artificial Sequence: Synthetic oligonucleotide
  Antisense strand to SEQ ID NO: 266934
uuggguagccacuauucag

SEQ ID NO: 266936 - RNA, 19 nt, Artificial Sequence
  Description of Artificial Sequence: Synthetic oligonucleotide
  Sense strand starting at position 3846 of SEQ ID NO: 3431
auccuaaucccugggaacu

SEQ ID NO: 266937 - RNA, 19 nt, Artificial Sequence
  Description of Artificial Sequence: Synthetic oligonucleotide
  Antisense strand to SEQ ID NO: 266936
aguucccagggauuaggau

SEQ ID NO: 266938 - RNA, 19 nt, Artificial Sequence
  Description of Artificial Sequence: Synthetic oligonucleotide
  Sense strand starting at position 3895 of SEQ ID NO: 3431
auuuaaggcucugaagaug

SEQ ID NO: 266939 - RNA, 19 nt, Artificial Sequence
  Description of Artificial Sequence: Synthetic oligonucleotide
  Antisense strand to SEQ ID NO: 266938
caucuucagagccuuaaau

SEQ ID NO: 266940 - RNA, 19 nt, Artificial Sequence
  Description of Artificial Sequence: Synthetic oligonucleotide
  Sense strand starting at position 251 of SEQ ID NO: 3432
gacaauuagcagugugaug

SEQ ID NO: 266941 - RNA, 19 nt, Artificial Sequence
  Description of Artificial Sequence: Synthetic oligonucleotide
  Antisense strand to SEQ ID NO: 266940
caucacacugcuaauuguc

SEQ ID NO: 266942 - RNA, 19 nt, Artificial Sequence
  Description of Artificial Sequence: Synthetic oligonucleotide
  Sense strand starting at position 417 of SEQ ID NO: 3432
ucagguuucucaucaguaa

SEQ ID NO: 266943 - RNA, 19 nt, Artificial Sequence
  Description of Artificial Sequence: Synthetic oligonucleotide
  Antisense strand to SEQ ID NO: 266942
uuacugaugagaaaccuga

SEQ ID NO: 266944 - RNA, 19 nt, Artificial Sequence
  Description of Artificial Sequence: Synthetic oligonucleotide
  Sense strand starting at position 426 of SEQ ID NO: 3432
ucaucaguaacuugggaga

SEQ ID NO: 266945 - RNA, 19 nt, Artificial Sequence
  Description of Artificial Sequence: Synthetic oligonucleotide
  Antisense strand to SEQ ID NO: 266944
ucucccaaguuacugauga

SEQ ID NO: 266946 - RNA, 19 nt, Artificial Sequence
  Description of Artificial Sequence: Synthetic oligonucleotide
  Sense strand starting at position 481 of SEQ ID NO: 3432
cuuugaucaucugugauuc

SEQ ID NO: 266947 - RNA, 19 nt, Artificial Sequence
  Description of Artificial Sequence: Synthetic oligonucleotide
  Antisense strand to SEQ ID NO: 266946
gaaucacagaugaucaaag

SEQ ID NO: 266948 - RNA, 19 nt, Artificial Sequence
  Description of Artificial Sequence: Synthetic oligonucleotide
  Sense strand starting at position 506 of SEQ ID NO: 3432
cagucuuagcaacaagagu

SEQ ID NO: 266949 - RNA, 19 nt, Artificial Sequence
  Description of Artificial Sequence: Synthetic oligonucleotide
  Antisense strand to SEQ ID NO: 266948
acucuuguugcuaagacug

SEQ ID NO: 266950 - RNA, 19 nt, Artificial Sequence
  Description of Artificial Sequence: Synthetic oligonucleotide
  Sense strand starting at position 1213 of SEQ ID NO: 3432
cgaguucuuguagaccaga

SEQ ID NO: 266951 - RNA, 19 nt, Artificial Sequence
  Description of Artificial Sequence: Synthetic oligonucleotide
  Antisense strand to SEQ ID NO: 266950
ucuggucuacaagaacucg

SEQ ID NO: 266952 - RNA, 19 nt, Artificial Sequence
  Description of Artificial Sequence: Synthetic oligonucleotide
  Sense strand starting at position 1308 of SEQ ID NO: 3432
caguaagagugguuuggac

SEQ ID NO: 266953 - RNA, 19 nt, Artificial Sequence
  Description of Artificial Sequence: Synthetic oligonucleotide
  Antisense strand to SEQ ID NO: 266952
guccaaaccacucuuacug

SEQ ID NO: 266954 - RNA, 19 nt, Artificial Sequence
  Description of Artificial Sequence: Synthetic oligonucleotide
  Sense strand starting at position 1310 of SEQ ID NO: 3432
guaagagugguuuggacac

SEQ ID NO: 266955 - RNA, 19 nt, Artificial Sequence
  Description of Artificial Sequence: Synthetic oligonucleotide
  Antisense strand to SEQ ID NO: 266954
guguccaaaccacucuuac

SEQ ID NO: 266956 - RNA, 19 nt, Artificial Sequence
  Description of Artificial Sequence: Synthetic oligonucleotide
  Sense strand starting at position 1414 of SEQ ID NO: 3432
gcuagaaauuccgucaaga

SEQ ID NO: 266957 - RNA, 19 nt, Artificial Sequence
  Description of Artificial Sequence: Synthetic oligonucleotide
  Antisense strand to SEQ ID NO: 266956
ucuugacggaauuucuagc

SEQ ID NO: 266958 - RNA, 19 nt, Artificial Sequence
  Description of Artificial Sequence: Synthetic oligonucleotide
  Sense strand starting at position 1423 of SEQ ID NO: 3432
uccgucaagaaaggaauua

SEQ ID NO: 266959 - RNA, 19 nt, Artificial Sequence
  Description of Artificial Sequence: Synthetic oligonucleotide
  Antisense strand to SEQ ID NO: 266958
uaauuccuuucuugacgga

SEQ ID NO: 266960 - RNA, 19 nt, Artificial Sequence
  Description of Artificial Sequence: Synthetic oligonucleotide
  Sense strand starting at position 1487 of SEQ ID NO: 3432
ugaguuacuuauucuauac

SEQ ID NO: 266961 - RNA, 19 nt, Artificial Sequence
  Description of Artificial Sequence: Synthetic oligonucleotide
  Antisense strand to SEQ ID NO: 266960
guauagaauaaguaacuca

SEQ ID NO: 266962 - RNA, 19 nt, Artificial Sequence
  Description of Artificial Sequence: Synthetic oligonucleotide
  Sense strand starting at position 1876 of SEQ ID NO: 3432
aaugcuuaaccaugggaga

SEQ ID NO: 266963 - RNA, 19 nt, Artificial Sequence
  Description of Artificial Sequence: Synthetic oligonucleotide
  Antisense strand to SEQ ID NO: 266962
ucucccaugguuaagcauu

SEQ ID NO: 266964 - RNA, 19 nt, Artificial Sequence
  Description of Artificial Sequence: Synthetic oligonucleotide
  Sense strand starting at position 1877 of SEQ ID NO: 3432
augcuuaaccaugggagau

SEQ ID NO: 266965 - RNA, 19 nt, Artificial Sequence
  Description of Artificial Sequence: Synthetic oligonucleotide
  Antisense strand to SEQ ID NO: 266964
aucucccaugguuaagcau

SEQ ID NO: 266966 - RNA, 19 nt, Artificial Sequence
  Description of Artificial Sequence: Synthetic oligonucleotide
  Sense strand starting at position 1878 of SEQ ID NO: 3432
ugcuuaaccaugggagaua

SEQ ID NO: 266967 - RNA, 19 nt, Artificial Sequence
  Description of Artificial Sequence: Synthetic oligonucleotide
  Antisense strand to SEQ ID NO: 266966
uaucucccaugguuaagca

SEQ ID NO: 266968 - RNA, 19 nt, Artificial Sequence
  Description of Artificial Sequence: Synthetic oligonucleotide
  Sense strand starting at position 1889 of SEQ ID NO: 3432
gggagauagagcgguaaau

SEQ ID NO: 266969 - RNA, 19 nt, Artificial Sequence
  Description of Artificial Sequence: Synthetic oligonucleotide
  Antisense strand to SEQ ID NO: 266968
auuuaccgcucuaucuccc

SEQ ID NO: 266970 - RNA, 19 nt, Artificial Sequence
  Description of Artificial Sequence: Synthetic oligonucleotide
  Sense strand starting at position 1986 of SEQ ID NO: 3432
gaggacuuccagcagaugu

SEQ ID NO: 266971 - RNA, 19 nt, Artificial Sequence
  Description of Artificial Sequence: Synthetic oligonucleotide
  Antisense strand to SEQ ID NO: 266970
acaucugcuggaaguccuc

SEQ ID NO: 266972 - RNA, 19 nt, Artificial Sequence
  Description of Artificial Sequence: Synthetic oligonucleotide
  Sense strand starting at position 2045 of SEQ ID NO: 3432
gcaaacagaucaccaguuu

SEQ ID NO: 266973 - RNA, 19 nt, Artificial Sequence
  Description of Artificial Sequence: Synthetic oligonucleotide
  Antisense strand to SEQ ID NO: 266972
aaacuggugaucuguuugc

SEQ ID NO: 266974 - RNA, 19 nt, Artificial Sequence
  Description of Artificial Sequence: Synthetic oligonucleotide
  Sense strand starting at position 2090 of SEQ ID NO: 3432
ggacacccuccggaguaua

SEQ ID NO: 266975 - RNA, 19 nt, Artificial Sequence
  Description of Artificial Sequence: Synthetic oligonucleotide
  Antisense strand to SEQ ID NO: 266974
uauacuccggagggugucc

SEQ ID NO: 266976 - RNA, 19 nt, Artificial Sequence
  Description of Artificial Sequence: Synthetic oligonucleotide
  Sense strand starting at position 2214 of SEQ ID NO: 3432
uucccuugaggaugacauu

SEQ ID NO: 266977 - RNA, 19 nt, Artificial Sequence
  Description of Artificial Sequence: Synthetic oligonucleotide
  Antisense strand to SEQ ID NO: 266976
aaugucauccucaagggaa

SEQ ID NO: 266978 - RNA, 19 nt, Artificial Sequence
  Description of Artificial Sequence: Synthetic oligonucleotide
  Sense strand starting at position 2425 of SEQ ID NO: 3432
ugagguggguuucucugaa

SEQ ID NO: 266979 - RNA, 19 nt, Artificial Sequence
  Description of Artificial Sequence: Synthetic oligonucleotide
  Antisense strand to SEQ ID NO: 266978
uucagagaaacccaccuca

SEQ ID NO: 266980 - RNA, 19 nt, Artificial Sequence
  Description of Artificial Sequence: Synthetic oligonucleotide
  Sense strand starting at position 2433 of SEQ ID NO: 3432
guuucucugaagugagauu

SEQ ID NO: 266981 - RNA, 19 nt, Artificial Sequence
  Description of Artificial Sequence: Synthetic oligonucleotide
  Antisense strand to SEQ ID NO: 266980
aaucucacuucagagaaac

SEQ ID NO: 266982 - RNA, 19 nt, Artificial Sequence
  Description of Artificial Sequence: Synthetic oligonucleotide
  Sense strand starting at position 2605 of SEQ ID NO: 3432
ggcuuaucuguauauucua

SEQ ID NO: 266983 - RNA, 19 nt, Artificial Sequence
  Description of Artificial Sequence: Synthetic oligonucleotide
  Antisense strand to SEQ ID NO: 266982
uagaauauacagauaagcc

SEQ ID NO: 266984 - RNA, 19 nt, Artificial Sequence
  Description of Artificial Sequence: Synthetic oligonucleotide
  Sense strand starting at position 3057 of SEQ ID NO: 3432
uagaaauaugguuguagua

SEQ ID NO: 266985 - RNA, 19 nt, Artificial Sequence
  Description of Artificial Sequence: Synthetic oligonucleotide
  Antisense strand to SEQ ID NO: 266984
uacuacaaccauauuucua

SEQ ID NO: 266986 - RNA, 19 nt, Artificial Sequence
  Description of Artificial Sequence: Synthetic oligonucleotide
  Sense strand starting at position 3078 of SEQ ID NO: 3432
cugaauaguggcuacccaa

SEQ ID NO: 266987 - RNA, 19 nt, Artificial Sequence
  Description of Artificial Sequence: Synthetic oligonucleotide
  Antisense strand to SEQ ID NO: 266986
uuggguagccacuauucag

SEQ ID NO: 266988 - RNA, 19 nt, Artificial Sequence
  Description of Artificial Sequence: Synthetic oligonucleotide
  Sense strand starting at position 3106 of SEQ ID NO: 3432
auccuaaucccugggaacu

SEQ ID NO: 266989 - RNA, 19 nt, Artificial Sequence
  Description of Artificial Sequence: Synthetic oligonucleotide
  Antisense strand to SEQ ID NO: 266988
aguucccagggauuaggau

SEQ ID NO: 266990 - RNA, 19 nt, Artificial Sequence
  Description of Artificial Sequence: Synthetic oligonucleotide
  Sense strand starting at position 3155 of SEQ ID NO: 3432
auuuaaggcucugaagaug

SEQ ID NO: 266991 - RNA, 19 nt, Artificial Sequence
  Description of Artificial Sequence: Synthetic oligonucleotide
  Antisense strand to SEQ ID NO: 266990
caucuucagagccuuaaau

SEQ ID NO: 266992 - RNA, 19 nt, Artificial Sequence
  Description of Artificial Sequence: Synthetic oligonucleotide
  Sense strand starting at position 3282 of SEQ ID NO: 3432
cagagauucgaguaauacg

SEQ ID NO: 266993 - RNA, 19 nt, Artificial Sequence
  Description of Artificial Sequence: Synthetic oligonucleotide
  Antisense strand to SEQ ID NO: 266992
cguauuacucgaaucucug

SEQ ID NO: 266994 - RNA, 19 nt, Artificial Sequence
  Description of Artificial Sequence: Synthetic oligonucleotide
  Sense strand starting at position 3430 of SEQ ID NO: 3432
gguccucagaacugugaaa

SEQ ID NO: 266995 - RNA, 19 nt, Artificial Sequence
  Description of Artificial Sequence: Synthetic oligonucleotide
  Antisense strand to SEQ ID NO: 266994
uuucacaguucugaggacc

SEQ ID NO: 266996 - RNA, 19 nt, Artificial Sequence
  Description of Artificial Sequence: Synthetic oligonucleotide
  Sense strand starting at position 3432 of SEQ ID NO: 3432
uccucagaacugugaaaga

SEQ ID NO: 266997 - RNA, 19 nt, Artificial Sequence
  Description of Artificial Sequence: Synthetic oligonucleotide
  Antisense strand to SEQ ID NO: 266996
ucuuucacaguucugagga

SEQ ID NO: 266998 - RNA, 19 nt, Artificial Sequence
  Description of Artificial Sequence: Synthetic oligonucleotide
  Sense strand starting at position 3596 of SEQ ID NO: 3432
uuccuuugugaguggauuu

SEQ ID NO: 266999 - RNA, 19 nt, Artificial Sequence
  Description of Artificial Sequence: Synthetic oligonucleotide
  Antisense strand to SEQ ID NO: 266998
aaauccacucacaaaggaa

SEQ ID NO: 267000 - RNA, 19 nt, Artificial Sequence
  Description of Artificial Sequence: Synthetic oligonucleotide
  Sense strand starting at position 3656 of SEQ ID NO: 3432
uaguaacuucggcauccua

SEQ ID NO: 267001 - RNA, 19 nt, Artificial Sequence
  Description of Artificial Sequence: Synthetic oligonucleotide
  Antisense strand to SEQ ID NO: 267000
uaggaugccgaaguuacua

SEQ ID NO: 267002 - RNA, 19 nt, Artificial Sequence
  Description of Artificial Sequence: Synthetic oligonucleotide
  Sense strand starting at position 3737 of SEQ ID NO: 3432
auccuaggagugugguaaa

SEQ ID NO: 267003 - RNA, 19 nt, Artificial Sequence
  Description of Artificial Sequence: Synthetic oligonucleotide
  Antisense strand to SEQ ID NO: 267002
uuuaccacacuccuaggau

SEQ ID NO: 267004 - RNA, 19 nt, Artificial Sequence
  Description of Artificial Sequence: Synthetic oligonucleotide
  Sense strand starting at position 3884 of SEQ ID NO: 3432
uugugaauaucagcugaga

SEQ ID NO: 267005 - RNA, 19 nt, Artificial Sequence
  Description of Artificial Sequence: Synthetic oligonucleotide
  Antisense strand to SEQ ID NO: 267004
ucucagcugauauucacaa

SEQ ID NO: 267006 - RNA, 19 nt, Artificial Sequence
  Description of Artificial Sequence: Synthetic oligonucleotide
  Sense strand starting at position 3886 of SEQ ID NO: 3432
gugaauaucagcugagaug

SEQ ID NO: 267007 - RNA, 19 nt, Artificial Sequence
  Description of Artificial Sequence: Synthetic oligonucleotide
  Antisense strand to SEQ ID NO: 267006
caucucagcugauauucac

SEQ ID NO: 267008 - RNA, 19 nt, Artificial Sequence
  Description of Artificial Sequence: Synthetic oligonucleotide
  Sense strand starting at position 3898 of SEQ ID NO: 3432
ugagaugccaucugugaag

SEQ ID NO: 267009 - RNA, 19 nt, Artificial Sequence
  Description of Artificial Sequence: Synthetic oligonucleotide
  Antisense strand to SEQ ID NO: 267008
cuucacagauggcaucuca

SEQ ID NO: 267010 - RNA, 19 nt, Artificial Sequence
  Description of Artificial Sequence: Synthetic oligonucleotide
  Sense strand starting at position 3925 of SEQ ID NO: 3432
ggcacuaacuauucuguga

SEQ ID NO: 267011 - RNA, 19 nt, Artificial Sequence
  Description of Artificial Sequence: Synthetic oligonucleotide
  Antisense strand to SEQ ID NO: 267010
ucacagaauaguuagugcc

SEQ ID NO: 267012 - RNA, 19 nt, Artificial Sequence
  Description of Artificial Sequence: Synthetic oligonucleotide
  Sense strand starting at position 3932 of SEQ ID NO: 3432
acuauucugugacuuuaag

SEQ ID NO: 267013 - RNA, 19 nt, Artificial Sequence
  Description of Artificial Sequence: Synthetic oligonucleotide
  Antisense strand to SEQ ID NO: 267012
cuuaaagucacagaauagu

SEQ ID NO: 267014 - RNA, 19 nt, Artificial Sequence
  Description of Artificial Sequence: Synthetic oligonucleotide
  Sense strand starting at position 3938 of SEQ ID NO: 3432
cugugacuuuaagcauaug

SEQ ID NO: 267015 - RNA, 19 nt, Artificial Sequence
  Description of Artificial Sequence: Synthetic oligonucleotide
  Antisense strand to SEQ ID NO: 267014
cauaugcuuaaagucacag

SEQ ID NO: 267016 - RNA, 19 nt, Artificial Sequence
  Description of Artificial Sequence: Synthetic oligonucleotide
  Sense strand starting at position 3941 of SEQ ID NO: 3432
ugacuuuaagcauauguag

SEQ ID NO: 267017 - RNA, 19 nt, Artificial Sequence
  Description of Artificial Sequence: Synthetic oligonucleotide
  Antisense strand to SEQ ID NO: 267016
cuacauaugcuuaaaguca

SEQ ID NO: 267018 - RNA, 19 nt, Artificial Sequence
  Description of Artificial Sequence: Synthetic oligonucleotide
  Sense strand starting at position 3980 of SEQ ID NO: 3432
caguuuaaugcggagggaa

SEQ ID NO: 267019 - RNA, 19 nt, Artificial Sequence
  Description of Artificial Sequence: Synthetic oligonucleotide
  Antisense strand to SEQ ID NO: 267018
uucccuccgcauuaaacug

SEQ ID NO: 267020 - RNA, 19 nt, Artificial Sequence
  Description of Artificial Sequence: Synthetic oligonucleotide
  Sense strand starting at position 128 of SEQ ID NO: 3433
gacaauuagcagugugaug

SEQ ID NO: 267021 - RNA, 19 nt, Artificial Sequence
  Description of Artificial Sequence: Synthetic oligonucleotide
  Antisense strand to SEQ ID NO: 267020
caucacacugcuaauuguc

SEQ ID NO: 267022 - RNA, 19 nt, Artificial Sequence
  Description of Artificial Sequence: Synthetic oligonucleotide
  Sense strand starting at position 294 of SEQ ID NO: 3433
ucagguuucucaucaguaa

SEQ ID NO: 267023 - RNA, 19 nt, Artificial Sequence
  Description of Artificial Sequence: Synthetic oligonucleotide
  Antisense strand to SEQ ID NO: 267022
uuacugaugagaaaccuga

SEQ ID NO: 267024 - RNA, 19 nt, Artificial Sequence
  Description of Artificial Sequence: Synthetic oligonucleotide
  Sense strand starting at position 303 of SEQ ID NO: 3433
ucaucaguaacuugggaga

SEQ ID NO: 267025 - RNA, 19 nt, Artificial Sequence
  Description of Artificial Sequence: Synthetic oligonucleotide
  Antisense strand to SEQ ID NO: 267024
ucucccaaguuacugauga

SEQ ID NO: 267026 - RNA, 19 nt, Artificial Sequence
  Description of Artificial Sequence: Synthetic oligonucleotide
  Sense strand starting at position 358 of SEQ ID NO: 3433
cuuugaucaucugugauuc

SEQ ID NO: 267027 - RNA, 19 nt, Artificial Sequence
  Description of Artificial Sequence: Synthetic oligonucleotide
  Antisense strand to SEQ ID NO: 267026
gaaucacagaugaucaaag

SEQ ID NO: 267028 - RNA, 19 nt, Artificial Sequence
  Description of Artificial Sequence: Synthetic oligonucleotide
  Sense strand starting at position 383 of SEQ ID NO: 3433
cagucuuagcaacaagagu

SEQ ID NO: 267029 - RNA, 19 nt, Artificial Sequence
  Description of Artificial Sequence: Synthetic oligonucleotide
  Antisense strand to SEQ ID NO: 267028
acucuuguugcuaagacug

SEQ ID NO: 267030 - RNA, 19 nt, Artificial Sequence
  Description of Artificial Sequence: Synthetic oligonucleotide
  Sense strand starting at position 1090 of SEQ ID NO: 3433
cgaguucuuguagaccaga

SEQ ID NO: 267031 - RNA, 19 nt, Artificial Sequence
  Description of Artificial Sequence: Synthetic oligonucleotide
  Antisense strand to SEQ ID NO: 267030
ucuggucuacaagaacucg

SEQ ID NO: 267032 - RNA, 19 nt, Artificial Sequence
  Description of Artificial Sequence: Synthetic oligonucleotide
  Sense strand starting at position 1185 of SEQ ID NO: 3433
caguaagagugguuuggac

SEQ ID NO: 267033 - RNA, 19 nt, Artificial Sequence
  Description of Artificial Sequence: Synthetic oligonucleotide
  Antisense strand to SEQ ID NO: 267032
guccaaaccacucuuacug

SEQ ID NO: 267034 - RNA, 19 nt, Artificial Sequence
  Description of Artificial Sequence: Synthetic oligonucleotide
  Sense strand starting at position 1187 of SEQ ID NO: 3433
guaagagugguuuggacac

SEQ ID NO: 267035 - RNA, 19 nt, Artificial Sequence
  Description of Artificial Sequence: Synthetic oligonucleotide
  Antisense strand to SEQ ID NO: 267034
guguccaaaccacucuuac

SEQ ID NO: 267036 - RNA, 19 nt, Artificial Sequence
  Description of Artificial Sequence: Synthetic oligonucleotide
  Sense strand starting at position 1291 of SEQ ID NO: 3433
gcuagaaauuccgucaaga

SEQ ID NO: 267037 - RNA, 19 nt, Artificial Sequence
  Description of Artificial Sequence: Synthetic oligonucleotide
  Antisense strand to SEQ ID NO: 267036
ucuugacggaauuucuagc

SEQ ID NO: 267038 - RNA, 19 nt, Artificial Sequence
  Description of Artificial Sequence: Synthetic oligonucleotide
  Sense strand starting at position 1300 of SEQ ID NO: 3433
uccgucaagaaaggaauua

SEQ ID NO: 267039 - RNA, 19 nt, Artificial Sequence
  Description of Artificial Sequence: Synthetic oligonucleotide
  Antisense strand to SEQ ID NO: 267038
uaauuccuuucuugacgga

SEQ ID NO: 267040 - RNA, 19 nt, Artificial Sequence
  Description of Artificial Sequence: Synthetic oligonucleotide
  Sense strand starting at position 1364 of SEQ ID NO: 3433
ugaguuacuuauucuauac

SEQ ID NO: 267041 - RNA, 19 nt, Artificial Sequence
  Description of Artificial Sequence: Synthetic oligonucleotide
  Antisense strand to SEQ ID NO: 267040
guauagaauaaguaacuca

SEQ ID NO: 267042 - RNA, 19 nt, Artificial Sequence
  Description of Artificial Sequence: Synthetic oligonucleotide
  Sense strand starting at position 1753 of SEQ ID NO: 3433
aaugcuuaaccaugggaga

SEQ ID NO: 267043 - RNA, 19 nt, Artificial Sequence
  Description of Artificial Sequence: Synthetic oligonucleotide
  Antisense strand to SEQ ID NO: 267042
ucucccaugguuaagcauu

SEQ ID NO: 267044 - RNA, 19 nt, Artificial Sequence
  Description of Artificial Sequence: Synthetic oligonucleotide
  Sense strand starting at position 1754 of SEQ ID NO: 3433
augcuuaaccaugggagau

SEQ ID NO: 267045 - RNA, 19 nt, Artificial Sequence
  Description of Artificial Sequence: Synthetic oligonucleotide
  Antisense strand to SEQ ID NO: 267044
aucucccaugguuaagcau

SEQ ID NO: 267046 - RNA, 19 nt, Artificial Sequence
  Description of Artificial Sequence: Synthetic oligonucleotide
  Sense strand starting at position 1755 of SEQ ID NO: 3433
ugcuuaaccaugggagaua

SEQ ID NO: 267047 - RNA, 19 nt, Artificial Sequence
  Description of Artificial Sequence: Synthetic oligonucleotide
  Antisense strand to SEQ ID NO: 267046
uaucucccaugguuaagca

SEQ ID NO: 267048 - RNA, 19 nt, Artificial Sequence
  Description of Artificial Sequence: Synthetic oligonucleotide
  Sense strand starting at position 1766 of SEQ ID NO: 3433
gggagauagagcgguaaau

SEQ ID NO: 267049 - RNA, 19 nt, Artificial Sequence
  Description of Artificial Sequence: Synthetic oligonucleotide
  Antisense strand to SEQ ID NO: 267048
auuuaccgcucuaucuccc

SEQ ID NO: 267050 - RNA, 19 nt, Artificial Sequence
  Description of Artificial Sequence: Synthetic oligonucleotide
  Sense strand starting at position 1863 of SEQ ID NO: 3433
gaggacuuccagcagaugu

SEQ ID NO: 267051 - RNA, 19 nt, Artificial Sequence
  Description of Artificial Sequence: Synthetic oligonucleotide
  Antisense strand to SEQ ID NO: 267050
acaucugcuggaaguccuc

SEQ ID NO: 267052 - RNA, 19 nt, Artificial Sequence
  Description of Artificial Sequence: Synthetic oligonucleotide
  Sense strand starting at position 1922 of SEQ ID NO: 3433
gcaaacagaucaccaguuu

SEQ ID NO: 267053 - RNA, 19 nt, Artificial Sequence
  Description of Artificial Sequence: Synthetic oligonucleotide
  Antisense strand to SEQ ID NO: 267052
aaacuggugaucuguuugc

SEQ ID NO: 267054 - RNA, 19 nt, Artificial Sequence
  Description of Artificial Sequence: Synthetic oligonucleotide
  Sense strand starting at position 1967 of SEQ ID NO: 3433
ggacacccuccggaguaua

SEQ ID NO: 267055 - RNA, 19 nt, Artificial Sequence
  Description of Artificial Sequence: Synthetic oligonucleotide
  Antisense strand to SEQ ID NO: 267054
uauacuccggagggugucc

SEQ ID NO: 267056 - RNA, 19 nt, Artificial Sequence
  Description of Artificial Sequence: Synthetic oligonucleotide
  Sense strand starting at position 2091 of SEQ ID NO: 3433
uucccuugaggaugacauu

SEQ ID NO: 267057 - RNA, 19 nt, Artificial Sequence
  Description of Artificial Sequence: Synthetic oligonucleotide
  Antisense strand to SEQ ID NO: 267056
aaugucauccucaagggaa

SEQ ID NO: 267058 - RNA, 19 nt, Artificial Sequence
  Description of Artificial Sequence: Synthetic oligonucleotide
  Sense strand starting at position 2302 of SEQ ID NO: 3433
ugagguggguuucucugaa

SEQ ID NO: 267059 - RNA, 19 nt, Artificial Sequence
  Description of Artificial Sequence: Synthetic oligonucleotide
  Antisense strand to SEQ ID NO: 267058
uucagagaaacccaccuca

SEQ ID NO: 267060 - RNA, 19 nt, Artificial Sequence
  Description of Artificial Sequence: Synthetic oligonucleotide
  Sense strand starting at position 2310 of SEQ ID NO: 3433
guuucucugaagugagauu

SEQ ID NO: 267061 - RNA, 19 nt, Artificial Sequence
  Description of Artificial Sequence: Synthetic oligonucleotide
  Antisense strand to SEQ ID NO: 267060
aaucucacuucagagaaac

SEQ ID NO: 267062 - RNA, 19 nt, Artificial Sequence
  Description of Artificial Sequence: Synthetic oligonucleotide
  Sense strand starting at position 2482 of SEQ ID NO: 3433
ggcuuaucuguauauucua

SEQ ID NO: 267063 - RNA, 19 nt, Artificial Sequence
  Description of Artificial Sequence: Synthetic oligonucleotide
  Antisense strand to SEQ ID NO: 267062
uagaauauacagauaagcc

SEQ ID NO: 267064 - RNA, 19 nt, Artificial Sequence
  Description of Artificial Sequence: Synthetic oligonucleotide
  Sense strand starting at position 2934 of SEQ ID NO: 3433
uagaaauaugguuguagua

SEQ ID NO: 267065 - RNA, 19 nt, Artificial Sequence
  Description of Artificial Sequence: Synthetic oligonucleotide
  Antisense strand to SEQ ID NO: 267064
uacuacaaccauauuucua

SEQ ID NO: 267066 - RNA, 19 nt, Artificial Sequence
  Description of Artificial Sequence: Synthetic oligonucleotide
  Sense strand starting at position 2955 of SEQ ID NO: 3433
cugaauaguggcuacccaa

SEQ ID NO: 267067 - RNA, 19 nt, Artificial Sequence
  Description of Artificial Sequence: Synthetic oligonucleotide
  Antisense strand to SEQ ID NO: 267066
uuggguagccacuauucag

SEQ ID NO: 267068 - RNA, 19 nt, Artificial Sequence
  Description of Artificial Sequence: Synthetic oligonucleotide
  Sense strand starting at position 2983 of SEQ ID NO: 3433
auccuaaucccugggaacu

SEQ ID NO: 267069 - RNA, 19 nt, Artificial Sequence
  Description of Artificial Sequence: Synthetic oligonucleotide
  Antisense strand to SEQ ID NO: 267068
aguucccagggauuaggau

SEQ ID NO: 267070 - RNA, 19 nt, Artificial Sequence
  Description of Artificial Sequence: Synthetic oligonucleotide
  Sense strand starting at position 3032 of SEQ ID NO: 3433
auuuaaggcucugaagaug

SEQ ID NO: 267071 - RNA, 19 nt, Artificial Sequence
  Description of Artificial Sequence: Synthetic oligonucleotide
  Antisense strand to SEQ ID NO: 267070
caucuucagagccuuaaau

SEQ ID NO: 267072 - RNA, 19 nt, Artificial Sequence
  Description of Artificial Sequence: Synthetic oligonucleotide
  Sense strand starting at position 3159 of SEQ ID NO: 3433
cagagauucgaguaauacg

SEQ ID NO: 267073 - RNA, 19 nt, Artificial Sequence
  Description of Artificial Sequence: Synthetic oligonucleotide
  Antisense strand to SEQ ID NO: 267072
cguauuacucgaaucucug

SEQ ID NO: 267074 - RNA, 19 nt, Artificial Sequence
  Description of Artificial Sequence: Synthetic oligonucleotide
  Sense strand starting at position 3307 of SEQ ID NO: 3433
gguccucagaacugugaaa

SEQ ID NO: 267075 - RNA, 19 nt, Artificial Sequence
  Description of Artificial Sequence: Synthetic oligonucleotide
  Antisense strand to SEQ ID NO: 267074
uuucacaguucugaggacc

SEQ ID NO: 267076 - RNA, 19 nt, Artificial Sequence
  Description of Artificial Sequence: Synthetic oligonucleotide
  Sense strand starting at position 3309 of SEQ ID NO: 3433
uccucagaacugugaaaga

SEQ ID NO: 267077 - RNA, 19 nt, Artificial Sequence
  Description of Artificial Sequence: Synthetic oligonucleotide
  Antisense strand to SEQ ID NO: 267076
ucuuucacaguucugagga

SEQ ID NO: 267078 - RNA, 19 nt, Artificial Sequence
  Description of Artificial Sequence: Synthetic oligonucleotide
  Sense strand starting at position 3473 of SEQ ID NO: 3433
uuccuuugugaguggauuu

SEQ ID NO: 267079 - RNA, 19 nt, Artificial Sequence
  Description of Artificial Sequence: Synthetic oligonucleotide
  Antisense strand to SEQ ID NO: 267078
aaauccacucacaaaggaa

SEQ ID NO: 267080 - RNA, 19 nt, Artificial Sequence
  Description of Artificial Sequence: Synthetic oligonucleotide
  Sense strand starting at position 3614 of SEQ ID NO: 3433
auccuaggagugugguaaa

SEQ ID NO: 267081 - RNA, 19 nt, Artificial Sequence
  Description of Artificial Sequence: Synthetic oligonucleotide
  Antisense strand to SEQ ID NO: 267080
uuuaccacacuccuaggau

SEQ ID NO: 267082 - RNA, 19 nt, Artificial Sequence
  Description of Artificial Sequence: Synthetic oligonucleotide
  Sense strand starting at position 3761 of SEQ ID NO: 3433
uugugaauaucagcugaga

SEQ ID NO: 267083 - RNA, 19 nt, Artificial Sequence
  Description of Artificial Sequence: Synthetic oligonucleotide
  Antisense strand to SEQ ID NO: 267082
ucucagcugauauucacaa

SEQ ID NO: 267084 - RNA, 19 nt, Artificial Sequence
  Description of Artificial Sequence: Synthetic oligonucleotide
  Sense strand starting at position 3763 of SEQ ID NO: 3433
gugaauaucagcugagaug

SEQ ID NO: 267085 - RNA, 19 nt, Artificial Sequence
  Description of Artificial Sequence: Synthetic oligonucleotide
  Antisense strand to SEQ ID NO: 267084
caucucagcugauauucac

SEQ ID NO: 267086 - RNA, 19 nt, Artificial Sequence
  Description of Artificial Sequence: Synthetic oligonucleotide
  Sense strand starting at position 3775 of SEQ ID NO: 3433
ugagaugccaucugugaag

SEQ ID NO: 267087 - RNA, 19 nt, Artificial Sequence
  Description of Artificial Sequence: Synthetic oligonucleotide
  Antisense strand to SEQ ID NO: 267086
cuucacagauggcaucuca

SEQ ID NO: 267088 - RNA, 19 nt, Artificial Sequence
  Description of Artificial Sequence: Synthetic oligonucleotide
  Sense strand starting at position 3802 of SEQ ID NO: 3433
ggcacuaacuauucuguga

SEQ ID NO: 267089 - RNA, 19 nt, Artificial Sequence
  Description of Artificial Sequence: Synthetic oligonucleotide
  Antisense strand to SEQ ID NO: 267088
ucacagaauaguuagugcc

SEQ ID NO: 267090 - RNA, 19 nt, Artificial Sequence
  Description of Artificial Sequence: Synthetic oligonucleotide
  Sense strand starting at position 3809 of SEQ ID NO: 3433
acuauucugugacuuuaag

SEQ ID NO: 267091 - RNA, 19 nt, Artificial Sequence
  Description of Artificial Sequence: Synthetic oligonucleotide
  Antisense strand to SEQ ID NO: 267090
cuuaaagucacagaauagu

SEQ ID NO: 267092 - RNA, 19 nt, Artificial Sequence
  Description of Artificial Sequence: Synthetic oligonucleotide
  Sense strand starting at position 3818 of SEQ ID NO: 3433
ugacuuuaagcauauguag

SEQ ID NO: 267093 - RNA, 19 nt, Artificial Sequence
  Description of Artificial Sequence: Synthetic oligonucleotide
  Antisense strand to SEQ ID NO: 267092
cuacauaugcuuaaaguca

SEQ ID NO: 267094 - RNA, 19 nt, Artificial Sequence
  Description of Artificial Sequence: Synthetic oligonucleotide
  Sense strand starting at position 3857 of SEQ ID NO: 3433
caguuuaaugcggagggaa

SEQ ID NO: 267095 - RNA, 19 nt, Artificial Sequence
  Description of Artificial Sequence: Synthetic oligonucleotide
  Antisense strand to SEQ ID NO: 267094
uucccuccgcauuaaacug

SEQ ID NO: 267096 - RNA, 19 nt, Artificial Sequence
  Description of Artificial Sequence: Synthetic oligonucleotide
  Sense strand starting at position 3900 of SEQ ID NO: 3433
ccuagaggccuguaacuca

SEQ ID NO: 267097 - RNA, 19 nt, Artificial Sequence
  Description of Artificial Sequence: Synthetic oligonucleotide
  Antisense strand to SEQ ID NO: 267096
ugaguuacaggccucuagg

SEQ ID NO: 267098 - RNA, 19 nt, Artificial Sequence
  Description of Artificial Sequence: Synthetic oligonucleotide
  Sense strand starting at position 3980 of SEQ ID NO: 3433
ggaagucacugggccaaau

SEQ ID NO: 267099 - RNA, 19 nt, Artificial Sequence
  Description of Artificial Sequence: Synthetic oligonucleotide
  Antisense strand to SEQ ID NO: 267098
auuuggcccagugacuucc

SEQ ID NO: 267100 - RNA, 19 nt, Artificial Sequence
  Description of Artificial Sequence: Synthetic oligonucleotide
  Sense strand starting at position 54 of SEQ ID NO: 3434
auuccaagagccuguaaua

SEQ ID NO: 267101 - RNA, 19 nt, Artificial Sequence
  Description of Artificial Sequence: Synthetic oligonucleotide
  Antisense strand to SEQ ID NO: 267100
uauuacaggcucuuggaau

SEQ ID NO: 267102 - RNA, 19 nt, Artificial Sequence
  Description of Artificial Sequence: Synthetic oligonucleotide
  Sense strand starting at position 83 of SEQ ID NO: 3434
gcauaaauggucuacuauc

SEQ ID NO: 267103 - RNA, 19 nt, Artificial Sequence
  Description of Artificial Sequence: Synthetic oligonucleotide
  Antisense strand to SEQ ID NO: 267102
gauaguagaccauuuaugc

SEQ ID NO: 267104 - RNA, 19 nt, Artificial Sequence
  Description of Artificial Sequence: Synthetic oligonucleotide
  Sense strand starting at position 153 of SEQ ID NO: 3434
uaugcaugagugggaugua

SEQ ID NO: 267105 - RNA, 19 nt, Artificial Sequence
  Description of Artificial Sequence: Synthetic oligonucleotide
  Antisense strand to SEQ ID NO: 267104
uacaucccacucaugcaua

SEQ ID NO: 267106 - RNA, 19 nt, Artificial Sequence
  Description of Artificial Sequence: Synthetic oligonucleotide
  Sense strand starting at position 241 of SEQ ID NO: 3434
ucccaagaaucugugauua

SEQ ID NO: 267107 - RNA, 19 nt, Artificial Sequence
  Description of Artificial Sequence: Synthetic oligonucleotide
  Antisense strand to SEQ ID NO: 267106
uaaucacagauucuuggga

SEQ ID NO: 267108 - RNA, 19 nt, Artificial Sequence
  Description of Artificial Sequence: Synthetic oligonucleotide
  Sense strand starting at position 245 of SEQ ID NO: 3434
aagaaucugugauuauguu

SEQ ID NO: 267109 - RNA, 19 nt, Artificial Sequence
  Description of Artificial Sequence: Synthetic oligonucleotide
  Antisense strand to SEQ ID NO: 267108
aacauaaucacagauucuu

SEQ ID NO: 267110 - RNA, 19 nt, Artificial Sequence
  Description of Artificial Sequence: Synthetic oligonucleotide
  Sense strand starting at position 246 of SEQ ID NO: 3434
agaaucugugauuauguua

SEQ ID NO: 267111 - RNA, 19 nt, Artificial Sequence
  Description of Artificial Sequence: Synthetic oligonucleotide
  Antisense strand to SEQ ID NO: 267110
uaacauaaucacagauucu

SEQ ID NO: 267112 - RNA, 19 nt, Artificial Sequence
  Description of Artificial Sequence: Synthetic oligonucleotide
  Sense strand starting at position 287 of SEQ ID NO: 3434
aaggcugcagauugaauua

SEQ ID NO: 267113 - RNA, 19 nt, Artificial Sequence
  Description of Artificial Sequence: Synthetic oligonucleotide
  Antisense strand to SEQ ID NO: 267112
uaauucaaucugcagccuu

SEQ ID NO: 267114 - RNA, 19 nt, Artificial Sequence
  Description of Artificial Sequence: Synthetic oligonucleotide
  Sense strand starting at position 344 of SEQ ID NO: 3434
ccuggauuaucugugggag

SEQ ID NO: 267115 - RNA, 19 nt, Artificial Sequence
  Description of Artificial Sequence: Synthetic oligonucleotide
  Antisense strand to SEQ ID NO: 267114
cucccacagauaauccagg

SEQ ID NO: 267116 - RNA, 19 nt, Artificial Sequence
  Description of Artificial Sequence: Synthetic oligonucleotide
  Sense strand starting at position 594 of SEQ ID NO: 3434
gugagaccucaguaggacu

SEQ ID NO: 267117 - RNA, 19 nt, Artificial Sequence
  Description of Artificial Sequence: Synthetic oligonucleotide
  Antisense strand to SEQ ID NO: 267116
aguccuacugaggucucac

SEQ ID NO: 267118 - RNA, 19 nt, Artificial Sequence
  Description of Artificial Sequence: Synthetic oligonucleotide
  Sense strand starting at position 605 of SEQ ID NO: 3434
guaggacugcuacagaauc

SEQ ID NO: 267119 - RNA, 19 nt, Artificial Sequence
  Description of Artificial Sequence: Synthetic oligonucleotide
  Antisense strand to SEQ ID NO: 267118
gauucuguagcaguccuac

SEQ ID NO: 267120 - RNA, 19 nt, Artificial Sequence
  Description of Artificial Sequence: Synthetic oligonucleotide
  Sense strand starting at position 630 of SEQ ID NO: 3434
uaguaaauuguguauguga

SEQ ID NO: 267121 - RNA, 19 nt, Artificial Sequence
  Description of Artificial Sequence: Synthetic oligonucleotide
  Antisense strand to SEQ ID NO: 267120
ucacauacacaauuuacua

SEQ ID NO: 267122 - RNA, 19 nt, Artificial Sequence
  Description of Artificial Sequence: Synthetic oligonucleotide
  Sense strand starting at position 679 of SEQ ID NO: 3434
gcgcgcguuccuauguguu

SEQ ID NO: 267123 - RNA, 19 nt, Artificial Sequence
  Description of Artificial Sequence: Synthetic oligonucleotide
  Antisense strand to SEQ ID NO: 267122
aacacauaggaacgcgcgc

SEQ ID NO: 267124 - RNA, 19 nt, Artificial Sequence
  Description of Artificial Sequence: Synthetic oligonucleotide
  Sense strand starting at position 721 of SEQ ID NO: 3434
uguuauggcagcgaauuaa

SEQ ID NO: 267125 - RNA, 19 nt, Artificial Sequence
  Description of Artificial Sequence: Synthetic oligonucleotide
  Antisense strand to SEQ ID NO: 267124
uuaauucgcugccauaaca

SEQ ID NO: 267126 - RNA, 19 nt, Artificial Sequence
  Description of Artificial Sequence: Synthetic oligonucleotide
  Sense strand starting at position 796 of SEQ ID NO: 3434
gugccaggccguguagaau

SEQ ID NO: 267127 - RNA, 19 nt, Artificial Sequence
  Description of Artificial Sequence: Synthetic oligonucleotide
  Antisense strand to SEQ ID NO: 267126
auucuacacggccuggcac

SEQ ID NO: 267128 - RNA, 19 nt, Artificial Sequence
  Description of Artificial Sequence: Synthetic oligonucleotide
  Sense strand starting at position 804 of SEQ ID NO: 3434
ccguguagaaucgaaucuu

SEQ ID NO: 267129 - RNA, 19 nt, Artificial Sequence
  Description of Artificial Sequence: Synthetic oligonucleotide
  Antisense strand to SEQ ID NO: 267128
aagauucgauucuacacgg

SEQ ID NO: 267130 - RNA, 19 nt, Artificial Sequence
  Description of Artificial Sequence: Synthetic oligonucleotide
  Sense strand starting at position 810 of SEQ ID NO: 3434
agaaucgaaucuuccuaua

SEQ ID NO: 267131 - RNA, 19 nt, Artificial Sequence
  Description of Artificial Sequence: Synthetic oligonucleotide
  Antisense strand to SEQ ID NO: 267130
uauaggaagauucgauucu

SEQ ID NO: 267132 - RNA, 19 nt, Artificial Sequence
  Description of Artificial Sequence: Synthetic oligonucleotide
  Sense strand starting at position 815 of SEQ ID NO: 3434
cgaaucuuccuauaugcau

SEQ ID NO: 267133 - RNA, 19 nt, Artificial Sequence
  Description of Artificial Sequence: Synthetic oligonucleotide
  Antisense strand to SEQ ID NO: 267132
augcauauaggaagauucg

SEQ ID NO: 267134 - RNA, 19 nt, Artificial Sequence
  Description of Artificial Sequence: Synthetic oligonucleotide
  Sense strand starting at position 1969 of SEQ ID NO: 3434
caugguugucuccaaugau

SEQ ID NO: 267135 - RNA, 19 nt, Artificial Sequence
  Description of Artificial Sequence: Synthetic oligonucleotide
  Antisense strand to SEQ ID NO: 267134
aucauuggagacaaccaug

SEQ ID NO: 267136 - RNA, 19 nt, Artificial Sequence
  Description of Artificial Sequence: Synthetic oligonucleotide
  Sense strand starting at position 1972 of SEQ ID NO: 3434
gguugucuccaaugauuag

SEQ ID NO: 267137 - RNA, 19 nt, Artificial Sequence
  Description of Artificial Sequence: Synthetic oligonucleotide
  Antisense strand to SEQ ID NO: 267136
cuaaucauuggagacaacc

SEQ ID NO: 267138 - RNA, 19 nt, Artificial Sequence
  Description of Artificial Sequence: Synthetic oligonucleotide
  Sense strand starting at position 1973 of SEQ ID NO: 3434
guugucuccaaugauuagu

SEQ ID NO: 267139 - RNA, 19 nt, Artificial Sequence
  Description of Artificial Sequence: Synthetic oligonucleotide
  Antisense strand to SEQ ID NO: 267138
acuaaucauuggagacaac

SEQ ID NO: 267140 - RNA, 19 nt, Artificial Sequence
  Description of Artificial Sequence: Synthetic oligonucleotide
  Sense strand starting at position 2071 of SEQ ID NO: 3434
gaaguuuccguacacacua

SEQ ID NO: 267141 - RNA, 19 nt, Artificial Sequence
  Description of Artificial Sequence: Synthetic oligonucleotide
  Antisense strand to SEQ ID NO: 267140
uaguguguacggaaacuuc

SEQ ID NO: 267142 - RNA, 19 nt, Artificial Sequence
  Description of Artificial Sequence: Synthetic oligonucleotide
  Sense strand starting at position 2131 of SEQ ID NO: 3434
uuuauaagguauguuggaa

SEQ ID NO: 267143 - RNA, 19 nt, Artificial Sequence
  Description of Artificial Sequence: Synthetic oligonucleotide
  Antisense strand to SEQ ID NO: 267142
uuccaacauaccuuauaaa

SEQ ID NO: 267144 - RNA, 19 nt, Artificial Sequence
  Description of Artificial Sequence: Synthetic oligonucleotide
  Sense strand starting at position 2213 of SEQ ID NO: 3434
guaauuucuuagucauugu

SEQ ID NO: 267145 - RNA, 19 nt, Artificial Sequence
  Description of Artificial Sequence: Synthetic oligonucleotide
  Antisense strand to SEQ ID NO: 267144
acaaugacuaagaaauuac

SEQ ID NO: 267146 - RNA, 19 nt, Artificial Sequence
  Description of Artificial Sequence: Synthetic oligonucleotide
  Sense strand starting at position 2228 of SEQ ID NO: 3434
uuguaacacuaguugacaa

SEQ ID NO: 267147 - RNA, 19 nt, Artificial Sequence
  Description of Artificial Sequence: Synthetic oligonucleotide
  Antisense strand to SEQ ID NO: 267146
uugucaacuaguguuacaa

SEQ ID NO: 267148 - RNA, 19 nt, Artificial Sequence
  Description of Artificial Sequence: Synthetic oligonucleotide
  Sense strand starting at position 2239 of SEQ ID NO: 3434
guugacaaauguuuacagu

SEQ ID NO: 267149 - RNA, 19 nt, Artificial Sequence
  Description of Artificial Sequence: Synthetic oligonucleotide
  Antisense strand to SEQ ID NO: 267148
acuguaaacauuugucaac

SEQ ID NO: 267150 - RNA, 19 nt, Artificial Sequence
  Description of Artificial Sequence: Synthetic oligonucleotide
  Sense strand starting at position 2301 of SEQ ID NO: 3434
gggccaugaaguugggaaa

SEQ ID NO: 267151 - RNA, 19 nt, Artificial Sequence
  Description of Artificial Sequence: Synthetic oligonucleotide
  Antisense strand to SEQ ID NO: 267150
uuucccaacuucauggccc

SEQ ID NO: 267152 - RNA, 19 nt, Artificial Sequence
  Description of Artificial Sequence: Synthetic oligonucleotide
  Sense strand starting at position 2322 of SEQ ID NO: 3434
ugugguguuccuguugguu

SEQ ID NO: 267153 - RNA, 19 nt, Artificial Sequence
  Description of Artificial Sequence: Synthetic oligonucleotide
  Antisense strand to SEQ ID NO: 267152
aaccaacaggaacaccaca

SEQ ID NO: 267154 - RNA, 19 nt, Artificial Sequence
  Description of Artificial Sequence: Synthetic oligonucleotide
  Sense strand starting at position 2345 of SEQ ID NO: 3434
ugacccaugucccuugaaa

SEQ ID NO: 267155 - RNA, 19 nt, Artificial Sequence
  Description of Artificial Sequence: Synthetic oligonucleotide
  Antisense strand to SEQ ID NO: 267154
uuucaagggacauggguca

SEQ ID NO: 267156 - RNA, 19 nt, Artificial Sequence
  Description of Artificial Sequence: Synthetic oligonucleotide
  Sense strand starting at position 2347 of SEQ ID NO: 3434
acccaugucccuugaaagu

SEQ ID NO: 267157 - RNA, 19 nt, Artificial Sequence
  Description of Artificial Sequence: Synthetic oligonucleotide
  Antisense strand to SEQ ID NO: 267156
acuuucaagggacaugggu

SEQ ID NO: 267158 - RNA, 19 nt, Artificial Sequence
  Description of Artificial Sequence: Synthetic oligonucleotide
  Sense strand starting at position 2663 of SEQ ID NO: 3434
guugaugggaaccaguuua

SEQ ID NO: 267159 - RNA, 19 nt, Artificial Sequence
  Description of Artificial Sequence: Synthetic oligonucleotide
  Antisense strand to SEQ ID NO: 267158
uaaacugguucccaucaac

SEQ ID NO: 267160 - RNA, 19 nt, Artificial Sequence
  Description of Artificial Sequence: Synthetic oligonucleotide
  Sense strand starting at position 2674 of SEQ ID NO: 3434
ccaguuuaaaguggugaca

SEQ ID NO: 267161 - RNA, 19 nt, Artificial Sequence
  Description of Artificial Sequence: Synthetic oligonucleotide
  Antisense strand to SEQ ID NO: 267160
ugucaccacuuuaaacugg

SEQ ID NO: 267162 - RNA, 19 nt, Artificial Sequence
  Description of Artificial Sequence: Synthetic oligonucleotide
  Sense strand starting at position 2886 of SEQ ID NO: 3434
ugagcucuggcccaaguga

SEQ ID NO: 267163 - RNA, 19 nt, Artificial Sequence
  Description of Artificial Sequence: Synthetic oligonucleotide
  Antisense strand to SEQ ID NO: 267162
ucacuugggccagagcuca

SEQ ID NO: 267164 - RNA, 19 nt, Artificial Sequence
  Description of Artificial Sequence: Synthetic oligonucleotide
  Sense strand starting at position 3055 of SEQ ID NO: 3434
auaugaacucucgagguua

SEQ ID NO: 267165 - RNA, 19 nt, Artificial Sequence
  Description of Artificial Sequence: Synthetic oligonucleotide
  Antisense strand to SEQ ID NO: 267164
uaaccucgagaguucauau

SEQ ID NO: 267166 - RNA, 19 nt, Artificial Sequence
  Description of Artificial Sequence: Synthetic oligonucleotide
  Sense strand starting at position 3057 of SEQ ID NO: 3434
augaacucucgagguuauu

SEQ ID NO: 267167 - RNA, 19 nt, Artificial Sequence
  Description of Artificial Sequence: Synthetic oligonucleotide
  Antisense strand to SEQ ID NO: 267166
aauaaccucgagaguucau

SEQ ID NO: 267168 - RNA, 19 nt, Artificial Sequence
  Description of Artificial Sequence: Synthetic oligonucleotide
  Sense strand starting at position 3281 of SEQ ID NO: 3434
ucugguauucugcaaagug

SEQ ID NO: 267169 - RNA, 19 nt, Artificial Sequence
  Description of Artificial Sequence: Synthetic oligonucleotide
  Antisense strand to SEQ ID NO: 267168
cacuuugcagaauaccaga

SEQ ID NO: 267170 - RNA, 19 nt, Artificial Sequence
  Description of Artificial Sequence: Synthetic oligonucleotide
  Sense strand starting at position 3297 of SEQ ID NO: 3434
guguuagagaucugaagau

SEQ ID NO: 267171 - RNA, 19 nt, Artificial Sequence
  Description of Artificial Sequence: Synthetic oligonucleotide
  Antisense strand to SEQ ID NO: 267170
aucuucagaucucuaacac

SEQ ID NO: 267172 - RNA, 19 nt, Artificial Sequence
  Description of Artificial Sequence: Synthetic oligonucleotide
  Sense strand starting at position 3367 of SEQ ID NO: 3434
cuaagaacuccuggacauu

SEQ ID NO: 267173 - RNA, 19 nt, Artificial Sequence
  Description of Artificial Sequence: Synthetic oligonucleotide
  Antisense strand to SEQ ID NO: 267172
aauguccaggaguucuuag

SEQ ID NO: 267174 - RNA, 19 nt, Artificial Sequence
  Description of Artificial Sequence: Synthetic oligonucleotide
  Sense strand starting at position 3833 of SEQ ID NO: 3434
ggaguuucugaugggaccu

SEQ ID NO: 267175 - RNA, 19 nt, Artificial Sequence
  Description of Artificial Sequence: Synthetic oligonucleotide
  Antisense strand to SEQ ID NO: 267174
aggucccaucagaaacucc

SEQ ID NO: 267176 - RNA, 19 nt, Artificial Sequence
  Description of Artificial Sequence: Synthetic oligonucleotide
  Sense strand starting at position 3846 of SEQ ID NO: 3434
ggaccuuucgaggaaugcu

SEQ ID NO: 267177 - RNA, 19 nt, Artificial Sequence
  Description of Artificial Sequence: Synthetic oligonucleotide
  Antisense strand to SEQ ID NO: 267176
agcauuccucgaaaggucc

SEQ ID NO: 267178 - RNA, 19 nt, Artificial Sequence
  Description of Artificial Sequence: Synthetic oligonucleotide
  Sense strand starting at position 3854 of SEQ ID NO: 3434
cgaggaaugcucuaguaaa

SEQ ID NO: 267179 - RNA, 19 nt, Artificial Sequence
  Description of Artificial Sequence: Synthetic oligonucleotide
  Antisense strand to SEQ ID NO: 267178
uuuacuagagcauuccucg

SEQ ID NO: 267180 - RNA, 19 nt, Artificial Sequence
  Description of Artificial Sequence: Synthetic oligonucleotide
  Sense strand starting at position 86 of SEQ ID NO: 3435
accuuugaacuuugaagac

SEQ ID NO: 267181 - RNA, 19 nt, Artificial Sequence
  Description of Artificial Sequence: Synthetic oligonucleotide
  Antisense strand to SEQ ID NO: 267180
gucuucaaaguucaaaggu

SEQ ID NO: 267182 - RNA, 19 nt, Artificial Sequence
  Description of Artificial Sequence: Synthetic oligonucleotide
  Sense strand starting at position 257 of SEQ ID NO: 3435
uauagugcagucgaaagaa

SEQ ID NO: 267183 - RNA, 19 nt, Artificial Sequence
  Description of Artificial Sequence: Synthetic oligonucleotide
  Antisense strand to SEQ ID NO: 267182
uucuuucgacugcacuaua

SEQ ID NO: 267184 - RNA, 19 nt, Artificial Sequence
  Description of Artificial Sequence: Synthetic oligonucleotide
  Sense strand starting at position 360 of SEQ ID NO: 3435
gggaauguauggcucaaga

SEQ ID NO: 267185 - RNA, 19 nt, Artificial Sequence
  Description of Artificial Sequence: Synthetic oligonucleotide
  Antisense strand to SEQ ID NO: 267184
ucuugagccauacauuccc

SEQ ID NO: 267186 - RNA, 19 nt, Artificial Sequence
  Description of Artificial Sequence: Synthetic oligonucleotide
  Sense strand starting at position 362 of SEQ ID NO: 3435
gaauguauggcucaagagc

SEQ ID NO: 267187 - RNA, 19 nt, Artificial Sequence
  Description of Artificial Sequence: Synthetic oligonucleotide
  Antisense strand to SEQ ID NO: 267186
gcucuugagccauacauuc

SEQ ID NO: 267188 - RNA, 19 nt, Artificial Sequence
  Description of Artificial Sequence: Synthetic oligonucleotide
  Sense strand starting at position 373 of SEQ ID NO: 3435
ucaagagcaguuuauguuu

SEQ ID NO: 267189 - RNA, 19 nt, Artificial Sequence
  Description of Artificial Sequence: Synthetic oligonucleotide
  Antisense strand to SEQ ID NO: 267188
aaacauaaacugcucuuga

SEQ ID NO: 267190 - RNA, 19 nt, Artificial Sequence
  Description of Artificial Sequence: Synthetic oligonucleotide
  Sense strand starting at position 540 of SEQ ID NO: 3435
gguaaaggcacugagcaua

SEQ ID NO: 267191 - RNA, 19 nt, Artificial Sequence
  Description of Artificial Sequence: Synthetic oligonucleotide
  Antisense strand to SEQ ID NO: 267190
uaugcucagugccuuuacc

SEQ ID NO: 267192 - RNA, 19 nt, Artificial Sequence
  Description of Artificial Sequence: Synthetic oligonucleotide
  Sense strand starting at position 582 of SEQ ID NO: 3435
uaggaaguauauguuaacu

SEQ ID NO: 267193 - RNA, 19 nt, Artificial Sequence
  Description of Artificial Sequence: Synthetic oligonucleotide
  Antisense strand to SEQ ID NO: 267192
aguuaacauauacuuccua

SEQ ID NO: 267194 - RNA, 19 nt, Artificial Sequence
  Description of Artificial Sequence: Synthetic oligonucleotide
  Sense strand starting at position 685 of SEQ ID NO: 3435
cgguuagaaaguuacaugu

SEQ ID NO: 267195 - RNA, 19 nt, Artificial Sequence
  Description of Artificial Sequence: Synthetic oligonucleotide
  Antisense strand to SEQ ID NO: 267194
acauguaacuuucuaaccg

SEQ ID NO: 267196 - RNA, 19 nt, Artificial Sequence
  Description of Artificial Sequence: Synthetic oligonucleotide
  Sense strand starting at position 694 of SEQ ID NO: 3435
aguuacaugugaucacacu

SEQ ID NO: 267197 - RNA, 19 nt, Artificial Sequence
  Description of Artificial Sequence: Synthetic oligonucleotide
  Antisense strand to SEQ ID NO: 267196
agugugaucacauguaacu

SEQ ID NO: 267198 - RNA, 19 nt, Artificial Sequence
  Description of Artificial Sequence: Synthetic oligonucleotide
  Sense strand starting at position 695 of SEQ ID NO: 3435
guuacaugugaucacacuu

SEQ ID NO: 267199 - RNA, 19 nt, Artificial Sequence
  Description of Artificial Sequence: Synthetic oligonucleotide
  Antisense strand to SEQ ID NO: 267198
aagugugaucacauguaac

SEQ ID NO: 267200 - RNA, 19 nt, Artificial Sequence
  Description of Artificial Sequence: Synthetic oligonucleotide
  Sense strand starting at position 712 of SEQ ID NO: 3435
uuaagcuuagccuaaagaa

SEQ ID NO: 267201 - RNA, 19 nt, Artificial Sequence
  Description of Artificial Sequence: Synthetic oligonucleotide
  Antisense strand to SEQ ID NO: 267200
uucuuuaggcuaagcuuaa

SEQ ID NO: 267202 - RNA, 19 nt, Artificial Sequence
  Description of Artificial Sequence: Synthetic oligonucleotide
  Sense strand starting at position 797 of SEQ ID NO: 3435
agagguucuuugcuaauaa

SEQ ID NO: 267203 - RNA, 19 nt, Artificial Sequence
  Description of Artificial Sequence: Synthetic oligonucleotide
  Antisense strand to SEQ ID NO: 267202
uuauuagcaaagaaccucu

SEQ ID NO: 267204 - RNA, 19 nt, Artificial Sequence
  Description of Artificial Sequence: Synthetic oligonucleotide
  Sense strand starting at position 992 of SEQ ID NO: 3435
gggucauugaaguaguuaa

SEQ ID NO: 267205 - RNA, 19 nt, Artificial Sequence
  Description of Artificial Sequence: Synthetic oligonucleotide
  Antisense strand to SEQ ID NO: 267204
uuaacuacuucaaugaccc

SEQ ID NO: 267206 - RNA, 19 nt, Artificial Sequence
  Description of Artificial Sequence: Synthetic oligonucleotide
  Sense strand starting at position 1098 of SEQ ID NO: 3435
uugugauuacauuguagga

SEQ ID NO: 267207 - RNA, 19 nt, Artificial Sequence
  Description of Artificial Sequence: Synthetic oligonucleotide
  Antisense strand to SEQ ID NO: 267206
uccuacaauguaaucacaa

SEQ ID NO: 267208 - RNA, 19 nt, Artificial Sequence
  Description of Artificial Sequence: Synthetic oligonucleotide
  Sense strand starting at position 1262 of SEQ ID NO: 3435
cccugcauccuaugaagau

SEQ ID NO: 267209 - RNA, 19 nt, Artificial Sequence
  Description of Artificial Sequence: Synthetic oligonucleotide
  Antisense strand to SEQ ID NO: 267208
aucuucauaggaugcaggg

SEQ ID NO: 267210 - RNA, 19 nt, Artificial Sequence
  Description of Artificial Sequence: Synthetic oligonucleotide
  Sense strand starting at position 1318 of SEQ ID NO: 3435
cccuguucccuagaagcua

SEQ ID NO: 267211 - RNA, 19 nt, Artificial Sequence
  Description of Artificial Sequence: Synthetic oligonucleotide
  Antisense strand to SEQ ID NO: 267210
uagcuucuagggaacaggg

SEQ ID NO: 267212 - RNA, 19 nt, Artificial Sequence
  Description of Artificial Sequence: Synthetic oligonucleotide
  Sense strand starting at position 1505 of SEQ ID NO: 3435
ucucgaacugcccaucaau

SEQ ID NO: 267213 - RNA, 19 nt, Artificial Sequence
  Description of Artificial Sequence: Synthetic oligonucleotide
  Antisense strand to SEQ ID NO: 267212
auugaugggcaguucgaga

SEQ ID NO: 267214 - RNA, 19 nt, Artificial Sequence
  Description of Artificial Sequence: Synthetic oligonucleotide
  Sense strand starting at position 1589 of SEQ ID NO: 3435
agcagaaauggcuacaagu

SEQ ID NO: 267215 - RNA, 19 nt, Artificial Sequence
  Description of Artificial Sequence: Synthetic oligonucleotide
  Antisense strand to SEQ ID NO: 267214
acuuguagccauuucugcu

SEQ ID NO: 267216 - RNA, 19 nt, Artificial Sequence
  Description of Artificial Sequence: Synthetic oligonucleotide
  Sense strand starting at position 1851 of SEQ ID NO: 3435
gggaucaaggucugucuca

SEQ ID NO: 267217 - RNA, 19 nt, Artificial Sequence
  Description of Artificial Sequence: Synthetic oligonucleotide
  Antisense strand to SEQ ID NO: 267216
ugagacagaccuugauccc

SEQ ID NO: 267218 - RNA, 19 nt, Artificial Sequence
  Description of Artificial Sequence: Synthetic oligonucleotide
  Sense strand starting at position 1866 of SEQ ID NO: 3435
cucagacauccucagaguu

SEQ ID NO: 267219 - RNA, 19 nt, Artificial Sequence
  Description of Artificial Sequence: Synthetic oligonucleotide
  Antisense strand to SEQ ID NO: 267218
aacucugaggaugucugag

SEQ ID NO: 267220 - RNA, 19 nt, Artificial Sequence
  Description of Artificial Sequence: Synthetic oligonucleotide
  Sense strand starting at position 1876 of SEQ ID NO: 3435
cucagaguuuaggccagau

SEQ ID NO: 267221 - RNA, 19 nt, Artificial Sequence
  Description of Artificial Sequence: Synthetic oligonucleotide
  Antisense strand to SEQ ID NO: 267220
aucuggccuaaacucugag

SEQ ID NO: 267222 - RNA, 19 nt, Artificial Sequence
  Description of Artificial Sequence: Synthetic oligonucleotide
  Sense strand starting at position 2234 of SEQ ID NO: 3435
aucuuucuggaguaggcau

SEQ ID NO: 267223 - RNA, 19 nt, Artificial Sequence
  Description of Artificial Sequence: Synthetic oligonucleotide
  Antisense strand to SEQ ID NO: 267222
augccuacuccagaaagau

SEQ ID NO: 267224 - RNA, 19 nt, Artificial Sequence
  Description of Artificial Sequence: Synthetic oligonucleotide
  Sense strand starting at position 2251 of SEQ ID NO: 3435
auuguagagagccauguuu

SEQ ID NO: 267225 - RNA, 19 nt, Artificial Sequence
  Description of Artificial Sequence: Synthetic oligonucleotide
  Antisense strand to SEQ ID NO: 267224
aaacauggcucucuacaau

SEQ ID NO: 267226 - RNA, 19 nt, Artificial Sequence
  Description of Artificial Sequence: Synthetic oligonucleotide
  Sense strand starting at position 2509 of SEQ ID NO: 3435
uggagucuucuguauaaua

SEQ ID NO: 267227 - RNA, 19 nt, Artificial Sequence
  Description of Artificial Sequence: Synthetic oligonucleotide
  Antisense strand to SEQ ID NO: 267226
uauuauacagaagacucca

SEQ ID NO: 267228 - RNA, 19 nt, Artificial Sequence
  Description of Artificial Sequence: Synthetic oligonucleotide
  Sense strand starting at position 2568 of SEQ ID NO: 3435
uuuagaucauggcuggaaa

SEQ ID NO: 267229 - RNA, 19 nt, Artificial Sequence
  Description of Artificial Sequence: Synthetic oligonucleotide
  Antisense strand to SEQ ID NO: 267228
uuuccagccaugaucuaaa

SEQ ID NO: 267230 - RNA, 19 nt, Artificial Sequence
  Description of Artificial Sequence: Synthetic oligonucleotide
  Sense strand starting at position 2569 of SEQ ID NO: 3435
uuagaucauggcuggaaau

SEQ ID NO: 267231 - RNA, 19 nt, Artificial Sequence
  Description of Artificial Sequence: Synthetic oligonucleotide
  Antisense strand to SEQ ID NO: 267230
auuuccagccaugaucuaa

SEQ ID NO: 267232 - RNA, 19 nt, Artificial Sequence
  Description of Artificial Sequence: Synthetic oligonucleotide
  Sense strand starting at position 2570 of SEQ ID NO: 3435
uagaucauggcuggaaauu

SEQ ID NO: 267233 - RNA, 19 nt, Artificial Sequence
  Description of Artificial Sequence: Synthetic oligonucleotide
  Antisense strand to SEQ ID NO: 267232
aauuuccagccaugaucua

SEQ ID NO: 267234 - RNA, 19 nt, Artificial Sequence
  Description of Artificial Sequence: Synthetic oligonucleotide
  Sense strand starting at position 2593 of SEQ ID NO: 3435
ucuuuaaggucuuuccaga

SEQ ID NO: 267235 - RNA, 19 nt, Artificial Sequence
  Description of Artificial Sequence: Synthetic oligonucleotide
  Antisense strand to SEQ ID NO: 267234
ucuggaaagaccuuaaaga

SEQ ID NO: 267236 - RNA, 19 nt, Artificial Sequence
  Description of Artificial Sequence: Synthetic oligonucleotide
  Sense strand starting at position 2770 of SEQ ID NO: 3435
aucuauuaggaauguguua

SEQ ID NO: 267237 - RNA, 19 nt, Artificial Sequence
  Description of Artificial Sequence: Synthetic oligonucleotide
  Antisense strand to SEQ ID NO: 267236
uaacacauuccuaauagau

SEQ ID NO: 267238 - RNA, 19 nt, Artificial Sequence
  Description of Artificial Sequence: Synthetic oligonucleotide
  Sense strand starting at position 2907 of SEQ ID NO: 3435
ucauuucuguaagaauaug

SEQ ID NO: 267239 - RNA, 19 nt, Artificial Sequence
  Description of Artificial Sequence: Synthetic oligonucleotide
  Antisense strand to SEQ ID NO: 267238
cauauucuuacagaaauga

SEQ ID NO: 267240 - RNA, 19 nt, Artificial Sequence
  Description of Artificial Sequence: Synthetic oligonucleotide
  Sense strand starting at position 2954 of SEQ ID NO: 3435
acaugcuuccuugggauua

SEQ ID NO: 267241 - RNA, 19 nt, Artificial Sequence
  Description of Artificial Sequence: Synthetic oligonucleotide
  Antisense strand to SEQ ID NO: 267240
uaaucccaaggaagcaugu

SEQ ID NO: 267242 - RNA, 19 nt, Artificial Sequence
  Description of Artificial Sequence: Synthetic oligonucleotide
  Sense strand starting at position 3034 of SEQ ID NO: 3435
uacauaguauacgugaaac

SEQ ID NO: 267243 - RNA, 19 nt, Artificial Sequence
  Description of Artificial Sequence: Synthetic oligonucleotide
  Antisense strand to SEQ ID NO: 267242
guuucacguauacuaugua

SEQ ID NO: 267244 - RNA, 19 nt, Artificial Sequence
  Description of Artificial Sequence: Synthetic oligonucleotide
  Sense strand starting at position 3036 of SEQ ID NO: 3435
cauaguauacgugaaacaa

SEQ ID NO: 267245 - RNA, 19 nt, Artificial Sequence
  Description of Artificial Sequence: Synthetic oligonucleotide
  Antisense strand to SEQ ID NO: 267244
uuguuucacguauacuaug

SEQ ID NO: 267246 - RNA, 19 nt, Artificial Sequence
  Description of Artificial Sequence: Synthetic oligonucleotide
  Sense strand starting at position 3407 of SEQ ID NO: 3435
uuuagagauuaggugguua

SEQ ID NO: 267247 - RNA, 19 nt, Artificial Sequence
  Description of Artificial Sequence: Synthetic oligonucleotide
  Antisense strand to SEQ ID NO: 267246
uaaccaccuaaucucuaaa

SEQ ID NO: 267248 - RNA, 19 nt, Artificial Sequence
  Description of Artificial Sequence: Synthetic oligonucleotide
  Sense strand starting at position 3463 of SEQ ID NO: 3435
guuaauacuuuaccuaagu

SEQ ID NO: 267249 - RNA, 19 nt, Artificial Sequence
  Description of Artificial Sequence: Synthetic oligonucleotide
  Antisense strand to SEQ ID NO: 267248
acuuagguaaaguauuaac

SEQ ID NO: 267250 - RNA, 19 nt, Artificial Sequence
  Description of Artificial Sequence: Synthetic oligonucleotide
  Sense strand starting at position 3718 of SEQ ID NO: 3435
agacuaacccaaggucuuu

SEQ ID NO: 267251 - RNA, 19 nt, Artificial Sequence
  Description of Artificial Sequence: Synthetic oligonucleotide
  Antisense strand to SEQ ID NO: 267250
aaagaccuuggguuagucu

SEQ ID NO: 267252 - RNA, 19 nt, Artificial Sequence
  Description of Artificial Sequence: Synthetic oligonucleotide
  Sense strand starting at position 3795 of SEQ ID NO: 3435
gucuuuacugaaugaaagg

SEQ ID NO: 267253 - RNA, 19 nt, Artificial Sequence
  Description of Artificial Sequence: Synthetic oligonucleotide
  Antisense strand to SEQ ID NO: 267252
ccuuucauucaguaaagac

SEQ ID NO: 267254 - RNA, 19 nt, Artificial Sequence
  Description of Artificial Sequence: Synthetic oligonucleotide
  Sense strand starting at position 3876 of SEQ ID NO: 3435
uacuuauggucauuguaga

SEQ ID NO: 267255 - RNA, 19 nt, Artificial Sequence
  Description of Artificial Sequence: Synthetic oligonucleotide
  Antisense strand to SEQ ID NO: 267254
ucuacaaugaccauaagua

SEQ ID NO: 267256 - RNA, 19 nt, Artificial Sequence
  Description of Artificial Sequence: Synthetic oligonucleotide
  Sense strand starting at position 3877 of SEQ ID NO: 3435
acuuauggucauuguagau

SEQ ID NO: 267257 - RNA, 19 nt, Artificial Sequence
  Description of Artificial Sequence: Synthetic oligonucleotide
  Antisense strand to SEQ ID NO: 267256
aucuacaaugaccauaagu

SEQ ID NO: 267258 - RNA, 19 nt, Artificial Sequence
  Description of Artificial Sequence: Synthetic oligonucleotide
  Sense strand starting at position 3883 of SEQ ID NO: 3435
ggucauuguagauacacga

SEQ ID NO: 267259 - RNA, 19 nt, Artificial Sequence
  Description of Artificial Sequence: Synthetic oligonucleotide
  Antisense strand to SEQ ID NO: 267258
ucguguaucuacaaugacc

SEQ ID NO: 267260 - RNA, 19 nt, Artificial Sequence
  Description of Artificial Sequence: Synthetic oligonucleotide
  Sense strand starting at position 128 of SEQ ID NO: 3436
aacaguagcgugcggaaau

SEQ ID NO: 267261 - RNA, 19 nt, Artificial Sequence
  Description of Artificial Sequence: Synthetic oligonucleotide
  Antisense strand to SEQ ID NO: 267260
auuuccgcacgcuacuguu

SEQ ID NO: 267262 - RNA, 19 nt, Artificial Sequence
  Description of Artificial Sequence: Synthetic oligonucleotide
  Sense strand starting at position 129 of SEQ ID NO: 3436
acaguagcgugcggaaaua

SEQ ID NO: 267263 - RNA, 19 nt, Artificial Sequence
  Description of Artificial Sequence: Synthetic oligonucleotide
  Antisense strand to SEQ ID NO: 267262
uauuuccgcacgcuacugu

SEQ ID NO: 267264 - RNA, 19 nt, Artificial Sequence
  Description of Artificial Sequence: Synthetic oligonucleotide
  Sense strand starting at position 175 of SEQ ID NO: 3436
guaguugugccacaucuca

SEQ ID NO: 267265 - RNA, 19 nt, Artificial Sequence
  Description of Artificial Sequence: Synthetic oligonucleotide
  Antisense strand to SEQ ID NO: 267264
ugagauguggcacaacuac

SEQ ID NO: 267266 - RNA, 19 nt, Artificial Sequence
  Description of Artificial Sequence: Synthetic oligonucleotide
  Sense strand starting at position 334 of SEQ ID NO: 3436
cacgaagaucagcagguau

SEQ ID NO: 267267 - RNA, 19 nt, Artificial Sequence
  Description of Artificial Sequence: Synthetic oligonucleotide
  Antisense strand to SEQ ID NO: 267266
auaccugcugaucuucgug

SEQ ID NO: 267268 - RNA, 19 nt, Artificial Sequence
  Description of Artificial Sequence: Synthetic oligonucleotide
  Sense strand starting at position 336 of SEQ ID NO: 3436
cgaagaucagcagguaugu

SEQ ID NO: 267269 - RNA, 19 nt, Artificial Sequence
  Description of Artificial Sequence: Synthetic oligonucleotide
  Antisense strand to SEQ ID NO: 267268
acauaccugcugaucuucg

SEQ ID NO: 267270 - RNA, 19 nt, Artificial Sequence
  Description of Artificial Sequence: Synthetic oligonucleotide
  Sense strand starting at position 345 of SEQ ID NO: 3436
gcagguauguggcacagau

SEQ ID NO: 267271 - RNA, 19 nt, Artificial Sequence
  Description of Artificial Sequence: Synthetic oligonucleotide
  Antisense strand to SEQ ID NO: 267270
aucugugccacauaccugc

SEQ ID NO: 267272 - RNA, 19 nt, Artificial Sequence
  Description of Artificial Sequence: Synthetic oligonucleotide
  Sense strand starting at position 429 of SEQ ID NO: 3436
ucaaguccucagggucaaa

SEQ ID NO: 267273 - RNA, 19 nt, Artificial Sequence
  Description of Artificial Sequence: Synthetic oligonucleotide
  Antisense strand to SEQ ID NO: 267272
uuugacccugaggacuuga

SEQ ID NO: 267274 - RNA, 19 nt, Artificial Sequence
  Description of Artificial Sequence: Synthetic oligonucleotide
  Sense strand starting at position 536 of SEQ ID NO: 3436
cagagaggagucuguggaa

SEQ ID NO: 267275 - RNA, 19 nt, Artificial Sequence
  Description of Artificial Sequence: Synthetic oligonucleotide
  Antisense strand to SEQ ID NO: 267274
uuccacagacuccucucug

SEQ ID NO: 267276 - RNA, 19 nt, Artificial Sequence
  Description of Artificial Sequence: Synthetic oligonucleotide
  Sense strand starting at position 625 of SEQ ID NO: 3436
ugacauuagcgcuaugaug

SEQ ID NO: 267277 - RNA, 19 nt, Artificial Sequence
  Description of Artificial Sequence: Synthetic oligonucleotide
  Antisense strand to SEQ ID NO: 267276
caucauagcgcuaauguca

SEQ ID NO: 267278 - RNA, 19 nt, Artificial Sequence
  Description of Artificial Sequence: Synthetic oligonucleotide
  Sense strand starting at position 627 of SEQ ID NO: 3436
acauuagcgcuaugaugac

SEQ ID NO: 267279 - RNA, 19 nt, Artificial Sequence
  Description of Artificial Sequence: Synthetic oligonucleotide
  Antisense strand to SEQ ID NO: 267278
gucaucauagcgcuaaugu

SEQ ID NO: 267280 - RNA, 19 nt, Artificial Sequence
  Description of Artificial Sequence: Synthetic oligonucleotide
  Sense strand starting at position 633 of SEQ ID NO: 3436
gcgcuaugaugaccauuau

SEQ ID NO: 267281 - RNA, 19 nt, Artificial Sequence
  Description of Artificial Sequence: Synthetic oligonucleotide
  Antisense strand to SEQ ID NO: 267280
auaauggucaucauagcgc

SEQ ID NO: 267282 - RNA, 19 nt, Artificial Sequence
  Description of Artificial Sequence: Synthetic oligonucleotide
  Sense strand starting at position 634 of SEQ ID NO: 3436
cgcuaugaugaccauuauu

SEQ ID NO: 267283 - RNA, 19 nt, Artificial Sequence
  Description of Artificial Sequence: Synthetic oligonucleotide
  Antisense strand to SEQ ID NO: 267282
aauaauggucaucauagcg

SEQ ID NO: 267284 - RNA, 19 nt, Artificial Sequence
  Description of Artificial Sequence: Synthetic oligonucleotide
  Sense strand starting at position 1079 of SEQ ID NO: 3436
auuggaaccuuugaguaaa

SEQ ID NO: 267285 - RNA, 19 nt, Artificial Sequence
  Description of Artificial Sequence: Synthetic oligonucleotide
  Antisense strand to SEQ ID NO: 267284
uuuacucaaagguuccaau

SEQ ID NO: 267286 - RNA, 19 nt, Artificial Sequence
  Description of Artificial Sequence: Synthetic oligonucleotide
  Sense strand starting at position 1089 of SEQ ID NO: 3436
uugaguaaaugacagaucu

SEQ ID NO: 267287 - RNA, 19 nt, Artificial Sequence
  Description of Artificial Sequence: Synthetic oligonucleotide
  Antisense strand to SEQ ID NO: 267286
agaucugucauuuacucaa

SEQ ID NO: 267288 - RNA, 19 nt, Artificial Sequence
  Description of Artificial Sequence: Synthetic oligonucleotide
  Sense strand starting at position 1125 of SEQ ID NO: 3436
aagcaaugaugcuagauga

SEQ ID NO: 267289 - RNA, 19 nt, Artificial Sequence
  Description of Artificial Sequence: Synthetic oligonucleotide
  Antisense strand to SEQ ID NO: 267288
ucaucuagcaucauugcuu

SEQ ID NO: 267290 - RNA, 19 nt, Artificial Sequence
  Description of Artificial Sequence: Synthetic oligonucleotide
  Sense strand starting at position 1142 of SEQ ID NO: 3436
gaggcacucguuugggcau

SEQ ID NO: 267291 - RNA, 19 nt, Artificial Sequence
  Description of Artificial Sequence: Synthetic oligonucleotide
  Antisense strand to SEQ ID NO: 267290
augcccaaacgagugccuc

SEQ ID NO: 267292 - RNA, 19 nt, Artificial Sequence
  Description of Artificial Sequence: Synthetic oligonucleotide
  Sense strand starting at position 1170 of SEQ ID NO: 3436
gggcacaaugccugguauu

SEQ ID NO: 267293 - RNA, 19 nt, Artificial Sequence
  Description of Artificial Sequence: Synthetic oligonucleotide
  Antisense strand to SEQ ID NO: 267292
aauaccaggcauugugccc

SEQ ID NO: 267294 - RNA, 19 nt, Artificial Sequence
  Description of Artificial Sequence: Synthetic oligonucleotide
  Sense strand starting at position 1171 of SEQ ID NO: 3436
ggcacaaugccugguauug

SEQ ID NO: 267295 - RNA, 19 nt, Artificial Sequence
  Description of Artificial Sequence: Synthetic oligonucleotide
  Antisense strand to SEQ ID NO: 267294
caauaccaggcauugugcc

SEQ ID NO: 267296 - RNA, 19 nt, Artificial Sequence
  Description of Artificial Sequence: Synthetic oligonucleotide
  Sense strand starting at position 1263 of SEQ ID NO: 3436
gugaccuuuagcgagguaa

SEQ ID NO: 267297 - RNA, 19 nt, Artificial Sequence
  Description of Artificial Sequence: Synthetic oligonucleotide
  Antisense strand to SEQ ID NO: 267296
uuaccucgcuaaaggucac

SEQ ID NO: 267298 - RNA, 19 nt, Artificial Sequence
  Description of Artificial Sequence: Synthetic oligonucleotide
  Sense strand starting at position 1288 of SEQ ID NO: 3436
ugaggcuguuucccuauua

SEQ ID NO: 267299 - RNA, 19 nt, Artificial Sequence
  Description of Artificial Sequence: Synthetic oligonucleotide
  Antisense strand to SEQ ID NO: 267298
uaauagggaaacagccuca

SEQ ID NO: 267300 - RNA, 19 nt, Artificial Sequence
  Description of Artificial Sequence: Synthetic oligonucleotide
  Sense strand starting at position 1315 of SEQ ID NO: 3436
cagggaguuuaauccauua

SEQ ID NO: 267301 - RNA, 19 nt, Artificial Sequence
  Description of Artificial Sequence: Synthetic oligonucleotide
  Antisense strand to SEQ ID NO: 267300
uaauggauuaaacucccug

SEQ ID NO: 267302 - RNA, 19 nt, Artificial Sequence
  Description of Artificial Sequence: Synthetic oligonucleotide
  Sense strand starting at position 1402 of SEQ ID NO: 3436
cagucacuaugagagucaa

SEQ ID NO: 267303 - RNA, 19 nt, Artificial Sequence
  Description of Artificial Sequence: Synthetic oligonucleotide
  Antisense strand to SEQ ID NO: 267302
uugacucucauagugacug

SEQ ID NO: 267304 - RNA, 19 nt, Artificial Sequence
  Description of Artificial Sequence: Synthetic oligonucleotide
  Sense strand starting at position 1670 of SEQ ID NO: 3436
cgcccugguccucgaggaa

SEQ ID NO: 267305 - RNA, 19 nt, Artificial Sequence
  Description of Artificial Sequence: Synthetic oligonucleotide
  Antisense strand to SEQ ID NO: 267304
uuccucgaggaccagggcg

SEQ ID NO: 267306 - RNA, 19 nt, Artificial Sequence
  Description of Artificial Sequence: Synthetic oligonucleotide
  Sense strand starting at position 2261 of SEQ ID NO: 3436
gcgugcugaguuuagcuua

SEQ ID NO: 267307 - RNA, 19 nt, Artificial Sequence
  Description of Artificial Sequence: Synthetic oligonucleotide
  Antisense strand to SEQ ID NO: 267306
uaagcuaaacucagcacgc

SEQ ID NO: 267308 - RNA, 19 nt, Artificial Sequence
  Description of Artificial Sequence: Synthetic oligonucleotide
  Sense strand starting at position 3207 of SEQ ID NO: 3436
cacuauugugaaggugaca

SEQ ID NO: 267309 - RNA, 19 nt, Artificial Sequence
  Description of Artificial Sequence: Synthetic oligonucleotide
  Antisense strand to SEQ ID NO: 267308
ugucaccuucacaauagug

SEQ ID NO: 267310 - RNA, 19 nt, Artificial Sequence
  Description of Artificial Sequence: Synthetic oligonucleotide
  Sense strand starting at position 3212 of SEQ ID NO: 3436
uugugaaggugacaugaga

SEQ ID NO: 267311 - RNA, 19 nt, Artificial Sequence
  Description of Artificial Sequence: Synthetic oligonucleotide
  Antisense strand to SEQ ID NO: 267310
ucucaugucaccuucacaa

SEQ ID NO: 267312 - RNA, 19 nt, Artificial Sequence
  Description of Artificial Sequence: Synthetic oligonucleotide
  Sense strand starting at position 3229 of SEQ ID NO: 3436
gacacugagcgucaagauu

SEQ ID NO: 267313 - RNA, 19 nt, Artificial Sequence
  Description of Artificial Sequence: Synthetic oligonucleotide
  Antisense strand to SEQ ID NO: 267312
aaucuugacgcucaguguc

SEQ ID NO: 267314 - RNA, 19 nt, Artificial Sequence
  Description of Artificial Sequence: Synthetic oligonucleotide
  Sense strand starting at position 3269 of SEQ ID NO: 3436
gccaacacucaagaaaugu

SEQ ID NO: 267315 - RNA, 19 nt, Artificial Sequence
  Description of Artificial Sequence: Synthetic oligonucleotide
  Antisense strand to SEQ ID NO: 267314
acauuucuugaguguuggc

SEQ ID NO: 267316 - RNA, 19 nt, Artificial Sequence
  Description of Artificial Sequence: Synthetic oligonucleotide
  Sense strand starting at position 3408 of SEQ ID NO: 3436
gaguuaggcccucaaggag

SEQ ID NO: 267317 - RNA, 19 nt, Artificial Sequence
  Description of Artificial Sequence: Synthetic oligonucleotide
  Antisense strand to SEQ ID NO: 267316
cuccuugagggccuaacuc

SEQ ID NO: 267318 - RNA, 19 nt, Artificial Sequence
  Description of Artificial Sequence: Synthetic oligonucleotide
  Sense strand starting at position 3529 of SEQ ID NO: 3436
gagaaaggauucuguggug

SEQ ID NO: 267319 - RNA, 19 nt, Artificial Sequence
  Description of Artificial Sequence: Synthetic oligonucleotide
  Antisense strand to SEQ ID NO: 267318
caccacagaauccuuucuc

SEQ ID NO: 267320 - RNA, 19 nt, Artificial Sequence
  Description of Artificial Sequence: Synthetic oligonucleotide
  Sense strand starting at position 3541 of SEQ ID NO: 3436
uguggugcccugggaauua

SEQ ID NO: 267321 - RNA, 19 nt, Artificial Sequence
  Description of Artificial Sequence: Synthetic oligonucleotide
  Antisense strand to SEQ ID NO: 267320
uaauucccagggcaccaca

SEQ ID NO: 267322 - RNA, 19 nt, Artificial Sequence
  Description of Artificial Sequence: Synthetic oligonucleotide
  Sense strand starting at position 3576 of SEQ ID NO: 3436
ugagcuaguccaggagaaa

SEQ ID NO: 267323 - RNA, 19 nt, Artificial Sequence
  Description of Artificial Sequence: Synthetic oligonucleotide
  Antisense strand to SEQ ID NO: 267322
uuucuccuggacuagcuca

SEQ ID NO: 267324 - RNA, 19 nt, Artificial Sequence
  Description of Artificial Sequence: Synthetic oligonucleotide
  Sense strand starting at position 3678 of SEQ ID NO: 3436
ggcugcucuuagcaaguga

SEQ ID NO: 267325 - RNA, 19 nt, Artificial Sequence
  Description of Artificial Sequence: Synthetic oligonucleotide
  Antisense strand to SEQ ID NO: 267324
ucacuugcuaagagcagcc

SEQ ID NO: 267326 - RNA, 19 nt, Artificial Sequence
  Description of Artificial Sequence: Synthetic oligonucleotide
  Sense strand starting at position 3840 of SEQ ID NO: 3436
cucugagcaguccgaaagu

SEQ ID NO: 267327 - RNA, 19 nt, Artificial Sequence
  Description of Artificial Sequence: Synthetic oligonucleotide
  Antisense strand to SEQ ID NO: 267326
acuuucggacugcucagag

SEQ ID NO: 267328 - RNA, 19 nt, Artificial Sequence
  Description of Artificial Sequence: Synthetic oligonucleotide
  Sense strand starting at position 3927 of SEQ ID NO: 3436
cagaaugacucuugccagu

SEQ ID NO: 267329 - RNA, 19 nt, Artificial Sequence
  Description of Artificial Sequence: Synthetic oligonucleotide
  Antisense strand to SEQ ID NO: 267328
acuggcaagagucauucug

SEQ ID NO: 267330 - RNA, 19 nt, Artificial Sequence
  Description of Artificial Sequence: Synthetic oligonucleotide
  Sense strand starting at position 3929 of SEQ ID NO: 3436
gaaugacucuugccaguca

SEQ ID NO: 267331 - RNA, 19 nt, Artificial Sequence
  Description of Artificial Sequence: Synthetic oligonucleotide
  Antisense strand to SEQ ID NO: 267330
ugacuggcaagagucauuc

SEQ ID NO: 267332 - RNA, 19 nt, Artificial Sequence
  Description of Artificial Sequence: Synthetic oligonucleotide
  Sense strand starting at position 59 of SEQ ID NO: 3437
acugaagaguucucugauu

SEQ ID NO: 267333 - RNA, 19 nt, Artificial Sequence
  Description of Artificial Sequence: Synthetic oligonucleotide
  Antisense strand to SEQ ID NO: 267332
aaucagagaacucuucagu

SEQ ID NO: 267334 - RNA, 19 nt, Artificial Sequence
  Description of Artificial Sequence: Synthetic oligonucleotide
  Sense strand starting at position 61 of SEQ ID NO: 3437
ugaagaguucucugauucc

SEQ ID NO: 267335 - RNA, 19 nt, Artificial Sequence
  Description of Artificial Sequence: Synthetic oligonucleotide
  Antisense strand to SEQ ID NO: 267334
ggaaucagagaacucuuca

SEQ ID NO: 267336 - RNA, 19 nt, Artificial Sequence
  Description of Artificial Sequence: Synthetic oligonucleotide
  Sense strand starting at position 266 of SEQ ID NO: 3437
gcuagacauuugucgcaca

SEQ ID NO: 267337 - RNA, 19 nt, Artificial Sequence
  Description of Artificial Sequence: Synthetic oligonucleotide
  Antisense strand to SEQ ID NO: 267336
ugugcgacaaaugucuagc

SEQ ID NO: 267338 - RNA, 19 nt, Artificial Sequence
  Description of Artificial Sequence: Synthetic oligonucleotide
  Sense strand starting at position 475 of SEQ ID NO: 3437
uucuguucucagcacugaa

SEQ ID NO: 267339 - RNA, 19 nt, Artificial Sequence
  Description of Artificial Sequence: Synthetic oligonucleotide
  Antisense strand to SEQ ID NO: 267338
uucagugcugagaacagaa

SEQ ID NO: 267340 - RNA, 19 nt, Artificial Sequence
  Description of Artificial Sequence: Synthetic oligonucleotide
  Sense strand starting at position 679 of SEQ ID NO: 3437
gccuuauuugcucacuugu

SEQ ID NO: 267341 - RNA, 19 nt, Artificial Sequence
  Description of Artificial Sequence: Synthetic oligonucleotide
  Antisense strand to SEQ ID NO: 267340
acaagugagcaaauaaggc

SEQ ID NO: 267342 - RNA, 19 nt, Artificial Sequence
  Description of Artificial Sequence: Synthetic oligonucleotide
  Sense strand starting at position 782 of SEQ ID NO: 3437
guaacuucucaauacaugu

SEQ ID NO: 267343 - RNA, 19 nt, Artificial Sequence
  Description of Artificial Sequence: Synthetic oligonucleotide
  Antisense strand to SEQ ID NO: 267342
acauguauugagaaguuac

SEQ ID NO: 267344 - RNA, 19 nt, Artificial Sequence
  Description of Artificial Sequence: Synthetic oligonucleotide
  Sense strand starting at position 996 of SEQ ID NO: 3437
augcuauaaggugacauau

SEQ ID NO: 267345 - RNA, 19 nt, Artificial Sequence
  Description of Artificial Sequence: Synthetic oligonucleotide
  Antisense strand to SEQ ID NO: 267344
auaugucaccuuauagcau

SEQ ID NO: 267346 - RNA, 19 nt, Artificial Sequence
  Description of Artificial Sequence: Synthetic oligonucleotide
  Sense strand starting at position 1101 of SEQ ID NO: 3437
gaggcuggaucaucacgua

SEQ ID NO: 267347 - RNA, 19 nt, Artificial Sequence
  Description of Artificial Sequence: Synthetic oligonucleotide
  Antisense strand to SEQ ID NO: 267346
uacgugaugauccagccuc

SEQ ID NO: 267348 - RNA, 19 nt, Artificial Sequence
  Description of Artificial Sequence: Synthetic oligonucleotide
  Sense strand starting at position 1144 of SEQ ID NO: 3437
agccuaagugugucaugcu

SEQ ID NO: 267349 - RNA, 19 nt, Artificial Sequence
  Description of Artificial Sequence: Synthetic oligonucleotide
  Antisense strand to SEQ ID NO: 267348
agcaugacacacuuaggcu

SEQ ID NO: 267350 - RNA, 19 nt, Artificial Sequence
  Description of Artificial Sequence: Synthetic oligonucleotide
  Sense strand starting at position 1152 of SEQ ID NO: 3437
ugugucaugcuggacaagu

SEQ ID NO: 267351 - RNA, 19 nt, Artificial Sequence
  Description of Artificial Sequence: Synthetic oligonucleotide
  Antisense strand to SEQ ID NO: 267350
acuuguccagcaugacaca

SEQ ID NO: 267352 - RNA, 19 nt, Artificial Sequence
  Description of Artificial Sequence: Synthetic oligonucleotide
  Sense strand starting at position 1187 of SEQ ID NO: 3437
ggaucucagcugcauauua

SEQ ID NO: 267353 - RNA, 19 nt, Artificial Sequence
  Description of Artificial Sequence: Synthetic oligonucleotide
  Antisense strand to SEQ ID NO: 267352
uaauaugcagcugagaucc

SEQ ID NO: 267354 - RNA, 19 nt, Artificial Sequence
  Description of Artificial Sequence: Synthetic oligonucleotide
  Sense strand starting at position 1240 of SEQ ID NO: 3437
acgagaagauuggaagaga

SEQ ID NO: 267355 - RNA, 19 nt, Artificial Sequence
  Description of Artificial Sequence: Synthetic oligonucleotide
  Antisense strand to SEQ ID NO: 267354
ucucuuccaaucuucucgu

SEQ ID NO: 267356 - RNA, 19 nt, Artificial Sequence
  Description of Artificial Sequence: Synthetic oligonucleotide
  Sense strand starting at position 1343 of SEQ ID NO: 3437
accauaaauucugcagaug

SEQ ID NO: 267357 - RNA, 19 nt, Artificial Sequence
  Description of Artificial Sequence: Synthetic oligonucleotide
  Antisense strand to SEQ ID NO: 267356
caucugcagaauuuauggu

SEQ ID NO: 267358 - RNA, 19 nt, Artificial Sequence
  Description of Artificial Sequence: Synthetic oligonucleotide
  Sense strand starting at position 1346 of SEQ ID NO: 3437
auaaauucugcagaugcga

SEQ ID NO: 267359 - RNA, 19 nt, Artificial Sequence
  Description of Artificial Sequence: Synthetic oligonucleotide
  Antisense strand to SEQ ID NO: 267358
ucgcaucugcagaauuuau

SEQ ID NO: 267360 - RNA, 19 nt, Artificial Sequence
  Description of Artificial Sequence: Synthetic oligonucleotide
  Sense strand starting at position 1385 of SEQ ID NO: 3437
acuguuguaucccuaagac

SEQ ID NO: 267361 - RNA, 19 nt, Artificial Sequence
  Description of Artificial Sequence: Synthetic oligonucleotide
  Antisense strand to SEQ ID NO: 267360
gucuuagggauacaacagu

SEQ ID NO: 267362 - RNA, 19 nt, Artificial Sequence
  Description of Artificial Sequence: Synthetic oligonucleotide
  Sense strand starting at position 1394 of SEQ ID NO: 3437
ucccuaagaccuggcaaau

SEQ ID NO: 267363 - RNA, 19 nt, Artificial Sequence
  Description of Artificial Sequence: Synthetic oligonucleotide
  Antisense strand to SEQ ID NO: 267362
auuugccaggucuuaggga

SEQ ID NO: 267364 - RNA, 19 nt, Artificial Sequence
  Description of Artificial Sequence: Synthetic oligonucleotide
  Sense strand starting at position 1453 of SEQ ID NO: 3437
agaugugucaacgaaucug

SEQ ID NO: 267365 - RNA, 19 nt, Artificial Sequence
  Description of Artificial Sequence: Synthetic oligonucleotide
  Antisense strand to SEQ ID NO: 267364
cagauucguugacacaucu

SEQ ID NO: 267366 - RNA, 19 nt, Artificial Sequence
  Description of Artificial Sequence: Synthetic oligonucleotide
  Sense strand starting at position 1531 of SEQ ID NO: 3437
uugcguucucuggaacaga

SEQ ID NO: 267367 - RNA, 19 nt, Artificial Sequence
  Description of Artificial Sequence: Synthetic oligonucleotide
  Antisense strand to SEQ ID NO: 267366
ucuguuccagagaacgcaa

SEQ ID NO: 267368 - RNA, 19 nt, Artificial Sequence
  Description of Artificial Sequence: Synthetic oligonucleotide
  Sense strand starting at position 1574 of SEQ ID NO: 3437
gcucacugacccugauuau

SEQ ID NO: 267369 - RNA, 19 nt, Artificial Sequence
  Description of Artificial Sequence: Synthetic oligonucleotide
  Antisense strand to SEQ ID NO: 267368
auaaucagggucagugagc

SEQ ID NO: 267370 - RNA, 19 nt, Artificial Sequence
  Description of Artificial Sequence: Synthetic oligonucleotide
  Sense strand starting at position 1585 of SEQ ID NO: 3437
cugauuaucccuuggucca

SEQ ID NO: 267371 - RNA, 19 nt, Artificial Sequence
  Description of Artificial Sequence: Synthetic oligonucleotide
  Antisense strand to SEQ ID NO: 267370
uggaccaagggauaaucag

SEQ ID NO: 267372 - RNA, 19 nt, Artificial Sequence
  Description of Artificial Sequence: Synthetic oligonucleotide
  Sense strand starting at position 2563 of SEQ ID NO: 3437
gagugaacccagcgaauga

SEQ ID NO: 267373 - RNA, 19 nt, Artificial Sequence
  Description of Artificial Sequence: Synthetic oligonucleotide
  Antisense strand to SEQ ID NO: 267372
ucauucgcuggguucacuc

SEQ ID NO: 267374 - RNA, 19 nt, Artificial Sequence
  Description of Artificial Sequence: Synthetic oligonucleotide
  Sense strand starting at position 2593 of SEQ ID NO: 3437
gugcgaauuccgaguggaa

SEQ ID NO: 267375 - RNA, 19 nt, Artificial Sequence
  Description of Artificial Sequence: Synthetic oligonucleotide
  Antisense strand to SEQ ID NO: 267374
uuccacucggaauucgcac

SEQ ID NO: 267376 - RNA, 19 nt, Artificial Sequence
  Description of Artificial Sequence: Synthetic oligonucleotide
  Sense strand starting at position 2636 of SEQ ID NO: 3437
guuucugcgauguuacguu

SEQ ID NO: 267377 - RNA, 19 nt, Artificial Sequence
  Description of Artificial Sequence: Synthetic oligonucleotide
  Antisense strand to SEQ ID NO: 267376
aacguaacaucgcagaaac

SEQ ID NO: 267378 - RNA, 19 nt, Artificial Sequence
  Description of Artificial Sequence: Synthetic oligonucleotide
  Sense strand starting at position 2648 of SEQ ID NO: 3437
uuacguuagaaguacugua

SEQ ID NO: 267379 - RNA, 19 nt, Artificial Sequence
  Description of Artificial Sequence: Synthetic oligonucleotide
  Antisense strand to SEQ ID NO: 267378
uacaguacuucuaacguaa

SEQ ID NO: 267380 - RNA, 19 nt, Artificial Sequence
  Description of Artificial Sequence: Synthetic oligonucleotide
  Sense strand starting at position 3023 of SEQ ID NO: 3437
guaucuaaaccuggauauu

SEQ ID NO: 267381 - RNA, 19 nt, Artificial Sequence
  Description of Artificial Sequence: Synthetic oligonucleotide
  Antisense strand to SEQ ID NO: 267380
aauauccagguuuagauac

SEQ ID NO: 267382 - RNA, 19 nt, Artificial Sequence
  Description of Artificial Sequence: Synthetic oligonucleotide
  Sense strand starting at position 3059 of SEQ ID NO: 3437
uccuuaaaguaaucuguuu

SEQ ID NO: 267383 - RNA, 19 nt, Artificial Sequence
  Description of Artificial Sequence: Synthetic oligonucleotide
  Antisense strand to SEQ ID NO: 267382
aaacagauuacuuuaagga

SEQ ID NO: 267384 - RNA, 19 nt, Artificial Sequence
  Description of Artificial Sequence: Synthetic oligonucleotide
  Sense strand starting at position 3266 of SEQ ID NO: 3437
ucagaauuagguugagagu

SEQ ID NO: 267385 - RNA, 19 nt, Artificial Sequence
  Description of Artificial Sequence: Synthetic oligonucleotide
  Antisense strand to SEQ ID NO: 267384
acucucaaccuaauucuga

SEQ ID NO: 267386 - RNA, 19 nt, Artificial Sequence
  Description of Artificial Sequence: Synthetic oligonucleotide
  Sense strand starting at position 3281 of SEQ ID NO: 3437
gaguucuucguggacccua

SEQ ID NO: 267387 - RNA, 19 nt, Artificial Sequence
  Description of Artificial Sequence: Synthetic oligonucleotide
  Antisense strand to SEQ ID NO: 267386
uaggguccacgaagaacuc

SEQ ID NO: 267388 - RNA, 19 nt, Artificial Sequence
  Description of Artificial Sequence: Synthetic oligonucleotide
  Sense strand starting at position 3286 of SEQ ID NO: 3437
cuucguggacccuauauca

SEQ ID NO: 267389 - RNA, 19 nt, Artificial Sequence
  Description of Artificial Sequence: Synthetic oligonucleotide
  Antisense strand to SEQ ID NO: 267388
ugauauaggguccacgaag

SEQ ID NO: 267390 - RNA, 19 nt, Artificial Sequence
  Description of Artificial Sequence: Synthetic oligonucleotide
  Sense strand starting at position 3393 of SEQ ID NO: 3437
uacauuuagccauguacgu

SEQ ID NO: 267391 - RNA, 19 nt, Artificial Sequence
  Description of Artificial Sequence: Synthetic oligonucleotide
  Antisense strand to SEQ ID NO: 267390
acguacauggcuaaaugua

SEQ ID NO: 267392 - RNA, 19 nt, Artificial Sequence
  Description of Artificial Sequence: Synthetic oligonucleotide
  Sense strand starting at position 3399 of SEQ ID NO: 3437
uagccauguacguagggau

SEQ ID NO: 267393 - RNA, 19 nt, Artificial Sequence
  Description of Artificial Sequence: Synthetic oligonucleotide
  Antisense strand to SEQ ID NO: 267392
aucccuacguacauggcua

SEQ ID NO: 267394 - RNA, 19 nt, Artificial Sequence
  Description of Artificial Sequence: Synthetic oligonucleotide
  Sense strand starting at position 3403 of SEQ ID NO: 3437
cauguacguagggauauau

SEQ ID NO: 267395 - RNA, 19 nt, Artificial Sequence
  Description of Artificial Sequence: Synthetic oligonucleotide
  Antisense strand to SEQ ID NO: 267394
auauaucccuacguacaug

SEQ ID NO: 267396 - RNA, 19 nt, Artificial Sequence
  Description of Artificial Sequence: Synthetic oligonucleotide
  Sense strand starting at position 3413 of SEQ ID NO: 3437
gggauauauuccuuaacuc

SEQ ID NO: 267397 - RNA, 19 nt, Artificial Sequence
  Description of Artificial Sequence: Synthetic oligonucleotide
  Antisense strand to SEQ ID NO: 267396
gaguuaaggaauauauccc

SEQ ID NO: 267398 - RNA, 19 nt, Artificial Sequence
  Description of Artificial Sequence: Synthetic oligonucleotide
  Sense strand starting at position 3519 of SEQ ID NO: 3437
ggcauaauagaaugguuag

SEQ ID NO: 267399 - RNA, 19 nt, Artificial Sequence
  Description of Artificial Sequence: Synthetic oligonucleotide
  Antisense strand to SEQ ID NO: 267398
cuaaccauucuauuaugcc

SEQ ID NO: 267400 - RNA, 19 nt, Artificial Sequence
  Description of Artificial Sequence: Synthetic oligonucleotide
  Sense strand starting at position 3520 of SEQ ID NO: 3437
gcauaauagaaugguuaga

SEQ ID NO: 267401 - RNA, 19 nt, Artificial Sequence
  Description of Artificial Sequence: Synthetic oligonucleotide
  Antisense strand to SEQ ID NO: 267400
ucuaaccauucuauuaugc

SEQ ID NO: 267402 - RNA, 19 nt, Artificial Sequence
  Description of Artificial Sequence: Synthetic oligonucleotide
  Sense strand starting at position 3704 of SEQ ID NO: 3437
ccaccauguuaccuaagga

SEQ ID NO: 267403 - RNA, 19 nt, Artificial Sequence
  Description of Artificial Sequence: Synthetic oligonucleotide
  Antisense strand to SEQ ID NO: 267402
uccuuagguaacauggugg

SEQ ID NO: 267404 - RNA, 19 nt, Artificial Sequence
  Description of Artificial Sequence: Synthetic oligonucleotide
  Sense strand starting at position 3730 of SEQ ID NO: 3437
agcggcucaggucagaaau

SEQ ID NO: 267405 - RNA, 19 nt, Artificial Sequence
  Description of Artificial Sequence: Synthetic oligonucleotide
  Antisense strand to SEQ ID NO: 267404
auuucugaccugagccgcu

SEQ ID NO: 267406 - RNA, 19 nt, Artificial Sequence
  Description of Artificial Sequence: Synthetic oligonucleotide
  Sense strand starting at position 3782 of SEQ ID NO: 3437
ugggaucaugccugugacu

SEQ ID NO: 267407 - RNA, 19 nt, Artificial Sequence
  Description of Artificial Sequence: Synthetic oligonucleotide
  Antisense strand to SEQ ID NO: 267406
agucacaggcaugauccca

SEQ ID NO: 267408 - RNA, 19 nt, Artificial Sequence
  Description of Artificial Sequence: Synthetic oligonucleotide
  Sense strand starting at position 3784 of SEQ ID NO: 3437
ggaucaugccugugacuaa

SEQ ID NO: 267409 - RNA, 19 nt, Artificial Sequence
  Description of Artificial Sequence: Synthetic oligonucleotide
  Antisense strand to SEQ ID NO: 267408
uuagucacaggcaugaucc

SEQ ID NO: 267410 - RNA, 19 nt, Artificial Sequence
  Description of Artificial Sequence: Synthetic oligonucleotide
  Sense strand starting at position 3918 of SEQ ID NO: 3437
gaaagaccuuagguaaguu

SEQ ID NO: 267411 - RNA, 19 nt, Artificial Sequence
  Description of Artificial Sequence: Synthetic oligonucleotide
  Antisense strand to SEQ ID NO: 267410
aacuuaccuaaggucuuuc

SEQ ID NO: 267412 - RNA, 19 nt, Artificial Sequence
  Description of Artificial Sequence: Synthetic oligonucleotide
  Sense strand starting at position 18 of SEQ ID NO: 3438
ggucuagaaauccgaccau

SEQ ID NO: 267413 - RNA, 19 nt, Artificial Sequence
  Description of Artificial Sequence: Synthetic oligonucleotide
  Antisense strand to SEQ ID NO: 267412
auggucggauuucuagacc

SEQ ID NO: 267414 - RNA, 19 nt, Artificial Sequence
  Description of Artificial Sequence: Synthetic oligonucleotide
  Sense strand starting at position 114 of SEQ ID NO: 3438
gacaguauacuacggcaau

SEQ ID NO: 267415 - RNA, 19 nt, Artificial Sequence
  Description of Artificial Sequence: Synthetic oligonucleotide
  Antisense strand to SEQ ID NO: 267414
auugccguaguauacuguc

SEQ ID NO: 267416 - RNA, 19 nt, Artificial Sequence
  Description of Artificial Sequence: Synthetic oligonucleotide
  Sense strand starting at position 117 of SEQ ID NO: 3438
aguauacuacggcaauuaa

SEQ ID NO: 267417 - RNA, 19 nt, Artificial Sequence
  Description of Artificial Sequence: Synthetic oligonucleotide
  Antisense strand to SEQ ID NO: 267416
uuaauugccguaguauacu

SEQ ID NO: 267418 - RNA, 19 nt, Artificial Sequence
  Description of Artificial Sequence: Synthetic oligonucleotide
  Sense strand starting at position 125 of SEQ ID NO: 3438
acggcaauuaacggugaaa

SEQ ID NO: 267419 - RNA, 19 nt, Artificial Sequence
  Description of Artificial Sequence: Synthetic oligonucleotide
  Antisense strand to SEQ ID NO: 267418
uuucaccguuaauugccgu

SEQ ID NO: 267420 - RNA, 19 nt, Artificial Sequence
  Description of Artificial Sequence: Synthetic oligonucleotide
  Sense strand starting at position 127 of SEQ ID NO: 3438
ggcaauuaacggugaaauu

SEQ ID NO: 267421 - RNA, 19 nt, Artificial Sequence
  Description of Artificial Sequence: Synthetic oligonucleotide
  Antisense strand to SEQ ID NO: 267420
aauuucaccguuaauugcc

SEQ ID NO: 267422 - RNA, 19 nt, Artificial Sequence
  Description of Artificial Sequence: Synthetic oligonucleotide
  Sense strand starting at position 128 of SEQ ID NO: 3438
gcaauuaacggugaaauuc

SEQ ID NO: 267423 - RNA, 19 nt, Artificial Sequence
  Description of Artificial Sequence: Synthetic oligonucleotide
  Antisense strand to SEQ ID NO: 267422
gaauuucaccguuaauugc

SEQ ID NO: 267424 - RNA, 19 nt, Artificial Sequence
  Description of Artificial Sequence: Synthetic oligonucleotide
  Sense strand starting at position 136 of SEQ ID NO: 3438
cggugaaauucaucgauag

SEQ ID NO: 267425 - RNA, 19 nt, Artificial Sequence
  Description of Artificial Sequence: Synthetic oligonucleotide
  Antisense strand to SEQ ID NO: 267424
cuaucgaugaauuucaccg

SEQ ID NO: 267426 - RNA, 19 nt, Artificial Sequence
  Description of Artificial Sequence: Synthetic oligonucleotide
  Sense strand starting at position 137 of SEQ ID NO: 3438
ggugaaauucaucgauaga

SEQ ID NO: 267427 - RNA, 19 nt, Artificial Sequence
  Description of Artificial Sequence: Synthetic oligonucleotide
  Antisense strand to SEQ ID NO: 267426
ucuaucgaugaauuucacc

SEQ ID NO: 267428 - RNA, 19 nt, Artificial Sequence
  Description of Artificial Sequence: Synthetic oligonucleotide
  Sense strand starting at position 175 of SEQ ID NO: 3438
cuaagagaauuugaagcua

SEQ ID NO: 267429 - RNA, 19 nt, Artificial Sequence
  Description of Artificial Sequence: Synthetic oligonucleotide
  Antisense strand to SEQ ID NO: 267428
uagcuucaaauucucuuag

SEQ ID NO: 267430 - RNA, 19 nt, Artificial Sequence
  Description of Artificial Sequence: Synthetic oligonucleotide
  Sense strand starting at position 194 of SEQ ID NO: 3438
ugcagaacucuacauggua

SEQ ID NO: 267431 - RNA, 19 nt, Artificial Sequence
  Description of Artificial Sequence: Synthetic oligonucleotide
  Antisense strand to SEQ ID NO: 267430
uaccauguagaguucugca

SEQ ID NO: 267432 - RNA, 19 nt, Artificial Sequence
  Description of Artificial Sequence: Synthetic oligonucleotide
  Sense strand starting at position 197 of SEQ ID NO: 3438
agaacucuacaugguaauu

SEQ ID NO: 267433 - RNA, 19 nt, Artificial Sequence
  Description of Artificial Sequence: Synthetic oligonucleotide
  Antisense strand to SEQ ID NO: 267432
aauuaccauguagaguucu

SEQ ID NO: 267434 - RNA, 19 nt, Artificial Sequence
  Description of Artificial Sequence: Synthetic oligonucleotide
  Sense strand starting at position 206 of SEQ ID NO: 3438
caugguaauuuagauaaga

SEQ ID NO: 267435 - RNA, 19 nt, Artificial Sequence
  Description of Artificial Sequence: Synthetic oligonucleotide
  Antisense strand to SEQ ID NO: 267434
ucuuaucuaaauuaccaug

SEQ ID NO: 267436 - RNA, 19 nt, Artificial Sequence
  Description of Artificial Sequence: Synthetic oligonucleotide
  Sense strand starting at position 316 of SEQ ID NO: 3438
acggcaauugcagauaacu

SEQ ID NO: 267437 - RNA, 19 nt, Artificial Sequence
  Description of Artificial Sequence: Synthetic oligonucleotide
  Antisense strand to SEQ ID NO: 267436
aguuaucugcaauugccgu

SEQ ID NO: 267438 - RNA, 19 nt, Artificial Sequence
  Description of Artificial Sequence: Synthetic oligonucleotide
  Sense strand starting at position 458 of SEQ ID NO: 3438
uggagaacucugcacccau

SEQ ID NO: 267439 - RNA, 19 nt, Artificial Sequence
  Description of Artificial Sequence: Synthetic oligonucleotide
  Antisense strand to SEQ ID NO: 267438
augggugcagaguucucca

SEQ ID NO: 267440 - RNA, 19 nt, Artificial Sequence
  Description of Artificial Sequence: Synthetic oligonucleotide
  Sense strand starting at position 696 of SEQ ID NO: 3438
agcaucuugcgauacgaau

SEQ ID NO: 267441 - RNA, 19 nt, Artificial Sequence
  Description of Artificial Sequence: Synthetic oligonucleotide
  Antisense strand to SEQ ID NO: 267440
auucguaucgcaagaugcu

SEQ ID NO: 267442 - RNA, 19 nt, Artificial Sequence
  Description of Artificial Sequence: Synthetic oligonucleotide
  Sense strand starting at position 738 of SEQ ID NO: 3438
ugcugacgaacuugucaaa

SEQ ID NO: 267443 - RNA, 19 nt, Artificial Sequence
  Description of Artificial Sequence: Synthetic oligonucleotide
  Antisense strand to SEQ ID NO: 267442
uuugacaaguucgucagca

SEQ ID NO: 267444 - RNA, 19 nt, Artificial Sequence
  Description of Artificial Sequence: Synthetic oligonucleotide
  Sense strand starting at position 904 of SEQ ID NO: 3438
accggaaaucuuuaguccu

SEQ ID NO: 267445 - RNA, 19 nt, Artificial Sequence
  Description of Artificial Sequence: Synthetic oligonucleotide
  Antisense strand to SEQ ID NO: 267444
aggacuaaagauuuccggu

SEQ ID NO: 267446 - RNA, 19 nt, Artificial Sequence
  Description of Artificial Sequence: Synthetic oligonucleotide
  Sense strand starting at position 1016 of SEQ ID NO: 3438
cgauauuuguuucucucca

SEQ ID NO: 267447 - RNA, 19 nt, Artificial Sequence
  Description of Artificial Sequence: Synthetic oligonucleotide
  Antisense strand to SEQ ID NO: 267446
uggagagaaacaaauaucg

SEQ ID NO: 267448 - RNA, 19 nt, Artificial Sequence
  Description of Artificial Sequence: Synthetic oligonucleotide
  Sense strand starting at position 1085 of SEQ ID NO: 3438
cguucuuaucuccucgagu

SEQ ID NO: 267449 - RNA, 19 nt, Artificial Sequence
  Description of Artificial Sequence: Synthetic oligonucleotide
  Antisense strand to SEQ ID NO: 267448
acucgaggagauaagaacg

SEQ ID NO: 267450 - RNA, 19 nt, Artificial Sequence
  Description of Artificial Sequence: Synthetic oligonucleotide
  Sense strand starting at position 1088 of SEQ ID NO: 3438
ucuuaucuccucgagucua

SEQ ID NO: 267451 - RNA, 19 nt, Artificial Sequence
  Description of Artificial Sequence: Synthetic oligonucleotide
  Antisense strand to SEQ ID NO: 267450
uagacucgaggagauaaga

SEQ ID NO: 267452 - RNA, 19 nt, Artificial Sequence
  Description of Artificial Sequence: Synthetic oligonucleotide
  Sense strand starting at position 1099 of SEQ ID NO: 3438
cgagucuaaucuccacaca

SEQ ID NO: 267453 - RNA, 19 nt, Artificial Sequence
  Description of Artificial Sequence: Synthetic oligonucleotide
  Antisense strand to SEQ ID NO: 267452
uguguggagauuagacucg

SEQ ID NO: 267454 - RNA, 19 nt, Artificial Sequence
  Description of Artificial Sequence: Synthetic oligonucleotide
  Sense strand starting at position 1136 of SEQ ID NO: 3438
gacaaauuagcaggucauu

SEQ ID NO: 267455 - RNA, 19 nt, Artificial Sequence
  Description of Artificial Sequence: Synthetic oligonucleotide
  Antisense strand to SEQ ID NO: 267454
aaugaccugcuaauuuguc

SEQ ID NO: 267456 - RNA, 19 nt, Artificial Sequence
  Description of Artificial Sequence: Synthetic oligonucleotide
  Sense strand starting at position 1526 of SEQ ID NO: 3438
guccgaauucccuauaauc

SEQ ID NO: 267457 - RNA, 19 nt, Artificial Sequence
  Description of Artificial Sequence: Synthetic oligonucleotide
  Antisense strand to SEQ ID NO: 267456
gauuauagggaauucggac

SEQ ID NO: 267458 - RNA, 19 nt, Artificial Sequence
  Description of Artificial Sequence: Synthetic oligonucleotide
  Sense strand starting at position 1528 of SEQ ID NO: 3438
ccgaauucccuauaaucug

SEQ ID NO: 267459 - RNA, 19 nt, Artificial Sequence
  Description of Artificial Sequence: Synthetic oligonucleotide
  Antisense strand to SEQ ID NO: 267458
cagauuauagggaauucgg

SEQ ID NO: 267460 - RNA, 19 nt, Artificial Sequence
  Description of Artificial Sequence: Synthetic oligonucleotide
  Sense strand starting at position 1652 of SEQ ID NO: 3438
auggcucucagguguaaag

SEQ ID NO: 267461 - RNA, 19 nt, Artificial Sequence
  Description of Artificial Sequence: Synthetic oligonucleotide
  Antisense strand to SEQ ID NO: 267460
cuuuacaccugagagccau

SEQ ID NO: 267462 - RNA, 19 nt, Artificial Sequence
  Description of Artificial Sequence: Synthetic oligonucleotide
  Sense strand starting at position 1724 of SEQ ID NO: 3438
aguaguuccgugcuuaagu

SEQ ID NO: 267463 - RNA, 19 nt, Artificial Sequence
  Description of Artificial Sequence: Synthetic oligonucleotide
  Antisense strand to SEQ ID NO: 267462
acuuaagcacggaacuacu

SEQ ID NO: 267464 - RNA, 19 nt, Artificial Sequence
  Description of Artificial Sequence: Synthetic oligonucleotide
  Sense strand starting at position 1803 of SEQ ID NO: 3438
cuaccuuaaagauggcgua

SEQ ID NO: 267465 - RNA, 19 nt, Artificial Sequence
  Description of Artificial Sequence: Synthetic oligonucleotide
  Antisense strand to SEQ ID NO: 267464
uacgccaucuuuaagguag

SEQ ID NO: 267466 - RNA, 19 nt, Artificial Sequence
  Description of Artificial Sequence: Synthetic oligonucleotide
  Sense strand starting at position 2041 of SEQ ID NO: 3438
cgcgcuacuccuucucuga

SEQ ID NO: 267467 - RNA, 19 nt, Artificial Sequence
  Description of Artificial Sequence: Synthetic oligonucleotide
  Antisense strand to SEQ ID NO: 267466
ucagagaaggaguagcgcg

SEQ ID NO: 267468 - RNA, 19 nt, Artificial Sequence
  Description of Artificial Sequence: Synthetic oligonucleotide
  Sense strand starting at position 2044 of SEQ ID NO: 3438
gcuacuccuucucugagga

SEQ ID NO: 267469 - RNA, 19 nt, Artificial Sequence
  Description of Artificial Sequence: Synthetic oligonucleotide
  Antisense strand to SEQ ID NO: 267468
uccucagagaaggaguagc

SEQ ID NO: 267470 - RNA, 19 nt, Artificial Sequence
  Description of Artificial Sequence: Synthetic oligonucleotide
  Sense strand starting at position 2045 of SEQ ID NO: 3438
cuacuccuucucugaggau

SEQ ID NO: 267471 - RNA, 19 nt, Artificial Sequence
  Description of Artificial Sequence: Synthetic oligonucleotide
  Antisense strand to SEQ ID NO: 267470
auccucagagaaggaguag

SEQ ID NO: 267472 - RNA, 19 nt, Artificial Sequence
  Description of Artificial Sequence: Synthetic oligonucleotide
  Sense strand starting at position 2077 of SEQ ID NO: 3438
cgucacuuccgacagaaga

SEQ ID NO: 267473 - RNA, 19 nt, Artificial Sequence
  Description of Artificial Sequence: Synthetic oligonucleotide
  Antisense strand to SEQ ID NO: 267472
ucuucugucggaagugacg

SEQ ID NO: 267474 - RNA, 19 nt, Artificial Sequence
  Description of Artificial Sequence: Synthetic oligonucleotide
  Sense strand starting at position 2090 of SEQ ID NO: 3438
agaagacugccgcagagau

SEQ ID NO: 267475 - RNA, 19 nt, Artificial Sequence
  Description of Artificial Sequence: Synthetic oligonucleotide
  Antisense strand to SEQ ID NO: 267474
aucucugcggcagucuucu

SEQ ID NO: 267476 - RNA, 19 nt, Artificial Sequence
  Description of Artificial Sequence: Synthetic oligonucleotide
  Sense strand starting at position 2111 of SEQ ID NO: 3438
ccgucacuuccagaauguu

SEQ ID NO: 267477 - RNA, 19 nt, Artificial Sequence
  Description of Artificial Sequence: Synthetic oligonucleotide
  Antisense strand to SEQ ID NO: 267476
aacauucuggaagugacgg

SEQ ID NO: 267478 - RNA, 19 nt, Artificial Sequence
  Description of Artificial Sequence: Synthetic oligonucleotide
  Sense strand starting at position 3344 of SEQ ID NO: 3438
gucacuauauuugugagca

SEQ ID NO: 267479 - RNA, 19 nt, Artificial Sequence
  Description of Artificial Sequence: Synthetic oligonucleotide
  Antisense strand to SEQ ID NO: 267478
ugcucacaaauauagugac

SEQ ID NO: 267480 - RNA, 19 nt, Artificial Sequence
  Description of Artificial Sequence: Synthetic oligonucleotide
  Sense strand starting at position 3800 of SEQ ID NO: 3438
uuuagacugucuucuugau

SEQ ID NO: 267481 - RNA, 19 nt, Artificial Sequence
  Description of Artificial Sequence: Synthetic oligonucleotide
  Antisense strand to SEQ ID NO: 267480
aucaagaagacagucuaaa

SEQ ID NO: 267482 - RNA, 19 nt, Artificial Sequence
  Description of Artificial Sequence: Synthetic oligonucleotide
  Sense strand starting at position 3808 of SEQ ID NO: 3438
gucuucuugauuuaguguu

SEQ ID NO: 267483 - RNA, 19 nt, Artificial Sequence
  Description of Artificial Sequence: Synthetic oligonucleotide
  Antisense strand to SEQ ID NO: 267482
aacacuaaaucaagaagac

SEQ ID NO: 267484 - RNA, 19 nt, Artificial Sequence
  Description of Artificial Sequence: Synthetic oligonucleotide
  Sense strand starting at position 3816 of SEQ ID NO: 3438
gauuuaguguuacuugcuu

SEQ ID NO: 267485 - RNA, 19 nt, Artificial Sequence
  Description of Artificial Sequence: Synthetic oligonucleotide
  Antisense strand to SEQ ID NO: 267484
aagcaaguaacacuaaauc

SEQ ID NO: 267486 - RNA, 19 nt, Artificial Sequence
  Description of Artificial Sequence: Synthetic oligonucleotide
  Sense strand starting at position 3885 of SEQ ID NO: 3438
ucacaagucugucuuccaa

SEQ ID NO: 267487 - RNA, 19 nt, Artificial Sequence
  Description of Artificial Sequence: Synthetic oligonucleotide
  Antisense strand to SEQ ID NO: 267486
uuggaagacagacuuguga

SEQ ID NO: 267488 - RNA, 19 nt, Artificial Sequence
  Description of Artificial Sequence: Synthetic oligonucleotide
  Sense strand starting at position 3940 of SEQ ID NO: 3438
auaugcagauuguuccuaa

SEQ ID NO: 267489 - RNA, 19 nt, Artificial Sequence
  Description of Artificial Sequence: Synthetic oligonucleotide
  Antisense strand to SEQ ID NO: 267488
uuaggaacaaucugcauau

SEQ ID NO: 267490 - RNA, 19 nt, Artificial Sequence
  Description of Artificial Sequence: Synthetic oligonucleotide
  Sense strand starting at position 3943 of SEQ ID NO: 3438
ugcagauuguuccuaauca

SEQ ID NO: 267491 - RNA, 19 nt, Artificial Sequence
  Description of Artificial Sequence: Synthetic oligonucleotide
  Antisense strand to SEQ ID NO: 267490
ugauuaggaacaaucugca

SEQ ID NO: 267492 - RNA, 19 nt, Artificial Sequence
  Description of Artificial Sequence: Synthetic oligonucleotide
  Sense strand starting at position 446 of SEQ ID NO: 3440
cugucaucguuacuauuua

SEQ ID NO: 267493 - RNA, 19 nt, Artificial Sequence
  Description of Artificial Sequence: Synthetic oligonucleotide
  Antisense strand to SEQ ID NO: 267492
uaaauaguaacgaugacag

SEQ ID NO: 267494 - RNA, 19 nt, Artificial Sequence
  Description of Artificial Sequence: Synthetic oligonucleotide
  Sense strand starting at position 747 of SEQ ID NO: 3440
guuagacauguccacauga

SEQ ID NO: 267495 - RNA, 19 nt, Artificial Sequence
  Description of Artificial Sequence: Synthetic oligonucleotide
  Antisense strand to SEQ ID NO: 267494
ucauguggacaugucuaac

SEQ ID NO: 267496 - RNA, 19 nt, Artificial Sequence
  Description of Artificial Sequence: Synthetic oligonucleotide
  Sense strand starting at position 768 of SEQ ID NO: 3440
ggacucucaucagcuuaaa

SEQ ID NO: 267497 - RNA, 19 nt, Artificial Sequence
  Description of Artificial Sequence: Synthetic oligonucleotide
  Antisense strand to SEQ ID NO: 267496
uuuaagcugaugagagucc

SEQ ID NO: 267498 - RNA, 19 nt, Artificial Sequence
  Description of Artificial Sequence: Synthetic oligonucleotide
  Sense strand starting at position 917 of SEQ ID NO: 3440
gcugauaaggaucagcuau

SEQ ID NO: 267499 - RNA, 19 nt, Artificial Sequence
  Description of Artificial Sequence: Synthetic oligonucleotide
  Antisense strand to SEQ ID NO: 267498
auagcugauccuuaucagc

SEQ ID NO: 267500 - RNA, 19 nt, Artificial Sequence
  Description of Artificial Sequence: Synthetic oligonucleotide
  Sense strand starting at position 945 of SEQ ID NO: 3440
ggccuuugcccucaagaug

SEQ ID NO: 267501 - RNA, 19 nt, Artificial Sequence
  Description of Artificial Sequence: Synthetic oligonucleotide
  Antisense strand to SEQ ID NO: 267500
caucuugagggcaaaggcc

SEQ ID NO: 267502 - RNA, 19 nt, Artificial Sequence
  Description of Artificial Sequence: Synthetic oligonucleotide
  Sense strand starting at position 998 of SEQ ID NO: 3440
aaguguucugauggaguua

SEQ ID NO: 267503 - RNA, 19 nt, Artificial Sequence
  Description of Artificial Sequence: Synthetic oligonucleotide
  Antisense strand to SEQ ID NO: 267502
uaacuccaucagaacacuu

SEQ ID NO: 267504 - RNA, 19 nt, Artificial Sequence
  Description of Artificial Sequence: Synthetic oligonucleotide
  Sense strand starting at position 999 of SEQ ID NO: 3440
aguguucugauggaguuaa

SEQ ID NO: 267505 - RNA, 19 nt, Artificial Sequence
  Description of Artificial Sequence: Synthetic oligonucleotide
  Antisense strand to SEQ ID NO: 267504
uuaacuccaucagaacacu

SEQ ID NO: 267506 - RNA, 19 nt, Artificial Sequence
  Description of Artificial Sequence: Synthetic oligonucleotide
  Sense strand starting at position 1007 of SEQ ID NO: 3440
gauggaguuaaaugguugu

SEQ ID NO: 267507 - RNA, 19 nt, Artificial Sequence
  Description of Artificial Sequence: Synthetic oligonucleotide
  Antisense strand to SEQ ID NO: 267506
acaaccauuuaacuccauc

SEQ ID NO: 267508 - RNA, 19 nt, Artificial Sequence
  Description of Artificial Sequence: Synthetic oligonucleotide
  Sense strand starting at position 1063 of SEQ ID NO: 3440
ggcuaaggcuuucugggaa

SEQ ID NO: 267509 - RNA, 19 nt, Artificial Sequence
  Description of Artificial Sequence: Synthetic oligonucleotide
  Antisense strand to SEQ ID NO: 267508
uucccagaaagccuuagcc

SEQ ID NO: 267510 - RNA, 19 nt, Artificial Sequence
  Description of Artificial Sequence: Synthetic oligonucleotide
  Sense strand starting at position 1116 of SEQ ID NO: 3440
aaguaagaguuagcgacau

SEQ ID NO: 267511 - RNA, 19 nt, Artificial Sequence
  Description of Artificial Sequence: Synthetic oligonucleotide
  Antisense strand to SEQ ID NO: 267510
augucgcuaacucuuacuu

SEQ ID NO: 267512 - RNA, 19 nt, Artificial Sequence
  Description of Artificial Sequence: Synthetic oligonucleotide
  Sense strand starting at position 1118 of SEQ ID NO: 3440
guaagaguuagcgacauga

SEQ ID NO: 267513 - RNA, 19 nt, Artificial Sequence
  Description of Artificial Sequence: Synthetic oligonucleotide
  Antisense strand to SEQ ID NO: 267512
ucaugucgcuaacucuuac

SEQ ID NO: 267514 - RNA, 19 nt, Artificial Sequence
  Description of Artificial Sequence: Synthetic oligonucleotide
  Sense strand starting at position 1122 of SEQ ID NO: 3440
gaguuagcgacaugaagaa

SEQ ID NO: 267515 - RNA, 19 nt, Artificial Sequence
  Description of Artificial Sequence: Synthetic oligonucleotide
  Antisense strand to SEQ ID NO: 267514
uucuucaugucgcuaacuc

SEQ ID NO: 267516 - RNA, 19 nt, Artificial Sequence
  Description of Artificial Sequence: Synthetic oligonucleotide
  Sense strand starting at position 1147 of SEQ ID NO: 3440
gaaagaggucucuguggca

SEQ ID NO: 267517 - RNA, 19 nt, Artificial Sequence
  Description of Artificial Sequence: Synthetic oligonucleotide
  Antisense strand to SEQ ID NO: 267516
ugccacagagaccucuuuc

SEQ ID NO: 267518 - RNA, 19 nt, Artificial Sequence
  Description of Artificial Sequence: Synthetic oligonucleotide
  Sense strand starting at position 1153 of SEQ ID NO: 3440
ggucucuguggcaguguaa

SEQ ID NO: 267519 - RNA, 19 nt, Artificial Sequence
  Description of Artificial Sequence: Synthetic oligonucleotide
  Antisense strand to SEQ ID NO: 267518
uuacacugccacagagacc

SEQ ID NO: 267520 - RNA, 19 nt, Artificial Sequence
  Description of Artificial Sequence: Synthetic oligonucleotide
  Sense strand starting at position 1397 of SEQ ID NO: 3440
agcuuucugcuugaaaccu

SEQ ID NO: 267521 - RNA, 19 nt, Artificial Sequence
  Description of Artificial Sequence: Synthetic oligonucleotide
  Antisense strand to SEQ ID NO: 267520
agguuucaagcagaaagcu

SEQ ID NO: 267522 - RNA, 19 nt, Artificial Sequence
  Description of Artificial Sequence: Synthetic oligonucleotide
  Sense strand starting at position 1482 of SEQ ID NO: 3440
auucuuagcuccuuagaag

SEQ ID NO: 267523 - RNA, 19 nt, Artificial Sequence
  Description of Artificial Sequence: Synthetic oligonucleotide
  Antisense strand to SEQ ID NO: 267522
cuucuaaggagcuaagaau

SEQ ID NO: 267524 - RNA, 19 nt, Artificial Sequence
  Description of Artificial Sequence: Synthetic oligonucleotide
  Sense strand starting at position 1483 of SEQ ID NO: 3440
uucuuagcuccuuagaaga

SEQ ID NO: 267525 - RNA, 19 nt, Artificial Sequence
  Description of Artificial Sequence: Synthetic oligonucleotide
  Antisense strand to SEQ ID NO: 267524
ucuucuaaggagcuaagaa

SEQ ID NO: 267526 - RNA, 19 nt, Artificial Sequence
  Description of Artificial Sequence: Synthetic oligonucleotide
  Sense strand starting at position 1895 of SEQ ID NO: 3440
uuggcauaccucugggauc

SEQ ID NO: 267527 - RNA, 19 nt, Artificial Sequence
  Description of Artificial Sequence: Synthetic oligonucleotide
  Antisense strand to SEQ ID NO: 267526
gaucccagagguaugccaa

SEQ ID NO: 267528 - RNA, 19 nt, Artificial Sequence
  Description of Artificial Sequence: Synthetic oligonucleotide
  Sense strand starting at position 1897 of SEQ ID NO: 3440
ggcauaccucugggaucuu

SEQ ID NO: 267529 - RNA, 19 nt, Artificial Sequence
  Description of Artificial Sequence: Synthetic oligonucleotide
  Antisense strand to SEQ ID NO: 267528
aagaucccagagguaugcc

SEQ ID NO: 267530 - RNA, 19 nt, Artificial Sequence
  Description of Artificial Sequence: Synthetic oligonucleotide
  Sense strand starting at position 2343 of SEQ ID NO: 3440
ugaugucugccugacuacu

SEQ ID NO: 267531 - RNA, 19 nt, Artificial Sequence
  Description of Artificial Sequence: Synthetic oligonucleotide
  Antisense strand to SEQ ID NO: 267530
aguagucaggcagacauca

SEQ ID NO: 267532 - RNA, 19 nt, Artificial Sequence
  Description of Artificial Sequence: Synthetic oligonucleotide
  Sense strand starting at position 2429 of SEQ ID NO: 3440
cgaugauaccaaugucuua

SEQ ID NO: 267533 - RNA, 19 nt, Artificial Sequence
  Description of Artificial Sequence: Synthetic oligonucleotide
  Antisense strand to SEQ ID NO: 267532
uaagacauugguaucaucg

SEQ ID NO: 267534 - RNA, 19 nt, Artificial Sequence
  Description of Artificial Sequence: Synthetic oligonucleotide
  Sense strand starting at position 2898 of SEQ ID NO: 3440
acauaaugucucgaacgau

SEQ ID NO: 267535 - RNA, 19 nt, Artificial Sequence
  Description of Artificial Sequence: Synthetic oligonucleotide
  Antisense strand to SEQ ID NO: 267534
aucguucgagacauuaugu

SEQ ID NO: 267536 - RNA, 19 nt, Artificial Sequence
  Description of Artificial Sequence: Synthetic oligonucleotide
  Sense strand starting at position 2912 of SEQ ID NO: 3440
acgauuggugcucaauaca

SEQ ID NO: 267537 - RNA, 19 nt, Artificial Sequence
  Description of Artificial Sequence: Synthetic oligonucleotide
  Antisense strand to SEQ ID NO: 267536
uguauugagcaccaaucgu

SEQ ID NO: 267538 - RNA, 19 nt, Artificial Sequence
  Description of Artificial Sequence: Synthetic oligonucleotide
  Sense strand starting at position 2979 of SEQ ID NO: 3440
uggcucuguggguaaacaa

SEQ ID NO: 267539 - RNA, 19 nt, Artificial Sequence
  Description of Artificial Sequence: Synthetic oligonucleotide
  Antisense strand to SEQ ID NO: 267538
uuguuuacccacagagcca

SEQ ID NO: 267540 - RNA, 19 nt, Artificial Sequence
  Description of Artificial Sequence: Synthetic oligonucleotide
  Sense strand starting at position 3007 of SEQ ID NO: 3440
uguagcauaguguaaacua

SEQ ID NO: 267541 - RNA, 19 nt, Artificial Sequence
  Description of Artificial Sequence: Synthetic oligonucleotide
  Antisense strand to SEQ ID NO: 267540
uaguuuacacuaugcuaca

SEQ ID NO: 267542 - RNA, 19 nt, Artificial Sequence
  Description of Artificial Sequence: Synthetic oligonucleotide
  Sense strand starting at position 3029 of SEQ ID NO: 3440
guuagcauagugcaaacua

SEQ ID NO: 267543 - RNA, 19 nt, Artificial Sequence
  Description of Artificial Sequence: Synthetic oligonucleotide
  Antisense strand to SEQ ID NO: 267542
uaguuugcacuaugcuaac

SEQ ID NO: 267544 - RNA, 19 nt, Artificial Sequence
  Description of Artificial Sequence: Synthetic oligonucleotide
  Sense strand starting at position 3099 of SEQ ID NO: 3440
gcacuagaaguguaguaca

SEQ ID NO: 267545 - RNA, 19 nt, Artificial Sequence
  Description of Artificial Sequence: Synthetic oligonucleotide
  Antisense strand to SEQ ID NO: 267544
uguacuacacuucuagugc

SEQ ID NO: 267546 - RNA, 19 nt, Artificial Sequence
  Description of Artificial Sequence: Synthetic oligonucleotide
  Sense strand starting at position 3203 of SEQ ID NO: 3440
uugaacucaucuuugguga

SEQ ID NO: 267547 - RNA, 19 nt, Artificial Sequence
  Description of Artificial Sequence: Synthetic oligonucleotide
  Antisense strand to SEQ ID NO: 267546
ucaccaaagaugaguucaa

SEQ ID NO: 267548 - RNA, 19 nt, Artificial Sequence
  Description of Artificial Sequence: Synthetic oligonucleotide
  Sense strand starting at position 3218 of SEQ ID NO: 3440
gugacauagcuccaauuag

SEQ ID NO: 267549 - RNA, 19 nt, Artificial Sequence
  Description of Artificial Sequence: Synthetic oligonucleotide
  Antisense strand to SEQ ID NO: 267548
cuaauuggagcuaugucac

SEQ ID NO: 267550 - RNA, 19 nt, Artificial Sequence
  Description of Artificial Sequence: Synthetic oligonucleotide
  Sense strand starting at position 3225 of SEQ ID NO: 3440
agcuccaauuagucugaaa

SEQ ID NO: 267551 - RNA, 19 nt, Artificial Sequence
  Description of Artificial Sequence: Synthetic oligonucleotide
  Antisense strand to SEQ ID NO: 267550
uuucagacuaauuggagcu

SEQ ID NO: 267552 - RNA, 19 nt, Artificial Sequence
  Description of Artificial Sequence: Synthetic oligonucleotide
  Sense strand starting at position 3262 of SEQ ID NO: 3440
gauggcuugccagacagua

SEQ ID NO: 267553 - RNA, 19 nt, Artificial Sequence
  Description of Artificial Sequence: Synthetic oligonucleotide
  Antisense strand to SEQ ID NO: 267552
uacugucuggcaagccauc

SEQ ID NO: 267554 - RNA, 19 nt, Artificial Sequence
  Description of Artificial Sequence: Synthetic oligonucleotide
  Sense strand starting at position 3299 of SEQ ID NO: 3440
gaacuuuggccagagccaa

SEQ ID NO: 267555 - RNA, 19 nt, Artificial Sequence
  Description of Artificial Sequence: Synthetic oligonucleotide
  Antisense strand to SEQ ID NO: 267554
uuggcucuggccaaaguuc

SEQ ID NO: 267556 - RNA, 19 nt, Artificial Sequence
  Description of Artificial Sequence: Synthetic oligonucleotide
  Sense strand starting at position 3556 of SEQ ID NO: 3440
caauguauugaaugacuga

SEQ ID NO: 267557 - RNA, 19 nt, Artificial Sequence
  Description of Artificial Sequence: Synthetic oligonucleotide
  Antisense strand to SEQ ID NO: 267556
ucagucauucaauacauug

SEQ ID NO: 267558 - RNA, 19 nt, Artificial Sequence
  Description of Artificial Sequence: Synthetic oligonucleotide
  Sense strand starting at position 3559 of SEQ ID NO: 3440
uguauugaaugacugaauu

SEQ ID NO: 267559 - RNA, 19 nt, Artificial Sequence
  Description of Artificial Sequence: Synthetic oligonucleotide
  Antisense strand to SEQ ID NO: 267558
aauucagucauucaauaca

SEQ ID NO: 267560 - RNA, 19 nt, Artificial Sequence
  Description of Artificial Sequence: Synthetic oligonucleotide
  Sense strand starting at position 3569 of SEQ ID NO: 3440
gacugaauugcuuguacug

SEQ ID NO: 267561 - RNA, 19 nt, Artificial Sequence
  Description of Artificial Sequence: Synthetic oligonucleotide
  Antisense strand to SEQ ID NO: 267560
caguacaagcaauucaguc

SEQ ID NO: 267562 - RNA, 19 nt, Artificial Sequence
  Description of Artificial Sequence: Synthetic oligonucleotide
  Sense strand starting at position 3615 of SEQ ID NO: 3440
auguuugcccuugcaaguu

SEQ ID NO: 267563 - RNA, 19 nt, Artificial Sequence
  Description of Artificial Sequence: Synthetic oligonucleotide
  Antisense strand to SEQ ID NO: 267562
aacuugcaagggcaaacau

SEQ ID NO: 267564 - RNA, 19 nt, Artificial Sequence
  Description of Artificial Sequence: Synthetic oligonucleotide
  Sense strand starting at position 3668 of SEQ ID NO: 3440
ugugaauuagacugauaca

SEQ ID NO: 267565 - RNA, 19 nt, Artificial Sequence
  Description of Artificial Sequence: Synthetic oligonucleotide
  Antisense strand to SEQ ID NO: 267564
uguaucagucuaauucaca

SEQ ID NO: 267566 - RNA, 19 nt, Artificial Sequence
  Description of Artificial Sequence: Synthetic oligonucleotide
  Sense strand starting at position 3754 of SEQ ID NO: 3440
cuuccaauauaguugaaag

SEQ ID NO: 267567 - RNA, 19 nt, Artificial Sequence
  Description of Artificial Sequence: Synthetic oligonucleotide
  Antisense strand to SEQ ID NO: 267566
cuuucaacuauauuggaag

SEQ ID NO: 267568 - RNA, 19 nt, Artificial Sequence
  Description of Artificial Sequence: Synthetic oligonucleotide
  Sense strand starting at position 3943 of SEQ ID NO: 3440
acuggaaucuguguaauga

SEQ ID NO: 267569 - RNA, 19 nt, Artificial Sequence
  Description of Artificial Sequence: Synthetic oligonucleotide
  Antisense strand to SEQ ID NO: 267568
ucauuacacagauuccagu

SEQ ID NO: 267570 - RNA, 19 nt, Artificial Sequence
  Description of Artificial Sequence: Synthetic oligonucleotide
  Sense strand starting at position 3963 of SEQ ID NO: 3440
ccagaaugaguacguguaa

SEQ ID NO: 267571 - RNA, 19 nt, Artificial Sequence
  Description of Artificial Sequence: Synthetic oligonucleotide
  Antisense strand to SEQ ID NO: 267570
uuacacguacucauucugg

SEQ ID NO: 267572 - RNA, 19 nt, Artificial Sequence
  Description of Artificial Sequence: Synthetic oligonucleotide
  Sense strand starting at position 106 of SEQ ID NO: 3439
aagaaugugccaggaaauc

SEQ ID NO: 267573 - RNA, 19 nt, Artificial Sequence
  Description of Artificial Sequence: Synthetic oligonucleotide
  Antisense strand to SEQ ID NO: 267572
gauuuccuggcacauucuu

SEQ ID NO: 267574 - RNA, 19 nt, Artificial Sequence
  Description of Artificial Sequence: Synthetic oligonucleotide
  Sense strand starting at position 132 of SEQ ID NO: 3439
acacuugauuaagaugaaa

SEQ ID NO: 267575 - RNA, 19 nt, Artificial Sequence
  Description of Artificial Sequence: Synthetic oligonucleotide
  Antisense strand to SEQ ID NO: 267574
uuucaucuuaaucaagugu

SEQ ID NO: 267576 - RNA, 19 nt, Artificial Sequence
  Description of Artificial Sequence: Synthetic oligonucleotide
  Sense strand starting at position 167 of SEQ ID NO: 3439
aauguucugugaguuuaga

SEQ ID NO: 267577 - RNA, 19 nt, Artificial Sequence
  Description of Artificial Sequence: Synthetic oligonucleotide
  Antisense strand to SEQ ID NO: 267576
ucuaaacucacagaacauu

SEQ ID NO: 267578 - RNA, 19 nt, Artificial Sequence
  Description of Artificial Sequence: Synthetic oligonucleotide
  Sense strand starting at position 224 of SEQ ID NO: 3439
ccaugacucccggauacuu

SEQ ID NO: 267579 - RNA, 19 nt, Artificial Sequence
  Description of Artificial Sequence: Synthetic oligonucleotide
  Antisense strand to SEQ ID NO: 267578
aaguauccgggagucaugg

SEQ ID NO: 267580 - RNA, 19 nt, Artificial Sequence
  Description of Artificial Sequence: Synthetic oligonucleotide
  Sense strand starting at position 295 of SEQ ID NO: 3439
gaguccuuggcccagcaua

SEQ ID NO: 267581 - RNA, 19 nt, Artificial Sequence
  Description of Artificial Sequence: Synthetic oligonucleotide
  Antisense strand to SEQ ID NO: 267580
uaugcugggccaaggacuc

SEQ ID NO: 267582 - RNA, 19 nt, Artificial Sequence
  Description of Artificial Sequence: Synthetic oligonucleotide
  Sense strand starting at position 358 of SEQ ID NO: 3439
gacacagaagugugguuau

SEQ ID NO: 267583 - RNA, 19 nt, Artificial Sequence
  Description of Artificial Sequence: Synthetic oligonucleotide
  Antisense strand to SEQ ID NO: 267582
auaaccacacuucuguguc

SEQ ID NO: 267584 - RNA, 19 nt, Artificial Sequence
  Description of Artificial Sequence: Synthetic oligonucleotide
  Sense strand starting at position 428 of SEQ ID NO: 3439
ugacuuugcugucuacaaa

SEQ ID NO: 267585 - RNA, 19 nt, Artificial Sequence
  Description of Artificial Sequence: Synthetic oligonucleotide
  Antisense strand to SEQ ID NO: 267584
uuuguagacagcaaaguca

SEQ ID NO: 267586 - RNA, 19 nt, Artificial Sequence
  Description of Artificial Sequence: Synthetic oligonucleotide
  Sense strand starting at position 684 of SEQ ID NO: 3439
uuaacaguuuagucaggga

SEQ ID NO: 267587 - RNA, 19 nt, Artificial Sequence
  Description of Artificial Sequence: Synthetic oligonucleotide
  Antisense strand to SEQ ID NO: 267586
ucccugacuaaacuguuaa

SEQ ID NO: 267588 - RNA, 19 nt, Artificial Sequence
  Description of Artificial Sequence: Synthetic oligonucleotide
  Sense strand starting at position 688 of SEQ ID NO: 3439
caguuuagucagggagcaa

SEQ ID NO: 267589 - RNA, 19 nt, Artificial Sequence
  Description of Artificial Sequence: Synthetic oligonucleotide
  Antisense strand to SEQ ID NO: 267588
uugcucccugacuaaacug

SEQ ID NO: 267590 - RNA, 19 nt, Artificial Sequence
  Description of Artificial Sequence: Synthetic oligonucleotide
  Sense strand starting at position 689 of SEQ ID NO: 3439
aguuuagucagggagcaac

SEQ ID NO: 267591 - RNA, 19 nt, Artificial Sequence
  Description of Artificial Sequence: Synthetic oligonucleotide
  Antisense strand to SEQ ID NO: 267590
guugcucccugacuaaacu

SEQ ID NO: 267592 - RNA, 19 nt, Artificial Sequence
  Description of Artificial Sequence: Synthetic oligonucleotide
  Sense strand starting at position 769 of SEQ ID NO: 3439
agagaacacugagauugaa

SEQ ID NO: 267593 - RNA, 19 nt, Artificial Sequence
  Description of Artificial Sequence: Synthetic oligonucleotide
  Antisense strand to SEQ ID NO: 267592
uucaaucucaguguucucu

SEQ ID NO: 267594 - RNA, 19 nt, Artificial Sequence
  Description of Artificial Sequence: Synthetic oligonucleotide
  Sense strand starting at position 841 of SEQ ID NO: 3439
ggaauuuguuucuacauua

SEQ ID NO: 267595 - RNA, 19 nt, Artificial Sequence
  Description of Artificial Sequence: Synthetic oligonucleotide
  Antisense strand to SEQ ID NO: 267594
uaauguagaaacaaauucc

SEQ ID NO: 267596 - RNA, 19 nt, Artificial Sequence
  Description of Artificial Sequence: Synthetic oligonucleotide
  Sense strand starting at position 898 of SEQ ID NO: 3439
ggcagaauuggcuacuaug

SEQ ID NO: 267597 - RNA, 19 nt, Artificial Sequence
  Description of Artificial Sequence: Synthetic oligonucleotide
  Antisense strand to SEQ ID NO: 267596
cauaguagccaauucugcc

SEQ ID NO: 267598 - RNA, 19 nt, Artificial Sequence
  Description of Artificial Sequence: Synthetic oligonucleotide
  Sense strand starting at position 977 of SEQ ID NO: 3439
cugcaauaguaacuauagu

SEQ ID NO: 267599 - RNA, 19 nt, Artificial Sequence
  Description of Artificial Sequence: Synthetic oligonucleotide
  Antisense strand to SEQ ID NO: 267598
acuauaguuacuauugcag

SEQ ID NO: 267600 - RNA, 19 nt, Artificial Sequence
  Description of Artificial Sequence: Synthetic oligonucleotide
  Sense strand starting at position 1120 of SEQ ID NO: 3439
uuguguuaucaauacauga

SEQ ID NO: 267601 - RNA, 19 nt, Artificial Sequence
  Description of Artificial Sequence: Synthetic oligonucleotide
  Antisense strand to SEQ ID NO: 267600
ucauguauugauaacacaa

SEQ ID NO: 267602 - RNA, 19 nt, Artificial Sequence
  Description of Artificial Sequence: Synthetic oligonucleotide
  Sense strand starting at position 1295 of SEQ ID NO: 3439
cugcuauugccgccggaga

SEQ ID NO: 267603 - RNA, 19 nt, Artificial Sequence
  Description of Artificial Sequence: Synthetic oligonucleotide
  Antisense strand to SEQ ID NO: 267602
ucuccggcggcaauagcag

SEQ ID NO: 267604 - RNA, 19 nt, Artificial Sequence
  Description of Artificial Sequence: Synthetic oligonucleotide
  Sense strand starting at position 1315 of SEQ ID NO: 3439
cucacaaugucuuuggacu

SEQ ID NO: 267605 - RNA, 19 nt, Artificial Sequence
  Description of Artificial Sequence: Synthetic oligonucleotide
  Antisense strand to SEQ ID NO: 267604
aguccaaagacauugugag

SEQ ID NO: 267606 - RNA, 19 nt, Artificial Sequence
  Description of Artificial Sequence: Synthetic oligonucleotide
  Sense strand starting at position 1316 of SEQ ID NO: 3439
ucacaaugucuuuggacuu

SEQ ID NO: 267607 - RNA, 19 nt, Artificial Sequence
  Description of Artificial Sequence: Synthetic oligonucleotide
  Antisense strand to SEQ ID NO: 267606
aaguccaaagacauuguga

SEQ ID NO: 267608 - RNA, 19 nt, Artificial Sequence
  Description of Artificial Sequence: Synthetic oligonucleotide
  Sense strand starting at position 1327 of SEQ ID NO: 3439
uuggacuucugaccaaacu

SEQ ID NO: 267609 - RNA, 19 nt, Artificial Sequence
  Description of Artificial Sequence: Synthetic oligonucleotide
  Antisense strand to SEQ ID NO: 267608
aguuuggucagaaguccaa

SEQ ID NO: 267610 - RNA, 19 nt, Artificial Sequence
  Description of Artificial Sequence: Synthetic oligonucleotide
  Sense strand starting at position 1353 of SEQ ID NO: 3439
uugguagugcuccaaacau

SEQ ID NO: 267611 - RNA, 19 nt, Artificial Sequence
  Description of Artificial Sequence: Synthetic oligonucleotide
  Antisense strand to SEQ ID NO: 267610
auguuuggagcacuaccaa

SEQ ID NO: 267612 - RNA, 19 nt, Artificial Sequence
  Description of Artificial Sequence: Synthetic oligonucleotide
  Sense strand starting at position 1466 of SEQ ID NO: 3439
caggacuugugauccuuga

SEQ ID NO: 267613 - RNA, 19 nt, Artificial Sequence
  Description of Artificial Sequence: Synthetic oligonucleotide
  Antisense strand to SEQ ID NO: 267612
ucaaggaucacaaguccug

SEQ ID NO: 267614 - RNA, 19 nt, Artificial Sequence
  Description of Artificial Sequence: Synthetic oligonucleotide
  Sense strand starting at position 1473 of SEQ ID NO: 3439
ugugauccuugacuccaaa

SEQ ID NO: 267615 - RNA, 19 nt, Artificial Sequence
  Description of Artificial Sequence: Synthetic oligonucleotide
  Antisense strand to SEQ ID NO: 267614
uuuggagucaaggaucaca

SEQ ID NO: 267616 - RNA, 19 nt, Artificial Sequence
  Description of Artificial Sequence: Synthetic oligonucleotide
  Sense strand starting at position 1607 of SEQ ID NO: 3439
auggguguaugucuuaaga

SEQ ID NO: 267617 - RNA, 19 nt, Artificial Sequence
  Description of Artificial Sequence: Synthetic oligonucleotide
  Antisense strand to SEQ ID NO: 267616
ucuuaagacauacacccau

SEQ ID NO: 267618 - RNA, 19 nt, Artificial Sequence
  Description of Artificial Sequence: Synthetic oligonucleotide
  Sense strand starting at position 1688 of SEQ ID NO: 3439
ccaagaauaugagaaggaa

SEQ ID NO: 267619 - RNA, 19 nt, Artificial Sequence
  Description of Artificial Sequence: Synthetic oligonucleotide
  Antisense strand to SEQ ID NO: 267618
uuccuucucauauucuugg

SEQ ID NO: 267620 - RNA, 19 nt, Artificial Sequence
  Description of Artificial Sequence: Synthetic oligonucleotide
  Sense strand starting at position 2196 of SEQ ID NO: 3439
gcaggauccugaguccuga

SEQ ID NO: 267621 - RNA, 19 nt, Artificial Sequence
  Description of Artificial Sequence: Synthetic oligonucleotide
  Antisense strand to SEQ ID NO: 267620
ucaggacucaggauccugc

SEQ ID NO: 267622 - RNA, 19 nt, Artificial Sequence
  Description of Artificial Sequence: Synthetic oligonucleotide
  Sense strand starting at position 2209 of SEQ ID NO: 3439
uccugaacagcguaacauu

SEQ ID NO: 267623 - RNA, 19 nt, Artificial Sequence
  Description of Artificial Sequence: Synthetic oligonucleotide
  Antisense strand to SEQ ID NO: 267622
aauguuacgcuguucagga

SEQ ID NO: 267624 - RNA, 19 nt, Artificial Sequence
  Description of Artificial Sequence: Synthetic oligonucleotide
  Sense strand starting at position 2304 of SEQ ID NO: 3439
cucagccugcaguauuaau

SEQ ID NO: 267625 - RNA, 19 nt, Artificial Sequence
  Description of Artificial Sequence: Synthetic oligonucleotide
  Antisense strand to SEQ ID NO: 267624
auuaauacugcaggcugag

SEQ ID NO: 267626 - RNA, 19 nt, Artificial Sequence
  Description of Artificial Sequence: Synthetic oligonucleotide
  Sense strand starting at position 2394 of SEQ ID NO: 3439
cucucugaggguuagcuaa

SEQ ID NO: 267627 - RNA, 19 nt, Artificial Sequence
  Description of Artificial Sequence: Synthetic oligonucleotide
  Antisense strand to SEQ ID NO: 267626
uuagcuaacccucagagag

SEQ ID NO: 267628 - RNA, 19 nt, Artificial Sequence
  Description of Artificial Sequence: Synthetic oligonucleotide
  Sense strand starting at position 2396 of SEQ ID NO: 3439
cucugaggguuagcuaauu

SEQ ID NO: 267629 - RNA, 19 nt, Artificial Sequence
  Description of Artificial Sequence: Synthetic oligonucleotide
  Antisense strand to SEQ ID NO: 267628
aauuagcuaacccucagag

SEQ ID NO: 267630 - RNA, 19 nt, Artificial Sequence
  Description of Artificial Sequence: Synthetic oligonucleotide
  Sense strand starting at position 2441 of SEQ ID NO: 3439
ugagcacuccuuuaauaug

SEQ ID NO: 267631 - RNA, 19 nt, Artificial Sequence
  Description of Artificial Sequence: Synthetic oligonucleotide
  Antisense strand to SEQ ID NO: 267630
cauauuaaaggagugcuca

SEQ ID NO: 267632 - RNA, 19 nt, Artificial Sequence
  Description of Artificial Sequence: Synthetic oligonucleotide
  Sense strand starting at position 2501 of SEQ ID NO: 3439
guuacccaguucucaaaua

SEQ ID NO: 267633 - RNA, 19 nt, Artificial Sequence
  Description of Artificial Sequence: Synthetic oligonucleotide
  Antisense strand to SEQ ID NO: 267632
uauuugagaacuggguaac

SEQ ID NO: 267634 - RNA, 19 nt, Artificial Sequence
  Description of Artificial Sequence: Synthetic oligonucleotide
  Sense strand starting at position 2784 of SEQ ID NO: 3439
accacagcuugaguucuau

SEQ ID NO: 267635 - RNA, 19 nt, Artificial Sequence
  Description of Artificial Sequence: Synthetic oligonucleotide
  Antisense strand to SEQ ID NO: 267634
auagaacucaagcuguggu

SEQ ID NO: 267636 - RNA, 19 nt, Artificial Sequence
  Description of Artificial Sequence: Synthetic oligonucleotide
  Sense strand starting at position 2827 of SEQ ID NO: 3439
aguugccaaucauuagauu

SEQ ID NO: 267637 - RNA, 19 nt, Artificial Sequence
  Description of Artificial Sequence: Synthetic oligonucleotide
  Antisense strand to SEQ ID NO: 267636
aaucuaaugauuggcaacu

SEQ ID NO: 267638 - RNA, 19 nt, Artificial Sequence
  Description of Artificial Sequence: Synthetic oligonucleotide
  Sense strand starting at position 2856 of SEQ ID NO: 3439
ggccuauugauguacgaca

SEQ ID NO: 267639 - RNA, 19 nt, Artificial Sequence
  Description of Artificial Sequence: Synthetic oligonucleotide
  Antisense strand to SEQ ID NO: 267638
ugucguacaucaauaggcc

SEQ ID NO: 267640 - RNA, 19 nt, Artificial Sequence
  Description of Artificial Sequence: Synthetic oligonucleotide
  Sense strand starting at position 2869 of SEQ ID NO: 3439
acgacagccauuugcuaga

SEQ ID NO: 267641 - RNA, 19 nt, Artificial Sequence
  Description of Artificial Sequence: Synthetic oligonucleotide
  Antisense strand to SEQ ID NO: 267640
ucuagcaaauggcugucgu

SEQ ID NO: 267642 - RNA, 19 nt, Artificial Sequence
  Description of Artificial Sequence: Synthetic oligonucleotide
  Sense strand starting at position 3161 of SEQ ID NO: 3439
ggcaauauagcaggagauu

SEQ ID NO: 267643 - RNA, 19 nt, Artificial Sequence
  Description of Artificial Sequence: Synthetic oligonucleotide
  Antisense strand to SEQ ID NO: 267642
aaucuccugcuauauugcc

SEQ ID NO: 267644 - RNA, 19 nt, Artificial Sequence
  Description of Artificial Sequence: Synthetic oligonucleotide
  Sense strand starting at position 3162 of SEQ ID NO: 3439
gcaauauagcaggagauuc

SEQ ID NO: 267645 - RNA, 19 nt, Artificial Sequence
  Description of Artificial Sequence: Synthetic oligonucleotide
  Antisense strand to SEQ ID NO: 267644
gaaucuccugcuauauugc

SEQ ID NO: 267646 - RNA, 19 nt, Artificial Sequence
  Description of Artificial Sequence: Synthetic oligonucleotide
  Sense strand starting at position 3173 of SEQ ID NO: 3439
ggagauuccuaucucuaua

SEQ ID NO: 267647 - RNA, 19 nt, Artificial Sequence
  Description of Artificial Sequence: Synthetic oligonucleotide
  Antisense strand to SEQ ID NO: 267646
uauagagauaggaaucucc

SEQ ID NO: 267648 - RNA, 19 nt, Artificial Sequence
  Description of Artificial Sequence: Synthetic oligonucleotide
  Sense strand starting at position 3750 of SEQ ID NO: 3439
cuucucugcccucagagau

SEQ ID NO: 267649 - RNA, 19 nt, Artificial Sequence
  Description of Artificial Sequence: Synthetic oligonucleotide
  Antisense strand to SEQ ID NO: 267648
aucucugagggcagagaag

SEQ ID NO: 267650 - RNA, 19 nt, Artificial Sequence
  Description of Artificial Sequence: Synthetic oligonucleotide
  Sense strand starting at position 3951 of SEQ ID NO: 3439
gugaucuuuguauacgaau

SEQ ID NO: 267651 - RNA, 19 nt, Artificial Sequence
  Description of Artificial Sequence: Synthetic oligonucleotide
  Antisense strand to SEQ ID NO: 267650
auucguauacaaagaucac

SEQ ID NO: 267652 - RNA, 19 nt, Artificial Sequence
  Description of Artificial Sequence: Synthetic oligonucleotide
  Sense strand starting at position 113 of SEQ ID NO: 3441
aagaaugugccaggaaauc

SEQ ID NO: 267653 - RNA, 19 nt, Artificial Sequence
  Description of Artificial Sequence: Synthetic oligonucleotide
  Antisense strand to SEQ ID NO: 267652
gauuuccuggcacauucuu

SEQ ID NO: 267654 - RNA, 19 nt, Artificial Sequence
  Description of Artificial Sequence: Synthetic oligonucleotide
  Sense strand starting at position 139 of SEQ ID NO: 3441
acacuugauuaagaugaaa

SEQ ID NO: 267655 - RNA, 19 nt, Artificial Sequence
  Description of Artificial Sequence: Synthetic oligonucleotide
  Antisense strand to SEQ ID NO: 267654
uuucaucuuaaucaagugu

SEQ ID NO: 267656 - RNA, 19 nt, Artificial Sequence
  Description of Artificial Sequence: Synthetic oligonucleotide
  Sense strand starting at position 174 of SEQ ID NO: 3441
aauguucugugaguuuaga

SEQ ID NO: 267657 - RNA, 19 nt, Artificial Sequence
  Description of Artificial Sequence: Synthetic oligonucleotide
  Antisense strand to SEQ ID NO: 267656
ucuaaacucacagaacauu

SEQ ID NO: 267658 - RNA, 19 nt, Artificial Sequence
  Description of Artificial Sequence: Synthetic oligonucleotide
  Sense strand starting at position 231 of SEQ ID NO: 3441
ccaugacucccggauacuu

SEQ ID NO: 267659 - RNA, 19 nt, Artificial Sequence
  Description of Artificial Sequence: Synthetic oligonucleotide
  Antisense strand to SEQ ID NO: 267658
aaguauccgggagucaugg

SEQ ID NO: 267660 - RNA, 19 nt, Artificial Sequence
  Description of Artificial Sequence: Synthetic oligonucleotide
  Sense strand starting at position 302 of SEQ ID NO: 3441
gaguccuuggcccagcaua

SEQ ID NO: 267661 - RNA, 19 nt, Artificial Sequence
  Description of Artificial Sequence: Synthetic oligonucleotide
  Antisense strand to SEQ ID NO: 267660
uaugcugggccaaggacuc

SEQ ID NO: 267662 - RNA, 19 nt, Artificial Sequence
  Description of Artificial Sequence: Synthetic oligonucleotide
  Sense strand starting at position 365 of SEQ ID NO: 3441
gacacagaagugugguuau

SEQ ID NO: 267663 - RNA, 19 nt, Artificial Sequence
  Description of Artificial Sequence: Synthetic oligonucleotide
  Antisense strand to SEQ ID NO: 267662
auaaccacacuucuguguc

SEQ ID NO: 267664 - RNA, 19 nt, Artificial Sequence
  Description of Artificial Sequence: Synthetic oligonucleotide
  Sense strand starting at position 435 of SEQ ID NO: 3441
ugacuuugcugucuacaaa

SEQ ID NO: 267665 - RNA, 19 nt, Artificial Sequence
  Description of Artificial Sequence: Synthetic oligonucleotide
  Antisense strand to SEQ ID NO: 267664
uuuguagacagcaaaguca

SEQ ID NO: 267666 - RNA, 19 nt, Artificial Sequence
  Description of Artificial Sequence: Synthetic oligonucleotide
  Sense strand starting at position 691 of SEQ ID NO: 3441
uuaacaguuuagucaggga

SEQ ID NO: 267667 - RNA, 19 nt, Artificial Sequence
  Description of Artificial Sequence: Synthetic oligonucleotide
  Antisense strand to SEQ ID NO: 267666
ucccugacuaaacuguuaa

SEQ ID NO: 267668 - RNA, 19 nt, Artificial Sequence
  Description of Artificial Sequence: Synthetic oligonucleotide
  Sense strand starting at position 695 of SEQ ID NO: 3441
caguuuagucagggagcaa

SEQ ID NO: 267669 - RNA, 19 nt, Artificial Sequence
  Description of Artificial Sequence: Synthetic oligonucleotide
  Antisense strand to SEQ ID NO: 267668
uugcucccugacuaaacug

SEQ ID NO: 267670 - RNA, 19 nt, Artificial Sequence
  Description of Artificial Sequence: Synthetic oligonucleotide
  Sense strand starting at position 696 of SEQ ID NO: 3441
aguuuagucagggagcaac

SEQ ID NO: 267671 - RNA, 19 nt, Artificial Sequence
  Description of Artificial Sequence: Synthetic oligonucleotide
  Antisense strand to SEQ ID NO: 267670
guugcucccugacuaaacu

SEQ ID NO: 267672 - RNA, 19 nt, Artificial Sequence
  Description of Artificial Sequence: Synthetic oligonucleotide
  Sense strand starting at position 776 of SEQ ID NO: 3441
agagaacacugagauugaa

SEQ ID NO: 267673 - RNA, 19 nt, Artificial Sequence
  Description of Artificial Sequence: Synthetic oligonucleotide
  Antisense strand to SEQ ID NO: 267672
uucaaucucaguguucucu

SEQ ID NO: 267674 - RNA, 19 nt, Artificial Sequence
  Description of Artificial Sequence: Synthetic oligonucleotide
  Sense strand starting at position 848 of SEQ ID NO: 3441
ggaauuuguuucuacauua

SEQ ID NO: 267675 - RNA, 19 nt, Artificial Sequence
  Description of Artificial Sequence: Synthetic oligonucleotide
  Antisense strand to SEQ ID NO: 267674
uaauguagaaacaaauucc

SEQ ID NO: 267676 - RNA, 19 nt, Artificial Sequence
  Description of Artificial Sequence: Synthetic oligonucleotide
  Sense strand starting at position 905 of SEQ ID NO: 3441
ggcagaauuggcuacuaug

SEQ ID NO: 267677 - RNA, 19 nt, Artificial Sequence
  Description of Artificial Sequence: Synthetic oligonucleotide
  Antisense strand to SEQ ID NO: 267676
cauaguagccaauucugcc

SEQ ID NO: 267678 - RNA, 19 nt, Artificial Sequence
  Description of Artificial Sequence: Synthetic oligonucleotide
  Sense strand starting at position 984 of SEQ ID NO: 3441
cugcaauaguaacuauagu

SEQ ID NO: 267679 - RNA, 19 nt, Artificial Sequence
  Description of Artificial Sequence: Synthetic oligonucleotide
  Antisense strand to SEQ ID NO: 267678
acuauaguuacuauugcag

SEQ ID NO: 267680 - RNA, 19 nt, Artificial Sequence
  Description of Artificial Sequence: Synthetic oligonucleotide
  Sense strand starting at position 1127 of SEQ ID NO: 3441
uuguguuaucaauacauga

SEQ ID NO: 267681 - RNA, 19 nt, Artificial Sequence
  Description of Artificial Sequence: Synthetic oligonucleotide
  Antisense strand to SEQ ID NO: 267680
ucauguauugauaacacaa

SEQ ID NO: 267682 - RNA, 19 nt, Artificial Sequence
  Description of Artificial Sequence: Synthetic oligonucleotide
  Sense strand starting at position 1302 of SEQ ID NO: 3441
cugcuauugccgccggaga

SEQ ID NO: 267683 - RNA, 19 nt, Artificial Sequence
  Description of Artificial Sequence: Synthetic oligonucleotide
  Antisense strand to SEQ ID NO: 267682
ucuccggcggcaauagcag

SEQ ID NO: 267684 - RNA, 19 nt, Artificial Sequence
  Description of Artificial Sequence: Synthetic oligonucleotide
  Sense strand starting at position 1322 of SEQ ID NO: 3441
cucacaaugucuuuggacu

SEQ ID NO: 267685 - RNA, 19 nt, Artificial Sequence
  Description of Artificial Sequence: Synthetic oligonucleotide
  Antisense strand to SEQ ID NO: 267684
aguccaaagacauugugag

SEQ ID NO: 267686 - RNA, 19 nt, Artificial Sequence
  Description of Artificial Sequence: Synthetic oligonucleotide
  Sense strand starting at position 1323 of SEQ ID NO: 3441
ucacaaugucuuuggacuu

SEQ ID NO: 267687 - RNA, 19 nt, Artificial Sequence
  Description of Artificial Sequence: Synthetic oligonucleotide
  Antisense strand to SEQ ID NO: 267686
aaguccaaagacauuguga

SEQ ID NO: 267688 - RNA, 19 nt, Artificial Sequence
  Description of Artificial Sequence: Synthetic oligonucleotide
  Sense strand starting at position 1334 of SEQ ID NO: 3441
uuggacuucugaccaaacu

SEQ ID NO: 267689 - RNA, 19 nt, Artificial Sequence
  Description of Artificial Sequence: Synthetic oligonucleotide
  Antisense strand to SEQ ID NO: 267688
aguuuggucagaaguccaa

SEQ ID NO: 267690 - RNA, 19 nt, Artificial Sequence
  Description of Artificial Sequence: Synthetic oligonucleotide
  Sense strand starting at position 1360 of SEQ ID NO: 3441
uugguagugcuccaaacau

SEQ ID NO: 267691 - RNA, 19 nt, Artificial Sequence
  Description of Artificial Sequence: Synthetic oligonucleotide
  Antisense strand to SEQ ID NO: 267690
auguuuggagcacuaccaa

SEQ ID NO: 267692 - RNA, 19 nt, Artificial Sequence
  Description of Artificial Sequence: Synthetic oligonucleotide
  Sense strand starting at position 1473 of SEQ ID NO: 3441
caggacuugugauccuuga

SEQ ID NO: 267693 - RNA, 19 nt, Artificial Sequence
  Description of Artificial Sequence: Synthetic oligonucleotide
  Antisense strand to SEQ ID NO: 267692
ucaaggaucacaaguccug

SEQ ID NO: 267694 - RNA, 19 nt, Artificial Sequence
  Description of Artificial Sequence: Synthetic oligonucleotide
  Sense strand starting at position 1480 of SEQ ID NO: 3441
ugugauccuugacuccaaa

SEQ ID NO: 267695 - RNA, 19 nt, Artificial Sequence
  Description of Artificial Sequence: Synthetic oligonucleotide
  Antisense strand to SEQ ID NO: 267694
uuuggagucaaggaucaca

SEQ ID NO: 267696 - RNA, 19 nt, Artificial Sequence
  Description of Artificial Sequence: Synthetic oligonucleotide
  Sense strand starting at position 1614 of SEQ ID NO: 3441
auggguguaugucuuaaga

SEQ ID NO: 267697 - RNA, 19 nt, Artificial Sequence
  Description of Artificial Sequence: Synthetic oligonucleotide
  Antisense strand to SEQ ID NO: 267696
ucuuaagacauacacccau

SEQ ID NO: 267698 - RNA, 19 nt, Artificial Sequence
  Description of Artificial Sequence: Synthetic oligonucleotide
  Sense strand starting at position 1695 of SEQ ID NO: 3441
ccaagaauaugagaaggaa

SEQ ID NO: 267699 - RNA, 19 nt, Artificial Sequence
  Description of Artificial Sequence: Synthetic oligonucleotide
  Antisense strand to SEQ ID NO: 267698
uuccuucucauauucuugg

SEQ ID NO: 267700 - RNA, 19 nt, Artificial Sequence
  Description of Artificial Sequence: Synthetic oligonucleotide
  Sense strand starting at position 2203 of SEQ ID NO: 3441
gcaggauccugaguccuga

SEQ ID NO: 267701 - RNA, 19 nt, Artificial Sequence
  Description of Artificial Sequence: Synthetic oligonucleotide
  Antisense strand to SEQ ID NO: 267700
ucaggacucaggauccugc

SEQ ID NO: 267702 - RNA, 19 nt, Artificial Sequence
  Description of Artificial Sequence: Synthetic oligonucleotide
  Sense strand starting at position 2216 of SEQ ID NO: 3441
uccugaacagcguaacauu

SEQ ID NO: 267703 - RNA, 19 nt, Artificial Sequence
  Description of Artificial Sequence: Synthetic oligonucleotide
  Antisense strand to SEQ ID NO: 267702
aauguuacgcuguucagga

SEQ ID NO: 267704 - RNA, 19 nt, Artificial Sequence
  Description of Artificial Sequence: Synthetic oligonucleotide
  Sense strand starting at position 2311 of SEQ ID NO: 3441
cucagccugcaguauuaau

SEQ ID NO: 267705 - RNA, 19 nt, Artificial Sequence
  Description of Artificial Sequence: Synthetic oligonucleotide
  Antisense strand to SEQ ID NO: 267704
auuaauacugcaggcugag

SEQ ID NO: 267706 - RNA, 19 nt, Artificial Sequence
  Description of Artificial Sequence: Synthetic oligonucleotide
  Sense strand starting at position 2401 of SEQ ID NO: 3441
cucucugaggguuagcuaa

SEQ ID NO: 267707 - RNA, 19 nt, Artificial Sequence
  Description of Artificial Sequence: Synthetic oligonucleotide
  Antisense strand to SEQ ID NO: 267706
uuagcuaacccucagagag

SEQ ID NO: 267708 - RNA, 19 nt, Artificial Sequence
  Description of Artificial Sequence: Synthetic oligonucleotide
  Sense strand starting at position 2403 of SEQ ID NO: 3441
cucugaggguuagcuaauu

SEQ ID NO: 267709 - RNA, 19 nt, Artificial Sequence
  Description of Artificial Sequence: Synthetic oligonucleotide
  Antisense strand to SEQ ID NO: 267708
aauuagcuaacccucagag

SEQ ID NO: 267710 - RNA, 19 nt, Artificial Sequence
  Description of Artificial Sequence: Synthetic oligonucleotide
  Sense strand starting at position 2448 of SEQ ID NO: 3441
ugagcacuccuuuaauaug

SEQ ID NO: 267711 - RNA, 19 nt, Artificial Sequence
  Description of Artificial Sequence: Synthetic oligonucleotide
  Antisense strand to SEQ ID NO: 267710
cauauuaaaggagugcuca

SEQ ID NO: 267712 - RNA, 19 nt, Artificial Sequence
  Description of Artificial Sequence: Synthetic oligonucleotide
  Sense strand starting at position 2508 of SEQ ID NO: 3441
guuacccaguucucaaaua

SEQ ID NO: 267713 - RNA, 19 nt, Artificial Sequence
  Description of Artificial Sequence: Synthetic oligonucleotide
  Antisense strand to SEQ ID NO: 267712
uauuugagaacuggguaac

SEQ ID NO: 267714 - RNA, 19 nt, Artificial Sequence
  Description of Artificial Sequence: Synthetic oligonucleotide
  Sense strand starting at position 2791 of SEQ ID NO: 3441
accacagcuugaguucuau

SEQ ID NO: 267715 - RNA, 19 nt, Artificial Sequence
  Description of Artificial Sequence: Synthetic oligonucleotide
  Antisense strand to SEQ ID NO: 267714
auagaacucaagcuguggu

SEQ ID NO: 267716 - RNA, 19 nt, Artificial Sequence
  Description of Artificial Sequence: Synthetic oligonucleotide
  Sense strand starting at position 2834 of SEQ ID NO: 3441
aguugccaaucauuagauu

SEQ ID NO: 267717 - RNA, 19 nt, Artificial Sequence
  Description of Artificial Sequence: Synthetic oligonucleotide
  Antisense strand to SEQ ID NO: 267716
aaucuaaugauuggcaacu

SEQ ID NO: 267718 - RNA, 19 nt, Artificial Sequence
  Description of Artificial Sequence: Synthetic oligonucleotide
  Sense strand starting at position 2863 of SEQ ID NO: 3441
ggccuauugauguacgaca

SEQ ID NO: 267719 - RNA, 19 nt, Artificial Sequence
  Description of Artificial Sequence: Synthetic oligonucleotide
  Antisense strand to SEQ ID NO: 267718
ugucguacaucaauaggcc

SEQ ID NO: 267720 - RNA, 19 nt, Artificial Sequence
  Description of Artificial Sequence: Synthetic oligonucleotide
  Sense strand starting at position 2876 of SEQ ID NO: 3441
acgacagccauuugcuaga

SEQ ID NO: 267721 - RNA, 19 nt, Artificial Sequence
  Description of Artificial Sequence: Synthetic oligonucleotide
  Antisense strand to SEQ ID NO: 267720
ucuagcaaauggcugucgu

SEQ ID NO: 267722 - RNA, 19 nt, Artificial Sequence
  Description of Artificial Sequence: Synthetic oligonucleotide
  Sense strand starting at position 3168 of SEQ ID NO: 3441
ggcaauauagcaggagauu

SEQ ID NO: 267723 - RNA, 19 nt, Artificial Sequence
  Description of Artificial Sequence: Synthetic oligonucleotide
  Antisense strand to SEQ ID NO: 267722
aaucuccugcuauauugcc

SEQ ID NO: 267724 - RNA, 19 nt, Artificial Sequence
  Description of Artificial Sequence: Synthetic oligonucleotide
  Sense strand starting at position 3169 of SEQ ID NO: 3441
gcaauauagcaggagauuc

SEQ ID NO: 267725 - RNA, 19 nt, Artificial Sequence
  Description of Artificial Sequence: Synthetic oligonucleotide
  Antisense strand to SEQ ID NO: 267724
gaaucuccugcuauauugc

SEQ ID NO: 267726 - RNA, 19 nt, Artificial Sequence
  Description of Artificial Sequence: Synthetic oligonucleotide
  Sense strand starting at position 3180 of SEQ ID NO: 3441
ggagauuccuaucucuaua

SEQ ID NO: 267727 - RNA, 19 nt, Artificial Sequence
  Description of Artificial Sequence: Synthetic oligonucleotide
  Antisense strand to SEQ ID NO: 267726
uauagagauaggaaucucc

SEQ ID NO: 267728 - RNA, 19 nt, Artificial Sequence
  Description of Artificial Sequence: Synthetic oligonucleotide
  Sense strand starting at position 3757 of SEQ ID NO: 3441
cuucucugcccucagagau

SEQ ID NO: 267729 - RNA, 19 nt, Artificial Sequence
  Description of Artificial Sequence: Synthetic oligonucleotide
  Antisense strand to SEQ ID NO: 267728
aucucugagggcagagaag

SEQ ID NO: 267730 - RNA, 19 nt, Artificial Sequence
  Description of Artificial Sequence: Synthetic oligonucleotide
  Sense strand starting at position 3958 of SEQ ID NO: 3441
gugaucuuuguauacgaau

SEQ ID NO: 267731 - RNA, 19 nt, Artificial Sequence
  Description of Artificial Sequence: Synthetic oligonucleotide
  Antisense strand to SEQ ID NO: 267730
auucguauacaaagaucac

SEQ ID NO: 267732 - RNA, 19 nt, Artificial Sequence
  Description of Artificial Sequence: Synthetic oligonucleotide
  Sense strand starting at position 654 of SEQ ID NO: 3442
gagcgaaguguguagcuca

SEQ ID NO: 267733 - RNA, 19 nt, Artificial Sequence
  Description of Artificial Sequence: Synthetic oligonucleotide
  Antisense strand to SEQ ID NO: 267732
ugagcuacacacuucgcuc

SEQ ID NO: 267734 - RNA, 19 nt, Artificial Sequence
  Description of Artificial Sequence: Synthetic oligonucleotide
  Sense strand starting at position 657 of SEQ ID NO: 3442
cgaaguguguagcucaagu

SEQ ID NO: 267735 - RNA, 19 nt, Artificial Sequence
  Description of Artificial Sequence: Synthetic oligonucleotide
  Antisense strand to SEQ ID NO: 267734
acuugagcuacacacuucg

SEQ ID NO: 267736 - RNA, 19 nt, Artificial Sequence
  Description of Artificial Sequence: Synthetic oligonucleotide
  Sense strand starting at position 829 of SEQ ID NO: 3442
ggaagcgucucugucacua

SEQ ID NO: 267737 - RNA, 19 nt, Artificial Sequence
  Description of Artificial Sequence: Synthetic oligonucleotide
  Antisense strand to SEQ ID NO: 267736
uagugacagagacgcuucc

SEQ ID NO: 267738 - RNA, 19 nt, Artificial Sequence
  Description of Artificial Sequence: Synthetic oligonucleotide
  Sense strand starting at position 1089 of SEQ ID NO: 3442
acuccagccgugugugauu

SEQ ID NO: 267739 - RNA, 19 nt, Artificial Sequence
  Description of Artificial Sequence: Synthetic oligonucleotide
  Antisense strand to SEQ ID NO: 267738
aaucacacacggcuggagu

SEQ ID NO: 267740 - RNA, 19 nt, Artificial Sequence
  Description of Artificial Sequence: Synthetic oligonucleotide
  Sense strand starting at position 1098 of SEQ ID NO: 3442
gugugugauucucacacuc

SEQ ID NO: 267741 - RNA, 19 nt, Artificial Sequence
  Description of Artificial Sequence: Synthetic oligonucleotide
  Antisense strand to SEQ ID NO: 267740
gagugugagaaucacacac

SEQ ID NO: 267742 - RNA, 19 nt, Artificial Sequence
  Description of Artificial Sequence: Synthetic oligonucleotide
  Sense strand starting at position 1100 of SEQ ID NO: 3442
gugugauucucacacucag

SEQ ID NO: 267743 - RNA, 19 nt, Artificial Sequence
  Description of Artificial Sequence: Synthetic oligonucleotide
  Antisense strand to SEQ ID NO: 267742
cugagugugagaaucacac

SEQ ID NO: 267744 - RNA, 19 nt, Artificial Sequence
  Description of Artificial Sequence: Synthetic oligonucleotide
  Sense strand starting at position 1996 of SEQ ID NO: 3442
ggagcugugaucuggagag

SEQ ID NO: 267745 - RNA, 19 nt, Artificial Sequence
  Description of Artificial Sequence: Synthetic oligonucleotide
  Antisense strand to SEQ ID NO: 267744
cucuccagaucacagcucc

SEQ ID NO: 267746 - RNA, 19 nt, Artificial Sequence
  Description of Artificial Sequence: Synthetic oligonucleotide
  Sense strand starting at position 2068 of SEQ ID NO: 3442
gcagaagccucggccagau

SEQ ID NO: 267747 - RNA, 19 nt, Artificial Sequence
  Description of Artificial Sequence: Synthetic oligonucleotide
  Antisense strand to SEQ ID NO: 267746
aucuggccgaggcuucugc

SEQ ID NO: 267748 - RNA, 19 nt, Artificial Sequence
  Description of Artificial Sequence: Synthetic oligonucleotide
  Sense strand starting at position 2143 of SEQ ID NO: 3442
uuauaagcacagugauaag

SEQ ID NO: 267749 - RNA, 19 nt, Artificial Sequence
  Description of Artificial Sequence: Synthetic oligonucleotide
  Antisense strand to SEQ ID NO: 267748
cuuaucacugugcuuauaa

SEQ ID NO: 267750 - RNA, 19 nt, Artificial Sequence
  Description of Artificial Sequence: Synthetic oligonucleotide
  Sense strand starting at position 2189 of SEQ ID NO: 3442
uaguuucccugccuugaga

SEQ ID NO: 267751 - RNA, 19 nt, Artificial Sequence
  Description of Artificial Sequence: Synthetic oligonucleotide
  Antisense strand to SEQ ID NO: 267750
ucucaaggcagggaaacua

SEQ ID NO: 267752 - RNA, 19 nt, Artificial Sequence
  Description of Artificial Sequence: Synthetic oligonucleotide
  Sense strand starting at position 2203 of SEQ ID NO: 3442
ugagaugcgcugugauuac

SEQ ID NO: 267753 - RNA, 19 nt, Artificial Sequence
  Description of Artificial Sequence: Synthetic oligonucleotide
  Antisense strand to SEQ ID NO: 267752
guaaucacagcgcaucuca

SEQ ID NO: 267754 - RNA, 19 nt, Artificial Sequence
  Description of Artificial Sequence: Synthetic oligonucleotide
  Sense strand starting at position 2207 of SEQ ID NO: 3442
augcgcugugauuaccaau

SEQ ID NO: 267755 - RNA, 19 nt, Artificial Sequence
  Description of Artificial Sequence: Synthetic oligonucleotide
  Antisense strand to SEQ ID NO: 267754
auugguaaucacagcgcau

SEQ ID NO: 267756 - RNA, 19 nt, Artificial Sequence
  Description of Artificial Sequence: Synthetic oligonucleotide
  Sense strand starting at position 2383 of SEQ ID NO: 3442
gucucuaaccuuggacuuu

SEQ ID NO: 267757 - RNA, 19 nt, Artificial Sequence
  Description of Artificial Sequence: Synthetic oligonucleotide
  Antisense strand to SEQ ID NO: 267756
aaaguccaagguuagagac

SEQ ID NO: 267758 - RNA, 19 nt, Artificial Sequence
  Description of Artificial Sequence: Synthetic oligonucleotide
  Sense strand starting at position 2404 of SEQ ID NO: 3442
guauauaauucuguguuuc

SEQ ID NO: 267759 - RNA, 19 nt, Artificial Sequence
  Description of Artificial Sequence: Synthetic oligonucleotide
  Antisense strand to SEQ ID NO: 267758
gaaacacagaauuauauac

SEQ ID NO: 267760 - RNA, 19 nt, Artificial Sequence
  Description of Artificial Sequence: Synthetic oligonucleotide
  Sense strand starting at position 2406 of SEQ ID NO: 3442
auauaauucuguguuucca

SEQ ID NO: 267761 - RNA, 19 nt, Artificial Sequence
  Description of Artificial Sequence: Synthetic oligonucleotide
  Antisense strand to SEQ ID NO: 267760
uggaaacacagaauuauau

SEQ ID NO: 267762 - RNA, 19 nt, Artificial Sequence
  Description of Artificial Sequence: Synthetic oligonucleotide
  Sense strand starting at position 2408 of SEQ ID NO: 3442
auaauucuguguuuccaua

SEQ ID NO: 267763 - RNA, 19 nt, Artificial Sequence
  Description of Artificial Sequence: Synthetic oligonucleotide
  Antisense strand to SEQ ID NO: 267762
uauggaaacacagaauuau

SEQ ID NO: 267764 - RNA, 19 nt, Artificial Sequence
  Description of Artificial Sequence: Synthetic oligonucleotide
  Sense strand starting at position 2442 of SEQ ID NO: 3442
ucuguugugucauuuauuc

SEQ ID NO: 267765 - RNA, 19 nt, Artificial Sequence
  Description of Artificial Sequence: Synthetic oligonucleotide
  Antisense strand to SEQ ID NO: 267764
gaauaaaugacacaacaga

SEQ ID NO: 267766 - RNA, 19 nt, Artificial Sequence
  Description of Artificial Sequence: Synthetic oligonucleotide
  Sense strand starting at position 2469 of SEQ ID NO: 3442
gacuguaaauuccugagca

SEQ ID NO: 267767 - RNA, 19 nt, Artificial Sequence
  Description of Artificial Sequence: Synthetic oligonucleotide
  Antisense strand to SEQ ID NO: 267766
ugcucaggaauuuacaguc

SEQ ID NO: 267768 - RNA, 19 nt, Artificial Sequence
  Description of Artificial Sequence: Synthetic oligonucleotide
  Sense strand starting at position 2470 of SEQ ID NO: 3442
acuguaaauuccugagcau

SEQ ID NO: 267769 - RNA, 19 nt, Artificial Sequence
  Description of Artificial Sequence: Synthetic oligonucleotide
  Antisense strand to SEQ ID NO: 267768
augcucaggaauuuacagu

SEQ ID NO: 267770 - RNA, 19 nt, Artificial Sequence
  Description of Artificial Sequence: Synthetic oligonucleotide
  Sense strand starting at position 2471 of SEQ ID NO: 3442
cuguaaauuccugagcaua

SEQ ID NO: 267771 - RNA, 19 nt, Artificial Sequence
  Description of Artificial Sequence: Synthetic oligonucleotide
  Antisense strand to SEQ ID NO: 267770
uaugcucaggaauuuacag

SEQ ID NO: 267772 - RNA, 19 nt, Artificial Sequence
  Description of Artificial Sequence: Synthetic oligonucleotide
  Sense strand starting at position 2473 of SEQ ID NO: 3442
guaaauuccugagcauaag

SEQ ID NO: 267773 - RNA, 19 nt, Artificial Sequence
  Description of Artificial Sequence: Synthetic oligonucleotide
  Antisense strand to SEQ ID NO: 267772
cuuaugcucaggaauuuac

SEQ ID NO: 267774 - RNA, 19 nt, Artificial Sequence
  Description of Artificial Sequence: Synthetic oligonucleotide
  Sense strand starting at position 2694 of SEQ ID NO: 3442
uuuguauugggucacuaug

SEQ ID NO: 267775 - RNA, 19 nt, Artificial Sequence
  Description of Artificial Sequence: Synthetic oligonucleotide
  Antisense strand to SEQ ID NO: 267774
cauagugacccaauacaaa

SEQ ID NO: 267776 - RNA, 19 nt, Artificial Sequence
  Description of Artificial Sequence: Synthetic oligonucleotide
  Sense strand starting at position 2696 of SEQ ID NO: 3442
uguauugggucacuauguu

SEQ ID NO: 267777 - RNA, 19 nt, Artificial Sequence
  Description of Artificial Sequence: Synthetic oligonucleotide
  Antisense strand to SEQ ID NO: 267776
aacauagugacccaauaca

SEQ ID NO: 267778 - RNA, 19 nt, Artificial Sequence
  Description of Artificial Sequence: Synthetic oligonucleotide
  Sense strand starting at position 2752 of SEQ ID NO: 3442
aaucaaguccuucguugua

SEQ ID NO: 267779 - RNA, 19 nt, Artificial Sequence
  Description of Artificial Sequence: Synthetic oligonucleotide
  Antisense strand to SEQ ID NO: 267778
uacaacgaaggacuugauu

SEQ ID NO: 267780 - RNA, 19 nt, Artificial Sequence
  Description of Artificial Sequence: Synthetic oligonucleotide
  Sense strand starting at position 2754 of SEQ ID NO: 3442
ucaaguccuucguuguaau

SEQ ID NO: 267781 - RNA, 19 nt, Artificial Sequence
  Description of Artificial Sequence: Synthetic oligonucleotide
  Antisense strand to SEQ ID NO: 267780
auuacaacgaaggacuuga

SEQ ID NO: 267782 - RNA, 19 nt, Artificial Sequence
  Description of Artificial Sequence: Synthetic oligonucleotide
  Sense strand starting at position 2755 of SEQ ID NO: 3442
caaguccuucguuguaaua

SEQ ID NO: 267783 - RNA, 19 nt, Artificial Sequence
  Description of Artificial Sequence: Synthetic oligonucleotide
  Antisense strand to SEQ ID NO: 267782
uauuacaacgaaggacuug

SEQ ID NO: 267784 - RNA, 19 nt, Artificial Sequence
  Description of Artificial Sequence: Synthetic oligonucleotide
  Sense strand starting at position 2757 of SEQ ID NO: 3442
aguccuucguuguaauaua

SEQ ID NO: 267785 - RNA, 19 nt, Artificial Sequence
  Description of Artificial Sequence: Synthetic oligonucleotide
  Antisense strand to SEQ ID NO: 267784
uauauuacaacgaaggacu

SEQ ID NO: 267786 - RNA, 19 nt, Artificial Sequence
  Description of Artificial Sequence: Synthetic oligonucleotide
  Sense strand starting at position 2783 of SEQ ID NO: 3442
gcagauaaccucugucacu

SEQ ID NO: 267787 - RNA, 19 nt, Artificial Sequence
  Description of Artificial Sequence: Synthetic oligonucleotide
  Antisense strand to SEQ ID NO: 267786
agugacagagguuaucugc

SEQ ID NO: 267788 - RNA, 19 nt, Artificial Sequence
  Description of Artificial Sequence: Synthetic oligonucleotide
  Sense strand starting at position 3366 of SEQ ID NO: 3442
uggguuaguacaugaacua

SEQ ID NO: 267789 - RNA, 19 nt, Artificial Sequence
  Description of Artificial Sequence: Synthetic oligonucleotide
  Antisense strand to SEQ ID NO: 267788
uaguucauguacuaaccca

SEQ ID NO: 267790 - RNA, 19 nt, Artificial Sequence
  Description of Artificial Sequence: Synthetic oligonucleotide
  Sense strand starting at position 3732 of SEQ ID NO: 3442
cauacugaacucugugagu

SEQ ID NO: 267791 - RNA, 19 nt, Artificial Sequence
  Description of Artificial Sequence: Synthetic oligonucleotide
  Antisense strand to SEQ ID NO: 267790
acucacagaguucaguaug

SEQ ID NO: 267792 - RNA, 19 nt, Artificial Sequence
  Description of Artificial Sequence: Synthetic oligonucleotide
  Sense strand starting at position 3734 of SEQ ID NO: 3442
uacugaacucugugaguca

SEQ ID NO: 267793 - RNA, 19 nt, Artificial Sequence
  Description of Artificial Sequence: Synthetic oligonucleotide
  Antisense strand to SEQ ID NO: 267792
ugacucacagaguucagua

SEQ ID NO: 267794 - RNA, 19 nt, Artificial Sequence
  Description of Artificial Sequence: Synthetic oligonucleotide
  Sense strand starting at position 3735 of SEQ ID NO: 3442
acugaacucugugagucau

SEQ ID NO: 267795 - RNA, 19 nt, Artificial Sequence
  Description of Artificial Sequence: Synthetic oligonucleotide
  Antisense strand to SEQ ID NO: 267794
augacucacagaguucagu

SEQ ID NO: 267796 - RNA, 19 nt, Artificial Sequence
  Description of Artificial Sequence: Synthetic oligonucleotide
  Sense strand starting at position 3737 of SEQ ID NO: 3442
ugaacucugugagucauca

SEQ ID NO: 267797 - RNA, 19 nt, Artificial Sequence
  Description of Artificial Sequence: Synthetic oligonucleotide
  Antisense strand to SEQ ID NO: 267796
ugaugacucacagaguuca

SEQ ID NO: 267798 - RNA, 19 nt, Artificial Sequence
  Description of Artificial Sequence: Synthetic oligonucleotide
  Sense strand starting at position 3741 of SEQ ID NO: 3442
cucugugagucaucaggga

SEQ ID NO: 267799 - RNA, 19 nt, Artificial Sequence
  Description of Artificial Sequence: Synthetic oligonucleotide
  Antisense strand to SEQ ID NO: 267798
ucccugaugacucacagag

SEQ ID NO: 267800 - RNA, 19 nt, Artificial Sequence
  Description of Artificial Sequence: Synthetic oligonucleotide
  Sense strand starting at position 3773 of SEQ ID NO: 3442
aucacaucgugauccacua

SEQ ID NO: 267801 - RNA, 19 nt, Artificial Sequence
  Description of Artificial Sequence: Synthetic oligonucleotide
  Antisense strand to SEQ ID NO: 267800
uaguggaucacgaugugau

SEQ ID NO: 267802 - RNA, 19 nt, Artificial Sequence
  Description of Artificial Sequence: Synthetic oligonucleotide
  Sense strand starting at position 69 of SEQ ID NO: 3443
ggcaucgauuuccaagaag

SEQ ID NO: 267803 - RNA, 19 nt, Artificial Sequence
  Description of Artificial Sequence: Synthetic oligonucleotide
  Antisense strand to SEQ ID NO: 267802
cuucuuggaaaucgaugcc

SEQ ID NO: 267804 - RNA, 19 nt, Artificial Sequence
  Description of Artificial Sequence: Synthetic oligonucleotide
  Sense strand starting at position 132 of SEQ ID NO: 3443
uccacaucucucugugaga

SEQ ID NO: 267805 - RNA, 19 nt, Artificial Sequence
  Description of Artificial Sequence: Synthetic oligonucleotide
  Antisense strand to SEQ ID NO: 267804
ucucacagagagaugugga

SEQ ID NO: 267806 - RNA, 19 nt, Artificial Sequence
  Description of Artificial Sequence: Synthetic oligonucleotide
  Sense strand starting at position 133 of SEQ ID NO: 3443
ccacaucucucugugagau

SEQ ID NO: 267807 - RNA, 19 nt, Artificial Sequence
  Description of Artificial Sequence: Synthetic oligonucleotide
  Antisense strand to SEQ ID NO: 267806
aucucacagagagaugugg

SEQ ID NO: 267808 - RNA, 19 nt, Artificial Sequence
  Description of Artificial Sequence: Synthetic oligonucleotide
  Sense strand starting at position 134 of SEQ ID NO: 3443
cacaucucucugugagaug

SEQ ID NO: 267809 - RNA, 19 nt, Artificial Sequence
  Description of Artificial Sequence: Synthetic oligonucleotide
  Antisense strand to SEQ ID NO: 267808
caucucacagagagaugug

SEQ ID NO: 267810 - RNA, 19 nt, Artificial Sequence
  Description of Artificial Sequence: Synthetic oligonucleotide
  Sense strand starting at position 137 of SEQ ID NO: 3443
aucucucugugagauggaa

SEQ ID NO: 267811 - RNA, 19 nt, Artificial Sequence
  Description of Artificial Sequence: Synthetic oligonucleotide
  Antisense strand to SEQ ID NO: 267810
uuccaucucacagagagau

SEQ ID NO: 267812 - RNA, 19 nt, Artificial Sequence
  Description of Artificial Sequence: Synthetic oligonucleotide
  Sense strand starting at position 139 of SEQ ID NO: 3443
cucucugugagauggaaga

SEQ ID NO: 267813 - RNA, 19 nt, Artificial Sequence
  Description of Artificial Sequence: Synthetic oligonucleotide
  Antisense strand to SEQ ID NO: 267812
ucuuccaucucacagagag

SEQ ID NO: 267814 - RNA, 19 nt, Artificial Sequence
  Description of Artificial Sequence: Synthetic oligonucleotide
  Sense strand starting at position 245 of SEQ ID NO: 3443
ccugguuuagcgcuguaau

SEQ ID NO: 267815 - RNA, 19 nt, Artificial Sequence
  Description of Artificial Sequence: Synthetic oligonucleotide
  Antisense strand to SEQ ID NO: 267814
auuacagcgcuaaaccagg

SEQ ID NO: 267816 - RNA, 19 nt, Artificial Sequence
  Description of Artificial Sequence: Synthetic oligonucleotide
  Sense strand starting at position 248 of SEQ ID NO: 3443
gguuuagcgcuguaaugaa

SEQ ID NO: 267817 - RNA, 19 nt, Artificial Sequence
  Description of Artificial Sequence: Synthetic oligonucleotide
  Antisense strand to SEQ ID NO: 267816
uucauuacagcgcuaaacc

SEQ ID NO: 267818 - RNA, 19 nt, Artificial Sequence
  Description of Artificial Sequence: Synthetic oligonucleotide
  Sense strand starting at position 376 of SEQ ID NO: 3443
aucuuaguggcaggaagau

SEQ ID NO: 267819 - RNA, 19 nt, Artificial Sequence
  Description of Artificial Sequence: Synthetic oligonucleotide
  Antisense strand to SEQ ID NO: 267818
aucuuccugccacuaagau

SEQ ID NO: 267820 - RNA, 19 nt, Artificial Sequence
  Description of Artificial Sequence: Synthetic oligonucleotide
  Sense strand starting at position 400 of SEQ ID NO: 3443
uagugugugcgcuugaaug

SEQ ID NO: 267821 - RNA, 19 nt, Artificial Sequence
  Description of Artificial Sequence: Synthetic oligonucleotide
  Antisense strand to SEQ ID NO: 267820
cauucaagcgcacacacua

SEQ ID NO: 267822 - RNA, 19 nt, Artificial Sequence
  Description of Artificial Sequence: Synthetic oligonucleotide
  Sense strand starting at position 437 of SEQ ID NO: 3443
gagggcagcucuguguuua

SEQ ID NO: 267823 - RNA, 19 nt, Artificial Sequence
  Description of Artificial Sequence: Synthetic oligonucleotide
  Antisense strand to SEQ ID NO: 267822
uaaacacagagcugcccuc

SEQ ID NO: 267824 - RNA, 19 nt, Artificial Sequence
  Description of Artificial Sequence: Synthetic oligonucleotide
  Sense strand starting at position 442 of SEQ ID NO: 3443
cagcucuguguuuaaugca

SEQ ID NO: 267825 - RNA, 19 nt, Artificial Sequence
  Description of Artificial Sequence: Synthetic oligonucleotide
  Antisense strand to SEQ ID NO: 267824
ugcauuaaacacagagcug

SEQ ID NO: 267826 - RNA, 19 nt, Artificial Sequence
  Description of Artificial Sequence: Synthetic oligonucleotide
  Sense strand starting at position 461 of SEQ ID NO: 3443
agccauaauuaguugguca

SEQ ID NO: 267827 - RNA, 19 nt, Artificial Sequence
  Description of Artificial Sequence: Synthetic oligonucleotide
  Antisense strand to SEQ ID NO: 267826
ugaccaacuaauuauggcu

SEQ ID NO: 267828 - RNA, 19 nt, Artificial Sequence
  Description of Artificial Sequence: Synthetic oligonucleotide
  Sense strand starting at position 463 of SEQ ID NO: 3443
ccauaauuaguuggucaau

SEQ ID NO: 267829 - RNA, 19 nt, Artificial Sequence
  Description of Artificial Sequence: Synthetic oligonucleotide
  Antisense strand to SEQ ID NO: 267828
auugaccaacuaauuaugg

SEQ ID NO: 267830 - RNA, 19 nt, Artificial Sequence
  Description of Artificial Sequence: Synthetic oligonucleotide
  Sense strand starting at position 465 of SEQ ID NO: 3443
auaauuaguuggucaauuc

SEQ ID NO: 267831 - RNA, 19 nt, Artificial Sequence
  Description of Artificial Sequence: Synthetic oligonucleotide
  Antisense strand to SEQ ID NO: 267830
gaauugaccaacuaauuau

SEQ ID NO: 267832 - RNA, 19 nt, Artificial Sequence
  Description of Artificial Sequence: Synthetic oligonucleotide
  Sense strand starting at position 524 of SEQ ID NO: 3443
agagaugucuugcugggaa

SEQ ID NO: 267833 - RNA, 19 nt, Artificial Sequence
  Description of Artificial Sequence: Synthetic oligonucleotide
  Antisense strand to SEQ ID NO: 267832
uucccagcaagacaucucu

SEQ ID NO: 267834 - RNA, 19 nt, Artificial Sequence
  Description of Artificial Sequence: Synthetic oligonucleotide
  Sense strand starting at position 526 of SEQ ID NO: 3443
agaugucuugcugggaacu

SEQ ID NO: 267835 - RNA, 19 nt, Artificial Sequence
  Description of Artificial Sequence: Synthetic oligonucleotide
  Antisense strand to SEQ ID NO: 267834
aguucccagcaagacaucu

SEQ ID NO: 267836 - RNA, 19 nt, Artificial Sequence
  Description of Artificial Sequence: Synthetic oligonucleotide
  Sense strand starting at position 527 of SEQ ID NO: 3443
gaugucuugcugggaacua

SEQ ID NO: 267837 - RNA, 19 nt, Artificial Sequence
  Description of Artificial Sequence: Synthetic oligonucleotide
  Antisense strand to SEQ ID NO: 267836
uaguucccagcaagacauc

SEQ ID NO: 267838 - RNA, 19 nt, Artificial Sequence
  Description of Artificial Sequence: Synthetic oligonucleotide
  Sense strand starting at position 539 of SEQ ID NO: 3443
ggaacuacuuuagaacuaa

SEQ ID NO: 267839 - RNA, 19 nt, Artificial Sequence
  Description of Artificial Sequence: Synthetic oligonucleotide
  Antisense strand to SEQ ID NO: 267838
uuaguucuaaaguaguucc

SEQ ID NO: 267840 - RNA, 19 nt, Artificial Sequence
  Description of Artificial Sequence: Synthetic oligonucleotide
  Sense strand starting at position 553 of SEQ ID NO: 3443
acuaauuaccugggaaguu

SEQ ID NO: 267841 - RNA, 19 nt, Artificial Sequence
  Description of Artificial Sequence: Synthetic oligonucleotide
  Antisense strand to SEQ ID NO: 267840
aacuucccagguaauuagu

SEQ ID NO: 267842 - RNA, 19 nt, Artificial Sequence
  Description of Artificial Sequence: Synthetic oligonucleotide
  Sense strand starting at position 612 of SEQ ID NO: 3443
gguucuaaaugaucaagac

SEQ ID NO: 267843 - RNA, 19 nt, Artificial Sequence
  Description of Artificial Sequence: Synthetic oligonucleotide
  Antisense strand to SEQ ID NO: 267842
gucuugaucauuuagaacc

SEQ ID NO: 267844 - RNA, 19 nt, Artificial Sequence
  Description of Artificial Sequence: Synthetic oligonucleotide
  Sense strand starting at position 640 of SEQ ID NO: 3443
cgucucugcugauuaaguu

SEQ ID NO: 267845 - RNA, 19 nt, Artificial Sequence
  Description of Artificial Sequence: Synthetic oligonucleotide
  Antisense strand to SEQ ID NO: 267844
aacuuaaucagcagagacg

SEQ ID NO: 267846 - RNA, 19 nt, Artificial Sequence
  Description of Artificial Sequence: Synthetic oligonucleotide
  Sense strand starting at position 641 of SEQ ID NO: 3443
gucucugcugauuaaguua

SEQ ID NO: 267847 - RNA, 19 nt, Artificial Sequence
  Description of Artificial Sequence: Synthetic oligonucleotide
  Antisense strand to SEQ ID NO: 267846
uaacuuaaucagcagagac

SEQ ID NO: 267848 - RNA, 19 nt, Artificial Sequence
  Description of Artificial Sequence: Synthetic oligonucleotide
  Sense strand starting at position 644 of SEQ ID NO: 3443
ucugcugauuaaguuaauu

SEQ ID NO: 267849 - RNA, 19 nt, Artificial Sequence
  Description of Artificial Sequence: Synthetic oligonucleotide
  Antisense strand to SEQ ID NO: 267848
aauuaacuuaaucagcaga

SEQ ID NO: 267850 - RNA, 19 nt, Artificial Sequence
  Description of Artificial Sequence: Synthetic oligonucleotide
  Sense strand starting at position 840 of SEQ ID NO: 3443
guguuuagacuuuguggaa

SEQ ID NO: 267851 - RNA, 19 nt, Artificial Sequence
  Description of Artificial Sequence: Synthetic oligonucleotide
  Antisense strand to SEQ ID NO: 267850
uuccacaaagucuaaacac

SEQ ID NO: 267852 - RNA, 19 nt, Artificial Sequence
  Description of Artificial Sequence: Synthetic oligonucleotide
  Sense strand starting at position 841 of SEQ ID NO: 3443
uguuuagacuuuguggaag

SEQ ID NO: 267853 - RNA, 19 nt, Artificial Sequence
  Description of Artificial Sequence: Synthetic oligonucleotide
  Antisense strand to SEQ ID NO: 267852
cuuccacaaagucuaaaca

SEQ ID NO: 267854 - RNA, 19 nt, Artificial Sequence
  Description of Artificial Sequence: Synthetic oligonucleotide
  Sense strand starting at position 853 of SEQ ID NO: 3443
guggaagugcgugcguaua

SEQ ID NO: 267855 - RNA, 19 nt, Artificial Sequence
  Description of Artificial Sequence: Synthetic oligonucleotide
  Antisense strand to SEQ ID NO: 267854
uauacgcacgcacuuccac

SEQ ID NO: 267856 - RNA, 19 nt, Artificial Sequence
  Description of Artificial Sequence: Synthetic oligonucleotide
  Sense strand starting at position 919 of SEQ ID NO: 3443
uuaugaaucacagggcuga

SEQ ID NO: 267857 - RNA, 19 nt, Artificial Sequence
  Description of Artificial Sequence: Synthetic oligonucleotide
  Antisense strand to SEQ ID NO: 267856
ucagcccugugauucauaa

SEQ ID NO: 267858 - RNA, 19 nt, Artificial Sequence
  Description of Artificial Sequence: Synthetic oligonucleotide
  Sense strand starting at position 985 of SEQ ID NO: 3443
cgggacugguucugaauuu

SEQ ID NO: 267859 - RNA, 19 nt, Artificial Sequence
  Description of Artificial Sequence: Synthetic oligonucleotide
  Antisense strand to SEQ ID NO: 267858
aaauucagaaccagucccg

SEQ ID NO: 267860 - RNA, 19 nt, Artificial Sequence
  Description of Artificial Sequence: Synthetic oligonucleotide
  Sense strand starting at position 986 of SEQ ID NO: 3443
gggacugguucugaauuua

SEQ ID NO: 267861 - RNA, 19 nt, Artificial Sequence
  Description of Artificial Sequence: Synthetic oligonucleotide
  Antisense strand to SEQ ID NO: 267860
uaaauucagaaccaguccc

SEQ ID NO: 267862 - RNA, 19 nt, Artificial Sequence
  Description of Artificial Sequence: Synthetic oligonucleotide
  Sense strand starting at position 1092 of SEQ ID NO: 3443
gggcacaucucccaacaaa

SEQ ID NO: 267863 - RNA, 19 nt, Artificial Sequence
  Description of Artificial Sequence: Synthetic oligonucleotide
  Antisense strand to SEQ ID NO: 267862
uuuguugggagaugugccc

SEQ ID NO: 267864 - RNA, 19 nt, Artificial Sequence
  Description of Artificial Sequence: Synthetic oligonucleotide
  Sense strand starting at position 1341 of SEQ ID NO: 3443
gcgcgaugggucucgaaga

SEQ ID NO: 267865 - RNA, 19 nt, Artificial Sequence
  Description of Artificial Sequence: Synthetic oligonucleotide
  Antisense strand to SEQ ID NO: 267864
ucuucgagacccaucgcgc

SEQ ID NO: 267866 - RNA, 19 nt, Artificial Sequence
  Description of Artificial Sequence: Synthetic oligonucleotide
  Sense strand starting at position 2942 of SEQ ID NO: 3443
caggaaauguuccacugac

SEQ ID NO: 267867 - RNA, 19 nt, Artificial Sequence
  Description of Artificial Sequence: Synthetic oligonucleotide
  Antisense strand to SEQ ID NO: 267866
gucaguggaacauuuccug

SEQ ID NO: 267868 - RNA, 19 nt, Artificial Sequence
  Description of Artificial Sequence: Synthetic oligonucleotide
  Sense strand starting at position 3633 of SEQ ID NO: 3443
cgccuuauuugggcaugca

SEQ ID NO: 267869 - RNA, 19 nt, Artificial Sequence
  Description of Artificial Sequence: Synthetic oligonucleotide
  Antisense strand to SEQ ID NO: 267868
ugcaugcccaaauaaggcg

SEQ ID NO: 267870 - RNA, 19 nt, Artificial Sequence
  Description of Artificial Sequence: Synthetic oligonucleotide
  Sense strand starting at position 3705 of SEQ ID NO: 3443
cccuguaaaguaggucauu

SEQ ID NO: 267871 - RNA, 19 nt, Artificial Sequence
  Description of Artificial Sequence: Synthetic oligonucleotide
  Antisense strand to SEQ ID NO: 267870
aaugaccuacuuuacaggg

SEQ ID NO: 267872 - RNA, 19 nt, Artificial Sequence
  Description of Artificial Sequence: Synthetic oligonucleotide
  Sense strand starting at position 3714 of SEQ ID NO: 3443
guaggucauucucuuuauu

SEQ ID NO: 267873 - RNA, 19 nt, Artificial Sequence
  Description of Artificial Sequence: Synthetic oligonucleotide
  Antisense strand to SEQ ID NO: 267872
aauaaagagaaugaccuac

SEQ ID NO: 267874 - RNA, 19 nt, Artificial Sequence
  Description of Artificial Sequence: Synthetic oligonucleotide
  Sense strand starting at position 3738 of SEQ ID NO: 3443
cuuguauuauuugugucua

SEQ ID NO: 267875 - RNA, 19 nt, Artificial Sequence
  Description of Artificial Sequence: Synthetic oligonucleotide
  Antisense strand to SEQ ID NO: 267874
uagacacaaauaauacaag

SEQ ID NO: 267876 - RNA, 19 nt, Artificial Sequence
  Description of Artificial Sequence: Synthetic oligonucleotide
  Sense strand starting at position 3786 of SEQ ID NO: 3443
aggagcuuugagcauccua

SEQ ID NO: 267877 - RNA, 19 nt, Artificial Sequence
  Description of Artificial Sequence: Synthetic oligonucleotide
  Antisense strand to SEQ ID NO: 267876
uaggaugcucaaagcuccu

SEQ ID NO: 267878 - RNA, 19 nt, Artificial Sequence
  Description of Artificial Sequence: Synthetic oligonucleotide
  Sense strand starting at position 3863 of SEQ ID NO: 3443
ggaggcauuuggccuguca

SEQ ID NO: 267879 - RNA, 19 nt, Artificial Sequence
  Description of Artificial Sequence: Synthetic oligonucleotide
  Antisense strand to SEQ ID NO: 267878
ugacaggccaaaugccucc

SEQ ID NO: 267880 - RNA, 19 nt, Artificial Sequence
  Description of Artificial Sequence: Synthetic oligonucleotide
  Sense strand starting at position 3865 of SEQ ID NO: 3443
aggcauuuggccugucaug

SEQ ID NO: 267881 - RNA, 19 nt, Artificial Sequence
  Description of Artificial Sequence: Synthetic oligonucleotide
  Antisense strand to SEQ ID NO: 267880
caugacaggccaaaugccu

SEQ ID NO: 267882 - RNA, 19 nt, Artificial Sequence
  Description of Artificial Sequence: Synthetic oligonucleotide
  Sense strand starting at position 249 of SEQ ID NO: 3444
ugcucacugcuugugugau

SEQ ID NO: 267883 - RNA, 19 nt, Artificial Sequence
  Description of Artificial Sequence: Synthetic oligonucleotide
  Antisense strand to SEQ ID NO: 267882
aucacacaagcagugagca

SEQ ID NO: 267884 - RNA, 19 nt, Artificial Sequence
  Description of Artificial Sequence: Synthetic oligonucleotide
  Sense strand starting at position 558 of SEQ ID NO: 3444
auaugagcaucagugaauc

SEQ ID NO: 267885 - RNA, 19 nt, Artificial Sequence
  Description of Artificial Sequence: Synthetic oligonucleotide
  Antisense strand to SEQ ID NO: 267884
gauucacugaugcucauau

SEQ ID NO: 267886 - RNA, 19 nt, Artificial Sequence
  Description of Artificial Sequence: Synthetic oligonucleotide
  Sense strand starting at position 1052 of SEQ ID NO: 3444
auagcagaucccuggaaau

SEQ ID NO: 267887 - RNA, 19 nt, Artificial Sequence
  Description of Artificial Sequence: Synthetic oligonucleotide
  Antisense strand to SEQ ID NO: 267886
auuuccagggaucugcuau

SEQ ID NO: 267888 - RNA, 19 nt, Artificial Sequence
  Description of Artificial Sequence: Synthetic oligonucleotide
  Sense strand starting at position 1054 of SEQ ID NO: 3444
agcagaucccuggaaaugu

SEQ ID NO: 267889 - RNA, 19 nt, Artificial Sequence
  Description of Artificial Sequence: Synthetic oligonucleotide
  Antisense strand to SEQ ID NO: 267888
acauuuccagggaucugcu

SEQ ID NO: 267890 - RNA, 19 nt, Artificial Sequence
  Description of Artificial Sequence: Synthetic oligonucleotide
  Sense strand starting at position 1241 of SEQ ID NO: 3444
uugcaauuacuugaguauc

SEQ ID NO: 267891 - RNA, 19 nt, Artificial Sequence
  Description of Artificial Sequence: Synthetic oligonucleotide
  Antisense strand to SEQ ID NO: 267890
gauacucaaguaauugcaa

SEQ ID NO: 267892 - RNA, 19 nt, Artificial Sequence
  Description of Artificial Sequence: Synthetic oligonucleotide
  Sense strand starting at position 1247 of SEQ ID NO: 3444
uuacuugaguaucuuugaa

SEQ ID NO: 267893 - RNA, 19 nt, Artificial Sequence
  Description of Artificial Sequence: Synthetic oligonucleotide
  Antisense strand to SEQ ID NO: 267892
uucaaagauacucaaguaa

SEQ ID NO: 267894 - RNA, 19 nt, Artificial Sequence
  Description of Artificial Sequence: Synthetic oligonucleotide
  Sense strand starting at position 1249 of SEQ ID NO: 3444
acuugaguaucuuugaagu

SEQ ID NO: 267895 - RNA, 19 nt, Artificial Sequence
  Description of Artificial Sequence: Synthetic oligonucleotide
  Antisense strand to SEQ ID NO: 267894
acuucaaagauacucaagu

SEQ ID NO: 267896 - RNA, 19 nt, Artificial Sequence
  Description of Artificial Sequence: Synthetic oligonucleotide
  Sense strand starting at position 1281 of SEQ ID NO: 3444
auguuuaugaguuacuugu

SEQ ID NO: 267897 - RNA, 19 nt, Artificial Sequence
  Description of Artificial Sequence: Synthetic oligonucleotide
  Antisense strand to SEQ ID NO: 267896
acaaguaacucauaaacau

SEQ ID NO: 267898 - RNA, 19 nt, Artificial Sequence
  Description of Artificial Sequence: Synthetic oligonucleotide
  Sense strand starting at position 1373 of SEQ ID NO: 3444
acaccuauuucgcuugagu

SEQ ID NO: 267899 - RNA, 19 nt, Artificial Sequence
  Description of Artificial Sequence: Synthetic oligonucleotide
  Antisense strand to SEQ ID NO: 267898
acucaagcgaaauaggugu

SEQ ID NO: 267900 - RNA, 19 nt, Artificial Sequence
  Description of Artificial Sequence: Synthetic oligonucleotide
  Sense strand starting at position 1375 of SEQ ID NO: 3444
accuauuucgcuugaguuc

SEQ ID NO: 267901 - RNA, 19 nt, Artificial Sequence
  Description of Artificial Sequence: Synthetic oligonucleotide
  Antisense strand to SEQ ID NO: 267900
gaacucaagcgaaauaggu

SEQ ID NO: 267902 - RNA, 19 nt, Artificial Sequence
  Description of Artificial Sequence: Synthetic oligonucleotide
  Sense strand starting at position 1433 of SEQ ID NO: 3444
ggaaaugggcuuggaaagu

SEQ ID NO: 267903 - RNA, 19 nt, Artificial Sequence
  Description of Artificial Sequence: Synthetic oligonucleotide
  Antisense strand to SEQ ID NO: 267902
acuuuccaagcccauuucc

SEQ ID NO: 267904 - RNA, 19 nt, Artificial Sequence
  Description of Artificial Sequence: Synthetic oligonucleotide
  Sense strand starting at position 1471 of SEQ ID NO: 3444
cagaguuggguuggaaaug

SEQ ID NO: 267905 - RNA, 19 nt, Artificial Sequence
  Description of Artificial Sequence: Synthetic oligonucleotide
  Antisense strand to SEQ ID NO: 267904
cauuuccaacccaacucug

SEQ ID NO: 267906 - RNA, 19 nt, Artificial Sequence
  Description of Artificial Sequence: Synthetic oligonucleotide
  Sense strand starting at position 1488 of SEQ ID NO: 3444
ugguuacaccacuaaguuu

SEQ ID NO: 267907 - RNA, 19 nt, Artificial Sequence
  Description of Artificial Sequence: Synthetic oligonucleotide
  Antisense strand to SEQ ID NO: 267906
aaacuuagugguguaacca

SEQ ID NO: 267908 - RNA, 19 nt, Artificial Sequence
  Description of Artificial Sequence: Synthetic oligonucleotide
  Sense strand starting at position 1513 of SEQ ID NO: 3444
ggagauaagguggguuagu

SEQ ID NO: 267909 - RNA, 19 nt, Artificial Sequence
  Description of Artificial Sequence: Synthetic oligonucleotide
  Antisense strand to SEQ ID NO: 267908
acuaacccaccuuaucucc

SEQ ID NO: 267910 - RNA, 19 nt, Artificial Sequence
  Description of Artificial Sequence: Synthetic oligonucleotide
  Sense strand starting at position 1592 of SEQ ID NO: 3444
uuaguugauggucacgaau

SEQ ID NO: 267911 - RNA, 19 nt, Artificial Sequence
  Description of Artificial Sequence: Synthetic oligonucleotide
  Antisense strand to SEQ ID NO: 267910
auucgugaccaucaacuaa

SEQ ID NO: 267912 - RNA, 19 nt, Artificial Sequence
  Description of Artificial Sequence: Synthetic oligonucleotide
  Sense strand starting at position 1615 of SEQ ID NO: 3444
ggagguuucgccuuuggcu

SEQ ID NO: 267913 - RNA, 19 nt, Artificial Sequence
  Description of Artificial Sequence: Synthetic oligonucleotide
  Antisense strand to SEQ ID NO: 267912
agccaaaggcgaaaccucc

SEQ ID NO: 267914 - RNA, 19 nt, Artificial Sequence
  Description of Artificial Sequence: Synthetic oligonucleotide
  Sense strand starting at position 2205 of SEQ ID NO: 3444
ggcauuugcuuucugauac

SEQ ID NO: 267915 - RNA, 19 nt, Artificial Sequence
  Description of Artificial Sequence: Synthetic oligonucleotide
  Antisense strand to SEQ ID NO: 267914
guaucagaaagcaaaugcc

SEQ ID NO: 267916 - RNA, 19 nt, Artificial Sequence
  Description of Artificial Sequence: Synthetic oligonucleotide
  Sense strand starting at position 2285 of SEQ ID NO: 3444
aggauagcuuuccuaugga

SEQ ID NO: 267917 - RNA, 19 nt, Artificial Sequence
  Description of Artificial Sequence: Synthetic oligonucleotide
  Antisense strand to SEQ ID NO: 267916
uccauaggaaagcuauccu

SEQ ID NO: 267918 - RNA, 19 nt, Artificial Sequence
  Description of Artificial Sequence: Synthetic oligonucleotide
  Sense strand starting at position 2288 of SEQ ID NO: 3444
auagcuuuccuauggaaua

SEQ ID NO: 267919 - RNA, 19 nt, Artificial Sequence
  Description of Artificial Sequence: Synthetic oligonucleotide
  Antisense strand to SEQ ID NO: 267918
uauuccauaggaaagcuau

SEQ ID NO: 267920 - RNA, 19 nt, Artificial Sequence
  Description of Artificial Sequence: Synthetic oligonucleotide
  Sense strand starting at position 2300 of SEQ ID NO: 3444
uggaauauaugguucuguu

SEQ ID NO: 267921 - RNA, 19 nt, Artificial Sequence
  Description of Artificial Sequence: Synthetic oligonucleotide
  Antisense strand to SEQ ID NO: 267920
aacagaaccauauauucca

SEQ ID NO: 267922 - RNA, 19 nt, Artificial Sequence
  Description of Artificial Sequence: Synthetic oligonucleotide
  Sense strand starting at position 2414 of SEQ ID NO: 3444
uucuguaaggaugguaauu

SEQ ID NO: 267923 - RNA, 19 nt, Artificial Sequence
  Description of Artificial Sequence: Synthetic oligonucleotide
  Antisense strand to SEQ ID NO: 267922
aauuaccauccuuacagaa

SEQ ID NO: 267924 - RNA, 19 nt, Artificial Sequence
  Description of Artificial Sequence: Synthetic oligonucleotide
  Sense strand starting at position 2423 of SEQ ID NO: 3444
gaugguaauuguucuacag

SEQ ID NO: 267925 - RNA, 19 nt, Artificial Sequence
  Description of Artificial Sequence: Synthetic oligonucleotide
  Antisense strand to SEQ ID NO: 267924
cuguagaacaauuaccauc

SEQ ID NO: 267926 - RNA, 19 nt, Artificial Sequence
  Description of Artificial Sequence: Synthetic oligonucleotide
  Sense strand starting at position 2427 of SEQ ID NO: 3444
guaauuguucuacagcaaa

SEQ ID NO: 267927 - RNA, 19 nt, Artificial Sequence
  Description of Artificial Sequence: Synthetic oligonucleotide
  Antisense strand to SEQ ID NO: 267926
uuugcuguagaacaauuac

SEQ ID NO: 267928 - RNA, 19 nt, Artificial Sequence
  Description of Artificial Sequence: Synthetic oligonucleotide
  Sense strand starting at position 2438 of SEQ ID NO: 3444
acagcaaaucuaugagcaa

SEQ ID NO: 267929 - RNA, 19 nt, Artificial Sequence
  Description of Artificial Sequence: Synthetic oligonucleotide
  Antisense strand to SEQ ID NO: 267928
uugcucauagauuugcugu

SEQ ID NO: 267930 - RNA, 19 nt, Artificial Sequence
  Description of Artificial Sequence: Synthetic oligonucleotide
  Sense strand starting at position 2441 of SEQ ID NO: 3444
gcaaaucuaugagcaaauu

SEQ ID NO: 267931 - RNA, 19 nt, Artificial Sequence
  Description of Artificial Sequence: Synthetic oligonucleotide
  Antisense strand to SEQ ID NO: 267930
aauuugcucauagauuugc

SEQ ID NO: 267932 - RNA, 19 nt, Artificial Sequence
  Description of Artificial Sequence: Synthetic oligonucleotide
  Sense strand starting at position 2468 of SEQ ID NO: 3444
ucauuaugauucccaguuu

SEQ ID NO: 267933 - RNA, 19 nt, Artificial Sequence
  Description of Artificial Sequence: Synthetic oligonucleotide
  Antisense strand to SEQ ID NO: 267932
aaacugggaaucauaauga

SEQ ID NO: 267934 - RNA, 19 nt, Artificial Sequence
  Description of Artificial Sequence: Synthetic oligonucleotide
  Sense strand starting at position 2883 of SEQ ID NO: 3444
ggugaacaauauccuaacu

SEQ ID NO: 267935 - RNA, 19 nt, Artificial Sequence
  Description of Artificial Sequence: Synthetic oligonucleotide
  Antisense strand to SEQ ID NO: 267934
aguuaggauauuguucacc

SEQ ID NO: 267936 - RNA, 19 nt, Artificial Sequence
  Description of Artificial Sequence: Synthetic oligonucleotide
  Sense strand starting at position 2996 of SEQ ID NO: 3444
gugagaugcaucuauacug

SEQ ID NO: 267937 - RNA, 19 nt, Artificial Sequence
  Description of Artificial Sequence: Synthetic oligonucleotide
  Antisense strand to SEQ ID NO: 267936
caguauagaugcaucucac

SEQ ID NO: 267938 - RNA, 19 nt, Artificial Sequence
  Description of Artificial Sequence: Synthetic oligonucleotide
  Sense strand starting at position 3111 of SEQ ID NO: 3444
ccagcuuagggcuaguaua

SEQ ID NO: 267939 - RNA, 19 nt, Artificial Sequence
  Description of Artificial Sequence: Synthetic oligonucleotide
  Antisense strand to SEQ ID NO: 267938
uauacuagcccuaagcugg

SEQ ID NO: 267940 - RNA, 19 nt, Artificial Sequence
  Description of Artificial Sequence: Synthetic oligonucleotide
  Sense strand starting at position 3185 of SEQ ID NO: 3444
cugagucacaggcauguua

SEQ ID NO: 267941 - RNA, 19 nt, Artificial Sequence
  Description of Artificial Sequence: Synthetic oligonucleotide
  Antisense strand to SEQ ID NO: 267940
uaacaugccugugacucag

SEQ ID NO: 267942 - RNA, 19 nt, Artificial Sequence
  Description of Artificial Sequence: Synthetic oligonucleotide
  Sense strand starting at position 3196 of SEQ ID NO: 3444
gcauguuauacgucagcuu

SEQ ID NO: 267943 - RNA, 19 nt, Artificial Sequence
  Description of Artificial Sequence: Synthetic oligonucleotide
  Antisense strand to SEQ ID NO: 267942
aagcugacguauaacaugc

SEQ ID NO: 267944 - RNA, 19 nt, Artificial Sequence
  Description of Artificial Sequence: Synthetic oligonucleotide
  Sense strand starting at position 3200 of SEQ ID NO: 3444
guuauacgucagcuuuagu

SEQ ID NO: 267945 - RNA, 19 nt, Artificial Sequence
  Description of Artificial Sequence: Synthetic oligonucleotide
  Antisense strand to SEQ ID NO: 267944
acuaaagcugacguauaac

SEQ ID NO: 267946 - RNA, 19 nt, Artificial Sequence
  Description of Artificial Sequence: Synthetic oligonucleotide
  Sense strand starting at position 3358 of SEQ ID NO: 3444
ucuauuauggcuuaugaua

SEQ ID NO: 267947 - RNA, 19 nt, Artificial Sequence
  Description of Artificial Sequence: Synthetic oligonucleotide
  Antisense strand to SEQ ID NO: 267946
uaucauaagccauaauaga

SEQ ID NO: 267948 - RNA, 19 nt, Artificial Sequence
  Description of Artificial Sequence: Synthetic oligonucleotide
  Sense strand starting at position 3456 of SEQ ID NO: 3444
cuaaguggauuauuaaauc

SEQ ID NO: 267949 - RNA, 19 nt, Artificial Sequence
  Description of Artificial Sequence: Synthetic oligonucleotide
  Antisense strand to SEQ ID NO: 267948
gauuuaauaauccacuuag

SEQ ID NO: 267950 - RNA, 19 nt, Artificial Sequence
  Description of Artificial Sequence: Synthetic oligonucleotide
  Sense strand starting at position 3583 of SEQ ID NO: 3444
ucuacuuauuuauagggau

SEQ ID NO: 267951 - RNA, 19 nt, Artificial Sequence
  Description of Artificial Sequence: Synthetic oligonucleotide
  Antisense strand to SEQ ID NO: 267950
aucccuauaaauaaguaga

SEQ ID NO: 267952 - RNA, 19 nt, Artificial Sequence
  Description of Artificial Sequence: Synthetic oligonucleotide
  Sense strand starting at position 3622 of SEQ ID NO: 3444
aguuaauagcaucauggau

SEQ ID NO: 267953 - RNA, 19 nt, Artificial Sequence
  Description of Artificial Sequence: Synthetic oligonucleotide
  Antisense strand to SEQ ID NO: 267952
auccaugaugcuauuaacu

SEQ ID NO: 267954 - RNA, 19 nt, Artificial Sequence
  Description of Artificial Sequence: Synthetic oligonucleotide
  Sense strand starting at position 3680 of SEQ ID NO: 3444
cccuaaauaugugugaaua

SEQ ID NO: 267955 - RNA, 19 nt, Artificial Sequence
  Description of Artificial Sequence: Synthetic oligonucleotide
  Antisense strand to SEQ ID NO: 267954
uauucacacauauuuaggg

SEQ ID NO: 267956 - RNA, 19 nt, Artificial Sequence
  Description of Artificial Sequence: Synthetic oligonucleotide
  Sense strand starting at position 3681 of SEQ ID NO: 3444
ccuaaauaugugugaauau

SEQ ID NO: 267957 - RNA, 19 nt, Artificial Sequence
  Description of Artificial Sequence: Synthetic oligonucleotide
  Antisense strand to SEQ ID NO: 267956
auauucacacauauuuagg

SEQ ID NO: 267958 - RNA, 19 nt, Artificial Sequence
  Description of Artificial Sequence: Synthetic oligonucleotide
  Sense strand starting at position 3754 of SEQ ID NO: 3444
gaagauguuugacuuuaua

SEQ ID NO: 267959 - RNA, 19 nt, Artificial Sequence
  Description of Artificial Sequence: Synthetic oligonucleotide
  Antisense strand to SEQ ID NO: 267958
uauaaagucaaacaucuuc

SEQ ID NO: 267960 - RNA, 19 nt, Artificial Sequence
  Description of Artificial Sequence: Synthetic oligonucleotide
  Sense strand starting at position 3887 of SEQ ID NO: 3444
accacaguccuaggagaau

SEQ ID NO: 267961 - RNA, 19 nt, Artificial Sequence
  Description of Artificial Sequence: Synthetic oligonucleotide
  Antisense strand to SEQ ID NO: 267960
auucuccuaggacuguggu

SEQ ID NO: 267962 - RNA, 19 nt, Artificial Sequence
  Description of Artificial Sequence: Synthetic oligonucleotide
  Sense strand starting at position 18 of SEQ ID NO: 3445
cuuguuucccuccgggaga

SEQ ID NO: 267963 - RNA, 19 nt, Artificial Sequence
  Description of Artificial Sequence: Synthetic oligonucleotide
  Antisense strand to SEQ ID NO: 267962
ucucccggagggaaacaag

SEQ ID NO: 267964 - RNA, 19 nt, Artificial Sequence
  Description of Artificial Sequence: Synthetic oligonucleotide
  Sense strand starting at position 161 of SEQ ID NO: 3445
ccagguaagccugauccua

SEQ ID NO: 267965 - RNA, 19 nt, Artificial Sequence
  Description of Artificial Sequence: Synthetic oligonucleotide
  Antisense strand to SEQ ID NO: 267964
uaggaucaggcuuaccugg

SEQ ID NO: 267966 - RNA, 19 nt, Artificial Sequence
  Description of Artificial Sequence: Synthetic oligonucleotide
  Sense strand starting at position 163 of SEQ ID NO: 3445
agguaagccugauccuaac

SEQ ID NO: 267967 - RNA, 19 nt, Artificial Sequence
  Description of Artificial Sequence: Synthetic oligonucleotide
  Antisense strand to SEQ ID NO: 267966
guuaggaucaggcuuaccu

SEQ ID NO: 267968 - RNA, 19 nt, Artificial Sequence
  Description of Artificial Sequence: Synthetic oligonucleotide
  Sense strand starting at position 185 of SEQ ID NO: 3445
caugacugucaaugucaga

SEQ ID NO: 267969 - RNA, 19 nt, Artificial Sequence
  Description of Artificial Sequence: Synthetic oligonucleotide
  Antisense strand to SEQ ID NO: 267968
ucugacauugacagucaug

SEQ ID NO: 267970 - RNA, 19 nt, Artificial Sequence
  Description of Artificial Sequence: Synthetic oligonucleotide
  Sense strand starting at position 209 of SEQ ID NO: 3445
ggauguuauucagugggca

SEQ ID NO: 267971 - RNA, 19 nt, Artificial Sequence
  Description of Artificial Sequence: Synthetic oligonucleotide
  Antisense strand to SEQ ID NO: 267970
ugcccacugaauaacaucc

SEQ ID NO: 267972 - RNA, 19 nt, Artificial Sequence
  Description of Artificial Sequence: Synthetic oligonucleotide
  Sense strand starting at position 272 of SEQ ID NO: 3445
ggcucucugcagcaguaaa

SEQ ID NO: 267973 - RNA, 19 nt, Artificial Sequence
  Description of Artificial Sequence: Synthetic oligonucleotide
  Antisense strand to SEQ ID NO: 267972
uuuacugcugcagagagcc

SEQ ID NO: 267974 - RNA, 19 nt, Artificial Sequence
  Description of Artificial Sequence: Synthetic oligonucleotide
  Sense strand starting at position 462 of SEQ ID NO: 3445
acuuuagugucuuuccuau

SEQ ID NO: 267975 - RNA, 19 nt, Artificial Sequence
  Description of Artificial Sequence: Synthetic oligonucleotide
  Antisense strand to SEQ ID NO: 267974
auaggaaagacacuaaagu

SEQ ID NO: 267976 - RNA, 19 nt, Artificial Sequence
  Description of Artificial Sequence: Synthetic oligonucleotide
  Sense strand starting at position 493 of SEQ ID NO: 3445
ugccacaagcacugagauu

SEQ ID NO: 267977 - RNA, 19 nt, Artificial Sequence
  Description of Artificial Sequence: Synthetic oligonucleotide
  Antisense strand to SEQ ID NO: 267976
aaucucagugcuuguggca

SEQ ID NO: 267978 - RNA, 19 nt, Artificial Sequence
  Description of Artificial Sequence: Synthetic oligonucleotide
  Sense strand starting at position 600 of SEQ ID NO: 3445
cggagugucccaggcagaa

SEQ ID NO: 267979 - RNA, 19 nt, Artificial Sequence
  Description of Artificial Sequence: Synthetic oligonucleotide
  Antisense strand to SEQ ID NO: 267978
uucugccugggacacuccg

SEQ ID NO: 267980 - RNA, 19 nt, Artificial Sequence
  Description of Artificial Sequence: Synthetic oligonucleotide
  Sense strand starting at position 693 of SEQ ID NO: 3445
ccuggacuuguggguguaa

SEQ ID NO: 267981 - RNA, 19 nt, Artificial Sequence
  Description of Artificial Sequence: Synthetic oligonucleotide
  Antisense strand to SEQ ID NO: 267980
uuacacccacaaguccagg

SEQ ID NO: 267982 - RNA, 19 nt, Artificial Sequence
  Description of Artificial Sequence: Synthetic oligonucleotide
  Sense strand starting at position 836 of SEQ ID NO: 3445
ucugcuucuccagaagaag

SEQ ID NO: 267983 - RNA, 19 nt, Artificial Sequence
  Description of Artificial Sequence: Synthetic oligonucleotide
  Antisense strand to SEQ ID NO: 267982
cuucuucuggagaagcaga

SEQ ID NO: 267984 - RNA, 19 nt, Artificial Sequence
  Description of Artificial Sequence: Synthetic oligonucleotide
  Sense strand starting at position 880 of SEQ ID NO: 3445
cguuucugaccuugccaaa

SEQ ID NO: 267985 - RNA, 19 nt, Artificial Sequence
  Description of Artificial Sequence: Synthetic oligonucleotide
  Antisense strand to SEQ ID NO: 267984
uuuggcaaggucagaaacg

SEQ ID NO: 267986 - RNA, 19 nt, Artificial Sequence
  Description of Artificial Sequence: Synthetic oligonucleotide
  Sense strand starting at position 908 of SEQ ID NO: 3445
ucacguuauccuucgcuuu

SEQ ID NO: 267987 - RNA, 19 nt, Artificial Sequence
  Description of Artificial Sequence: Synthetic oligonucleotide
  Antisense strand to SEQ ID NO: 267986
aaagcgaaggauaacguga

SEQ ID NO: 267988 - RNA, 19 nt, Artificial Sequence
  Description of Artificial Sequence: Synthetic oligonucleotide
  Sense strand starting at position 922 of SEQ ID NO: 3445
gcuuucuuugucuguaaag

SEQ ID NO: 267989 - RNA, 19 nt, Artificial Sequence
  Description of Artificial Sequence: Synthetic oligonucleotide
  Antisense strand to SEQ ID NO: 267988
cuuuacagacaaagaaagc

SEQ ID NO: 267990 - RNA, 19 nt, Artificial Sequence
  Description of Artificial Sequence: Synthetic oligonucleotide
  Sense strand starting at position 929 of SEQ ID NO: 3445
uugucuguaaagugggaua

SEQ ID NO: 267991 - RNA, 19 nt, Artificial Sequence
  Description of Artificial Sequence: Synthetic oligonucleotide
  Antisense strand to SEQ ID NO: 267990
uaucccacuuuacagacaa

SEQ ID NO: 267992 - RNA, 19 nt, Artificial Sequence
  Description of Artificial Sequence: Synthetic oligonucleotide
  Sense strand starting at position 1273 of SEQ ID NO: 3445
accggucgcccuugagauu

SEQ ID NO: 267993 - RNA, 19 nt, Artificial Sequence
  Description of Artificial Sequence: Synthetic oligonucleotide
  Antisense strand to SEQ ID NO: 267992
aaucucaagggcgaccggu

SEQ ID NO: 267994 - RNA, 19 nt, Artificial Sequence
  Description of Artificial Sequence: Synthetic oligonucleotide
  Sense strand starting at position 1384 of SEQ ID NO: 3445
ggaccuguccgaggaaaga

SEQ ID NO: 267995 - RNA, 19 nt, Artificial Sequence
  Description of Artificial Sequence: Synthetic oligonucleotide
  Antisense strand to SEQ ID NO: 267994
ucuuuccucggacaggucc

SEQ ID NO: 267996 - RNA, 19 nt, Artificial Sequence
  Description of Artificial Sequence: Synthetic oligonucleotide
  Sense strand starting at position 2079 of SEQ ID NO: 3445
cucugcucgcgccuuuaua

SEQ ID NO: 267997 - RNA, 19 nt, Artificial Sequence
  Description of Artificial Sequence: Synthetic oligonucleotide
  Antisense strand to SEQ ID NO: 267996
uauaaaggcgcgagcagag

SEQ ID NO: 267998 - RNA, 19 nt, Artificial Sequence
  Description of Artificial Sequence: Synthetic oligonucleotide
  Sense strand starting at position 2080 of SEQ ID NO: 3445
ucugcucgcgccuuuauaa

SEQ ID NO: 267999 - RNA, 19 nt, Artificial Sequence
  Description of Artificial Sequence: Synthetic oligonucleotide
  Antisense strand to SEQ ID NO: 267998
uuauaaaggcgcgagcaga

SEQ ID NO: 268000 - RNA, 19 nt, Artificial Sequence
  Description of Artificial Sequence: Synthetic oligonucleotide
  Sense strand starting at position 2081 of SEQ ID NO: 3445
cugcucgcgccuuuauaau

SEQ ID NO: 268001 - RNA, 19 nt, Artificial Sequence
  Description of Artificial Sequence: Synthetic oligonucleotide
  Antisense strand to SEQ ID NO: 268000
auuauaaaggcgcgagcag

SEQ ID NO: 268002 - RNA, 19 nt, Artificial Sequence
  Description of Artificial Sequence: Synthetic oligonucleotide
  Sense strand starting at position 2420 of SEQ ID NO: 3445
aagacaggcucagaggaau

SEQ ID NO: 268003 - RNA, 19 nt, Artificial Sequence
  Description of Artificial Sequence: Synthetic oligonucleotide
  Antisense strand to SEQ ID NO: 268002
auuccucugagccugucuu

SEQ ID NO: 268004 - RNA, 19 nt, Artificial Sequence
  Description of Artificial Sequence: Synthetic oligonucleotide
  Sense strand starting at position 2456 of SEQ ID NO: 3445
gucauacaggcauaaaguu

SEQ ID NO: 268005 - RNA, 19 nt, Artificial Sequence
  Description of Artificial Sequence: Synthetic oligonucleotide
  Antisense strand to SEQ ID NO: 268004
aacuuuaugccuguaugac

SEQ ID NO: 268006 - RNA, 19 nt, Artificial Sequence
  Description of Artificial Sequence: Synthetic oligonucleotide
  Sense strand starting at position 2695 of SEQ ID NO: 3445
gcaagucuuccacacugga

SEQ ID NO: 268007 - RNA, 19 nt, Artificial Sequence
  Description of Artificial Sequence: Synthetic oligonucleotide
  Antisense strand to SEQ ID NO: 268006
uccaguguggaagacuugc

SEQ ID NO: 268008 - RNA, 19 nt, Artificial Sequence
  Description of Artificial Sequence: Synthetic oligonucleotide
  Sense strand starting at position 2817 of SEQ ID NO: 3445
caucguaugcucgccaguu

SEQ ID NO: 268009 - RNA, 19 nt, Artificial Sequence
  Description of Artificial Sequence: Synthetic oligonucleotide
  Antisense strand to SEQ ID NO: 268008
aacuggcgagcauacgaug

SEQ ID NO: 268010 - RNA, 19 nt, Artificial Sequence
  Description of Artificial Sequence: Synthetic oligonucleotide
  Sense strand starting at position 2859 of SEQ ID NO: 3445
cgguuucggccacacagaa

SEQ ID NO: 268011 - RNA, 19 nt, Artificial Sequence
  Description of Artificial Sequence: Synthetic oligonucleotide
  Antisense strand to SEQ ID NO: 268010
uucuguguggccgaaaccg

SEQ ID NO: 268012 - RNA, 19 nt, Artificial Sequence
  Description of Artificial Sequence: Synthetic oligonucleotide
  Sense strand starting at position 2887 of SEQ ID NO: 3445
gucugacuccgcuggugaa

SEQ ID NO: 268013 - RNA, 19 nt, Artificial Sequence
  Description of Artificial Sequence: Synthetic oligonucleotide
  Antisense strand to SEQ ID NO: 268012
uucaccagcggagucagac

SEQ ID NO: 268014 - RNA, 19 nt, Artificial Sequence
  Description of Artificial Sequence: Synthetic oligonucleotide
  Sense strand starting at position 2980 of SEQ ID NO: 3445
uccaguauccugugcacuu

SEQ ID NO: 268015 - RNA, 19 nt, Artificial Sequence
  Description of Artificial Sequence: Synthetic oligonucleotide
  Antisense strand to SEQ ID NO: 268014
aagugcacaggauacugga

SEQ ID NO: 268016 - RNA, 19 nt, Artificial Sequence
  Description of Artificial Sequence: Synthetic oligonucleotide
  Sense strand starting at position 2981 of SEQ ID NO: 3445
ccaguauccugugcacuuu

SEQ ID NO: 268017 - RNA, 19 nt, Artificial Sequence
  Description of Artificial Sequence: Synthetic oligonucleotide
  Antisense strand to SEQ ID NO: 268016
aaagugcacaggauacugg

SEQ ID NO: 268018 - RNA, 19 nt, Artificial Sequence
  Description of Artificial Sequence: Synthetic oligonucleotide
  Sense strand starting at position 3054 of SEQ ID NO: 3445
cgugacagguggucaacuu

SEQ ID NO: 268019 - RNA, 19 nt, Artificial Sequence
  Description of Artificial Sequence: Synthetic oligonucleotide
  Antisense strand to SEQ ID NO: 268018
aaguugaccaccugucacg

SEQ ID NO: 268020 - RNA, 19 nt, Artificial Sequence
  Description of Artificial Sequence: Synthetic oligonucleotide
  Sense strand starting at position 3615 of SEQ ID NO: 3445
aggucacuuugcuuaggaa

SEQ ID NO: 268021 - RNA, 19 nt, Artificial Sequence
  Description of Artificial Sequence: Synthetic oligonucleotide
  Antisense strand to SEQ ID NO: 268020
uuccuaagcaaagugaccu

SEQ ID NO: 268022 - RNA, 19 nt, Artificial Sequence
  Description of Artificial Sequence: Synthetic oligonucleotide
  Sense strand starting at position 3616 of SEQ ID NO: 3445
ggucacuuugcuuaggaaa

SEQ ID NO: 268023 - RNA, 19 nt, Artificial Sequence
  Description of Artificial Sequence: Synthetic oligonucleotide
  Antisense strand to SEQ ID NO: 268022
uuuccuaagcaaagugacc

SEQ ID NO: 268024 - RNA, 19 nt, Artificial Sequence
  Description of Artificial Sequence: Synthetic oligonucleotide
  Sense strand starting at position 3641 of SEQ ID NO: 3445
acaccugaggucugaguuu

SEQ ID NO: 268025 - RNA, 19 nt, Artificial Sequence
  Description of Artificial Sequence: Synthetic oligonucleotide
  Antisense strand to SEQ ID NO: 268024
aaacucagaccucaggugu

SEQ ID NO: 268026 - RNA, 19 nt, Artificial Sequence
  Description of Artificial Sequence: Synthetic oligonucleotide
  Sense strand starting at position 3663 of SEQ ID NO: 3445
gcagcaaaguuuccugauc

SEQ ID NO: 268027 - RNA, 19 nt, Artificial Sequence
  Description of Artificial Sequence: Synthetic oligonucleotide
  Antisense strand to SEQ ID NO: 268026
gaucaggaaacuuugcugc

SEQ ID NO: 268028 - RNA, 19 nt, Artificial Sequence
  Description of Artificial Sequence: Synthetic oligonucleotide
  Sense strand starting at position 3671 of SEQ ID NO: 3445
guuuccugaucuccaggaa

SEQ ID NO: 268029 - RNA, 19 nt, Artificial Sequence
  Description of Artificial Sequence: Synthetic oligonucleotide
  Antisense strand to SEQ ID NO: 268028
uuccuggagaucaggaaac

SEQ ID NO: 268030 - RNA, 19 nt, Artificial Sequence
  Description of Artificial Sequence: Synthetic oligonucleotide
  Sense strand starting at position 3674 of SEQ ID NO: 3445
uccugaucuccaggaagau

SEQ ID NO: 268031 - RNA, 19 nt, Artificial Sequence
  Description of Artificial Sequence: Synthetic oligonucleotide
  Antisense strand to SEQ ID NO: 268030
aucuuccuggagaucagga

SEQ ID NO: 268032 - RNA, 19 nt, Artificial Sequence
  Description of Artificial Sequence: Synthetic oligonucleotide
  Sense strand starting at position 3717 of SEQ ID NO: 3445
guggauucuggugaauuga

SEQ ID NO: 268033 - RNA, 19 nt, Artificial Sequence
  Description of Artificial Sequence: Synthetic oligonucleotide
  Antisense strand to SEQ ID NO: 268032
ucaauucaccagaauccac

SEQ ID NO: 268034 - RNA, 19 nt, Artificial Sequence
  Description of Artificial Sequence: Synthetic oligonucleotide
  Sense strand starting at position 3758 of SEQ ID NO: 3445
ccaauuccucuccgugcua

SEQ ID NO: 268035 - RNA, 19 nt, Artificial Sequence
  Description of Artificial Sequence: Synthetic oligonucleotide
  Antisense strand to SEQ ID NO: 268034
uagcacggagaggaauugg

SEQ ID NO: 268036 - RNA, 19 nt, Artificial Sequence
  Description of Artificial Sequence: Synthetic oligonucleotide
  Sense strand starting at position 3853 of SEQ ID NO: 3445
ccaggugggcugugaaagu

SEQ ID NO: 268037 - RNA, 19 nt, Artificial Sequence
  Description of Artificial Sequence: Synthetic oligonucleotide
  Antisense strand to SEQ ID NO: 268036
acuuucacagcccaccugg

SEQ ID NO: 268038 - RNA, 19 nt, Artificial Sequence
  Description of Artificial Sequence: Synthetic oligonucleotide
  Sense strand starting at position 3863 of SEQ ID NO: 3445
ugugaaaguucccucugcu

SEQ ID NO: 268039 - RNA, 19 nt, Artificial Sequence
  Description of Artificial Sequence: Synthetic oligonucleotide
  Antisense strand to SEQ ID NO: 268038
agcagagggaacuuucaca

SEQ ID NO: 268040 - RNA, 19 nt, Artificial Sequence
  Description of Artificial Sequence: Synthetic oligonucleotide
  Sense strand starting at position 3915 of SEQ ID NO: 3445
cuggaacuucucugacacu

SEQ ID NO: 268041 - RNA, 19 nt, Artificial Sequence
  Description of Artificial Sequence: Synthetic oligonucleotide
  Antisense strand to SEQ ID NO: 268040
agugucagagaaguuccag

SEQ ID NO: 268042 - RNA, 19 nt, Artificial Sequence
  Description of Artificial Sequence: Synthetic oligonucleotide
  Sense strand starting at position 43 of SEQ ID NO: 3446
ggguuucuucccgacagag

SEQ ID NO: 268043 - RNA, 19 nt, Artificial Sequence
  Description of Artificial Sequence: Synthetic oligonucleotide
  Antisense strand to SEQ ID NO: 268042
cucugucgggaagaaaccc

SEQ ID NO: 268044 - RNA, 19 nt, Artificial Sequence
  Description of Artificial Sequence: Synthetic oligonucleotide
  Sense strand starting at position 45 of SEQ ID NO: 3446
guuucuucccgacagagau

SEQ ID NO: 268045 - RNA, 19 nt, Artificial Sequence
  Description of Artificial Sequence: Synthetic oligonucleotide
  Antisense strand to SEQ ID NO: 268044
aucucugucgggaagaaac

SEQ ID NO: 268046 - RNA, 19 nt, Artificial Sequence
  Description of Artificial Sequence: Synthetic oligonucleotide
  Sense strand starting at position 112 of SEQ ID NO: 3446
cuguuugucucauuggaaa

SEQ ID NO: 268047 - RNA, 19 nt, Artificial Sequence
  Description of Artificial Sequence: Synthetic oligonucleotide
  Antisense strand to SEQ ID NO: 268046
uuuccaaugagacaaacag

SEQ ID NO: 268048 - RNA, 19 nt, Artificial Sequence
  Description of Artificial Sequence: Synthetic oligonucleotide
  Sense strand starting at position 134 of SEQ ID NO: 3446
gugggaagccuuuaccaaa

SEQ ID NO: 268049 - RNA, 19 nt, Artificial Sequence
  Description of Artificial Sequence: Synthetic oligonucleotide
  Antisense strand to SEQ ID NO: 268048
uuugguaaaggcuucccac

SEQ ID NO: 268050 - RNA, 19 nt, Artificial Sequence
  Description of Artificial Sequence: Synthetic oligonucleotide
  Sense strand starting at position 209 of SEQ ID NO: 3446
cccauugcacuguguaaau

SEQ ID NO: 268051 - RNA, 19 nt, Artificial Sequence
  Description of Artificial Sequence: Synthetic oligonucleotide
  Antisense strand to SEQ ID NO: 268050
auuuacacagugcaauggg

SEQ ID NO: 268052 - RNA, 19 nt, Artificial Sequence
  Description of Artificial Sequence: Synthetic oligonucleotide
  Sense strand starting at position 218 of SEQ ID NO: 3446
cuguguaaauccuugcaga

SEQ ID NO: 268053 - RNA, 19 nt, Artificial Sequence
  Description of Artificial Sequence: Synthetic oligonucleotide
  Antisense strand to SEQ ID NO: 268052
ucugcaaggauuuacacag

SEQ ID NO: 268054 - RNA, 19 nt, Artificial Sequence
  Description of Artificial Sequence: Synthetic oligonucleotide
  Sense strand starting at position 219 of SEQ ID NO: 3446
uguguaaauccuugcagag

SEQ ID NO: 268055 - RNA, 19 nt, Artificial Sequence
  Description of Artificial Sequence: Synthetic oligonucleotide
  Antisense strand to SEQ ID NO: 268054
cucugcaaggauuuacaca

SEQ ID NO: 268056 - RNA, 19 nt, Artificial Sequence
  Description of Artificial Sequence: Synthetic oligonucleotide
  Sense strand starting at position 252 of SEQ ID NO: 3446
gaggaaagcuaguccauga

SEQ ID NO: 268057 - RNA, 19 nt, Artificial Sequence
  Description of Artificial Sequence: Synthetic oligonucleotide
  Antisense strand to SEQ ID NO: 268056
ucauggacuagcuuuccuc

SEQ ID NO: 268058 - RNA, 19 nt, Artificial Sequence
  Description of Artificial Sequence: Synthetic oligonucleotide
  Sense strand starting at position 326 of SEQ ID NO: 3446
agaggucauuuccaucuua

SEQ ID NO: 268059 - RNA, 19 nt, Artificial Sequence
  Description of Artificial Sequence: Synthetic oligonucleotide
  Antisense strand to SEQ ID NO: 268058
uaagauggaaaugaccucu

SEQ ID NO: 268060 - RNA, 19 nt, Artificial Sequence
  Description of Artificial Sequence: Synthetic oligonucleotide
  Sense strand starting at position 331 of SEQ ID NO: 3446
ucauuuccaucuuagguua

SEQ ID NO: 268061 - RNA, 19 nt, Artificial Sequence
  Description of Artificial Sequence: Synthetic oligonucleotide
  Antisense strand to SEQ ID NO: 268060
uaaccuaagauggaaauga

SEQ ID NO: 268062 - RNA, 19 nt, Artificial Sequence
  Description of Artificial Sequence: Synthetic oligonucleotide
  Sense strand starting at position 355 of SEQ ID NO: 3446
ggaccugaguaugaagacu

SEQ ID NO: 268063 - RNA, 19 nt, Artificial Sequence
  Description of Artificial Sequence: Synthetic oligonucleotide
  Antisense strand to SEQ ID NO: 268062
agucuucauacucaggucc

SEQ ID NO: 268064 - RNA, 19 nt, Artificial Sequence
  Description of Artificial Sequence: Synthetic oligonucleotide
  Sense strand starting at position 513 of SEQ ID NO: 3446
uuagaaaggccuugacuga

SEQ ID NO: 268065 - RNA, 19 nt, Artificial Sequence
  Description of Artificial Sequence: Synthetic oligonucleotide
  Antisense strand to SEQ ID NO: 268064
ucagucaaggccuuucuaa

SEQ ID NO: 268066 - RNA, 19 nt, Artificial Sequence
  Description of Artificial Sequence: Synthetic oligonucleotide
  Sense strand starting at position 536 of SEQ ID NO: 3446
gcaaguugaguggaagcau

SEQ ID NO: 268067 - RNA, 19 nt, Artificial Sequence
  Description of Artificial Sequence: Synthetic oligonucleotide
  Antisense strand to SEQ ID NO: 268066
augcuuccacucaacuugc

SEQ ID NO: 268068 - RNA, 19 nt, Artificial Sequence
  Description of Artificial Sequence: Synthetic oligonucleotide
  Sense strand starting at position 574 of SEQ ID NO: 3446
uugacagagcacugggauu

SEQ ID NO: 268069 - RNA, 19 nt, Artificial Sequence
  Description of Artificial Sequence: Synthetic oligonucleotide
  Antisense strand to SEQ ID NO: 268068
aaucccagugcucugucaa

SEQ ID NO: 268070 - RNA, 19 nt, Artificial Sequence
  Description of Artificial Sequence: Synthetic oligonucleotide
  Sense strand starting at position 704 of SEQ ID NO: 3446
ggagcuucuuaggucaauu

SEQ ID NO: 268071 - RNA, 19 nt, Artificial Sequence
  Description of Artificial Sequence: Synthetic oligonucleotide
  Antisense strand to SEQ ID NO: 268070
aauugaccuaagaagcucc

SEQ ID NO: 268072 - RNA, 19 nt, Artificial Sequence
  Description of Artificial Sequence: Synthetic oligonucleotide
  Sense strand starting at position 731 of SEQ ID NO: 3446
gggacauacugcuuauaug

SEQ ID NO: 268073 - RNA, 19 nt, Artificial Sequence
  Description of Artificial Sequence: Synthetic oligonucleotide
  Antisense strand to SEQ ID NO: 268072
cauauaagcaguauguccc

SEQ ID NO: 268074 - RNA, 19 nt, Artificial Sequence
  Description of Artificial Sequence: Synthetic oligonucleotide
  Sense strand starting at position 748 of SEQ ID NO: 3446
ugguauuggcaccaauauu

SEQ ID NO: 268075 - RNA, 19 nt, Artificial Sequence
  Description of Artificial Sequence: Synthetic oligonucleotide
  Antisense strand to SEQ ID NO: 268074
aauauuggugccaauacca

SEQ ID NO: 268076 - RNA, 19 nt, Artificial Sequence
  Description of Artificial Sequence: Synthetic oligonucleotide
  Sense strand starting at position 1050 of SEQ ID NO: 3446
gagauauuccuguguugga

SEQ ID NO: 268077 - RNA, 19 nt, Artificial Sequence
  Description of Artificial Sequence: Synthetic oligonucleotide
  Antisense strand to SEQ ID NO: 268076
uccaacacaggaauaucuc

SEQ ID NO: 268078 - RNA, 19 nt, Artificial Sequence
  Description of Artificial Sequence: Synthetic oligonucleotide
  Sense strand starting at position 1051 of SEQ ID NO: 3446
agauauuccuguguuggau

SEQ ID NO: 268079 - RNA, 19 nt, Artificial Sequence
  Description of Artificial Sequence: Synthetic oligonucleotide
  Antisense strand to SEQ ID NO: 268078
auccaacacaggaauaucu

SEQ ID NO: 268080 - RNA, 19 nt, Artificial Sequence
  Description of Artificial Sequence: Synthetic oligonucleotide
  Sense strand starting at position 1054 of SEQ ID NO: 3446
uauuccuguguuggauauu

SEQ ID NO: 268081 - RNA, 19 nt, Artificial Sequence
  Description of Artificial Sequence: Synthetic oligonucleotide
  Antisense strand to SEQ ID NO: 268080
aauauccaacacaggaaua

SEQ ID NO: 268082 - RNA, 19 nt, Artificial Sequence
  Description of Artificial Sequence: Synthetic oligonucleotide
  Sense strand starting at position 1057 of SEQ ID NO: 3446
uccuguguuggauauuaac

SEQ ID NO: 268083 - RNA, 19 nt, Artificial Sequence
  Description of Artificial Sequence: Synthetic oligonucleotide
  Antisense strand to SEQ ID NO: 268082
guuaauauccaacacagga

SEQ ID NO: 268084 - RNA, 19 nt, Artificial Sequence
  Description of Artificial Sequence: Synthetic oligonucleotide
  Sense strand starting at position 1121 of SEQ ID NO: 3446
auauucucgcucugauaca

SEQ ID NO: 268085 - RNA, 19 nt, Artificial Sequence
  Description of Artificial Sequence: Synthetic oligonucleotide
  Antisense strand to SEQ ID NO: 268084
uguaucagagcgagaauau

SEQ ID NO: 268086 - RNA, 19 nt, Artificial Sequence
  Description of Artificial Sequence: Synthetic oligonucleotide
  Sense strand starting at position 1393 of SEQ ID NO: 3446
agcaaacuuugcgcacauu

SEQ ID NO: 268087 - RNA, 19 nt, Artificial Sequence
  Description of Artificial Sequence: Synthetic oligonucleotide
  Antisense strand to SEQ ID NO: 268086
aaugugcgcaaaguuugcu

SEQ ID NO: 268088 - RNA, 19 nt, Artificial Sequence
  Description of Artificial Sequence: Synthetic oligonucleotide
  Sense strand starting at position 1394 of SEQ ID NO: 3446
gcaaacuuugcgcacauuu

SEQ ID NO: 268089 - RNA, 19 nt, Artificial Sequence
  Description of Artificial Sequence: Synthetic oligonucleotide
  Antisense strand to SEQ ID NO: 268088
aaaugugcgcaaaguuugc

SEQ ID NO: 268090 - RNA, 19 nt, Artificial Sequence
  Description of Artificial Sequence: Synthetic oligonucleotide
  Sense strand starting at position 1404 of SEQ ID NO: 3446
cgcacauuuccgcgggcua

SEQ ID NO: 268091 - RNA, 19 nt, Artificial Sequence
  Description of Artificial Sequence: Synthetic oligonucleotide
  Antisense strand to SEQ ID NO: 268090
uagcccgcggaaaugugcg

SEQ ID NO: 268092 - RNA, 19 nt, Artificial Sequence
  Description of Artificial Sequence: Synthetic oligonucleotide
  Sense strand starting at position 1476 of SEQ ID NO: 3446
cuggaaaccucugucgaga

SEQ ID NO: 268093 - RNA, 19 nt, Artificial Sequence
  Description of Artificial Sequence: Synthetic oligonucleotide
  Antisense strand to SEQ ID NO: 268092
ucucgacagagguuuccag

SEQ ID NO: 268094 - RNA, 19 nt, Artificial Sequence
  Description of Artificial Sequence: Synthetic oligonucleotide
  Sense strand starting at position 1689 of SEQ ID NO: 3446
ggcugcaucuacucacuua

SEQ ID NO: 268095 - RNA, 19 nt, Artificial Sequence
  Description of Artificial Sequence: Synthetic oligonucleotide
  Antisense strand to SEQ ID NO: 268094
uaagugaguagaugcagcc

SEQ ID NO: 268096 - RNA, 19 nt, Artificial Sequence
  Description of Artificial Sequence: Synthetic oligonucleotide
  Sense strand starting at position 1919 of SEQ ID NO: 3446
cgccaaugugccuuuguuu

SEQ ID NO: 268097 - RNA, 19 nt, Artificial Sequence
  Description of Artificial Sequence: Synthetic oligonucleotide
  Antisense strand to SEQ ID NO: 268096
aaacaaaggcacauuggcg

SEQ ID NO: 268098 - RNA, 19 nt, Artificial Sequence
  Description of Artificial Sequence: Synthetic oligonucleotide
  Sense strand starting at position 1920 of SEQ ID NO: 3446
gccaaugugccuuuguuua

SEQ ID NO: 268099 - RNA, 19 nt, Artificial Sequence
  Description of Artificial Sequence: Synthetic oligonucleotide
  Antisense strand to SEQ ID NO: 268098
uaaacaaaggcacauuggc

SEQ ID NO: 268100 - RNA, 19 nt, Artificial Sequence
  Description of Artificial Sequence: Synthetic oligonucleotide
  Sense strand starting at position 2060 of SEQ ID NO: 3446
ugguauauuuccgaccuga

SEQ ID NO: 268101 - RNA, 19 nt, Artificial Sequence
  Description of Artificial Sequence: Synthetic oligonucleotide
  Antisense strand to SEQ ID NO: 268100
ucaggucggaaauauacca

SEQ ID NO: 268102 - RNA, 19 nt, Artificial Sequence
  Description of Artificial Sequence: Synthetic oligonucleotide
  Sense strand starting at position 2418 of SEQ ID NO: 3446
agcggaagagcguacagau

SEQ ID NO: 268103 - RNA, 19 nt, Artificial Sequence
  Description of Artificial Sequence: Synthetic oligonucleotide
  Antisense strand to SEQ ID NO: 268102
aucuguacgcucuuccgcu

SEQ ID NO: 268104 - RNA, 19 nt, Artificial Sequence
  Description of Artificial Sequence: Synthetic oligonucleotide
  Sense strand starting at position 2749 of SEQ ID NO: 3446
ugacccagcucuuuagaaa

SEQ ID NO: 268105 - RNA, 19 nt, Artificial Sequence
  Description of Artificial Sequence: Synthetic oligonucleotide
  Antisense strand to SEQ ID NO: 268104
uuucuaaagagcuggguca

SEQ ID NO: 268106 - RNA, 19 nt, Artificial Sequence
  Description of Artificial Sequence: Synthetic oligonucleotide
  Sense strand starting at position 2798 of SEQ ID NO: 3446
uuuccuuucgcagacaaug

SEQ ID NO: 268107 - RNA, 19 nt, Artificial Sequence
  Description of Artificial Sequence: Synthetic oligonucleotide
  Antisense strand to SEQ ID NO: 268106
cauugucugcgaaaggaaa

SEQ ID NO: 268108 - RNA, 19 nt, Artificial Sequence
  Description of Artificial Sequence: Synthetic oligonucleotide
  Sense strand starting at position 2840 of SEQ ID NO: 3446
gcgccuucugcagaaaggu

SEQ ID NO: 268109 - RNA, 19 nt, Artificial Sequence
  Description of Artificial Sequence: Synthetic oligonucleotide
  Antisense strand to SEQ ID NO: 268108
accuuucugcagaaggcgc

SEQ ID NO: 268110 - RNA, 19 nt, Artificial Sequence
  Description of Artificial Sequence: Synthetic oligonucleotide
  Sense strand starting at position 2849 of SEQ ID NO: 3446
gcagaaagguacucugauu

SEQ ID NO: 268111 - RNA, 19 nt, Artificial Sequence
  Description of Artificial Sequence: Synthetic oligonucleotide
  Antisense strand to SEQ ID NO: 268110
aaucagaguaccuuucugc

SEQ ID NO: 268112 - RNA, 19 nt, Artificial Sequence
  Description of Artificial Sequence: Synthetic oligonucleotide
  Sense strand starting at position 2948 of SEQ ID NO: 3446
uaaaucgaucuucguuuga

SEQ ID NO: 268113 - RNA, 19 nt, Artificial Sequence
  Description of Artificial Sequence: Synthetic oligonucleotide
  Antisense strand to SEQ ID NO: 268112
ucaaacgaagaucgauuua

SEQ ID NO: 268114 - RNA, 19 nt, Artificial Sequence
  Description of Artificial Sequence: Synthetic oligonucleotide
  Sense strand starting at position 2950 of SEQ ID NO: 3446
aaucgaucuucguuugaaa

SEQ ID NO: 268115 - RNA, 19 nt, Artificial Sequence
  Description of Artificial Sequence: Synthetic oligonucleotide
  Antisense strand to SEQ ID NO: 268114
uuucaaacgaagaucgauu

SEQ ID NO: 268116 - RNA, 19 nt, Artificial Sequence
  Description of Artificial Sequence: Synthetic oligonucleotide
  Sense strand starting at position 2952 of SEQ ID NO: 3446
ucgaucuucguuugaaaca

SEQ ID NO: 268117 - RNA, 19 nt, Artificial Sequence
  Description of Artificial Sequence: Synthetic oligonucleotide
  Antisense strand to SEQ ID NO: 268116
uguuucaaacgaagaucga

SEQ ID NO: 268118 - RNA, 19 nt, Artificial Sequence
  Description of Artificial Sequence: Synthetic oligonucleotide
  Sense strand starting at position 3461 of SEQ ID NO: 3446
gauggcuccguggaacuau

SEQ ID NO: 268119 - RNA, 19 nt, Artificial Sequence
  Description of Artificial Sequence: Synthetic oligonucleotide
  Antisense strand to SEQ ID NO: 268118
auaguuccacggagccauc

SEQ ID NO: 268120 - RNA, 19 nt, Artificial Sequence
  Description of Artificial Sequence: Synthetic oligonucleotide
  Sense strand starting at position 3639 of SEQ ID NO: 3446
acgugaccaccuuaaguuu

SEQ ID NO: 268121 - RNA, 19 nt, Artificial Sequence
  Description of Artificial Sequence: Synthetic oligonucleotide
  Antisense strand to SEQ ID NO: 268120
aaacuuaagguggucacgu

SEQ ID NO: 268122 - RNA, 19 nt, Artificial Sequence
  Description of Artificial Sequence: Synthetic oligonucleotide
  Sense strand starting at position 388 of SEQ ID NO: 3447
agauauucuuucccuaugu

SEQ ID NO: 268123 - RNA, 19 nt, Artificial Sequence
  Description of Artificial Sequence: Synthetic oligonucleotide
  Antisense strand to SEQ ID NO: 268122
acauagggaaagaauaucu

SEQ ID NO: 268124 - RNA, 19 nt, Artificial Sequence
  Description of Artificial Sequence: Synthetic oligonucleotide
  Sense strand starting at position 633 of SEQ ID NO: 3447
uuaguuacuuccuugagca

SEQ ID NO: 268125 - RNA, 19 nt, Artificial Sequence
  Description of Artificial Sequence: Synthetic oligonucleotide
  Antisense strand to SEQ ID NO: 268124
ugcucaaggaaguaacuaa

SEQ ID NO: 268126 - RNA, 19 nt, Artificial Sequence
  Description of Artificial Sequence: Synthetic oligonucleotide
  Sense strand starting at position 634 of SEQ ID NO: 3447
uaguuacuuccuugagcag

SEQ ID NO: 268127 - RNA, 19 nt, Artificial Sequence
  Description of Artificial Sequence: Synthetic oligonucleotide
  Antisense strand to SEQ ID NO: 268126
cugcucaaggaaguaacua

SEQ ID NO: 268128 - RNA, 19 nt, Artificial Sequence
  Description of Artificial Sequence: Synthetic oligonucleotide
  Sense strand starting at position 706 of SEQ ID NO: 3447
agacuacaguaggaaauaa

SEQ ID NO: 268129 - RNA, 19 nt, Artificial Sequence
  Description of Artificial Sequence: Synthetic oligonucleotide
  Antisense strand to SEQ ID NO: 268128
uuauuuccuacuguagucu

SEQ ID NO: 268130 - RNA, 19 nt, Artificial Sequence
  Description of Artificial Sequence: Synthetic oligonucleotide
  Sense strand starting at position 740 of SEQ ID NO: 3447
acaggaaagcuguagccaa

SEQ ID NO: 268131 - RNA, 19 nt, Artificial Sequence
  Description of Artificial Sequence: Synthetic oligonucleotide
  Antisense strand to SEQ ID NO: 268130
uuggcuacagcuuuccugu

SEQ ID NO: 268132 - RNA, 19 nt, Artificial Sequence
  Description of Artificial Sequence: Synthetic oligonucleotide
  Sense strand starting at position 754 of SEQ ID NO: 3447
gccaaugggcuccagagaa

SEQ ID NO: 268133 - RNA, 19 nt, Artificial Sequence
  Description of Artificial Sequence: Synthetic oligonucleotide
  Antisense strand to SEQ ID NO: 268132
uucucuggagcccauuggc

SEQ ID NO: 268134 - RNA, 19 nt, Artificial Sequence
  Description of Artificial Sequence: Synthetic oligonucleotide
  Sense strand starting at position 844 of SEQ ID NO: 3447
gauagaugcccuuggaauu

SEQ ID NO: 268135 - RNA, 19 nt, Artificial Sequence
  Description of Artificial Sequence: Synthetic oligonucleotide
  Antisense strand to SEQ ID NO: 268134
aauuccaagggcaucuauc

SEQ ID NO: 268136 - RNA, 19 nt, Artificial Sequence
  Description of Artificial Sequence: Synthetic oligonucleotide
  Sense strand starting at position 935 of SEQ ID NO: 3447
gagggcagugcccaagauu

SEQ ID NO: 268137 - RNA, 19 nt, Artificial Sequence
  Description of Artificial Sequence: Synthetic oligonucleotide
  Antisense strand to SEQ ID NO: 268136
aaucuugggcacugcccuc

SEQ ID NO: 268138 - RNA, 19 nt, Artificial Sequence
  Description of Artificial Sequence: Synthetic oligonucleotide
  Sense strand starting at position 975 of SEQ ID NO: 3447
ugaagaaaccucugcgaca

SEQ ID NO: 268139 - RNA, 19 nt, Artificial Sequence
  Description of Artificial Sequence: Synthetic oligonucleotide
  Antisense strand to SEQ ID NO: 268138
ugucgcagagguuucuuca

SEQ ID NO: 268140 - RNA, 19 nt, Artificial Sequence
  Description of Artificial Sequence: Synthetic oligonucleotide
  Sense strand starting at position 1154 of SEQ ID NO: 3447
gacacuuucguuuauugga

SEQ ID NO: 268141 - RNA, 19 nt, Artificial Sequence
  Description of Artificial Sequence: Synthetic oligonucleotide
  Antisense strand to SEQ ID NO: 268140
uccaauaaacgaaaguguc

SEQ ID NO: 268142 - RNA, 19 nt, Artificial Sequence
  Description of Artificial Sequence: Synthetic oligonucleotide
  Sense strand starting at position 1189 of SEQ ID NO: 3447
ugucaacuccucugcaaga

SEQ ID NO: 268143 - RNA, 19 nt, Artificial Sequence
  Description of Artificial Sequence: Synthetic oligonucleotide
  Antisense strand to SEQ ID NO: 268142
ucuugcagaggaguugaca

SEQ ID NO: 268144 - RNA, 19 nt, Artificial Sequence
  Description of Artificial Sequence: Synthetic oligonucleotide
  Sense strand starting at position 1275 of SEQ ID NO: 3447
cacaguccagucggaaaua

SEQ ID NO: 268145 - RNA, 19 nt, Artificial Sequence
  Description of Artificial Sequence: Synthetic oligonucleotide
  Antisense strand to SEQ ID NO: 268144
uauuuccgacuggacugug

SEQ ID NO: 268146 - RNA, 19 nt, Artificial Sequence
  Description of Artificial Sequence: Synthetic oligonucleotide
  Sense strand starting at position 2036 of SEQ ID NO: 3447
gcagguuuccauuggguga

SEQ ID NO: 268147 - RNA, 19 nt, Artificial Sequence
  Description of Artificial Sequence: Synthetic oligonucleotide
  Antisense strand to SEQ ID NO: 268146
ucacccaauggaaaccugc

SEQ ID NO: 268148 - RNA, 19 nt, Artificial Sequence
  Description of Artificial Sequence: Synthetic oligonucleotide
  Sense strand starting at position 2278 of SEQ ID NO: 3447
caguucuaaugccuggaaa

SEQ ID NO: 268149 - RNA, 19 nt, Artificial Sequence
  Description of Artificial Sequence: Synthetic oligonucleotide
  Antisense strand to SEQ ID NO: 268148
uuuccaggcauuagaacug

SEQ ID NO: 268150 - RNA, 19 nt, Artificial Sequence
  Description of Artificial Sequence: Synthetic oligonucleotide
  Sense strand starting at position 2391 of SEQ ID NO: 3447
gacgccaauucuccggaaa

SEQ ID NO: 268151 - RNA, 19 nt, Artificial Sequence
  Description of Artificial Sequence: Synthetic oligonucleotide
  Antisense strand to SEQ ID NO: 268150
uuuccggagaauuggcguc

SEQ ID NO: 268152 - RNA, 19 nt, Artificial Sequence
  Description of Artificial Sequence: Synthetic oligonucleotide
  Sense strand starting at position 2392 of SEQ ID NO: 3447
acgccaauucuccggaaag

SEQ ID NO: 268153 - RNA, 19 nt, Artificial Sequence
  Description of Artificial Sequence: Synthetic oligonucleotide
  Antisense strand to SEQ ID NO: 268152
cuuuccggagaauuggcgu

SEQ ID NO: 268154 - RNA, 19 nt, Artificial Sequence
  Description of Artificial Sequence: Synthetic oligonucleotide
  Sense strand starting at position 2394 of SEQ ID NO: 3447
gccaauucuccggaaagcu

SEQ ID NO: 268155 - RNA, 19 nt, Artificial Sequence
  Description of Artificial Sequence: Synthetic oligonucleotide
  Antisense strand to SEQ ID NO: 268154
agcuuuccggagaauuggc

SEQ ID NO: 268156 - RNA, 19 nt, Artificial Sequence
  Description of Artificial Sequence: Synthetic oligonucleotide
  Sense strand starting at position 2473 of SEQ ID NO: 3447
uugcuuaaacuuuguaaga

SEQ ID NO: 268157 - RNA, 19 nt, Artificial Sequence
  Description of Artificial Sequence: Synthetic oligonucleotide
  Antisense strand to SEQ ID NO: 268156
ucuuacaaaguuuaagcaa

SEQ ID NO: 268158 - RNA, 19 nt, Artificial Sequence
  Description of Artificial Sequence: Synthetic oligonucleotide
  Sense strand starting at position 2474 of SEQ ID NO: 3447
ugcuuaaacuuuguaagag

SEQ ID NO: 268159 - RNA, 19 nt, Artificial Sequence
  Description of Artificial Sequence: Synthetic oligonucleotide
  Antisense strand to SEQ ID NO: 268158
cucuuacaaaguuuaagca

SEQ ID NO: 268160 - RNA, 19 nt, Artificial Sequence
  Description of Artificial Sequence: Synthetic oligonucleotide
  Sense strand starting at position 2604 of SEQ ID NO: 3447
accgaaaguuaaguuggua

SEQ ID NO: 268161 - RNA, 19 nt, Artificial Sequence
  Description of Artificial Sequence: Synthetic oligonucleotide
  Antisense strand to SEQ ID NO: 268160
uaccaacuuaacuuucggu

SEQ ID NO: 268162 - RNA, 19 nt, Artificial Sequence
  Description of Artificial Sequence: Synthetic oligonucleotide
  Sense strand starting at position 2607 of SEQ ID NO: 3447
gaaaguuaaguugguaaga

SEQ ID NO: 268163 - RNA, 19 nt, Artificial Sequence
  Description of Artificial Sequence: Synthetic oligonucleotide
  Antisense strand to SEQ ID NO: 268162
ucuuaccaacuuaacuuuc

SEQ ID NO: 268164 - RNA, 19 nt, Artificial Sequence
  Description of Artificial Sequence: Synthetic oligonucleotide
  Sense strand starting at position 2668 of SEQ ID NO: 3447
cuacguugagaagauguuu

SEQ ID NO: 268165 - RNA, 19 nt, Artificial Sequence
  Description of Artificial Sequence: Synthetic oligonucleotide
  Antisense strand to SEQ ID NO: 268164
aaacaucuucucaacguag

SEQ ID NO: 268166 - RNA, 19 nt, Artificial Sequence
  Description of Artificial Sequence: Synthetic oligonucleotide
  Sense strand starting at position 2676 of SEQ ID NO: 3447
agaagauguuuggaaagaa

SEQ ID NO: 268167 - RNA, 19 nt, Artificial Sequence
  Description of Artificial Sequence: Synthetic oligonucleotide
  Antisense strand to SEQ ID NO: 268166
uucuuuccaaacaucuucu

SEQ ID NO: 268168 - RNA, 19 nt, Artificial Sequence
  Description of Artificial Sequence: Synthetic oligonucleotide
  Sense strand starting at position 2701 of SEQ ID NO: 3447
uugguuucgaguuagugga

SEQ ID NO: 268169 - RNA, 19 nt, Artificial Sequence
  Description of Artificial Sequence: Synthetic oligonucleotide
  Antisense strand to SEQ ID NO: 268168
uccacuaacucgaaaccaa

SEQ ID NO: 268170 - RNA, 19 nt, Artificial Sequence
  Description of Artificial Sequence: Synthetic oligonucleotide
  Sense strand starting at position 2703 of SEQ ID NO: 3447
gguuucgaguuaguggaaa

SEQ ID NO: 268171 - RNA, 19 nt, Artificial Sequence
  Description of Artificial Sequence: Synthetic oligonucleotide
  Antisense strand to SEQ ID NO: 268170
uuuccacuaacucgaaacc

SEQ ID NO: 268172 - RNA, 19 nt, Artificial Sequence
  Description of Artificial Sequence: Synthetic oligonucleotide
  Sense strand starting at position 2705 of SEQ ID NO: 3447
uuucgaguuaguggaaaga

SEQ ID NO: 268173 - RNA, 19 nt, Artificial Sequence
  Description of Artificial Sequence: Synthetic oligonucleotide
  Antisense strand to SEQ ID NO: 268172
ucuuuccacuaacucgaaa

SEQ ID NO: 268174 - RNA, 19 nt, Artificial Sequence
  Description of Artificial Sequence: Synthetic oligonucleotide
  Sense strand starting at position 2727 of SEQ ID NO: 3447
gaugauaaauucuugguga

SEQ ID NO: 268175 - RNA, 19 nt, Artificial Sequence
  Description of Artificial Sequence: Synthetic oligonucleotide
  Antisense strand to SEQ ID NO: 268174
ucaccaagaauuuaucauc

SEQ ID NO: 268176 - RNA, 19 nt, Artificial Sequence
  Description of Artificial Sequence: Synthetic oligonucleotide
  Sense strand starting at position 2729 of SEQ ID NO: 3447
ugauaaauucuuggugagc

SEQ ID NO: 268177 - RNA, 19 nt, Artificial Sequence
  Description of Artificial Sequence: Synthetic oligonucleotide
  Antisense strand to SEQ ID NO: 268176
gcucaccaagaauuuauca

SEQ ID NO: 268178 - RNA, 19 nt, Artificial Sequence
  Description of Artificial Sequence: Synthetic oligonucleotide
  Sense strand starting at position 2730 of SEQ ID NO: 3447
gauaaauucuuggugagcu

SEQ ID NO: 268179 - RNA, 19 nt, Artificial Sequence
  Description of Artificial Sequence: Synthetic oligonucleotide
  Antisense strand to SEQ ID NO: 268178
agcucaccaagaauuuauc

SEQ ID NO: 268180 - RNA, 19 nt, Artificial Sequence
  Description of Artificial Sequence: Synthetic oligonucleotide
  Sense strand starting at position 2734 of SEQ ID NO: 3447
aauucuuggugagcuauua

SEQ ID NO: 268181 - RNA, 19 nt, Artificial Sequence
  Description of Artificial Sequence: Synthetic oligonucleotide
  Antisense strand to SEQ ID NO: 268180
uaauagcucaccaagaauu

SEQ ID NO: 268182 - RNA, 19 nt, Artificial Sequence
  Description of Artificial Sequence: Synthetic oligonucleotide
  Sense strand starting at position 2800 of SEQ ID NO: 3447
cccuuagacguguaugaug

SEQ ID NO: 268183 - RNA, 19 nt, Artificial Sequence
  Description of Artificial Sequence: Synthetic oligonucleotide
  Antisense strand to SEQ ID NO: 268182
caucauacacgucuaaggg

SEQ ID NO: 268184 - RNA, 19 nt, Artificial Sequence
  Description of Artificial Sequence: Synthetic oligonucleotide
  Sense strand starting at position 2802 of SEQ ID NO: 3447
cuuagacguguaugaugga

SEQ ID NO: 268185 - RNA, 19 nt, Artificial Sequence
  Description of Artificial Sequence: Synthetic oligonucleotide
  Antisense strand to SEQ ID NO: 268184
uccaucauacacgucuaag

SEQ ID NO: 268186 - RNA, 19 nt, Artificial Sequence
  Description of Artificial Sequence: Synthetic oligonucleotide
  Sense strand starting at position 2819 of SEQ ID NO: 3447
gagggaagaugaugaauca

SEQ ID NO: 268187 - RNA, 19 nt, Artificial Sequence
  Description of Artificial Sequence: Synthetic oligonucleotide
  Antisense strand to SEQ ID NO: 268186
ugauucaucaucuucccuc

SEQ ID NO: 268188 - RNA, 19 nt, Artificial Sequence
  Description of Artificial Sequence: Synthetic oligonucleotide
  Sense strand starting at position 3131 of SEQ ID NO: 3447
acaugucuguucucucaag

SEQ ID NO: 268189 - RNA, 19 nt, Artificial Sequence
  Description of Artificial Sequence: Synthetic oligonucleotide
  Antisense strand to SEQ ID NO: 268188
cuugagagaacagacaugu

SEQ ID NO: 268190 - RNA, 19 nt, Artificial Sequence
  Description of Artificial Sequence: Synthetic oligonucleotide
  Sense strand starting at position 3239 of SEQ ID NO: 3447
ggcaacagagugugagaau

SEQ ID NO: 268191 - RNA, 19 nt, Artificial Sequence
  Description of Artificial Sequence: Synthetic oligonucleotide
  Antisense strand to SEQ ID NO: 268190
auucucacacucuguugcc

SEQ ID NO: 268192 - RNA, 19 nt, Artificial Sequence
  Description of Artificial Sequence: Synthetic oligonucleotide
  Sense strand starting at position 3365 of SEQ ID NO: 3447
ugauucuucuaucuuugga

SEQ ID NO: 268193 - RNA, 19 nt, Artificial Sequence
  Description of Artificial Sequence: Synthetic oligonucleotide
  Antisense strand to SEQ ID NO: 268192
uccaaagauagaagaauca

SEQ ID NO: 268194 - RNA, 19 nt, Artificial Sequence
  Description of Artificial Sequence: Synthetic oligonucleotide
  Sense strand starting at position 3368 of SEQ ID NO: 3447
uucuucuaucuuuggaaga

SEQ ID NO: 268195 - RNA, 19 nt, Artificial Sequence
  Description of Artificial Sequence: Synthetic oligonucleotide
  Antisense strand to SEQ ID NO: 268194
ucuuccaaagauagaagaa

SEQ ID NO: 268196 - RNA, 19 nt, Artificial Sequence
  Description of Artificial Sequence: Synthetic oligonucleotide
  Sense strand starting at position 3931 of SEQ ID NO: 3447
ucauguuaucauuagaguu

SEQ ID NO: 268197 - RNA, 19 nt, Artificial Sequence
  Description of Artificial Sequence: Synthetic oligonucleotide
  Antisense strand to SEQ ID NO: 268196
aacucuaaugauaacauga

SEQ ID NO: 268198 - RNA, 19 nt, Artificial Sequence
  Description of Artificial Sequence: Synthetic oligonucleotide
  Sense strand starting at position 3939 of SEQ ID NO: 3447
ucauuagaguuucccauuc

SEQ ID NO: 268199 - RNA, 19 nt, Artificial Sequence
  Description of Artificial Sequence: Synthetic oligonucleotide
  Antisense strand to SEQ ID NO: 268198
gaaugggaaacucuaauga

SEQ ID NO: 268200 - RNA, 19 nt, Artificial Sequence
  Description of Artificial Sequence: Synthetic oligonucleotide
  Sense strand starting at position 3969 of SEQ ID NO: 3447
gggcuuuaucauuaucaac

SEQ ID NO: 268201 - RNA, 19 nt, Artificial Sequence
  Description of Artificial Sequence: Synthetic oligonucleotide
  Antisense strand to SEQ ID NO: 268200
guugauaaugauaaagccc

SEQ ID NO: 268202 - RNA, 19 nt, Artificial Sequence
  Description of Artificial Sequence: Synthetic oligonucleotide
  Sense strand starting at position 177 of SEQ ID NO: 3448
uccagacacuguucucaga

SEQ ID NO: 268203 - RNA, 19 nt, Artificial Sequence
  Description of Artificial Sequence: Synthetic oligonucleotide
  Antisense strand to SEQ ID NO: 268202
ucugagaacagugucugga

SEQ ID NO: 268204 - RNA, 19 nt, Artificial Sequence
  Description of Artificial Sequence: Synthetic oligonucleotide
  Sense strand starting at position 213 of SEQ ID NO: 3448
ucuagagagugguccgaga

SEQ ID NO: 268205 - RNA, 19 nt, Artificial Sequence
  Description of Artificial Sequence: Synthetic oligonucleotide
  Antisense strand to SEQ ID NO: 268204
ucucggaccacucucuaga

SEQ ID NO: 268206 - RNA, 19 nt, Artificial Sequence
  Description of Artificial Sequence: Synthetic oligonucleotide
  Sense strand starting at position 215 of SEQ ID NO: 3448
uagagagugguccgagaag

SEQ ID NO: 268207 - RNA, 19 nt, Artificial Sequence
  Description of Artificial Sequence: Synthetic oligonucleotide
  Antisense strand to SEQ ID NO: 268206
cuucucggaccacucucua

SEQ ID NO: 268208 - RNA, 19 nt, Artificial Sequence
  Description of Artificial Sequence: Synthetic oligonucleotide
  Sense strand starting at position 331 of SEQ ID NO: 3448
cgaaaugcuuaucuccaca

SEQ ID NO: 268209 - RNA, 19 nt, Artificial Sequence
  Description of Artificial Sequence: Synthetic oligonucleotide
  Antisense strand to SEQ ID NO: 268208
uguggagauaagcauuucg

SEQ ID NO: 268210 - RNA, 19 nt, Artificial Sequence
  Description of Artificial Sequence: Synthetic oligonucleotide
  Sense strand starting at position 600 of SEQ ID NO: 3448
cagccugagccuuaugauu

SEQ ID NO: 268211 - RNA, 19 nt, Artificial Sequence
  Description of Artificial Sequence: Synthetic oligonucleotide
  Antisense strand to SEQ ID NO: 268210
aaucauaaggcucaggcug

SEQ ID NO: 268212 - RNA, 19 nt, Artificial Sequence
  Description of Artificial Sequence: Synthetic oligonucleotide
  Sense strand starting at position 605 of SEQ ID NO: 3448
ugagccuuaugauucugaa

SEQ ID NO: 268213 - RNA, 19 nt, Artificial Sequence
  Description of Artificial Sequence: Synthetic oligonucleotide
  Antisense strand to SEQ ID NO: 268212
uucagaaucauaaggcuca

SEQ ID NO: 268214 - RNA, 19 nt, Artificial Sequence
  Description of Artificial Sequence: Synthetic oligonucleotide
  Sense strand starting at position 701 of SEQ ID NO: 3448
guuaacauugcucaaugua

SEQ ID NO: 268215 - RNA, 19 nt, Artificial Sequence
  Description of Artificial Sequence: Synthetic oligonucleotide
  Antisense strand to SEQ ID NO: 268214
uacauugagcaauguuaac

SEQ ID NO: 268216 - RNA, 19 nt, Artificial Sequence
  Description of Artificial Sequence: Synthetic oligonucleotide
  Sense strand starting at position 1004 of SEQ ID NO: 3448
ugggaucucucuuuaaauu

SEQ ID NO: 268217 - RNA, 19 nt, Artificial Sequence
  Description of Artificial Sequence: Synthetic oligonucleotide
  Antisense strand to SEQ ID NO: 268216
aauuuaaagagagauccca

SEQ ID NO: 268218 - RNA, 19 nt, Artificial Sequence
  Description of Artificial Sequence: Synthetic oligonucleotide
  Sense strand starting at position 1070 of SEQ ID NO: 3448
cugcuuuagcggucacuuu

SEQ ID NO: 268219 - RNA, 19 nt, Artificial Sequence
  Description of Artificial Sequence: Synthetic oligonucleotide
  Antisense strand to SEQ ID NO: 268218
aaagugaccgcuaaagcag

SEQ ID NO: 268220 - RNA, 19 nt, Artificial Sequence
  Description of Artificial Sequence: Synthetic oligonucleotide
  Sense strand starting at position 2060 of SEQ ID NO: 3448
gcggcagagcuauccgauu

SEQ ID NO: 268221 - RNA, 19 nt, Artificial Sequence
  Description of Artificial Sequence: Synthetic oligonucleotide
  Antisense strand to SEQ ID NO: 268220
aaucggauagcucugccgc

SEQ ID NO: 268222 - RNA, 19 nt, Artificial Sequence
  Description of Artificial Sequence: Synthetic oligonucleotide
  Sense strand starting at position 2103 of SEQ ID NO: 3448
uucuguguuccugauuaaa

SEQ ID NO: 268223 - RNA, 19 nt, Artificial Sequence
  Description of Artificial Sequence: Synthetic oligonucleotide
  Antisense strand to SEQ ID NO: 268222
uuuaaucaggaacacagaa

SEQ ID NO: 268224 - RNA, 19 nt, Artificial Sequence
  Description of Artificial Sequence: Synthetic oligonucleotide
  Sense strand starting at position 2105 of SEQ ID NO: 3448
cuguguuccugauuaaaga

SEQ ID NO: 268225 - RNA, 19 nt, Artificial Sequence
  Description of Artificial Sequence: Synthetic oligonucleotide
  Antisense strand to SEQ ID NO: 268224
ucuuuaaucaggaacacag

SEQ ID NO: 268226 - RNA, 19 nt, Artificial Sequence
  Description of Artificial Sequence: Synthetic oligonucleotide
  Sense strand starting at position 2106 of SEQ ID NO: 3448
uguguuccugauuaaagag

SEQ ID NO: 268227 - RNA, 19 nt, Artificial Sequence
  Description of Artificial Sequence: Synthetic oligonucleotide
  Antisense strand to SEQ ID NO: 268226
cucuuuaaucaggaacaca

SEQ ID NO: 268228 - RNA, 19 nt, Artificial Sequence
  Description of Artificial Sequence: Synthetic oligonucleotide
  Sense strand starting at position 2535 of SEQ ID NO: 3448
ucagccaugcguucgaaca

SEQ ID NO: 268229 - RNA, 19 nt, Artificial Sequence
  Description of Artificial Sequence: Synthetic oligonucleotide
  Antisense strand to SEQ ID NO: 268228
uguucgaacgcauggcuga

SEQ ID NO: 268230 - RNA, 19 nt, Artificial Sequence
  Description of Artificial Sequence: Synthetic oligonucleotide
  Sense strand starting at position 2581 of SEQ ID NO: 3448
ccgucagcccggucugaau

SEQ ID NO: 268231 - RNA, 19 nt, Artificial Sequence
  Description of Artificial Sequence: Synthetic oligonucleotide
  Antisense strand to SEQ ID NO: 268230
auucagaccgggcugacgg

SEQ ID NO: 268232 - RNA, 19 nt, Artificial Sequence
  Description of Artificial Sequence: Synthetic oligonucleotide
  Sense strand starting at position 2626 of SEQ ID NO: 3448
cuacucagauccuuuguua

SEQ ID NO: 268233 - RNA, 19 nt, Artificial Sequence
  Description of Artificial Sequence: Synthetic oligonucleotide
  Antisense strand to SEQ ID NO: 268232
uaacaaaggaucugaguag

SEQ ID NO: 268234 - RNA, 19 nt, Artificial Sequence
  Description of Artificial Sequence: Synthetic oligonucleotide
  Sense strand starting at position 2664 of SEQ ID NO: 3448
uccucucuggguuaggauu

SEQ ID NO: 268235 - RNA, 19 nt, Artificial Sequence
  Description of Artificial Sequence: Synthetic oligonucleotide
  Antisense strand to SEQ ID NO: 268234
aauccuaacccagagagga

SEQ ID NO: 268236 - RNA, 19 nt, Artificial Sequence
  Description of Artificial Sequence: Synthetic oligonucleotide
  Sense strand starting at position 2765 of SEQ ID NO: 3448
auuggauuccaucaaguuc

SEQ ID NO: 268237 - RNA, 19 nt, Artificial Sequence
  Description of Artificial Sequence: Synthetic oligonucleotide
  Antisense strand to SEQ ID NO: 268236
gaacuugauggaauccaau

SEQ ID NO: 268238 - RNA, 19 nt, Artificial Sequence
  Description of Artificial Sequence: Synthetic oligonucleotide
  Sense strand starting at position 2806 of SEQ ID NO: 3448
gaaggcgucucauccaaau

SEQ ID NO: 268239 - RNA, 19 nt, Artificial Sequence
  Description of Artificial Sequence: Synthetic oligonucleotide
  Antisense strand to SEQ ID NO: 268238
auuuggaugagacgccuuc

SEQ ID NO: 268240 - RNA, 19 nt, Artificial Sequence
  Description of Artificial Sequence: Synthetic oligonucleotide
  Sense strand starting at position 2859 of SEQ ID NO: 3448
auggaaacguggucacaaa

SEQ ID NO: 268241 - RNA, 19 nt, Artificial Sequence
  Description of Artificial Sequence: Synthetic oligonucleotide
  Antisense strand to SEQ ID NO: 268240
uuugugaccacguuuccau

SEQ ID NO: 268242 - RNA, 19 nt, Artificial Sequence
  Description of Artificial Sequence: Synthetic oligonucleotide
  Sense strand starting at position 2913 of SEQ ID NO: 3448
uuuaaauggaggcgugaaa

SEQ ID NO: 268243 - RNA, 19 nt, Artificial Sequence
  Description of Artificial Sequence: Synthetic oligonucleotide
  Antisense strand to SEQ ID NO: 268242
uuucacgccuccauuuaaa

SEQ ID NO: 268244 - RNA, 19 nt, Artificial Sequence
  Description of Artificial Sequence: Synthetic oligonucleotide
  Sense strand starting at position 2975 of SEQ ID NO: 3448
guaucuuuguuucugagga

SEQ ID NO: 268245 - RNA, 19 nt, Artificial Sequence
  Description of Artificial Sequence: Synthetic oligonucleotide
  Antisense strand to SEQ ID NO: 268244
uccucagaaacaaagauac

SEQ ID NO: 268246 - RNA, 19 nt, Artificial Sequence
  Description of Artificial Sequence: Synthetic oligonucleotide
  Sense strand starting at position 2988 of SEQ ID NO: 3448
ugaggauggcuuuguggau

SEQ ID NO: 268247 - RNA, 19 nt, Artificial Sequence
  Description of Artificial Sequence: Synthetic oligonucleotide
  Antisense strand to SEQ ID NO: 268246
auccacaaagccauccuca

SEQ ID NO: 268248 - RNA, 19 nt, Artificial Sequence
  Description of Artificial Sequence: Synthetic oligonucleotide
  Sense strand starting at position 2989 of SEQ ID NO: 3448
gaggauggcuuuguggauu

SEQ ID NO: 268249 - RNA, 19 nt, Artificial Sequence
  Description of Artificial Sequence: Synthetic oligonucleotide
  Antisense strand to SEQ ID NO: 268248
aauccacaaagccauccuc

SEQ ID NO: 268250 - RNA, 19 nt, Artificial Sequence
  Description of Artificial Sequence: Synthetic oligonucleotide
  Sense strand starting at position 3210 of SEQ ID NO: 3448
uacaguuucggugacgaga

SEQ ID NO: 268251 - RNA, 19 nt, Artificial Sequence
  Description of Artificial Sequence: Synthetic oligonucleotide
  Antisense strand to SEQ ID NO: 268250
ucucgucaccgaaacugua

SEQ ID NO: 268252 - RNA, 19 nt, Artificial Sequence
  Description of Artificial Sequence: Synthetic oligonucleotide
  Sense strand starting at position 3271 of SEQ ID NO: 3448
uggauucuucugggugguu

SEQ ID NO: 268253 - RNA, 19 nt, Artificial Sequence
  Description of Artificial Sequence: Synthetic oligonucleotide
  Antisense strand to SEQ ID NO: 268252
aaccacccagaagaaucca

SEQ ID NO: 268254 - RNA, 19 nt, Artificial Sequence
  Description of Artificial Sequence: Synthetic oligonucleotide
  Sense strand starting at position 3272 of SEQ ID NO: 3448
ggauucuucugggugguuu

SEQ ID NO: 268255 - RNA, 19 nt, Artificial Sequence
  Description of Artificial Sequence: Synthetic oligonucleotide
  Antisense strand to SEQ ID NO: 268254
aaaccacccagaagaaucc

SEQ ID NO: 268256 - RNA, 19 nt, Artificial Sequence
  Description of Artificial Sequence: Synthetic oligonucleotide
  Sense strand starting at position 3303 of SEQ ID NO: 3448
ggacuugcccauuagcuuu

SEQ ID NO: 268257 - RNA, 19 nt, Artificial Sequence
  Description of Artificial Sequence: Synthetic oligonucleotide
  Antisense strand to SEQ ID NO: 268256
aaagcuaaugggcaagucc

SEQ ID NO: 268258 - RNA, 19 nt, Artificial Sequence
  Description of Artificial Sequence: Synthetic oligonucleotide
  Sense strand starting at position 3401 of SEQ ID NO: 3448
agaagugauuugcaaauag

SEQ ID NO: 268259 - RNA, 19 nt, Artificial Sequence
  Description of Artificial Sequence: Synthetic oligonucleotide
  Antisense strand to SEQ ID NO: 268258
cuauuugcaaaucacuucu

SEQ ID NO: 268260 - RNA, 19 nt, Artificial Sequence
  Description of Artificial Sequence: Synthetic oligonucleotide
  Sense strand starting at position 3476 of SEQ ID NO: 3448
ugaguaucacacuguuaau

SEQ ID NO: 268261 - RNA, 19 nt, Artificial Sequence
  Description of Artificial Sequence: Synthetic oligonucleotide
  Antisense strand to SEQ ID NO: 268260
auuaacagugugauacuca

SEQ ID NO: 268262 - RNA, 19 nt, Artificial Sequence
  Description of Artificial Sequence: Synthetic oligonucleotide
  Sense strand starting at position 3496 of SEQ ID NO: 3448
ucagaugccugguugggaa

SEQ ID NO: 268263 - RNA, 19 nt, Artificial Sequence
  Description of Artificial Sequence: Synthetic oligonucleotide
  Antisense strand to SEQ ID NO: 268262
uucccaaccaggcaucuga

SEQ ID NO: 268264 - RNA, 19 nt, Artificial Sequence
  Description of Artificial Sequence: Synthetic oligonucleotide
  Sense strand starting at position 3535 of SEQ ID NO: 3448
ugaguucuuccagggagca

SEQ ID NO: 268265 - RNA, 19 nt, Artificial Sequence
  Description of Artificial Sequence: Synthetic oligonucleotide
  Antisense strand to SEQ ID NO: 268264
ugcucccuggaagaacuca

SEQ ID NO: 268266 - RNA, 19 nt, Artificial Sequence
  Description of Artificial Sequence: Synthetic oligonucleotide
  Sense strand starting at position 3536 of SEQ ID NO: 3448
gaguucuuccagggagcau

SEQ ID NO: 268267 - RNA, 19 nt, Artificial Sequence
  Description of Artificial Sequence: Synthetic oligonucleotide
  Antisense strand to SEQ ID NO: 268266
augcucccuggaagaacuc

SEQ ID NO: 268268 - RNA, 19 nt, Artificial Sequence
  Description of Artificial Sequence: Synthetic oligonucleotide
  Sense strand starting at position 3758 of SEQ ID NO: 3448
agcaguuuggauuauuaac

SEQ ID NO: 268269 - RNA, 19 nt, Artificial Sequence
  Description of Artificial Sequence: Synthetic oligonucleotide
  Antisense strand to SEQ ID NO: 268268
guuaauaauccaaacugcu

SEQ ID NO: 268270 - RNA, 19 nt, Artificial Sequence
  Description of Artificial Sequence: Synthetic oligonucleotide
  Sense strand starting at position 3799 of SEQ ID NO: 3448
ugucauugccaagaugcua

SEQ ID NO: 268271 - RNA, 19 nt, Artificial Sequence
  Description of Artificial Sequence: Synthetic oligonucleotide
  Antisense strand to SEQ ID NO: 268270
uagcaucuuggcaaugaca

SEQ ID NO: 268272 - RNA, 19 nt, Artificial Sequence
  Description of Artificial Sequence: Synthetic oligonucleotide
  Sense strand starting at position 3825 of SEQ ID NO: 3448
gacaaagaacgcuaucugu

SEQ ID NO: 268273 - RNA, 19 nt, Artificial Sequence
  Description of Artificial Sequence: Synthetic oligonucleotide
  Antisense strand to SEQ ID NO: 268272
acagauagcguucuuuguc

SEQ ID NO: 268274 - RNA, 19 nt, Artificial Sequence
  Description of Artificial Sequence: Synthetic oligonucleotide
  Sense strand starting at position 3843 of SEQ ID NO: 3448
uagugacagucccugaaua

SEQ ID NO: 268275 - RNA, 19 nt, Artificial Sequence
  Description of Artificial Sequence: Synthetic oligonucleotide
  Antisense strand to SEQ ID NO: 268274
uauucagggacugucacua

SEQ ID NO: 268276 - RNA, 19 nt, Artificial Sequence
  Description of Artificial Sequence: Synthetic oligonucleotide
  Sense strand starting at position 3938 of SEQ ID NO: 3448
gagacuccuguuugugaga

SEQ ID NO: 268277 - RNA, 19 nt, Artificial Sequence
  Description of Artificial Sequence: Synthetic oligonucleotide
  Antisense strand to SEQ ID NO: 268276
ucucacaaacaggagucuc

SEQ ID NO: 268278 - RNA, 19 nt, Artificial Sequence
  Description of Artificial Sequence: Synthetic oligonucleotide
  Sense strand starting at position 3939 of SEQ ID NO: 3448
agacuccuguuugugagaa

SEQ ID NO: 268279 - RNA, 19 nt, Artificial Sequence
  Description of Artificial Sequence: Synthetic oligonucleotide
  Antisense strand to SEQ ID NO: 268278
uucucacaaacaggagucu

SEQ ID NO: 268280 - RNA, 19 nt, Artificial Sequence
  Description of Artificial Sequence: Synthetic oligonucleotide
  Sense strand starting at position 3976 of SEQ ID NO: 3448
ggugaagggcacugugaaa

SEQ ID NO: 268281 - RNA, 19 nt, Artificial Sequence
  Description of Artificial Sequence: Synthetic oligonucleotide
  Antisense strand to SEQ ID NO: 268280
uuucacagugcccuucacc

SEQ ID NO: 268282 - RNA, 19 nt, Artificial Sequence
  Description of Artificial Sequence: Synthetic oligonucleotide
  Sense strand starting at position 4 of SEQ ID NO: 3450
ggagaauaguuucccuuag

SEQ ID NO: 268283 - RNA, 19 nt, Artificial Sequence
  Description of Artificial Sequence: Synthetic oligonucleotide
  Antisense strand to SEQ ID NO: 268282
cuaagggaaacuauucucc

SEQ ID NO: 268284 - RNA, 19 nt, Artificial Sequence
  Description of Artificial Sequence: Synthetic oligonucleotide
  Sense strand starting at position 6 of SEQ ID NO: 3450
agaauaguuucccuuagcu

SEQ ID NO: 268285 - RNA, 19 nt, Artificial Sequence
  Description of Artificial Sequence: Synthetic oligonucleotide
  Antisense strand to SEQ ID NO: 268284
agcuaagggaaacuauucu

SEQ ID NO: 268286 - RNA, 19 nt, Artificial Sequence
  Description of Artificial Sequence: Synthetic oligonucleotide
  Sense strand starting at position 149 of SEQ ID NO: 3450
cgugauccuccgggagaug

SEQ ID NO: 268287 - RNA, 19 nt, Artificial Sequence
  Description of Artificial Sequence: Synthetic oligonucleotide
  Antisense strand to SEQ ID NO: 268286
caucucccggaggaucacg

SEQ ID NO: 268288 - RNA, 19 nt, Artificial Sequence
  Description of Artificial Sequence: Synthetic oligonucleotide
  Sense strand starting at position 265 of SEQ ID NO: 3450
gggaaugguguccagaggu

SEQ ID NO: 268289 - RNA, 19 nt, Artificial Sequence
  Description of Artificial Sequence: Synthetic oligonucleotide
  Antisense strand to SEQ ID NO: 268288
accucuggacaccauuccc

SEQ ID NO: 268290 - RNA, 19 nt, Artificial Sequence
  Description of Artificial Sequence: Synthetic oligonucleotide
  Sense strand starting at position 301 of SEQ ID NO: 3450
agggcuggcccgcauuaaa

SEQ ID NO: 268291 - RNA, 19 nt, Artificial Sequence
  Description of Artificial Sequence: Synthetic oligonucleotide
  Antisense strand to SEQ ID NO: 268290
uuuaaugcgggccagcccu

SEQ ID NO: 268292 - RNA, 19 nt, Artificial Sequence
  Description of Artificial Sequence: Synthetic oligonucleotide
  Sense strand starting at position 899 of SEQ ID NO: 3450
gggauaacccgcgagaacu

SEQ ID NO: 268293 - RNA, 19 nt, Artificial Sequence
  Description of Artificial Sequence: Synthetic oligonucleotide
  Antisense strand to SEQ ID NO: 268292
aguucucgcggguuauccc

SEQ ID NO: 268294 - RNA, 19 nt, Artificial Sequence
  Description of Artificial Sequence: Synthetic oligonucleotide
  Sense strand starting at position 960 of SEQ ID NO: 3450
ugaccuguagauugcaaua

SEQ ID NO: 268295 - RNA, 19 nt, Artificial Sequence
  Description of Artificial Sequence: Synthetic oligonucleotide
  Antisense strand to SEQ ID NO: 268294
uauugcaaucuacagguca

SEQ ID NO: 268296 - RNA, 19 nt, Artificial Sequence
  Description of Artificial Sequence: Synthetic oligonucleotide
  Sense strand starting at position 1499 of SEQ ID NO: 3450
ccagguucucgagagauac

SEQ ID NO: 268297 - RNA, 19 nt, Artificial Sequence
  Description of Artificial Sequence: Synthetic oligonucleotide
  Antisense strand to SEQ ID NO: 268296
guaucucucgagaaccugg

SEQ ID NO: 268298 - RNA, 19 nt, Artificial Sequence
  Description of Artificial Sequence: Synthetic oligonucleotide
  Sense strand starting at position 1509 of SEQ ID NO: 3450
gagagauacucccaaagag

SEQ ID NO: 268299 - RNA, 19 nt, Artificial Sequence
  Description of Artificial Sequence: Synthetic oligonucleotide
  Antisense strand to SEQ ID NO: 268298
cucuuugggaguaucucuc

SEQ ID NO: 268300 - RNA, 19 nt, Artificial Sequence
  Description of Artificial Sequence: Synthetic oligonucleotide
  Sense strand starting at position 1562 of SEQ ID NO: 3450
ccgagaaauuguuuaaagc

SEQ ID NO: 268301 - RNA, 19 nt, Artificial Sequence
  Description of Artificial Sequence: Synthetic oligonucleotide
  Antisense strand to SEQ ID NO: 268300
gcuuuaaacaauuucucgg

SEQ ID NO: 268302 - RNA, 19 nt, Artificial Sequence
  Description of Artificial Sequence: Synthetic oligonucleotide
  Sense strand starting at position 1563 of SEQ ID NO: 3450
cgagaaauuguuuaaagcu

SEQ ID NO: 268303 - RNA, 19 nt, Artificial Sequence
  Description of Artificial Sequence: Synthetic oligonucleotide
  Antisense strand to SEQ ID NO: 268302
agcuuuaaacaauuucucg

SEQ ID NO: 268304 - RNA, 19 nt, Artificial Sequence
  Description of Artificial Sequence: Synthetic oligonucleotide
  Sense strand starting at position 1572 of SEQ ID NO: 3450
guuuaaagcuccuccugga

SEQ ID NO: 268305 - RNA, 19 nt, Artificial Sequence
  Description of Artificial Sequence: Synthetic oligonucleotide
  Antisense strand to SEQ ID NO: 268304
uccaggaggagcuuuaaac

SEQ ID NO: 268306 - RNA, 19 nt, Artificial Sequence
  Description of Artificial Sequence: Synthetic oligonucleotide
  Sense strand starting at position 1610 of SEQ ID NO: 3450
acagacauccaccgcgaau

SEQ ID NO: 268307 - RNA, 19 nt, Artificial Sequence
  Description of Artificial Sequence: Synthetic oligonucleotide
  Antisense strand to SEQ ID NO: 268306
auucgcgguggaugucugu

SEQ ID NO: 268308 - RNA, 19 nt, Artificial Sequence
  Description of Artificial Sequence: Synthetic oligonucleotide
  Sense strand starting at position 1621 of SEQ ID NO: 3450
ccgcgaauccacuagguaa

SEQ ID NO: 268309 - RNA, 19 nt, Artificial Sequence
  Description of Artificial Sequence: Synthetic oligonucleotide
  Antisense strand to SEQ ID NO: 268308
uuaccuaguggauucgcgg

SEQ ID NO: 268310 - RNA, 19 nt, Artificial Sequence
  Description of Artificial Sequence: Synthetic oligonucleotide
  Sense strand starting at position 1623 of SEQ ID NO: 3450
gcgaauccacuagguaaau

SEQ ID NO: 268311 - RNA, 19 nt, Artificial Sequence
  Description of Artificial Sequence: Synthetic oligonucleotide
  Antisense strand to SEQ ID NO: 268310
auuuaccuaguggauucgc

SEQ ID NO: 268312 - RNA, 19 nt, Artificial Sequence
  Description of Artificial Sequence: Synthetic oligonucleotide
  Sense strand starting at position 2092 of SEQ ID NO: 3450
agaggacgagccuauguaa

SEQ ID NO: 268313 - RNA, 19 nt, Artificial Sequence
  Description of Artificial Sequence: Synthetic oligonucleotide
  Antisense strand to SEQ ID NO: 268312
uuacauaggcucguccucu

SEQ ID NO: 268314 - RNA, 19 nt, Artificial Sequence
  Description of Artificial Sequence: Synthetic oligonucleotide
  Sense strand starting at position 2237 of SEQ ID NO: 3450
aggugaucccuccaucuga

SEQ ID NO: 268315 - RNA, 19 nt, Artificial Sequence
  Description of Artificial Sequence: Synthetic oligonucleotide
  Antisense strand to SEQ ID NO: 268314
ucagauggagggaucaccu

SEQ ID NO: 268316 - RNA, 19 nt, Artificial Sequence
  Description of Artificial Sequence: Synthetic oligonucleotide
  Sense strand starting at position 2284 of SEQ ID NO: 3450
uacccaaugguuuagaugu

SEQ ID NO: 268317 - RNA, 19 nt, Artificial Sequence
  Description of Artificial Sequence: Synthetic oligonucleotide
  Antisense strand to SEQ ID NO: 268316
acaucuaaaccauugggua

SEQ ID NO: 268318 - RNA, 19 nt, Artificial Sequence
  Description of Artificial Sequence: Synthetic oligonucleotide
  Sense strand starting at position 2297 of SEQ ID NO: 3450
agauguaaccagugucuuu

SEQ ID NO: 268319 - RNA, 19 nt, Artificial Sequence
  Description of Artificial Sequence: Synthetic oligonucleotide
  Antisense strand to SEQ ID NO: 268318
aaagacacugguuacaucu

SEQ ID NO: 268320 - RNA, 19 nt, Artificial Sequence
  Description of Artificial Sequence: Synthetic oligonucleotide
  Sense strand starting at position 2302 of SEQ ID NO: 3450
uaaccagugucuuuagaga

SEQ ID NO: 268321 - RNA, 19 nt, Artificial Sequence
  Description of Artificial Sequence: Synthetic oligonucleotide
  Antisense strand to SEQ ID NO: 268320
ucucuaaagacacugguua

SEQ ID NO: 268322 - RNA, 19 nt, Artificial Sequence
  Description of Artificial Sequence: Synthetic oligonucleotide
  Sense strand starting at position 2391 of SEQ ID NO: 3450
ugcuaaauauggcuugaua

SEQ ID NO: 268323 - RNA, 19 nt, Artificial Sequence
  Description of Artificial Sequence: Synthetic oligonucleotide
  Antisense strand to SEQ ID NO: 268322
uaucaagccauauuuagca

SEQ ID NO: 268324 - RNA, 19 nt, Artificial Sequence
  Description of Artificial Sequence: Synthetic oligonucleotide
  Sense strand starting at position 2735 of SEQ ID NO: 3450
cugugaugaucuuugcuaa

SEQ ID NO: 268325 - RNA, 19 nt, Artificial Sequence
  Description of Artificial Sequence: Synthetic oligonucleotide
  Antisense strand to SEQ ID NO: 268324
uuagcaaagaucaucacag

SEQ ID NO: 268326 - RNA, 19 nt, Artificial Sequence
  Description of Artificial Sequence: Synthetic oligonucleotide
  Sense strand starting at position 2736 of SEQ ID NO: 3450
ugugaugaucuuugcuaac

SEQ ID NO: 268327 - RNA, 19 nt, Artificial Sequence
  Description of Artificial Sequence: Synthetic oligonucleotide
  Antisense strand to SEQ ID NO: 268326
guuagcaaagaucaucaca

SEQ ID NO: 268328 - RNA, 19 nt, Artificial Sequence
  Description of Artificial Sequence: Synthetic oligonucleotide
  Sense strand starting at position 2738 of SEQ ID NO: 3450
ugaugaucuuugcuaacag

SEQ ID NO: 268329 - RNA, 19 nt, Artificial Sequence
  Description of Artificial Sequence: Synthetic oligonucleotide
  Antisense strand to SEQ ID NO: 268328
cuguuagcaaagaucauca

SEQ ID NO: 268330 - RNA, 19 nt, Artificial Sequence
  Description of Artificial Sequence: Synthetic oligonucleotide
  Sense strand starting at position 2843 of SEQ ID NO: 3450
auaggacauuuauaugcuu

SEQ ID NO: 268331 - RNA, 19 nt, Artificial Sequence
  Description of Artificial Sequence: Synthetic oligonucleotide
  Antisense strand to SEQ ID NO: 268330
aagcauauaaauguccuau

SEQ ID NO: 268332 - RNA, 19 nt, Artificial Sequence
  Description of Artificial Sequence: Synthetic oligonucleotide
  Sense strand starting at position 2892 of SEQ ID NO: 3450
cuguguguccuagaugaaa

SEQ ID NO: 268333 - RNA, 19 nt, Artificial Sequence
  Description of Artificial Sequence: Synthetic oligonucleotide
  Antisense strand to SEQ ID NO: 268332
uuucaucuaggacacacag

SEQ ID NO: 268334 - RNA, 19 nt, Artificial Sequence
  Description of Artificial Sequence: Synthetic oligonucleotide
  Sense strand starting at position 2894 of SEQ ID NO: 3450
guguguccuagaugaaaga

SEQ ID NO: 268335 - RNA, 19 nt, Artificial Sequence
  Description of Artificial Sequence: Synthetic oligonucleotide
  Antisense strand to SEQ ID NO: 268334
ucuuucaucuaggacacac

SEQ ID NO: 268336 - RNA, 19 nt, Artificial Sequence
  Description of Artificial Sequence: Synthetic oligonucleotide
  Sense strand starting at position 2925 of SEQ ID NO: 3450
gcauaaauuuaagaguaga

SEQ ID NO: 268337 - RNA, 19 nt, Artificial Sequence
  Description of Artificial Sequence: Synthetic oligonucleotide
  Antisense strand to SEQ ID NO: 268336
ucuacucuuaaauuuaugc

SEQ ID NO: 268338 - RNA, 19 nt, Artificial Sequence
  Description of Artificial Sequence: Synthetic oligonucleotide
  Sense strand starting at position 2990 of SEQ ID NO: 3450
gaugcuggugauuaagacu

SEQ ID NO: 268339 - RNA, 19 nt, Artificial Sequence
  Description of Artificial Sequence: Synthetic oligonucleotide
  Antisense strand to SEQ ID NO: 268338
agucuuaaucaccagcauc

SEQ ID NO: 268340 - RNA, 19 nt, Artificial Sequence
  Description of Artificial Sequence: Synthetic oligonucleotide
  Sense strand starting at position 2997 of SEQ ID NO: 3450
gugauuaagacuugggacu

SEQ ID NO: 268341 - RNA, 19 nt, Artificial Sequence
  Description of Artificial Sequence: Synthetic oligonucleotide
  Antisense strand to SEQ ID NO: 268340
agucccaagucuuaaucac

SEQ ID NO: 268342 - RNA, 19 nt, Artificial Sequence
  Description of Artificial Sequence: Synthetic oligonucleotide
  Sense strand starting at position 3279 of SEQ ID NO: 3450
ugcuuccuaguccaaagau

SEQ ID NO: 268343 - RNA, 19 nt, Artificial Sequence
  Description of Artificial Sequence: Synthetic oligonucleotide
  Antisense strand to SEQ ID NO: 268342
aucuuuggacuaggaagca

SEQ ID NO: 268344 - RNA, 19 nt, Artificial Sequence
  Description of Artificial Sequence: Synthetic oligonucleotide
  Sense strand starting at position 3426 of SEQ ID NO: 3450
guaguauauugauugaaac

SEQ ID NO: 268345 - RNA, 19 nt, Artificial Sequence
  Description of Artificial Sequence: Synthetic oligonucleotide
  Antisense strand to SEQ ID NO: 268344
guuucaaucaauauacuac

SEQ ID NO: 268346 - RNA, 19 nt, Artificial Sequence
  Description of Artificial Sequence: Synthetic oligonucleotide
  Sense strand starting at position 3628 of SEQ ID NO: 3450
acuaacaagagucgugauu

SEQ ID NO: 268347 - RNA, 19 nt, Artificial Sequence
  Description of Artificial Sequence: Synthetic oligonucleotide
  Antisense strand to SEQ ID NO: 268346
aaucacgacucuuguuagu

SEQ ID NO: 268348 - RNA, 19 nt, Artificial Sequence
  Description of Artificial Sequence: Synthetic oligonucleotide
  Sense strand starting at position 3720 of SEQ ID NO: 3450
gcagguccauauucugaau

SEQ ID NO: 268349 - RNA, 19 nt, Artificial Sequence
  Description of Artificial Sequence: Synthetic oligonucleotide
  Antisense strand to SEQ ID NO: 268348
auucagaauauggaccugc

SEQ ID NO: 268350 - RNA, 19 nt, Artificial Sequence
  Description of Artificial Sequence: Synthetic oligonucleotide
  Sense strand starting at position 3750 of SEQ ID NO: 3450
uaguguuagcauggaaaga

SEQ ID NO: 268351 - RNA, 19 nt, Artificial Sequence
  Description of Artificial Sequence: Synthetic oligonucleotide
  Antisense strand to SEQ ID NO: 268350
ucuuuccaugcuaacacua

SEQ ID NO: 268352 - RNA, 19 nt, Artificial Sequence
  Description of Artificial Sequence: Synthetic oligonucleotide
  Sense strand starting at position 3751 of SEQ ID NO: 3450
aguguuagcauggaaagag

SEQ ID NO: 268353 - RNA, 19 nt, Artificial Sequence
  Description of Artificial Sequence: Synthetic oligonucleotide
  Antisense strand to SEQ ID NO: 268352
cucuuuccaugcuaacacu

SEQ ID NO: 268354 - RNA, 19 nt, Artificial Sequence
  Description of Artificial Sequence: Synthetic oligonucleotide
  Sense strand starting at position 3784 of SEQ ID NO: 3450
uuaggaaauccguacugca

SEQ ID NO: 268355 - RNA, 19 nt, Artificial Sequence
  Description of Artificial Sequence: Synthetic oligonucleotide
  Antisense strand to SEQ ID NO: 268354
ugcaguacggauuuccuaa

SEQ ID NO: 268356 - RNA, 19 nt, Artificial Sequence
  Description of Artificial Sequence: Synthetic oligonucleotide
  Sense strand starting at position 3844 of SEQ ID NO: 3450
ugagucuuucccugaggca

SEQ ID NO: 268357 - RNA, 19 nt, Artificial Sequence
  Description of Artificial Sequence: Synthetic oligonucleotide
  Antisense strand to SEQ ID NO: 268356
ugccucagggaaagacuca

SEQ ID NO: 268358 - RNA, 19 nt, Artificial Sequence
  Description of Artificial Sequence: Synthetic oligonucleotide
  Sense strand starting at position 3845 of SEQ ID NO: 3450
gagucuuucccugaggcac

SEQ ID NO: 268359 - RNA, 19 nt, Artificial Sequence
  Description of Artificial Sequence: Synthetic oligonucleotide
  Antisense strand to SEQ ID NO: 268358
gugccucagggaaagacuc

SEQ ID NO: 268360 - RNA, 19 nt, Artificial Sequence
  Description of Artificial Sequence: Synthetic oligonucleotide
  Sense strand starting at position 3982 of SEQ ID NO: 3450
acaugaaggcguuaugucu

SEQ ID NO: 268361 - RNA, 19 nt, Artificial Sequence
  Description of Artificial Sequence: Synthetic oligonucleotide
  Antisense strand to SEQ ID NO: 268360
agacauaacgccuucaugu

SEQ ID NO: 268362 - RNA, 19 nt, Artificial Sequence
  Description of Artificial Sequence: Synthetic oligonucleotide
  Sense strand starting at position 100 of SEQ ID NO: 3449
uuuauuauggcugauacau

SEQ ID NO: 268363 - RNA, 19 nt, Artificial Sequence
  Description of Artificial Sequence: Synthetic oligonucleotide
  Antisense strand to SEQ ID NO: 268362
auguaucagccauaauaaa

SEQ ID NO: 268364 - RNA, 19 nt, Artificial Sequence
  Description of Artificial Sequence: Synthetic oligonucleotide
  Sense strand starting at position 173 of SEQ ID NO: 3449
aggaaagaggcucgucaaa

SEQ ID NO: 268365 - RNA, 19 nt, Artificial Sequence
  Description of Artificial Sequence: Synthetic oligonucleotide
  Antisense strand to SEQ ID NO: 268364
uuugacgagccucuuuccu

SEQ ID NO: 268366 - RNA, 19 nt, Artificial Sequence
  Description of Artificial Sequence: Synthetic oligonucleotide
  Sense strand starting at position 183 of SEQ ID NO: 3449
cucgucaaaucaucugaaa

SEQ ID NO: 268367 - RNA, 19 nt, Artificial Sequence
  Description of Artificial Sequence: Synthetic oligonucleotide
  Antisense strand to SEQ ID NO: 268366
uuucagaugauuugacgag

SEQ ID NO: 268368 - RNA, 19 nt, Artificial Sequence
  Description of Artificial Sequence: Synthetic oligonucleotide
  Sense strand starting at position 398 of SEQ ID NO: 3449
auguuacauugaucacaua

SEQ ID NO: 268369 - RNA, 19 nt, Artificial Sequence
  Description of Artificial Sequence: Synthetic oligonucleotide
  Antisense strand to SEQ ID NO: 268368
uaugugaucaauguaacau

SEQ ID NO: 268370 - RNA, 19 nt, Artificial Sequence
  Description of Artificial Sequence: Synthetic oligonucleotide
  Sense strand starting at position 536 of SEQ ID NO: 3449
auucuuaucacagggaggu

SEQ ID NO: 268371 - RNA, 19 nt, Artificial Sequence
  Description of Artificial Sequence: Synthetic oligonucleotide
  Antisense strand to SEQ ID NO: 268370
accucccugugauaagaau

SEQ ID NO: 268372 - RNA, 19 nt, Artificial Sequence
  Description of Artificial Sequence: Synthetic oligonucleotide
  Sense strand starting at position 537 of SEQ ID NO: 3449
uucuuaucacagggagguu

SEQ ID NO: 268373 - RNA, 19 nt, Artificial Sequence
  Description of Artificial Sequence: Synthetic oligonucleotide
  Antisense strand to SEQ ID NO: 268372
aaccucccugugauaagaa

SEQ ID NO: 268374 - RNA, 19 nt, Artificial Sequence
  Description of Artificial Sequence: Synthetic oligonucleotide
  Sense strand starting at position 564 of SEQ ID NO: 3449
uucccaguucuuggaggaa

SEQ ID NO: 268375 - RNA, 19 nt, Artificial Sequence
  Description of Artificial Sequence: Synthetic oligonucleotide
  Antisense strand to SEQ ID NO: 268374
uuccuccaagaacugggaa

SEQ ID NO: 268376 - RNA, 19 nt, Artificial Sequence
  Description of Artificial Sequence: Synthetic oligonucleotide
  Sense strand starting at position 576 of SEQ ID NO: 3449
ggaggaagcucauuguaug

SEQ ID NO: 268377 - RNA, 19 nt, Artificial Sequence
  Description of Artificial Sequence: Synthetic oligonucleotide
  Antisense strand to SEQ ID NO: 268376
cauacaaugagcuuccucc

SEQ ID NO: 268378 - RNA, 19 nt, Artificial Sequence
  Description of Artificial Sequence: Synthetic oligonucleotide
  Sense strand starting at position 596 of SEQ ID NO: 3449
gagcgaguaucuguauuua

SEQ ID NO: 268379 - RNA, 19 nt, Artificial Sequence
  Description of Artificial Sequence: Synthetic oligonucleotide
  Antisense strand to SEQ ID NO: 268378
uaaauacagauacucgcuc

SEQ ID NO: 268380 - RNA, 19 nt, Artificial Sequence
  Description of Artificial Sequence: Synthetic oligonucleotide
  Sense strand starting at position 625 of SEQ ID NO: 3449
agaggauucucucuaggug

SEQ ID NO: 268381 - RNA, 19 nt, Artificial Sequence
  Description of Artificial Sequence: Synthetic oligonucleotide
  Antisense strand to SEQ ID NO: 268380
caccuagagagaauccucu

SEQ ID NO: 268382 - RNA, 19 nt, Artificial Sequence
  Description of Artificial Sequence: Synthetic oligonucleotide
  Sense strand starting at position 742 of SEQ ID NO: 3449
gcagacuaacagcaucauu

SEQ ID NO: 268383 - RNA, 19 nt, Artificial Sequence
  Description of Artificial Sequence: Synthetic oligonucleotide
  Antisense strand to SEQ ID NO: 268382
aaugaugcuguuagucugc

SEQ ID NO: 268384 - RNA, 19 nt, Artificial Sequence
  Description of Artificial Sequence: Synthetic oligonucleotide
  Sense strand starting at position 1505 of SEQ ID NO: 3449
uuuccugaggucuauggau

SEQ ID NO: 268385 - RNA, 19 nt, Artificial Sequence
  Description of Artificial Sequence: Synthetic oligonucleotide
  Antisense strand to SEQ ID NO: 268384
auccauagaccucaggaaa

SEQ ID NO: 268386 - RNA, 19 nt, Artificial Sequence
  Description of Artificial Sequence: Synthetic oligonucleotide
  Sense strand starting at position 1507 of SEQ ID NO: 3449
uccugaggucuauggauaa

SEQ ID NO: 268387 - RNA, 19 nt, Artificial Sequence
  Description of Artificial Sequence: Synthetic oligonucleotide
  Antisense strand to SEQ ID NO: 268386
uuauccauagaccucagga

SEQ ID NO: 268388 - RNA, 19 nt, Artificial Sequence
  Description of Artificial Sequence: Synthetic oligonucleotide
  Sense strand starting at position 1921 of SEQ ID NO: 3449
ccgcaagcgcuucuaacuu

SEQ ID NO: 268389 - RNA, 19 nt, Artificial Sequence
  Description of Artificial Sequence: Synthetic oligonucleotide
  Antisense strand to SEQ ID NO: 268388
aaguuagaagcgcuugcgg

SEQ ID NO: 268390 - RNA, 19 nt, Artificial Sequence
  Description of Artificial Sequence: Synthetic oligonucleotide
  Sense strand starting at position 2071 of SEQ ID NO: 3449
cugcuagacccauggaaag

SEQ ID NO: 268391 - RNA, 19 nt, Artificial Sequence
  Description of Artificial Sequence: Synthetic oligonucleotide
  Antisense strand to SEQ ID NO: 268390
cuuuccaugggucuagcag

SEQ ID NO: 268392 - RNA, 19 nt, Artificial Sequence
  Description of Artificial Sequence: Synthetic oligonucleotide
  Sense strand starting at position 2184 of SEQ ID NO: 3449
ggccaaggagucgauaauu

SEQ ID NO: 268393 - RNA, 19 nt, Artificial Sequence
  Description of Artificial Sequence: Synthetic oligonucleotide
  Antisense strand to SEQ ID NO: 268392
aauuaucgacuccuuggcc

SEQ ID NO: 268394 - RNA, 19 nt, Artificial Sequence
  Description of Artificial Sequence: Synthetic oligonucleotide
  Sense strand starting at position 2189 of SEQ ID NO: 3449
aggagucgauaauuaugau

SEQ ID NO: 268395 - RNA, 19 nt, Artificial Sequence
  Description of Artificial Sequence: Synthetic oligonucleotide
  Antisense strand to SEQ ID NO: 268394
aucauaauuaucgacuccu

SEQ ID NO: 268396 - RNA, 19 nt, Artificial Sequence
  Description of Artificial Sequence: Synthetic oligonucleotide
  Sense strand starting at position 2313 of SEQ ID NO: 3449
ggcauucuucuagauccga

SEQ ID NO: 268397 - RNA, 19 nt, Artificial Sequence
  Description of Artificial Sequence: Synthetic oligonucleotide
  Antisense strand to SEQ ID NO: 268396
ucggaucuagaagaaugcc

SEQ ID NO: 268398 - RNA, 19 nt, Artificial Sequence
  Description of Artificial Sequence: Synthetic oligonucleotide
  Sense strand starting at position 2461 of SEQ ID NO: 3449
gaucaacugugucugacaa

SEQ ID NO: 268399 - RNA, 19 nt, Artificial Sequence
  Description of Artificial Sequence: Synthetic oligonucleotide
  Antisense strand to SEQ ID NO: 268398
uugucagacacaguugauc

SEQ ID NO: 268400 - RNA, 19 nt, Artificial Sequence
  Description of Artificial Sequence: Synthetic oligonucleotide
  Sense strand starting at position 2662 of SEQ ID NO: 3449
gcuggguuuggugagaaag

SEQ ID NO: 268401 - RNA, 19 nt, Artificial Sequence
  Description of Artificial Sequence: Synthetic oligonucleotide
  Antisense strand to SEQ ID NO: 268400
cuuucucaccaaacccagc

SEQ ID NO: 268402 - RNA, 19 nt, Artificial Sequence
  Description of Artificial Sequence: Synthetic oligonucleotide
  Sense strand starting at position 2869 of SEQ ID NO: 3449
acuguaaggcaagacuauu

SEQ ID NO: 268403 - RNA, 19 nt, Artificial Sequence
  Description of Artificial Sequence: Synthetic oligonucleotide
  Antisense strand to SEQ ID NO: 268402
aauagucuugccuuacagu

SEQ ID NO: 268404 - RNA, 19 nt, Artificial Sequence
  Description of Artificial Sequence: Synthetic oligonucleotide
  Sense strand starting at position 2899 of SEQ ID NO: 3449
ggcccuauagagcaagaau

SEQ ID NO: 268405 - RNA, 19 nt, Artificial Sequence
  Description of Artificial Sequence: Synthetic oligonucleotide
  Antisense strand to SEQ ID NO: 268404
auucuugcucuauagggcc

SEQ ID NO: 268406 - RNA, 19 nt, Artificial Sequence
  Description of Artificial Sequence: Synthetic oligonucleotide
  Sense strand starting at position 2910 of SEQ ID NO: 3449
gcaagaauuuaagaacuag

SEQ ID NO: 268407 - RNA, 19 nt, Artificial Sequence
  Description of Artificial Sequence: Synthetic oligonucleotide
  Antisense strand to SEQ ID NO: 268406
cuaguucuuaaauucuugc

SEQ ID NO: 268408 - RNA, 19 nt, Artificial Sequence
  Description of Artificial Sequence: Synthetic oligonucleotide
  Sense strand starting at position 2925 of SEQ ID NO: 3449
cuagauaaauuugggaaca

SEQ ID NO: 268409 - RNA, 19 nt, Artificial Sequence
  Description of Artificial Sequence: Synthetic oligonucleotide
  Antisense strand to SEQ ID NO: 268408
uguucccaaauuuaucuag

SEQ ID NO: 268410 - RNA, 19 nt, Artificial Sequence
  Description of Artificial Sequence: Synthetic oligonucleotide
  Sense strand starting at position 3135 of SEQ ID NO: 3449
gaaauagauugucugagcu

SEQ ID NO: 268411 - RNA, 19 nt, Artificial Sequence
  Description of Artificial Sequence: Synthetic oligonucleotide
  Antisense strand to SEQ ID NO: 268410
agcucagacaaucuauuuc

SEQ ID NO: 268412 - RNA, 19 nt, Artificial Sequence
  Description of Artificial Sequence: Synthetic oligonucleotide
  Sense strand starting at position 3167 of SEQ ID NO: 3449
ugccauuuauuaguuguaa

SEQ ID NO: 268413 - RNA, 19 nt, Artificial Sequence
  Description of Artificial Sequence: Synthetic oligonucleotide
  Antisense strand to SEQ ID NO: 268412
uuacaacuaauaaauggca

SEQ ID NO: 268414 - RNA, 19 nt, Artificial Sequence
  Description of Artificial Sequence: Synthetic oligonucleotide
  Sense strand starting at position 3168 of SEQ ID NO: 3449
gccauuuauuaguuguaac

SEQ ID NO: 268415 - RNA, 19 nt, Artificial Sequence
  Description of Artificial Sequence: Synthetic oligonucleotide
  Antisense strand to SEQ ID NO: 268414
guuacaacuaauaaauggc

SEQ ID NO: 268416 - RNA, 19 nt, Artificial Sequence
  Description of Artificial Sequence: Synthetic oligonucleotide
  Sense strand starting at position 3180 of SEQ ID NO: 3449
uuguaaccucagcaagaua

SEQ ID NO: 268417 - RNA, 19 nt, Artificial Sequence
  Description of Artificial Sequence: Synthetic oligonucleotide
  Antisense strand to SEQ ID NO: 268416
uaucuugcugagguuacaa

SEQ ID NO: 268418 - RNA, 19 nt, Artificial Sequence
  Description of Artificial Sequence: Synthetic oligonucleotide
  Sense strand starting at position 3319 of SEQ ID NO: 3449
uggauuccaaauuguggaa

SEQ ID NO: 268419 - RNA, 19 nt, Artificial Sequence
  Description of Artificial Sequence: Synthetic oligonucleotide
  Antisense strand to SEQ ID NO: 268418
uuccacaauuuggaaucca

SEQ ID NO: 268420 - RNA, 19 nt, Artificial Sequence
  Description of Artificial Sequence: Synthetic oligonucleotide
  Sense strand starting at position 3411 of SEQ ID NO: 3449
cgaauucuuugacuauaaa

SEQ ID NO: 268421 - RNA, 19 nt, Artificial Sequence
  Description of Artificial Sequence: Synthetic oligonucleotide
  Antisense strand to SEQ ID NO: 268420
uuuauagucaaagaauucg

SEQ ID NO: 268422 - RNA, 19 nt, Artificial Sequence
  Description of Artificial Sequence: Synthetic oligonucleotide
  Sense strand starting at position 3432 of SEQ ID NO: 3449
agagguauuagucauuguc

SEQ ID NO: 268423 - RNA, 19 nt, Artificial Sequence
  Description of Artificial Sequence: Synthetic oligonucleotide
  Antisense strand to SEQ ID NO: 268422
gacaaugacuaauaccucu

SEQ ID NO: 268424 - RNA, 19 nt, Artificial Sequence
  Description of Artificial Sequence: Synthetic oligonucleotide
  Sense strand starting at position 3459 of SEQ ID NO: 3449
ccauaagauugcuuuggga

SEQ ID NO: 268425 - RNA, 19 nt, Artificial Sequence
  Description of Artificial Sequence: Synthetic oligonucleotide
  Antisense strand to SEQ ID NO: 268424
ucccaaagcaaucuuaugg

SEQ ID NO: 268426 - RNA, 19 nt, Artificial Sequence
  Description of Artificial Sequence: Synthetic oligonucleotide
  Sense strand starting at position 3461 of SEQ ID NO: 3449
auaagauugcuuugggaau

SEQ ID NO: 268427 - RNA, 19 nt, Artificial Sequence
  Description of Artificial Sequence: Synthetic oligonucleotide
  Antisense strand to SEQ ID NO: 268426
auucccaaagcaaucuuau

SEQ ID NO: 268428 - RNA, 19 nt, Artificial Sequence
  Description of Artificial Sequence: Synthetic oligonucleotide
  Sense strand starting at position 3493 of SEQ ID NO: 3449
agcuguuaacaugauucuu

SEQ ID NO: 268429 - RNA, 19 nt, Artificial Sequence
  Description of Artificial Sequence: Synthetic oligonucleotide
  Antisense strand to SEQ ID NO: 268428
aagaaucauguuaacagcu

SEQ ID NO: 268430 - RNA, 19 nt, Artificial Sequence
  Description of Artificial Sequence: Synthetic oligonucleotide
  Sense strand starting at position 3675 of SEQ ID NO: 3449
caccgcgauguguuuagua

SEQ ID NO: 268431 - RNA, 19 nt, Artificial Sequence
  Description of Artificial Sequence: Synthetic oligonucleotide
  Antisense strand to SEQ ID NO: 268430
uacuaaacacaucgcggug

SEQ ID NO: 268432 - RNA, 19 nt, Artificial Sequence
  Description of Artificial Sequence: Synthetic oligonucleotide
  Sense strand starting at position 3777 of SEQ ID NO: 3449
uaagaucuggugugaacau

SEQ ID NO: 268433 - RNA, 19 nt, Artificial Sequence
  Description of Artificial Sequence: Synthetic oligonucleotide
  Antisense strand to SEQ ID NO: 268432
auguucacaccagaucuua

SEQ ID NO: 268434 - RNA, 19 nt, Artificial Sequence
  Description of Artificial Sequence: Synthetic oligonucleotide
  Sense strand starting at position 3788 of SEQ ID NO: 3449
gugaacaugcaucagugaa

SEQ ID NO: 268435 - RNA, 19 nt, Artificial Sequence
  Description of Artificial Sequence: Synthetic oligonucleotide
  Antisense strand to SEQ ID NO: 268434
uucacugaugcauguucac

SEQ ID NO: 268436 - RNA, 19 nt, Artificial Sequence
  Description of Artificial Sequence: Synthetic oligonucleotide
  Sense strand starting at position 3790 of SEQ ID NO: 3449
gaacaugcaucagugaaca

SEQ ID NO: 268437 - RNA, 19 nt, Artificial Sequence
  Description of Artificial Sequence: Synthetic oligonucleotide
  Antisense strand to SEQ ID NO: 268436
uguucacugaugcauguuc

SEQ ID NO: 268438 - RNA, 19 nt, Artificial Sequence
  Description of Artificial Sequence: Synthetic oligonucleotide
  Sense strand starting at position 3923 of SEQ ID NO: 3449
ucauuucgucuuugugaau

SEQ ID NO: 268439 - RNA, 19 nt, Artificial Sequence
  Description of Artificial Sequence: Synthetic oligonucleotide
  Antisense strand to SEQ ID NO: 268438
auucacaaagacgaaauga

SEQ ID NO: 268440 - RNA, 19 nt, Artificial Sequence
  Description of Artificial Sequence: Synthetic oligonucleotide
  Sense strand starting at position 3924 of SEQ ID NO: 3449
cauuucgucuuugugaauu

SEQ ID NO: 268441 - RNA, 19 nt, Artificial Sequence
  Description of Artificial Sequence: Synthetic oligonucleotide
  Antisense strand to SEQ ID NO: 268440
aauucacaaagacgaaaug

SEQ ID NO: 268442 - RNA, 19 nt, Artificial Sequence
  Description of Artificial Sequence: Synthetic oligonucleotide
  Sense strand starting at position 2 of SEQ ID NO: 3451
ccaggcucauucuugacaa

SEQ ID NO: 268443 - RNA, 19 nt, Artificial Sequence
  Description of Artificial Sequence: Synthetic oligonucleotide
  Antisense strand to SEQ ID NO: 268442
uugucaagaaugagccugg

SEQ ID NO: 268444 - RNA, 19 nt, Artificial Sequence
  Description of Artificial Sequence: Synthetic oligonucleotide
  Sense strand starting at position 160 of SEQ ID NO: 3451
uucuaacaagcaugaguaa

SEQ ID NO: 268445 - RNA, 19 nt, Artificial Sequence
  Description of Artificial Sequence: Synthetic oligonucleotide
  Antisense strand to SEQ ID NO: 268444
uuacucaugcuuguuagaa

SEQ ID NO: 268446 - RNA, 19 nt, Artificial Sequence
  Description of Artificial Sequence: Synthetic oligonucleotide
  Sense strand starting at position 270 of SEQ ID NO: 3451
uuguuuaaagacugauaac

SEQ ID NO: 268447 - RNA, 19 nt, Artificial Sequence
  Description of Artificial Sequence: Synthetic oligonucleotide
  Antisense strand to SEQ ID NO: 268446
guuaucagucuuuaaacaa

SEQ ID NO: 268448 - RNA, 19 nt, Artificial Sequence
  Description of Artificial Sequence: Synthetic oligonucleotide
  Sense strand starting at position 314 of SEQ ID NO: 3451
guuguuuauguagaauaag

SEQ ID NO: 268449 - RNA, 19 nt, Artificial Sequence
  Description of Artificial Sequence: Synthetic oligonucleotide
  Antisense strand to SEQ ID NO: 268448
cuuauucuacauaaacaac

SEQ ID NO: 268450 - RNA, 19 nt, Artificial Sequence
  Description of Artificial Sequence: Synthetic oligonucleotide
  Sense strand starting at position 352 of SEQ ID NO: 3451
cucugaagauugcuacuua

SEQ ID NO: 268451 - RNA, 19 nt, Artificial Sequence
  Description of Artificial Sequence: Synthetic oligonucleotide
  Antisense strand to SEQ ID NO: 268450
uaaguagcaaucuucagag

SEQ ID NO: 268452 - RNA, 19 nt, Artificial Sequence
  Description of Artificial Sequence: Synthetic oligonucleotide
  Sense strand starting at position 356 of SEQ ID NO: 3451
gaagauugcuacuuaugga

SEQ ID NO: 268453 - RNA, 19 nt, Artificial Sequence
  Description of Artificial Sequence: Synthetic oligonucleotide
  Antisense strand to SEQ ID NO: 268452
uccauaaguagcaaucuuc

SEQ ID NO: 268454 - RNA, 19 nt, Artificial Sequence
  Description of Artificial Sequence: Synthetic oligonucleotide
  Sense strand starting at position 569 of SEQ ID NO: 3451
gggauuucuuaccaacaaa

SEQ ID NO: 268455 - RNA, 19 nt, Artificial Sequence
  Description of Artificial Sequence: Synthetic oligonucleotide
  Antisense strand to SEQ ID NO: 268454
uuuguugguaagaaauccc

SEQ ID NO: 268456 - RNA, 19 nt, Artificial Sequence
  Description of Artificial Sequence: Synthetic oligonucleotide
  Sense strand starting at position 698 of SEQ ID NO: 3451
ggaauauuauuugaacugu

SEQ ID NO: 268457 - RNA, 19 nt, Artificial Sequence
  Description of Artificial Sequence: Synthetic oligonucleotide
  Antisense strand to SEQ ID NO: 268456
acaguucaaauaauauucc

SEQ ID NO: 268458 - RNA, 19 nt, Artificial Sequence
  Description of Artificial Sequence: Synthetic oligonucleotide
  Sense strand starting at position 735 of SEQ ID NO: 3451
cugcaaugugaucaagauu

SEQ ID NO: 268459 - RNA, 19 nt, Artificial Sequence
  Description of Artificial Sequence: Synthetic oligonucleotide
  Antisense strand to SEQ ID NO: 268458
aaucuugaucacauugcag

SEQ ID NO: 268460 - RNA, 19 nt, Artificial Sequence
  Description of Artificial Sequence: Synthetic oligonucleotide
  Sense strand starting at position 741 of SEQ ID NO: 3451
ugugaucaagauuaguguu

SEQ ID NO: 268461 - RNA, 19 nt, Artificial Sequence
  Description of Artificial Sequence: Synthetic oligonucleotide
  Antisense strand to SEQ ID NO: 268460
aacacuaaucuugaucaca

SEQ ID NO: 268462 - RNA, 19 nt, Artificial Sequence
  Description of Artificial Sequence: Synthetic oligonucleotide
  Sense strand starting at position 743 of SEQ ID NO: 3451
ugaucaagauuaguguuau

SEQ ID NO: 268463 - RNA, 19 nt, Artificial Sequence
  Description of Artificial Sequence: Synthetic oligonucleotide
  Antisense strand to SEQ ID NO: 268462
auaacacuaaucuugauca

SEQ ID NO: 268464 - RNA, 19 nt, Artificial Sequence
  Description of Artificial Sequence: Synthetic oligonucleotide
  Sense strand starting at position 805 of SEQ ID NO: 3451
acuagagcagucuauauuc

SEQ ID NO: 268465 - RNA, 19 nt, Artificial Sequence
  Description of Artificial Sequence: Synthetic oligonucleotide
  Antisense strand to SEQ ID NO: 268464
gaauauagacugcucuagu

SEQ ID NO: 268466 - RNA, 19 nt, Artificial Sequence
  Description of Artificial Sequence: Synthetic oligonucleotide
  Sense strand starting at position 898 of SEQ ID NO: 3451
gagagaauggcauagcugu

SEQ ID NO: 268467 - RNA, 19 nt, Artificial Sequence
  Description of Artificial Sequence: Synthetic oligonucleotide
  Antisense strand to SEQ ID NO: 268466
acagcuaugccauucucuc

SEQ ID NO: 268468 - RNA, 19 nt, Artificial Sequence
  Description of Artificial Sequence: Synthetic oligonucleotide
  Sense strand starting at position 1152 of SEQ ID NO: 3451
agaucuguccaccguauuu

SEQ ID NO: 268469 - RNA, 19 nt, Artificial Sequence
  Description of Artificial Sequence: Synthetic oligonucleotide
  Antisense strand to SEQ ID NO: 268468
aaauacgguggacagaucu

SEQ ID NO: 268470 - RNA, 19 nt, Artificial Sequence
  Description of Artificial Sequence: Synthetic oligonucleotide
  Sense strand starting at position 1176 of SEQ ID NO: 3451
gaguaauauuuacaagaug

SEQ ID NO: 268471 - RNA, 19 nt, Artificial Sequence
  Description of Artificial Sequence: Synthetic oligonucleotide
  Antisense strand to SEQ ID NO: 268470
caucuuguaaauauuacuc

SEQ ID NO: 268472 - RNA, 19 nt, Artificial Sequence
  Description of Artificial Sequence: Synthetic oligonucleotide
  Sense strand starting at position 1336 of SEQ ID NO: 3451
acuuguauuugccugcaua

SEQ ID NO: 268473 - RNA, 19 nt, Artificial Sequence
  Description of Artificial Sequence: Synthetic oligonucleotide
  Antisense strand to SEQ ID NO: 268472
uaugcaggcaaauacaagu

SEQ ID NO: 268474 - RNA, 19 nt, Artificial Sequence
  Description of Artificial Sequence: Synthetic oligonucleotide
  Sense strand starting at position 1359 of SEQ ID NO: 3451
agccuuauuuccuuauggu

SEQ ID NO: 268475 - RNA, 19 nt, Artificial Sequence
  Description of Artificial Sequence: Synthetic oligonucleotide
  Antisense strand to SEQ ID NO: 268474
accauaaggaaauaaggcu

SEQ ID NO: 268476 - RNA, 19 nt, Artificial Sequence
  Description of Artificial Sequence: Synthetic oligonucleotide
  Sense strand starting at position 1429 of SEQ ID NO: 3451
aaguucccagagugaaaua

SEQ ID NO: 268477 - RNA, 19 nt, Artificial Sequence
  Description of Artificial Sequence: Synthetic oligonucleotide
  Antisense strand to SEQ ID NO: 268476
uauuucacucugggaacuu

SEQ ID NO: 268478 - RNA, 19 nt, Artificial Sequence
  Description of Artificial Sequence: Synthetic oligonucleotide
  Sense strand starting at position 1738 of SEQ ID NO: 3451
accugaagccauuaucuga

SEQ ID NO: 268479 - RNA, 19 nt, Artificial Sequence
  Description of Artificial Sequence: Synthetic oligonucleotide
  Antisense strand to SEQ ID NO: 268478
ucagauaauggcuucaggu

SEQ ID NO: 268480 - RNA, 19 nt, Artificial Sequence
  Description of Artificial Sequence: Synthetic oligonucleotide
  Sense strand starting at position 1741 of SEQ ID NO: 3451
ugaagccauuaucugaaau

SEQ ID NO: 268481 - RNA, 19 nt, Artificial Sequence
  Description of Artificial Sequence: Synthetic oligonucleotide
  Antisense strand to SEQ ID NO: 268480
auuucagauaauggcuuca

SEQ ID NO: 268482 - RNA, 19 nt, Artificial Sequence
  Description of Artificial Sequence: Synthetic oligonucleotide
  Sense strand starting at position 1863 of SEQ ID NO: 3451
uucuguuugagagauguuu

SEQ ID NO: 268483 - RNA, 19 nt, Artificial Sequence
  Description of Artificial Sequence: Synthetic oligonucleotide
  Antisense strand to SEQ ID NO: 268482
aaacaucucucaaacagaa

SEQ ID NO: 268484 - RNA, 19 nt, Artificial Sequence
  Description of Artificial Sequence: Synthetic oligonucleotide
  Sense strand starting at position 2034 of SEQ ID NO: 3451
cucuaugaauaugugauua

SEQ ID NO: 268485 - RNA, 19 nt, Artificial Sequence
  Description of Artificial Sequence: Synthetic oligonucleotide
  Antisense strand to SEQ ID NO: 268484
uaaucacauauucauagag

SEQ ID NO: 268486 - RNA, 19 nt, Artificial Sequence
  Description of Artificial Sequence: Synthetic oligonucleotide
  Sense strand starting at position 2038 of SEQ ID NO: 3451
augaauaugugauuaaccu

SEQ ID NO: 268487 - RNA, 19 nt, Artificial Sequence
  Description of Artificial Sequence: Synthetic oligonucleotide
  Antisense strand to SEQ ID NO: 268486
agguuaaucacauauucau

SEQ ID NO: 268488 - RNA, 19 nt, Artificial Sequence
  Description of Artificial Sequence: Synthetic oligonucleotide
  Sense strand starting at position 2386 of SEQ ID NO: 3451
guuccagacauggaguuua

SEQ ID NO: 268489 - RNA, 19 nt, Artificial Sequence
  Description of Artificial Sequence: Synthetic oligonucleotide
  Antisense strand to SEQ ID NO: 268488
uaaacuccaugucuggaac

SEQ ID NO: 268490 - RNA, 19 nt, Artificial Sequence
  Description of Artificial Sequence: Synthetic oligonucleotide
  Sense strand starting at position 2397 of SEQ ID NO: 3451
ggaguuuagacuugaguuu

SEQ ID NO: 268491 - RNA, 19 nt, Artificial Sequence
  Description of Artificial Sequence: Synthetic oligonucleotide
  Antisense strand to SEQ ID NO: 268490
aaacucaagucuaaacucc

SEQ ID NO: 268492 - RNA, 19 nt, Artificial Sequence
  Description of Artificial Sequence: Synthetic oligonucleotide
  Sense strand starting at position 2498 of SEQ ID NO: 3451
agacucaguguagaauguu

SEQ ID NO: 268493 - RNA, 19 nt, Artificial Sequence
  Description of Artificial Sequence: Synthetic oligonucleotide
  Antisense strand to SEQ ID NO: 268492
aacauucuacacugagucu

SEQ ID NO: 268494 - RNA, 19 nt, Artificial Sequence
  Description of Artificial Sequence: Synthetic oligonucleotide
  Sense strand starting at position 2644 of SEQ ID NO: 3451
aguuuccagaucugaggaa

SEQ ID NO: 268495 - RNA, 19 nt, Artificial Sequence
  Description of Artificial Sequence: Synthetic oligonucleotide
  Antisense strand to SEQ ID NO: 268494
uuccucagaucuggaaacu

SEQ ID NO: 268496 - RNA, 19 nt, Artificial Sequence
  Description of Artificial Sequence: Synthetic oligonucleotide
  Sense strand starting at position 2694 of SEQ ID NO: 3451
auaaaugauuggguccaca

SEQ ID NO: 268497 - RNA, 19 nt, Artificial Sequence
  Description of Artificial Sequence: Synthetic oligonucleotide
  Antisense strand to SEQ ID NO: 268496
uguggacccaaucauuuau

SEQ ID NO: 268498 - RNA, 19 nt, Artificial Sequence
  Description of Artificial Sequence: Synthetic oligonucleotide
  Sense strand starting at position 2709 of SEQ ID NO: 3451
cacaaaugaguuugugauu

SEQ ID NO: 268499 - RNA, 19 nt, Artificial Sequence
  Description of Artificial Sequence: Synthetic oligonucleotide
  Antisense strand to SEQ ID NO: 268498
aaucacaaacucauuugug

SEQ ID NO: 268500 - RNA, 19 nt, Artificial Sequence
  Description of Artificial Sequence: Synthetic oligonucleotide
  Sense strand starting at position 2884 of SEQ ID NO: 3451
ccaaccugagcuggugaaa

SEQ ID NO: 268501 - RNA, 19 nt, Artificial Sequence
  Description of Artificial Sequence: Synthetic oligonucleotide
  Antisense strand to SEQ ID NO: 268500
uuucaccagcucagguugg

SEQ ID NO: 268502 - RNA, 19 nt, Artificial Sequence
  Description of Artificial Sequence: Synthetic oligonucleotide
  Sense strand starting at position 2887 of SEQ ID NO: 3451
accugagcuggugaaauca

SEQ ID NO: 268503 - RNA, 19 nt, Artificial Sequence
  Description of Artificial Sequence: Synthetic oligonucleotide
  Antisense strand to SEQ ID NO: 268502
ugauuucaccagcucaggu

SEQ ID NO: 268504 - RNA, 19 nt, Artificial Sequence
  Description of Artificial Sequence: Synthetic oligonucleotide
  Sense strand starting at position 2918 of SEQ ID NO: 3451
gcagguuuccagccuguuu

SEQ ID NO: 268505 - RNA, 19 nt, Artificial Sequence
  Description of Artificial Sequence: Synthetic oligonucleotide
  Antisense strand to SEQ ID NO: 268504
aaacaggcuggaaaccugc

SEQ ID NO: 268506 - RNA, 19 nt, Artificial Sequence
  Description of Artificial Sequence: Synthetic oligonucleotide
  Sense strand starting at position 2951 of SEQ ID NO: 3451
gauagcuaagguugaauau

SEQ ID NO: 268507 - RNA, 19 nt, Artificial Sequence
  Description of Artificial Sequence: Synthetic oligonucleotide
  Antisense strand to SEQ ID NO: 268506
auauucaaccuuagcuauc

SEQ ID NO: 268508 - RNA, 19 nt, Artificial Sequence
  Description of Artificial Sequence: Synthetic oligonucleotide
  Sense strand starting at position 2994 of SEQ ID NO: 3451
uaaguuauccaaggagucu

SEQ ID NO: 268509 - RNA, 19 nt, Artificial Sequence
  Description of Artificial Sequence: Synthetic oligonucleotide
  Antisense strand to SEQ ID NO: 268508
agacuccuuggauaacuua

SEQ ID NO: 268510 - RNA, 19 nt, Artificial Sequence
  Description of Artificial Sequence: Synthetic oligonucleotide
  Sense strand starting at position 3400 of SEQ ID NO: 3451
cacuccuucgagggagaga

SEQ ID NO: 268511 - RNA, 19 nt, Artificial Sequence
  Description of Artificial Sequence: Synthetic oligonucleotide
  Antisense strand to SEQ ID NO: 268510
ucucucccucgaaggagug

SEQ ID NO: 268512 - RNA, 19 nt, Artificial Sequence
  Description of Artificial Sequence: Synthetic oligonucleotide
  Sense strand starting at position 3546 of SEQ ID NO: 3451
accugagucagagguuuau

SEQ ID NO: 268513 - RNA, 19 nt, Artificial Sequence
  Description of Artificial Sequence: Synthetic oligonucleotide
  Antisense strand to SEQ ID NO: 268512
auaaaccucugacucaggu

SEQ ID NO: 268514 - RNA, 19 nt, Artificial Sequence
  Description of Artificial Sequence: Synthetic oligonucleotide
  Sense strand starting at position 3550 of SEQ ID NO: 3451
gagucagagguuuauguga

SEQ ID NO: 268515 - RNA, 19 nt, Artificial Sequence
  Description of Artificial Sequence: Synthetic oligonucleotide
  Antisense strand to SEQ ID NO: 268514
ucacauaaaccucugacuc

SEQ ID NO: 268516 - RNA, 19 nt, Artificial Sequence
  Description of Artificial Sequence: Synthetic oligonucleotide
  Sense strand starting at position 3779 of SEQ ID NO: 3451
uccauuagggauugaccuu

SEQ ID NO: 268517 - RNA, 19 nt, Artificial Sequence
  Description of Artificial Sequence: Synthetic oligonucleotide
  Antisense strand to SEQ ID NO: 268516
aaggucaaucccuaaugga

SEQ ID NO: 268518 - RNA, 19 nt, Artificial Sequence
  Description of Artificial Sequence: Synthetic oligonucleotide
  Sense strand starting at position 3886 of SEQ ID NO: 3451
cauguaauggguuaagcau

SEQ ID NO: 268519 - RNA, 19 nt, Artificial Sequence
  Description of Artificial Sequence: Synthetic oligonucleotide
  Antisense strand to SEQ ID NO: 268518
augcuuaacccauuacaug

SEQ ID NO: 268520 - RNA, 19 nt, Artificial Sequence
  Description of Artificial Sequence: Synthetic oligonucleotide
  Sense strand starting at position 3899 of SEQ ID NO: 3451
aagcauguucuugucgcaa

SEQ ID NO: 268521 - RNA, 19 nt, Artificial Sequence
  Description of Artificial Sequence: Synthetic oligonucleotide
  Antisense strand to SEQ ID NO: 268520
uugcgacaagaacaugcuu

SEQ ID NO: 268522 - RNA, 19 nt, Artificial Sequence
  Description of Artificial Sequence: Synthetic oligonucleotide
  Sense strand starting at position 2 of SEQ ID NO: 3451
ccaggcucauucuugacaa

SEQ ID NO: 268523 - RNA, 19 nt, Artificial Sequence
  Description of Artificial Sequence: Synthetic oligonucleotide
  Antisense strand to SEQ ID NO: 268522
uugucaagaaugagccugg

SEQ ID NO: 268524 - RNA, 19 nt, Artificial Sequence
  Description of Artificial Sequence: Synthetic oligonucleotide
  Sense strand starting at position 160 of SEQ ID NO: 3451
uucuaacaagcaugaguaa

SEQ ID NO: 268525 - RNA, 19 nt, Artificial Sequence
  Description of Artificial Sequence: Synthetic oligonucleotide
  Antisense strand to SEQ ID NO: 268524
uuacucaugcuuguuagaa

SEQ ID NO: 268526 - RNA, 19 nt, Artificial Sequence
  Description of Artificial Sequence: Synthetic oligonucleotide
  Sense strand starting at position 270 of SEQ ID NO: 3451
uuguuuaaagacugauaac

SEQ ID NO: 268527 - RNA, 19 nt, Artificial Sequence
  Description of Artificial Sequence: Synthetic oligonucleotide
  Antisense strand to SEQ ID NO: 268526
guuaucagucuuuaaacaa

SEQ ID NO: 268528 - RNA, 19 nt, Artificial Sequence
  Description of Artificial Sequence: Synthetic oligonucleotide
  Sense strand starting at position 314 of SEQ ID NO: 3451
guuguuuauguagaauaag

SEQ ID NO: 268529 - RNA, 19 nt, Artificial Sequence
  Description of Artificial Sequence: Synthetic oligonucleotide
  Antisense strand to SEQ ID NO: 268528
cuuauucuacauaaacaac

SEQ ID NO: 268530 - RNA, 19 nt, Artificial Sequence
  Description of Artificial Sequence: Synthetic oligonucleotide
  Sense strand starting at position 352 of SEQ ID NO: 3451
cucugaagauugcuacuua

SEQ ID NO: 268531 - RNA, 19 nt, Artificial Sequence
  Description of Artificial Sequence: Synthetic oligonucleotide
  Antisense strand to SEQ ID NO: 268530
uaaguagcaaucuucagag

SEQ ID NO: 268532 - RNA, 19 nt, Artificial Sequence
  Description of Artificial Sequence: Synthetic oligonucleotide
  Sense strand starting at position 356 of SEQ ID NO: 3451
gaagauugcuacuuaugga

SEQ ID NO: 268533 - RNA, 19 nt, Artificial Sequence
  Description of Artificial Sequence: Synthetic oligonucleotide
  Antisense strand to SEQ ID NO: 268532
uccauaaguagcaaucuuc

SEQ ID NO: 268534 - RNA, 19 nt, Artificial Sequence
  Description of Artificial Sequence: Synthetic oligonucleotide
  Sense strand starting at position 569 of SEQ ID NO: 3451
gggauuucuuaccaacaaa

SEQ ID NO: 268535 - RNA, 19 nt, Artificial Sequence
  Description of Artificial Sequence: Synthetic oligonucleotide
  Antisense strand to SEQ ID NO: 268534
uuuguugguaagaaauccc

SEQ ID NO: 268536 - RNA, 19 nt, Artificial Sequence
  Description of Artificial Sequence: Synthetic oligonucleotide
  Sense strand starting at position 698 of SEQ ID NO: 3451
ggaauauuauuugaacugu

SEQ ID NO: 268537 - RNA, 19 nt, Artificial Sequence
  Description of Artificial Sequence: Synthetic oligonucleotide
  Antisense strand to SEQ ID NO: 268536
acaguucaaauaauauucc

SEQ ID NO: 268538 - RNA, 19 nt, Artificial Sequence
  Description of Artificial Sequence: Synthetic oligonucleotide
  Sense strand starting at position 735 of SEQ ID NO: 3451
cugcaaugugaucaagauu

SEQ ID NO: 268539 - RNA, 19 nt, Artificial Sequence
  Description of Artificial Sequence: Synthetic oligonucleotide
  Antisense strand to SEQ ID NO: 268538
aaucuugaucacauugcag

SEQ ID NO: 268540 - RNA, 19 nt, Artificial Sequence
  Description of Artificial Sequence: Synthetic oligonucleotide
  Sense strand starting at position 741 of SEQ ID NO: 3451
ugugaucaagauuaguguu

SEQ ID NO: 268541 - RNA, 19 nt, Artificial Sequence
  Description of Artificial Sequence: Synthetic oligonucleotide
  Antisense strand to SEQ ID NO: 268540
aacacuaaucuugaucaca

SEQ ID NO: 268542 - RNA, 19 nt, Artificial Sequence
  Description of Artificial Sequence: Synthetic oligonucleotide
  Sense strand starting at position 743 of SEQ ID NO: 3451
ugaucaagauuaguguuau

SEQ ID NO: 268543 - RNA, 19 nt, Artificial Sequence
  Description of Artificial Sequence: Synthetic oligonucleotide
  Antisense strand to SEQ ID NO: 268542
auaacacuaaucuugauca

SEQ ID NO: 268544 - RNA, 19 nt, Artificial Sequence
  Description of Artificial Sequence: Synthetic oligonucleotide
  Sense strand starting at position 805 of SEQ ID NO: 3451
acuagagcagucuauauuc

SEQ ID NO: 268545 - RNA, 19 nt, Artificial Sequence
  Description of Artificial Sequence: Synthetic oligonucleotide
  Antisense strand to SEQ ID NO: 268544
gaauauagacugcucuagu

SEQ ID NO: 268546 - RNA, 19 nt, Artificial Sequence
  Description of Artificial Sequence: Synthetic oligonucleotide
  Sense strand starting at position 898 of SEQ ID NO: 3451
gagagaauggcauagcugu

SEQ ID NO: 268547 - RNA, 19 nt, Artificial Sequence
  Description of Artificial Sequence: Synthetic oligonucleotide
  Antisense strand to SEQ ID NO: 268546
acagcuaugccauucucuc

SEQ ID NO: 268548 - RNA, 19 nt, Artificial Sequence
  Description of Artificial Sequence: Synthetic oligonucleotide
  Sense strand starting at position 1152 of SEQ ID NO: 3451
agaucuguccaccguauuu

SEQ ID NO: 268549 - RNA, 19 nt, Artificial Sequence
  Description of Artificial Sequence: Synthetic oligonucleotide
  Antisense strand to SEQ ID NO: 268548
aaauacgguggacagaucu

SEQ ID NO: 268550 - RNA, 19 nt, Artificial Sequence
  Description of Artificial Sequence: Synthetic oligonucleotide
  Sense strand starting at position 1176 of SEQ ID NO: 3451
gaguaauauuuacaagaug

SEQ ID NO: 268551 - RNA, 19 nt, Artificial Sequence
  Description of Artificial Sequence: Synthetic oligonucleotide
  Antisense strand to SEQ ID NO: 268550
caucuuguaaauauuacuc

SEQ ID NO: 268552 - RNA, 19 nt, Artificial Sequence
  Description of Artificial Sequence: Synthetic oligonucleotide
  Sense strand starting at position 1336 of SEQ ID NO: 3451
acuuguauuugccugcaua

SEQ ID NO: 268553 - RNA, 19 nt, Artificial Sequence
  Description of Artificial Sequence: Synthetic oligonucleotide
  Antisense strand to SEQ ID NO: 268552
uaugcaggcaaauacaagu

SEQ ID NO: 268554 - RNA, 19 nt, Artificial Sequence
  Description of Artificial Sequence: Synthetic oligonucleotide
  Sense strand starting at position 1359 of SEQ ID NO: 3451
agccuuauuuccuuauggu

SEQ ID NO: 268555 - RNA, 19 nt, Artificial Sequence
  Description of Artificial Sequence: Synthetic oligonucleotide
  Antisense strand to SEQ ID NO: 268554
accauaaggaaauaaggcu

SEQ ID NO: 268556 - RNA, 19 nt, Artificial Sequence
  Description of Artificial Sequence: Synthetic oligonucleotide
  Sense strand starting at position 1429 of SEQ ID NO: 3451
aaguucccagagugaaaua

SEQ ID NO: 268557 - RNA, 19 nt, Artificial Sequence
  Description of Artificial Sequence: Synthetic oligonucleotide
  Antisense strand to SEQ ID NO: 268556
uauuucacucugggaacuu

SEQ ID NO: 268558 - RNA, 19 nt, Artificial Sequence
  Description of Artificial Sequence: Synthetic oligonucleotide
  Sense strand starting at position 1738 of SEQ ID NO: 3451
accugaagccauuaucuga

SEQ ID NO: 268559 - RNA, 19 nt, Artificial Sequence
  Description of Artificial Sequence: Synthetic oligonucleotide
  Antisense strand to SEQ ID NO: 268558
ucagauaauggcuucaggu

SEQ ID NO: 268560 - RNA, 19 nt, Artificial Sequence
  Description of Artificial Sequence: Synthetic oligonucleotide
  Sense strand starting at position 1741 of SEQ ID NO: 3451
ugaagccauuaucugaaau

SEQ ID NO: 268561 - RNA, 19 nt, Artificial Sequence
  Description of Artificial Sequence: Synthetic oligonucleotide
  Antisense strand to SEQ ID NO: 268560
auuucagauaauggcuuca

SEQ ID NO: 268562 - RNA, 19 nt, Artificial Sequence
  Description of Artificial Sequence: Synthetic oligonucleotide
  Sense strand starting at position 1863 of SEQ ID NO: 3451
uucuguuugagagauguuu

SEQ ID NO: 268563 - RNA, 19 nt, Artificial Sequence
  Description of Artificial Sequence: Synthetic oligonucleotide
  Antisense strand to SEQ ID NO: 268562
aaacaucucucaaacagaa

SEQ ID NO: 268564 - RNA, 19 nt, Artificial Sequence
  Description of Artificial Sequence: Synthetic oligonucleotide
  Sense strand starting at position 2034 of SEQ ID NO: 3451
cucuaugaauaugugauua

SEQ ID NO: 268565 - RNA, 19 nt, Artificial Sequence
  Description of Artificial Sequence: Synthetic oligonucleotide
  Antisense strand to SEQ ID NO: 268564
uaaucacauauucauagag

SEQ ID NO: 268566 - RNA, 19 nt, Artificial Sequence
  Description of Artificial Sequence: Synthetic oligonucleotide
  Sense strand starting at position 2038 of SEQ ID NO: 3451
augaauaugugauuaaccu

SEQ ID NO: 268567 - RNA, 19 nt, Artificial Sequence
  Description of Artificial Sequence: Synthetic oligonucleotide
  Antisense strand to SEQ ID NO: 268566
agguuaaucacauauucau

SEQ ID NO: 268568 - RNA, 19 nt, Artificial Sequence
  Description of Artificial Sequence: Synthetic oligonucleotide
  Sense strand starting at position 2386 of SEQ ID NO: 3451
guuccagacauggaguuua

SEQ ID NO: 268569 - RNA, 19 nt, Artificial Sequence
  Description of Artificial Sequence: Synthetic oligonucleotide
  Antisense strand to SEQ ID NO: 268568
uaaacuccaugucuggaac

SEQ ID NO: 268570 - RNA, 19 nt, Artificial Sequence
  Description of Artificial Sequence: Synthetic oligonucleotide
  Sense strand starting at position 2397 of SEQ ID NO: 3451
ggaguuuagacuugaguuu

SEQ ID NO: 268571 - RNA, 19 nt, Artificial Sequence
  Description of Artificial Sequence: Synthetic oligonucleotide
  Antisense strand to SEQ ID NO: 268570
aaacucaagucuaaacucc

SEQ ID NO: 268572 - RNA, 19 nt, Artificial Sequence
  Description of Artificial Sequence: Synthetic oligonucleotide
  Sense strand starting at position 2498 of SEQ ID NO: 3451
agacucaguguagaauguu

SEQ ID NO: 268573 - RNA, 19 nt, Artificial Sequence
  Description of Artificial Sequence: Synthetic oligonucleotide
  Antisense strand to SEQ ID NO: 268572
aacauucuacacugagucu

SEQ ID NO: 268574 - RNA, 19 nt, Artificial Sequence
  Description of Artificial Sequence: Synthetic oligonucleotide
  Sense strand starting at position 2644 of SEQ ID NO: 3451
aguuuccagaucugaggaa

SEQ ID NO: 268575 - RNA, 19 nt, Artificial Sequence
  Description of Artificial Sequence: Synthetic oligonucleotide
  Antisense strand to SEQ ID NO: 268574
uuccucagaucuggaaacu

SEQ ID NO: 268576 - RNA, 19 nt, Artificial Sequence
  Description of Artificial Sequence: Synthetic oligonucleotide
  Sense strand starting at position 2694 of SEQ ID NO: 3451
auaaaugauuggguccaca

SEQ ID NO: 268577 - RNA, 19 nt, Artificial Sequence
  Description of Artificial Sequence: Synthetic oligonucleotide
  Antisense strand to SEQ ID NO: 268576
uguggacccaaucauuuau

SEQ ID NO: 268578 - RNA, 19 nt, Artificial Sequence
  Description of Artificial Sequence: Synthetic oligonucleotide
  Sense strand starting at position 2709 of SEQ ID NO: 3451
cacaaaugaguuugugauu

SEQ ID NO: 268579 - RNA, 19 nt, Artificial Sequence
  Description of Artificial Sequence: Synthetic oligonucleotide
  Antisense strand to SEQ ID NO: 268578
aaucacaaacucauuugug

SEQ ID NO: 268580 - RNA, 19 nt, Artificial Sequence
  Description of Artificial Sequence: Synthetic oligonucleotide
  Sense strand starting at position 2884 of SEQ ID NO: 3451
ccaaccugagcuggugaaa

SEQ ID NO: 268581 - RNA, 19 nt, Artificial Sequence
  Description of Artificial Sequence: Synthetic oligonucleotide
  Antisense strand to SEQ ID NO: 268580
uuucaccagcucagguugg

SEQ ID NO: 268582 - RNA, 19 nt, Artificial Sequence
  Description of Artificial Sequence: Synthetic oligonucleotide
  Sense strand starting at position 2887 of SEQ ID NO: 3451
accugagcuggugaaauca

SEQ ID NO: 268583 - RNA, 19 nt, Artificial Sequence
  Description of Artificial Sequence: Synthetic oligonucleotide
  Antisense strand to SEQ ID NO: 268582
ugauuucaccagcucaggu

SEQ ID NO: 268584 - RNA, 19 nt, Artificial Sequence
  Description of Artificial Sequence: Synthetic oligonucleotide
  Sense strand starting at position 2918 of SEQ ID NO: 3451
gcagguuuccagccuguuu

SEQ ID NO: 268585 - RNA, 19 nt, Artificial Sequence
  Description of Artificial Sequence: Synthetic oligonucleotide
  Antisense strand to SEQ ID NO: 268584
aaacaggcuggaaaccugc

SEQ ID NO: 268586 - RNA, 19 nt, Artificial Sequence
  Description of Artificial Sequence: Synthetic oligonucleotide
  Sense strand starting at position 2951 of SEQ ID NO: 3451
gauagcuaagguugaauau

SEQ ID NO: 268587 - RNA, 19 nt, Artificial Sequence
  Description of Artificial Sequence: Synthetic oligonucleotide
  Antisense strand to SEQ ID NO: 268586
auauucaaccuuagcuauc

SEQ ID NO: 268588 - RNA, 19 nt, Artificial Sequence
  Description of Artificial Sequence: Synthetic oligonucleotide
  Sense strand starting at position 2994 of SEQ ID NO: 3451
uaaguuauccaaggagucu

SEQ ID NO: 268589 - RNA, 19 nt, Artificial Sequence
  Description of Artificial Sequence: Synthetic oligonucleotide
  Antisense strand to SEQ ID NO: 268588
agacuccuuggauaacuua

SEQ ID NO: 268590 - RNA, 19 nt, Artificial Sequence
  Description of Artificial Sequence: Synthetic oligonucleotide
  Sense strand starting at position 3400 of SEQ ID NO: 3451
cacuccuucgagggagaga

SEQ ID NO: 268591 - RNA, 19 nt, Artificial Sequence
  Description of Artificial Sequence: Synthetic oligonucleotide
  Antisense strand to SEQ ID NO: 268590
ucucucccucgaaggagug

SEQ ID NO: 268592 - RNA, 19 nt, Artificial Sequence
  Description of Artificial Sequence: Synthetic oligonucleotide
  Sense strand starting at position 3546 of SEQ ID NO: 3451
accugagucagagguuuau

SEQ ID NO: 268593 - RNA, 19 nt, Artificial Sequence
  Description of Artificial Sequence: Synthetic oligonucleotide
  Antisense strand to SEQ ID NO: 268592
auaaaccucugacucaggu

SEQ ID NO: 268594 - RNA, 19 nt, Artificial Sequence
  Description of Artificial Sequence: Synthetic oligonucleotide
  Sense strand starting at position 3550 of SEQ ID NO: 3451
gagucagagguuuauguga

SEQ ID NO: 268595 - RNA, 19 nt, Artificial Sequence
  Description of Artificial Sequence: Synthetic oligonucleotide
  Antisense strand to SEQ ID NO: 268594
ucacauaaaccucugacuc

SEQ ID NO: 268596 - RNA, 19 nt, Artificial Sequence
  Description of Artificial Sequence: Synthetic oligonucleotide
  Sense strand starting at position 3779 of SEQ ID NO: 3451
uccauuagggauugaccuu

SEQ ID NO: 268597 - RNA, 19 nt, Artificial Sequence
  Description of Artificial Sequence: Synthetic oligonucleotide
  Antisense strand to SEQ ID NO: 268596
aaggucaaucccuaaugga

SEQ ID NO: 268598 - RNA, 19 nt, Artificial Sequence
  Description of Artificial Sequence: Synthetic oligonucleotide
  Sense strand starting at position 3886 of SEQ ID NO: 3451
cauguaauggguuaagcau

SEQ ID NO: 268599 - RNA, 19 nt, Artificial Sequence
  Description of Artificial Sequence: Synthetic oligonucleotide
  Antisense strand to SEQ ID NO: 268598
augcuuaacccauuacaug

SEQ ID NO: 268600 - RNA, 19 nt, Artificial Sequence
  Description of Artificial Sequence: Synthetic oligonucleotide
  Sense strand starting at position 3899 of SEQ ID NO: 3451
aagcauguucuugucgcaa

SEQ ID NO: 268601 - RNA, 19 nt, Artificial Sequence
  Description of Artificial Sequence: Synthetic oligonucleotide
  Antisense strand to SEQ ID NO: 268600
uugcgacaagaacaugcuu

SEQ ID NO: 268602 - RNA, 19 nt, Artificial Sequence
  Description of Artificial Sequence: Synthetic oligonucleotide
  Sense strand starting at position 455 of SEQ ID NO: 3452
cccaaugugcuggauacau

SEQ ID NO: 268603 - RNA, 19 nt, Artificial Sequence
  Description of Artificial Sequence: Synthetic oligonucleotide
  Antisense strand to SEQ ID NO: 268602
auguauccagcacauuggg

SEQ ID NO: 268604 - RNA, 19 nt, Artificial Sequence
  Description of Artificial Sequence: Synthetic oligonucleotide
  Sense strand starting at position 457 of SEQ ID NO: 3452
caaugugcuggauacauga

SEQ ID NO: 268605 - RNA, 19 nt, Artificial Sequence
  Description of Artificial Sequence: Synthetic oligonucleotide
  Antisense strand to SEQ ID NO: 268604
ucauguauccagcacauug

SEQ ID NO: 268606 - RNA, 19 nt, Artificial Sequence
  Description of Artificial Sequence: Synthetic oligonucleotide
  Sense strand starting at position 470 of SEQ ID NO: 3452
acaugagaucauggucuaa

SEQ ID NO: 268607 - RNA, 19 nt, Artificial Sequence
  Description of Artificial Sequence: Synthetic oligonucleotide
  Antisense strand to SEQ ID NO: 268606
uuagaccaugaucucaugu

SEQ ID NO: 268608 - RNA, 19 nt, Artificial Sequence
  Description of Artificial Sequence: Synthetic oligonucleotide
  Sense strand starting at position 472 of SEQ ID NO: 3452
augagaucauggucuaaug

SEQ ID NO: 268609 - RNA, 19 nt, Artificial Sequence
  Description of Artificial Sequence: Synthetic oligonucleotide
  Antisense strand to SEQ ID NO: 268608
cauuagaccaugaucucau

SEQ ID NO: 268610 - RNA, 19 nt, Artificial Sequence
  Description of Artificial Sequence: Synthetic oligonucleotide
  Sense strand starting at position 483 of SEQ ID NO: 3452
gucuaaugugacuagagca

SEQ ID NO: 268611 - RNA, 19 nt, Artificial Sequence
  Description of Artificial Sequence: Synthetic oligonucleotide
  Antisense strand to SEQ ID NO: 268610
ugcucuagucacauuagac

SEQ ID NO: 268612 - RNA, 19 nt, Artificial Sequence
  Description of Artificial Sequence: Synthetic oligonucleotide
  Sense strand starting at position 523 of SEQ ID NO: 3452
uguagaacgaugcggaaau

SEQ ID NO: 268613 - RNA, 19 nt, Artificial Sequence
  Description of Artificial Sequence: Synthetic oligonucleotide
  Antisense strand to SEQ ID NO: 268612
auuuccgcaucguucuaca

SEQ ID NO: 268614 - RNA, 19 nt, Artificial Sequence
  Description of Artificial Sequence: Synthetic oligonucleotide
  Sense strand starting at position 588 of SEQ ID NO: 3452
ugugaagugcugcaaauac

SEQ ID NO: 268615 - RNA, 19 nt, Artificial Sequence
  Description of Artificial Sequence: Synthetic oligonucleotide
  Antisense strand to SEQ ID NO: 268614
guauuugcagcacuucaca

SEQ ID NO: 268616 - RNA, 19 nt, Artificial Sequence
  Description of Artificial Sequence: Synthetic oligonucleotide
  Sense strand starting at position 633 of SEQ ID NO: 3452
cgggagagucccuggaguu

SEQ ID NO: 268617 - RNA, 19 nt, Artificial Sequence
  Description of Artificial Sequence: Synthetic oligonucleotide
  Antisense strand to SEQ ID NO: 268616
aacuccagggacucucccg

SEQ ID NO: 268618 - RNA, 19 nt, Artificial Sequence
  Description of Artificial Sequence: Synthetic oligonucleotide
  Sense strand starting at position 634 of SEQ ID NO: 3452
gggagagucccuggaguug

SEQ ID NO: 268619 - RNA, 19 nt, Artificial Sequence
  Description of Artificial Sequence: Synthetic oligonucleotide
  Antisense strand to SEQ ID NO: 268618
caacuccagggacucuccc

SEQ ID NO: 268620 - RNA, 19 nt, Artificial Sequence
  Description of Artificial Sequence: Synthetic oligonucleotide
  Sense strand starting at position 845 of SEQ ID NO: 3452
agguuagaagccugaucag

SEQ ID NO: 268621 - RNA, 19 nt, Artificial Sequence
  Description of Artificial Sequence: Synthetic oligonucleotide
  Antisense strand to SEQ ID NO: 268620
cugaucaggcuucuaaccu

SEQ ID NO: 268622 - RNA, 19 nt, Artificial Sequence
  Description of Artificial Sequence: Synthetic oligonucleotide
  Sense strand starting at position 857 of SEQ ID NO: 3452
ugaucaggccucuggaaga

SEQ ID NO: 268623 - RNA, 19 nt, Artificial Sequence
  Description of Artificial Sequence: Synthetic oligonucleotide
  Antisense strand to SEQ ID NO: 268622
ucuuccagaggccugauca

SEQ ID NO: 268624 - RNA, 19 nt, Artificial Sequence
  Description of Artificial Sequence: Synthetic oligonucleotide
  Sense strand starting at position 1094 of SEQ ID NO: 3452
ugaauugaaaucgggacuu

SEQ ID NO: 268625 - RNA, 19 nt, Artificial Sequence
  Description of Artificial Sequence: Synthetic oligonucleotide
  Antisense strand to SEQ ID NO: 268624
aagucccgauuucaauuca

SEQ ID NO: 268626 - RNA, 19 nt, Artificial Sequence
  Description of Artificial Sequence: Synthetic oligonucleotide
  Sense strand starting at position 1293 of SEQ ID NO: 3452
acgcccuuaccuggauaaa

SEQ ID NO: 268627 - RNA, 19 nt, Artificial Sequence
  Description of Artificial Sequence: Synthetic oligonucleotide
  Antisense strand to SEQ ID NO: 268626
uuuauccagguaagggcgu

SEQ ID NO: 268628 - RNA, 19 nt, Artificial Sequence
  Description of Artificial Sequence: Synthetic oligonucleotide
  Sense strand starting at position 2045 of SEQ ID NO: 3452
aagggugucccugagccaa

SEQ ID NO: 268629 - RNA, 19 nt, Artificial Sequence
  Description of Artificial Sequence: Synthetic oligonucleotide
  Antisense strand to SEQ ID NO: 268628
uuggcucagggacacccuu

SEQ ID NO: 268630 - RNA, 19 nt, Artificial Sequence
  Description of Artificial Sequence: Synthetic oligonucleotide
  Sense strand starting at position 2259 of SEQ ID NO: 3452
cuuuauuaucgacacugca

SEQ ID NO: 268631 - RNA, 19 nt, Artificial Sequence
  Description of Artificial Sequence: Synthetic oligonucleotide
  Antisense strand to SEQ ID NO: 268630
ugcagugucgauaauaaag

SEQ ID NO: 268632 - RNA, 19 nt, Artificial Sequence
  Description of Artificial Sequence: Synthetic oligonucleotide
  Sense strand starting at position 2274 of SEQ ID NO: 3452
ugcagaauuucugggaaga

SEQ ID NO: 268633 - RNA, 19 nt, Artificial Sequence
  Description of Artificial Sequence: Synthetic oligonucleotide
  Antisense strand to SEQ ID NO: 268632
ucuucccagaaauucugca

SEQ ID NO: 268634 - RNA, 19 nt, Artificial Sequence
  Description of Artificial Sequence: Synthetic oligonucleotide
  Sense strand starting at position 2276 of SEQ ID NO: 3452
cagaauuucugggaagaug

SEQ ID NO: 268635 - RNA, 19 nt, Artificial Sequence
  Description of Artificial Sequence: Synthetic oligonucleotide
  Antisense strand to SEQ ID NO: 268634
caucuucccagaaauucug

SEQ ID NO: 268636 - RNA, 19 nt, Artificial Sequence
  Description of Artificial Sequence: Synthetic oligonucleotide
  Sense strand starting at position 2318 of SEQ ID NO: 3452
aguuucuaccugcagcaua

SEQ ID NO: 268637 - RNA, 19 nt, Artificial Sequence
  Description of Artificial Sequence: Synthetic oligonucleotide
  Antisense strand to SEQ ID NO: 268636
uaugcugcagguagaaacu

SEQ ID NO: 268638 - RNA, 19 nt, Artificial Sequence
  Description of Artificial Sequence: Synthetic oligonucleotide
  Sense strand starting at position 2391 of SEQ ID NO: 3452
ugugcagcucgggagagau

SEQ ID NO: 268639 - RNA, 19 nt, Artificial Sequence
  Description of Artificial Sequence: Synthetic oligonucleotide
  Antisense strand to SEQ ID NO: 268638
aucucucccgagcugcaca

SEQ ID NO: 268640 - RNA, 19 nt, Artificial Sequence
  Description of Artificial Sequence: Synthetic oligonucleotide
  Sense strand starting at position 2403 of SEQ ID NO: 3452
gagagaucuugggaaagac

SEQ ID NO: 268641 - RNA, 19 nt, Artificial Sequence
  Description of Artificial Sequence: Synthetic oligonucleotide
  Antisense strand to SEQ ID NO: 268640
gucuuucccaagaucucuc

SEQ ID NO: 268642 - RNA, 19 nt, Artificial Sequence
  Description of Artificial Sequence: Synthetic oligonucleotide
  Sense strand starting at position 2498 of SEQ ID NO: 3452
cuccuuugucacugagaau

SEQ ID NO: 268643 - RNA, 19 nt, Artificial Sequence
  Description of Artificial Sequence: Synthetic oligonucleotide
  Antisense strand to SEQ ID NO: 268642
auucucagugacaaaggag

SEQ ID NO: 268644 - RNA, 19 nt, Artificial Sequence
  Description of Artificial Sequence: Synthetic oligonucleotide
  Sense strand starting at position 2511 of SEQ ID NO: 3452
gagaauacauccucauggu

SEQ ID NO: 268645 - RNA, 19 nt, Artificial Sequence
  Description of Artificial Sequence: Synthetic oligonucleotide
  Antisense strand to SEQ ID NO: 268644
accaugaggauguauucuc

SEQ ID NO: 268646 - RNA, 19 nt, Artificial Sequence
  Description of Artificial Sequence: Synthetic oligonucleotide
  Sense strand starting at position 2536 of SEQ ID NO: 3452
cuuucccaguccuuugaga

SEQ ID NO: 268647 - RNA, 19 nt, Artificial Sequence
  Description of Artificial Sequence: Synthetic oligonucleotide
  Antisense strand to SEQ ID NO: 268646
ucucaaaggacugggaaag

SEQ ID NO: 268648 - RNA, 19 nt, Artificial Sequence
  Description of Artificial Sequence: Synthetic oligonucleotide
  Sense strand starting at position 2549 of SEQ ID NO: 3452
uugagagugucauucucau

SEQ ID NO: 268649 - RNA, 19 nt, Artificial Sequence
  Description of Artificial Sequence: Synthetic oligonucleotide
  Antisense strand to SEQ ID NO: 268648
augagaaugacacucucaa

SEQ ID NO: 268650 - RNA, 19 nt, Artificial Sequence
  Description of Artificial Sequence: Synthetic oligonucleotide
  Sense strand starting at position 2775 of SEQ ID NO: 3452
cccggugauaaucaguuua

SEQ ID NO: 268651 - RNA, 19 nt, Artificial Sequence
  Description of Artificial Sequence: Synthetic oligonucleotide
  Antisense strand to SEQ ID NO: 268650
uaaacugauuaucaccggg

SEQ ID NO: 268652 - RNA, 19 nt, Artificial Sequence
  Description of Artificial Sequence: Synthetic oligonucleotide
  Sense strand starting at position 2777 of SEQ ID NO: 3452
cggugauaaucaguuuaau

SEQ ID NO: 268653 - RNA, 19 nt, Artificial Sequence
  Description of Artificial Sequence: Synthetic oligonucleotide
  Antisense strand to SEQ ID NO: 268652
auuaaacugauuaucaccg

SEQ ID NO: 268654 - RNA, 19 nt, Artificial Sequence
  Description of Artificial Sequence: Synthetic oligonucleotide
  Sense strand starting at position 2796 of SEQ ID NO: 3452
cuuccaugugggcauauaa

SEQ ID NO: 268655 - RNA, 19 nt, Artificial Sequence
  Description of Artificial Sequence: Synthetic oligonucleotide
  Antisense strand to SEQ ID NO: 268654
uuauaugcccacauggaag

SEQ ID NO: 268656 - RNA, 19 nt, Artificial Sequence
  Description of Artificial Sequence: Synthetic oligonucleotide
  Sense strand starting at position 2925 of SEQ ID NO: 3452
uggauucuuaggcauguga

SEQ ID NO: 268657 - RNA, 19 nt, Artificial Sequence
  Description of Artificial Sequence: Synthetic oligonucleotide
  Antisense strand to SEQ ID NO: 268656
ucacaugccuaagaaucca

SEQ ID NO: 268658 - RNA, 19 nt, Artificial Sequence
  Description of Artificial Sequence: Synthetic oligonucleotide
  Sense strand starting at position 2927 of SEQ ID NO: 3452
gauucuuaggcaugugacu

SEQ ID NO: 268659 - RNA, 19 nt, Artificial Sequence
  Description of Artificial Sequence: Synthetic oligonucleotide
  Antisense strand to SEQ ID NO: 268658
agucacaugccuaagaauc

SEQ ID NO: 268660 - RNA, 19 nt, Artificial Sequence
  Description of Artificial Sequence: Synthetic oligonucleotide
  Sense strand starting at position 2976 of SEQ ID NO: 3452
aggccuuguccugagucaa

SEQ ID NO: 268661 - RNA, 19 nt, Artificial Sequence
  Description of Artificial Sequence: Synthetic oligonucleotide
  Antisense strand to SEQ ID NO: 268660
uugacucaggacaaggccu

SEQ ID NO: 268662 - RNA, 19 nt, Artificial Sequence
  Description of Artificial Sequence: Synthetic oligonucleotide
  Sense strand starting at position 3008 of SEQ ID NO: 3452
cugggaauucugcaucauu

SEQ ID NO: 268663 - RNA, 19 nt, Artificial Sequence
  Description of Artificial Sequence: Synthetic oligonucleotide
  Antisense strand to SEQ ID NO: 268662
aaugaugcagaauucccag

SEQ ID NO: 268664 - RNA, 19 nt, Artificial Sequence
  Description of Artificial Sequence: Synthetic oligonucleotide
  Sense strand starting at position 3128 of SEQ ID NO: 3452
agcagaagugguuagacau

SEQ ID NO: 268665 - RNA, 19 nt, Artificial Sequence
  Description of Artificial Sequence: Synthetic oligonucleotide
  Antisense strand to SEQ ID NO: 268664
augucuaaccacuucugcu

SEQ ID NO: 268666 - RNA, 19 nt, Artificial Sequence
  Description of Artificial Sequence: Synthetic oligonucleotide
  Sense strand starting at position 3165 of SEQ ID NO: 3452
uuugcaauugagggacaaa

SEQ ID NO: 268667 - RNA, 19 nt, Artificial Sequence
  Description of Artificial Sequence: Synthetic oligonucleotide
  Antisense strand to SEQ ID NO: 268666
uuugucccucaauugcaaa

SEQ ID NO: 268668 - RNA, 19 nt, Artificial Sequence
  Description of Artificial Sequence: Synthetic oligonucleotide
  Sense strand starting at position 3192 of SEQ ID NO: 3452
gagggcuuucuuugucaga

SEQ ID NO: 268669 - RNA, 19 nt, Artificial Sequence
  Description of Artificial Sequence: Synthetic oligonucleotide
  Antisense strand to SEQ ID NO: 268668
ucugacaaagaaagcccuc

SEQ ID NO: 268670 - RNA, 19 nt, Artificial Sequence
  Description of Artificial Sequence: Synthetic oligonucleotide
  Sense strand starting at position 3193 of SEQ ID NO: 3452
agggcuuucuuugucagaa

SEQ ID NO: 268671 - RNA, 19 nt, Artificial Sequence
  Description of Artificial Sequence: Synthetic oligonucleotide
  Antisense strand to SEQ ID NO: 268670
uucugacaaagaaagcccu

SEQ ID NO: 268672 - RNA, 19 nt, Artificial Sequence
  Description of Artificial Sequence: Synthetic oligonucleotide
  Sense strand starting at position 3598 of SEQ ID NO: 3452
aaaggucguguccacuuaa

SEQ ID NO: 268673 - RNA, 19 nt, Artificial Sequence
  Description of Artificial Sequence: Synthetic oligonucleotide
  Antisense strand to SEQ ID NO: 268672
uuaaguggacacgaccuuu

SEQ ID NO: 268674 - RNA, 19 nt, Artificial Sequence
  Description of Artificial Sequence: Synthetic oligonucleotide
  Sense strand starting at position 3677 of SEQ ID NO: 3452
gaugaaauugcugggcagu

SEQ ID NO: 268675 - RNA, 19 nt, Artificial Sequence
  Description of Artificial Sequence: Synthetic oligonucleotide
  Antisense strand to SEQ ID NO: 268674
acugcccagcaauuucauc

SEQ ID NO: 268676 - RNA, 19 nt, Artificial Sequence
  Description of Artificial Sequence: Synthetic oligonucleotide
  Sense strand starting at position 3716 of SEQ ID NO: 3452
cagugcucgcuucucugaa

SEQ ID NO: 268677 - RNA, 19 nt, Artificial Sequence
  Description of Artificial Sequence: Synthetic oligonucleotide
  Antisense strand to SEQ ID NO: 268676
uucagagaagcgagcacug

SEQ ID NO: 268678 - RNA, 19 nt, Artificial Sequence
  Description of Artificial Sequence: Synthetic oligonucleotide
  Sense strand starting at position 3728 of SEQ ID NO: 3452
cucugaaaucauuguuuag

SEQ ID NO: 268679 - RNA, 19 nt, Artificial Sequence
  Description of Artificial Sequence: Synthetic oligonucleotide
  Antisense strand to SEQ ID NO: 268678
cuaaacaaugauuucagag

SEQ ID NO: 268680 - RNA, 19 nt, Artificial Sequence
  Description of Artificial Sequence: Synthetic oligonucleotide
  Sense strand starting at position 3730 of SEQ ID NO: 3452
cugaaaucauuguuuagaa

SEQ ID NO: 268681 - RNA, 19 nt, Artificial Sequence
  Description of Artificial Sequence: Synthetic oligonucleotide
  Antisense strand to SEQ ID NO: 268680
uucuaaacaaugauuucag

SEQ ID NO: 268682 - RNA, 19 nt, Artificial Sequence
  Description of Artificial Sequence: Synthetic oligonucleotide
  Sense strand starting at position 69 of SEQ ID NO: 3453
cucacuuugcuguaagaua

SEQ ID NO: 268683 - RNA, 19 nt, Artificial Sequence
  Description of Artificial Sequence: Synthetic oligonucleotide
  Antisense strand to SEQ ID NO: 268682
uaucuuacagcaaagugag

SEQ ID NO: 268684 - RNA, 19 nt, Artificial Sequence
  Description of Artificial Sequence: Synthetic oligonucleotide
  Sense strand starting at position 336 of SEQ ID NO: 3453
gcaguuucccaguagauag

SEQ ID NO: 268685 - RNA, 19 nt, Artificial Sequence
  Description of Artificial Sequence: Synthetic oligonucleotide
  Antisense strand to SEQ ID NO: 268684
cuaucuacugggaaacugc

SEQ ID NO: 268686 - RNA, 19 nt, Artificial Sequence
  Description of Artificial Sequence: Synthetic oligonucleotide
  Sense strand starting at position 446 of SEQ ID NO: 3453
aggaguuuaacugguaucu

SEQ ID NO: 268687 - RNA, 19 nt, Artificial Sequence
  Description of Artificial Sequence: Synthetic oligonucleotide
  Antisense strand to SEQ ID NO: 268686
agauaccaguuaaacuccu

SEQ ID NO: 268688 - RNA, 19 nt, Artificial Sequence
  Description of Artificial Sequence: Synthetic oligonucleotide
  Sense strand starting at position 455 of SEQ ID NO: 3453
acugguaucugaccuccua

SEQ ID NO: 268689 - RNA, 19 nt, Artificial Sequence
  Description of Artificial Sequence: Synthetic oligonucleotide
  Antisense strand to SEQ ID NO: 268688
uaggaggucagauaccagu

SEQ ID NO: 268690 - RNA, 19 nt, Artificial Sequence
  Description of Artificial Sequence: Synthetic oligonucleotide
  Sense strand starting at position 497 of SEQ ID NO: 3453
gaacacuuccagugagcau

SEQ ID NO: 268691 - RNA, 19 nt, Artificial Sequence
  Description of Artificial Sequence: Synthetic oligonucleotide
  Antisense strand to SEQ ID NO: 268690
augcucacuggaaguguuc

SEQ ID NO: 268692 - RNA, 19 nt, Artificial Sequence
  Description of Artificial Sequence: Synthetic oligonucleotide
  Sense strand starting at position 818 of SEQ ID NO: 3453
ggacacaagaauuguuguu

SEQ ID NO: 268693 - RNA, 19 nt, Artificial Sequence
  Description of Artificial Sequence: Synthetic oligonucleotide
  Antisense strand to SEQ ID NO: 268692
aacaacaauucuugugucc

SEQ ID NO: 268694 - RNA, 19 nt, Artificial Sequence
  Description of Artificial Sequence: Synthetic oligonucleotide
  Sense strand starting at position 823 of SEQ ID NO: 3453
caagaauuguuguugcaga

SEQ ID NO: 268695 - RNA, 19 nt, Artificial Sequence
  Description of Artificial Sequence: Synthetic oligonucleotide
  Antisense strand to SEQ ID NO: 268694
ucugcaacaacaauucuug

SEQ ID NO: 268696 - RNA, 19 nt, Artificial Sequence
  Description of Artificial Sequence: Synthetic oligonucleotide
  Sense strand starting at position 848 of SEQ ID NO: 3453
uggauuugccgcugacaac

SEQ ID NO: 268697 - RNA, 19 nt, Artificial Sequence
  Description of Artificial Sequence: Synthetic oligonucleotide
  Antisense strand to SEQ ID NO: 268696
guugucagcggcaaaucca

SEQ ID NO: 268698 - RNA, 19 nt, Artificial Sequence
  Description of Artificial Sequence: Synthetic oligonucleotide
  Sense strand starting at position 874 of SEQ ID NO: 3453
ggugcuguguaauuuggau

SEQ ID NO: 268699 - RNA, 19 nt, Artificial Sequence
  Description of Artificial Sequence: Synthetic oligonucleotide
  Antisense strand to SEQ ID NO: 268698
auccaaauuacacagcacc

SEQ ID NO: 268700 - RNA, 19 nt, Artificial Sequence
  Description of Artificial Sequence: Synthetic oligonucleotide
  Sense strand starting at position 990 of SEQ ID NO: 3453
uuugcauguuugccaauuu

SEQ ID NO: 268701 - RNA, 19 nt, Artificial Sequence
  Description of Artificial Sequence: Synthetic oligonucleotide
  Antisense strand to SEQ ID NO: 268700
aaauuggcaaacaugcaaa

SEQ ID NO: 268702 - RNA, 19 nt, Artificial Sequence
  Description of Artificial Sequence: Synthetic oligonucleotide
  Sense strand starting at position 1056 of SEQ ID NO: 3453
ugaagaccuguuuauaguu

SEQ ID NO: 268703 - RNA, 19 nt, Artificial Sequence
  Description of Artificial Sequence: Synthetic oligonucleotide
  Antisense strand to SEQ ID NO: 268702
aacuauaaacaggucuuca

SEQ ID NO: 268704 - RNA, 19 nt, Artificial Sequence
  Description of Artificial Sequence: Synthetic oligonucleotide
  Sense strand starting at position 1061 of SEQ ID NO: 3453
accuguuuauaguucuaau

SEQ ID NO: 268705 - RNA, 19 nt, Artificial Sequence
  Description of Artificial Sequence: Synthetic oligonucleotide
  Antisense strand to SEQ ID NO: 268704
auuagaacuauaaacaggu

SEQ ID NO: 268706 - RNA, 19 nt, Artificial Sequence
  Description of Artificial Sequence: Synthetic oligonucleotide
  Sense strand starting at position 1110 of SEQ ID NO: 3453
aaauguggauuaucuugaa

SEQ ID NO: 268707 - RNA, 19 nt, Artificial Sequence
  Description of Artificial Sequence: Synthetic oligonucleotide
  Antisense strand to SEQ ID NO: 268706
uucaagauaauccacauuu

SEQ ID NO: 268708 - RNA, 19 nt, Artificial Sequence
  Description of Artificial Sequence: Synthetic oligonucleotide
  Sense strand starting at position 1190 of SEQ ID NO: 3453
ucacuauauuccucuguag

SEQ ID NO: 268709 - RNA, 19 nt, Artificial Sequence
  Description of Artificial Sequence: Synthetic oligonucleotide
  Antisense strand to SEQ ID NO: 268708
cuacagaggaauauaguga

SEQ ID NO: 268710 - RNA, 19 nt, Artificial Sequence
  Description of Artificial Sequence: Synthetic oligonucleotide
  Sense strand starting at position 1192 of SEQ ID NO: 3453
acuauauuccucuguagau

SEQ ID NO: 268711 - RNA, 19 nt, Artificial Sequence
  Description of Artificial Sequence: Synthetic oligonucleotide
  Antisense strand to SEQ ID NO: 268710
aucuacagaggaauauagu

SEQ ID NO: 268712 - RNA, 19 nt, Artificial Sequence
  Description of Artificial Sequence: Synthetic oligonucleotide
  Sense strand starting at position 1193 of SEQ ID NO: 3453
cuauauuccucuguagaug

SEQ ID NO: 268713 - RNA, 19 nt, Artificial Sequence
  Description of Artificial Sequence: Synthetic oligonucleotide
  Antisense strand to SEQ ID NO: 268712
caucuacagaggaauauag

SEQ ID NO: 268714 - RNA, 19 nt, Artificial Sequence
  Description of Artificial Sequence: Synthetic oligonucleotide
  Sense strand starting at position 1199 of SEQ ID NO: 3453
uccucuguagaugaauauu

SEQ ID NO: 268715 - RNA, 19 nt, Artificial Sequence
  Description of Artificial Sequence: Synthetic oligonucleotide
  Antisense strand to SEQ ID NO: 268714
aauauucaucuacagagga

SEQ ID NO: 268716 - RNA, 19 nt, Artificial Sequence
  Description of Artificial Sequence: Synthetic oligonucleotide
  Sense strand starting at position 1252 of SEQ ID NO: 3453
uucugaacgcacuaaauaa

SEQ ID NO: 268717 - RNA, 19 nt, Artificial Sequence
  Description of Artificial Sequence: Synthetic oligonucleotide
  Antisense strand to SEQ ID NO: 268716
uuauuuagugcguucagaa

SEQ ID NO: 268718 - RNA, 19 nt, Artificial Sequence
  Description of Artificial Sequence: Synthetic oligonucleotide
  Sense strand starting at position 1350 of SEQ ID NO: 3453
uuuguagaccauugauuau

SEQ ID NO: 268719 - RNA, 19 nt, Artificial Sequence
  Description of Artificial Sequence: Synthetic oligonucleotide
  Antisense strand to SEQ ID NO: 268718
auaaucaauggucuacaaa

SEQ ID NO: 268720 - RNA, 19 nt, Artificial Sequence
  Description of Artificial Sequence: Synthetic oligonucleotide
  Sense strand starting at position 1353 of SEQ ID NO: 3453
guagaccauugauuaucaa

SEQ ID NO: 268721 - RNA, 19 nt, Artificial Sequence
  Description of Artificial Sequence: Synthetic oligonucleotide
  Antisense strand to SEQ ID NO: 268720
uugauaaucaauggucuac

SEQ ID NO: 268722 - RNA, 19 nt, Artificial Sequence
  Description of Artificial Sequence: Synthetic oligonucleotide
  Sense strand starting at position 1405 of SEQ ID NO: 3453
uggugcagaugcuuaauaa

SEQ ID NO: 268723 - RNA, 19 nt, Artificial Sequence
  Description of Artificial Sequence: Synthetic oligonucleotide
  Antisense strand to SEQ ID NO: 268722
uuauuaagcaucugcacca

SEQ ID NO: 268724 - RNA, 19 nt, Artificial Sequence
  Description of Artificial Sequence: Synthetic oligonucleotide
  Sense strand starting at position 1406 of SEQ ID NO: 3453
ggugcagaugcuuaauaaa

SEQ ID NO: 268725 - RNA, 19 nt, Artificial Sequence
  Description of Artificial Sequence: Synthetic oligonucleotide
  Antisense strand to SEQ ID NO: 268724
uuuauuaagcaucugcacc

SEQ ID NO: 268726 - RNA, 19 nt, Artificial Sequence
  Description of Artificial Sequence: Synthetic oligonucleotide
  Sense strand starting at position 1514 of SEQ ID NO: 3453
uugaaauacuugguuugga

SEQ ID NO: 268727 - RNA, 19 nt, Artificial Sequence
  Description of Artificial Sequence: Synthetic oligonucleotide
  Antisense strand to SEQ ID NO: 268726
uccaaaccaaguauuucaa

SEQ ID NO: 268728 - RNA, 19 nt, Artificial Sequence
  Description of Artificial Sequence: Synthetic oligonucleotide
  Sense strand starting at position 1517 of SEQ ID NO: 3453
aaauacuugguuuggagua

SEQ ID NO: 268729 - RNA, 19 nt, Artificial Sequence
  Description of Artificial Sequence: Synthetic oligonucleotide
  Antisense strand to SEQ ID NO: 268728
uacuccaaaccaaguauuu

SEQ ID NO: 268730 - RNA, 19 nt, Artificial Sequence
  Description of Artificial Sequence: Synthetic oligonucleotide
  Sense strand starting at position 2071 of SEQ ID NO: 3453
cuuugugauguuuacaaug

SEQ ID NO: 268731 - RNA, 19 nt, Artificial Sequence
  Description of Artificial Sequence: Synthetic oligonucleotide
  Antisense strand to SEQ ID NO: 268730
cauuguaaacaucacaaag

SEQ ID NO: 268732 - RNA, 19 nt, Artificial Sequence
  Description of Artificial Sequence: Synthetic oligonucleotide
  Sense strand starting at position 2076 of SEQ ID NO: 3453
ugauguuuacaauguagag

SEQ ID NO: 268733 - RNA, 19 nt, Artificial Sequence
  Description of Artificial Sequence: Synthetic oligonucleotide
  Antisense strand to SEQ ID NO: 268732
cucuacauuguaaacauca

SEQ ID NO: 268734 - RNA, 19 nt, Artificial Sequence
  Description of Artificial Sequence: Synthetic oligonucleotide
  Sense strand starting at position 2090 of SEQ ID NO: 3453
uagagaucuggcugggcau

SEQ ID NO: 268735 - RNA, 19 nt, Artificial Sequence
  Description of Artificial Sequence: Synthetic oligonucleotide
  Antisense strand to SEQ ID NO: 268734
augcccagccagaucucua

SEQ ID NO: 268736 - RNA, 19 nt, Artificial Sequence
  Description of Artificial Sequence: Synthetic oligonucleotide
  Sense strand starting at position 2600 of SEQ ID NO: 3453
ugaccaaagccaugucuuu

SEQ ID NO: 268737 - RNA, 19 nt, Artificial Sequence
  Description of Artificial Sequence: Synthetic oligonucleotide
  Antisense strand to SEQ ID NO: 268736
aaagacauggcuuugguca

SEQ ID NO: 268738 - RNA, 19 nt, Artificial Sequence
  Description of Artificial Sequence: Synthetic oligonucleotide
  Sense strand starting at position 2864 of SEQ ID NO: 3453
cagguaguuugaucagaug

SEQ ID NO: 268739 - RNA, 19 nt, Artificial Sequence
  Description of Artificial Sequence: Synthetic oligonucleotide
  Antisense strand to SEQ ID NO: 268738
caucugaucaaacuaccug

SEQ ID NO: 268740 - RNA, 19 nt, Artificial Sequence
  Description of Artificial Sequence: Synthetic oligonucleotide
  Sense strand starting at position 2975 of SEQ ID NO: 3453
gaaauaauuugcuagggua

SEQ ID NO: 268741 - RNA, 19 nt, Artificial Sequence
  Description of Artificial Sequence: Synthetic oligonucleotide
  Antisense strand to SEQ ID NO: 268740
uacccuagcaaauuauuuc

SEQ ID NO: 268742 - RNA, 19 nt, Artificial Sequence
  Description of Artificial Sequence: Synthetic oligonucleotide
  Sense strand starting at position 3061 of SEQ ID NO: 3453
auaaauguugaugguaaca

SEQ ID NO: 268743 - RNA, 19 nt, Artificial Sequence
  Description of Artificial Sequence: Synthetic oligonucleotide
  Antisense strand to SEQ ID NO: 268742
uguuaccaucaacauuuau

SEQ ID NO: 268744 - RNA, 19 nt, Artificial Sequence
  Description of Artificial Sequence: Synthetic oligonucleotide
  Sense strand starting at position 3121 of SEQ ID NO: 3453
gcuagaacucaaugcuauu

SEQ ID NO: 268745 - RNA, 19 nt, Artificial Sequence
  Description of Artificial Sequence: Synthetic oligonucleotide
  Antisense strand to SEQ ID NO: 268744
aauagcauugaguucuagc

SEQ ID NO: 268746 - RNA, 19 nt, Artificial Sequence
  Description of Artificial Sequence: Synthetic oligonucleotide
  Sense strand starting at position 3207 of SEQ ID NO: 3453
gccuaaauucuagaguguu

SEQ ID NO: 268747 - RNA, 19 nt, Artificial Sequence
  Description of Artificial Sequence: Synthetic oligonucleotide
  Antisense strand to SEQ ID NO: 268746
aacacucuagaauuuaggc

SEQ ID NO: 268748 - RNA, 19 nt, Artificial Sequence
  Description of Artificial Sequence: Synthetic oligonucleotide
  Sense strand starting at position 3600 of SEQ ID NO: 3453
ugaaucuuuccuugcuuga

SEQ ID NO: 268749 - RNA, 19 nt, Artificial Sequence
  Description of Artificial Sequence: Synthetic oligonucleotide
  Antisense strand to SEQ ID NO: 268748
ucaagcaaggaaagauuca

SEQ ID NO: 268750 - RNA, 19 nt, Artificial Sequence
  Description of Artificial Sequence: Synthetic oligonucleotide
  Sense strand starting at position 3617 of SEQ ID NO: 3453
gauaaugccuuuguuuaga

SEQ ID NO: 268751 - RNA, 19 nt, Artificial Sequence
  Description of Artificial Sequence: Synthetic oligonucleotide
  Antisense strand to SEQ ID NO: 268750
ucuaaacaaaggcauuauc

SEQ ID NO: 268752 - RNA, 19 nt, Artificial Sequence
  Description of Artificial Sequence: Synthetic oligonucleotide
  Sense strand starting at position 3619 of SEQ ID NO: 3453
uaaugccuuuguuuagaga

SEQ ID NO: 268753 - RNA, 19 nt, Artificial Sequence
  Description of Artificial Sequence: Synthetic oligonucleotide
  Antisense strand to SEQ ID NO: 268752
ucucuaaacaaaggcauua

SEQ ID NO: 268754 - RNA, 19 nt, Artificial Sequence
  Description of Artificial Sequence: Synthetic oligonucleotide
  Sense strand starting at position 3620 of SEQ ID NO: 3453
aaugccuuuguuuagagaa

SEQ ID NO: 268755 - RNA, 19 nt, Artificial Sequence
  Description of Artificial Sequence: Synthetic oligonucleotide
  Antisense strand to SEQ ID NO: 268754
uucucuaaacaaaggcauu

SEQ ID NO: 268756 - RNA, 19 nt, Artificial Sequence
  Description of Artificial Sequence: Synthetic oligonucleotide
  Sense strand starting at position 3649 of SEQ ID NO: 3453
guugacuacaggugcaaau

SEQ ID NO: 268757 - RNA, 19 nt, Artificial Sequence
  Description of Artificial Sequence: Synthetic oligonucleotide
  Antisense strand to SEQ ID NO: 268756
auuugcaccuguagucaac

SEQ ID NO: 268758 - RNA, 19 nt, Artificial Sequence
  Description of Artificial Sequence: Synthetic oligonucleotide
  Sense strand starting at position 3728 of SEQ ID NO: 3453
aucugaauagugugaauaa

SEQ ID NO: 268759 - RNA, 19 nt, Artificial Sequence
  Description of Artificial Sequence: Synthetic oligonucleotide
  Antisense strand to SEQ ID NO: 268758
uuauucacacuauucagau

SEQ ID NO: 268760 - RNA, 19 nt, Artificial Sequence
  Description of Artificial Sequence: Synthetic oligonucleotide
  Sense strand starting at position 3862 of SEQ ID NO: 3453
cgauguagccuuugauaaa

SEQ ID NO: 268761 - RNA, 19 nt, Artificial Sequence
  Description of Artificial Sequence: Synthetic oligonucleotide
  Antisense strand to SEQ ID NO: 268760
uuuaucaaaggcuacaucg

SEQ ID NO: 268762 - RNA, 19 nt, Artificial Sequence
  Description of Artificial Sequence: Synthetic oligonucleotide
  Sense strand starting at position 491 of SEQ ID NO: 3454
aaagauacguacucagcua

SEQ ID NO: 268763 - RNA, 19 nt, Artificial Sequence
  Description of Artificial Sequence: Synthetic oligonucleotide
  Antisense strand to SEQ ID NO: 268762
uagcugaguacguaucuuu

SEQ ID NO: 268764 - RNA, 19 nt, Artificial Sequence
  Description of Artificial Sequence: Synthetic oligonucleotide
  Sense strand starting at position 629 of SEQ ID NO: 3454
gggauugguuuacucacau

SEQ ID NO: 268765 - RNA, 19 nt, Artificial Sequence
  Description of Artificial Sequence: Synthetic oligonucleotide
  Antisense strand to SEQ ID NO: 268764
augugaguaaaccaauccc

SEQ ID NO: 268766 - RNA, 19 nt, Artificial Sequence
  Description of Artificial Sequence: Synthetic oligonucleotide
  Sense strand starting at position 786 of SEQ ID NO: 3454
gaguaucugcauuauugac

SEQ ID NO: 268767 - RNA, 19 nt, Artificial Sequence
  Description of Artificial Sequence: Synthetic oligonucleotide
  Antisense strand to SEQ ID NO: 268766
gucaauaaugcagauacuc

SEQ ID NO: 268768 - RNA, 19 nt, Artificial Sequence
  Description of Artificial Sequence: Synthetic oligonucleotide
  Sense strand starting at position 987 of SEQ ID NO: 3454
ucagguaagucucuaugac

SEQ ID NO: 268769 - RNA, 19 nt, Artificial Sequence
  Description of Artificial Sequence: Synthetic oligonucleotide
  Antisense strand to SEQ ID NO: 268768
gucauagagacuuaccuga

SEQ ID NO: 268770 - RNA, 19 nt, Artificial Sequence
  Description of Artificial Sequence: Synthetic oligonucleotide
  Sense strand starting at position 988 of SEQ ID NO: 3454
cagguaagucucuaugaca

SEQ ID NO: 268771 - RNA, 19 nt, Artificial Sequence
  Description of Artificial Sequence: Synthetic oligonucleotide
  Antisense strand to SEQ ID NO: 268770
ugucauagagacuuaccug

SEQ ID NO: 268772 - RNA, 19 nt, Artificial Sequence
  Description of Artificial Sequence: Synthetic oligonucleotide
  Sense strand starting at position 1076 of SEQ ID NO: 3454
aaagaaauccgcgugcugu

SEQ ID NO: 268773 - RNA, 19 nt, Artificial Sequence
  Description of Artificial Sequence: Synthetic oligonucleotide
  Antisense strand to SEQ ID NO: 268772
acagcacgcggauuucuuu

SEQ ID NO: 268774 - RNA, 19 nt, Artificial Sequence
  Description of Artificial Sequence: Synthetic oligonucleotide
  Sense strand starting at position 1078 of SEQ ID NO: 3454
agaaauccgcgugcuguua

SEQ ID NO: 268775 - RNA, 19 nt, Artificial Sequence
  Description of Artificial Sequence: Synthetic oligonucleotide
  Antisense strand to SEQ ID NO: 268774
uaacagcacgcggauuucu

SEQ ID NO: 268776 - RNA, 19 nt, Artificial Sequence
  Description of Artificial Sequence: Synthetic oligonucleotide
  Sense strand starting at position 1079 of SEQ ID NO: 3454
gaaauccgcgugcuguuaa

SEQ ID NO: 268777 - RNA, 19 nt, Artificial Sequence
  Description of Artificial Sequence: Synthetic oligonucleotide
  Antisense strand to SEQ ID NO: 268776
uuaacagcacgcggauuuc

SEQ ID NO: 268778 - RNA, 19 nt, Artificial Sequence
  Description of Artificial Sequence: Synthetic oligonucleotide
  Sense strand starting at position 1082 of SEQ ID NO: 3454
auccgcgugcuguuaaagu

SEQ ID NO: 268779 - RNA, 19 nt, Artificial Sequence
  Description of Artificial Sequence: Synthetic oligonucleotide
  Antisense strand to SEQ ID NO: 268778
acuuuaacagcacgcggau

SEQ ID NO: 268780 - RNA, 19 nt, Artificial Sequence
  Description of Artificial Sequence: Synthetic oligonucleotide
  Sense strand starting at position 1144 of SEQ ID NO: 3454
aaugaauaaugggaaugaa

SEQ ID NO: 268781 - RNA, 19 nt, Artificial Sequence
  Description of Artificial Sequence: Synthetic oligonucleotide
  Antisense strand to SEQ ID NO: 268780
uucauucccauuauucauu

SEQ ID NO: 268782 - RNA, 19 nt, Artificial Sequence
  Description of Artificial Sequence: Synthetic oligonucleotide
  Sense strand starting at position 1179 of SEQ ID NO: 3454
gaucgugacuuacuagaga

SEQ ID NO: 268783 - RNA, 19 nt, Artificial Sequence
  Description of Artificial Sequence: Synthetic oligonucleotide
  Antisense strand to SEQ ID NO: 268782
ucucuaguaagucacgauc

SEQ ID NO: 268784 - RNA, 19 nt, Artificial Sequence
  Description of Artificial Sequence: Synthetic oligonucleotide
  Sense strand starting at position 1271 of SEQ ID NO: 3454
ugcuguuaaggucaauauc

SEQ ID NO: 268785 - RNA, 19 nt, Artificial Sequence
  Description of Artificial Sequence: Synthetic oligonucleotide
  Antisense strand to SEQ ID NO: 268784
gauauugaccuuaacagca

SEQ ID NO: 268786 - RNA, 19 nt, Artificial Sequence
  Description of Artificial Sequence: Synthetic oligonucleotide
  Sense strand starting at position 1274 of SEQ ID NO: 3454
uguuaaggucaauaucuca

SEQ ID NO: 268787 - RNA, 19 nt, Artificial Sequence
  Description of Artificial Sequence: Synthetic oligonucleotide
  Antisense strand to SEQ ID NO: 268786
ugagauauugaccuuaaca

SEQ ID NO: 268788 - RNA, 19 nt, Artificial Sequence
  Description of Artificial Sequence: Synthetic oligonucleotide
  Sense strand starting at position 1301 of SEQ ID NO: 3454
caaccacacgguugauuaa

SEQ ID NO: 268789 - RNA, 19 nt, Artificial Sequence
  Description of Artificial Sequence: Synthetic oligonucleotide
  Antisense strand to SEQ ID NO: 268788
uuaaucaaccgugugguug

SEQ ID NO: 268790 - RNA, 19 nt, Artificial Sequence
  Description of Artificial Sequence: Synthetic oligonucleotide
  Sense strand starting at position 1349 of SEQ ID NO: 3454
acaagauuccuuuggcaaa

SEQ ID NO: 268791 - RNA, 19 nt, Artificial Sequence
  Description of Artificial Sequence: Synthetic oligonucleotide
  Antisense strand to SEQ ID NO: 268790
uuugccaaaggaaucuugu

SEQ ID NO: 268792 - RNA, 19 nt, Artificial Sequence
  Description of Artificial Sequence: Synthetic oligonucleotide
  Sense strand starting at position 1542 of SEQ ID NO: 3454
cggguaucagaaggagguu

SEQ ID NO: 268793 - RNA, 19 nt, Artificial Sequence
  Description of Artificial Sequence: Synthetic oligonucleotide
  Antisense strand to SEQ ID NO: 268792
aaccuccuucugauacccg

SEQ ID NO: 268794 - RNA, 19 nt, Artificial Sequence
  Description of Artificial Sequence: Synthetic oligonucleotide
  Sense strand starting at position 1560 of SEQ ID NO: 3454
uaagguaugggccagucua

SEQ ID NO: 268795 - RNA, 19 nt, Artificial Sequence
  Description of Artificial Sequence: Synthetic oligonucleotide
  Antisense strand to SEQ ID NO: 268794
uagacuggcccauaccuua

SEQ ID NO: 268796 - RNA, 19 nt, Artificial Sequence
  Description of Artificial Sequence: Synthetic oligonucleotide
  Sense strand starting at position 2073 of SEQ ID NO: 3454
cugagaauuuccgaggaaa

SEQ ID NO: 268797 - RNA, 19 nt, Artificial Sequence
  Description of Artificial Sequence: Synthetic oligonucleotide
  Antisense strand to SEQ ID NO: 268796
uuuccucggaaauucucag

SEQ ID NO: 268798 - RNA, 19 nt, Artificial Sequence
  Description of Artificial Sequence: Synthetic oligonucleotide
  Sense strand starting at position 2160 of SEQ ID NO: 3454
uccugauuuguggguacuu

SEQ ID NO: 268799 - RNA, 19 nt, Artificial Sequence
  Description of Artificial Sequence: Synthetic oligonucleotide
  Antisense strand to SEQ ID NO: 268798
aaguacccacaaaucagga

SEQ ID NO: 268800 - RNA, 19 nt, Artificial Sequence
  Description of Artificial Sequence: Synthetic oligonucleotide
  Sense strand starting at position 2217 of SEQ ID NO: 3454
cauaauuagcgugaguuga

SEQ ID NO: 268801 - RNA, 19 nt, Artificial Sequence
  Description of Artificial Sequence: Synthetic oligonucleotide
  Antisense strand to SEQ ID NO: 268800
ucaacucacgcuaauuaug

SEQ ID NO: 268802 - RNA, 19 nt, Artificial Sequence
  Description of Artificial Sequence: Synthetic oligonucleotide
  Sense strand starting at position 2399 of SEQ ID NO: 3454
uuguguuauguagacaauu

SEQ ID NO: 268803 - RNA, 19 nt, Artificial Sequence
  Description of Artificial Sequence: Synthetic oligonucleotide
  Antisense strand to SEQ ID NO: 268802
aauugucuacauaacacaa

SEQ ID NO: 268804 - RNA, 19 nt, Artificial Sequence
  Description of Artificial Sequence: Synthetic oligonucleotide
  Sense strand starting at position 2612 of SEQ ID NO: 3454
uucuuuagggcauagucau

SEQ ID NO: 268805 - RNA, 19 nt, Artificial Sequence
  Description of Artificial Sequence: Synthetic oligonucleotide
  Antisense strand to SEQ ID NO: 268804
augacuaugcccuaaagaa

SEQ ID NO: 268806 - RNA, 19 nt, Artificial Sequence
  Description of Artificial Sequence: Synthetic oligonucleotide
  Sense strand starting at position 2644 of SEQ ID NO: 3454
acacauauucugcauaugu

SEQ ID NO: 268807 - RNA, 19 nt, Artificial Sequence
  Description of Artificial Sequence: Synthetic oligonucleotide
  Antisense strand to SEQ ID NO: 268806
acauaugcagaauaugugu

SEQ ID NO: 268808 - RNA, 19 nt, Artificial Sequence
  Description of Artificial Sequence: Synthetic oligonucleotide
  Sense strand starting at position 2646 of SEQ ID NO: 3454
acauauucugcauaugugu

SEQ ID NO: 268809 - RNA, 19 nt, Artificial Sequence
  Description of Artificial Sequence: Synthetic oligonucleotide
  Antisense strand to SEQ ID NO: 268808
acacauaugcagaauaugu

SEQ ID NO: 268810 - RNA, 19 nt, Artificial Sequence
  Description of Artificial Sequence: Synthetic oligonucleotide
  Sense strand starting at position 2748 of SEQ ID NO: 3454
ugcuccauaccaugaggau

SEQ ID NO: 268811 - RNA, 19 nt, Artificial Sequence
  Description of Artificial Sequence: Synthetic oligonucleotide
  Antisense strand to SEQ ID NO: 268810
auccucaugguauggagca

SEQ ID NO: 268812 - RNA, 19 nt, Artificial Sequence
  Description of Artificial Sequence: Synthetic oligonucleotide
  Sense strand starting at position 2749 of SEQ ID NO: 3454
gcuccauaccaugaggauu

SEQ ID NO: 268813 - RNA, 19 nt, Artificial Sequence
  Description of Artificial Sequence: Synthetic oligonucleotide
  Antisense strand to SEQ ID NO: 268812
aauccucaugguauggagc

SEQ ID NO: 268814 - RNA, 19 nt, Artificial Sequence
  Description of Artificial Sequence: Synthetic oligonucleotide
  Sense strand starting at position 2840 of SEQ ID NO: 3454
uugucuuuggaaugaggca

SEQ ID NO: 268815 - RNA, 19 nt, Artificial Sequence
  Description of Artificial Sequence: Synthetic oligonucleotide
  Antisense strand to SEQ ID NO: 268814
ugccucauuccaaagacaa

SEQ ID NO: 268816 - RNA, 19 nt, Artificial Sequence
  Description of Artificial Sequence: Synthetic oligonucleotide
  Sense strand starting at position 2941 of SEQ ID NO: 3454
gggugugugaauugaauug

SEQ ID NO: 268817 - RNA, 19 nt, Artificial Sequence
  Description of Artificial Sequence: Synthetic oligonucleotide
  Antisense strand to SEQ ID NO: 268816
caauucaauucacacaccc

SEQ ID NO: 268818 - RNA, 19 nt, Artificial Sequence
  Description of Artificial Sequence: Synthetic oligonucleotide
  Sense strand starting at position 3060 of SEQ ID NO: 3454
gucacauuggaguaccaca

SEQ ID NO: 268819 - RNA, 19 nt, Artificial Sequence
  Description of Artificial Sequence: Synthetic oligonucleotide
  Antisense strand to SEQ ID NO: 268818
ugugguacuccaaugugac

SEQ ID NO: 268820 - RNA, 19 nt, Artificial Sequence
  Description of Artificial Sequence: Synthetic oligonucleotide
  Sense strand starting at position 3141 of SEQ ID NO: 3454
augaguauuguagggcuaa

SEQ ID NO: 268821 - RNA, 19 nt, Artificial Sequence
  Description of Artificial Sequence: Synthetic oligonucleotide
  Antisense strand to SEQ ID NO: 268820
uuagcccuacaauacucau

SEQ ID NO: 268822 - RNA, 19 nt, Artificial Sequence
  Description of Artificial Sequence: Synthetic oligonucleotide
  Sense strand starting at position 3339 of SEQ ID NO: 3454
aucacauagccuugugaug

SEQ ID NO: 268823 - RNA, 19 nt, Artificial Sequence
  Description of Artificial Sequence: Synthetic oligonucleotide
  Antisense strand to SEQ ID NO: 268822
caucacaaggcuaugugau

SEQ ID NO: 268824 - RNA, 19 nt, Artificial Sequence
  Description of Artificial Sequence: Synthetic oligonucleotide
  Sense strand starting at position 3410 of SEQ ID NO: 3454
aguagaggugauuaaguua

SEQ ID NO: 268825 - RNA, 19 nt, Artificial Sequence
  Description of Artificial Sequence: Synthetic oligonucleotide
  Antisense strand to SEQ ID NO: 268824
uaacuuaaucaccucuacu

SEQ ID NO: 268826 - RNA, 19 nt, Artificial Sequence
  Description of Artificial Sequence: Synthetic oligonucleotide
  Sense strand starting at position 3413 of SEQ ID NO: 3454
agaggugauuaaguuaaua

SEQ ID NO: 268827 - RNA, 19 nt, Artificial Sequence
  Description of Artificial Sequence: Synthetic oligonucleotide
  Antisense strand to SEQ ID NO: 268826
uauuaacuuaaucaccucu

SEQ ID NO: 268828 - RNA, 19 nt, Artificial Sequence
  Description of Artificial Sequence: Synthetic oligonucleotide
  Sense strand starting at position 3477 of SEQ ID NO: 3454
gauucuaaagcuuagugua

SEQ ID NO: 268829 - RNA, 19 nt, Artificial Sequence
  Description of Artificial Sequence: Synthetic oligonucleotide
  Antisense strand to SEQ ID NO: 268828
uacacuaagcuuuagaauc

SEQ ID NO: 268830 - RNA, 19 nt, Artificial Sequence
  Description of Artificial Sequence: Synthetic oligonucleotide
  Sense strand starting at position 3482 of SEQ ID NO: 3454
uaaagcuuaguguauggau

SEQ ID NO: 268831 - RNA, 19 nt, Artificial Sequence
  Description of Artificial Sequence: Synthetic oligonucleotide
  Antisense strand to SEQ ID NO: 268830
auccauacacuaagcuuua

SEQ ID NO: 268832 - RNA, 19 nt, Artificial Sequence
  Description of Artificial Sequence: Synthetic oligonucleotide
  Sense strand starting at position 3592 of SEQ ID NO: 3454
acacauugaggcuagaugu

SEQ ID NO: 268833 - RNA, 19 nt, Artificial Sequence
  Description of Artificial Sequence: Synthetic oligonucleotide
  Antisense strand to SEQ ID NO: 268832
acaucuagccucaaugugu

SEQ ID NO: 268834 - RNA, 19 nt, Artificial Sequence
  Description of Artificial Sequence: Synthetic oligonucleotide
  Sense strand starting at position 3779 of SEQ ID NO: 3454
uuagauggauuugauauga

SEQ ID NO: 268835 - RNA, 19 nt, Artificial Sequence
  Description of Artificial Sequence: Synthetic oligonucleotide
  Antisense strand to SEQ ID NO: 268834
ucauaucaaauccaucuaa

SEQ ID NO: 268836 - RNA, 19 nt, Artificial Sequence
  Description of Artificial Sequence: Synthetic oligonucleotide
  Sense strand starting at position 3784 of SEQ ID NO: 3454
uggauuugauaugagugua

SEQ ID NO: 268837 - RNA, 19 nt, Artificial Sequence
  Description of Artificial Sequence: Synthetic oligonucleotide
  Antisense strand to SEQ ID NO: 268836
uacacucauaucaaaucca

SEQ ID NO: 268838 - RNA, 19 nt, Artificial Sequence
  Description of Artificial Sequence: Synthetic oligonucleotide
  Sense strand starting at position 3813 of SEQ ID NO: 3454
uagaaagaccucugugaua

SEQ ID NO: 268839 - RNA, 19 nt, Artificial Sequence
  Description of Artificial Sequence: Synthetic oligonucleotide
  Antisense strand to SEQ ID NO: 268838
uaucacagaggucuuucua

SEQ ID NO: 268840 - RNA, 19 nt, Artificial Sequence
  Description of Artificial Sequence: Synthetic oligonucleotide
  Sense strand starting at position 3897 of SEQ ID NO: 3454
ggguuuauuuaggaacaga

SEQ ID NO: 268841 - RNA, 19 nt, Artificial Sequence
  Description of Artificial Sequence: Synthetic oligonucleotide
  Antisense strand to SEQ ID NO: 268840
ucuguuccuaaauaaaccc

SEQ ID NO: 268842 - RNA, 19 nt, Artificial Sequence
  Description of Artificial Sequence: Synthetic oligonucleotide
  Sense strand starting at position 26 of SEQ ID NO: 3455
augauaaagugcuccagga

SEQ ID NO: 268843 - RNA, 19 nt, Artificial Sequence
  Description of Artificial Sequence: Synthetic oligonucleotide
  Antisense strand to SEQ ID NO: 268842
uccuggagcacuuuaucau

SEQ ID NO: 268844 - RNA, 19 nt, Artificial Sequence
  Description of Artificial Sequence: Synthetic oligonucleotide
  Sense strand starting at position 30 of SEQ ID NO: 3455
uaaagugcuccaggagaaa

SEQ ID NO: 268845 - RNA, 19 nt, Artificial Sequence
  Description of Artificial Sequence: Synthetic oligonucleotide
  Antisense strand to SEQ ID NO: 268844
uuucuccuggagcacuuua

SEQ ID NO: 268846 - RNA, 19 nt, Artificial Sequence
  Description of Artificial Sequence: Synthetic oligonucleotide
  Sense strand starting at position 146 of SEQ ID NO: 3455
agcucuuaaggagagcaua

SEQ ID NO: 268847 - RNA, 19 nt, Artificial Sequence
  Description of Artificial Sequence: Synthetic oligonucleotide
  Antisense strand to SEQ ID NO: 268846
uaugcucuccuuaagagcu

SEQ ID NO: 268848 - RNA, 19 nt, Artificial Sequence
  Description of Artificial Sequence: Synthetic oligonucleotide
  Sense strand starting at position 239 of SEQ ID NO: 3455
aauauaguagcugggagaa

SEQ ID NO: 268849 - RNA, 19 nt, Artificial Sequence
  Description of Artificial Sequence: Synthetic oligonucleotide
  Antisense strand to SEQ ID NO: 268848
uucucccagcuacuauauu

SEQ ID NO: 268850 - RNA, 19 nt, Artificial Sequence
  Description of Artificial Sequence: Synthetic oligonucleotide
  Sense strand starting at position 268 of SEQ ID NO: 3455
ccgacacgugcccaaauau

SEQ ID NO: 268851 - RNA, 19 nt, Artificial Sequence
  Description of Artificial Sequence: Synthetic oligonucleotide
  Antisense strand to SEQ ID NO: 268850
auauuugggcacgugucgg

SEQ ID NO: 268852 - RNA, 19 nt, Artificial Sequence
  Description of Artificial Sequence: Synthetic oligonucleotide
  Sense strand starting at position 364 of SEQ ID NO: 3455
ugaacuaagauucgugaag

SEQ ID NO: 268853 - RNA, 19 nt, Artificial Sequence
  Description of Artificial Sequence: Synthetic oligonucleotide
  Antisense strand to SEQ ID NO: 268852
cuucacgaaucuuaguuca

SEQ ID NO: 268854 - RNA, 19 nt, Artificial Sequence
  Description of Artificial Sequence: Synthetic oligonucleotide
  Sense strand starting at position 365 of SEQ ID NO: 3455
gaacuaagauucgugaaga

SEQ ID NO: 268855 - RNA, 19 nt, Artificial Sequence
  Description of Artificial Sequence: Synthetic oligonucleotide
  Antisense strand to SEQ ID NO: 268854
ucuucacgaaucuuaguuc

SEQ ID NO: 268856 - RNA, 19 nt, Artificial Sequence
  Description of Artificial Sequence: Synthetic oligonucleotide
  Sense strand starting at position 375 of SEQ ID NO: 3455
ucgugaagauauucugaag

SEQ ID NO: 268857 - RNA, 19 nt, Artificial Sequence
  Description of Artificial Sequence: Synthetic oligonucleotide
  Antisense strand to SEQ ID NO: 268856
cuucagaauaucuucacga

SEQ ID NO: 268858 - RNA, 19 nt, Artificial Sequence
  Description of Artificial Sequence: Synthetic oligonucleotide
  Sense strand starting at position 567 of SEQ ID NO: 3455
uuuaacauggaguauugua

SEQ ID NO: 268859 - RNA, 19 nt, Artificial Sequence
  Description of Artificial Sequence: Synthetic oligonucleotide
  Antisense strand to SEQ ID NO: 268858
uacaauacuccauguuaaa

SEQ ID NO: 268860 - RNA, 19 nt, Artificial Sequence
  Description of Artificial Sequence: Synthetic oligonucleotide
  Sense strand starting at position 579 of SEQ ID NO: 3455
uauuguagauagccaguau

SEQ ID NO: 268861 - RNA, 19 nt, Artificial Sequence
  Description of Artificial Sequence: Synthetic oligonucleotide
  Antisense strand to SEQ ID NO: 268860
auacuggcuaucuacaaua

SEQ ID NO: 268862 - RNA, 19 nt, Artificial Sequence
  Description of Artificial Sequence: Synthetic oligonucleotide
  Sense strand starting at position 583 of SEQ ID NO: 3455
guagauagccaguauguga

SEQ ID NO: 268863 - RNA, 19 nt, Artificial Sequence
  Description of Artificial Sequence: Synthetic oligonucleotide
  Antisense strand to SEQ ID NO: 268862
ucacauacuggcuaucuac

SEQ ID NO: 268864 - RNA, 19 nt, Artificial Sequence
  Description of Artificial Sequence: Synthetic oligonucleotide
  Sense strand starting at position 611 of SEQ ID NO: 3455
caaggauauuugggcauau

SEQ ID NO: 268865 - RNA, 19 nt, Artificial Sequence
  Description of Artificial Sequence: Synthetic oligonucleotide
  Antisense strand to SEQ ID NO: 268864
auaugcccaaauauccuug

SEQ ID NO: 268866 - RNA, 19 nt, Artificial Sequence
  Description of Artificial Sequence: Synthetic oligonucleotide
  Sense strand starting at position 620 of SEQ ID NO: 3455
uugggcauaucauugcauu

SEQ ID NO: 268867 - RNA, 19 nt, Artificial Sequence
  Description of Artificial Sequence: Synthetic oligonucleotide
  Antisense strand to SEQ ID NO: 268866
aaugcaaugauaugcccaa

SEQ ID NO: 268868 - RNA, 19 nt, Artificial Sequence
  Description of Artificial Sequence: Synthetic oligonucleotide
  Sense strand starting at position 621 of SEQ ID NO: 3455
ugggcauaucauugcauuu

SEQ ID NO: 268869 - RNA, 19 nt, Artificial Sequence
  Description of Artificial Sequence: Synthetic oligonucleotide
  Antisense strand to SEQ ID NO: 268868
aaaugcaaugauaugccca

SEQ ID NO: 268870 - RNA, 19 nt, Artificial Sequence
  Description of Artificial Sequence: Synthetic oligonucleotide
  Sense strand starting at position 643 of SEQ ID NO: 3455
ucuugaugccauugaagag

SEQ ID NO: 268871 - RNA, 19 nt, Artificial Sequence
  Description of Artificial Sequence: Synthetic oligonucleotide
  Antisense strand to SEQ ID NO: 268870
cucuucaauggcaucaaga

SEQ ID NO: 268872 - RNA, 19 nt, Artificial Sequence
  Description of Artificial Sequence: Synthetic oligonucleotide
  Sense strand starting at position 653 of SEQ ID NO: 3455
auugaagaguuucugaguu

SEQ ID NO: 268873 - RNA, 19 nt, Artificial Sequence
  Description of Artificial Sequence: Synthetic oligonucleotide
  Antisense strand to SEQ ID NO: 268872
aacucagaaacucuucaau

SEQ ID NO: 268874 - RNA, 19 nt, Artificial Sequence
  Description of Artificial Sequence: Synthetic oligonucleotide
  Sense strand starting at position 657 of SEQ ID NO: 3455
aagaguuucugaguuaacg

SEQ ID NO: 268875 - RNA, 19 nt, Artificial Sequence
  Description of Artificial Sequence: Synthetic oligonucleotide
  Antisense strand to SEQ ID NO: 268874
cguuaacucagaaacucuu

SEQ ID NO: 268876 - RNA, 19 nt, Artificial Sequence
  Description of Artificial Sequence: Synthetic oligonucleotide
  Sense strand starting at position 659 of SEQ ID NO: 3455
gaguuucugaguuaacgcu

SEQ ID NO: 268877 - RNA, 19 nt, Artificial Sequence
  Description of Artificial Sequence: Synthetic oligonucleotide
  Antisense strand to SEQ ID NO: 268876
agcguuaacucagaaacuc

SEQ ID NO: 268878 - RNA, 19 nt, Artificial Sequence
  Description of Artificial Sequence: Synthetic oligonucleotide
  Sense strand starting at position 686 of SEQ ID NO: 3455
gaagcuaaucuccaccgua

SEQ ID NO: 268879 - RNA, 19 nt, Artificial Sequence
  Description of Artificial Sequence: Synthetic oligonucleotide
  Antisense strand to SEQ ID NO: 268878
uacgguggagauuagcuuc

SEQ ID NO: 268880 - RNA, 19 nt, Artificial Sequence
  Description of Artificial Sequence: Synthetic oligonucleotide
  Sense strand starting at position 778 of SEQ ID NO: 3455
gugccucugccuuaacaau

SEQ ID NO: 268881 - RNA, 19 nt, Artificial Sequence
  Description of Artificial Sequence: Synthetic oligonucleotide
  Antisense strand to SEQ ID NO: 268880
auuguuaaggcagaggcac

SEQ ID NO: 268882 - RNA, 19 nt, Artificial Sequence
  Description of Artificial Sequence: Synthetic oligonucleotide
  Sense strand starting at position 1084 of SEQ ID NO: 3455
ugaagaucuuacuuugguu

SEQ ID NO: 268883 - RNA, 19 nt, Artificial Sequence
  Description of Artificial Sequence: Synthetic oligonucleotide
  Antisense strand to SEQ ID NO: 268882
aaccaaaguaagaucuuca

SEQ ID NO: 268884 - RNA, 19 nt, Artificial Sequence
  Description of Artificial Sequence: Synthetic oligonucleotide
  Sense strand starting at position 1117 of SEQ ID NO: 3455
auuagccaugcauauagaa

SEQ ID NO: 268885 - RNA, 19 nt, Artificial Sequence
  Description of Artificial Sequence: Synthetic oligonucleotide
  Antisense strand to SEQ ID NO: 268884
uucuauaugcauggcuaau

SEQ ID NO: 268886 - RNA, 19 nt, Artificial Sequence
  Description of Artificial Sequence: Synthetic oligonucleotide
  Sense strand starting at position 1132 of SEQ ID NO: 3455
agaacauaggcguauauca

SEQ ID NO: 268887 - RNA, 19 nt, Artificial Sequence
  Description of Artificial Sequence: Synthetic oligonucleotide
  Antisense strand to SEQ ID NO: 268886
ugauauacgccuauguucu

SEQ ID NO: 268888 - RNA, 19 nt, Artificial Sequence
  Description of Artificial Sequence: Synthetic oligonucleotide
  Sense strand starting at position 1321 of SEQ ID NO: 3455
ggagcugggcaugaaaguu

SEQ ID NO: 268889 - RNA, 19 nt, Artificial Sequence
  Description of Artificial Sequence: Synthetic oligonucleotide
  Antisense strand to SEQ ID NO: 268888
aacuuucaugcccagcucc

SEQ ID NO: 268890 - RNA, 19 nt, Artificial Sequence
  Description of Artificial Sequence: Synthetic oligonucleotide
  Sense strand starting at position 1327 of SEQ ID NO: 3455
gggcaugaaaguuauaucu

SEQ ID NO: 268891 - RNA, 19 nt, Artificial Sequence
  Description of Artificial Sequence: Synthetic oligonucleotide
  Antisense strand to SEQ ID NO: 268890
agauauaacuuucaugccc

SEQ ID NO: 268892 - RNA, 19 nt, Artificial Sequence
  Description of Artificial Sequence: Synthetic oligonucleotide
  Sense strand starting at position 1503 of SEQ ID NO: 3455
ugugcuuugggagaagugu

SEQ ID NO: 268893 - RNA, 19 nt, Artificial Sequence
  Description of Artificial Sequence: Synthetic oligonucleotide
  Antisense strand to SEQ ID NO: 268892
acacuucucccaaagcaca

SEQ ID NO: 268894 - RNA, 19 nt, Artificial Sequence
  Description of Artificial Sequence: Synthetic oligonucleotide
  Sense strand starting at position 1642 of SEQ ID NO: 3455
cuugaccgcuuaucaauaa

SEQ ID NO: 268895 - RNA, 19 nt, Artificial Sequence
  Description of Artificial Sequence: Synthetic oligonucleotide
  Antisense strand to SEQ ID NO: 268894
uuauugauaagcggucaag

SEQ ID NO: 268896 - RNA, 19 nt, Artificial Sequence
  Description of Artificial Sequence: Synthetic oligonucleotide
  Sense strand starting at position 2975 of SEQ ID NO: 3455
agacaaaguugcucccaga

SEQ ID NO: 268897 - RNA, 19 nt, Artificial Sequence
  Description of Artificial Sequence: Synthetic oligonucleotide
  Antisense strand to SEQ ID NO: 268896
ucugggagcaacuuugucu

SEQ ID NO: 268898 - RNA, 19 nt, Artificial Sequence
  Description of Artificial Sequence: Synthetic oligonucleotide
  Sense strand starting at position 3265 of SEQ ID NO: 3455
ucgucacuccuuuauugaa

SEQ ID NO: 268899 - RNA, 19 nt, Artificial Sequence
  Description of Artificial Sequence: Synthetic oligonucleotide
  Antisense strand to SEQ ID NO: 268898
uucaauaaaggagugacga

SEQ ID NO: 268900 - RNA, 19 nt, Artificial Sequence
  Description of Artificial Sequence: Synthetic oligonucleotide
  Sense strand starting at position 3370 of SEQ ID NO: 3455
cgagaaugcuucuuacauc

SEQ ID NO: 268901 - RNA, 19 nt, Artificial Sequence
  Description of Artificial Sequence: Synthetic oligonucleotide
  Antisense strand to SEQ ID NO: 268900
gauguaagaagcauucucg

SEQ ID NO: 268902 - RNA, 19 nt, Artificial Sequence
  Description of Artificial Sequence: Synthetic oligonucleotide
  Sense strand starting at position 3484 of SEQ ID NO: 3455
agcacagauuaaguuguaa

SEQ ID NO: 268903 - RNA, 19 nt, Artificial Sequence
  Description of Artificial Sequence: Synthetic oligonucleotide
  Antisense strand to SEQ ID NO: 268902
uuacaacuuaaucugugcu

SEQ ID NO: 268904 - RNA, 19 nt, Artificial Sequence
  Description of Artificial Sequence: Synthetic oligonucleotide
  Sense strand starting at position 3568 of SEQ ID NO: 3455
gaaggaggguuguuaaauc

SEQ ID NO: 268905 - RNA, 19 nt, Artificial Sequence
  Description of Artificial Sequence: Synthetic oligonucleotide
  Antisense strand to SEQ ID NO: 268904
gauuuaacaacccuccuuc

SEQ ID NO: 268906 - RNA, 19 nt, Artificial Sequence
  Description of Artificial Sequence: Synthetic oligonucleotide
  Sense strand starting at position 3580 of SEQ ID NO: 3455
uuaaaucuuagcgguugaa

SEQ ID NO: 268907 - RNA, 19 nt, Artificial Sequence
  Description of Artificial Sequence: Synthetic oligonucleotide
  Antisense strand to SEQ ID NO: 268906
uucaaccgcuaagauuuaa

SEQ ID NO: 268908 - RNA, 19 nt, Artificial Sequence
  Description of Artificial Sequence: Synthetic oligonucleotide
  Sense strand starting at position 3632 of SEQ ID NO: 3455
ggaggauugcuuugacuag

SEQ ID NO: 268909 - RNA, 19 nt, Artificial Sequence
  Description of Artificial Sequence: Synthetic oligonucleotide
  Antisense strand to SEQ ID NO: 268908
cuagucaaagcaauccucc

SEQ ID NO: 268910 - RNA, 19 nt, Artificial Sequence
  Description of Artificial Sequence: Synthetic oligonucleotide
  Sense strand starting at position 3636 of SEQ ID NO: 3455
gauugcuuugacuagggca

SEQ ID NO: 268911 - RNA, 19 nt, Artificial Sequence
  Description of Artificial Sequence: Synthetic oligonucleotide
  Antisense strand to SEQ ID NO: 268910
ugcccuagucaaagcaauc

SEQ ID NO: 268912 - RNA, 19 nt, Artificial Sequence
  Description of Artificial Sequence: Synthetic oligonucleotide
  Sense strand starting at position 3638 of SEQ ID NO: 3455
uugcuuugacuagggcaaa

SEQ ID NO: 268913 - RNA, 19 nt, Artificial Sequence
  Description of Artificial Sequence: Synthetic oligonucleotide
  Antisense strand to SEQ ID NO: 268912
uuugcccuagucaaagcaa

SEQ ID NO: 268914 - RNA, 19 nt, Artificial Sequence
  Description of Artificial Sequence: Synthetic oligonucleotide
  Sense strand starting at position 3707 of SEQ ID NO: 3455
gagguuauuccagaguguu

SEQ ID NO: 268915 - RNA, 19 nt, Artificial Sequence
  Description of Artificial Sequence: Synthetic oligonucleotide
  Antisense strand to SEQ ID NO: 268914
aacacucuggaauaaccuc

SEQ ID NO: 268916 - RNA, 19 nt, Artificial Sequence
  Description of Artificial Sequence: Synthetic oligonucleotide
  Sense strand starting at position 3713 of SEQ ID NO: 3455
auuccagaguguucuggga

SEQ ID NO: 268917 - RNA, 19 nt, Artificial Sequence
  Description of Artificial Sequence: Synthetic oligonucleotide
  Antisense strand to SEQ ID NO: 268916
ucccagaacacucuggaau

SEQ ID NO: 268918 - RNA, 19 nt, Artificial Sequence
  Description of Artificial Sequence: Synthetic oligonucleotide
  Sense strand starting at position 3779 of SEQ ID NO: 3455
guaucuuuccaguacaacu

SEQ ID NO: 268919 - RNA, 19 nt, Artificial Sequence
  Description of Artificial Sequence: Synthetic oligonucleotide
  Antisense strand to SEQ ID NO: 268918
aguuguacuggaaagauac

SEQ ID NO: 268920 - RNA, 19 nt, Artificial Sequence
  Description of Artificial Sequence: Synthetic oligonucleotide
  Sense strand starting at position 3832 of SEQ ID NO: 3455
gggcaugcauccucccuaa

SEQ ID NO: 268921 - RNA, 19 nt, Artificial Sequence
  Description of Artificial Sequence: Synthetic oligonucleotide
  Antisense strand to SEQ ID NO: 268920
uuagggaggaugcaugccc

SEQ ID NO: 268922 - RNA, 19 nt, Artificial Sequence
  Description of Artificial Sequence: Synthetic oligonucleotide
  Sense strand starting at position 58 of SEQ ID NO: 3456
cuuugauuaugcuugaaau

SEQ ID NO: 268923 - RNA, 19 nt, Artificial Sequence
  Description of Artificial Sequence: Synthetic oligonucleotide
  Antisense strand to SEQ ID NO: 268922
auuucaagcauaaucaaag

SEQ ID NO: 268924 - RNA, 19 nt, Artificial Sequence
  Description of Artificial Sequence: Synthetic oligonucleotide
  Sense strand starting at position 59 of SEQ ID NO: 3456
uuugauuaugcuugaaauc

SEQ ID NO: 268925 - RNA, 19 nt, Artificial Sequence
  Description of Artificial Sequence: Synthetic oligonucleotide
  Antisense strand to SEQ ID NO: 268924
gauuucaagcauaaucaaa

SEQ ID NO: 268926 - RNA, 19 nt, Artificial Sequence
  Description of Artificial Sequence: Synthetic oligonucleotide
  Sense strand starting at position 186 of SEQ ID NO: 3456
uugcuaaagugacuacaaa

SEQ ID NO: 268927 - RNA, 19 nt, Artificial Sequence
  Description of Artificial Sequence: Synthetic oligonucleotide
  Antisense strand to SEQ ID NO: 268926
uuuguagucacuuuagcaa

SEQ ID NO: 268928 - RNA, 19 nt, Artificial Sequence
  Description of Artificial Sequence: Synthetic oligonucleotide
  Sense strand starting at position 278 of SEQ ID NO: 3456
augaguaagauaggcauaa

SEQ ID NO: 268929 - RNA, 19 nt, Artificial Sequence
  Description of Artificial Sequence: Synthetic oligonucleotide
  Antisense strand to SEQ ID NO: 268928
uuaugccuaucuuacucau

SEQ ID NO: 268930 - RNA, 19 nt, Artificial Sequence
  Description of Artificial Sequence: Synthetic oligonucleotide
  Sense strand starting at position 279 of SEQ ID NO: 3456
ugaguaagauaggcauaaa

SEQ ID NO: 268931 - RNA, 19 nt, Artificial Sequence
  Description of Artificial Sequence: Synthetic oligonucleotide
  Antisense strand to SEQ ID NO: 268930
uuuaugccuaucuuacuca

SEQ ID NO: 268932 - RNA, 19 nt, Artificial Sequence
  Description of Artificial Sequence: Synthetic oligonucleotide
  Sense strand starting at position 299 of SEQ ID NO: 3456
cguguuaaugcaguagcau

SEQ ID NO: 268933 - RNA, 19 nt, Artificial Sequence
  Description of Artificial Sequence: Synthetic oligonucleotide
  Antisense strand to SEQ ID NO: 268932
augcuacugcauuaacacg

SEQ ID NO: 268934 - RNA, 19 nt, Artificial Sequence
  Description of Artificial Sequence: Synthetic oligonucleotide
  Sense strand starting at position 374 of SEQ ID NO: 3456
guguaaagagauuguacau

SEQ ID NO: 268935 - RNA, 19 nt, Artificial Sequence
  Description of Artificial Sequence: Synthetic oligonucleotide
  Antisense strand to SEQ ID NO: 268934
auguacaaucucuuuacac

SEQ ID NO: 268936 - RNA, 19 nt, Artificial Sequence
  Description of Artificial Sequence: Synthetic oligonucleotide
  Sense strand starting at position 468 of SEQ ID NO: 3456
agaugcuuacaaggcauua

SEQ ID NO: 268937 - RNA, 19 nt, Artificial Sequence
  Description of Artificial Sequence: Synthetic oligonucleotide
  Antisense strand to SEQ ID NO: 268936
uaaugccuuguaagcaucu

SEQ ID NO: 268938 - RNA, 19 nt, Artificial Sequence
  Description of Artificial Sequence: Synthetic oligonucleotide
  Sense strand starting at position 494 of SEQ ID NO: 3456
aguagauguagucagucua

SEQ ID NO: 268939 - RNA, 19 nt, Artificial Sequence
  Description of Artificial Sequence: Synthetic oligonucleotide
  Antisense strand to SEQ ID NO: 268938
uagacugacuacaucuacu

SEQ ID NO: 268940 - RNA, 19 nt, Artificial Sequence
  Description of Artificial Sequence: Synthetic oligonucleotide
  Sense strand starting at position 545 of SEQ ID NO: 3456
aucuaauugaauugggagu

SEQ ID NO: 268941 - RNA, 19 nt, Artificial Sequence
  Description of Artificial Sequence: Synthetic oligonucleotide
  Antisense strand to SEQ ID NO: 268940
acucccaauucaauuagau

SEQ ID NO: 268942 - RNA, 19 nt, Artificial Sequence
  Description of Artificial Sequence: Synthetic oligonucleotide
  Sense strand starting at position 673 of SEQ ID NO: 3456
gucccuugugcaguuguaa

SEQ ID NO: 268943 - RNA, 19 nt, Artificial Sequence
  Description of Artificial Sequence: Synthetic oligonucleotide
  Antisense strand to SEQ ID NO: 268942
uuacaacugcacaagggac

SEQ ID NO: 268944 - RNA, 19 nt, Artificial Sequence
  Description of Artificial Sequence: Synthetic oligonucleotide
  Sense strand starting at position 780 of SEQ ID NO: 3456
uugcacuuuccauaggaaa

SEQ ID NO: 268945 - RNA, 19 nt, Artificial Sequence
  Description of Artificial Sequence: Synthetic oligonucleotide
  Antisense strand to SEQ ID NO: 268944
uuuccuauggaaagugcaa

SEQ ID NO: 268946 - RNA, 19 nt, Artificial Sequence
  Description of Artificial Sequence: Synthetic oligonucleotide
  Sense strand starting at position 852 of SEQ ID NO: 3456
agugcuugacaauauauaa

SEQ ID NO: 268947 - RNA, 19 nt, Artificial Sequence
  Description of Artificial Sequence: Synthetic oligonucleotide
  Antisense strand to SEQ ID NO: 268946
uuauauauugucaagcacu

SEQ ID NO: 268948 - RNA, 19 nt, Artificial Sequence
  Description of Artificial Sequence: Synthetic oligonucleotide
  Sense strand starting at position 947 of SEQ ID NO: 3456
uccacacuacuugguuaua

SEQ ID NO: 268949 - RNA, 19 nt, Artificial Sequence
  Description of Artificial Sequence: Synthetic oligonucleotide
  Antisense strand to SEQ ID NO: 268948
uauaaccaaguagugugga

SEQ ID NO: 268950 - RNA, 19 nt, Artificial Sequence
  Description of Artificial Sequence: Synthetic oligonucleotide
  Sense strand starting at position 959 of SEQ ID NO: 3456
gguuauaaaugcuuggaug

SEQ ID NO: 268951 - RNA, 19 nt, Artificial Sequence
  Description of Artificial Sequence: Synthetic oligonucleotide
  Antisense strand to SEQ ID NO: 268950
cauccaagcauuuauaacc

SEQ ID NO: 268952 - RNA, 19 nt, Artificial Sequence
  Description of Artificial Sequence: Synthetic oligonucleotide
  Sense strand starting at position 1165 of SEQ ID NO: 3456
auugcugaguaguuggaaa

SEQ ID NO: 268953 - RNA, 19 nt, Artificial Sequence
  Description of Artificial Sequence: Synthetic oligonucleotide
  Antisense strand to SEQ ID NO: 268952
uuuccaacuacucagcaau

SEQ ID NO: 268954 - RNA, 19 nt, Artificial Sequence
  Description of Artificial Sequence: Synthetic oligonucleotide
  Sense strand starting at position 1325 of SEQ ID NO: 3456
agagguuuaugucuaauca

SEQ ID NO: 268955 - RNA, 19 nt, Artificial Sequence
  Description of Artificial Sequence: Synthetic oligonucleotide
  Antisense strand to SEQ ID NO: 268954
ugauuagacauaaaccucu

SEQ ID NO: 268956 - RNA, 19 nt, Artificial Sequence
  Description of Artificial Sequence: Synthetic oligonucleotide
  Sense strand starting at position 1326 of SEQ ID NO: 3456
gagguuuaugucuaaucag

SEQ ID NO: 268957 - RNA, 19 nt, Artificial Sequence
  Description of Artificial Sequence: Synthetic oligonucleotide
  Antisense strand to SEQ ID NO: 268956
cugauuagacauaaaccuc

SEQ ID NO: 268958 - RNA, 19 nt, Artificial Sequence
  Description of Artificial Sequence: Synthetic oligonucleotide
  Sense strand starting at position 1369 of SEQ ID NO: 3456
gcuguuugucugguaguuu

SEQ ID NO: 268959 - RNA, 19 nt, Artificial Sequence
  Description of Artificial Sequence: Synthetic oligonucleotide
  Antisense strand to SEQ ID NO: 268958
aaacuaccagacaaacagc

SEQ ID NO: 268960 - RNA, 19 nt, Artificial Sequence
  Description of Artificial Sequence: Synthetic oligonucleotide
  Sense strand starting at position 1436 of SEQ ID NO: 3456
gcucucacugcugacauaa

SEQ ID NO: 268961 - RNA, 19 nt, Artificial Sequence
  Description of Artificial Sequence: Synthetic oligonucleotide
  Antisense strand to SEQ ID NO: 268960
uuaugucagcagugagagc

SEQ ID NO: 268962 - RNA, 19 nt, Artificial Sequence
  Description of Artificial Sequence: Synthetic oligonucleotide
  Sense strand starting at position 1447 of SEQ ID NO: 3456
ugacauaaaugugcuaaga

SEQ ID NO: 268963 - RNA, 19 nt, Artificial Sequence
  Description of Artificial Sequence: Synthetic oligonucleotide
  Antisense strand to SEQ ID NO: 268962
ucuuagcacauuuauguca

SEQ ID NO: 268964 - RNA, 19 nt, Artificial Sequence
  Description of Artificial Sequence: Synthetic oligonucleotide
  Sense strand starting at position 1529 of SEQ ID NO: 3456
gccaauuaauacccuggaa

SEQ ID NO: 268965 - RNA, 19 nt, Artificial Sequence
  Description of Artificial Sequence: Synthetic oligonucleotide
  Antisense strand to SEQ ID NO: 268964
uuccaggguauuaauuggc

SEQ ID NO: 268966 - RNA, 19 nt, Artificial Sequence
  Description of Artificial Sequence: Synthetic oligonucleotide
  Sense strand starting at position 1771 of SEQ ID NO: 3456
accagauugcuugaucuau

SEQ ID NO: 268967 - RNA, 19 nt, Artificial Sequence
  Description of Artificial Sequence: Synthetic oligonucleotide
  Antisense strand to SEQ ID NO: 268966
auagaucaagcaaucuggu

SEQ ID NO: 268968 - RNA, 19 nt, Artificial Sequence
  Description of Artificial Sequence: Synthetic oligonucleotide
  Sense strand starting at position 2029 of SEQ ID NO: 3456
ugucgacucccagauucuu

SEQ ID NO: 268969 - RNA, 19 nt, Artificial Sequence
  Description of Artificial Sequence: Synthetic oligonucleotide
  Antisense strand to SEQ ID NO: 268968
aagaaucugggagucgaca

SEQ ID NO: 268970 - RNA, 19 nt, Artificial Sequence
  Description of Artificial Sequence: Synthetic oligonucleotide
  Sense strand starting at position 2098 of SEQ ID NO: 3456
cuuuaaaguuugcuaggaa

SEQ ID NO: 268971 - RNA, 19 nt, Artificial Sequence
  Description of Artificial Sequence: Synthetic oligonucleotide
  Antisense strand to SEQ ID NO: 268970
uuccuagcaaacuuuaaag

SEQ ID NO: 268972 - RNA, 19 nt, Artificial Sequence
  Description of Artificial Sequence: Synthetic oligonucleotide
  Sense strand starting at position 2101 of SEQ ID NO: 3456
uaaaguuugcuaggaagau

SEQ ID NO: 268973 - RNA, 19 nt, Artificial Sequence
  Description of Artificial Sequence: Synthetic oligonucleotide
  Antisense strand to SEQ ID NO: 268972
aucuuccuagcaaacuuua

SEQ ID NO: 268974 - RNA, 19 nt, Artificial Sequence
  Description of Artificial Sequence: Synthetic oligonucleotide
  Sense strand starting at position 2299 of SEQ ID NO: 3456
uggcuaauguaccucauuu

SEQ ID NO: 268975 - RNA, 19 nt, Artificial Sequence
  Description of Artificial Sequence: Synthetic oligonucleotide
  Antisense strand to SEQ ID NO: 268974
aaaugagguacauuagcca

SEQ ID NO: 268976 - RNA, 19 nt, Artificial Sequence
  Description of Artificial Sequence: Synthetic oligonucleotide
  Sense strand starting at position 2317 of SEQ ID NO: 3456
ugauuauauucugcgaaga

SEQ ID NO: 268977 - RNA, 19 nt, Artificial Sequence
  Description of Artificial Sequence: Synthetic oligonucleotide
  Antisense strand to SEQ ID NO: 268976
ucuucgcagaauauaauca

SEQ ID NO: 268978 - RNA, 19 nt, Artificial Sequence
  Description of Artificial Sequence: Synthetic oligonucleotide
  Sense strand starting at position 2318 of SEQ ID NO: 3456
gauuauauucugcgaagac

SEQ ID NO: 268979 - RNA, 19 nt, Artificial Sequence
  Description of Artificial Sequence: Synthetic oligonucleotide
  Antisense strand to SEQ ID NO: 268978
gucuucgcagaauauaauc

SEQ ID NO: 268980 - RNA, 19 nt, Artificial Sequence
  Description of Artificial Sequence: Synthetic oligonucleotide
  Sense strand starting at position 2593 of SEQ ID NO: 3456
gcugcugauuaaucaggga

SEQ ID NO: 268981 - RNA, 19 nt, Artificial Sequence
  Description of Artificial Sequence: Synthetic oligonucleotide
  Antisense strand to SEQ ID NO: 268980
ucccugauuaaucagcagc

SEQ ID NO: 268982 - RNA, 19 nt, Artificial Sequence
  Description of Artificial Sequence: Synthetic oligonucleotide
  Sense strand starting at position 2597 of SEQ ID NO: 3456
cugauuaaucagggauucu

SEQ ID NO: 268983 - RNA, 19 nt, Artificial Sequence
  Description of Artificial Sequence: Synthetic oligonucleotide
  Antisense strand to SEQ ID NO: 268982
agaaucccugauuaaucag

SEQ ID NO: 268984 - RNA, 19 nt, Artificial Sequence
  Description of Artificial Sequence: Synthetic oligonucleotide
  Sense strand starting at position 2636 of SEQ ID NO: 3456
ugaaauaagcaguaaucuu

SEQ ID NO: 268985 - RNA, 19 nt, Artificial Sequence
  Description of Artificial Sequence: Synthetic oligonucleotide
  Antisense strand to SEQ ID NO: 268984
aagauuacugcuuauuuca

SEQ ID NO: 268986 - RNA, 19 nt, Artificial Sequence
  Description of Artificial Sequence: Synthetic oligonucleotide
  Sense strand starting at position 2666 of SEQ ID NO: 3456
ucugcaauccgucugcauu

SEQ ID NO: 268987 - RNA, 19 nt, Artificial Sequence
  Description of Artificial Sequence: Synthetic oligonucleotide
  Antisense strand to SEQ ID NO: 268986
aaugcagacggauugcaga

SEQ ID NO: 268988 - RNA, 19 nt, Artificial Sequence
  Description of Artificial Sequence: Synthetic oligonucleotide
  Sense strand starting at position 2890 of SEQ ID NO: 3456
gaagucugauuaguaaaua

SEQ ID NO: 268989 - RNA, 19 nt, Artificial Sequence
  Description of Artificial Sequence: Synthetic oligonucleotide
  Antisense strand to SEQ ID NO: 268988
uauuuacuaaucagacuuc

SEQ ID NO: 268990 - RNA, 19 nt, Artificial Sequence
  Description of Artificial Sequence: Synthetic oligonucleotide
  Sense strand starting at position 3019 of SEQ ID NO: 3456
uacagagaaugguuaaguu

SEQ ID NO: 268991 - RNA, 19 nt, Artificial Sequence
  Description of Artificial Sequence: Synthetic oligonucleotide
  Antisense strand to SEQ ID NO: 268990
aacuuaaccauucucugua

SEQ ID NO: 268992 - RNA, 19 nt, Artificial Sequence
  Description of Artificial Sequence: Synthetic oligonucleotide
  Sense strand starting at position 3023 of SEQ ID NO: 3456
gagaaugguuaaguuauaa

SEQ ID NO: 268993 - RNA, 19 nt, Artificial Sequence
  Description of Artificial Sequence: Synthetic oligonucleotide
  Antisense strand to SEQ ID NO: 268992
uuauaacuuaaccauucuc

SEQ ID NO: 268994 - RNA, 19 nt, Artificial Sequence
  Description of Artificial Sequence: Synthetic oligonucleotide
  Sense strand starting at position 3659 of SEQ ID NO: 3456
uauguuucugauggauaug

SEQ ID NO: 268995 - RNA, 19 nt, Artificial Sequence
  Description of Artificial Sequence: Synthetic oligonucleotide
  Antisense strand to SEQ ID NO: 268994
cauauccaucagaaacaua

SEQ ID NO: 268996 - RNA, 19 nt, Artificial Sequence
  Description of Artificial Sequence: Synthetic oligonucleotide
  Sense strand starting at position 3664 of SEQ ID NO: 3456
uucugauggauaugagcuu

SEQ ID NO: 268997 - RNA, 19 nt, Artificial Sequence
  Description of Artificial Sequence: Synthetic oligonucleotide
  Antisense strand to SEQ ID NO: 268996
aagcucauauccaucagaa

SEQ ID NO: 268998 - RNA, 19 nt, Artificial Sequence
  Description of Artificial Sequence: Synthetic oligonucleotide
  Sense strand starting at position 3718 of SEQ ID NO: 3456
acuugauagugaccuauag

SEQ ID NO: 268999 - RNA, 19 nt, Artificial Sequence
  Description of Artificial Sequence: Synthetic oligonucleotide
  Antisense strand to SEQ ID NO: 268998
cuauaggucacuaucaagu

SEQ ID NO: 269000 - RNA, 19 nt, Artificial Sequence
  Description of Artificial Sequence: Synthetic oligonucleotide
  Sense strand starting at position 3918 of SEQ ID NO: 3456
ucuuaaaugucaccugaga

SEQ ID NO: 269001 - RNA, 19 nt, Artificial Sequence
  Description of Artificial Sequence: Synthetic oligonucleotide
  Antisense strand to SEQ ID NO: 269000
ucucaggugacauuuaaga

SEQ ID NO: 269002 - RNA, 19 nt, Artificial Sequence
  Description of Artificial Sequence: Synthetic oligonucleotide
  Sense strand starting at position 37 of SEQ ID NO: 3457
ggagcaguuuaaucaaaga

SEQ ID NO: 269003 - RNA, 19 nt, Artificial Sequence
  Description of Artificial Sequence: Synthetic oligonucleotide
  Antisense strand to SEQ ID NO: 269002
ucuuugauuaaacugcucc

SEQ ID NO: 269004 - RNA, 19 nt, Artificial Sequence
  Description of Artificial Sequence: Synthetic oligonucleotide
  Sense strand starting at position 109 of SEQ ID NO: 3457
aucacuuguuucucaaggu

SEQ ID NO: 269005 - RNA, 19 nt, Artificial Sequence
  Description of Artificial Sequence: Synthetic oligonucleotide
  Antisense strand to SEQ ID NO: 269004
accuugagaaacaagugau

SEQ ID NO: 269006 - RNA, 19 nt, Artificial Sequence
  Description of Artificial Sequence: Synthetic oligonucleotide
  Sense strand starting at position 113 of SEQ ID NO: 3457
cuuguuucucaaggugaca

SEQ ID NO: 269007 - RNA, 19 nt, Artificial Sequence
  Description of Artificial Sequence: Synthetic oligonucleotide
  Antisense strand to SEQ ID NO: 269006
ugucaccuugagaaacaag

SEQ ID NO: 269008 - RNA, 19 nt, Artificial Sequence
  Description of Artificial Sequence: Synthetic oligonucleotide
  Sense strand starting at position 115 of SEQ ID NO: 3457
uguuucucaaggugacaga

SEQ ID NO: 269009 - RNA, 19 nt, Artificial Sequence
  Description of Artificial Sequence: Synthetic oligonucleotide
  Antisense strand to SEQ ID NO: 269008
ucugucaccuugagaaaca

SEQ ID NO: 269010 - RNA, 19 nt, Artificial Sequence
  Description of Artificial Sequence: Synthetic oligonucleotide
  Sense strand starting at position 116 of SEQ ID NO: 3457
guuucucaaggugacagau

SEQ ID NO: 269011 - RNA, 19 nt, Artificial Sequence
  Description of Artificial Sequence: Synthetic oligonucleotide
  Antisense strand to SEQ ID NO: 269010
aucugucaccuugagaaac

SEQ ID NO: 269012 - RNA, 19 nt, Artificial Sequence
  Description of Artificial Sequence: Synthetic oligonucleotide
  Sense strand starting at position 221 of SEQ ID NO: 3457
ccuuauucucacugauggu

SEQ ID NO: 269013 - RNA, 19 nt, Artificial Sequence
  Description of Artificial Sequence: Synthetic oligonucleotide
  Antisense strand to SEQ ID NO: 269012
accaucagugagaauaagg

SEQ ID NO: 269014 - RNA, 19 nt, Artificial Sequence
  Description of Artificial Sequence: Synthetic oligonucleotide
  Sense strand starting at position 227 of SEQ ID NO: 3457
ucucacugaugguuuagaa

SEQ ID NO: 269015 - RNA, 19 nt, Artificial Sequence
  Description of Artificial Sequence: Synthetic oligonucleotide
  Antisense strand to SEQ ID NO: 269014
uucuaaaccaucagugaga

SEQ ID NO: 269016 - RNA, 19 nt, Artificial Sequence
  Description of Artificial Sequence: Synthetic oligonucleotide
  Sense strand starting at position 249 of SEQ ID NO: 3457
ccuguuauauacguagacu

SEQ ID NO: 269017 - RNA, 19 nt, Artificial Sequence
  Description of Artificial Sequence: Synthetic oligonucleotide
  Antisense strand to SEQ ID NO: 269016
agucuacguauauaacagg

SEQ ID NO: 269018 - RNA, 19 nt, Artificial Sequence
  Description of Artificial Sequence: Synthetic oligonucleotide
  Sense strand starting at position 267 of SEQ ID NO: 3457
ucagcaauuuacgcccaua

SEQ ID NO: 269019 - RNA, 19 nt, Artificial Sequence
  Description of Artificial Sequence: Synthetic oligonucleotide
  Antisense strand to SEQ ID NO: 269018
uaugggcguaaauugcuga

SEQ ID NO: 269020 - RNA, 19 nt, Artificial Sequence
  Description of Artificial Sequence: Synthetic oligonucleotide
  Sense strand starting at position 452 of SEQ ID NO: 3457
ggaaucauuuaaggaguuu

SEQ ID NO: 269021 - RNA, 19 nt, Artificial Sequence
  Description of Artificial Sequence: Synthetic oligonucleotide
  Antisense strand to SEQ ID NO: 269020
aaacuccuuaaaugauucc

SEQ ID NO: 269022 - RNA, 19 nt, Artificial Sequence
  Description of Artificial Sequence: Synthetic oligonucleotide
  Sense strand starting at position 461 of SEQ ID NO: 3457
uaaggaguuugcuaagaag

SEQ ID NO: 269023 - RNA, 19 nt, Artificial Sequence
  Description of Artificial Sequence: Synthetic oligonucleotide
  Antisense strand to SEQ ID NO: 269022
cuucuuagcaaacuccuua

SEQ ID NO: 269024 - RNA, 19 nt, Artificial Sequence
  Description of Artificial Sequence: Synthetic oligonucleotide
  Sense strand starting at position 549 of SEQ ID NO: 3457
uuaauauucccgcggacca

SEQ ID NO: 269025 - RNA, 19 nt, Artificial Sequence
  Description of Artificial Sequence: Synthetic oligonucleotide
  Antisense strand to SEQ ID NO: 269024
ugguccgcgggaauauuaa

SEQ ID NO: 269026 - RNA, 19 nt, Artificial Sequence
  Description of Artificial Sequence: Synthetic oligonucleotide
  Sense strand starting at position 2175 of SEQ ID NO: 3457
gcuccacuggucuaaguau

SEQ ID NO: 269027 - RNA, 19 nt, Artificial Sequence
  Description of Artificial Sequence: Synthetic oligonucleotide
  Antisense strand to SEQ ID NO: 269026
auacuuagaccaguggagc

SEQ ID NO: 269028 - RNA, 19 nt, Artificial Sequence
  Description of Artificial Sequence: Synthetic oligonucleotide
  Sense strand starting at position 2274 of SEQ ID NO: 3457
ccagcagcugcuuauugaa

SEQ ID NO: 269029 - RNA, 19 nt, Artificial Sequence
  Description of Artificial Sequence: Synthetic oligonucleotide
  Antisense strand to SEQ ID NO: 269028
uucaauaagcagcugcugg

SEQ ID NO: 269030 - RNA, 19 nt, Artificial Sequence
  Description of Artificial Sequence: Synthetic oligonucleotide
  Sense strand starting at position 2604 of SEQ ID NO: 3457
ggcucauggccacagacau

SEQ ID NO: 269031 - RNA, 19 nt, Artificial Sequence
  Description of Artificial Sequence: Synthetic oligonucleotide
  Antisense strand to SEQ ID NO: 269030
augucuguggccaugagcc

SEQ ID NO: 269032 - RNA, 19 nt, Artificial Sequence
  Description of Artificial Sequence: Synthetic oligonucleotide
  Sense strand starting at position 2614 of SEQ ID NO: 3457
cacagacaucugcgucaga

SEQ ID NO: 269033 - RNA, 19 nt, Artificial Sequence
  Description of Artificial Sequence: Synthetic oligonucleotide
  Antisense strand to SEQ ID NO: 269032
ucugacgcagaugucugug

SEQ ID NO: 269034 - RNA, 19 nt, Artificial Sequence
  Description of Artificial Sequence: Synthetic oligonucleotide
  Sense strand starting at position 2617 of SEQ ID NO: 3457
agacaucugcgucagagau

SEQ ID NO: 269035 - RNA, 19 nt, Artificial Sequence
  Description of Artificial Sequence: Synthetic oligonucleotide
  Antisense strand to SEQ ID NO: 269034
aucucugacgcagaugucu

SEQ ID NO: 269036 - RNA, 19 nt, Artificial Sequence
  Description of Artificial Sequence: Synthetic oligonucleotide
  Sense strand starting at position 3328 of SEQ ID NO: 3457
ggaggcauuugggaaguau

SEQ ID NO: 269037 - RNA, 19 nt, Artificial Sequence
  Description of Artificial Sequence: Synthetic oligonucleotide
  Antisense strand to SEQ ID NO: 269036
auacuucccaaaugccucc

SEQ ID NO: 269038 - RNA, 19 nt, Artificial Sequence
  Description of Artificial Sequence: Synthetic oligonucleotide
  Sense strand starting at position 3339 of SEQ ID NO: 3457
ggaaguaugcgcugggaga

SEQ ID NO: 269039 - RNA, 19 nt, Artificial Sequence
  Description of Artificial Sequence: Synthetic oligonucleotide
  Antisense strand to SEQ ID NO: 269038
ucucccagcgcauacuucc

SEQ ID NO: 269040 - RNA, 19 nt, Artificial Sequence
  Description of Artificial Sequence: Synthetic oligonucleotide
  Sense strand starting at position 3476 of SEQ ID NO: 3457
cugagaagcuaucagagau

SEQ ID NO: 269041 - RNA, 19 nt, Artificial Sequence
  Description of Artificial Sequence: Synthetic oligonucleotide
  Antisense strand to SEQ ID NO: 269040
aucucugauagcuucucag

SEQ ID NO: 269042 - RNA, 19 nt, Artificial Sequence
  Description of Artificial Sequence: Synthetic oligonucleotide
  Sense strand starting at position 3502 of SEQ ID NO: 3457
aaagauuaguugggaaacu

SEQ ID NO: 269043 - RNA, 19 nt, Artificial Sequence
  Description of Artificial Sequence: Synthetic oligonucleotide
  Antisense strand to SEQ ID NO: 269042
aguuucccaacuaaucuuu

SEQ ID NO: 269044 - RNA, 19 nt, Artificial Sequence
  Description of Artificial Sequence: Synthetic oligonucleotide
  Sense strand starting at position 3503 of SEQ ID NO: 3457
aagauuaguugggaaacuu

SEQ ID NO: 269045 - RNA, 19 nt, Artificial Sequence
  Description of Artificial Sequence: Synthetic oligonucleotide
  Antisense strand to SEQ ID NO: 269044
aaguuucccaacuaaucuu

SEQ ID NO: 269046 - RNA, 19 nt, Artificial Sequence
  Description of Artificial Sequence: Synthetic oligonucleotide
  Sense strand starting at position 3534 of SEQ ID NO: 3457
agucuaucuucucuugagu

SEQ ID NO: 269047 - RNA, 19 nt, Artificial Sequence
  Description of Artificial Sequence: Synthetic oligonucleotide
  Antisense strand to SEQ ID NO: 269046
acucaagagaagauagacu

SEQ ID NO: 269048 - RNA, 19 nt, Artificial Sequence
  Description of Artificial Sequence: Synthetic oligonucleotide
  Sense strand starting at position 3547 of SEQ ID NO: 3457
uugaguuccugucucaaca

SEQ ID NO: 269049 - RNA, 19 nt, Artificial Sequence
  Description of Artificial Sequence: Synthetic oligonucleotide
  Antisense strand to SEQ ID NO: 269048
uguugagacaggaacucaa

SEQ ID NO: 269050 - RNA, 19 nt, Artificial Sequence
  Description of Artificial Sequence: Synthetic oligonucleotide
  Sense strand starting at position 3634 of SEQ ID NO: 3457
gguccaccuuucucuuaga

SEQ ID NO: 269051 - RNA, 19 nt, Artificial Sequence
  Description of Artificial Sequence: Synthetic oligonucleotide
  Antisense strand to SEQ ID NO: 269050
ucuaagagaaagguggacc

SEQ ID NO: 269052 - RNA, 19 nt, Artificial Sequence
  Description of Artificial Sequence: Synthetic oligonucleotide
  Sense strand starting at position 3637 of SEQ ID NO: 3457
ccaccuuucucuuagagag

SEQ ID NO: 269053 - RNA, 19 nt, Artificial Sequence
  Description of Artificial Sequence: Synthetic oligonucleotide
  Antisense strand to SEQ ID NO: 269052
cucucuaagagaaaggugg

SEQ ID NO: 269054 - RNA, 19 nt, Artificial Sequence
  Description of Artificial Sequence: Synthetic oligonucleotide
  Sense strand starting at position 3639 of SEQ ID NO: 3457
accuuucucuuagagagga

SEQ ID NO: 269055 - RNA, 19 nt, Artificial Sequence
  Description of Artificial Sequence: Synthetic oligonucleotide
  Antisense strand to SEQ ID NO: 269054
uccucucuaagagaaaggu

SEQ ID NO: 269056 - RNA, 19 nt, Artificial Sequence
  Description of Artificial Sequence: Synthetic oligonucleotide
  Sense strand starting at position 3736 of SEQ ID NO: 3457
uggccacuuagucguugaa

SEQ ID NO: 269057 - RNA, 19 nt, Artificial Sequence
  Description of Artificial Sequence: Synthetic oligonucleotide
  Antisense strand to SEQ ID NO: 269056
uucaacgacuaaguggcca

SEQ ID NO: 269058 - RNA, 19 nt, Artificial Sequence
  Description of Artificial Sequence: Synthetic oligonucleotide
  Sense strand starting at position 3739 of SEQ ID NO: 3457
ccacuuagucguugaacgu

SEQ ID NO: 269059 - RNA, 19 nt, Artificial Sequence
  Description of Artificial Sequence: Synthetic oligonucleotide
  Antisense strand to SEQ ID NO: 269058
acguucaacgacuaagugg

SEQ ID NO: 269060 - RNA, 19 nt, Artificial Sequence
  Description of Artificial Sequence: Synthetic oligonucleotide
  Sense strand starting at position 3746 of SEQ ID NO: 3457
gucguugaacgucauuuca

SEQ ID NO: 269061 - RNA, 19 nt, Artificial Sequence
  Description of Artificial Sequence: Synthetic oligonucleotide
  Antisense strand to SEQ ID NO: 269060
ugaaaugacguucaacgac

SEQ ID NO: 269062 - RNA, 19 nt, Artificial Sequence
  Description of Artificial Sequence: Synthetic oligonucleotide
  Sense strand starting at position 3808 of SEQ ID NO: 3457
gugacuagauaaugagaga

SEQ ID NO: 269063 - RNA, 19 nt, Artificial Sequence
  Description of Artificial Sequence: Synthetic oligonucleotide
  Antisense strand to SEQ ID NO: 269062
ucucucauuaucuagucac

SEQ ID NO: 269064 - RNA, 19 nt, Artificial Sequence
  Description of Artificial Sequence: Synthetic oligonucleotide
  Sense strand starting at position 3822 of SEQ ID NO: 3457
agagaagccauguaacagu

SEQ ID NO: 269065 - RNA, 19 nt, Artificial Sequence
  Description of Artificial Sequence: Synthetic oligonucleotide
  Antisense strand to SEQ ID NO: 269064
acuguuacauggcuucucu

SEQ ID NO: 269066 - RNA, 19 nt, Artificial Sequence
  Description of Artificial Sequence: Synthetic oligonucleotide
  Sense strand starting at position 3833 of SEQ ID NO: 3457
guaacaguauaguuccaau

SEQ ID NO: 269067 - RNA, 19 nt, Artificial Sequence
  Description of Artificial Sequence: Synthetic oligonucleotide
  Antisense strand to SEQ ID NO: 269066
auuggaacuauacuguuac

SEQ ID NO: 269068 - RNA, 19 nt, Artificial Sequence
  Description of Artificial Sequence: Synthetic oligonucleotide
  Sense strand starting at position 3874 of SEQ ID NO: 3457
gcuccaggaugauuaguau

SEQ ID NO: 269069 - RNA, 19 nt, Artificial Sequence
  Description of Artificial Sequence: Synthetic oligonucleotide
  Antisense strand to SEQ ID NO: 269068
auacuaaucauccuggagc

SEQ ID NO: 269070 - RNA, 19 nt, Artificial Sequence
  Description of Artificial Sequence: Synthetic oligonucleotide
  Sense strand starting at position 3877 of SEQ ID NO: 3457
ccaggaugauuaguauagu

SEQ ID NO: 269071 - RNA, 19 nt, Artificial Sequence
  Description of Artificial Sequence: Synthetic oligonucleotide
  Antisense strand to SEQ ID NO: 269070
acuauacuaaucauccugg

SEQ ID NO: 269072 - RNA, 19 nt, Artificial Sequence
  Description of Artificial Sequence: Synthetic oligonucleotide
  Sense strand starting at position 3883 of SEQ ID NO: 3457
ugauuaguauagucuauga

SEQ ID NO: 269073 - RNA, 19 nt, Artificial Sequence
  Description of Artificial Sequence: Synthetic oligonucleotide
  Antisense strand to SEQ ID NO: 269072
ucauagacuauacuaauca

SEQ ID NO: 269074 - RNA, 19 nt, Artificial Sequence
  Description of Artificial Sequence: Synthetic oligonucleotide
  Sense strand starting at position 3885 of SEQ ID NO: 3457
auuaguauagucuaugagu

SEQ ID NO: 269075 - RNA, 19 nt, Artificial Sequence
  Description of Artificial Sequence: Synthetic oligonucleotide
  Antisense strand to SEQ ID NO: 269074
acucauagacuauacuaau

SEQ ID NO: 269076 - RNA, 19 nt, Artificial Sequence
  Description of Artificial Sequence: Synthetic oligonucleotide
  Sense strand starting at position 3887 of SEQ ID NO: 3457
uaguauagucuaugagugu

SEQ ID NO: 269077 - RNA, 19 nt, Artificial Sequence
  Description of Artificial Sequence: Synthetic oligonucleotide
  Antisense strand to SEQ ID NO: 269076
acacucauagacuauacua

SEQ ID NO: 269078 - RNA, 19 nt, Artificial Sequence
  Description of Artificial Sequence: Synthetic oligonucleotide
  Sense strand starting at position 3893 of SEQ ID NO: 3457
agucuaugagugugucagu

SEQ ID NO: 269079 - RNA, 19 nt, Artificial Sequence
  Description of Artificial Sequence: Synthetic oligonucleotide
  Antisense strand to SEQ ID NO: 269078
acugacacacucauagacu

SEQ ID NO: 269080 - RNA, 19 nt, Artificial Sequence
  Description of Artificial Sequence: Synthetic oligonucleotide
  Sense strand starting at position 3901 of SEQ ID NO: 3457
agugugucagugugaggau

SEQ ID NO: 269081 - RNA, 19 nt, Artificial Sequence
  Description of Artificial Sequence: Synthetic oligonucleotide
  Antisense strand to SEQ ID NO: 269080
auccucacacugacacacu

SEQ ID NO: 269082 - RNA, 19 nt, Artificial Sequence
  Description of Artificial Sequence: Synthetic oligonucleotide
  Sense strand starting at position 194 of SEQ ID NO: 3459
cauggaaaugucuggagca

SEQ ID NO: 269083 - RNA, 19 nt, Artificial Sequence
  Description of Artificial Sequence: Synthetic oligonucleotide
  Antisense strand to SEQ ID NO: 269082
ugcuccagacauuuccaug

SEQ ID NO: 269084 - RNA, 19 nt, Artificial Sequence
  Description of Artificial Sequence: Synthetic oligonucleotide
  Sense strand starting at position 236 of SEQ ID NO: 3459
ucauguauuagcuggguau

SEQ ID NO: 269085 - RNA, 19 nt, Artificial Sequence
  Description of Artificial Sequence: Synthetic oligonucleotide
  Antisense strand to SEQ ID NO: 269084
auacccagcuaauacauga

SEQ ID NO: 269086 - RNA, 19 nt, Artificial Sequence
  Description of Artificial Sequence: Synthetic oligonucleotide
  Sense strand starting at position 237 of SEQ ID NO: 3459
cauguauuagcuggguaua

SEQ ID NO: 269087 - RNA, 19 nt, Artificial Sequence
  Description of Artificial Sequence: Synthetic oligonucleotide
  Antisense strand to SEQ ID NO: 269086
uauacccagcuaauacaug

SEQ ID NO: 269088 - RNA, 19 nt, Artificial Sequence
  Description of Artificial Sequence: Synthetic oligonucleotide
  Sense strand starting at position 238 of SEQ ID NO: 3459
auguauuagcuggguauau

SEQ ID NO: 269089 - RNA, 19 nt, Artificial Sequence
  Description of Artificial Sequence: Synthetic oligonucleotide
  Antisense strand to SEQ ID NO: 269088
auauacccagcuaauacau

SEQ ID NO: 269090 - RNA, 19 nt, Artificial Sequence
  Description of Artificial Sequence: Synthetic oligonucleotide
  Sense strand starting at position 239 of SEQ ID NO: 3459
uguauuagcuggguauaua

SEQ ID NO: 269091 - RNA, 19 nt, Artificial Sequence
  Description of Artificial Sequence: Synthetic oligonucleotide
  Antisense strand to SEQ ID NO: 269090
uauauacccagcuaauaca

SEQ ID NO: 269092 - RNA, 19 nt, Artificial Sequence
  Description of Artificial Sequence: Synthetic oligonucleotide
  Sense strand starting at position 240 of SEQ ID NO: 3459
guauuagcuggguauauac

SEQ ID NO: 269093 - RNA, 19 nt, Artificial Sequence
  Description of Artificial Sequence: Synthetic oligonucleotide
  Antisense strand to SEQ ID NO: 269092
guauauacccagcuaauac

SEQ ID NO: 269094 - RNA, 19 nt, Artificial Sequence
  Description of Artificial Sequence: Synthetic oligonucleotide
  Sense strand starting at position 247 of SEQ ID NO: 3459
cuggguauauacuucuuaa

SEQ ID NO: 269095 - RNA, 19 nt, Artificial Sequence
  Description of Artificial Sequence: Synthetic oligonucleotide
  Antisense strand to SEQ ID NO: 269094
uuaagaaguauauacccag

SEQ ID NO: 269096 - RNA, 19 nt, Artificial Sequence
  Description of Artificial Sequence: Synthetic oligonucleotide
  Sense strand starting at position 309 of SEQ ID NO: 3459
gcuguuaccugaucagaau

SEQ ID NO: 269097 - RNA, 19 nt, Artificial Sequence
  Description of Artificial Sequence: Synthetic oligonucleotide
  Antisense strand to SEQ ID NO: 269096
auucugaucagguaacagc

SEQ ID NO: 269098 - RNA, 19 nt, Artificial Sequence
  Description of Artificial Sequence: Synthetic oligonucleotide
  Sense strand starting at position 310 of SEQ ID NO: 3459
cuguuaccugaucagaauu

SEQ ID NO: 269099 - RNA, 19 nt, Artificial Sequence
  Description of Artificial Sequence: Synthetic oligonucleotide
  Antisense strand to SEQ ID NO: 269098
aauucugaucagguaacag

SEQ ID NO: 269100 - RNA, 19 nt, Artificial Sequence
  Description of Artificial Sequence: Synthetic oligonucleotide
  Sense strand starting at position 635 of SEQ ID NO: 3459
ccggcuagaacucaguauu

SEQ ID NO: 269101 - RNA, 19 nt, Artificial Sequence
  Description of Artificial Sequence: Synthetic oligonucleotide
  Antisense strand to SEQ ID NO: 269100
aauacugaguucuagccgg

SEQ ID NO: 269102 - RNA, 19 nt, Artificial Sequence
  Description of Artificial Sequence: Synthetic oligonucleotide
  Sense strand starting at position 638 of SEQ ID NO: 3459
gcuagaacucaguauucuu

SEQ ID NO: 269103 - RNA, 19 nt, Artificial Sequence
  Description of Artificial Sequence: Synthetic oligonucleotide
  Antisense strand to SEQ ID NO: 269102
aagaauacugaguucuagc

SEQ ID NO: 269104 - RNA, 19 nt, Artificial Sequence
  Description of Artificial Sequence: Synthetic oligonucleotide
  Sense strand starting at position 695 of SEQ ID NO: 3459
ugccaacuguccuuacagu

SEQ ID NO: 269105 - RNA, 19 nt, Artificial Sequence
  Description of Artificial Sequence: Synthetic oligonucleotide
  Antisense strand to SEQ ID NO: 269104
acuguaaggacaguuggca

SEQ ID NO: 269106 - RNA, 19 nt, Artificial Sequence
  Description of Artificial Sequence: Synthetic oligonucleotide
  Sense strand starting at position 717 of SEQ ID NO: 3459
ucucguauuugcuuagcua

SEQ ID NO: 269107 - RNA, 19 nt, Artificial Sequence
  Description of Artificial Sequence: Synthetic oligonucleotide
  Antisense strand to SEQ ID NO: 269106
uagcuaagcaaauacgaga

SEQ ID NO: 269108 - RNA, 19 nt, Artificial Sequence
  Description of Artificial Sequence: Synthetic oligonucleotide
  Sense strand starting at position 718 of SEQ ID NO: 3459
cucguauuugcuuagcuau

SEQ ID NO: 269109 - RNA, 19 nt, Artificial Sequence
  Description of Artificial Sequence: Synthetic oligonucleotide
  Antisense strand to SEQ ID NO: 269108
auagcuaagcaaauacgag

SEQ ID NO: 269110 - RNA, 19 nt, Artificial Sequence
  Description of Artificial Sequence: Synthetic oligonucleotide
  Sense strand starting at position 720 of SEQ ID NO: 3459
cguauuugcuuagcuauga

SEQ ID NO: 269111 - RNA, 19 nt, Artificial Sequence
  Description of Artificial Sequence: Synthetic oligonucleotide
  Antisense strand to SEQ ID NO: 269110
ucauagcuaagcaaauacg

SEQ ID NO: 269112 - RNA, 19 nt, Artificial Sequence
  Description of Artificial Sequence: Synthetic oligonucleotide
  Sense strand starting at position 724 of SEQ ID NO: 3459
uuugcuuagcuaugagaau

SEQ ID NO: 269113 - RNA, 19 nt, Artificial Sequence
  Description of Artificial Sequence: Synthetic oligonucleotide
  Antisense strand to SEQ ID NO: 269112
auucucauagcuaagcaaa

SEQ ID NO: 269114 - RNA, 19 nt, Artificial Sequence
  Description of Artificial Sequence: Synthetic oligonucleotide
  Sense strand starting at position 778 of SEQ ID NO: 3459
gcaagaacaucacucuagu

SEQ ID NO: 269115 - RNA, 19 nt, Artificial Sequence
  Description of Artificial Sequence: Synthetic oligonucleotide
  Antisense strand to SEQ ID NO: 269114
acuagagugauguucuugc

SEQ ID NO: 269116 - RNA, 19 nt, Artificial Sequence
  Description of Artificial Sequence: Synthetic oligonucleotide
  Sense strand starting at position 1017 of SEQ ID NO: 3459
gggugacgggccugucaua

SEQ ID NO: 269117 - RNA, 19 nt, Artificial Sequence
  Description of Artificial Sequence: Synthetic oligonucleotide
  Antisense strand to SEQ ID NO: 269116
uaugacaggcccgucaccc

SEQ ID NO: 269118 - RNA, 19 nt, Artificial Sequence
  Description of Artificial Sequence: Synthetic oligonucleotide
  Sense strand starting at position 1103 of SEQ ID NO: 3459
uccgaaguugccuaaauca

SEQ ID NO: 269119 - RNA, 19 nt, Artificial Sequence
  Description of Artificial Sequence: Synthetic oligonucleotide
  Antisense strand to SEQ ID NO: 269118
ugauuuaggcaacuucgga

SEQ ID NO: 269120 - RNA, 19 nt, Artificial Sequence
  Description of Artificial Sequence: Synthetic oligonucleotide
  Sense strand starting at position 1141 of SEQ ID NO: 3459
gaguaacaacgcuagcaaa

SEQ ID NO: 269121 - RNA, 19 nt, Artificial Sequence
  Description of Artificial Sequence: Synthetic oligonucleotide
  Antisense strand to SEQ ID NO: 269120
uuugcuagcguuguuacuc

SEQ ID NO: 269122 - RNA, 19 nt, Artificial Sequence
  Description of Artificial Sequence: Synthetic oligonucleotide
  Sense strand starting at position 1168 of SEQ ID NO: 3459
uguuacagacaugguuaua

SEQ ID NO: 269123 - RNA, 19 nt, Artificial Sequence
  Description of Artificial Sequence: Synthetic oligonucleotide
  Antisense strand to SEQ ID NO: 269122
uauaaccaugucuguaaca

SEQ ID NO: 269124 - RNA, 19 nt, Artificial Sequence
  Description of Artificial Sequence: Synthetic oligonucleotide
  Sense strand starting at position 1293 of SEQ ID NO: 3459
aggccuaaacuuggaaagu

SEQ ID NO: 269125 - RNA, 19 nt, Artificial Sequence
  Description of Artificial Sequence: Synthetic oligonucleotide
  Antisense strand to SEQ ID NO: 269124
acuuuccaaguuuaggccu

SEQ ID NO: 269126 - RNA, 19 nt, Artificial Sequence
  Description of Artificial Sequence: Synthetic oligonucleotide
  Sense strand starting at position 1465 of SEQ ID NO: 3459
agaggauaauguuagaaga

SEQ ID NO: 269127 - RNA, 19 nt, Artificial Sequence
  Description of Artificial Sequence: Synthetic oligonucleotide
  Antisense strand to SEQ ID NO: 269126
ucuucuaacauuauccucu

SEQ ID NO: 269128 - RNA, 19 nt, Artificial Sequence
  Description of Artificial Sequence: Synthetic oligonucleotide
  Sense strand starting at position 1467 of SEQ ID NO: 3459
aggauaauguuagaagaga

SEQ ID NO: 269129 - RNA, 19 nt, Artificial Sequence
  Description of Artificial Sequence: Synthetic oligonucleotide
  Antisense strand to SEQ ID NO: 269128
ucucuucuaacauuauccu

SEQ ID NO: 269130 - RNA, 19 nt, Artificial Sequence
  Description of Artificial Sequence: Synthetic oligonucleotide
  Sense strand starting at position 1692 of SEQ ID NO: 3459
uguguauguccguucaucu

SEQ ID NO: 269131 - RNA, 19 nt, Artificial Sequence
  Description of Artificial Sequence: Synthetic oligonucleotide
  Antisense strand to SEQ ID NO: 269130
agaugaacggacauacaca

SEQ ID NO: 269132 - RNA, 19 nt, Artificial Sequence
  Description of Artificial Sequence: Synthetic oligonucleotide
  Sense strand starting at position 1693 of SEQ ID NO: 3459
guguauguccguucaucua

SEQ ID NO: 269133 - RNA, 19 nt, Artificial Sequence
  Description of Artificial Sequence: Synthetic oligonucleotide
  Antisense strand to SEQ ID NO: 269132
uagaugaacggacauacac

SEQ ID NO: 269134 - RNA, 19 nt, Artificial Sequence
  Description of Artificial Sequence: Synthetic oligonucleotide
  Sense strand starting at position 1722 of SEQ ID NO: 3459
uuccgaaaucaccgaguca

SEQ ID NO: 269135 - RNA, 19 nt, Artificial Sequence
  Description of Artificial Sequence: Synthetic oligonucleotide
  Antisense strand to SEQ ID NO: 269134
ugacucggugauuucggaa

SEQ ID NO: 269136 - RNA, 19 nt, Artificial Sequence
  Description of Artificial Sequence: Synthetic oligonucleotide
  Sense strand starting at position 1723 of SEQ ID NO: 3459
uccgaaaucaccgagucau

SEQ ID NO: 269137 - RNA, 19 nt, Artificial Sequence
  Description of Artificial Sequence: Synthetic oligonucleotide
  Antisense strand to SEQ ID NO: 269136
augacucggugauuucgga

SEQ ID NO: 269138 - RNA, 19 nt, Artificial Sequence
  Description of Artificial Sequence: Synthetic oligonucleotide
  Sense strand starting at position 3218 of SEQ ID NO: 3459
cuuuguaacaucgagguau

SEQ ID NO: 269139 - RNA, 19 nt, Artificial Sequence
  Description of Artificial Sequence: Synthetic oligonucleotide
  Antisense strand to SEQ ID NO: 269138
auaccucgauguuacaaag

SEQ ID NO: 269140 - RNA, 19 nt, Artificial Sequence
  Description of Artificial Sequence: Synthetic oligonucleotide
  Sense strand starting at position 3222 of SEQ ID NO: 3459
guaacaucgagguauccug

SEQ ID NO: 269141 - RNA, 19 nt, Artificial Sequence
  Description of Artificial Sequence: Synthetic oligonucleotide
  Antisense strand to SEQ ID NO: 269140
caggauaccucgauguuac

SEQ ID NO: 269142 - RNA, 19 nt, Artificial Sequence
  Description of Artificial Sequence: Synthetic oligonucleotide
  Sense strand starting at position 3229 of SEQ ID NO: 3459
cgagguauccuguaacuag

SEQ ID NO: 269143 - RNA, 19 nt, Artificial Sequence
  Description of Artificial Sequence: Synthetic oligonucleotide
  Antisense strand to SEQ ID NO: 269142
cuaguuacaggauaccucg

SEQ ID NO: 269144 - RNA, 19 nt, Artificial Sequence
  Description of Artificial Sequence: Synthetic oligonucleotide
  Sense strand starting at position 3349 of SEQ ID NO: 3459
ucugcuuuaccggauggaa

SEQ ID NO: 269145 - RNA, 19 nt, Artificial Sequence
  Description of Artificial Sequence: Synthetic oligonucleotide
  Antisense strand to SEQ ID NO: 269144
uuccauccgguaaagcaga

SEQ ID NO: 269146 - RNA, 19 nt, Artificial Sequence
  Description of Artificial Sequence: Synthetic oligonucleotide
  Sense strand starting at position 3351 of SEQ ID NO: 3459
ugcuuuaccggauggaacu

SEQ ID NO: 269147 - RNA, 19 nt, Artificial Sequence
  Description of Artificial Sequence: Synthetic oligonucleotide
  Antisense strand to SEQ ID NO: 269146
aguuccauccgguaaagca

SEQ ID NO: 269148 - RNA, 19 nt, Artificial Sequence
  Description of Artificial Sequence: Synthetic oligonucleotide
  Sense strand starting at position 3363 of SEQ ID NO: 3459
uggaacucaucaguaacua

SEQ ID NO: 269149 - RNA, 19 nt, Artificial Sequence
  Description of Artificial Sequence: Synthetic oligonucleotide
  Antisense strand to SEQ ID NO: 269148
uaguuacugaugaguucca

SEQ ID NO: 269150 - RNA, 19 nt, Artificial Sequence
  Description of Artificial Sequence: Synthetic oligonucleotide
  Sense strand starting at position 3371 of SEQ ID NO: 3459
aucaguaacuagguaucuu

SEQ ID NO: 269151 - RNA, 19 nt, Artificial Sequence
  Description of Artificial Sequence: Synthetic oligonucleotide
  Antisense strand to SEQ ID NO: 269150
aagauaccuaguuacugau

SEQ ID NO: 269152 - RNA, 19 nt, Artificial Sequence
  Description of Artificial Sequence: Synthetic oligonucleotide
  Sense strand starting at position 3375 of SEQ ID NO: 3459
guaacuagguaucuuuaag

SEQ ID NO: 269153 - RNA, 19 nt, Artificial Sequence
  Description of Artificial Sequence: Synthetic oligonucleotide
  Antisense strand to SEQ ID NO: 269152
cuuaaagauaccuaguuac

SEQ ID NO: 269154 - RNA, 19 nt, Artificial Sequence
  Description of Artificial Sequence: Synthetic oligonucleotide
  Sense strand starting at position 3404 of SEQ ID NO: 3459
uggcgcgcucugagaguua

SEQ ID NO: 269155 - RNA, 19 nt, Artificial Sequence
  Description of Artificial Sequence: Synthetic oligonucleotide
  Antisense strand to SEQ ID NO: 269154
uaacucucagagcgcgcca

SEQ ID NO: 269156 - RNA, 19 nt, Artificial Sequence
  Description of Artificial Sequence: Synthetic oligonucleotide
  Sense strand starting at position 3409 of SEQ ID NO: 3459
cgcucugagaguuacggaa

SEQ ID NO: 269157 - RNA, 19 nt, Artificial Sequence
  Description of Artificial Sequence: Synthetic oligonucleotide
  Antisense strand to SEQ ID NO: 269156
uuccguaacucucagagcg

SEQ ID NO: 269158 - RNA, 19 nt, Artificial Sequence
  Description of Artificial Sequence: Synthetic oligonucleotide
  Sense strand starting at position 3451 of SEQ ID NO: 3459
acgucuaaacagugaauac

SEQ ID NO: 269159 - RNA, 19 nt, Artificial Sequence
  Description of Artificial Sequence: Synthetic oligonucleotide
  Antisense strand to SEQ ID NO: 269158
guauucacuguuuagacgu

SEQ ID NO: 269160 - RNA, 19 nt, Artificial Sequence
  Description of Artificial Sequence: Synthetic oligonucleotide
  Sense strand starting at position 3896 of SEQ ID NO: 3459
uacaaagcccugugagguu

SEQ ID NO: 269161 - RNA, 19 nt, Artificial Sequence
  Description of Artificial Sequence: Synthetic oligonucleotide
  Antisense strand to SEQ ID NO: 269160
aaccucacagggcuuugua

SEQ ID NO: 269162 - RNA, 19 nt, Artificial Sequence
  Description of Artificial Sequence: Synthetic oligonucleotide
  Sense strand starting at position 23 of SEQ ID NO: 3458
gcaagaacaucacucuagu

SEQ ID NO: 269163 - RNA, 19 nt, Artificial Sequence
  Description of Artificial Sequence: Synthetic oligonucleotide
  Antisense strand to SEQ ID NO: 269162
acuagagugauguucuugc

SEQ ID NO: 269164 - RNA, 19 nt, Artificial Sequence
  Description of Artificial Sequence: Synthetic oligonucleotide
  Sense strand starting at position 262 of SEQ ID NO: 3458
gggugacgggccugucaua

SEQ ID NO: 269165 - RNA, 19 nt, Artificial Sequence
  Description of Artificial Sequence: Synthetic oligonucleotide
  Antisense strand to SEQ ID NO: 269164
uaugacaggcccgucaccc

SEQ ID NO: 269166 - RNA, 19 nt, Artificial Sequence
  Description of Artificial Sequence: Synthetic oligonucleotide
  Sense strand starting at position 321 of SEQ ID NO: 3458
uauugugacugcuuggcau

SEQ ID NO: 269167 - RNA, 19 nt, Artificial Sequence
  Description of Artificial Sequence: Synthetic oligonucleotide
  Antisense strand to SEQ ID NO: 269166
augccaagcagucacaaua

SEQ ID NO: 269168 - RNA, 19 nt, Artificial Sequence
  Description of Artificial Sequence: Synthetic oligonucleotide
  Sense strand starting at position 348 of SEQ ID NO: 3458
uccgaaguugccuaaauca

SEQ ID NO: 269169 - RNA, 19 nt, Artificial Sequence
  Description of Artificial Sequence: Synthetic oligonucleotide
  Antisense strand to SEQ ID NO: 269168
ugauuuaggcaacuucgga

SEQ ID NO: 269170 - RNA, 19 nt, Artificial Sequence
  Description of Artificial Sequence: Synthetic oligonucleotide
  Sense strand starting at position 386 of SEQ ID NO: 3458
gaguaacaacgcuagcaaa

SEQ ID NO: 269171 - RNA, 19 nt, Artificial Sequence
  Description of Artificial Sequence: Synthetic oligonucleotide
  Antisense strand to SEQ ID NO: 269170
uuugcuagcguuguuacuc

SEQ ID NO: 269172 - RNA, 19 nt, Artificial Sequence
  Description of Artificial Sequence: Synthetic oligonucleotide
  Sense strand starting at position 413 of SEQ ID NO: 3458
uguuacagacaugguuaua

SEQ ID NO: 269173 - RNA, 19 nt, Artificial Sequence
  Description of Artificial Sequence: Synthetic oligonucleotide
  Antisense strand to SEQ ID NO: 269172
uauaaccaugucuguaaca

SEQ ID NO: 269174 - RNA, 19 nt, Artificial Sequence
  Description of Artificial Sequence: Synthetic oligonucleotide
  Sense strand starting at position 495 of SEQ ID NO: 3458
ugggucauuugaggccuua

SEQ ID NO: 269175 - RNA, 19 nt, Artificial Sequence
  Description of Artificial Sequence: Synthetic oligonucleotide
  Antisense strand to SEQ ID NO: 269174
uaaggccucaaaugaccca

SEQ ID NO: 269176 - RNA, 19 nt, Artificial Sequence
  Description of Artificial Sequence: Synthetic oligonucleotide
  Sense strand starting at position 538 of SEQ ID NO: 3458
aggccuaaacuuggaaagu

SEQ ID NO: 269177 - RNA, 19 nt, Artificial Sequence
  Description of Artificial Sequence: Synthetic oligonucleotide
  Antisense strand to SEQ ID NO: 269176
acuuuccaaguuuaggccu

SEQ ID NO: 269178 - RNA, 19 nt, Artificial Sequence
  Description of Artificial Sequence: Synthetic oligonucleotide
  Sense strand starting at position 539 of SEQ ID NO: 3458
ggccuaaacuuggaaaguu

SEQ ID NO: 269179 - RNA, 19 nt, Artificial Sequence
  Description of Artificial Sequence: Synthetic oligonucleotide
  Antisense strand to SEQ ID NO: 269178
aacuuuccaaguuuaggcc

SEQ ID NO: 269180 - RNA, 19 nt, Artificial Sequence
  Description of Artificial Sequence: Synthetic oligonucleotide
  Sense strand starting at position 609 of SEQ ID NO: 3458
ggcguuacuuaaguaacuu

SEQ ID NO: 269181 - RNA, 19 nt, Artificial Sequence
  Description of Artificial Sequence: Synthetic oligonucleotide
  Antisense strand to SEQ ID NO: 269180
aaguuacuuaaguaacgcc

SEQ ID NO: 269182 - RNA, 19 nt, Artificial Sequence
  Description of Artificial Sequence: Synthetic oligonucleotide
  Sense strand starting at position 707 of SEQ ID NO: 3458
acaagaggauaauguuaga

SEQ ID NO: 269183 - RNA, 19 nt, Artificial Sequence
  Description of Artificial Sequence: Synthetic oligonucleotide
  Antisense strand to SEQ ID NO: 269182
ucuaacauuauccucuugu

SEQ ID NO: 269184 - RNA, 19 nt, Artificial Sequence
  Description of Artificial Sequence: Synthetic oligonucleotide
  Sense strand starting at position 710 of SEQ ID NO: 3458
agaggauaauguuagaaga

SEQ ID NO: 269185 - RNA, 19 nt, Artificial Sequence
  Description of Artificial Sequence: Synthetic oligonucleotide
  Antisense strand to SEQ ID NO: 269184
ucuucuaacauuauccucu

SEQ ID NO: 269186 - RNA, 19 nt, Artificial Sequence
  Description of Artificial Sequence: Synthetic oligonucleotide
  Sense strand starting at position 712 of SEQ ID NO: 3458
aggauaauguuagaagaga

SEQ ID NO: 269187 - RNA, 19 nt, Artificial Sequence
  Description of Artificial Sequence: Synthetic oligonucleotide
  Antisense strand to SEQ ID NO: 269186
ucucuucuaacauuauccu

SEQ ID NO: 269188 - RNA, 19 nt, Artificial Sequence
  Description of Artificial Sequence: Synthetic oligonucleotide
  Sense strand starting at position 836 of SEQ ID NO: 3458
agacauuccugagagguuc

SEQ ID NO: 269189 - RNA, 19 nt, Artificial Sequence
  Description of Artificial Sequence: Synthetic oligonucleotide
  Antisense strand to SEQ ID NO: 269188
gaaccucucaggaaugucu

SEQ ID NO: 269190 - RNA, 19 nt, Artificial Sequence
  Description of Artificial Sequence: Synthetic oligonucleotide
  Sense strand starting at position 936 of SEQ ID NO: 3458
cuguguauguccguucauc

SEQ ID NO: 269191 - RNA, 19 nt, Artificial Sequence
  Description of Artificial Sequence: Synthetic oligonucleotide
  Antisense strand to SEQ ID NO: 269190
gaugaacggacauacacag

SEQ ID NO: 269192 - RNA, 19 nt, Artificial Sequence
  Description of Artificial Sequence: Synthetic oligonucleotide
  Sense strand starting at position 937 of SEQ ID NO: 3458
uguguauguccguucaucu

SEQ ID NO: 269193 - RNA, 19 nt, Artificial Sequence
  Description of Artificial Sequence: Synthetic oligonucleotide
  Antisense strand to SEQ ID NO: 269192
agaugaacggacauacaca

SEQ ID NO: 269194 - RNA, 19 nt, Artificial Sequence
  Description of Artificial Sequence: Synthetic oligonucleotide
  Sense strand starting at position 938 of SEQ ID NO: 3458
guguauguccguucaucua

SEQ ID NO: 269195 - RNA, 19 nt, Artificial Sequence
  Description of Artificial Sequence: Synthetic oligonucleotide
  Antisense strand to SEQ ID NO: 269194
uagaugaacggacauacac

SEQ ID NO: 269196 - RNA, 19 nt, Artificial Sequence
  Description of Artificial Sequence: Synthetic oligonucleotide
  Sense strand starting at position 967 of SEQ ID NO: 3458
uuccgaaaucaccgaguca

SEQ ID NO: 269197 - RNA, 19 nt, Artificial Sequence
  Description of Artificial Sequence: Synthetic oligonucleotide
  Antisense strand to SEQ ID NO: 269196
ugacucggugauuucggaa

SEQ ID NO: 269198 - RNA, 19 nt, Artificial Sequence
  Description of Artificial Sequence: Synthetic oligonucleotide
  Sense strand starting at position 968 of SEQ ID NO: 3458
uccgaaaucaccgagucau

SEQ ID NO: 269199 - RNA, 19 nt, Artificial Sequence
  Description of Artificial Sequence: Synthetic oligonucleotide
  Antisense strand to SEQ ID NO: 269198
augacucggugauuucgga

SEQ ID NO: 269200 - RNA, 19 nt, Artificial Sequence
  Description of Artificial Sequence: Synthetic oligonucleotide
  Sense strand starting at position 1010 of SEQ ID NO: 3458
cuaagucauggccgagcau

SEQ ID NO: 269201 - RNA, 19 nt, Artificial Sequence
  Description of Artificial Sequence: Synthetic oligonucleotide
  Antisense strand to SEQ ID NO: 269200
augcucggccaugacuuag

SEQ ID NO: 269202 - RNA, 19 nt, Artificial Sequence
  Description of Artificial Sequence: Synthetic oligonucleotide
  Sense strand starting at position 2454 of SEQ ID NO: 3458
aagccucgucuuuguaaca

SEQ ID NO: 269203 - RNA, 19 nt, Artificial Sequence
  Description of Artificial Sequence: Synthetic oligonucleotide
  Antisense strand to SEQ ID NO: 269202
uguuacaaagacgaggcuu

SEQ ID NO: 269204 - RNA, 19 nt, Artificial Sequence
  Description of Artificial Sequence: Synthetic oligonucleotide
  Sense strand starting at position 2455 of SEQ ID NO: 3458
agccucgucuuuguaacau

SEQ ID NO: 269205 - RNA, 19 nt, Artificial Sequence
  Description of Artificial Sequence: Synthetic oligonucleotide
  Antisense strand to SEQ ID NO: 269204
auguuacaaagacgaggcu

SEQ ID NO: 269206 - RNA, 19 nt, Artificial Sequence
  Description of Artificial Sequence: Synthetic oligonucleotide
  Sense strand starting at position 2463 of SEQ ID NO: 3458
cuuuguaacaucgagguau

SEQ ID NO: 269207 - RNA, 19 nt, Artificial Sequence
  Description of Artificial Sequence: Synthetic oligonucleotide
  Antisense strand to SEQ ID NO: 269206
auaccucgauguuacaaag

SEQ ID NO: 269208 - RNA, 19 nt, Artificial Sequence
  Description of Artificial Sequence: Synthetic oligonucleotide
  Sense strand starting at position 2467 of SEQ ID NO: 3458
guaacaucgagguauccug

SEQ ID NO: 269209 - RNA, 19 nt, Artificial Sequence
  Description of Artificial Sequence: Synthetic oligonucleotide
  Antisense strand to SEQ ID NO: 269208
caggauaccucgauguuac

SEQ ID NO: 269210 - RNA, 19 nt, Artificial Sequence
  Description of Artificial Sequence: Synthetic oligonucleotide
  Sense strand starting at position 2474 of SEQ ID NO: 3458
cgagguauccuguaacuag

SEQ ID NO: 269211 - RNA, 19 nt, Artificial Sequence
  Description of Artificial Sequence: Synthetic oligonucleotide
  Antisense strand to SEQ ID NO: 269210
cuaguuacaggauaccucg

SEQ ID NO: 269212 - RNA, 19 nt, Artificial Sequence
  Description of Artificial Sequence: Synthetic oligonucleotide
  Sense strand starting at position 2594 of SEQ ID NO: 3458
ucugcuuuaccggauggaa

SEQ ID NO: 269213 - RNA, 19 nt, Artificial Sequence
  Description of Artificial Sequence: Synthetic oligonucleotide
  Antisense strand to SEQ ID NO: 269212
uuccauccgguaaagcaga

SEQ ID NO: 269214 - RNA, 19 nt, Artificial Sequence
  Description of Artificial Sequence: Synthetic oligonucleotide
  Sense strand starting at position 2596 of SEQ ID NO: 3458
ugcuuuaccggauggaacu

SEQ ID NO: 269215 - RNA, 19 nt, Artificial Sequence
  Description of Artificial Sequence: Synthetic oligonucleotide
  Antisense strand to SEQ ID NO: 269214
aguuccauccgguaaagca

SEQ ID NO: 269216 - RNA, 19 nt, Artificial Sequence
  Description of Artificial Sequence: Synthetic oligonucleotide
  Sense strand starting at position 2608 of SEQ ID NO: 3458
uggaacucaucaguaacua

SEQ ID NO: 269217 - RNA, 19 nt, Artificial Sequence
  Description of Artificial Sequence: Synthetic oligonucleotide
  Antisense strand to SEQ ID NO: 269216
uaguuacugaugaguucca

SEQ ID NO: 269218 - RNA, 19 nt, Artificial Sequence
  Description of Artificial Sequence: Synthetic oligonucleotide
  Sense strand starting at position 2616 of SEQ ID NO: 3458
aucaguaacuagguaucuu

SEQ ID NO: 269219 - RNA, 19 nt, Artificial Sequence
  Description of Artificial Sequence: Synthetic oligonucleotide
  Antisense strand to SEQ ID NO: 269218
aagauaccuaguuacugau

SEQ ID NO: 269220 - RNA, 19 nt, Artificial Sequence
  Description of Artificial Sequence: Synthetic oligonucleotide
  Sense strand starting at position 2620 of SEQ ID NO: 3458
guaacuagguaucuuuaag

SEQ ID NO: 269221 - RNA, 19 nt, Artificial Sequence
  Description of Artificial Sequence: Synthetic oligonucleotide
  Antisense strand to SEQ ID NO: 269220
cuuaaagauaccuaguuac

SEQ ID NO: 269222 - RNA, 19 nt, Artificial Sequence
  Description of Artificial Sequence: Synthetic oligonucleotide
  Sense strand starting at position 2649 of SEQ ID NO: 3458
uggcgcgcucugagaguua

SEQ ID NO: 269223 - RNA, 19 nt, Artificial Sequence
  Description of Artificial Sequence: Synthetic oligonucleotide
  Antisense strand to SEQ ID NO: 269222
uaacucucagagcgcgcca

SEQ ID NO: 269224 - RNA, 19 nt, Artificial Sequence
  Description of Artificial Sequence: Synthetic oligonucleotide
  Sense strand starting at position 2654 of SEQ ID NO: 3458
cgcucugagaguuacggaa

SEQ ID NO: 269225 - RNA, 19 nt, Artificial Sequence
  Description of Artificial Sequence: Synthetic oligonucleotide
  Antisense strand to SEQ ID NO: 269224
uuccguaacucucagagcg

SEQ ID NO: 269226 - RNA, 19 nt, Artificial Sequence
  Description of Artificial Sequence: Synthetic oligonucleotide
  Sense strand starting at position 2696 of SEQ ID NO: 3458
acgucuaaacagugaauac

SEQ ID NO: 269227 - RNA, 19 nt, Artificial Sequence
  Description of Artificial Sequence: Synthetic oligonucleotide
  Antisense strand to SEQ ID NO: 269226
guauucacuguuuagacgu

SEQ ID NO: 269228 - RNA, 19 nt, Artificial Sequence
  Description of Artificial Sequence: Synthetic oligonucleotide
  Sense strand starting at position 3141 of SEQ ID NO: 3458
uacaaagcccugugagguu

SEQ ID NO: 269229 - RNA, 19 nt, Artificial Sequence
  Description of Artificial Sequence: Synthetic oligonucleotide
  Antisense strand to SEQ ID NO: 269228
aaccucacagggcuuugua

SEQ ID NO: 269230 - RNA, 19 nt, Artificial Sequence
  Description of Artificial Sequence: Synthetic oligonucleotide
  Sense strand starting at position 3314 of SEQ ID NO: 3458
agaagugagucuucuuccu

SEQ ID NO: 269231 - RNA, 19 nt, Artificial Sequence
  Description of Artificial Sequence: Synthetic oligonucleotide
  Antisense strand to SEQ ID NO: 269230
aggaagaagacucacuucu

SEQ ID NO: 269232 - RNA, 19 nt, Artificial Sequence
  Description of Artificial Sequence: Synthetic oligonucleotide
  Sense strand starting at position 3322 of SEQ ID NO: 3458
gucuucuuccuaugugaag

SEQ ID NO: 269233 - RNA, 19 nt, Artificial Sequence
  Description of Artificial Sequence: Synthetic oligonucleotide
  Antisense strand to SEQ ID NO: 269232
cuucacauaggaagaagac

SEQ ID NO: 269234 - RNA, 19 nt, Artificial Sequence
  Description of Artificial Sequence: Synthetic oligonucleotide
  Sense strand starting at position 3461 of SEQ ID NO: 3458
cuuaauucuugaugagauu

SEQ ID NO: 269235 - RNA, 19 nt, Artificial Sequence
  Description of Artificial Sequence: Synthetic oligonucleotide
  Antisense strand to SEQ ID NO: 269234
aaucucaucaagaauuaag

SEQ ID NO: 269236 - RNA, 19 nt, Artificial Sequence
  Description of Artificial Sequence: Synthetic oligonucleotide
  Sense strand starting at position 3491 of SEQ ID NO: 3458
cccaucagagaacguuaua

SEQ ID NO: 269237 - RNA, 19 nt, Artificial Sequence
  Description of Artificial Sequence: Synthetic oligonucleotide
  Antisense strand to SEQ ID NO: 269236
uauaacguucucugauggg

SEQ ID NO: 269238 - RNA, 19 nt, Artificial Sequence
  Description of Artificial Sequence: Synthetic oligonucleotide
  Sense strand starting at position 3494 of SEQ ID NO: 3458
aucagagaacguuauagcu

SEQ ID NO: 269239 - RNA, 19 nt, Artificial Sequence
  Description of Artificial Sequence: Synthetic oligonucleotide
  Antisense strand to SEQ ID NO: 269238
agcuauaacguucucugau

SEQ ID NO: 269240 - RNA, 19 nt, Artificial Sequence
  Description of Artificial Sequence: Synthetic oligonucleotide
  Sense strand starting at position 3819 of SEQ ID NO: 3458
cugacuguugcacauacaa

SEQ ID NO: 269241 - RNA, 19 nt, Artificial Sequence
  Description of Artificial Sequence: Synthetic oligonucleotide
  Antisense strand to SEQ ID NO: 269240
uuguaugugcaacagucag

SEQ ID NO: 269242 - RNA, 19 nt, Artificial Sequence
  Description of Artificial Sequence: Synthetic oligonucleotide
  Sense strand starting at position 363 of SEQ ID NO: 3460
guaaacauauccguuguca

SEQ ID NO: 269243 - RNA, 19 nt, Artificial Sequence
  Description of Artificial Sequence: Synthetic oligonucleotide
  Antisense strand to SEQ ID NO: 269242
ugacaacggauauguuuac

SEQ ID NO: 269244 - RNA, 19 nt, Artificial Sequence
  Description of Artificial Sequence: Synthetic oligonucleotide
  Sense strand starting at position 717 of SEQ ID NO: 3460
aaagcuaggcucugucuua

SEQ ID NO: 269245 - RNA, 19 nt, Artificial Sequence
  Description of Artificial Sequence: Synthetic oligonucleotide
  Antisense strand to SEQ ID NO: 269244
uaagacagagccuagcuuu

SEQ ID NO: 269246 - RNA, 19 nt, Artificial Sequence
  Description of Artificial Sequence: Synthetic oligonucleotide
  Sense strand starting at position 718 of SEQ ID NO: 3460
aagcuaggcucugucuuaa

SEQ ID NO: 269247 - RNA, 19 nt, Artificial Sequence
  Description of Artificial Sequence: Synthetic oligonucleotide
  Antisense strand to SEQ ID NO: 269246
uuaagacagagccuagcuu

SEQ ID NO: 269248 - RNA, 19 nt, Artificial Sequence
  Description of Artificial Sequence: Synthetic oligonucleotide
  Sense strand starting at position 788 of SEQ ID NO: 3460
cuuagaguuuagcuaccaa

SEQ ID NO: 269249 - RNA, 19 nt, Artificial Sequence
  Description of Artificial Sequence: Synthetic oligonucleotide
  Antisense strand to SEQ ID NO: 269248
uugguagcuaaacucuaag

SEQ ID NO: 269250 - RNA, 19 nt, Artificial Sequence
  Description of Artificial Sequence: Synthetic oligonucleotide
  Sense strand starting at position 847 of SEQ ID NO: 3460
ccugauauaugguuauaug

SEQ ID NO: 269251 - RNA, 19 nt, Artificial Sequence
  Description of Artificial Sequence: Synthetic oligonucleotide
  Antisense strand to SEQ ID NO: 269250
cauauaaccauauaucagg

SEQ ID NO: 269252 - RNA, 19 nt, Artificial Sequence
  Description of Artificial Sequence: Synthetic oligonucleotide
  Sense strand starting at position 1078 of SEQ ID NO: 3460
gaagguacggcucaucagu

SEQ ID NO: 269253 - RNA, 19 nt, Artificial Sequence
  Description of Artificial Sequence: Synthetic oligonucleotide
  Antisense strand to SEQ ID NO: 269252
acugaugagccguaccuuc

SEQ ID NO: 269254 - RNA, 19 nt, Artificial Sequence
  Description of Artificial Sequence: Synthetic oligonucleotide
  Sense strand starting at position 1087 of SEQ ID NO: 3460
gcucaucaguccucauaag

SEQ ID NO: 269255 - RNA, 19 nt, Artificial Sequence
  Description of Artificial Sequence: Synthetic oligonucleotide
  Antisense strand to SEQ ID NO: 269254
cuuaugaggacugaugagc

SEQ ID NO: 269256 - RNA, 19 nt, Artificial Sequence
  Description of Artificial Sequence: Synthetic oligonucleotide
  Sense strand starting at position 1118 of SEQ ID NO: 3460
ucuacauuaugguuacuau

SEQ ID NO: 269257 - RNA, 19 nt, Artificial Sequence
  Description of Artificial Sequence: Synthetic oligonucleotide
  Antisense strand to SEQ ID NO: 269256
auaguaaccauaauguaga

SEQ ID NO: 269258 - RNA, 19 nt, Artificial Sequence
  Description of Artificial Sequence: Synthetic oligonucleotide
  Sense strand starting at position 1119 of SEQ ID NO: 3460
cuacauuaugguuacuauu

SEQ ID NO: 269259 - RNA, 19 nt, Artificial Sequence
  Description of Artificial Sequence: Synthetic oligonucleotide
  Antisense strand to SEQ ID NO: 269258
aauaguaaccauaauguag

SEQ ID NO: 269260 - RNA, 19 nt, Artificial Sequence
  Description of Artificial Sequence: Synthetic oligonucleotide
  Sense strand starting at position 1128 of SEQ ID NO: 3460
gguuacuauuucuaauggu

SEQ ID NO: 269261 - RNA, 19 nt, Artificial Sequence
  Description of Artificial Sequence: Synthetic oligonucleotide
  Antisense strand to SEQ ID NO: 269260
accauuagaaauaguaacc

SEQ ID NO: 269262 - RNA, 19 nt, Artificial Sequence
  Description of Artificial Sequence: Synthetic oligonucleotide
  Sense strand starting at position 1143 of SEQ ID NO: 3460
ugguaaauuaaucgacgga

SEQ ID NO: 269263 - RNA, 19 nt, Artificial Sequence
  Description of Artificial Sequence: Synthetic oligonucleotide
  Antisense strand to SEQ ID NO: 269262
uccgucgauuaauuuacca

SEQ ID NO: 269264 - RNA, 19 nt, Artificial Sequence
  Description of Artificial Sequence: Synthetic oligonucleotide
  Sense strand starting at position 1147 of SEQ ID NO: 3460
aaauuaaucgacggaaccu

SEQ ID NO: 269265 - RNA, 19 nt, Artificial Sequence
  Description of Artificial Sequence: Synthetic oligonucleotide
  Antisense strand to SEQ ID NO: 269264
agguuccgucgauuaauuu

SEQ ID NO: 269266 - RNA, 19 nt, Artificial Sequence
  Description of Artificial Sequence: Synthetic oligonucleotide
  Sense strand starting at position 1213 of SEQ ID NO: 3460
ccaaaucaugcgugcagaa

SEQ ID NO: 269267 - RNA, 19 nt, Artificial Sequence
  Description of Artificial Sequence: Synthetic oligonucleotide
  Antisense strand to SEQ ID NO: 269266
uucugcacgcaugauuugg

SEQ ID NO: 269268 - RNA, 19 nt, Artificial Sequence
  Description of Artificial Sequence: Synthetic oligonucleotide
  Sense strand starting at position 1215 of SEQ ID NO: 3460
aaaucaugcgugcagaauu

SEQ ID NO: 269269 - RNA, 19 nt, Artificial Sequence
  Description of Artificial Sequence: Synthetic oligonucleotide
  Antisense strand to SEQ ID NO: 269268
aauucugcacgcaugauuu

SEQ ID NO: 269270 - RNA, 19 nt, Artificial Sequence
  Description of Artificial Sequence: Synthetic oligonucleotide
  Sense strand starting at position 1312 of SEQ ID NO: 3460
ccagucuucuggcugagag

SEQ ID NO: 269271 - RNA, 19 nt, Artificial Sequence
  Description of Artificial Sequence: Synthetic oligonucleotide
  Antisense strand to SEQ ID NO: 269270
cucucagccagaagacugg

SEQ ID NO: 269272 - RNA, 19 nt, Artificial Sequence
  Description of Artificial Sequence: Synthetic oligonucleotide
  Sense strand starting at position 1313 of SEQ ID NO: 3460
cagucuucuggcugagagu

SEQ ID NO: 269273 - RNA, 19 nt, Artificial Sequence
  Description of Artificial Sequence: Synthetic oligonucleotide
  Antisense strand to SEQ ID NO: 269272
acucucagccagaagacug

SEQ ID NO: 269274 - RNA, 19 nt, Artificial Sequence
  Description of Artificial Sequence: Synthetic oligonucleotide
  Sense strand starting at position 1314 of SEQ ID NO: 3460
agucuucuggcugagaguu

SEQ ID NO: 269275 - RNA, 19 nt, Artificial Sequence
  Description of Artificial Sequence: Synthetic oligonucleotide
  Antisense strand to SEQ ID NO: 269274
aacucucagccagaagacu

SEQ ID NO: 269276 - RNA, 19 nt, Artificial Sequence
  Description of Artificial Sequence: Synthetic oligonucleotide
  Sense strand starting at position 2303 of SEQ ID NO: 3460
cugacuucccuccgggaga

SEQ ID NO: 269277 - RNA, 19 nt, Artificial Sequence
  Description of Artificial Sequence: Synthetic oligonucleotide
  Antisense strand to SEQ ID NO: 269276
ucucccggagggaagucag

SEQ ID NO: 269278 - RNA, 19 nt, Artificial Sequence
  Description of Artificial Sequence: Synthetic oligonucleotide
  Sense strand starting at position 2413 of SEQ ID NO: 3460
ucagucugugcggagagaa

SEQ ID NO: 269279 - RNA, 19 nt, Artificial Sequence
  Description of Artificial Sequence: Synthetic oligonucleotide
  Antisense strand to SEQ ID NO: 269278
uucucuccgcacagacuga

SEQ ID NO: 269280 - RNA, 19 nt, Artificial Sequence
  Description of Artificial Sequence: Synthetic oligonucleotide
  Sense strand starting at position 2485 of SEQ ID NO: 3460
gggauuucuuccucgccuu

SEQ ID NO: 269281 - RNA, 19 nt, Artificial Sequence
  Description of Artificial Sequence: Synthetic oligonucleotide
  Antisense strand to SEQ ID NO: 269280
aaggcgaggaagaaauccc

SEQ ID NO: 269282 - RNA, 19 nt, Artificial Sequence
  Description of Artificial Sequence: Synthetic oligonucleotide
  Sense strand starting at position 2486 of SEQ ID NO: 3460
ggauuucuuccucgccuua

SEQ ID NO: 269283 - RNA, 19 nt, Artificial Sequence
  Description of Artificial Sequence: Synthetic oligonucleotide
  Antisense strand to SEQ ID NO: 269282
uaaggcgaggaagaaaucc

SEQ ID NO: 269284 - RNA, 19 nt, Artificial Sequence
  Description of Artificial Sequence: Synthetic oligonucleotide
  Sense strand starting at position 2533 of SEQ ID NO: 3460
aucacagaaugcguuuaau

SEQ ID NO: 269285 - RNA, 19 nt, Artificial Sequence
  Description of Artificial Sequence: Synthetic oligonucleotide
  Antisense strand to SEQ ID NO: 269284
auuaaacgcauucugugau

SEQ ID NO: 269286 - RNA, 19 nt, Artificial Sequence
  Description of Artificial Sequence: Synthetic oligonucleotide
  Sense strand starting at position 2536 of SEQ ID NO: 3460
acagaaugcguuuaauuga

SEQ ID NO: 269287 - RNA, 19 nt, Artificial Sequence
  Description of Artificial Sequence: Synthetic oligonucleotide
  Antisense strand to SEQ ID NO: 269286
ucaauuaaacgcauucugu

SEQ ID NO: 269288 - RNA, 19 nt, Artificial Sequence
  Description of Artificial Sequence: Synthetic oligonucleotide
  Sense strand starting at position 2541 of SEQ ID NO: 3460
augcguuuaauugagccaa

SEQ ID NO: 269289 - RNA, 19 nt, Artificial Sequence
  Description of Artificial Sequence: Synthetic oligonucleotide
  Antisense strand to SEQ ID NO: 269288
uuggcucaauuaaacgcau

SEQ ID NO: 269290 - RNA, 19 nt, Artificial Sequence
  Description of Artificial Sequence: Synthetic oligonucleotide
  Sense strand starting at position 2723 of SEQ ID NO: 3460
agguuauucgugugagaau

SEQ ID NO: 269291 - RNA, 19 nt, Artificial Sequence
  Description of Artificial Sequence: Synthetic oligonucleotide
  Antisense strand to SEQ ID NO: 269290
auucucacacgaauaaccu

SEQ ID NO: 269292 - RNA, 19 nt, Artificial Sequence
  Description of Artificial Sequence: Synthetic oligonucleotide
  Sense strand starting at position 2755 of SEQ ID NO: 3460
gcguguugagcucauaaca

SEQ ID NO: 269293 - RNA, 19 nt, Artificial Sequence
  Description of Artificial Sequence: Synthetic oligonucleotide
  Antisense strand to SEQ ID NO: 269292
uguuaugagcucaacacgc

SEQ ID NO: 269294 - RNA, 19 nt, Artificial Sequence
  Description of Artificial Sequence: Synthetic oligonucleotide
  Sense strand starting at position 2804 of SEQ ID NO: 3460
ugaguagucgcuguuguua

SEQ ID NO: 269295 - RNA, 19 nt, Artificial Sequence
  Description of Artificial Sequence: Synthetic oligonucleotide
  Antisense strand to SEQ ID NO: 269294
uaacaacagcgacuacuca

SEQ ID NO: 269296 - RNA, 19 nt, Artificial Sequence
  Description of Artificial Sequence: Synthetic oligonucleotide
  Sense strand starting at position 2807 of SEQ ID NO: 3460
guagucgcuguuguuaaua

SEQ ID NO: 269297 - RNA, 19 nt, Artificial Sequence
  Description of Artificial Sequence: Synthetic oligonucleotide
  Antisense strand to SEQ ID NO: 269296
uauuaacaacagcgacuac

SEQ ID NO: 269298 - RNA, 19 nt, Artificial Sequence
  Description of Artificial Sequence: Synthetic oligonucleotide
  Sense strand starting at position 2924 of SEQ ID NO: 3460
agguauuuguuguaaugaa

SEQ ID NO: 269299 - RNA, 19 nt, Artificial Sequence
  Description of Artificial Sequence: Synthetic oligonucleotide
  Antisense strand to SEQ ID NO: 269298
uucauuacaacaaauaccu

SEQ ID NO: 269300 - RNA, 19 nt, Artificial Sequence
  Description of Artificial Sequence: Synthetic oligonucleotide
  Sense strand starting at position 2987 of SEQ ID NO: 3460
agggauuaguugcuauuaa

SEQ ID NO: 269301 - RNA, 19 nt, Artificial Sequence
  Description of Artificial Sequence: Synthetic oligonucleotide
  Antisense strand to SEQ ID NO: 269300
uuaauagcaacuaaucccu

SEQ ID NO: 269302 - RNA, 19 nt, Artificial Sequence
  Description of Artificial Sequence: Synthetic oligonucleotide
  Sense strand starting at position 3068 of SEQ ID NO: 3460
guugauuaauuuggaugaa

SEQ ID NO: 269303 - RNA, 19 nt, Artificial Sequence
  Description of Artificial Sequence: Synthetic oligonucleotide
  Antisense strand to SEQ ID NO: 269302
uucauccaaauuaaucaac

SEQ ID NO: 269304 - RNA, 19 nt, Artificial Sequence
  Description of Artificial Sequence: Synthetic oligonucleotide
  Sense strand starting at position 3069 of SEQ ID NO: 3460
uugauuaauuuggaugaag

SEQ ID NO: 269305 - RNA, 19 nt, Artificial Sequence
  Description of Artificial Sequence: Synthetic oligonucleotide
  Antisense strand to SEQ ID NO: 269304
cuucauccaaauuaaucaa

SEQ ID NO: 269306 - RNA, 19 nt, Artificial Sequence
  Description of Artificial Sequence: Synthetic oligonucleotide
  Sense strand starting at position 3794 of SEQ ID NO: 3460
cccuauaagcucugagcca

SEQ ID NO: 269307 - RNA, 19 nt, Artificial Sequence
  Description of Artificial Sequence: Synthetic oligonucleotide
  Antisense strand to SEQ ID NO: 269306
uggcucagagcuuauaggg

SEQ ID NO: 269308 - RNA, 19 nt, Artificial Sequence
  Description of Artificial Sequence: Synthetic oligonucleotide
  Sense strand starting at position 3843 of SEQ ID NO: 3460
uccuuagcccuguaacagu

SEQ ID NO: 269309 - RNA, 19 nt, Artificial Sequence
  Description of Artificial Sequence: Synthetic oligonucleotide
  Antisense strand to SEQ ID NO: 269308
acuguuacagggcuaagga

SEQ ID NO: 269310 - RNA, 19 nt, Artificial Sequence
  Description of Artificial Sequence: Synthetic oligonucleotide
  Sense strand starting at position 3854 of SEQ ID NO: 3460
guaacagugcucuagugag

SEQ ID NO: 269311 - RNA, 19 nt, Artificial Sequence
  Description of Artificial Sequence: Synthetic oligonucleotide
  Antisense strand to SEQ ID NO: 269310
cucacuagagcacuguuac

SEQ ID NO: 269312 - RNA, 19 nt, Artificial Sequence
  Description of Artificial Sequence: Synthetic oligonucleotide
  Sense strand starting at position 3862 of SEQ ID NO: 3460
gcucuagugaggugaguua

SEQ ID NO: 269313 - RNA, 19 nt, Artificial Sequence
  Description of Artificial Sequence: Synthetic oligonucleotide
  Antisense strand to SEQ ID NO: 269312
uaacucaccucacuagagc

SEQ ID NO: 269314 - RNA, 19 nt, Artificial Sequence
  Description of Artificial Sequence: Synthetic oligonucleotide
  Sense strand starting at position 3871 of SEQ ID NO: 3460
aggugaguuaaagagcuuu

SEQ ID NO: 269315 - RNA, 19 nt, Artificial Sequence
  Description of Artificial Sequence: Synthetic oligonucleotide
  Antisense strand to SEQ ID NO: 269314
aaagcucuuuaacucaccu

SEQ ID NO: 269316 - RNA, 19 nt, Artificial Sequence
  Description of Artificial Sequence: Synthetic oligonucleotide
  Sense strand starting at position 3899 of SEQ ID NO: 3460
uuuggaaauucucaaggac

SEQ ID NO: 269317 - RNA, 19 nt, Artificial Sequence
  Description of Artificial Sequence: Synthetic oligonucleotide
  Antisense strand to SEQ ID NO: 269316
guccuugagaauuuccaaa

SEQ ID NO: 269318 - RNA, 19 nt, Artificial Sequence
  Description of Artificial Sequence: Synthetic oligonucleotide
  Sense strand starting at position 3979 of SEQ ID NO: 3460
uuuauauucuuggucuagu

SEQ ID NO: 269319 - RNA, 19 nt, Artificial Sequence
  Description of Artificial Sequence: Synthetic oligonucleotide
  Antisense strand to SEQ ID NO: 269318
acuagaccaagaauauaaa

SEQ ID NO: 269320 - RNA, 19 nt, Artificial Sequence
  Description of Artificial Sequence: Synthetic oligonucleotide
  Sense strand starting at position 3980 of SEQ ID NO: 3460
uuauauucuuggucuagua

SEQ ID NO: 269321 - RNA, 19 nt, Artificial Sequence
  Description of Artificial Sequence: Synthetic oligonucleotide
  Antisense strand to SEQ ID NO: 269320
uacuagaccaagaauauaa

SEQ ID NO: 269322 - RNA, 19 nt, Artificial Sequence
  Description of Artificial Sequence: Synthetic oligonucleotide
  Sense strand starting at position 79 of SEQ ID NO: 3461
uugacaggcuuacuauaaa

SEQ ID NO: 269323 - RNA, 19 nt, Artificial Sequence
  Description of Artificial Sequence: Synthetic oligonucleotide
  Antisense strand to SEQ ID NO: 269322
uuuauaguaagccugucaa

SEQ ID NO: 269324 - RNA, 19 nt, Artificial Sequence
  Description of Artificial Sequence: Synthetic oligonucleotide
  Sense strand starting at position 169 of SEQ ID NO: 3461
ucacucuuccaguguuaag

SEQ ID NO: 269325 - RNA, 19 nt, Artificial Sequence
  Description of Artificial Sequence: Synthetic oligonucleotide
  Antisense strand to SEQ ID NO: 269324
cuuaacacuggaagaguga

SEQ ID NO: 269326 - RNA, 19 nt, Artificial Sequence
  Description of Artificial Sequence: Synthetic oligonucleotide
  Sense strand starting at position 225 of SEQ ID NO: 3461
auggauggagggugugaua

SEQ ID NO: 269327 - RNA, 19 nt, Artificial Sequence
  Description of Artificial Sequence: Synthetic oligonucleotide
  Antisense strand to SEQ ID NO: 269326
uaucacacccuccauccau

SEQ ID NO: 269328 - RNA, 19 nt, Artificial Sequence
  Description of Artificial Sequence: Synthetic oligonucleotide
  Sense strand starting at position 227 of SEQ ID NO: 3461
ggauggagggugugauauu

SEQ ID NO: 269329 - RNA, 19 nt, Artificial Sequence
  Description of Artificial Sequence: Synthetic oligonucleotide
  Antisense strand to SEQ ID NO: 269328
aauaucacacccuccaucc

SEQ ID NO: 269330 - RNA, 19 nt, Artificial Sequence
  Description of Artificial Sequence: Synthetic oligonucleotide
  Sense strand starting at position 238 of SEQ ID NO: 3461
gugauauugauagauacgu

SEQ ID NO: 269331 - RNA, 19 nt, Artificial Sequence
  Description of Artificial Sequence: Synthetic oligonucleotide
  Antisense strand to SEQ ID NO: 269330
acguaucuaucaauaucac

SEQ ID NO: 269332 - RNA, 19 nt, Artificial Sequence
  Description of Artificial Sequence: Synthetic oligonucleotide
  Sense strand starting at position 334 of SEQ ID NO: 3461
aaugacauuuggugaauga

SEQ ID NO: 269333 - RNA, 19 nt, Artificial Sequence
  Description of Artificial Sequence: Synthetic oligonucleotide
  Antisense strand to SEQ ID NO: 269332
ucauucaccaaaugucauu

SEQ ID NO: 269334 - RNA, 19 nt, Artificial Sequence
  Description of Artificial Sequence: Synthetic oligonucleotide
  Sense strand starting at position 413 of SEQ ID NO: 3461
ccuuaucuguguuuagaug

SEQ ID NO: 269335 - RNA, 19 nt, Artificial Sequence
  Description of Artificial Sequence: Synthetic oligonucleotide
  Antisense strand to SEQ ID NO: 269334
caucuaaacacagauaagg

SEQ ID NO: 269336 - RNA, 19 nt, Artificial Sequence
  Description of Artificial Sequence: Synthetic oligonucleotide
  Sense strand starting at position 537 of SEQ ID NO: 3461
gcauuaucccaguauaugu

SEQ ID NO: 269337 - RNA, 19 nt, Artificial Sequence
  Description of Artificial Sequence: Synthetic oligonucleotide
  Antisense strand to SEQ ID NO: 269336
acauauacugggauaaugc

SEQ ID NO: 269338 - RNA, 19 nt, Artificial Sequence
  Description of Artificial Sequence: Synthetic oligonucleotide
  Sense strand starting at position 542 of SEQ ID NO: 3461
aucccaguauauguauuau

SEQ ID NO: 269339 - RNA, 19 nt, Artificial Sequence
  Description of Artificial Sequence: Synthetic oligonucleotide
  Antisense strand to SEQ ID NO: 269338
auaauacauauacugggau

SEQ ID NO: 269340 - RNA, 19 nt, Artificial Sequence
  Description of Artificial Sequence: Synthetic oligonucleotide
  Sense strand starting at position 554 of SEQ ID NO: 3461
guauuaucccaguaugaau

SEQ ID NO: 269341 - RNA, 19 nt, Artificial Sequence
  Description of Artificial Sequence: Synthetic oligonucleotide
  Antisense strand to SEQ ID NO: 269340
auucauacugggauaauac

SEQ ID NO: 269342 - RNA, 19 nt, Artificial Sequence
  Description of Artificial Sequence: Synthetic oligonucleotide
  Sense strand starting at position 629 of SEQ ID NO: 3461
uagcaaugagaaugcauga

SEQ ID NO: 269343 - RNA, 19 nt, Artificial Sequence
  Description of Artificial Sequence: Synthetic oligonucleotide
  Antisense strand to SEQ ID NO: 269342
ucaugcauucucauugcua

SEQ ID NO: 269344 - RNA, 19 nt, Artificial Sequence
  Description of Artificial Sequence: Synthetic oligonucleotide
  Sense strand starting at position 840 of SEQ ID NO: 3461
ucuaguucuugaucuggga

SEQ ID NO: 269345 - RNA, 19 nt, Artificial Sequence
  Description of Artificial Sequence: Synthetic oligonucleotide
  Antisense strand to SEQ ID NO: 269344
ucccagaucaagaacuaga

SEQ ID NO: 269346 - RNA, 19 nt, Artificial Sequence
  Description of Artificial Sequence: Synthetic oligonucleotide
  Sense strand starting at position 947 of SEQ ID NO: 3461
cacuuaguucuguagguuu

SEQ ID NO: 269347 - RNA, 19 nt, Artificial Sequence
  Description of Artificial Sequence: Synthetic oligonucleotide
  Antisense strand to SEQ ID NO: 269346
aaaccuacagaacuaagug

SEQ ID NO: 269348 - RNA, 19 nt, Artificial Sequence
  Description of Artificial Sequence: Synthetic oligonucleotide
  Sense strand starting at position 1048 of SEQ ID NO: 3461
gacauuuaguugucuuagu

SEQ ID NO: 269349 - RNA, 19 nt, Artificial Sequence
  Description of Artificial Sequence: Synthetic oligonucleotide
  Antisense strand to SEQ ID NO: 269348
acuaagacaacuaaauguc

SEQ ID NO: 269350 - RNA, 19 nt, Artificial Sequence
  Description of Artificial Sequence: Synthetic oligonucleotide
  Sense strand starting at position 1145 of SEQ ID NO: 3461
uaauuauuggcgugacaac

SEQ ID NO: 269351 - RNA, 19 nt, Artificial Sequence
  Description of Artificial Sequence: Synthetic oligonucleotide
  Antisense strand to SEQ ID NO: 269350
guugucacgccaauaauua

SEQ ID NO: 269352 - RNA, 19 nt, Artificial Sequence
  Description of Artificial Sequence: Synthetic oligonucleotide
  Sense strand starting at position 1146 of SEQ ID NO: 3461
aauuauuggcgugacaaca

SEQ ID NO: 269353 - RNA, 19 nt, Artificial Sequence
  Description of Artificial Sequence: Synthetic oligonucleotide
  Antisense strand to SEQ ID NO: 269352
uguugucacgccaauaauu

SEQ ID NO: 269354 - RNA, 19 nt, Artificial Sequence
  Description of Artificial Sequence: Synthetic oligonucleotide
  Sense strand starting at position 1163 of SEQ ID NO: 3461
caguguacacggcagagau

SEQ ID NO: 269355 - RNA, 19 nt, Artificial Sequence
  Description of Artificial Sequence: Synthetic oligonucleotide
  Antisense strand to SEQ ID NO: 269354
aucucugccguguacacug

SEQ ID NO: 269356 - RNA, 19 nt, Artificial Sequence
  Description of Artificial Sequence: Synthetic oligonucleotide
  Sense strand starting at position 1188 of SEQ ID NO: 3461
guuggagcucugggaauca

SEQ ID NO: 269357 - RNA, 19 nt, Artificial Sequence
  Description of Artificial Sequence: Synthetic oligonucleotide
  Antisense strand to SEQ ID NO: 269356
ugauucccagagcuccaac

SEQ ID NO: 269358 - RNA, 19 nt, Artificial Sequence
  Description of Artificial Sequence: Synthetic oligonucleotide
  Sense strand starting at position 2153 of SEQ ID NO: 3461
agagcagugaucugcugau

SEQ ID NO: 269359 - RNA, 19 nt, Artificial Sequence
  Description of Artificial Sequence: Synthetic oligonucleotide
  Antisense strand to SEQ ID NO: 269358
aucagcagaucacugcucu

SEQ ID NO: 269360 - RNA, 19 nt, Artificial Sequence
  Description of Artificial Sequence: Synthetic oligonucleotide
  Sense strand starting at position 2338 of SEQ ID NO: 3461
ggcagcucucaagauccaa

SEQ ID NO: 269361 - RNA, 19 nt, Artificial Sequence
  Description of Artificial Sequence: Synthetic oligonucleotide
  Antisense strand to SEQ ID NO: 269360
uuggaucuugagagcugcc

SEQ ID NO: 269362 - RNA, 19 nt, Artificial Sequence
  Description of Artificial Sequence: Synthetic oligonucleotide
  Sense strand starting at position 2620 of SEQ ID NO: 3461
cagucuagguggguugaau

SEQ ID NO: 269363 - RNA, 19 nt, Artificial Sequence
  Description of Artificial Sequence: Synthetic oligonucleotide
  Antisense strand to SEQ ID NO: 269362
auucaacccaccuagacug

SEQ ID NO: 269364 - RNA, 19 nt, Artificial Sequence
  Description of Artificial Sequence: Synthetic oligonucleotide
  Sense strand starting at position 2825 of SEQ ID NO: 3461
acaagucgaguucauggaa

SEQ ID NO: 269365 - RNA, 19 nt, Artificial Sequence
  Description of Artificial Sequence: Synthetic oligonucleotide
  Antisense strand to SEQ ID NO: 269364
uuccaugaacucgacuugu

SEQ ID NO: 269366 - RNA, 19 nt, Artificial Sequence
  Description of Artificial Sequence: Synthetic oligonucleotide
  Sense strand starting at position 2828 of SEQ ID NO: 3461
agucgaguucauggaagag

SEQ ID NO: 269367 - RNA, 19 nt, Artificial Sequence
  Description of Artificial Sequence: Synthetic oligonucleotide
  Antisense strand to SEQ ID NO: 269366
cucuuccaugaacucgacu

SEQ ID NO: 269368 - RNA, 19 nt, Artificial Sequence
  Description of Artificial Sequence: Synthetic oligonucleotide
  Sense strand starting at position 2840 of SEQ ID NO: 3461
ggaagaguugcaggcugaa

SEQ ID NO: 269369 - RNA, 19 nt, Artificial Sequence
  Description of Artificial Sequence: Synthetic oligonucleotide
  Antisense strand to SEQ ID NO: 269368
uucagccugcaacucuucc

SEQ ID NO: 269370 - RNA, 19 nt, Artificial Sequence
  Description of Artificial Sequence: Synthetic oligonucleotide
  Sense strand starting at position 2934 of SEQ ID NO: 3461
gugagcauucugugggaac

SEQ ID NO: 269371 - RNA, 19 nt, Artificial Sequence
  Description of Artificial Sequence: Synthetic oligonucleotide
  Antisense strand to SEQ ID NO: 269370
guucccacagaaugcucac

SEQ ID NO: 269372 - RNA, 19 nt, Artificial Sequence
  Description of Artificial Sequence: Synthetic oligonucleotide
  Sense strand starting at position 3112 of SEQ ID NO: 3461
ggucucaagaugugagucu

SEQ ID NO: 269373 - RNA, 19 nt, Artificial Sequence
  Description of Artificial Sequence: Synthetic oligonucleotide
  Antisense strand to SEQ ID NO: 269372
agacucacaucuugagacc

SEQ ID NO: 269374 - RNA, 19 nt, Artificial Sequence
  Description of Artificial Sequence: Synthetic oligonucleotide
  Sense strand starting at position 3381 of SEQ ID NO: 3461
agugguaacugaucauuag

SEQ ID NO: 269375 - RNA, 19 nt, Artificial Sequence
  Description of Artificial Sequence: Synthetic oligonucleotide
  Antisense strand to SEQ ID NO: 269374
cuaaugaucaguuaccacu

SEQ ID NO: 269376 - RNA, 19 nt, Artificial Sequence
  Description of Artificial Sequence: Synthetic oligonucleotide
  Sense strand starting at position 3384 of SEQ ID NO: 3461
gguaacugaucauuaguga

SEQ ID NO: 269377 - RNA, 19 nt, Artificial Sequence
  Description of Artificial Sequence: Synthetic oligonucleotide
  Antisense strand to SEQ ID NO: 269376
ucacuaaugaucaguuacc

SEQ ID NO: 269378 - RNA, 19 nt, Artificial Sequence
  Description of Artificial Sequence: Synthetic oligonucleotide
  Sense strand starting at position 3387 of SEQ ID NO: 3461
aacugaucauuagugaguu

SEQ ID NO: 269379 - RNA, 19 nt, Artificial Sequence
  Description of Artificial Sequence: Synthetic oligonucleotide
  Antisense strand to SEQ ID NO: 269378
aacucacuaaugaucaguu

SEQ ID NO: 269380 - RNA, 19 nt, Artificial Sequence
  Description of Artificial Sequence: Synthetic oligonucleotide
  Sense strand starting at position 3391 of SEQ ID NO: 3461
gaucauuagugaguuggcu

SEQ ID NO: 269381 - RNA, 19 nt, Artificial Sequence
  Description of Artificial Sequence: Synthetic oligonucleotide
  Antisense strand to SEQ ID NO: 269380
agccaacucacuaaugauc

SEQ ID NO: 269382 - RNA, 19 nt, Artificial Sequence
  Description of Artificial Sequence: Synthetic oligonucleotide
  Sense strand starting at position 3397 of SEQ ID NO: 3461
uagugaguuggcuaguuaa

SEQ ID NO: 269383 - RNA, 19 nt, Artificial Sequence
  Description of Artificial Sequence: Synthetic oligonucleotide
  Antisense strand to SEQ ID NO: 269382
uuaacuagccaacucacua

SEQ ID NO: 269384 - RNA, 19 nt, Artificial Sequence
  Description of Artificial Sequence: Synthetic oligonucleotide
  Sense strand starting at position 3400 of SEQ ID NO: 3461
ugaguuggcuaguuaauac

SEQ ID NO: 269385 - RNA, 19 nt, Artificial Sequence
  Description of Artificial Sequence: Synthetic oligonucleotide
  Antisense strand to SEQ ID NO: 269384
guauuaacuagccaacuca

SEQ ID NO: 269386 - RNA, 19 nt, Artificial Sequence
  Description of Artificial Sequence: Synthetic oligonucleotide
  Sense strand starting at position 3408 of SEQ ID NO: 3461
cuaguuaauaccggauuga

SEQ ID NO: 269387 - RNA, 19 nt, Artificial Sequence
  Description of Artificial Sequence: Synthetic oligonucleotide
  Antisense strand to SEQ ID NO: 269386
ucaauccgguauuaacuag

SEQ ID NO: 269388 - RNA, 19 nt, Artificial Sequence
  Description of Artificial Sequence: Synthetic oligonucleotide
  Sense strand starting at position 3409 of SEQ ID NO: 3461
uaguuaauaccggauugau

SEQ ID NO: 269389 - RNA, 19 nt, Artificial Sequence
  Description of Artificial Sequence: Synthetic oligonucleotide
  Antisense strand to SEQ ID NO: 269388
aucaauccgguauuaacua

SEQ ID NO: 269390 - RNA, 19 nt, Artificial Sequence
  Description of Artificial Sequence: Synthetic oligonucleotide
  Sense strand starting at position 3583 of SEQ ID NO: 3461
ugcagagagcucugggaga

SEQ ID NO: 269391 - RNA, 19 nt, Artificial Sequence
  Description of Artificial Sequence: Synthetic oligonucleotide
  Antisense strand to SEQ ID NO: 269390
ucucccagagcucucugca

SEQ ID NO: 269392 - RNA, 19 nt, Artificial Sequence
  Description of Artificial Sequence: Synthetic oligonucleotide
  Sense strand starting at position 3585 of SEQ ID NO: 3461
cagagagcucugggagauc

SEQ ID NO: 269393 - RNA, 19 nt, Artificial Sequence
  Description of Artificial Sequence: Synthetic oligonucleotide
  Antisense strand to SEQ ID NO: 269392
gaucucccagagcucucug

SEQ ID NO: 269394 - RNA, 19 nt, Artificial Sequence
  Description of Artificial Sequence: Synthetic oligonucleotide
  Sense strand starting at position 3665 of SEQ ID NO: 3461
gggauugauauugguauua

SEQ ID NO: 269395 - RNA, 19 nt, Artificial Sequence
  Description of Artificial Sequence: Synthetic oligonucleotide
  Antisense strand to SEQ ID NO: 269394
uaauaccaauaucaauccc

SEQ ID NO: 269396 - RNA, 19 nt, Artificial Sequence
  Description of Artificial Sequence: Synthetic oligonucleotide
  Sense strand starting at position 3675 of SEQ ID NO: 3461
uugguauuacuguggacua

SEQ ID NO: 269397 - RNA, 19 nt, Artificial Sequence
  Description of Artificial Sequence: Synthetic oligonucleotide
  Antisense strand to SEQ ID NO: 269396
uaguccacaguaauaccaa

SEQ ID NO: 269398 - RNA, 19 nt, Artificial Sequence
  Description of Artificial Sequence: Synthetic oligonucleotide
  Sense strand starting at position 3928 of SEQ ID NO: 3461
aggucuccaaucugagaga

SEQ ID NO: 269399 - RNA, 19 nt, Artificial Sequence
  Description of Artificial Sequence: Synthetic oligonucleotide
  Antisense strand to SEQ ID NO: 269398
ucucucagauuggagaccu

SEQ ID NO: 269400 - RNA, 19 nt, Artificial Sequence
  Description of Artificial Sequence: Synthetic oligonucleotide
  Sense strand starting at position 3953 of SEQ ID NO: 3461
ugaagcuuuccguaccaca

SEQ ID NO: 269401 - RNA, 19 nt, Artificial Sequence
  Description of Artificial Sequence: Synthetic oligonucleotide
  Antisense strand to SEQ ID NO: 269400
ugugguacggaaagcuuca

SEQ ID NO: 269402 - RNA, 19 nt, Artificial Sequence
  Description of Artificial Sequence: Synthetic oligonucleotide
  Sense strand starting at position 30 of SEQ ID NO: 3462
auugaaauugccuggaaca

SEQ ID NO: 269403 - RNA, 19 nt, Artificial Sequence
  Description of Artificial Sequence: Synthetic oligonucleotide
  Antisense strand to SEQ ID NO: 269402
uguuccaggcaauuucaau

SEQ ID NO: 269404 - RNA, 19 nt, Artificial Sequence
  Description of Artificial Sequence: Synthetic oligonucleotide
  Sense strand starting at position 31 of SEQ ID NO: 3462
uugaaauugccuggaacac

SEQ ID NO: 269405 - RNA, 19 nt, Artificial Sequence
  Description of Artificial Sequence: Synthetic oligonucleotide
  Antisense strand to SEQ ID NO: 269404
guguuccaggcaauuucaa

SEQ ID NO: 269406 - RNA, 19 nt, Artificial Sequence
  Description of Artificial Sequence: Synthetic oligonucleotide
  Sense strand starting at position 384 of SEQ ID NO: 3462
ugggcaucuguguguauuu

SEQ ID NO: 269407 - RNA, 19 nt, Artificial Sequence
  Description of Artificial Sequence: Synthetic oligonucleotide
  Antisense strand to SEQ ID NO: 269406
aaauacacacagaugccca

SEQ ID NO: 269408 - RNA, 19 nt, Artificial Sequence
  Description of Artificial Sequence: Synthetic oligonucleotide
  Sense strand starting at position 385 of SEQ ID NO: 3462
gggcaucuguguguauuua

SEQ ID NO: 269409 - RNA, 19 nt, Artificial Sequence
  Description of Artificial Sequence: Synthetic oligonucleotide
  Antisense strand to SEQ ID NO: 269408
uaaauacacacagaugccc

SEQ ID NO: 269410 - RNA, 19 nt, Artificial Sequence
  Description of Artificial Sequence: Synthetic oligonucleotide
  Sense strand starting at position 458 of SEQ ID NO: 3462
ugggcaucugcguauauuu

SEQ ID NO: 269411 - RNA, 19 nt, Artificial Sequence
  Description of Artificial Sequence: Synthetic oligonucleotide
  Antisense strand to SEQ ID NO: 269410
aaauauacgcagaugccca

SEQ ID NO: 269412 - RNA, 19 nt, Artificial Sequence
  Description of Artificial Sequence: Synthetic oligonucleotide
  Sense strand starting at position 599 of SEQ ID NO: 3462
agagaacauucguugggua

SEQ ID NO: 269413 - RNA, 19 nt, Artificial Sequence
  Description of Artificial Sequence: Synthetic oligonucleotide
  Antisense strand to SEQ ID NO: 269412
uacccaacgaauguucucu

SEQ ID NO: 269414 - RNA, 19 nt, Artificial Sequence
  Description of Artificial Sequence: Synthetic oligonucleotide
  Sense strand starting at position 600 of SEQ ID NO: 3462
gagaacauucguuggguau

SEQ ID NO: 269415 - RNA, 19 nt, Artificial Sequence
  Description of Artificial Sequence: Synthetic oligonucleotide
  Antisense strand to SEQ ID NO: 269414
auacccaacgaauguucuc

SEQ ID NO: 269416 - RNA, 19 nt, Artificial Sequence
  Description of Artificial Sequence: Synthetic oligonucleotide
  Sense strand starting at position 601 of SEQ ID NO: 3462
agaacauucguuggguaua

SEQ ID NO: 269417 - RNA, 19 nt, Artificial Sequence
  Description of Artificial Sequence: Synthetic oligonucleotide
  Antisense strand to SEQ ID NO: 269416
uauacccaacgaauguucu

SEQ ID NO: 269418 - RNA, 19 nt, Artificial Sequence
  Description of Artificial Sequence: Synthetic oligonucleotide
  Sense strand starting at position 603 of SEQ ID NO: 3462
aacauucguuggguauaaa

SEQ ID NO: 269419 - RNA, 19 nt, Artificial Sequence
  Description of Artificial Sequence: Synthetic oligonucleotide
  Antisense strand to SEQ ID NO: 269418
uuuauacccaacgaauguu

SEQ ID NO: 269420 - RNA, 19 nt, Artificial Sequence
  Description of Artificial Sequence: Synthetic oligonucleotide
  Sense strand starting at position 686 of SEQ ID NO: 3462
uuugccacaugguuaaaua

SEQ ID NO: 269421 - RNA, 19 nt, Artificial Sequence
  Description of Artificial Sequence: Synthetic oligonucleotide
  Antisense strand to SEQ ID NO: 269420
uauuuaaccauguggcaaa

SEQ ID NO: 269422 - RNA, 19 nt, Artificial Sequence
  Description of Artificial Sequence: Synthetic oligonucleotide
  Sense strand starting at position 687 of SEQ ID NO: 3462
uugccacaugguuaaauau

SEQ ID NO: 269423 - RNA, 19 nt, Artificial Sequence
  Description of Artificial Sequence: Synthetic oligonucleotide
  Antisense strand to SEQ ID NO: 269422
auauuuaaccauguggcaa

SEQ ID NO: 269424 - RNA, 19 nt, Artificial Sequence
  Description of Artificial Sequence: Synthetic oligonucleotide
  Sense strand starting at position 776 of SEQ ID NO: 3462
uucugaaaugugcauggua

SEQ ID NO: 269425 - RNA, 19 nt, Artificial Sequence
  Description of Artificial Sequence: Synthetic oligonucleotide
  Antisense strand to SEQ ID NO: 269424
uaccaugcacauuucagaa

SEQ ID NO: 269426 - RNA, 19 nt, Artificial Sequence
  Description of Artificial Sequence: Synthetic oligonucleotide
  Sense strand starting at position 778 of SEQ ID NO: 3462
cugaaaugugcaugguaau

SEQ ID NO: 269427 - RNA, 19 nt, Artificial Sequence
  Description of Artificial Sequence: Synthetic oligonucleotide
  Antisense strand to SEQ ID NO: 269426
auuaccaugcacauuucag

SEQ ID NO: 269428 - RNA, 19 nt, Artificial Sequence
  Description of Artificial Sequence: Synthetic oligonucleotide
  Sense strand starting at position 960 of SEQ ID NO: 3462
aaauaaaugcgguacuaca

SEQ ID NO: 269429 - RNA, 19 nt, Artificial Sequence
  Description of Artificial Sequence: Synthetic oligonucleotide
  Antisense strand to SEQ ID NO: 269428
uguaguaccgcauuuauuu

SEQ ID NO: 269430 - RNA, 19 nt, Artificial Sequence
  Description of Artificial Sequence: Synthetic oligonucleotide
  Sense strand starting at position 1014 of SEQ ID NO: 3462
cuggcuguguauuuggaga

SEQ ID NO: 269431 - RNA, 19 nt, Artificial Sequence
  Description of Artificial Sequence: Synthetic oligonucleotide
  Antisense strand to SEQ ID NO: 269430
ucuccaaauacacagccag

SEQ ID NO: 269432 - RNA, 19 nt, Artificial Sequence
  Description of Artificial Sequence: Synthetic oligonucleotide
  Sense strand starting at position 1154 of SEQ ID NO: 3462
gggugauaacuguguacaa

SEQ ID NO: 269433 - RNA, 19 nt, Artificial Sequence
  Description of Artificial Sequence: Synthetic oligonucleotide
  Antisense strand to SEQ ID NO: 269432
uuguacacaguuaucaccc

SEQ ID NO: 269434 - RNA, 19 nt, Artificial Sequence
  Description of Artificial Sequence: Synthetic oligonucleotide
  Sense strand starting at position 1155 of SEQ ID NO: 3462
ggugauaacuguguacaaa

SEQ ID NO: 269435 - RNA, 19 nt, Artificial Sequence
  Description of Artificial Sequence: Synthetic oligonucleotide
  Antisense strand to SEQ ID NO: 269434
uuuguacacaguuaucacc

SEQ ID NO: 269436 - RNA, 19 nt, Artificial Sequence
  Description of Artificial Sequence: Synthetic oligonucleotide
  Sense strand starting at position 1781 of SEQ ID NO: 3462
cguaccagaucucuaggaa

SEQ ID NO: 269437 - RNA, 19 nt, Artificial Sequence
  Description of Artificial Sequence: Synthetic oligonucleotide
  Antisense strand to SEQ ID NO: 269436
uuccuagagaucugguacg

SEQ ID NO: 269438 - RNA, 19 nt, Artificial Sequence
  Description of Artificial Sequence: Synthetic oligonucleotide
  Sense strand starting at position 2188 of SEQ ID NO: 3462
agcacuaaccucugaugau

SEQ ID NO: 269439 - RNA, 19 nt, Artificial Sequence
  Description of Artificial Sequence: Synthetic oligonucleotide
  Antisense strand to SEQ ID NO: 269438
aucaucagagguuagugcu

SEQ ID NO: 269440 - RNA, 19 nt, Artificial Sequence
  Description of Artificial Sequence: Synthetic oligonucleotide
  Sense strand starting at position 2217 of SEQ ID NO: 3462
ggucucagccuguaacacu

SEQ ID NO: 269441 - RNA, 19 nt, Artificial Sequence
  Description of Artificial Sequence: Synthetic oligonucleotide
  Antisense strand to SEQ ID NO: 269440
aguguuacaggcugagacc

SEQ ID NO: 269442 - RNA, 19 nt, Artificial Sequence
  Description of Artificial Sequence: Synthetic oligonucleotide
  Sense strand starting at position 2432 of SEQ ID NO: 3462
cuuucuaaauugguagaua

SEQ ID NO: 269443 - RNA, 19 nt, Artificial Sequence
  Description of Artificial Sequence: Synthetic oligonucleotide
  Antisense strand to SEQ ID NO: 269442
uaucuaccaauuuagaaag

SEQ ID NO: 269444 - RNA, 19 nt, Artificial Sequence
  Description of Artificial Sequence: Synthetic oligonucleotide
  Sense strand starting at position 2444 of SEQ ID NO: 3462
guagauauaugaccuguua

SEQ ID NO: 269445 - RNA, 19 nt, Artificial Sequence
  Description of Artificial Sequence: Synthetic oligonucleotide
  Antisense strand to SEQ ID NO: 269444
uaacaggucauauaucuac

SEQ ID NO: 269446 - RNA, 19 nt, Artificial Sequence
  Description of Artificial Sequence: Synthetic oligonucleotide
  Sense strand starting at position 2588 of SEQ ID NO: 3462
aagggaaaguggucacauc

SEQ ID NO: 269447 - RNA, 19 nt, Artificial Sequence
  Description of Artificial Sequence: Synthetic oligonucleotide
  Antisense strand to SEQ ID NO: 269446
gaugugaccacuuucccuu

SEQ ID NO: 269448 - RNA, 19 nt, Artificial Sequence
  Description of Artificial Sequence: Synthetic oligonucleotide
  Sense strand starting at position 2643 of SEQ ID NO: 3462
gagagauugcaaugcaauc

SEQ ID NO: 269449 - RNA, 19 nt, Artificial Sequence
  Description of Artificial Sequence: Synthetic oligonucleotide
  Antisense strand to SEQ ID NO: 269448
gauugcauugcaaucucuc

SEQ ID NO: 269450 - RNA, 19 nt, Artificial Sequence
  Description of Artificial Sequence: Synthetic oligonucleotide
  Sense strand starting at position 2693 of SEQ ID NO: 3462
ggaggaagucuagaacguu

SEQ ID NO: 269451 - RNA, 19 nt, Artificial Sequence
  Description of Artificial Sequence: Synthetic oligonucleotide
  Antisense strand to SEQ ID NO: 269450
aacguucuagacuuccucc

SEQ ID NO: 269452 - RNA, 19 nt, Artificial Sequence
  Description of Artificial Sequence: Synthetic oligonucleotide
  Sense strand starting at position 2817 of SEQ ID NO: 3462
ggcuuacaucucuaaguug

SEQ ID NO: 269453 - RNA, 19 nt, Artificial Sequence
  Description of Artificial Sequence: Synthetic oligonucleotide
  Antisense strand to SEQ ID NO: 269452
caacuuagagauguaagcc

SEQ ID NO: 269454 - RNA, 19 nt, Artificial Sequence
  Description of Artificial Sequence: Synthetic oligonucleotide
  Sense strand starting at position 2820 of SEQ ID NO: 3462
uuacaucucuaaguugaga

SEQ ID NO: 269455 - RNA, 19 nt, Artificial Sequence
  Description of Artificial Sequence: Synthetic oligonucleotide
  Antisense strand to SEQ ID NO: 269454
ucucaacuuagagauguaa

SEQ ID NO: 269456 - RNA, 19 nt, Artificial Sequence
  Description of Artificial Sequence: Synthetic oligonucleotide
  Sense strand starting at position 2828 of SEQ ID NO: 3462
cuaaguugagauggaaagu

SEQ ID NO: 269457 - RNA, 19 nt, Artificial Sequence
  Description of Artificial Sequence: Synthetic oligonucleotide
  Antisense strand to SEQ ID NO: 269456
acuuuccaucucaacuuag

SEQ ID NO: 269458 - RNA, 19 nt, Artificial Sequence
  Description of Artificial Sequence: Synthetic oligonucleotide
  Sense strand starting at position 2988 of SEQ ID NO: 3462
gcuagaacauuugaauuau

SEQ ID NO: 269459 - RNA, 19 nt, Artificial Sequence
  Description of Artificial Sequence: Synthetic oligonucleotide
  Antisense strand to SEQ ID NO: 269458
auaauucaaauguucuagc

SEQ ID NO: 269460 - RNA, 19 nt, Artificial Sequence
  Description of Artificial Sequence: Synthetic oligonucleotide
  Sense strand starting at position 3249 of SEQ ID NO: 3462
uugucacaucccuauuaug

SEQ ID NO: 269461 - RNA, 19 nt, Artificial Sequence
  Description of Artificial Sequence: Synthetic oligonucleotide
  Antisense strand to SEQ ID NO: 269460
cauaauagggaugugacaa

SEQ ID NO: 269462 - RNA, 19 nt, Artificial Sequence
  Description of Artificial Sequence: Synthetic oligonucleotide
  Sense strand starting at position 3268 of SEQ ID NO: 3462
aacacuauguggucacuga

SEQ ID NO: 269463 - RNA, 19 nt, Artificial Sequence
  Description of Artificial Sequence: Synthetic oligonucleotide
  Antisense strand to SEQ ID NO: 269462
ucagugaccacauaguguu

SEQ ID NO: 269464 - RNA, 19 nt, Artificial Sequence
  Description of Artificial Sequence: Synthetic oligonucleotide
  Sense strand starting at position 3269 of SEQ ID NO: 3462
acacuauguggucacugaa

SEQ ID NO: 269465 - RNA, 19 nt, Artificial Sequence
  Description of Artificial Sequence: Synthetic oligonucleotide
  Antisense strand to SEQ ID NO: 269464
uucagugaccacauagugu

SEQ ID NO: 269466 - RNA, 19 nt, Artificial Sequence
  Description of Artificial Sequence: Synthetic oligonucleotide
  Sense strand starting at position 3301 of SEQ ID NO: 3462
uccgucuguagauauggaa

SEQ ID NO: 269467 - RNA, 19 nt, Artificial Sequence
  Description of Artificial Sequence: Synthetic oligonucleotide
  Antisense strand to SEQ ID NO: 269466
uuccauaucuacagacgga

SEQ ID NO: 269468 - RNA, 19 nt, Artificial Sequence
  Description of Artificial Sequence: Synthetic oligonucleotide
  Sense strand starting at position 3617 of SEQ ID NO: 3462
aaaguuaugcacuggauua

SEQ ID NO: 269469 - RNA, 19 nt, Artificial Sequence
  Description of Artificial Sequence: Synthetic oligonucleotide
  Antisense strand to SEQ ID NO: 269468
uaauccagugcauaacuuu

SEQ ID NO: 269470 - RNA, 19 nt, Artificial Sequence
  Description of Artificial Sequence: Synthetic oligonucleotide
  Sense strand starting at position 3619 of SEQ ID NO: 3462
aguuaugcacuggauuaaa

SEQ ID NO: 269471 - RNA, 19 nt, Artificial Sequence
  Description of Artificial Sequence: Synthetic oligonucleotide
  Antisense strand to SEQ ID NO: 269470
uuuaauccagugcauaacu

SEQ ID NO: 269472 - RNA, 19 nt, Artificial Sequence
  Description of Artificial Sequence: Synthetic oligonucleotide
  Sense strand starting at position 3725 of SEQ ID NO: 3462
guguauugugcaguguauc

SEQ ID NO: 269473 - RNA, 19 nt, Artificial Sequence
  Description of Artificial Sequence: Synthetic oligonucleotide
  Antisense strand to SEQ ID NO: 269472
gauacacugcacaauacac

SEQ ID NO: 269474 - RNA, 19 nt, Artificial Sequence
  Description of Artificial Sequence: Synthetic oligonucleotide
  Sense strand starting at position 3737 of SEQ ID NO: 3462
guguaucgugugccuuuaa

SEQ ID NO: 269475 - RNA, 19 nt, Artificial Sequence
  Description of Artificial Sequence: Synthetic oligonucleotide
  Antisense strand to SEQ ID NO: 269474
uuaaaggcacacgauacac

SEQ ID NO: 269476 - RNA, 19 nt, Artificial Sequence
  Description of Artificial Sequence: Synthetic oligonucleotide
  Sense strand starting at position 3922 of SEQ ID NO: 3462
auugauggcaucuguuaga

SEQ ID NO: 269477 - RNA, 19 nt, Artificial Sequence
  Description of Artificial Sequence: Synthetic oligonucleotide
  Antisense strand to SEQ ID NO: 269476
ucuaacagaugccaucaau

SEQ ID NO: 269478 - RNA, 19 nt, Artificial Sequence
  Description of Artificial Sequence: Synthetic oligonucleotide
  Sense strand starting at position 3932 of SEQ ID NO: 3462
ucuguuagagcaugaauaa

SEQ ID NO: 269479 - RNA, 19 nt, Artificial Sequence
  Description of Artificial Sequence: Synthetic oligonucleotide
  Antisense strand to SEQ ID NO: 269478
uuauucaugcucuaacaga

SEQ ID NO: 269480 - RNA, 19 nt, Artificial Sequence
  Description of Artificial Sequence: Synthetic oligonucleotide
  Sense strand starting at position 3942 of SEQ ID NO: 3462
caugaauaaguagguaaau

SEQ ID NO: 269481 - RNA, 19 nt, Artificial Sequence
  Description of Artificial Sequence: Synthetic oligonucleotide
  Antisense strand to SEQ ID NO: 269480
auuuaccuacuuauucaug

SEQ ID NO: 269482 - RNA, 19 nt, Artificial Sequence
  Description of Artificial Sequence: Synthetic oligonucleotide
  Sense strand starting at position 276 of SEQ ID NO: 3463
gcaauuucccuaugguauu

SEQ ID NO: 269483 - RNA, 19 nt, Artificial Sequence
  Description of Artificial Sequence: Synthetic oligonucleotide
  Antisense strand to SEQ ID NO: 269482
aauaccauagggaaauugc

SEQ ID NO: 269484 - RNA, 19 nt, Artificial Sequence
  Description of Artificial Sequence: Synthetic oligonucleotide
  Sense strand starting at position 379 of SEQ ID NO: 3463
uggagcaucuuauuaaaua

SEQ ID NO: 269485 - RNA, 19 nt, Artificial Sequence
  Description of Artificial Sequence: Synthetic oligonucleotide
  Antisense strand to SEQ ID NO: 269484
uauuuaauaagaugcucca

SEQ ID NO: 269486 - RNA, 19 nt, Artificial Sequence
  Description of Artificial Sequence: Synthetic oligonucleotide
  Sense strand starting at position 441 of SEQ ID NO: 3463
ugagaaacguuuccuucuu

SEQ ID NO: 269487 - RNA, 19 nt, Artificial Sequence
  Description of Artificial Sequence: Synthetic oligonucleotide
  Antisense strand to SEQ ID NO: 269486
aagaaggaaacguuucuca

SEQ ID NO: 269488 - RNA, 19 nt, Artificial Sequence
  Description of Artificial Sequence: Synthetic oligonucleotide
  Sense strand starting at position 442 of SEQ ID NO: 3463
gagaaacguuuccuucuuu

SEQ ID NO: 269489 - RNA, 19 nt, Artificial Sequence
  Description of Artificial Sequence: Synthetic oligonucleotide
  Antisense strand to SEQ ID NO: 269488
aaagaaggaaacguuucuc

SEQ ID NO: 269490 - RNA, 19 nt, Artificial Sequence
  Description of Artificial Sequence: Synthetic oligonucleotide
  Sense strand starting at position 721 of SEQ ID NO: 3463
uuggauagauuagugguua

SEQ ID NO: 269491 - RNA, 19 nt, Artificial Sequence
  Description of Artificial Sequence: Synthetic oligonucleotide
  Antisense strand to SEQ ID NO: 269490
uaaccacuaaucuauccaa

SEQ ID NO: 269492 - RNA, 19 nt, Artificial Sequence
  Description of Artificial Sequence: Synthetic oligonucleotide
  Sense strand starting at position 725 of SEQ ID NO: 3463
auagauuagugguuaaaca

SEQ ID NO: 269493 - RNA, 19 nt, Artificial Sequence
  Description of Artificial Sequence: Synthetic oligonucleotide
  Antisense strand to SEQ ID NO: 269492
uguuuaaccacuaaucuau

SEQ ID NO: 269494 - RNA, 19 nt, Artificial Sequence
  Description of Artificial Sequence: Synthetic oligonucleotide
  Sense strand starting at position 789 of SEQ ID NO: 3463
acuuuauaacugugugacu

SEQ ID NO: 269495 - RNA, 19 nt, Artificial Sequence
  Description of Artificial Sequence: Synthetic oligonucleotide
  Antisense strand to SEQ ID NO: 269494
agucacacaguuauaaagu

SEQ ID NO: 269496 - RNA, 19 nt, Artificial Sequence
  Description of Artificial Sequence: Synthetic oligonucleotide
  Sense strand starting at position 791 of SEQ ID NO: 3463
uuuauaacugugugacuuu

SEQ ID NO: 269497 - RNA, 19 nt, Artificial Sequence
  Description of Artificial Sequence: Synthetic oligonucleotide
  Antisense strand to SEQ ID NO: 269496
aaagucacacaguuauaaa

SEQ ID NO: 269498 - RNA, 19 nt, Artificial Sequence
  Description of Artificial Sequence: Synthetic oligonucleotide
  Sense strand starting at position 810 of SEQ ID NO: 3463
guccaaaguccugacgauu

SEQ ID NO: 269499 - RNA, 19 nt, Artificial Sequence
  Description of Artificial Sequence: Synthetic oligonucleotide
  Antisense strand to SEQ ID NO: 269498
aaucgucaggacuuuggac

SEQ ID NO: 269500 - RNA, 19 nt, Artificial Sequence
  Description of Artificial Sequence: Synthetic oligonucleotide
  Sense strand starting at position 831 of SEQ ID NO: 3463
augaaaugaugugccugau

SEQ ID NO: 269501 - RNA, 19 nt, Artificial Sequence
  Description of Artificial Sequence: Synthetic oligonucleotide
  Antisense strand to SEQ ID NO: 269500
aucaggcacaucauuucau

SEQ ID NO: 269502 - RNA, 19 nt, Artificial Sequence
  Description of Artificial Sequence: Synthetic oligonucleotide
  Sense strand starting at position 834 of SEQ ID NO: 3463
aaaugaugugccugauaua

SEQ ID NO: 269503 - RNA, 19 nt, Artificial Sequence
  Description of Artificial Sequence: Synthetic oligonucleotide
  Antisense strand to SEQ ID NO: 269502
uauaucaggcacaucauuu

SEQ ID NO: 269504 - RNA, 19 nt, Artificial Sequence
  Description of Artificial Sequence: Synthetic oligonucleotide
  Sense strand starting at position 835 of SEQ ID NO: 3463
aaugaugugccugauauau

SEQ ID NO: 269505 - RNA, 19 nt, Artificial Sequence
  Description of Artificial Sequence: Synthetic oligonucleotide
  Antisense strand to SEQ ID NO: 269504
auauaucaggcacaucauu

SEQ ID NO: 269506 - RNA, 19 nt, Artificial Sequence
  Description of Artificial Sequence: Synthetic oligonucleotide
  Sense strand starting at position 1045 of SEQ ID NO: 3463
acgugcagugcccuuauau

SEQ ID NO: 269507 - RNA, 19 nt, Artificial Sequence
  Description of Artificial Sequence: Synthetic oligonucleotide
  Antisense strand to SEQ ID NO: 269506
auauaagggcacugcacgu

SEQ ID NO: 269508 - RNA, 19 nt, Artificial Sequence
  Description of Artificial Sequence: Synthetic oligonucleotide
  Sense strand starting at position 1046 of SEQ ID NO: 3463
cgugcagugcccuuauaua

SEQ ID NO: 269509 - RNA, 19 nt, Artificial Sequence
  Description of Artificial Sequence: Synthetic oligonucleotide
  Antisense strand to SEQ ID NO: 269508
uauauaagggcacugcacg

SEQ ID NO: 269510 - RNA, 19 nt, Artificial Sequence
  Description of Artificial Sequence: Synthetic oligonucleotide
  Sense strand starting at position 1423 of SEQ ID NO: 3463
ggaaucagguagguuagua

SEQ ID NO: 269511 - RNA, 19 nt, Artificial Sequence
  Description of Artificial Sequence: Synthetic oligonucleotide
  Antisense strand to SEQ ID NO: 269510
uacuaaccuaccugauucc

SEQ ID NO: 269512 - RNA, 19 nt, Artificial Sequence
  Description of Artificial Sequence: Synthetic oligonucleotide
  Sense strand starting at position 1486 of SEQ ID NO: 3463
aacgaaagguccucccaga

SEQ ID NO: 269513 - RNA, 19 nt, Artificial Sequence
  Description of Artificial Sequence: Synthetic oligonucleotide
  Antisense strand to SEQ ID NO: 269512
ucugggaggaccuuucguu

SEQ ID NO: 269514 - RNA, 19 nt, Artificial Sequence
  Description of Artificial Sequence: Synthetic oligonucleotide
  Sense strand starting at position 2181 of SEQ ID NO: 3463
aaggaaguguuguuuggau

SEQ ID NO: 269515 - RNA, 19 nt, Artificial Sequence
  Description of Artificial Sequence: Synthetic oligonucleotide
  Antisense strand to SEQ ID NO: 269514
auccaaacaacacuuccuu

SEQ ID NO: 269516 - RNA, 19 nt, Artificial Sequence
  Description of Artificial Sequence: Synthetic oligonucleotide
  Sense strand starting at position 2189 of SEQ ID NO: 3463
guuguuuggaucugaggaa

SEQ ID NO: 269517 - RNA, 19 nt, Artificial Sequence
  Description of Artificial Sequence: Synthetic oligonucleotide
  Antisense strand to SEQ ID NO: 269516
uuccucagauccaaacaac

SEQ ID NO: 269518 - RNA, 19 nt, Artificial Sequence
  Description of Artificial Sequence: Synthetic oligonucleotide
  Sense strand starting at position 2235 of SEQ ID NO: 3463
gcuguuugucuuguagcaa

SEQ ID NO: 269519 - RNA, 19 nt, Artificial Sequence
  Description of Artificial Sequence: Synthetic oligonucleotide
  Antisense strand to SEQ ID NO: 269518
uugcuacaagacaaacagc

SEQ ID NO: 269520 - RNA, 19 nt, Artificial Sequence
  Description of Artificial Sequence: Synthetic oligonucleotide
  Sense strand starting at position 2623 of SEQ ID NO: 3463
aauggaaauugauucgcau

SEQ ID NO: 269521 - RNA, 19 nt, Artificial Sequence
  Description of Artificial Sequence: Synthetic oligonucleotide
  Antisense strand to SEQ ID NO: 269520
augcgaaucaauuuccauu

SEQ ID NO: 269522 - RNA, 19 nt, Artificial Sequence
  Description of Artificial Sequence: Synthetic oligonucleotide
  Sense strand starting at position 2660 of SEQ ID NO: 3463
cuucauuuggcgugaaagg

SEQ ID NO: 269523 - RNA, 19 nt, Artificial Sequence
  Description of Artificial Sequence: Synthetic oligonucleotide
  Antisense strand to SEQ ID NO: 269522
ccuuucacgccaaaugaag

SEQ ID NO: 269524 - RNA, 19 nt, Artificial Sequence
  Description of Artificial Sequence: Synthetic oligonucleotide
  Sense strand starting at position 2900 of SEQ ID NO: 3463
guauuaagaacaggguauu

SEQ ID NO: 269525 - RNA, 19 nt, Artificial Sequence
  Description of Artificial Sequence: Synthetic oligonucleotide
  Antisense strand to SEQ ID NO: 269524
aauacccuguucuuaauac

SEQ ID NO: 269526 - RNA, 19 nt, Artificial Sequence
  Description of Artificial Sequence: Synthetic oligonucleotide
  Sense strand starting at position 2952 of SEQ ID NO: 3463
uacagaguacucugcgaac

SEQ ID NO: 269527 - RNA, 19 nt, Artificial Sequence
  Description of Artificial Sequence: Synthetic oligonucleotide
  Antisense strand to SEQ ID NO: 269526
guucgcagaguacucugua

SEQ ID NO: 269528 - RNA, 19 nt, Artificial Sequence
  Description of Artificial Sequence: Synthetic oligonucleotide
  Sense strand starting at position 2954 of SEQ ID NO: 3463
cagaguacucugcgaacag

SEQ ID NO: 269529 - RNA, 19 nt, Artificial Sequence
  Description of Artificial Sequence: Synthetic oligonucleotide
  Antisense strand to SEQ ID NO: 269528
cuguucgcagaguacucug

SEQ ID NO: 269530 - RNA, 19 nt, Artificial Sequence
  Description of Artificial Sequence: Synthetic oligonucleotide
  Sense strand starting at position 2958 of SEQ ID NO: 3463
guacucugcgaacagaaga

SEQ ID NO: 269531 - RNA, 19 nt, Artificial Sequence
  Description of Artificial Sequence: Synthetic oligonucleotide
  Antisense strand to SEQ ID NO: 269530
ucuucuguucgcagaguac

SEQ ID NO: 269532 - RNA, 19 nt, Artificial Sequence
  Description of Artificial Sequence: Synthetic oligonucleotide
  Sense strand starting at position 2984 of SEQ ID NO: 3463
ucauuaucgagcgagacaa

SEQ ID NO: 269533 - RNA, 19 nt, Artificial Sequence
  Description of Artificial Sequence: Synthetic oligonucleotide
  Antisense strand to SEQ ID NO: 269532
uugucucgcucgauaauga

SEQ ID NO: 269534 - RNA, 19 nt, Artificial Sequence
  Description of Artificial Sequence: Synthetic oligonucleotide
  Sense strand starting at position 3027 of SEQ ID NO: 3463
uuaccuagcacgugaagau

SEQ ID NO: 269535 - RNA, 19 nt, Artificial Sequence
  Description of Artificial Sequence: Synthetic oligonucleotide
  Antisense strand to SEQ ID NO: 269534
aucuucacgugcuagguaa

SEQ ID NO: 269536 - RNA, 19 nt, Artificial Sequence
  Description of Artificial Sequence: Synthetic oligonucleotide
  Sense strand starting at position 3028 of SEQ ID NO: 3463
uaccuagcacgugaagaua

SEQ ID NO: 269537 - RNA, 19 nt, Artificial Sequence
  Description of Artificial Sequence: Synthetic oligonucleotide
  Antisense strand to SEQ ID NO: 269536
uaucuucacgugcuaggua

SEQ ID NO: 269538 - RNA, 19 nt, Artificial Sequence
  Description of Artificial Sequence: Synthetic oligonucleotide
  Sense strand starting at position 3274 of SEQ ID NO: 3463
uugggucuguuauuaugaa

SEQ ID NO: 269539 - RNA, 19 nt, Artificial Sequence
  Description of Artificial Sequence: Synthetic oligonucleotide
  Antisense strand to SEQ ID NO: 269538
uucauaauaacagacccaa

SEQ ID NO: 269540 - RNA, 19 nt, Artificial Sequence
  Description of Artificial Sequence: Synthetic oligonucleotide
  Sense strand starting at position 3281 of SEQ ID NO: 3463
uguuauuaugaagggcuua

SEQ ID NO: 269541 - RNA, 19 nt, Artificial Sequence
  Description of Artificial Sequence: Synthetic oligonucleotide
  Antisense strand to SEQ ID NO: 269540
uaagcccuucauaauaaca

SEQ ID NO: 269542 - RNA, 19 nt, Artificial Sequence
  Description of Artificial Sequence: Synthetic oligonucleotide
  Sense strand starting at position 3317 of SEQ ID NO: 3463
uggucagauuuguauugaa

SEQ ID NO: 269543 - RNA, 19 nt, Artificial Sequence
  Description of Artificial Sequence: Synthetic oligonucleotide
  Antisense strand to SEQ ID NO: 269542
uucaauacaaaucugacca

SEQ ID NO: 269544 - RNA, 19 nt, Artificial Sequence
  Description of Artificial Sequence: Synthetic oligonucleotide
  Sense strand starting at position 3333 of SEQ ID NO: 3463
gaaagaucuuuggauaaag

SEQ ID NO: 269545 - RNA, 19 nt, Artificial Sequence
  Description of Artificial Sequence: Synthetic oligonucleotide
  Antisense strand to SEQ ID NO: 269544
cuuuauccaaagaucuuuc

SEQ ID NO: 269546 - RNA, 19 nt, Artificial Sequence
  Description of Artificial Sequence: Synthetic oligonucleotide
  Sense strand starting at position 3390 of SEQ ID NO: 3463
uugggagcuguuuaggaaa

SEQ ID NO: 269547 - RNA, 19 nt, Artificial Sequence
  Description of Artificial Sequence: Synthetic oligonucleotide
  Antisense strand to SEQ ID NO: 269546
uuuccuaaacagcucccaa

SEQ ID NO: 269548 - RNA, 19 nt, Artificial Sequence
  Description of Artificial Sequence: Synthetic oligonucleotide
  Sense strand starting at position 3426 of SEQ ID NO: 3463
ugaucauagccuugauacc

SEQ ID NO: 269549 - RNA, 19 nt, Artificial Sequence
  Description of Artificial Sequence: Synthetic oligonucleotide
  Antisense strand to SEQ ID NO: 269548
gguaucaaggcuaugauca

SEQ ID NO: 269550 - RNA, 19 nt, Artificial Sequence
  Description of Artificial Sequence: Synthetic oligonucleotide
  Sense strand starting at position 3525 of SEQ ID NO: 3463
gggagugacuagagacaga

SEQ ID NO: 269551 - RNA, 19 nt, Artificial Sequence
  Description of Artificial Sequence: Synthetic oligonucleotide
  Antisense strand to SEQ ID NO: 269550
ucugucucuagucacuccc

SEQ ID NO: 269552 - RNA, 19 nt, Artificial Sequence
  Description of Artificial Sequence: Synthetic oligonucleotide
  Sense strand starting at position 3570 of SEQ ID NO: 3463
uaacaaugauguguuugaa

SEQ ID NO: 269553 - RNA, 19 nt, Artificial Sequence
  Description of Artificial Sequence: Synthetic oligonucleotide
  Antisense strand to SEQ ID NO: 269552
uucaaacacaucauuguua

SEQ ID NO: 269554 - RNA, 19 nt, Artificial Sequence
  Description of Artificial Sequence: Synthetic oligonucleotide
  Sense strand starting at position 3573 of SEQ ID NO: 3463
caaugauguguuugaagag

SEQ ID NO: 269555 - RNA, 19 nt, Artificial Sequence
  Description of Artificial Sequence: Synthetic oligonucleotide
  Antisense strand to SEQ ID NO: 269554
cucuucaaacacaucauug

SEQ ID NO: 269556 - RNA, 19 nt, Artificial Sequence
  Description of Artificial Sequence: Synthetic oligonucleotide
  Sense strand starting at position 3661 of SEQ ID NO: 3463
aaaggaagauuguuugcau

SEQ ID NO: 269557 - RNA, 19 nt, Artificial Sequence
  Description of Artificial Sequence: Synthetic oligonucleotide
  Antisense strand to SEQ ID NO: 269556
augcaaacaaucuuccuuu

SEQ ID NO: 269558 - RNA, 19 nt, Artificial Sequence
  Description of Artificial Sequence: Synthetic oligonucleotide
  Sense strand starting at position 3662 of SEQ ID NO: 3463
aaggaagauuguuugcauc

SEQ ID NO: 269559 - RNA, 19 nt, Artificial Sequence
  Description of Artificial Sequence: Synthetic oligonucleotide
  Antisense strand to SEQ ID NO: 269558
gaugcaaacaaucuuccuu

SEQ ID NO: 269560 - RNA, 19 nt, Artificial Sequence
  Description of Artificial Sequence: Synthetic oligonucleotide
  Sense strand starting at position 3680 of SEQ ID NO: 3463
cccagaguuccaggaugca

SEQ ID NO: 269561 - RNA, 19 nt, Artificial Sequence
  Description of Artificial Sequence: Synthetic oligonucleotide
  Antisense strand to SEQ ID NO: 269560
ugcauccuggaacucuggg

SEQ ID NO: 269562 - RNA, 19 nt, Artificial Sequence
  Description of Artificial Sequence: Synthetic oligonucleotide
  Sense strand starting at position 9 of SEQ ID NO: 3466
ugcugacauaggugguuaa

SEQ ID NO: 269563 - RNA, 19 nt, Artificial Sequence
  Description of Artificial Sequence: Synthetic oligonucleotide
  Antisense strand to SEQ ID NO: 269562
uuaaccaccuaugucagca

SEQ ID NO: 269564 - RNA, 19 nt, Artificial Sequence
  Description of Artificial Sequence: Synthetic oligonucleotide
  Sense strand starting at position 12 of SEQ ID NO: 3466
ugacauaggugguuaagaa

SEQ ID NO: 269565 - RNA, 19 nt, Artificial Sequence
  Description of Artificial Sequence: Synthetic oligonucleotide
  Antisense strand to SEQ ID NO: 269564
uucuuaaccaccuauguca

SEQ ID NO: 269566 - RNA, 19 nt, Artificial Sequence
  Description of Artificial Sequence: Synthetic oligonucleotide
  Sense strand starting at position 46 of SEQ ID NO: 3466
gcaguaaaugauugccaua

SEQ ID NO: 269567 - RNA, 19 nt, Artificial Sequence
  Description of Artificial Sequence: Synthetic oligonucleotide
  Antisense strand to SEQ ID NO: 269566
uauggcaaucauuuacugc

SEQ ID NO: 269568 - RNA, 19 nt, Artificial Sequence
  Description of Artificial Sequence: Synthetic oligonucleotide
  Sense strand starting at position 48 of SEQ ID NO: 3466
aguaaaugauugccauaaa

SEQ ID NO: 269569 - RNA, 19 nt, Artificial Sequence
  Description of Artificial Sequence: Synthetic oligonucleotide
  Antisense strand to SEQ ID NO: 269568
uuuauggcaaucauuuacu

SEQ ID NO: 269570 - RNA, 19 nt, Artificial Sequence
  Description of Artificial Sequence: Synthetic oligonucleotide
  Sense strand starting at position 104 of SEQ ID NO: 3466
aagggaugaucaggaauag

SEQ ID NO: 269571 - RNA, 19 nt, Artificial Sequence
  Description of Artificial Sequence: Synthetic oligonucleotide
  Antisense strand to SEQ ID NO: 269570
cuauuccugaucaucccuu

SEQ ID NO: 269572 - RNA, 19 nt, Artificial Sequence
  Description of Artificial Sequence: Synthetic oligonucleotide
  Sense strand starting at position 210 of SEQ ID NO: 3466
ucauuauacuauguaucga

SEQ ID NO: 269573 - RNA, 19 nt, Artificial Sequence
  Description of Artificial Sequence: Synthetic oligonucleotide
  Antisense strand to SEQ ID NO: 269572
ucgauacauaguauaauga

SEQ ID NO: 269574 - RNA, 19 nt, Artificial Sequence
  Description of Artificial Sequence: Synthetic oligonucleotide
  Sense strand starting at position 339 of SEQ ID NO: 3466
gcagacaauugguuacacu

SEQ ID NO: 269575 - RNA, 19 nt, Artificial Sequence
  Description of Artificial Sequence: Synthetic oligonucleotide
  Antisense strand to SEQ ID NO: 269574
aguguaaccaauugucugc

SEQ ID NO: 269576 - RNA, 19 nt, Artificial Sequence
  Description of Artificial Sequence: Synthetic oligonucleotide
  Sense strand starting at position 364 of SEQ ID NO: 3466
acagacaauugguuacacu

SEQ ID NO: 269577 - RNA, 19 nt, Artificial Sequence
  Description of Artificial Sequence: Synthetic oligonucleotide
  Antisense strand to SEQ ID NO: 269576
aguguaaccaauugucugu

SEQ ID NO: 269578 - RNA, 19 nt, Artificial Sequence
  Description of Artificial Sequence: Synthetic oligonucleotide
  Sense strand starting at position 415 of SEQ ID NO: 3466
uuugauuccaucggacaug

SEQ ID NO: 269579 - RNA, 19 nt, Artificial Sequence
  Description of Artificial Sequence: Synthetic oligonucleotide
  Antisense strand to SEQ ID NO: 269578
cauguccgauggaaucaaa

SEQ ID NO: 269580 - RNA, 19 nt, Artificial Sequence
  Description of Artificial Sequence: Synthetic oligonucleotide
  Sense strand starting at position 463 of SEQ ID NO: 3466
gggcuaagcaaugaugcau

SEQ ID NO: 269581 - RNA, 19 nt, Artificial Sequence
  Description of Artificial Sequence: Synthetic oligonucleotide
  Antisense strand to SEQ ID NO: 269580
augcaucauugcuuagccc

SEQ ID NO: 269582 - RNA, 19 nt, Artificial Sequence
  Description of Artificial Sequence: Synthetic oligonucleotide
  Sense strand starting at position 540 of SEQ ID NO: 3466
acugauaguguacaccuaa

SEQ ID NO: 269583 - RNA, 19 nt, Artificial Sequence
  Description of Artificial Sequence: Synthetic oligonucleotide
  Antisense strand to SEQ ID NO: 269582
uuagguguacacuaucagu

SEQ ID NO: 269584 - RNA, 19 nt, Artificial Sequence
  Description of Artificial Sequence: Synthetic oligonucleotide
  Sense strand starting at position 983 of SEQ ID NO: 3466
acauauugagacugugaug

SEQ ID NO: 269585 - RNA, 19 nt, Artificial Sequence
  Description of Artificial Sequence: Synthetic oligonucleotide
  Antisense strand to SEQ ID NO: 269584
caucacagucucaauaugu

SEQ ID NO: 269586 - RNA, 19 nt, Artificial Sequence
  Description of Artificial Sequence: Synthetic oligonucleotide
  Sense strand starting at position 1001 of SEQ ID NO: 3466
gcuuuauauugauuguaug

SEQ ID NO: 269587 - RNA, 19 nt, Artificial Sequence
  Description of Artificial Sequence: Synthetic oligonucleotide
  Antisense strand to SEQ ID NO: 269586
cauacaaucaauauaaagc

SEQ ID NO: 269588 - RNA, 19 nt, Artificial Sequence
  Description of Artificial Sequence: Synthetic oligonucleotide
  Sense strand starting at position 1246 of SEQ ID NO: 3466
gggaaacuuugaucacguc

SEQ ID NO: 269589 - RNA, 19 nt, Artificial Sequence
  Description of Artificial Sequence: Synthetic oligonucleotide
  Antisense strand to SEQ ID NO: 269588
gacgugaucaaaguuuccc

SEQ ID NO: 269590 - RNA, 19 nt, Artificial Sequence
  Description of Artificial Sequence: Synthetic oligonucleotide
  Sense strand starting at position 1274 of SEQ ID NO: 3466
ucaucaaucguagaacuca

SEQ ID NO: 269591 - RNA, 19 nt, Artificial Sequence
  Description of Artificial Sequence: Synthetic oligonucleotide
  Antisense strand to SEQ ID NO: 269590
ugaguucuacgauugauga

SEQ ID NO: 269592 - RNA, 19 nt, Artificial Sequence
  Description of Artificial Sequence: Synthetic oligonucleotide
  Sense strand starting at position 1313 of SEQ ID NO: 3466
ccacaucccucuccgagaa

SEQ ID NO: 269593 - RNA, 19 nt, Artificial Sequence
  Description of Artificial Sequence: Synthetic oligonucleotide
  Antisense strand to SEQ ID NO: 269592
uucucggagagggaugugg

SEQ ID NO: 269594 - RNA, 19 nt, Artificial Sequence
  Description of Artificial Sequence: Synthetic oligonucleotide
  Sense strand starting at position 1518 of SEQ ID NO: 3466
ggacuugucucugucccua

SEQ ID NO: 269595 - RNA, 19 nt, Artificial Sequence
  Description of Artificial Sequence: Synthetic oligonucleotide
  Antisense strand to SEQ ID NO: 269594
uagggacagagacaagucc

SEQ ID NO: 269596 - RNA, 19 nt, Artificial Sequence
  Description of Artificial Sequence: Synthetic oligonucleotide
  Sense strand starting at position 1520 of SEQ ID NO: 3466
acuugucucugucccuaga

SEQ ID NO: 269597 - RNA, 19 nt, Artificial Sequence
  Description of Artificial Sequence: Synthetic oligonucleotide
  Antisense strand to SEQ ID NO: 269596
ucuagggacagagacaagu

SEQ ID NO: 269598 - RNA, 19 nt, Artificial Sequence
  Description of Artificial Sequence: Synthetic oligonucleotide
  Sense strand starting at position 1522 of SEQ ID NO: 3466
uugucucugucccuagaua

SEQ ID NO: 269599 - RNA, 19 nt, Artificial Sequence
  Description of Artificial Sequence: Synthetic oligonucleotide
  Antisense strand to SEQ ID NO: 269598
uaucuagggacagagacaa

SEQ ID NO: 269600 - RNA, 19 nt, Artificial Sequence
  Description of Artificial Sequence: Synthetic oligonucleotide
  Sense strand starting at position 1555 of SEQ ID NO: 3466
ugcagucaugagggucaau

SEQ ID NO: 269601 - RNA, 19 nt, Artificial Sequence
  Description of Artificial Sequence: Synthetic oligonucleotide
  Antisense strand to SEQ ID NO: 269600
auugacccucaugacugca

SEQ ID NO: 269602 - RNA, 19 nt, Artificial Sequence
  Description of Artificial Sequence: Synthetic oligonucleotide
  Sense strand starting at position 1566 of SEQ ID NO: 3466
gggucaauugcugaggcuu

SEQ ID NO: 269603 - RNA, 19 nt, Artificial Sequence
  Description of Artificial Sequence: Synthetic oligonucleotide
  Antisense strand to SEQ ID NO: 269602
aagccucagcaauugaccc

SEQ ID NO: 269604 - RNA, 19 nt, Artificial Sequence
  Description of Artificial Sequence: Synthetic oligonucleotide
  Sense strand starting at position 1674 of SEQ ID NO: 3466
aaggauuccucggcaagcu

SEQ ID NO: 269605 - RNA, 19 nt, Artificial Sequence
  Description of Artificial Sequence: Synthetic oligonucleotide
  Antisense strand to SEQ ID NO: 269604
agcuugccgaggaauccuu

SEQ ID NO: 269606 - RNA, 19 nt, Artificial Sequence
  Description of Artificial Sequence: Synthetic oligonucleotide
  Sense strand starting at position 2567 of SEQ ID NO: 3466
gaaggaguuucuucuucuu

SEQ ID NO: 269607 - RNA, 19 nt, Artificial Sequence
  Description of Artificial Sequence: Synthetic oligonucleotide
  Antisense strand to SEQ ID NO: 269606
aagaagaagaaacuccuuc

SEQ ID NO: 269608 - RNA, 19 nt, Artificial Sequence
  Description of Artificial Sequence: Synthetic oligonucleotide
  Sense strand starting at position 2883 of SEQ ID NO: 3466
uuauuacccuuugugucau

SEQ ID NO: 269609 - RNA, 19 nt, Artificial Sequence
  Description of Artificial Sequence: Synthetic oligonucleotide
  Antisense strand to SEQ ID NO: 269608
augacacaaaggguaauaa

SEQ ID NO: 269610 - RNA, 19 nt, Artificial Sequence
  Description of Artificial Sequence: Synthetic oligonucleotide
  Sense strand starting at position 3282 of SEQ ID NO: 3466
gcacacuuucuagauguca

SEQ ID NO: 269611 - RNA, 19 nt, Artificial Sequence
  Description of Artificial Sequence: Synthetic oligonucleotide
  Antisense strand to SEQ ID NO: 269610
ugacaucuagaaagugugc

SEQ ID NO: 269612 - RNA, 19 nt, Artificial Sequence
  Description of Artificial Sequence: Synthetic oligonucleotide
  Sense strand starting at position 3354 of SEQ ID NO: 3466
uuuguuucugagugggaaa

SEQ ID NO: 269613 - RNA, 19 nt, Artificial Sequence
  Description of Artificial Sequence: Synthetic oligonucleotide
  Antisense strand to SEQ ID NO: 269612
uuucccacucagaaacaaa

SEQ ID NO: 269614 - RNA, 19 nt, Artificial Sequence
  Description of Artificial Sequence: Synthetic oligonucleotide
  Sense strand starting at position 3392 of SEQ ID NO: 3466
auuggaacugcuuauccau

SEQ ID NO: 269615 - RNA, 19 nt, Artificial Sequence
  Description of Artificial Sequence: Synthetic oligonucleotide
  Antisense strand to SEQ ID NO: 269614
auggauaagcaguuccaau

SEQ ID NO: 269616 - RNA, 19 nt, Artificial Sequence
  Description of Artificial Sequence: Synthetic oligonucleotide
  Sense strand starting at position 3436 of SEQ ID NO: 3466
uuugguccuguaugagauu

SEQ ID NO: 269617 - RNA, 19 nt, Artificial Sequence
  Description of Artificial Sequence: Synthetic oligonucleotide
  Antisense strand to SEQ ID NO: 269616
aaucucauacaggaccaaa

SEQ ID NO: 269618 - RNA, 19 nt, Artificial Sequence
  Description of Artificial Sequence: Synthetic oligonucleotide
  Sense strand starting at position 3445 of SEQ ID NO: 3466
guaugagauuuggauauug

SEQ ID NO: 269619 - RNA, 19 nt, Artificial Sequence
  Description of Artificial Sequence: Synthetic oligonucleotide
  Antisense strand to SEQ ID NO: 269618
caauauccaaaucucauac

SEQ ID NO: 269620 - RNA, 19 nt, Artificial Sequence
  Description of Artificial Sequence: Synthetic oligonucleotide
  Sense strand starting at position 3472 of SEQ ID NO: 3466
guuggaagacuugauuggu

SEQ ID NO: 269621 - RNA, 19 nt, Artificial Sequence
  Description of Artificial Sequence: Synthetic oligonucleotide
  Antisense strand to SEQ ID NO: 269620
accaaucaagucuuccaac

SEQ ID NO: 269622 - RNA, 19 nt, Artificial Sequence
  Description of Artificial Sequence: Synthetic oligonucleotide
  Sense strand starting at position 3564 of SEQ ID NO: 3466
gguagaggccuuugguuag

SEQ ID NO: 269623 - RNA, 19 nt, Artificial Sequence
  Description of Artificial Sequence: Synthetic oligonucleotide
  Antisense strand to SEQ ID NO: 269622
cuaaccaaaggccucuacc

SEQ ID NO: 269624 - RNA, 19 nt, Artificial Sequence
  Description of Artificial Sequence: Synthetic oligonucleotide
  Sense strand starting at position 3700 of SEQ ID NO: 3466
acauacguuccugauacuu

SEQ ID NO: 269625 - RNA, 19 nt, Artificial Sequence
  Description of Artificial Sequence: Synthetic oligonucleotide
  Antisense strand to SEQ ID NO: 269624
aaguaucaggaacguaugu

SEQ ID NO: 269626 - RNA, 19 nt, Artificial Sequence
  Description of Artificial Sequence: Synthetic oligonucleotide
  Sense strand starting at position 3761 of SEQ ID NO: 3466
uggguauauuuguaaucuu

SEQ ID NO: 269627 - RNA, 19 nt, Artificial Sequence
  Description of Artificial Sequence: Synthetic oligonucleotide
  Antisense strand to SEQ ID NO: 269626
aagauuacaaauauaccca

SEQ ID NO: 269628 - RNA, 19 nt, Artificial Sequence
  Description of Artificial Sequence: Synthetic oligonucleotide
  Sense strand starting at position 3777 of SEQ ID NO: 3466
cuuuguaacuugucugaac

SEQ ID NO: 269629 - RNA, 19 nt, Artificial Sequence
  Description of Artificial Sequence: Synthetic oligonucleotide
  Antisense strand to SEQ ID NO: 269628
guucagacaaguuacaaag

SEQ ID NO: 269630 - RNA, 19 nt, Artificial Sequence
  Description of Artificial Sequence: Synthetic oligonucleotide
  Sense strand starting at position 3778 of SEQ ID NO: 3466
uuuguaacuugucugaaca

SEQ ID NO: 269631 - RNA, 19 nt, Artificial Sequence
  Description of Artificial Sequence: Synthetic oligonucleotide
  Antisense strand to SEQ ID NO: 269630
uguucagacaaguuacaaa

SEQ ID NO: 269632 - RNA, 19 nt, Artificial Sequence
  Description of Artificial Sequence: Synthetic oligonucleotide
  Sense strand starting at position 3779 of SEQ ID NO: 3466
uuguaacuugucugaacaa

SEQ ID NO: 269633 - RNA, 19 nt, Artificial Sequence
  Description of Artificial Sequence: Synthetic oligonucleotide
  Antisense strand to SEQ ID NO: 269632
uuguucagacaaguuacaa

SEQ ID NO: 269634 - RNA, 19 nt, Artificial Sequence
  Description of Artificial Sequence: Synthetic oligonucleotide
  Sense strand starting at position 3854 of SEQ ID NO: 3466
caucaauaguuugcuggau

SEQ ID NO: 269635 - RNA, 19 nt, Artificial Sequence
  Description of Artificial Sequence: Synthetic oligonucleotide
  Antisense strand to SEQ ID NO: 269634
auccagcaaacuauugaug

SEQ ID NO: 269636 - RNA, 19 nt, Artificial Sequence
  Description of Artificial Sequence: Synthetic oligonucleotide
  Sense strand starting at position 3855 of SEQ ID NO: 3466
aucaauaguuugcuggauu

SEQ ID NO: 269637 - RNA, 19 nt, Artificial Sequence
  Description of Artificial Sequence: Synthetic oligonucleotide
  Antisense strand to SEQ ID NO: 269636
aauccagcaaacuauugau

SEQ ID NO: 269638 - RNA, 19 nt, Artificial Sequence
  Description of Artificial Sequence: Synthetic oligonucleotide
  Sense strand starting at position 3909 of SEQ ID NO: 3466
acuguuguaaauugagaug

SEQ ID NO: 269639 - RNA, 19 nt, Artificial Sequence
  Description of Artificial Sequence: Synthetic oligonucleotide
  Antisense strand to SEQ ID NO: 269638
caucucaauuuacaacagu

SEQ ID NO: 269640 - RNA, 19 nt, Artificial Sequence
  Description of Artificial Sequence: Synthetic oligonucleotide
  Sense strand starting at position 3914 of SEQ ID NO: 3466
uguaaauugagaugaguuu

SEQ ID NO: 269641 - RNA, 19 nt, Artificial Sequence
  Description of Artificial Sequence: Synthetic oligonucleotide
  Antisense strand to SEQ ID NO: 269640
aaacucaucucaauuuaca

SEQ ID NO: 269642 - RNA, 19 nt, Artificial Sequence
  Description of Artificial Sequence: Synthetic oligonucleotide
  Sense strand starting at position 2 of SEQ ID NO: 3464
ugacauaggugguuaagaa

SEQ ID NO: 269643 - RNA, 19 nt, Artificial Sequence
  Description of Artificial Sequence: Synthetic oligonucleotide
  Antisense strand to SEQ ID NO: 269642
uucuuaaccaccuauguca

SEQ ID NO: 269644 - RNA, 19 nt, Artificial Sequence
  Description of Artificial Sequence: Synthetic oligonucleotide
  Sense strand starting at position 36 of SEQ ID NO: 3464
gcaguaaaugauugccaua

SEQ ID NO: 269645 - RNA, 19 nt, Artificial Sequence
  Description of Artificial Sequence: Synthetic oligonucleotide
  Antisense strand to SEQ ID NO: 269644
uauggcaaucauuuacugc

SEQ ID NO: 269646 - RNA, 19 nt, Artificial Sequence
  Description of Artificial Sequence: Synthetic oligonucleotide
  Sense strand starting at position 38 of SEQ ID NO: 3464
aguaaaugauugccauaaa

SEQ ID NO: 269647 - RNA, 19 nt, Artificial Sequence
  Description of Artificial Sequence: Synthetic oligonucleotide
  Antisense strand to SEQ ID NO: 269646
uuuauggcaaucauuuacu

SEQ ID NO: 269648 - RNA, 19 nt, Artificial Sequence
  Description of Artificial Sequence: Synthetic oligonucleotide
  Sense strand starting at position 94 of SEQ ID NO: 3464
aagggaugaucaggaauag

SEQ ID NO: 269649 - RNA, 19 nt, Artificial Sequence
  Description of Artificial Sequence: Synthetic oligonucleotide
  Antisense strand to SEQ ID NO: 269648
cuauuccugaucaucccuu

SEQ ID NO: 269650 - RNA, 19 nt, Artificial Sequence
  Description of Artificial Sequence: Synthetic oligonucleotide
  Sense strand starting at position 200 of SEQ ID NO: 3464
ucauuauacuauguaucga

SEQ ID NO: 269651 - RNA, 19 nt, Artificial Sequence
  Description of Artificial Sequence: Synthetic oligonucleotide
  Antisense strand to SEQ ID NO: 269650
ucgauacauaguauaauga

SEQ ID NO: 269652 - RNA, 19 nt, Artificial Sequence
  Description of Artificial Sequence: Synthetic oligonucleotide
  Sense strand starting at position 329 of SEQ ID NO: 3464
gcagacaauugguuacacu

SEQ ID NO: 269653 - RNA, 19 nt, Artificial Sequence
  Description of Artificial Sequence: Synthetic oligonucleotide
  Antisense strand to SEQ ID NO: 269652
aguguaaccaauugucugc

SEQ ID NO: 269654 - RNA, 19 nt, Artificial Sequence
  Description of Artificial Sequence: Synthetic oligonucleotide
  Sense strand starting at position 354 of SEQ ID NO: 3464
acagacaauugguuacacu

SEQ ID NO: 269655 - RNA, 19 nt, Artificial Sequence
  Description of Artificial Sequence: Synthetic oligonucleotide
  Antisense strand to SEQ ID NO: 269654
aguguaaccaauugucugu

SEQ ID NO: 269656 - RNA, 19 nt, Artificial Sequence
  Description of Artificial Sequence: Synthetic oligonucleotide
  Sense strand starting at position 405 of SEQ ID NO: 3464
uuugauuccaucggacaug

SEQ ID NO: 269657 - RNA, 19 nt, Artificial Sequence
  Description of Artificial Sequence: Synthetic oligonucleotide
  Antisense strand to SEQ ID NO: 269656
cauguccgauggaaucaaa

SEQ ID NO: 269658 - RNA, 19 nt, Artificial Sequence
  Description of Artificial Sequence: Synthetic oligonucleotide
  Sense strand starting at position 453 of SEQ ID NO: 3464
gggcuaagcaaugaugcau

SEQ ID NO: 269659 - RNA, 19 nt, Artificial Sequence
  Description of Artificial Sequence: Synthetic oligonucleotide
  Antisense strand to SEQ ID NO: 269658
augcaucauugcuuagccc

SEQ ID NO: 269660 - RNA, 19 nt, Artificial Sequence
  Description of Artificial Sequence: Synthetic oligonucleotide
  Sense strand starting at position 530 of SEQ ID NO: 3464
acugauaguguacaccuaa

SEQ ID NO: 269661 - RNA, 19 nt, Artificial Sequence
  Description of Artificial Sequence: Synthetic oligonucleotide
  Antisense strand to SEQ ID NO: 269660
uuagguguacacuaucagu

SEQ ID NO: 269662 - RNA, 19 nt, Artificial Sequence
  Description of Artificial Sequence: Synthetic oligonucleotide
  Sense strand starting at position 973 of SEQ ID NO: 3464
acauauugagacugugaug

SEQ ID NO: 269663 - RNA, 19 nt, Artificial Sequence
  Description of Artificial Sequence: Synthetic oligonucleotide
  Antisense strand to SEQ ID NO: 269662
caucacagucucaauaugu

SEQ ID NO: 269664 - RNA, 19 nt, Artificial Sequence
  Description of Artificial Sequence: Synthetic oligonucleotide
  Sense strand starting at position 991 of SEQ ID NO: 3464
gcuuuauauugauuguaug

SEQ ID NO: 269665 - RNA, 19 nt, Artificial Sequence
  Description of Artificial Sequence: Synthetic oligonucleotide
  Antisense strand to SEQ ID NO: 269664
cauacaaucaauauaaagc

SEQ ID NO: 269666 - RNA, 19 nt, Artificial Sequence
  Description of Artificial Sequence: Synthetic oligonucleotide
  Sense strand starting at position 1236 of SEQ ID NO: 3464
gggaaacuuugaucacguc

SEQ ID NO: 269667 - RNA, 19 nt, Artificial Sequence
  Description of Artificial Sequence: Synthetic oligonucleotide
  Antisense strand to SEQ ID NO: 269666
gacgugaucaaaguuuccc

SEQ ID NO: 269668 - RNA, 19 nt, Artificial Sequence
  Description of Artificial Sequence: Synthetic oligonucleotide
  Sense strand starting at position 1264 of SEQ ID NO: 3464
ucaucaaucguagaacuca

SEQ ID NO: 269669 - RNA, 19 nt, Artificial Sequence
  Description of Artificial Sequence: Synthetic oligonucleotide
  Antisense strand to SEQ ID NO: 269668
ugaguucuacgauugauga

SEQ ID NO: 269670 - RNA, 19 nt, Artificial Sequence
  Description of Artificial Sequence: Synthetic oligonucleotide
  Sense strand starting at position 1303 of SEQ ID NO: 3464
ccacaucccucuccgagaa

SEQ ID NO: 269671 - RNA, 19 nt, Artificial Sequence
  Description of Artificial Sequence: Synthetic oligonucleotide
  Antisense strand to SEQ ID NO: 269670
uucucggagagggaugugg

SEQ ID NO: 269672 - RNA, 19 nt, Artificial Sequence
  Description of Artificial Sequence: Synthetic oligonucleotide
  Sense strand starting at position 1508 of SEQ ID NO: 3464
ggacuugucucugucccua

SEQ ID NO: 269673 - RNA, 19 nt, Artificial Sequence
  Description of Artificial Sequence: Synthetic oligonucleotide
  Antisense strand to SEQ ID NO: 269672
uagggacagagacaagucc

SEQ ID NO: 269674 - RNA, 19 nt, Artificial Sequence
  Description of Artificial Sequence: Synthetic oligonucleotide
  Sense strand starting at position 1510 of SEQ ID NO: 3464
acuugucucugucccuaga

SEQ ID NO: 269675 - RNA, 19 nt, Artificial Sequence
  Description of Artificial Sequence: Synthetic oligonucleotide
  Antisense strand to SEQ ID NO: 269674
ucuagggacagagacaagu

SEQ ID NO: 269676 - RNA, 19 nt, Artificial Sequence
  Description of Artificial Sequence: Synthetic oligonucleotide
  Sense strand starting at position 1512 of SEQ ID NO: 3464
uugucucugucccuagaua

SEQ ID NO: 269677 - RNA, 19 nt, Artificial Sequence
  Description of Artificial Sequence: Synthetic oligonucleotide
  Antisense strand to SEQ ID NO: 269676
uaucuagggacagagacaa

SEQ ID NO: 269678 - RNA, 19 nt, Artificial Sequence
  Description of Artificial Sequence: Synthetic oligonucleotide
  Sense strand starting at position 1545 of SEQ ID NO: 3464
ugcagucaugagggucaau

SEQ ID NO: 269679 - RNA, 19 nt, Artificial Sequence
  Description of Artificial Sequence: Synthetic oligonucleotide
  Antisense strand to SEQ ID NO: 269678
auugacccucaugacugca

SEQ ID NO: 269680 - RNA, 19 nt, Artificial Sequence
  Description of Artificial Sequence: Synthetic oligonucleotide
  Sense strand starting at position 1556 of SEQ ID NO: 3464
gggucaauugcugaggcuu

SEQ ID NO: 269681 - RNA, 19 nt, Artificial Sequence
  Description of Artificial Sequence: Synthetic oligonucleotide
  Antisense strand to SEQ ID NO: 269680
aagccucagcaauugaccc

SEQ ID NO: 269682 - RNA, 19 nt, Artificial Sequence
  Description of Artificial Sequence: Synthetic oligonucleotide
  Sense strand starting at position 1664 of SEQ ID NO: 3464
aaggauuccucggcaagcu

SEQ ID NO: 269683 - RNA, 19 nt, Artificial Sequence
  Description of Artificial Sequence: Synthetic oligonucleotide
  Antisense strand to SEQ ID NO: 269682
agcuugccgaggaauccuu

SEQ ID NO: 269684 - RNA, 19 nt, Artificial Sequence
  Description of Artificial Sequence: Synthetic oligonucleotide
  Sense strand starting at position 2557 of SEQ ID NO: 3464
gaaggaguuucuucuucuu

SEQ ID NO: 269685 - RNA, 19 nt, Artificial Sequence
  Description of Artificial Sequence: Synthetic oligonucleotide
  Antisense strand to SEQ ID NO: 269684
aagaagaagaaacuccuuc

SEQ ID NO: 269686 - RNA, 19 nt, Artificial Sequence
  Description of Artificial Sequence: Synthetic oligonucleotide
  Sense strand starting at position 2872 of SEQ ID NO: 3464
uuuauuacccuuuguguca

SEQ ID NO: 269687 - RNA, 19 nt, Artificial Sequence
  Description of Artificial Sequence: Synthetic oligonucleotide
  Antisense strand to SEQ ID NO: 269686
ugacacaaaggguaauaaa

SEQ ID NO: 269688 - RNA, 19 nt, Artificial Sequence
  Description of Artificial Sequence: Synthetic oligonucleotide
  Sense strand starting at position 2873 of SEQ ID NO: 3464
uuauuacccuuugugucau

SEQ ID NO: 269689 - RNA, 19 nt, Artificial Sequence
  Description of Artificial Sequence: Synthetic oligonucleotide
  Antisense strand to SEQ ID NO: 269688
augacacaaaggguaauaa

SEQ ID NO: 269690 - RNA, 19 nt, Artificial Sequence
  Description of Artificial Sequence: Synthetic oligonucleotide
  Sense strand starting at position 3272 of SEQ ID NO: 3464
gcacacuuucuagauguca

SEQ ID NO: 269691 - RNA, 19 nt, Artificial Sequence
  Description of Artificial Sequence: Synthetic oligonucleotide
  Antisense strand to SEQ ID NO: 269690
ugacaucuagaaagugugc

SEQ ID NO: 269692 - RNA, 19 nt, Artificial Sequence
  Description of Artificial Sequence: Synthetic oligonucleotide
  Sense strand starting at position 3344 of SEQ ID NO: 3464
uuuguuucugagugggaaa

SEQ ID NO: 269693 - RNA, 19 nt, Artificial Sequence
  Description of Artificial Sequence: Synthetic oligonucleotide
  Antisense strand to SEQ ID NO: 269692
uuucccacucagaaacaaa

SEQ ID NO: 269694 - RNA, 19 nt, Artificial Sequence
  Description of Artificial Sequence: Synthetic oligonucleotide
  Sense strand starting at position 3382 of SEQ ID NO: 3464
auuggaacugcuuauccau

SEQ ID NO: 269695 - RNA, 19 nt, Artificial Sequence
  Description of Artificial Sequence: Synthetic oligonucleotide
  Antisense strand to SEQ ID NO: 269694
auggauaagcaguuccaau

SEQ ID NO: 269696 - RNA, 19 nt, Artificial Sequence
  Description of Artificial Sequence: Synthetic oligonucleotide
  Sense strand starting at position 3426 of SEQ ID NO: 3464
uuugguccuguaugagauu

SEQ ID NO: 269697 - RNA, 19 nt, Artificial Sequence
  Description of Artificial Sequence: Synthetic oligonucleotide
  Antisense strand to SEQ ID NO: 269696
aaucucauacaggaccaaa

SEQ ID NO: 269698 - RNA, 19 nt, Artificial Sequence
  Description of Artificial Sequence: Synthetic oligonucleotide
  Sense strand starting at position 3435 of SEQ ID NO: 3464
guaugagauuuggauauug

SEQ ID NO: 269699 - RNA, 19 nt, Artificial Sequence
  Description of Artificial Sequence: Synthetic oligonucleotide
  Antisense strand to SEQ ID NO: 269698
caauauccaaaucucauac

SEQ ID NO: 269700 - RNA, 19 nt, Artificial Sequence
  Description of Artificial Sequence: Synthetic oligonucleotide
  Sense strand starting at position 3462 of SEQ ID NO: 3464
guuggaagacuugauuggu

SEQ ID NO: 269701 - RNA, 19 nt, Artificial Sequence
  Description of Artificial Sequence: Synthetic oligonucleotide
  Antisense strand to SEQ ID NO: 269700
accaaucaagucuuccaac

SEQ ID NO: 269702 - RNA, 19 nt, Artificial Sequence
  Description of Artificial Sequence: Synthetic oligonucleotide
  Sense strand starting at position 3554 of SEQ ID NO: 3464
gguagaggccuuugguuag

SEQ ID NO: 269703 - RNA, 19 nt, Artificial Sequence
  Description of Artificial Sequence: Synthetic oligonucleotide
  Antisense strand to SEQ ID NO: 269702
cuaaccaaaggccucuacc

SEQ ID NO: 269704 - RNA, 19 nt, Artificial Sequence
  Description of Artificial Sequence: Synthetic oligonucleotide
  Sense strand starting at position 3690 of SEQ ID NO: 3464
acauacguuccugauacuu

SEQ ID NO: 269705 - RNA, 19 nt, Artificial Sequence
  Description of Artificial Sequence: Synthetic oligonucleotide
  Antisense strand to SEQ ID NO: 269704
aaguaucaggaacguaugu

SEQ ID NO: 269706 - RNA, 19 nt, Artificial Sequence
  Description of Artificial Sequence: Synthetic oligonucleotide
  Sense strand starting at position 3751 of SEQ ID NO: 3464
uggguauauuuguaaucuu

SEQ ID NO: 269707 - RNA, 19 nt, Artificial Sequence
  Description of Artificial Sequence: Synthetic oligonucleotide
  Antisense strand to SEQ ID NO: 269706
aagauuacaaauauaccca

SEQ ID NO: 269708 - RNA, 19 nt, Artificial Sequence
  Description of Artificial Sequence: Synthetic oligonucleotide
  Sense strand starting at position 3767 of SEQ ID NO: 3464
cuuuguaacuugucugaac

SEQ ID NO: 269709 - RNA, 19 nt, Artificial Sequence
  Description of Artificial Sequence: Synthetic oligonucleotide
  Antisense strand to SEQ ID NO: 269708
guucagacaaguuacaaag

SEQ ID NO: 269710 - RNA, 19 nt, Artificial Sequence
  Description of Artificial Sequence: Synthetic oligonucleotide
  Sense strand starting at position 3768 of SEQ ID NO: 3464
uuuguaacuugucugaaca

SEQ ID NO: 269711 - RNA, 19 nt, Artificial Sequence
  Description of Artificial Sequence: Synthetic oligonucleotide
  Antisense strand to SEQ ID NO: 269710
uguucagacaaguuacaaa

SEQ ID NO: 269712 - RNA, 19 nt, Artificial Sequence
  Description of Artificial Sequence: Synthetic oligonucleotide
  Sense strand starting at position 3769 of SEQ ID NO: 3464
uuguaacuugucugaacaa

SEQ ID NO: 269713 - RNA, 19 nt, Artificial Sequence
  Description of Artificial Sequence: Synthetic oligonucleotide
  Antisense strand to SEQ ID NO: 269712
uuguucagacaaguuacaa

SEQ ID NO: 269714 - RNA, 19 nt, Artificial Sequence
  Description of Artificial Sequence: Synthetic oligonucleotide
  Sense strand starting at position 3844 of SEQ ID NO: 3464
caucaauaguuugcuggau

SEQ ID NO: 269715 - RNA, 19 nt, Artificial Sequence
  Description of Artificial Sequence: Synthetic oligonucleotide
  Antisense strand to SEQ ID NO: 269714
auccagcaaacuauugaug

SEQ ID NO: 269716 - RNA, 19 nt, Artificial Sequence
  Description of Artificial Sequence: Synthetic oligonucleotide
  Sense strand starting at position 3845 of SEQ ID NO: 3464
aucaauaguuugcuggauu

SEQ ID NO: 269717 - RNA, 19 nt, Artificial Sequence
  Description of Artificial Sequence: Synthetic oligonucleotide
  Antisense strand to SEQ ID NO: 269716
aauccagcaaacuauugau

SEQ ID NO: 269718 - RNA, 19 nt, Artificial Sequence
  Description of Artificial Sequence: Synthetic oligonucleotide
  Sense strand starting at position 3899 of SEQ ID NO: 3464
acuguuguaaauugagaug

SEQ ID NO: 269719 - RNA, 19 nt, Artificial Sequence
  Description of Artificial Sequence: Synthetic oligonucleotide
  Antisense strand to SEQ ID NO: 269718
caucucaauuuacaacagu

SEQ ID NO: 269720 - RNA, 19 nt, Artificial Sequence
  Description of Artificial Sequence: Synthetic oligonucleotide
  Sense strand starting at position 3904 of SEQ ID NO: 3464
uguaaauugagaugaguuu

SEQ ID NO: 269721 - RNA, 19 nt, Artificial Sequence
  Description of Artificial Sequence: Synthetic oligonucleotide
  Antisense strand to SEQ ID NO: 269720
aaacucaucucaauuuaca

SEQ ID NO: 269722 - RNA, 19 nt, Artificial Sequence
  Description of Artificial Sequence: Synthetic oligonucleotide
  Sense strand starting at position 23 of SEQ ID NO: 3467
gcaguaaaugauugccaua

SEQ ID NO: 269723 - RNA, 19 nt, Artificial Sequence
  Description of Artificial Sequence: Synthetic oligonucleotide
  Antisense strand to SEQ ID NO: 269722
uauggcaaucauuuacugc

SEQ ID NO: 269724 - RNA, 19 nt, Artificial Sequence
  Description of Artificial Sequence: Synthetic oligonucleotide
  Sense strand starting at position 25 of SEQ ID NO: 3467
aguaaaugauugccauaaa

SEQ ID NO: 269725 - RNA, 19 nt, Artificial Sequence
  Description of Artificial Sequence: Synthetic oligonucleotide
  Antisense strand to SEQ ID NO: 269724
uuuauggcaaucauuuacu

SEQ ID NO: 269726 - RNA, 19 nt, Artificial Sequence
  Description of Artificial Sequence: Synthetic oligonucleotide
  Sense strand starting at position 81 of SEQ ID NO: 3467
aagggaugaucaggaauag

SEQ ID NO: 269727 - RNA, 19 nt, Artificial Sequence
  Description of Artificial Sequence: Synthetic oligonucleotide
  Antisense strand to SEQ ID NO: 269726
cuauuccugaucaucccuu

SEQ ID NO: 269728 - RNA, 19 nt, Artificial Sequence
  Description of Artificial Sequence: Synthetic oligonucleotide
  Sense strand starting at position 187 of SEQ ID NO: 3467
ucauuauacuauguaucga

SEQ ID NO: 269729 - RNA, 19 nt, Artificial Sequence
  Description of Artificial Sequence: Synthetic oligonucleotide
  Antisense strand to SEQ ID NO: 269728
ucgauacauaguauaauga

SEQ ID NO: 269730 - RNA, 19 nt, Artificial Sequence
  Description of Artificial Sequence: Synthetic oligonucleotide
  Sense strand starting at position 316 of SEQ ID NO: 3467
gcagacaauugguuacacu

SEQ ID NO: 269731 - RNA, 19 nt, Artificial Sequence
  Description of Artificial Sequence: Synthetic oligonucleotide
  Antisense strand to SEQ ID NO: 269730
aguguaaccaauugucugc

SEQ ID NO: 269732 - RNA, 19 nt, Artificial Sequence
  Description of Artificial Sequence: Synthetic oligonucleotide
  Sense strand starting at position 341 of SEQ ID NO: 3467
acagacaauugguuacacu

SEQ ID NO: 269733 - RNA, 19 nt, Artificial Sequence
  Description of Artificial Sequence: Synthetic oligonucleotide
  Antisense strand to SEQ ID NO: 269732
aguguaaccaauugucugu

SEQ ID NO: 269734 - RNA, 19 nt, Artificial Sequence
  Description of Artificial Sequence: Synthetic oligonucleotide
  Sense strand starting at position 392 of SEQ ID NO: 3467
uuugauuccaucggacaug

SEQ ID NO: 269735 - RNA, 19 nt, Artificial Sequence
  Description of Artificial Sequence: Synthetic oligonucleotide
  Antisense strand to SEQ ID NO: 269734
cauguccgauggaaucaaa

SEQ ID NO: 269736 - RNA, 19 nt, Artificial Sequence
  Description of Artificial Sequence: Synthetic oligonucleotide
  Sense strand starting at position 440 of SEQ ID NO: 3467
gggcuaagcaaugaugcau

SEQ ID NO: 269737 - RNA, 19 nt, Artificial Sequence
  Description of Artificial Sequence: Synthetic oligonucleotide
  Antisense strand to SEQ ID NO: 269736
augcaucauugcuuagccc

SEQ ID NO: 269738 - RNA, 19 nt, Artificial Sequence
  Description of Artificial Sequence: Synthetic oligonucleotide
  Sense strand starting at position 517 of SEQ ID NO: 3467
acugauaguguacaccuaa

SEQ ID NO: 269739 - RNA, 19 nt, Artificial Sequence
  Description of Artificial Sequence: Synthetic oligonucleotide
  Antisense strand to SEQ ID NO: 269738
uuagguguacacuaucagu

SEQ ID NO: 269740 - RNA, 19 nt, Artificial Sequence
  Description of Artificial Sequence: Synthetic oligonucleotide
  Sense strand starting at position 960 of SEQ ID NO: 3467
acauauugagacugugaug

SEQ ID NO: 269741 - RNA, 19 nt, Artificial Sequence
  Description of Artificial Sequence: Synthetic oligonucleotide
  Antisense strand to SEQ ID NO: 269740
caucacagucucaauaugu

SEQ ID NO: 269742 - RNA, 19 nt, Artificial Sequence
  Description of Artificial Sequence: Synthetic oligonucleotide
  Sense strand starting at position 978 of SEQ ID NO: 3467
gcuuuauauugauuguaug

SEQ ID NO: 269743 - RNA, 19 nt, Artificial Sequence
  Description of Artificial Sequence: Synthetic oligonucleotide
  Antisense strand to SEQ ID NO: 269742
cauacaaucaauauaaagc

SEQ ID NO: 269744 - RNA, 19 nt, Artificial Sequence
  Description of Artificial Sequence: Synthetic oligonucleotide
  Sense strand starting at position 1223 of SEQ ID NO: 3467
gggaaacuuugaucacguc

SEQ ID NO: 269745 - RNA, 19 nt, Artificial Sequence
  Description of Artificial Sequence: Synthetic oligonucleotide
  Antisense strand to SEQ ID NO: 269744
gacgugaucaaaguuuccc

SEQ ID NO: 269746 - RNA, 19 nt, Artificial Sequence
  Description of Artificial Sequence: Synthetic oligonucleotide
  Sense strand starting at position 1251 of SEQ ID NO: 3467
ucaucaaucguagaacuca

SEQ ID NO: 269747 - RNA, 19 nt, Artificial Sequence
  Description of Artificial Sequence: Synthetic oligonucleotide
  Antisense strand to SEQ ID NO: 269746
ugaguucuacgauugauga

SEQ ID NO: 269748 - RNA, 19 nt, Artificial Sequence
  Description of Artificial Sequence: Synthetic oligonucleotide
  Sense strand starting at position 1290 of SEQ ID NO: 3467
ccacaucccucuccgagaa

SEQ ID NO: 269749 - RNA, 19 nt, Artificial Sequence
  Description of Artificial Sequence: Synthetic oligonucleotide
  Antisense strand to SEQ ID NO: 269748
uucucggagagggaugugg

SEQ ID NO: 269750 - RNA, 19 nt, Artificial Sequence
  Description of Artificial Sequence: Synthetic oligonucleotide
  Sense strand starting at position 1495 of SEQ ID NO: 3467
ggacuugucucugucccua

SEQ ID NO: 269751 - RNA, 19 nt, Artificial Sequence
  Description of Artificial Sequence: Synthetic oligonucleotide
  Antisense strand to SEQ ID NO: 269750
uagggacagagacaagucc

SEQ ID NO: 269752 - RNA, 19 nt, Artificial Sequence
  Description of Artificial Sequence: Synthetic oligonucleotide
  Sense strand starting at position 1497 of SEQ ID NO: 3467
acuugucucugucccuaga

SEQ ID NO: 269753 - RNA, 19 nt, Artificial Sequence
  Description of Artificial Sequence: Synthetic oligonucleotide
  Antisense strand to SEQ ID NO: 269752
ucuagggacagagacaagu

SEQ ID NO: 269754 - RNA, 19 nt, Artificial Sequence
  Description of Artificial Sequence: Synthetic oligonucleotide
  Sense strand starting at position 1499 of SEQ ID NO: 3467
uugucucugucccuagaua

SEQ ID NO: 269755 - RNA, 19 nt, Artificial Sequence
  Description of Artificial Sequence: Synthetic oligonucleotide
  Antisense strand to SEQ ID NO: 269754
uaucuagggacagagacaa

SEQ ID NO: 269756 - RNA, 19 nt, Artificial Sequence
  Description of Artificial Sequence: Synthetic oligonucleotide
  Sense strand starting at position 1532 of SEQ ID NO: 3467
ugcagucaugagggucaau

SEQ ID NO: 269757 - RNA, 19 nt, Artificial Sequence
  Description of Artificial Sequence: Synthetic oligonucleotide
  Antisense strand to SEQ ID NO: 269756
auugacccucaugacugca

SEQ ID NO: 269758 - RNA, 19 nt, Artificial Sequence
  Description of Artificial Sequence: Synthetic oligonucleotide
  Sense strand starting at position 1543 of SEQ ID NO: 3467
gggucaauugcugaggcuu

SEQ ID NO: 269759 - RNA, 19 nt, Artificial Sequence
  Description of Artificial Sequence: Synthetic oligonucleotide
  Antisense strand to SEQ ID NO: 269758
aagccucagcaauugaccc

SEQ ID NO: 269760 - RNA, 19 nt, Artificial Sequence
  Description of Artificial Sequence: Synthetic oligonucleotide
  Sense strand starting at position 1651 of SEQ ID NO: 3467
aaggauuccucggcaagcu

SEQ ID NO: 269761 - RNA, 19 nt, Artificial Sequence
  Description of Artificial Sequence: Synthetic oligonucleotide
  Antisense strand to SEQ ID NO: 269760
agcuugccgaggaauccuu

SEQ ID NO: 269762 - RNA, 19 nt, Artificial Sequence
  Description of Artificial Sequence: Synthetic oligonucleotide
  Sense strand starting at position 2544 of SEQ ID NO: 3467
gaaggaguuucuucuucuu

SEQ ID NO: 269763 - RNA, 19 nt, Artificial Sequence
  Description of Artificial Sequence: Synthetic oligonucleotide
  Antisense strand to SEQ ID NO: 269762
aagaagaagaaacuccuuc

SEQ ID NO: 269764 - RNA, 19 nt, Artificial Sequence
  Description of Artificial Sequence: Synthetic oligonucleotide
  Sense strand starting at position 2859 of SEQ ID NO: 3467
uuuauuacccuuuguguca

SEQ ID NO: 269765 - RNA, 19 nt, Artificial Sequence
  Description of Artificial Sequence: Synthetic oligonucleotide
  Antisense strand to SEQ ID NO: 269764
ugacacaaaggguaauaaa

SEQ ID NO: 269766 - RNA, 19 nt, Artificial Sequence
  Description of Artificial Sequence: Synthetic oligonucleotide
  Sense strand starting at position 2860 of SEQ ID NO: 3467
uuauuacccuuugugucau

SEQ ID NO: 269767 - RNA, 19 nt, Artificial Sequence
  Description of Artificial Sequence: Synthetic oligonucleotide
  Antisense strand to SEQ ID NO: 269766
augacacaaaggguaauaa

SEQ ID NO: 269768 - RNA, 19 nt, Artificial Sequence
  Description of Artificial Sequence: Synthetic oligonucleotide
  Sense strand starting at position 3146 of SEQ ID NO: 3467
agugguuucucuccuccau

SEQ ID NO: 269769 - RNA, 19 nt, Artificial Sequence
  Description of Artificial Sequence: Synthetic oligonucleotide
  Antisense strand to SEQ ID NO: 269768
auggaggagagaaaccacu

SEQ ID NO: 269770 - RNA, 19 nt, Artificial Sequence
  Description of Artificial Sequence: Synthetic oligonucleotide
  Sense strand starting at position 3259 of SEQ ID NO: 3467
gcacacuuucuagauguca

SEQ ID NO: 269771 - RNA, 19 nt, Artificial Sequence
  Description of Artificial Sequence: Synthetic oligonucleotide
  Antisense strand to SEQ ID NO: 269770
ugacaucuagaaagugugc

SEQ ID NO: 269772 - RNA, 19 nt, Artificial Sequence
  Description of Artificial Sequence: Synthetic oligonucleotide
  Sense strand starting at position 3331 of SEQ ID NO: 3467
uuuguuucugagugggaaa

SEQ ID NO: 269773 - RNA, 19 nt, Artificial Sequence
  Description of Artificial Sequence: Synthetic oligonucleotide
  Antisense strand to SEQ ID NO: 269772
uuucccacucagaaacaaa

SEQ ID NO: 269774 - RNA, 19 nt, Artificial Sequence
  Description of Artificial Sequence: Synthetic oligonucleotide
  Sense strand starting at position 3369 of SEQ ID NO: 3467
auuggaacugcuuauccau

SEQ ID NO: 269775 - RNA, 19 nt, Artificial Sequence
  Description of Artificial Sequence: Synthetic oligonucleotide
  Antisense strand to SEQ ID NO: 269774
auggauaagcaguuccaau

SEQ ID NO: 269776 - RNA, 19 nt, Artificial Sequence
  Description of Artificial Sequence: Synthetic oligonucleotide
  Sense strand starting at position 3413 of SEQ ID NO: 3467
uuugguccuguaugagauu

SEQ ID NO: 269777 - RNA, 19 nt, Artificial Sequence
  Description of Artificial Sequence: Synthetic oligonucleotide
  Antisense strand to SEQ ID NO: 269776
aaucucauacaggaccaaa

SEQ ID NO: 269778 - RNA, 19 nt, Artificial Sequence
  Description of Artificial Sequence: Synthetic oligonucleotide
  Sense strand starting at position 3422 of SEQ ID NO: 3467
guaugagauuuggauauug

SEQ ID NO: 269779 - RNA, 19 nt, Artificial Sequence
  Description of Artificial Sequence: Synthetic oligonucleotide
  Antisense strand to SEQ ID NO: 269778
caauauccaaaucucauac

SEQ ID NO: 269780 - RNA, 19 nt, Artificial Sequence
  Description of Artificial Sequence: Synthetic oligonucleotide
  Sense strand starting at position 3449 of SEQ ID NO: 3467
guuggaagacuugauuggu

SEQ ID NO: 269781 - RNA, 19 nt, Artificial Sequence
  Description of Artificial Sequence: Synthetic oligonucleotide
  Antisense strand to SEQ ID NO: 269780
accaaucaagucuuccaac

SEQ ID NO: 269782 - RNA, 19 nt, Artificial Sequence
  Description of Artificial Sequence: Synthetic oligonucleotide
  Sense strand starting at position 3541 of SEQ ID NO: 3467
gguagaggccuuugguuag

SEQ ID NO: 269783 - RNA, 19 nt, Artificial Sequence
  Description of Artificial Sequence: Synthetic oligonucleotide
  Antisense strand to SEQ ID NO: 269782
cuaaccaaaggccucuacc

SEQ ID NO: 269784 - RNA, 19 nt, Artificial Sequence
  Description of Artificial Sequence: Synthetic oligonucleotide
  Sense strand starting at position 3677 of SEQ ID NO: 3467
acauacguuccugauacuu

SEQ ID NO: 269785 - RNA, 19 nt, Artificial Sequence
  Description of Artificial Sequence: Synthetic oligonucleotide
  Antisense strand to SEQ ID NO: 269784
aaguaucaggaacguaugu

SEQ ID NO: 269786 - RNA, 19 nt, Artificial Sequence
  Description of Artificial Sequence: Synthetic oligonucleotide
  Sense strand starting at position 3738 of SEQ ID NO: 3467
uggguauauuuguaaucuu

SEQ ID NO: 269787 - RNA, 19 nt, Artificial Sequence
  Description of Artificial Sequence: Synthetic oligonucleotide
  Antisense strand to SEQ ID NO: 269786
aagauuacaaauauaccca

SEQ ID NO: 269788 - RNA, 19 nt, Artificial Sequence
  Description of Artificial Sequence: Synthetic oligonucleotide
  Sense strand starting at position 3754 of SEQ ID NO: 3467
cuuuguaacuugucugaac

SEQ ID NO: 269789 - RNA, 19 nt, Artificial Sequence
  Description of Artificial Sequence: Synthetic oligonucleotide
  Antisense strand to SEQ ID NO: 269788
guucagacaaguuacaaag

SEQ ID NO: 269790 - RNA, 19 nt, Artificial Sequence
  Description of Artificial Sequence: Synthetic oligonucleotide
  Sense strand starting at position 3755 of SEQ ID NO: 3467
uuuguaacuugucugaaca

SEQ ID NO: 269791 - RNA, 19 nt, Artificial Sequence
  Description of Artificial Sequence: Synthetic oligonucleotide
  Antisense strand to SEQ ID NO: 269790
uguucagacaaguuacaaa

SEQ ID NO: 269792 - RNA, 19 nt, Artificial Sequence
  Description of Artificial Sequence: Synthetic oligonucleotide
  Sense strand starting at position 3756 of SEQ ID NO: 3467
uuguaacuugucugaacaa

SEQ ID NO: 269793 - RNA, 19 nt, Artificial Sequence
  Description of Artificial Sequence: Synthetic oligonucleotide
  Antisense strand to SEQ ID NO: 269792
uuguucagacaaguuacaa

SEQ ID NO: 269794 - RNA, 19 nt, Artificial Sequence
  Description of Artificial Sequence: Synthetic oligonucleotide
  Sense strand starting at position 3831 of SEQ ID NO: 3467
caucaauaguuugcuggau

SEQ ID NO: 269795 - RNA, 19 nt, Artificial Sequence
  Description of Artificial Sequence: Synthetic oligonucleotide
  Antisense strand to SEQ ID NO: 269794
auccagcaaacuauugaug

SEQ ID NO: 269796 - RNA, 19 nt, Artificial Sequence
  Description of Artificial Sequence: Synthetic oligonucleotide
  Sense strand starting at position 3832 of SEQ ID NO: 3467
aucaauaguuugcuggauu

SEQ ID NO: 269797 - RNA, 19 nt, Artificial Sequence
  Description of Artificial Sequence: Synthetic oligonucleotide
  Antisense strand to SEQ ID NO: 269796
aauccagcaaacuauugau

SEQ ID NO: 269798 - RNA, 19 nt, Artificial Sequence
  Description of Artificial Sequence: Synthetic oligonucleotide
  Sense strand starting at position 3886 of SEQ ID NO: 3467
acuguuguaaauugagaug

SEQ ID NO: 269799 - RNA, 19 nt, Artificial Sequence
  Description of Artificial Sequence: Synthetic oligonucleotide
  Antisense strand to SEQ ID NO: 269798
caucucaauuuacaacagu

SEQ ID NO: 269800 - RNA, 19 nt, Artificial Sequence
  Description of Artificial Sequence: Synthetic oligonucleotide
  Sense strand starting at position 3891 of SEQ ID NO: 3467
uguaaauugagaugaguuu

SEQ ID NO: 269801 - RNA, 19 nt, Artificial Sequence
  Description of Artificial Sequence: Synthetic oligonucleotide
  Antisense strand to SEQ ID NO: 269800
aaacucaucucaauuuaca

SEQ ID NO: 269802 - RNA, 19 nt, Artificial Sequence
  Description of Artificial Sequence: Synthetic oligonucleotide
  Sense strand starting at position 22 of SEQ ID NO: 3465
gcaguaaaugauugccaua

SEQ ID NO: 269803 - RNA, 19 nt, Artificial Sequence
  Description of Artificial Sequence: Synthetic oligonucleotide
  Antisense strand to SEQ ID NO: 269802
uauggcaaucauuuacugc

SEQ ID NO: 269804 - RNA, 19 nt, Artificial Sequence
  Description of Artificial Sequence: Synthetic oligonucleotide
  Sense strand starting at position 24 of SEQ ID NO: 3465
aguaaaugauugccauaaa

SEQ ID NO: 269805 - RNA, 19 nt, Artificial Sequence
  Description of Artificial Sequence: Synthetic oligonucleotide
  Antisense strand to SEQ ID NO: 269804
uuuauggcaaucauuuacu

SEQ ID NO: 269806 - RNA, 19 nt, Artificial Sequence
  Description of Artificial Sequence: Synthetic oligonucleotide
  Sense strand starting at position 80 of SEQ ID NO: 3465
aagggaugaucaggaauag

SEQ ID NO: 269807 - RNA, 19 nt, Artificial Sequence
  Description of Artificial Sequence: Synthetic oligonucleotide
  Antisense strand to SEQ ID NO: 269806
cuauuccugaucaucccuu

SEQ ID NO: 269808 - RNA, 19 nt, Artificial Sequence
  Description of Artificial Sequence: Synthetic oligonucleotide
  Sense strand starting at position 186 of SEQ ID NO: 3465
ucauuauacuauguaucga

SEQ ID NO: 269809 - RNA, 19 nt, Artificial Sequence
  Description of Artificial Sequence: Synthetic oligonucleotide
  Antisense strand to SEQ ID NO: 269808
ucgauacauaguauaauga

SEQ ID NO: 269810 - RNA, 19 nt, Artificial Sequence
  Description of Artificial Sequence: Synthetic oligonucleotide
  Sense strand starting at position 315 of SEQ ID NO: 3465
gcagacaauugguuacacu

SEQ ID NO: 269811 - RNA, 19 nt, Artificial Sequence
  Description of Artificial Sequence: Synthetic oligonucleotide
  Antisense strand to SEQ ID NO: 269810
aguguaaccaauugucugc

SEQ ID NO: 269812 - RNA, 19 nt, Artificial Sequence
  Description of Artificial Sequence: Synthetic oligonucleotide
  Sense strand starting at position 340 of SEQ ID NO: 3465
acagacaauugguuacacu

SEQ ID NO: 269813 - RNA, 19 nt, Artificial Sequence
  Description of Artificial Sequence: Synthetic oligonucleotide
  Antisense strand to SEQ ID NO: 269812
aguguaaccaauugucugu

SEQ ID NO: 269814 - RNA, 19 nt, Artificial Sequence
  Description of Artificial Sequence: Synthetic oligonucleotide
  Sense strand starting at position 391 of SEQ ID NO: 3465
uuugauuccaucggacaug

SEQ ID NO: 269815 - RNA, 19 nt, Artificial Sequence
  Description of Artificial Sequence: Synthetic oligonucleotide
  Antisense strand to SEQ ID NO: 269814
cauguccgauggaaucaaa

SEQ ID NO: 269816 - RNA, 19 nt, Artificial Sequence
  Description of Artificial Sequence: Synthetic oligonucleotide
  Sense strand starting at position 439 of SEQ ID NO: 3465
gggcuaagcaaugaugcau

SEQ ID NO: 269817 - RNA, 19 nt, Artificial Sequence
  Description of Artificial Sequence: Synthetic oligonucleotide
  Antisense strand to SEQ ID NO: 269816
augcaucauugcuuagccc

SEQ ID NO: 269818 - RNA, 19 nt, Artificial Sequence
  Description of Artificial Sequence: Synthetic oligonucleotide
  Sense strand starting at position 516 of SEQ ID NO: 3465
acugauaguguacaccuaa

SEQ ID NO: 269819 - RNA, 19 nt, Artificial Sequence
  Description of Artificial Sequence: Synthetic oligonucleotide
  Antisense strand to SEQ ID NO: 269818
uuagguguacacuaucagu

SEQ ID NO: 269820 - RNA, 19 nt, Artificial Sequence
  Description of Artificial Sequence: Synthetic oligonucleotide
  Sense strand starting at position 959 of SEQ ID NO: 3465
acauauugagacugugaug

SEQ ID NO: 269821 - RNA, 19 nt, Artificial Sequence
  Description of Artificial Sequence: Synthetic oligonucleotide
  Antisense strand to SEQ ID NO: 269820
caucacagucucaauaugu

SEQ ID NO: 269822 - RNA, 19 nt, Artificial Sequence
  Description of Artificial Sequence: Synthetic oligonucleotide
  Sense strand starting at position 977 of SEQ ID NO: 3465
gcuuuauauugauuguaug

SEQ ID NO: 269823 - RNA, 19 nt, Artificial Sequence
  Description of Artificial Sequence: Synthetic oligonucleotide
  Antisense strand to SEQ ID NO: 269822
cauacaaucaauauaaagc

SEQ ID NO: 269824 - RNA, 19 nt, Artificial Sequence
  Description of Artificial Sequence: Synthetic oligonucleotide
  Sense strand starting at position 1222 of SEQ ID NO: 3465
gggaaacuuugaucacguc

SEQ ID NO: 269825 - RNA, 19 nt, Artificial Sequence
  Description of Artificial Sequence: Synthetic oligonucleotide
  Antisense strand to SEQ ID NO: 269824
gacgugaucaaaguuuccc

SEQ ID NO: 269826 - RNA, 19 nt, Artificial Sequence
  Description of Artificial Sequence: Synthetic oligonucleotide
  Sense strand starting at position 1250 of SEQ ID NO: 3465
ucaucaaucguagaacuca

SEQ ID NO: 269827 - RNA, 19 nt, Artificial Sequence
  Description of Artificial Sequence: Synthetic oligonucleotide
  Antisense strand to SEQ ID NO: 269826
ugaguucuacgauugauga

SEQ ID NO: 269828 - RNA, 19 nt, Artificial Sequence
  Description of Artificial Sequence: Synthetic oligonucleotide
  Sense strand starting at position 1289 of SEQ ID NO: 3465
ccacaucccucuccgagaa

SEQ ID NO: 269829 - RNA, 19 nt, Artificial Sequence
  Description of Artificial Sequence: Synthetic oligonucleotide
  Antisense strand to SEQ ID NO: 269828
uucucggagagggaugugg

SEQ ID NO: 269830 - RNA, 19 nt, Artificial Sequence
  Description of Artificial Sequence: Synthetic oligonucleotide
  Sense strand starting at position 1494 of SEQ ID NO: 3465
ggacuugucucugucccua

SEQ ID NO: 269831 - RNA, 19 nt, Artificial Sequence
  Description of Artificial Sequence: Synthetic oligonucleotide
  Antisense strand to SEQ ID NO: 269830
uagggacagagacaagucc

SEQ ID NO: 269832 - RNA, 19 nt, Artificial Sequence
  Description of Artificial Sequence: Synthetic oligonucleotide
  Sense strand starting at position 1496 of SEQ ID NO: 3465
acuugucucugucccuaga

SEQ ID NO: 269833 - RNA, 19 nt, Artificial Sequence
  Description of Artificial Sequence: Synthetic oligonucleotide
  Antisense strand to SEQ ID NO: 269832
ucuagggacagagacaagu

SEQ ID NO: 269834 - RNA, 19 nt, Artificial Sequence
  Description of Artificial Sequence: Synthetic oligonucleotide
  Sense strand starting at position 1498 of SEQ ID NO: 3465
uugucucugucccuagaua

SEQ ID NO: 269835 - RNA, 19 nt, Artificial Sequence
  Description of Artificial Sequence: Synthetic oligonucleotide
  Antisense strand to SEQ ID NO: 269834
uaucuagggacagagacaa

SEQ ID NO: 269836 - RNA, 19 nt, Artificial Sequence
  Description of Artificial Sequence: Synthetic oligonucleotide
  Sense strand starting at position 1531 of SEQ ID NO: 3465
ugcagucaugagggucaau

SEQ ID NO: 269837 - RNA, 19 nt, Artificial Sequence
  Description of Artificial Sequence: Synthetic oligonucleotide
  Antisense strand to SEQ ID NO: 269836
auugacccucaugacugca

SEQ ID NO: 269838 - RNA, 19 nt, Artificial Sequence
  Description of Artificial Sequence: Synthetic oligonucleotide
  Sense strand starting at position 1542 of SEQ ID NO: 3465
gggucaauugcugaggcuu

SEQ ID NO: 269839 - RNA, 19 nt, Artificial Sequence
  Description of Artificial Sequence: Synthetic oligonucleotide
  Antisense strand to SEQ ID NO: 269838
aagccucagcaauugaccc

SEQ ID NO: 269840 - RNA, 19 nt, Artificial Sequence
  Description of Artificial Sequence: Synthetic oligonucleotide
  Sense strand starting at position 1650 of SEQ ID NO: 3465
aaggauuccucggcaagcu

SEQ ID NO: 269841 - RNA, 19 nt, Artificial Sequence
  Description of Artificial Sequence: Synthetic oligonucleotide
  Antisense strand to SEQ ID NO: 269840
agcuugccgaggaauccuu

SEQ ID NO: 269842 - RNA, 19 nt, Artificial Sequence
  Description of Artificial Sequence: Synthetic oligonucleotide
  Sense strand starting at position 2543 of SEQ ID NO: 3465
gaaggaguuucuucuucuu

SEQ ID NO: 269843 - RNA, 19 nt, Artificial Sequence
  Description of Artificial Sequence: Synthetic oligonucleotide
  Antisense strand to SEQ ID NO: 269842
aagaagaagaaacuccuuc

SEQ ID NO: 269844 - RNA, 19 nt, Artificial Sequence
  Description of Artificial Sequence: Synthetic oligonucleotide
  Sense strand starting at position 2858 of SEQ ID NO: 3465
uuuauuacccuuuguguca

SEQ ID NO: 269845 - RNA, 19 nt, Artificial Sequence
  Description of Artificial Sequence: Synthetic oligonucleotide
  Antisense strand to SEQ ID NO: 269844
ugacacaaaggguaauaaa

SEQ ID NO: 269846 - RNA, 19 nt, Artificial Sequence
  Description of Artificial Sequence: Synthetic oligonucleotide
  Sense strand starting at position 2859 of SEQ ID NO: 3465
uuauuacccuuugugucau

SEQ ID NO: 269847 - RNA, 19 nt, Artificial Sequence
  Description of Artificial Sequence: Synthetic oligonucleotide
  Antisense strand to SEQ ID NO: 269846
augacacaaaggguaauaa

SEQ ID NO: 269848 - RNA, 19 nt, Artificial Sequence
  Description of Artificial Sequence: Synthetic oligonucleotide
  Sense strand starting at position 3145 of SEQ ID NO: 3465
agugguuucucuccuccau

SEQ ID NO: 269849 - RNA, 19 nt, Artificial Sequence
  Description of Artificial Sequence: Synthetic oligonucleotide
  Antisense strand to SEQ ID NO: 269848
auggaggagagaaaccacu

SEQ ID NO: 269850 - RNA, 19 nt, Artificial Sequence
  Description of Artificial Sequence: Synthetic oligonucleotide
  Sense strand starting at position 3258 of SEQ ID NO: 3465
gcacacuuucuagauguca

SEQ ID NO: 269851 - RNA, 19 nt, Artificial Sequence
  Description of Artificial Sequence: Synthetic oligonucleotide
  Antisense strand to SEQ ID NO: 269850
ugacaucuagaaagugugc

SEQ ID NO: 269852 - RNA, 19 nt, Artificial Sequence
  Description of Artificial Sequence: Synthetic oligonucleotide
  Sense strand starting at position 3330 of SEQ ID NO: 3465
uuuguuucugagugggaaa

SEQ ID NO: 269853 - RNA, 19 nt, Artificial Sequence
  Description of Artificial Sequence: Synthetic oligonucleotide
  Antisense strand to SEQ ID NO: 269852
uuucccacucagaaacaaa

SEQ ID NO: 269854 - RNA, 19 nt, Artificial Sequence
  Description of Artificial Sequence: Synthetic oligonucleotide
  Sense strand starting at position 3368 of SEQ ID NO: 3465
auuggaacugcuuauccau

SEQ ID NO: 269855 - RNA, 19 nt, Artificial Sequence
  Description of Artificial Sequence: Synthetic oligonucleotide
  Antisense strand to SEQ ID NO: 269854
auggauaagcaguuccaau

SEQ ID NO: 269856 - RNA, 19 nt, Artificial Sequence
  Description of Artificial Sequence: Synthetic oligonucleotide
  Sense strand starting at position 3412 of SEQ ID NO: 3465
uuugguccuguaugagauu

SEQ ID NO: 269857 - RNA, 19 nt, Artificial Sequence
  Description of Artificial Sequence: Synthetic oligonucleotide
  Antisense strand to SEQ ID NO: 269856
aaucucauacaggaccaaa

SEQ ID NO: 269858 - RNA, 19 nt, Artificial Sequence
  Description of Artificial Sequence: Synthetic oligonucleotide
  Sense strand starting at position 3421 of SEQ ID NO: 3465
guaugagauuuggauauug

SEQ ID NO: 269859 - RNA, 19 nt, Artificial Sequence
  Description of Artificial Sequence: Synthetic oligonucleotide
  Antisense strand to SEQ ID NO: 269858
caauauccaaaucucauac

SEQ ID NO: 269860 - RNA, 19 nt, Artificial Sequence
  Description of Artificial Sequence: Synthetic oligonucleotide
  Sense strand starting at position 3448 of SEQ ID NO: 3465
guuggaagacuugauuggu

SEQ ID NO: 269861 - RNA, 19 nt, Artificial Sequence
  Description of Artificial Sequence: Synthetic oligonucleotide
  Antisense strand to SEQ ID NO: 269860
accaaucaagucuuccaac

SEQ ID NO: 269862 - RNA, 19 nt, Artificial Sequence
  Description of Artificial Sequence: Synthetic oligonucleotide
  Sense strand starting at position 3540 of SEQ ID NO: 3465
gguagaggccuuugguuag

SEQ ID NO: 269863 - RNA, 19 nt, Artificial Sequence
  Description of Artificial Sequence: Synthetic oligonucleotide
  Antisense strand to SEQ ID NO: 269862
cuaaccaaaggccucuacc

SEQ ID NO: 269864 - RNA, 19 nt, Artificial Sequence
  Description of Artificial Sequence: Synthetic oligonucleotide
  Sense strand starting at position 3676 of SEQ ID NO: 3465
acauacguuccugauacuu

SEQ ID NO: 269865 - RNA, 19 nt, Artificial Sequence
  Description of Artificial Sequence: Synthetic oligonucleotide
  Antisense strand to SEQ ID NO: 269864
aaguaucaggaacguaugu

SEQ ID NO: 269866 - RNA, 19 nt, Artificial Sequence
  Description of Artificial Sequence: Synthetic oligonucleotide
  Sense strand starting at position 3737 of SEQ ID NO: 3465
uggguauauuuguaaucuu

SEQ ID NO: 269867 - RNA, 19 nt, Artificial Sequence
  Description of Artificial Sequence: Synthetic oligonucleotide
  Antisense strand to SEQ ID NO: 269866
aagauuacaaauauaccca

SEQ ID NO: 269868 - RNA, 19 nt, Artificial Sequence
  Description of Artificial Sequence: Synthetic oligonucleotide
  Sense strand starting at position 3753 of SEQ ID NO: 3465
cuuuguaacuugucugaac

SEQ ID NO: 269869 - RNA, 19 nt, Artificial Sequence
  Description of Artificial Sequence: Synthetic oligonucleotide
  Antisense strand to SEQ ID NO: 269868
guucagacaaguuacaaag

SEQ ID NO: 269870 - RNA, 19 nt, Artificial Sequence
  Description of Artificial Sequence: Synthetic oligonucleotide
  Sense strand starting at position 3754 of SEQ ID NO: 3465
uuuguaacuugucugaaca

SEQ ID NO: 269871 - RNA, 19 nt, Artificial Sequence
  Description of Artificial Sequence: Synthetic oligonucleotide
  Antisense strand to SEQ ID NO: 269870
uguucagacaaguuacaaa

SEQ ID NO: 269872 - RNA, 19 nt, Artificial Sequence
  Description of Artificial Sequence: Synthetic oligonucleotide
  Sense strand starting at position 3755 of SEQ ID NO: 3465
uuguaacuugucugaacaa

SEQ ID NO: 269873 - RNA, 19 nt, Artificial Sequence
  Description of Artificial Sequence: Synthetic oligonucleotide
  Antisense strand to SEQ ID NO: 269872
uuguucagacaaguuacaa

SEQ ID NO: 269874 - RNA, 19 nt, Artificial Sequence
  Description of Artificial Sequence: Synthetic oligonucleotide
  Sense strand starting at position 3830 of SEQ ID NO: 3465
caucaauaguuugcuggau

SEQ ID NO: 269875 - RNA, 19 nt, Artificial Sequence
  Description of Artificial Sequence: Synthetic oligonucleotide
  Antisense strand to SEQ ID NO: 269874
auccagcaaacuauugaug

SEQ ID NO: 269876 - RNA, 19 nt, Artificial Sequence
  Description of Artificial Sequence: Synthetic oligonucleotide
  Sense strand starting at position 3831 of SEQ ID NO: 3465
aucaauaguuugcuggauu

SEQ ID NO: 269877 - RNA, 19 nt, Artificial Sequence
  Description of Artificial Sequence: Synthetic oligonucleotide
  Antisense strand to SEQ ID NO: 269876
aauccagcaaacuauugau

SEQ ID NO: 269878 - RNA, 19 nt, Artificial Sequence
  Description of Artificial Sequence: Synthetic oligonucleotide
  Sense strand starting at position 3885 of SEQ ID NO: 3465
acuguuguaaauugagaug

SEQ ID NO: 269879 - RNA, 19 nt, Artificial Sequence
  Description of Artificial Sequence: Synthetic oligonucleotide
  Antisense strand to SEQ ID NO: 269878
caucucaauuuacaacagu

SEQ ID NO: 269880 - RNA, 19 nt, Artificial Sequence
  Description of Artificial Sequence: Synthetic oligonucleotide
  Sense strand starting at position 3890 of SEQ ID NO: 3465
uguaaauugagaugaguuu

SEQ ID NO: 269881 - RNA, 19 nt, Artificial Sequence
  Description of Artificial Sequence: Synthetic oligonucleotide
  Antisense strand to SEQ ID NO: 269880
aaacucaucucaauuuaca

SEQ ID NO: 269882 - RNA, 19 nt, Artificial Sequence
  Description of Artificial Sequence: Synthetic oligonucleotide
  Sense strand starting at position 53 of SEQ ID NO: 3468
ucauuauacuauguaucga

SEQ ID NO: 269883 - RNA, 19 nt, Artificial Sequence
  Description of Artificial Sequence: Synthetic oligonucleotide
  Antisense strand to SEQ ID NO: 269882
ucgauacauaguauaauga

SEQ ID NO: 269884 - RNA, 19 nt, Artificial Sequence
  Description of Artificial Sequence: Synthetic oligonucleotide
  Sense strand starting at position 182 of SEQ ID NO: 3468
gcagacaauugguuacacu

SEQ ID NO: 269885 - RNA, 19 nt, Artificial Sequence
  Description of Artificial Sequence: Synthetic oligonucleotide
  Antisense strand to SEQ ID NO: 269884
aguguaaccaauugucugc

SEQ ID NO: 269886 - RNA, 19 nt, Artificial Sequence
  Description of Artificial Sequence: Synthetic oligonucleotide
  Sense strand starting at position 207 of SEQ ID NO: 3468
acagacaauugguuacacu

SEQ ID NO: 269887 - RNA, 19 nt, Artificial Sequence
  Description of Artificial Sequence: Synthetic oligonucleotide
  Antisense strand to SEQ ID NO: 269886
aguguaaccaauugucugu

SEQ ID NO: 269888 - RNA, 19 nt, Artificial Sequence
  Description of Artificial Sequence: Synthetic oligonucleotide
  Sense strand starting at position 258 of SEQ ID NO: 3468
uuugauuccaucggacaug

SEQ ID NO: 269889 - RNA, 19 nt, Artificial Sequence
  Description of Artificial Sequence: Synthetic oligonucleotide
  Antisense strand to SEQ ID NO: 269888
cauguccgauggaaucaaa

SEQ ID NO: 269890 - RNA, 19 nt, Artificial Sequence
  Description of Artificial Sequence: Synthetic oligonucleotide
  Sense strand starting at position 306 of SEQ ID NO: 3468
gggcuaagcaaugaugcau

SEQ ID NO: 269891 - RNA, 19 nt, Artificial Sequence
  Description of Artificial Sequence: Synthetic oligonucleotide
  Antisense strand to SEQ ID NO: 269890
augcaucauugcuuagccc

SEQ ID NO: 269892 - RNA, 19 nt, Artificial Sequence
  Description of Artificial Sequence: Synthetic oligonucleotide
  Sense strand starting at position 383 of SEQ ID NO: 3468
acugauaguguacaccuaa

SEQ ID NO: 269893 - RNA, 19 nt, Artificial Sequence
  Description of Artificial Sequence: Synthetic oligonucleotide
  Antisense strand to SEQ ID NO: 269892
uuagguguacacuaucagu

SEQ ID NO: 269894 - RNA, 19 nt, Artificial Sequence
  Description of Artificial Sequence: Synthetic oligonucleotide
  Sense strand starting at position 826 of SEQ ID NO: 3468
acauauugagacugugaug

SEQ ID NO: 269895 - RNA, 19 nt, Artificial Sequence
  Description of Artificial Sequence: Synthetic oligonucleotide
  Antisense strand to SEQ ID NO: 269894
caucacagucucaauaugu

SEQ ID NO: 269896 - RNA, 19 nt, Artificial Sequence
  Description of Artificial Sequence: Synthetic oligonucleotide
  Sense strand starting at position 844 of SEQ ID NO: 3468
gcuuuauauugauuguaug

SEQ ID NO: 269897 - RNA, 19 nt, Artificial Sequence
  Description of Artificial Sequence: Synthetic oligonucleotide
  Antisense strand to SEQ ID NO: 269896
cauacaaucaauauaaagc

SEQ ID NO: 269898 - RNA, 19 nt, Artificial Sequence
  Description of Artificial Sequence: Synthetic oligonucleotide
  Sense strand starting at position 1089 of SEQ ID NO: 3468
gggaaacuuugaucacguc

SEQ ID NO: 269899 - RNA, 19 nt, Artificial Sequence
  Description of Artificial Sequence: Synthetic oligonucleotide
  Antisense strand to SEQ ID NO: 269898
gacgugaucaaaguuuccc

SEQ ID NO: 269900 - RNA, 19 nt, Artificial Sequence
  Description of Artificial Sequence: Synthetic oligonucleotide
  Sense strand starting at position 1117 of SEQ ID NO: 3468
ucaucaaucguagaacuca

SEQ ID NO: 269901 - RNA, 19 nt, Artificial Sequence
  Description of Artificial Sequence: Synthetic oligonucleotide
  Antisense strand to SEQ ID NO: 269900
ugaguucuacgauugauga

SEQ ID NO: 269902 - RNA, 19 nt, Artificial Sequence
  Description of Artificial Sequence: Synthetic oligonucleotide
  Sense strand starting at position 1156 of SEQ ID NO: 3468
ccacaucccucuccgagaa

SEQ ID NO: 269903 - RNA, 19 nt, Artificial Sequence
  Description of Artificial Sequence: Synthetic oligonucleotide
  Antisense strand to SEQ ID NO: 269902
uucucggagagggaugugg

SEQ ID NO: 269904 - RNA, 19 nt, Artificial Sequence
  Description of Artificial Sequence: Synthetic oligonucleotide
  Sense strand starting at position 1330 of SEQ ID NO: 3468
gugugaugcaucuggucaa

SEQ ID NO: 269905 - RNA, 19 nt, Artificial Sequence
  Description of Artificial Sequence: Synthetic oligonucleotide
  Antisense strand to SEQ ID NO: 269904
uugaccagaugcaucacac

SEQ ID NO: 269906 - RNA, 19 nt, Artificial Sequence
  Description of Artificial Sequence: Synthetic oligonucleotide
  Sense strand starting at position 1361 of SEQ ID NO: 3468
ggacuugucucugucccua

SEQ ID NO: 269907 - RNA, 19 nt, Artificial Sequence
  Description of Artificial Sequence: Synthetic oligonucleotide
  Antisense strand to SEQ ID NO: 269906
uagggacagagacaagucc

SEQ ID NO: 269908 - RNA, 19 nt, Artificial Sequence
  Description of Artificial Sequence: Synthetic oligonucleotide
  Sense strand starting at position 1363 of SEQ ID NO: 3468
acuugucucugucccuaga

SEQ ID NO: 269909 - RNA, 19 nt, Artificial Sequence
  Description of Artificial Sequence: Synthetic oligonucleotide
  Antisense strand to SEQ ID NO: 269908
ucuagggacagagacaagu

SEQ ID NO: 269910 - RNA, 19 nt, Artificial Sequence
  Description of Artificial Sequence: Synthetic oligonucleotide
  Sense strand starting at position 1365 of SEQ ID NO: 3468
uugucucugucccuagaua

SEQ ID NO: 269911 - RNA, 19 nt, Artificial Sequence
  Description of Artificial Sequence: Synthetic oligonucleotide
  Antisense strand to SEQ ID NO: 269910
uaucuagggacagagacaa

SEQ ID NO: 269912 - RNA, 19 nt, Artificial Sequence
  Description of Artificial Sequence: Synthetic oligonucleotide
  Sense strand starting at position 1398 of SEQ ID NO: 3468
ugcagucaugagggucaau

SEQ ID NO: 269913 - RNA, 19 nt, Artificial Sequence
  Description of Artificial Sequence: Synthetic oligonucleotide
  Antisense strand to SEQ ID NO: 269912
auugacccucaugacugca

SEQ ID NO: 269914 - RNA, 19 nt, Artificial Sequence
  Description of Artificial Sequence: Synthetic oligonucleotide
  Sense strand starting at position 1409 of SEQ ID NO: 3468
gggucaauugcugaggcuu

SEQ ID NO: 269915 - RNA, 19 nt, Artificial Sequence
  Description of Artificial Sequence: Synthetic oligonucleotide
  Antisense strand to SEQ ID NO: 269914
aagccucagcaauugaccc

SEQ ID NO: 269916 - RNA, 19 nt, Artificial Sequence
  Description of Artificial Sequence: Synthetic oligonucleotide
  Sense strand starting at position 1517 of SEQ ID NO: 3468
aaggauuccucggcaagcu

SEQ ID NO: 269917 - RNA, 19 nt, Artificial Sequence
  Description of Artificial Sequence: Synthetic oligonucleotide
  Antisense strand to SEQ ID NO: 269916
agcuugccgaggaauccuu

SEQ ID NO: 269918 - RNA, 19 nt, Artificial Sequence
  Description of Artificial Sequence: Synthetic oligonucleotide
  Sense strand starting at position 2410 of SEQ ID NO: 3468
gaaggaguuucuucuucuu

SEQ ID NO: 269919 - RNA, 19 nt, Artificial Sequence
  Description of Artificial Sequence: Synthetic oligonucleotide
  Antisense strand to SEQ ID NO: 269918
aagaagaagaaacuccuuc

SEQ ID NO: 269920 - RNA, 19 nt, Artificial Sequence
  Description of Artificial Sequence: Synthetic oligonucleotide
  Sense strand starting at position 2725 of SEQ ID NO: 3468
uuuauuacccuuuguguca

SEQ ID NO: 269921 - RNA, 19 nt, Artificial Sequence
  Description of Artificial Sequence: Synthetic oligonucleotide
  Antisense strand to SEQ ID NO: 269920
ugacacaaaggguaauaaa

SEQ ID NO: 269922 - RNA, 19 nt, Artificial Sequence
  Description of Artificial Sequence: Synthetic oligonucleotide
  Sense strand starting at position 2726 of SEQ ID NO: 3468
uuauuacccuuugugucau

SEQ ID NO: 269923 - RNA, 19 nt, Artificial Sequence
  Description of Artificial Sequence: Synthetic oligonucleotide
  Antisense strand to SEQ ID NO: 269922
augacacaaaggguaauaa

SEQ ID NO: 269924 - RNA, 19 nt, Artificial Sequence
  Description of Artificial Sequence: Synthetic oligonucleotide
  Sense strand starting at position 3012 of SEQ ID NO: 3468
agugguuucucuccuccau

SEQ ID NO: 269925 - RNA, 19 nt, Artificial Sequence
  Description of Artificial Sequence: Synthetic oligonucleotide
  Antisense strand to SEQ ID NO: 269924
auggaggagagaaaccacu

SEQ ID NO: 269926 - RNA, 19 nt, Artificial Sequence
  Description of Artificial Sequence: Synthetic oligonucleotide
  Sense strand starting at position 3125 of SEQ ID NO: 3468
gcacacuuucuagauguca

SEQ ID NO: 269927 - RNA, 19 nt, Artificial Sequence
  Description of Artificial Sequence: Synthetic oligonucleotide
  Antisense strand to SEQ ID NO: 269926
ugacaucuagaaagugugc

SEQ ID NO: 269928 - RNA, 19 nt, Artificial Sequence
  Description of Artificial Sequence: Synthetic oligonucleotide
  Sense strand starting at position 3197 of SEQ ID NO: 3468
uuuguuucugagugggaaa

SEQ ID NO: 269929 - RNA, 19 nt, Artificial Sequence
  Description of Artificial Sequence: Synthetic oligonucleotide
  Antisense strand to SEQ ID NO: 269928
uuucccacucagaaacaaa

SEQ ID NO: 269930 - RNA, 19 nt, Artificial Sequence
  Description of Artificial Sequence: Synthetic oligonucleotide
  Sense strand starting at position 3235 of SEQ ID NO: 3468
auuggaacugcuuauccau

SEQ ID NO: 269931 - RNA, 19 nt, Artificial Sequence
  Description of Artificial Sequence: Synthetic oligonucleotide
  Antisense strand to SEQ ID NO: 269930
auggauaagcaguuccaau

SEQ ID NO: 269932 - RNA, 19 nt, Artificial Sequence
  Description of Artificial Sequence: Synthetic oligonucleotide
  Sense strand starting at position 3279 of SEQ ID NO: 3468
uuugguccuguaugagauu

SEQ ID NO: 269933 - RNA, 19 nt, Artificial Sequence
  Description of Artificial Sequence: Synthetic oligonucleotide
  Antisense strand to SEQ ID NO: 269932
aaucucauacaggaccaaa

SEQ ID NO: 269934 - RNA, 19 nt, Artificial Sequence
  Description of Artificial Sequence: Synthetic oligonucleotide
  Sense strand starting at position 3280 of SEQ ID NO: 3468
uugguccuguaugagauuu

SEQ ID NO: 269935 - RNA, 19 nt, Artificial Sequence
  Description of Artificial Sequence: Synthetic oligonucleotide
  Antisense strand to SEQ ID NO: 269934
aaaucucauacaggaccaa

SEQ ID NO: 269936 - RNA, 19 nt, Artificial Sequence
  Description of Artificial Sequence: Synthetic oligonucleotide
  Sense strand starting at position 3288 of SEQ ID NO: 3468
guaugagauuuggauauug

SEQ ID NO: 269937 - RNA, 19 nt, Artificial Sequence
  Description of Artificial Sequence: Synthetic oligonucleotide
  Antisense strand to SEQ ID NO: 269936
caauauccaaaucucauac

SEQ ID NO: 269938 - RNA, 19 nt, Artificial Sequence
  Description of Artificial Sequence: Synthetic oligonucleotide
  Sense strand starting at position 3315 of SEQ ID NO: 3468
guuggaagacuugauuggu

SEQ ID NO: 269939 - RNA, 19 nt, Artificial Sequence
  Description of Artificial Sequence: Synthetic oligonucleotide
  Antisense strand to SEQ ID NO: 269938
accaaucaagucuuccaac

SEQ ID NO: 269940 - RNA, 19 nt, Artificial Sequence
  Description of Artificial Sequence: Synthetic oligonucleotide
  Sense strand starting at position 3407 of SEQ ID NO: 3468
gguagaggccuuugguuag

SEQ ID NO: 269941 - RNA, 19 nt, Artificial Sequence
  Description of Artificial Sequence: Synthetic oligonucleotide
  Antisense strand to SEQ ID NO: 269940
cuaaccaaaggccucuacc

SEQ ID NO: 269942 - RNA, 19 nt, Artificial Sequence
  Description of Artificial Sequence: Synthetic oligonucleotide
  Sense strand starting at position 3543 of SEQ ID NO: 3468
acauacguuccugauacuu

SEQ ID NO: 269943 - RNA, 19 nt, Artificial Sequence
  Description of Artificial Sequence: Synthetic oligonucleotide
  Antisense strand to SEQ ID NO: 269942
aaguaucaggaacguaugu

SEQ ID NO: 269944 - RNA, 19 nt, Artificial Sequence
  Description of Artificial Sequence: Synthetic oligonucleotide
  Sense strand starting at position 3566 of SEQ ID NO: 3468
uccauaugaugagaauauu

SEQ ID NO: 269945 - RNA, 19 nt, Artificial Sequence
  Description of Artificial Sequence: Synthetic oligonucleotide
  Antisense strand to SEQ ID NO: 269944
aauauucucaucauaugga

SEQ ID NO: 269946 - RNA, 19 nt, Artificial Sequence
  Description of Artificial Sequence: Synthetic oligonucleotide
  Sense strand starting at position 3604 of SEQ ID NO: 3468
uggguauauuuguaaucuu

SEQ ID NO: 269947 - RNA, 19 nt, Artificial Sequence
  Description of Artificial Sequence: Synthetic oligonucleotide
  Antisense strand to SEQ ID NO: 269946
aagauuacaaauauaccca

SEQ ID NO: 269948 - RNA, 19 nt, Artificial Sequence
  Description of Artificial Sequence: Synthetic oligonucleotide
  Sense strand starting at position 3620 of SEQ ID NO: 3468
cuuuguaacuugucugaac

SEQ ID NO: 269949 - RNA, 19 nt, Artificial Sequence
  Description of Artificial Sequence: Synthetic oligonucleotide
  Antisense strand to SEQ ID NO: 269948
guucagacaaguuacaaag

SEQ ID NO: 269950 - RNA, 19 nt, Artificial Sequence
  Description of Artificial Sequence: Synthetic oligonucleotide
  Sense strand starting at position 3621 of SEQ ID NO: 3468
uuuguaacuugucugaaca

SEQ ID NO: 269951 - RNA, 19 nt, Artificial Sequence
  Description of Artificial Sequence: Synthetic oligonucleotide
  Antisense strand to SEQ ID NO: 269950
uguucagacaaguuacaaa

SEQ ID NO: 269952 - RNA, 19 nt, Artificial Sequence
  Description of Artificial Sequence: Synthetic oligonucleotide
  Sense strand starting at position 3622 of SEQ ID NO: 3468
uuguaacuugucugaacaa

SEQ ID NO: 269953 - RNA, 19 nt, Artificial Sequence
  Description of Artificial Sequence: Synthetic oligonucleotide
  Antisense strand to SEQ ID NO: 269952
uuguucagacaaguuacaa

SEQ ID NO: 269954 - RNA, 19 nt, Artificial Sequence
  Description of Artificial Sequence: Synthetic oligonucleotide
  Sense strand starting at position 3697 of SEQ ID NO: 3468
caucaauaguuugcuggau

SEQ ID NO: 269955 - RNA, 19 nt, Artificial Sequence
  Description of Artificial Sequence: Synthetic oligonucleotide
  Antisense strand to SEQ ID NO: 269954
auccagcaaacuauugaug

SEQ ID NO: 269956 - RNA, 19 nt, Artificial Sequence
  Description of Artificial Sequence: Synthetic oligonucleotide
  Sense strand starting at position 3698 of SEQ ID NO: 3468
aucaauaguuugcuggauu

SEQ ID NO: 269957 - RNA, 19 nt, Artificial Sequence
  Description of Artificial Sequence: Synthetic oligonucleotide
  Antisense strand to SEQ ID NO: 269956
aauccagcaaacuauugau

SEQ ID NO: 269958 - RNA, 19 nt, Artificial Sequence
  Description of Artificial Sequence: Synthetic oligonucleotide
  Sense strand starting at position 3752 of SEQ ID NO: 3468
acuguuguaaauugagaug

SEQ ID NO: 269959 - RNA, 19 nt, Artificial Sequence
  Description of Artificial Sequence: Synthetic oligonucleotide
  Antisense strand to SEQ ID NO: 269958
caucucaauuuacaacagu

SEQ ID NO: 269960 - RNA, 19 nt, Artificial Sequence
  Description of Artificial Sequence: Synthetic oligonucleotide
  Sense strand starting at position 3757 of SEQ ID NO: 3468
uguaaauugagaugaguuu

SEQ ID NO: 269961 - RNA, 19 nt, Artificial Sequence
  Description of Artificial Sequence: Synthetic oligonucleotide
  Antisense strand to SEQ ID NO: 269960
aaacucaucucaauuuaca

SEQ ID NO: 269962 - RNA, 19 nt, Artificial Sequence
  Description of Artificial Sequence: Synthetic oligonucleotide
  Sense strand starting at position 116 of SEQ ID NO: 3469
acauauugagacugugaug

SEQ ID NO: 269963 - RNA, 19 nt, Artificial Sequence
  Description of Artificial Sequence: Synthetic oligonucleotide
  Antisense strand to SEQ ID NO: 269962
caucacagucucaauaugu

SEQ ID NO: 269964 - RNA, 19 nt, Artificial Sequence
  Description of Artificial Sequence: Synthetic oligonucleotide
  Sense strand starting at position 134 of SEQ ID NO: 3469
gcuuuauauugauuguaug

SEQ ID NO: 269965 - RNA, 19 nt, Artificial Sequence
  Description of Artificial Sequence: Synthetic oligonucleotide
  Antisense strand to SEQ ID NO: 269964
cauacaaucaauauaaagc

SEQ ID NO: 269966 - RNA, 19 nt, Artificial Sequence
  Description of Artificial Sequence: Synthetic oligonucleotide
  Sense strand starting at position 379 of SEQ ID NO: 3469
gggaaacuuugaucacguc

SEQ ID NO: 269967 - RNA, 19 nt, Artificial Sequence
  Description of Artificial Sequence: Synthetic oligonucleotide
  Antisense strand to SEQ ID NO: 269966
gacgugaucaaaguuuccc

SEQ ID NO: 269968 - RNA, 19 nt, Artificial Sequence
  Description of Artificial Sequence: Synthetic oligonucleotide
  Sense strand starting at position 407 of SEQ ID NO: 3469
ucaucaaucguagaacuca

SEQ ID NO: 269969 - RNA, 19 nt, Artificial Sequence
  Description of Artificial Sequence: Synthetic oligonucleotide
  Antisense strand to SEQ ID NO: 269968
ugaguucuacgauugauga

SEQ ID NO: 269970 - RNA, 19 nt, Artificial Sequence
  Description of Artificial Sequence: Synthetic oligonucleotide
  Sense strand starting at position 446 of SEQ ID NO: 3469
ccacaucccucuccgagaa

SEQ ID NO: 269971 - RNA, 19 nt, Artificial Sequence
  Description of Artificial Sequence: Synthetic oligonucleotide
  Antisense strand to SEQ ID NO: 269970
uucucggagagggaugugg

SEQ ID NO: 269972 - RNA, 19 nt, Artificial Sequence
  Description of Artificial Sequence: Synthetic oligonucleotide
  Sense strand starting at position 688 of SEQ ID NO: 3469
ugcagucaugagggucaau

SEQ ID NO: 269973 - RNA, 19 nt, Artificial Sequence
  Description of Artificial Sequence: Synthetic oligonucleotide
  Antisense strand to SEQ ID NO: 269972
auugacccucaugacugca

SEQ ID NO: 269974 - RNA, 19 nt, Artificial Sequence
  Description of Artificial Sequence: Synthetic oligonucleotide
  Sense strand starting at position 699 of SEQ ID NO: 3469
gggucaauugcugaggcuu

SEQ ID NO: 269975 - RNA, 19 nt, Artificial Sequence
  Description of Artificial Sequence: Synthetic oligonucleotide
  Antisense strand to SEQ ID NO: 269974
aagccucagcaauugaccc

SEQ ID NO: 269976 - RNA, 19 nt, Artificial Sequence
  Description of Artificial Sequence: Synthetic oligonucleotide
  Sense strand starting at position 1700 of SEQ ID NO: 3469
gaaggaguuucuucuucuu

SEQ ID NO: 269977 - RNA, 19 nt, Artificial Sequence
  Description of Artificial Sequence: Synthetic oligonucleotide
  Antisense strand to SEQ ID NO: 269976
aagaagaagaaacuccuuc

SEQ ID NO: 269978 - RNA, 19 nt, Artificial Sequence
  Description of Artificial Sequence: Synthetic oligonucleotide
  Sense strand starting at position 2415 of SEQ ID NO: 3469
gcacacuuucuagauguca

SEQ ID NO: 269979 - RNA, 19 nt, Artificial Sequence
  Description of Artificial Sequence: Synthetic oligonucleotide
  Antisense strand to SEQ ID NO: 269978
ugacaucuagaaagugugc

SEQ ID NO: 269980 - RNA, 19 nt, Artificial Sequence
  Description of Artificial Sequence: Synthetic oligonucleotide
  Sense strand starting at position 2487 of SEQ ID NO: 3469
uuuguuucugagugggaaa

SEQ ID NO: 269981 - RNA, 19 nt, Artificial Sequence
  Description of Artificial Sequence: Synthetic oligonucleotide
  Antisense strand to SEQ ID NO: 269980
uuucccacucagaaacaaa

SEQ ID NO: 269982 - RNA, 19 nt, Artificial Sequence
  Description of Artificial Sequence: Synthetic oligonucleotide
  Sense strand starting at position 2525 of SEQ ID NO: 3469
auuggaacugcuuauccau

SEQ ID NO: 269983 - RNA, 19 nt, Artificial Sequence
  Description of Artificial Sequence: Synthetic oligonucleotide
  Antisense strand to SEQ ID NO: 269982
auggauaagcaguuccaau

SEQ ID NO: 269984 - RNA, 19 nt, Artificial Sequence
  Description of Artificial Sequence: Synthetic oligonucleotide
  Sense strand starting at position 2569 of SEQ ID NO: 3469
uuugguccuguaugagauu

SEQ ID NO: 269985 - RNA, 19 nt, Artificial Sequence
  Description of Artificial Sequence: Synthetic oligonucleotide
  Antisense strand to SEQ ID NO: 269984
aaucucauacaggaccaaa

SEQ ID NO: 269986 - RNA, 19 nt, Artificial Sequence
  Description of Artificial Sequence: Synthetic oligonucleotide
  Sense strand starting at position 2578 of SEQ ID NO: 3469
guaugagauuuggauauug

SEQ ID NO: 269987 - RNA, 19 nt, Artificial Sequence
  Description of Artificial Sequence: Synthetic oligonucleotide
  Antisense strand to SEQ ID NO: 269986
caauauccaaaucucauac

SEQ ID NO: 269988 - RNA, 19 nt, Artificial Sequence
  Description of Artificial Sequence: Synthetic oligonucleotide
  Sense strand starting at position 2605 of SEQ ID NO: 3469
guuggaagacuugauuggu

SEQ ID NO: 269989 - RNA, 19 nt, Artificial Sequence
  Description of Artificial Sequence: Synthetic oligonucleotide
  Antisense strand to SEQ ID NO: 269988
accaaucaagucuuccaac

SEQ ID NO: 269990 - RNA, 19 nt, Artificial Sequence
  Description of Artificial Sequence: Synthetic oligonucleotide
  Sense strand starting at position 2833 of SEQ ID NO: 3469
acauacguuccugauacuu

SEQ ID NO: 269991 - RNA, 19 nt, Artificial Sequence
  Description of Artificial Sequence: Synthetic oligonucleotide
  Antisense strand to SEQ ID NO: 269990
aaguaucaggaacguaugu

SEQ ID NO: 269992 - RNA, 19 nt, Artificial Sequence
  Description of Artificial Sequence: Synthetic oligonucleotide
  Sense strand starting at position 2910 of SEQ ID NO: 3469
cuuuguaacuugucugaac

SEQ ID NO: 269993 - RNA, 19 nt, Artificial Sequence
  Description of Artificial Sequence: Synthetic oligonucleotide
  Antisense strand to SEQ ID NO: 269992
guucagacaaguuacaaag

SEQ ID NO: 269994 - RNA, 19 nt, Artificial Sequence
  Description of Artificial Sequence: Synthetic oligonucleotide
  Sense strand starting at position 2911 of SEQ ID NO: 3469
uuuguaacuugucugaaca

SEQ ID NO: 269995 - RNA, 19 nt, Artificial Sequence
  Description of Artificial Sequence: Synthetic oligonucleotide
  Antisense strand to SEQ ID NO: 269994
uguucagacaaguuacaaa

SEQ ID NO: 269996 - RNA, 19 nt, Artificial Sequence
  Description of Artificial Sequence: Synthetic oligonucleotide
  Sense strand starting at position 2912 of SEQ ID NO: 3469
uuguaacuugucugaacaa

SEQ ID NO: 269997 - RNA, 19 nt, Artificial Sequence
  Description of Artificial Sequence: Synthetic oligonucleotide
  Antisense strand to SEQ ID NO: 269996
uuguucagacaaguuacaa

SEQ ID NO: 269998 - RNA, 19 nt, Artificial Sequence
  Description of Artificial Sequence: Synthetic oligonucleotide
  Sense strand starting at position 2987 of SEQ ID NO: 3469
caucaauaguuugcuggau

SEQ ID NO: 269999 - RNA, 19 nt, Artificial Sequence
  Description of Artificial Sequence: Synthetic oligonucleotide
  Antisense strand to SEQ ID NO: 269998
auccagcaaacuauugaug

SEQ ID NO: 270000 - RNA, 19 nt, Artificial Sequence
  Description of Artificial Sequence: Synthetic oligonucleotide
  Sense strand starting at position 2988 of SEQ ID NO: 3469
aucaauaguuugcuggauu

SEQ ID NO: 270001 - RNA, 19 nt, Artificial Sequence
  Description of Artificial Sequence: Synthetic oligonucleotide
  Antisense strand to SEQ ID NO: 270000
aauccagcaaacuauugau

SEQ ID NO: 270002 - RNA, 19 nt, Artificial Sequence
  Description of Artificial Sequence: Synthetic oligonucleotide
  Sense strand starting at position 3042 of SEQ ID NO: 3469
acuguuguaaauugagaug

SEQ ID NO: 270003 - RNA, 19 nt, Artificial Sequence
  Description of Artificial Sequence: Synthetic oligonucleotide
  Antisense strand to SEQ ID NO: 270002
caucucaauuuacaacagu

SEQ ID NO: 270004 - RNA, 19 nt, Artificial Sequence
  Description of Artificial Sequence: Synthetic oligonucleotide
  Sense strand starting at position 3047 of SEQ ID NO: 3469
uguaaauugagaugaguuu

SEQ ID NO: 270005 - RNA, 19 nt, Artificial Sequence
  Description of Artificial Sequence: Synthetic oligonucleotide
  Antisense strand to SEQ ID NO: 270004
aaacucaucucaauuuaca

SEQ ID NO: 270006 - RNA, 19 nt, Artificial Sequence
  Description of Artificial Sequence: Synthetic oligonucleotide
  Sense strand starting at position 3328 of SEQ ID NO: 3469
uagaaaguauguuucugau

SEQ ID NO: 270007 - RNA, 19 nt, Artificial Sequence
  Description of Artificial Sequence: Synthetic oligonucleotide
  Antisense strand to SEQ ID NO: 270006
aucagaaacauacuuucua

SEQ ID NO: 270008 - RNA, 19 nt, Artificial Sequence
  Description of Artificial Sequence: Synthetic oligonucleotide
  Sense strand starting at position 3330 of SEQ ID NO: 3469
gaaaguauguuucugaugu

SEQ ID NO: 270009 - RNA, 19 nt, Artificial Sequence
  Description of Artificial Sequence: Synthetic oligonucleotide
  Antisense strand to SEQ ID NO: 270008
acaucagaaacauacuuuc

SEQ ID NO: 270010 - RNA, 19 nt, Artificial Sequence
  Description of Artificial Sequence: Synthetic oligonucleotide
  Sense strand starting at position 3361 of SEQ ID NO: 3469
agggcuuauauuggaaagu

SEQ ID NO: 270011 - RNA, 19 nt, Artificial Sequence
  Description of Artificial Sequence: Synthetic oligonucleotide
  Antisense strand to SEQ ID NO: 270010
acuuuccaauauaagcccu

SEQ ID NO: 270012 - RNA, 19 nt, Artificial Sequence
  Description of Artificial Sequence: Synthetic oligonucleotide
  Sense strand starting at position 3508 of SEQ ID NO: 3469
ugguaucucugaucccaua

SEQ ID NO: 270013 - RNA, 19 nt, Artificial Sequence
  Description of Artificial Sequence: Synthetic oligonucleotide
  Antisense strand to SEQ ID NO: 270012
uaugggaucagagauacca

SEQ ID NO: 270014 - RNA, 19 nt, Artificial Sequence
  Description of Artificial Sequence: Synthetic oligonucleotide
  Sense strand starting at position 3568 of SEQ ID NO: 3469
uugugaucagacuggcaau

SEQ ID NO: 270015 - RNA, 19 nt, Artificial Sequence
  Description of Artificial Sequence: Synthetic oligonucleotide
  Antisense strand to SEQ ID NO: 270014
auugccagucugaucacaa

SEQ ID NO: 270016 - RNA, 19 nt, Artificial Sequence
  Description of Artificial Sequence: Synthetic oligonucleotide
  Sense strand starting at position 3569 of SEQ ID NO: 3469
ugugaucagacuggcaaua

SEQ ID NO: 270017 - RNA, 19 nt, Artificial Sequence
  Description of Artificial Sequence: Synthetic oligonucleotide
  Antisense strand to SEQ ID NO: 270016
uauugccagucugaucaca

SEQ ID NO: 270018 - RNA, 19 nt, Artificial Sequence
  Description of Artificial Sequence: Synthetic oligonucleotide
  Sense strand starting at position 3693 of SEQ ID NO: 3469
uuucuugaugguuaaagcu

SEQ ID NO: 270019 - RNA, 19 nt, Artificial Sequence
  Description of Artificial Sequence: Synthetic oligonucleotide
  Antisense strand to SEQ ID NO: 270018
agcuuuaaccaucaagaaa

SEQ ID NO: 270020 - RNA, 19 nt, Artificial Sequence
  Description of Artificial Sequence: Synthetic oligonucleotide
  Sense strand starting at position 3723 of SEQ ID NO: 3469
uuuagugacagugaagcau

SEQ ID NO: 270021 - RNA, 19 nt, Artificial Sequence
  Description of Artificial Sequence: Synthetic oligonucleotide
  Antisense strand to SEQ ID NO: 270020
augcuucacugucacuaaa

SEQ ID NO: 270022 - RNA, 19 nt, Artificial Sequence
  Description of Artificial Sequence: Synthetic oligonucleotide
  Sense strand starting at position 3737 of SEQ ID NO: 3469
agcauugcauauguagaaa

SEQ ID NO: 270023 - RNA, 19 nt, Artificial Sequence
  Description of Artificial Sequence: Synthetic oligonucleotide
  Antisense strand to SEQ ID NO: 270022
uuucuacauaugcaaugcu

SEQ ID NO: 270024 - RNA, 19 nt, Artificial Sequence
  Description of Artificial Sequence: Synthetic oligonucleotide
  Sense strand starting at position 3740 of SEQ ID NO: 3469
auugcauauguagaaacuu

SEQ ID NO: 270025 - RNA, 19 nt, Artificial Sequence
  Description of Artificial Sequence: Synthetic oligonucleotide
  Antisense strand to SEQ ID NO: 270024
aaguuucuacauaugcaau

SEQ ID NO: 270026 - RNA, 19 nt, Artificial Sequence
  Description of Artificial Sequence: Synthetic oligonucleotide
  Sense strand starting at position 3748 of SEQ ID NO: 3469
uguagaaacuuguucugua

SEQ ID NO: 270027 - RNA, 19 nt, Artificial Sequence
  Description of Artificial Sequence: Synthetic oligonucleotide
  Antisense strand to SEQ ID NO: 270026
uacagaacaaguuucuaca

SEQ ID NO: 270028 - RNA, 19 nt, Artificial Sequence
  Description of Artificial Sequence: Synthetic oligonucleotide
  Sense strand starting at position 3749 of SEQ ID NO: 3469
guagaaacuuguucuguaa

SEQ ID NO: 270029 - RNA, 19 nt, Artificial Sequence
  Description of Artificial Sequence: Synthetic oligonucleotide
  Antisense strand to SEQ ID NO: 270028
uuacagaacaaguuucuac

SEQ ID NO: 270030 - RNA, 19 nt, Artificial Sequence
  Description of Artificial Sequence: Synthetic oligonucleotide
  Sense strand starting at position 3775 of SEQ ID NO: 3469
auuaucaacugugugcaaa

SEQ ID NO: 270031 - RNA, 19 nt, Artificial Sequence
  Description of Artificial Sequence: Synthetic oligonucleotide
  Antisense strand to SEQ ID NO: 270030
uuugcacacaguugauaau

SEQ ID NO: 270032 - RNA, 19 nt, Artificial Sequence
  Description of Artificial Sequence: Synthetic oligonucleotide
  Sense strand starting at position 3823 of SEQ ID NO: 3469
gcuuuauagcaguaaacaa

SEQ ID NO: 270033 - RNA, 19 nt, Artificial Sequence
  Description of Artificial Sequence: Synthetic oligonucleotide
  Antisense strand to SEQ ID NO: 270032
uuguuuacugcuauaaagc

SEQ ID NO: 270034 - RNA, 19 nt, Artificial Sequence
  Description of Artificial Sequence: Synthetic oligonucleotide
  Sense strand starting at position 3882 of SEQ ID NO: 3469
uuuaccuuucucugagaug

SEQ ID NO: 270035 - RNA, 19 nt, Artificial Sequence
  Description of Artificial Sequence: Synthetic oligonucleotide
  Antisense strand to SEQ ID NO: 270034
caucucagagaaagguaaa

SEQ ID NO: 270036 - RNA, 19 nt, Artificial Sequence
  Description of Artificial Sequence: Synthetic oligonucleotide
  Sense strand starting at position 3893 of SEQ ID NO: 3469
cugagauguaauuagugca

SEQ ID NO: 270037 - RNA, 19 nt, Artificial Sequence
  Description of Artificial Sequence: Synthetic oligonucleotide
  Antisense strand to SEQ ID NO: 270036
ugcacuaauuacaucucag

SEQ ID NO: 270038 - RNA, 19 nt, Artificial Sequence
  Description of Artificial Sequence: Synthetic oligonucleotide
  Sense strand starting at position 3898 of SEQ ID NO: 3469
auguaauuagugcacuuaa

SEQ ID NO: 270039 - RNA, 19 nt, Artificial Sequence
  Description of Artificial Sequence: Synthetic oligonucleotide
  Antisense strand to SEQ ID NO: 270038
uuaagugcacuaauuacau

SEQ ID NO: 270040 - RNA, 19 nt, Artificial Sequence
  Description of Artificial Sequence: Synthetic oligonucleotide
  Sense strand starting at position 3908 of SEQ ID NO: 3469
ugcacuuaagcagaaaucu

SEQ ID NO: 270041 - RNA, 19 nt, Artificial Sequence
  Description of Artificial Sequence: Synthetic oligonucleotide
  Antisense strand to SEQ ID NO: 270040
agauuucugcuuaagugca

SEQ ID NO: 270042 - RNA, 19 nt, Artificial Sequence
  Description of Artificial Sequence: Synthetic oligonucleotide
  Sense strand starting at position 38 of SEQ ID NO: 3470
gugaaauucuuaccagauu

SEQ ID NO: 270043 - RNA, 19 nt, Artificial Sequence
  Description of Artificial Sequence: Synthetic oligonucleotide
  Antisense strand to SEQ ID NO: 270042
aaucugguaagaauuucac

SEQ ID NO: 270044 - RNA, 19 nt, Artificial Sequence
  Description of Artificial Sequence: Synthetic oligonucleotide
  Sense strand starting at position 44 of SEQ ID NO: 3470
uucuuaccagauuauguau

SEQ ID NO: 270045 - RNA, 19 nt, Artificial Sequence
  Description of Artificial Sequence: Synthetic oligonucleotide
  Antisense strand to SEQ ID NO: 270044
auacauaaucugguaagaa

SEQ ID NO: 270046 - RNA, 19 nt, Artificial Sequence
  Description of Artificial Sequence: Synthetic oligonucleotide
  Sense strand starting at position 67 of SEQ ID NO: 3470
uuuguuaaaguccaagcaa

SEQ ID NO: 270047 - RNA, 19 nt, Artificial Sequence
  Description of Artificial Sequence: Synthetic oligonucleotide
  Antisense strand to SEQ ID NO: 270046
uugcuuggacuuuaacaaa

SEQ ID NO: 270048 - RNA, 19 nt, Artificial Sequence
  Description of Artificial Sequence: Synthetic oligonucleotide
  Sense strand starting at position 101 of SEQ ID NO: 3470
agggaaugcugaguaagac

SEQ ID NO: 270049 - RNA, 19 nt, Artificial Sequence
  Description of Artificial Sequence: Synthetic oligonucleotide
  Antisense strand to SEQ ID NO: 270048
gucuuacucagcauucccu

SEQ ID NO: 270050 - RNA, 19 nt, Artificial Sequence
  Description of Artificial Sequence: Synthetic oligonucleotide
  Sense strand starting at position 223 of SEQ ID NO: 3470
auguuugcucuguaggaag

SEQ ID NO: 270051 - RNA, 19 nt, Artificial Sequence
  Description of Artificial Sequence: Synthetic oligonucleotide
  Antisense strand to SEQ ID NO: 270050
cuuccuacagagcaaacau

SEQ ID NO: 270052 - RNA, 19 nt, Artificial Sequence
  Description of Artificial Sequence: Synthetic oligonucleotide
  Sense strand starting at position 432 of SEQ ID NO: 3470
agacaagacuuguuauuau

SEQ ID NO: 270053 - RNA, 19 nt, Artificial Sequence
  Description of Artificial Sequence: Synthetic oligonucleotide
  Antisense strand to SEQ ID NO: 270052
auaauaacaagucuugucu

SEQ ID NO: 270054 - RNA, 19 nt, Artificial Sequence
  Description of Artificial Sequence: Synthetic oligonucleotide
  Sense strand starting at position 435 of SEQ ID NO: 3470
caagacuuguuauuauggu

SEQ ID NO: 270055 - RNA, 19 nt, Artificial Sequence
  Description of Artificial Sequence: Synthetic oligonucleotide
  Antisense strand to SEQ ID NO: 270054
accauaauaacaagucuug

SEQ ID NO: 270056 - RNA, 19 nt, Artificial Sequence
  Description of Artificial Sequence: Synthetic oligonucleotide
  Sense strand starting at position 555 of SEQ ID NO: 3470
uucuuauaucaugagagca

SEQ ID NO: 270057 - RNA, 19 nt, Artificial Sequence
  Description of Artificial Sequence: Synthetic oligonucleotide
  Antisense strand to SEQ ID NO: 270056
ugcucucaugauauaagaa

SEQ ID NO: 270058 - RNA, 19 nt, Artificial Sequence
  Description of Artificial Sequence: Synthetic oligonucleotide
  Sense strand starting at position 692 of SEQ ID NO: 3470
cauaaagaauggucagagu

SEQ ID NO: 270059 - RNA, 19 nt, Artificial Sequence
  Description of Artificial Sequence: Synthetic oligonucleotide
  Antisense strand to SEQ ID NO: 270058
acucugaccauucuuuaug

SEQ ID NO: 270060 - RNA, 19 nt, Artificial Sequence
  Description of Artificial Sequence: Synthetic oligonucleotide
  Sense strand starting at position 726 of SEQ ID NO: 3470
cugaauacucaauguggaa

SEQ ID NO: 270061 - RNA, 19 nt, Artificial Sequence
  Description of Artificial Sequence: Synthetic oligonucleotide
  Antisense strand to SEQ ID NO: 270060
uuccacauugaguauucag

SEQ ID NO: 270062 - RNA, 19 nt, Artificial Sequence
  Description of Artificial Sequence: Synthetic oligonucleotide
  Sense strand starting at position 746 of SEQ ID NO: 3470
guacaugcuguugacauaa

SEQ ID NO: 270063 - RNA, 19 nt, Artificial Sequence
  Description of Artificial Sequence: Synthetic oligonucleotide
  Antisense strand to SEQ ID NO: 270062
uuaugucaacagcauguac

SEQ ID NO: 270064 - RNA, 19 nt, Artificial Sequence
  Description of Artificial Sequence: Synthetic oligonucleotide
  Sense strand starting at position 789 of SEQ ID NO: 3470
agggauaauguuuguuucu

SEQ ID NO: 270065 - RNA, 19 nt, Artificial Sequence
  Description of Artificial Sequence: Synthetic oligonucleotide
  Antisense strand to SEQ ID NO: 270064
agaaacaaacauuaucccu

SEQ ID NO: 270066 - RNA, 19 nt, Artificial Sequence
  Description of Artificial Sequence: Synthetic oligonucleotide
  Sense strand starting at position 815 of SEQ ID NO: 3470
gugauuaaacuaggugaaa

SEQ ID NO: 270067 - RNA, 19 nt, Artificial Sequence
  Description of Artificial Sequence: Synthetic oligonucleotide
  Antisense strand to SEQ ID NO: 270066
uuucaccuaguuuaaucac

SEQ ID NO: 270068 - RNA, 19 nt, Artificial Sequence
  Description of Artificial Sequence: Synthetic oligonucleotide
  Sense strand starting at position 972 of SEQ ID NO: 3470
uaaugaugguguuuacuug

SEQ ID NO: 270069 - RNA, 19 nt, Artificial Sequence
  Description of Artificial Sequence: Synthetic oligonucleotide
  Antisense strand to SEQ ID NO: 270068
caaguaaacaccaucauua

SEQ ID NO: 270070 - RNA, 19 nt, Artificial Sequence
  Description of Artificial Sequence: Synthetic oligonucleotide
  Sense strand starting at position 976 of SEQ ID NO: 3470
gaugguguuuacuugagac

SEQ ID NO: 270071 - RNA, 19 nt, Artificial Sequence
  Description of Artificial Sequence: Synthetic oligonucleotide
  Antisense strand to SEQ ID NO: 270070
gucucaaguaaacaccauc

SEQ ID NO: 270072 - RNA, 19 nt, Artificial Sequence
  Description of Artificial Sequence: Synthetic oligonucleotide
  Sense strand starting at position 978 of SEQ ID NO: 3470
ugguguuuacuugagacua

SEQ ID NO: 270073 - RNA, 19 nt, Artificial Sequence
  Description of Artificial Sequence: Synthetic oligonucleotide
  Antisense strand to SEQ ID NO: 270072
uagucucaaguaaacacca

SEQ ID NO: 270074 - RNA, 19 nt, Artificial Sequence
  Description of Artificial Sequence: Synthetic oligonucleotide
  Sense strand starting at position 1108 of SEQ ID NO: 3470
guauuacggaguuagcaua

SEQ ID NO: 270075 - RNA, 19 nt, Artificial Sequence
  Description of Artificial Sequence: Synthetic oligonucleotide
  Antisense strand to SEQ ID NO: 270074
uaugcuaacuccguaauac

SEQ ID NO: 270076 - RNA, 19 nt, Artificial Sequence
  Description of Artificial Sequence: Synthetic oligonucleotide
  Sense strand starting at position 1130 of SEQ ID NO: 3470
agaggaauuucucauaacc

SEQ ID NO: 270077 - RNA, 19 nt, Artificial Sequence
  Description of Artificial Sequence: Synthetic oligonucleotide
  Antisense strand to SEQ ID NO: 270076
gguuaugagaaauuccucu

SEQ ID NO: 270078 - RNA, 19 nt, Artificial Sequence
  Description of Artificial Sequence: Synthetic oligonucleotide
  Sense strand starting at position 1160 of SEQ ID NO: 3470
auguuuccggaguauaaug

SEQ ID NO: 270079 - RNA, 19 nt, Artificial Sequence
  Description of Artificial Sequence: Synthetic oligonucleotide
  Antisense strand to SEQ ID NO: 270078
cauuauacuccggaaacau

SEQ ID NO: 270080 - RNA, 19 nt, Artificial Sequence
  Description of Artificial Sequence: Synthetic oligonucleotide
  Sense strand starting at position 1341 of SEQ ID NO: 3470
gccaacacucaagauaguu

SEQ ID NO: 270081 - RNA, 19 nt, Artificial Sequence
  Description of Artificial Sequence: Synthetic oligonucleotide
  Antisense strand to SEQ ID NO: 270080
aacuaucuugaguguuggc

SEQ ID NO: 270082 - RNA, 19 nt, Artificial Sequence
  Description of Artificial Sequence: Synthetic oligonucleotide
  Sense strand starting at position 2231 of SEQ ID NO: 3470
gugugacuaacggguauuu

SEQ ID NO: 270083 - RNA, 19 nt, Artificial Sequence
  Description of Artificial Sequence: Synthetic oligonucleotide
  Antisense strand to SEQ ID NO: 270082
aaauacccguuagucacac

SEQ ID NO: 270084 - RNA, 19 nt, Artificial Sequence
  Description of Artificial Sequence: Synthetic oligonucleotide
  Sense strand starting at position 2249 of SEQ ID NO: 3470
uauuauauccucgauggcu

SEQ ID NO: 270085 - RNA, 19 nt, Artificial Sequence
  Description of Artificial Sequence: Synthetic oligonucleotide
  Antisense strand to SEQ ID NO: 270084
agccaucgaggauauaaua

SEQ ID NO: 270086 - RNA, 19 nt, Artificial Sequence
  Description of Artificial Sequence: Synthetic oligonucleotide
  Sense strand starting at position 2427 of SEQ ID NO: 3470
gucuuuguugcgucccauu

SEQ ID NO: 270087 - RNA, 19 nt, Artificial Sequence
  Description of Artificial Sequence: Synthetic oligonucleotide
  Antisense strand to SEQ ID NO: 270086
aaugggacgcaacaaagac

SEQ ID NO: 270088 - RNA, 19 nt, Artificial Sequence
  Description of Artificial Sequence: Synthetic oligonucleotide
  Sense strand starting at position 2526 of SEQ ID NO: 3470
gugugaguggcgguuuaua

SEQ ID NO: 270089 - RNA, 19 nt, Artificial Sequence
  Description of Artificial Sequence: Synthetic oligonucleotide
  Antisense strand to SEQ ID NO: 270088
uauaaaccgccacucacac

SEQ ID NO: 270090 - RNA, 19 nt, Artificial Sequence
  Description of Artificial Sequence: Synthetic oligonucleotide
  Sense strand starting at position 2528 of SEQ ID NO: 3470
gugaguggcgguuuauagu

SEQ ID NO: 270091 - RNA, 19 nt, Artificial Sequence
  Description of Artificial Sequence: Synthetic oligonucleotide
  Antisense strand to SEQ ID NO: 270090
acuauaaaccgccacucac

SEQ ID NO: 270092 - RNA, 19 nt, Artificial Sequence
  Description of Artificial Sequence: Synthetic oligonucleotide
  Sense strand starting at position 2588 of SEQ ID NO: 3470
cuuuaaaguuaaucacgau

SEQ ID NO: 270093 - RNA, 19 nt, Artificial Sequence
  Description of Artificial Sequence: Synthetic oligonucleotide
  Antisense strand to SEQ ID NO: 270092
aucgugauuaacuuuaaag

SEQ ID NO: 270094 - RNA, 19 nt, Artificial Sequence
  Description of Artificial Sequence: Synthetic oligonucleotide
  Sense strand starting at position 2663 of SEQ ID NO: 3470
augcuaaggaaaugugaau

SEQ ID NO: 270095 - RNA, 19 nt, Artificial Sequence
  Description of Artificial Sequence: Synthetic oligonucleotide
  Antisense strand to SEQ ID NO: 270094
auucacauuuccuuagcau

SEQ ID NO: 270096 - RNA, 19 nt, Artificial Sequence
  Description of Artificial Sequence: Synthetic oligonucleotide
  Sense strand starting at position 2701 of SEQ ID NO: 3470
gaaagucuugauuagguuu

SEQ ID NO: 270097 - RNA, 19 nt, Artificial Sequence
  Description of Artificial Sequence: Synthetic oligonucleotide
  Antisense strand to SEQ ID NO: 270096
aaaccuaaucaagacuuuc

SEQ ID NO: 270098 - RNA, 19 nt, Artificial Sequence
  Description of Artificial Sequence: Synthetic oligonucleotide
  Sense strand starting at position 2723 of SEQ ID NO: 3470
uggaaucgccuuugaaaug

SEQ ID NO: 270099 - RNA, 19 nt, Artificial Sequence
  Description of Artificial Sequence: Synthetic oligonucleotide
  Antisense strand to SEQ ID NO: 270098
cauuucaaaggcgauucca

SEQ ID NO: 270100 - RNA, 19 nt, Artificial Sequence
  Description of Artificial Sequence: Synthetic oligonucleotide
  Sense strand starting at position 2920 of SEQ ID NO: 3470
uuguguucucucuaaugga

SEQ ID NO: 270101 - RNA, 19 nt, Artificial Sequence
  Description of Artificial Sequence: Synthetic oligonucleotide
  Antisense strand to SEQ ID NO: 270100
uccauuagagagaacacaa

SEQ ID NO: 270102 - RNA, 19 nt, Artificial Sequence
  Description of Artificial Sequence: Synthetic oligonucleotide
  Sense strand starting at position 3093 of SEQ ID NO: 3470
ugugauuuguaagcccgau

SEQ ID NO: 270103 - RNA, 19 nt, Artificial Sequence
  Description of Artificial Sequence: Synthetic oligonucleotide
  Antisense strand to SEQ ID NO: 270102
aucgggcuuacaaaucaca

SEQ ID NO: 270104 - RNA, 19 nt, Artificial Sequence
  Description of Artificial Sequence: Synthetic oligonucleotide
  Sense strand starting at position 3099 of SEQ ID NO: 3470
uuguaagcccgauauaaac

SEQ ID NO: 270105 - RNA, 19 nt, Artificial Sequence
  Description of Artificial Sequence: Synthetic oligonucleotide
  Antisense strand to SEQ ID NO: 270104
guuuauaucgggcuuacaa

SEQ ID NO: 270106 - RNA, 19 nt, Artificial Sequence
  Description of Artificial Sequence: Synthetic oligonucleotide
  Sense strand starting at position 3173 of SEQ ID NO: 3470
cgaugugugauugauauaa

SEQ ID NO: 270107 - RNA, 19 nt, Artificial Sequence
  Description of Artificial Sequence: Synthetic oligonucleotide
  Antisense strand to SEQ ID NO: 270106
uuauaucaaucacacaucg

SEQ ID NO: 270108 - RNA, 19 nt, Artificial Sequence
  Description of Artificial Sequence: Synthetic oligonucleotide
  Sense strand starting at position 3252 of SEQ ID NO: 3470
guaacuugugaugagguua

SEQ ID NO: 270109 - RNA, 19 nt, Artificial Sequence
  Description of Artificial Sequence: Synthetic oligonucleotide
  Antisense strand to SEQ ID NO: 270108
uaaccucaucacaaguuac

SEQ ID NO: 270110 - RNA, 19 nt, Artificial Sequence
  Description of Artificial Sequence: Synthetic oligonucleotide
  Sense strand starting at position 3257 of SEQ ID NO: 3470
uugugaugagguuaauuag

SEQ ID NO: 270111 - RNA, 19 nt, Artificial Sequence
  Description of Artificial Sequence: Synthetic oligonucleotide
  Antisense strand to SEQ ID NO: 270110
cuaauuaaccucaucacaa

SEQ ID NO: 270112 - RNA, 19 nt, Artificial Sequence
  Description of Artificial Sequence: Synthetic oligonucleotide
  Sense strand starting at position 3267 of SEQ ID NO: 3470
guuaauuagaaaugaggua

SEQ ID NO: 270113 - RNA, 19 nt, Artificial Sequence
  Description of Artificial Sequence: Synthetic oligonucleotide
  Antisense strand to SEQ ID NO: 270112
uaccucauuucuaauuaac

SEQ ID NO: 270114 - RNA, 19 nt, Artificial Sequence
  Description of Artificial Sequence: Synthetic oligonucleotide
  Sense strand starting at position 3854 of SEQ ID NO: 3470
agaaguuuguacuuaaccu

SEQ ID NO: 270115 - RNA, 19 nt, Artificial Sequence
  Description of Artificial Sequence: Synthetic oligonucleotide
  Antisense strand to SEQ ID NO: 270114
agguuaaguacaaacuucu

SEQ ID NO: 270116 - RNA, 19 nt, Artificial Sequence
  Description of Artificial Sequence: Synthetic oligonucleotide
  Sense strand starting at position 3946 of SEQ ID NO: 3470
cccuauaggugguugagau

SEQ ID NO: 270117 - RNA, 19 nt, Artificial Sequence
  Description of Artificial Sequence: Synthetic oligonucleotide
  Antisense strand to SEQ ID NO: 270116
aucucaaccaccuauaggg

SEQ ID NO: 270118 - RNA, 19 nt, Artificial Sequence
  Description of Artificial Sequence: Synthetic oligonucleotide
  Sense strand starting at position 3947 of SEQ ID NO: 3470
ccuauaggugguugagauu

SEQ ID NO: 270119 - RNA, 19 nt, Artificial Sequence
  Description of Artificial Sequence: Synthetic oligonucleotide
  Antisense strand to SEQ ID NO: 270118
aaucucaaccaccuauagg

SEQ ID NO: 270120 - RNA, 19 nt, Artificial Sequence
  Description of Artificial Sequence: Synthetic oligonucleotide
  Sense strand starting at position 3976 of SEQ ID NO: 3470
uaucaauuaggugguuauu

SEQ ID NO: 270121 - RNA, 19 nt, Artificial Sequence
  Description of Artificial Sequence: Synthetic oligonucleotide
  Antisense strand to SEQ ID NO: 270120
aauaaccaccuaauugaua

SEQ ID NO: 270122 - RNA, 19 nt, Artificial Sequence
  Description of Artificial Sequence: Synthetic oligonucleotide
  Sense strand starting at position 5 of SEQ ID NO: 3471
guaaucugaaacugaggua

SEQ ID NO: 270123 - RNA, 19 nt, Artificial Sequence
  Description of Artificial Sequence: Synthetic oligonucleotide
  Antisense strand to SEQ ID NO: 270122
uaccucaguuucagauuac

SEQ ID NO: 270124 - RNA, 19 nt, Artificial Sequence
  Description of Artificial Sequence: Synthetic oligonucleotide
  Sense strand starting at position 51 of SEQ ID NO: 3471
guauaauggcguuaucaac

SEQ ID NO: 270125 - RNA, 19 nt, Artificial Sequence
  Description of Artificial Sequence: Synthetic oligonucleotide
  Antisense strand to SEQ ID NO: 270124
guugauaacgccauuauac

SEQ ID NO: 270126 - RNA, 19 nt, Artificial Sequence
  Description of Artificial Sequence: Synthetic oligonucleotide
  Sense strand starting at position 57 of SEQ ID NO: 3471
uggcguuaucaacauugca

SEQ ID NO: 270127 - RNA, 19 nt, Artificial Sequence
  Description of Artificial Sequence: Synthetic oligonucleotide
  Antisense strand to SEQ ID NO: 270126
ugcaauguugauaacgcca

SEQ ID NO: 270128 - RNA, 19 nt, Artificial Sequence
  Description of Artificial Sequence: Synthetic oligonucleotide
  Sense strand starting at position 243 of SEQ ID NO: 3471
cccaaugagggcuaugcau

SEQ ID NO: 270129 - RNA, 19 nt, Artificial Sequence
  Description of Artificial Sequence: Synthetic oligonucleotide
  Antisense strand to SEQ ID NO: 270128
augcauagcccucauuggg

SEQ ID NO: 270130 - RNA, 19 nt, Artificial Sequence
  Description of Artificial Sequence: Synthetic oligonucleotide
  Sense strand starting at position 245 of SEQ ID NO: 3471
caaugagggcuaugcauau

SEQ ID NO: 270131 - RNA, 19 nt, Artificial Sequence
  Description of Artificial Sequence: Synthetic oligonucleotide
  Antisense strand to SEQ ID NO: 270130
auaugcauagcccucauug

SEQ ID NO: 270132 - RNA, 19 nt, Artificial Sequence
  Description of Artificial Sequence: Synthetic oligonucleotide
  Sense strand starting at position 256 of SEQ ID NO: 3471
augcauauucucuguaggu

SEQ ID NO: 270133 - RNA, 19 nt, Artificial Sequence
  Description of Artificial Sequence: Synthetic oligonucleotide
  Antisense strand to SEQ ID NO: 270132
accuacagagaauaugcau

SEQ ID NO: 270134 - RNA, 19 nt, Artificial Sequence
  Description of Artificial Sequence: Synthetic oligonucleotide
  Sense strand starting at position 258 of SEQ ID NO: 3471
gcauauucucuguagguga

SEQ ID NO: 270135 - RNA, 19 nt, Artificial Sequence
  Description of Artificial Sequence: Synthetic oligonucleotide
  Antisense strand to SEQ ID NO: 270134
ucaccuacagagaauaugc

SEQ ID NO: 270136 - RNA, 19 nt, Artificial Sequence
  Description of Artificial Sequence: Synthetic oligonucleotide
  Sense strand starting at position 260 of SEQ ID NO: 3471
auauucucuguaggugauu

SEQ ID NO: 270137 - RNA, 19 nt, Artificial Sequence
  Description of Artificial Sequence: Synthetic oligonucleotide
  Antisense strand to SEQ ID NO: 270136
aaucaccuacagagaauau

SEQ ID NO: 270138 - RNA, 19 nt, Artificial Sequence
  Description of Artificial Sequence: Synthetic oligonucleotide
  Sense strand starting at position 261 of SEQ ID NO: 3471
uauucucuguaggugauua

SEQ ID NO: 270139 - RNA, 19 nt, Artificial Sequence
  Description of Artificial Sequence: Synthetic oligonucleotide
  Antisense strand to SEQ ID NO: 270138
uaaucaccuacagagaaua

SEQ ID NO: 270140 - RNA, 19 nt, Artificial Sequence
  Description of Artificial Sequence: Synthetic oligonucleotide
  Sense strand starting at position 263 of SEQ ID NO: 3471
uucucuguaggugauuauu

SEQ ID NO: 270141 - RNA, 19 nt, Artificial Sequence
  Description of Artificial Sequence: Synthetic oligonucleotide
  Antisense strand to SEQ ID NO: 270140
aauaaucaccuacagagaa

SEQ ID NO: 270142 - RNA, 19 nt, Artificial Sequence
  Description of Artificial Sequence: Synthetic oligonucleotide
  Sense strand starting at position 271 of SEQ ID NO: 3471
aggugauuauugcugaauu

SEQ ID NO: 270143 - RNA, 19 nt, Artificial Sequence
  Description of Artificial Sequence: Synthetic oligonucleotide
  Antisense strand to SEQ ID NO: 270142
aauucagcaauaaucaccu

SEQ ID NO: 270144 - RNA, 19 nt, Artificial Sequence
  Description of Artificial Sequence: Synthetic oligonucleotide
  Sense strand starting at position 273 of SEQ ID NO: 3471
gugauuauugcugaauuac

SEQ ID NO: 270145 - RNA, 19 nt, Artificial Sequence
  Description of Artificial Sequence: Synthetic oligonucleotide
  Antisense strand to SEQ ID NO: 270144
guaauucagcaauaaucac

SEQ ID NO: 270146 - RNA, 19 nt, Artificial Sequence
  Description of Artificial Sequence: Synthetic oligonucleotide
  Sense strand starting at position 401 of SEQ ID NO: 3471
uagaaauaucaacguugug

SEQ ID NO: 270147 - RNA, 19 nt, Artificial Sequence
  Description of Artificial Sequence: Synthetic oligonucleotide
  Antisense strand to SEQ ID NO: 270146
cacaacguugauauuucua

SEQ ID NO: 270148 - RNA, 19 nt, Artificial Sequence
  Description of Artificial Sequence: Synthetic oligonucleotide
  Sense strand starting at position 540 of SEQ ID NO: 3471
guauuaagaugggaaauuu

SEQ ID NO: 270149 - RNA, 19 nt, Artificial Sequence
  Description of Artificial Sequence: Synthetic oligonucleotide
  Antisense strand to SEQ ID NO: 270148
aaauuucccaucuuaauac

SEQ ID NO: 270150 - RNA, 19 nt, Artificial Sequence
  Description of Artificial Sequence: Synthetic oligonucleotide
  Sense strand starting at position 587 of SEQ ID NO: 3471
uccuaaucagcuuagugau

SEQ ID NO: 270151 - RNA, 19 nt, Artificial Sequence
  Description of Artificial Sequence: Synthetic oligonucleotide
  Antisense strand to SEQ ID NO: 270150
aucacuaagcugauuagga

SEQ ID NO: 270152 - RNA, 19 nt, Artificial Sequence
  Description of Artificial Sequence: Synthetic oligonucleotide
  Sense strand starting at position 589 of SEQ ID NO: 3471
cuaaucagcuuagugauau

SEQ ID NO: 270153 - RNA, 19 nt, Artificial Sequence
  Description of Artificial Sequence: Synthetic oligonucleotide
  Antisense strand to SEQ ID NO: 270152
auaucacuaagcugauuag

SEQ ID NO: 270154 - RNA, 19 nt, Artificial Sequence
  Description of Artificial Sequence: Synthetic oligonucleotide
  Sense strand starting at position 600 of SEQ ID NO: 3471
agugauauguaaccauuag

SEQ ID NO: 270155 - RNA, 19 nt, Artificial Sequence
  Description of Artificial Sequence: Synthetic oligonucleotide
  Antisense strand to SEQ ID NO: 270154
cuaaugguuacauaucacu

SEQ ID NO: 270156 - RNA, 19 nt, Artificial Sequence
  Description of Artificial Sequence: Synthetic oligonucleotide
  Sense strand starting at position 601 of SEQ ID NO: 3471
gugauauguaaccauuagu

SEQ ID NO: 270157 - RNA, 19 nt, Artificial Sequence
  Description of Artificial Sequence: Synthetic oligonucleotide
  Antisense strand to SEQ ID NO: 270156
acuaaugguuacauaucac

SEQ ID NO: 270158 - RNA, 19 nt, Artificial Sequence
  Description of Artificial Sequence: Synthetic oligonucleotide
  Sense strand starting at position 604 of SEQ ID NO: 3471
auauguaaccauuaguaug

SEQ ID NO: 270159 - RNA, 19 nt, Artificial Sequence
  Description of Artificial Sequence: Synthetic oligonucleotide
  Antisense strand to SEQ ID NO: 270158
cauacuaaugguuacauau

SEQ ID NO: 270160 - RNA, 19 nt, Artificial Sequence
  Description of Artificial Sequence: Synthetic oligonucleotide
  Sense strand starting at position 814 of SEQ ID NO: 3471
cgugucauuugcuucaugu

SEQ ID NO: 270161 - RNA, 19 nt, Artificial Sequence
  Description of Artificial Sequence: Synthetic oligonucleotide
  Antisense strand to SEQ ID NO: 270160
acaugaagcaaaugacacg

SEQ ID NO: 270162 - RNA, 19 nt, Artificial Sequence
  Description of Artificial Sequence: Synthetic oligonucleotide
  Sense strand starting at position 855 of SEQ ID NO: 3471
gcuuuaggucucuauguuu

SEQ ID NO: 270163 - RNA, 19 nt, Artificial Sequence
  Description of Artificial Sequence: Synthetic oligonucleotide
  Antisense strand to SEQ ID NO: 270162
aaacauagagaccuaaagc

SEQ ID NO: 270164 - RNA, 19 nt, Artificial Sequence
  Description of Artificial Sequence: Synthetic oligonucleotide
  Sense strand starting at position 858 of SEQ ID NO: 3471
uuaggucucuauguuuaag

SEQ ID NO: 270165 - RNA, 19 nt, Artificial Sequence
  Description of Artificial Sequence: Synthetic oligonucleotide
  Antisense strand to SEQ ID NO: 270164
cuuaaacauagagaccuaa

SEQ ID NO: 270166 - RNA, 19 nt, Artificial Sequence
  Description of Artificial Sequence: Synthetic oligonucleotide
  Sense strand starting at position 860 of SEQ ID NO: 3471
aggucucuauguuuaagca

SEQ ID NO: 270167 - RNA, 19 nt, Artificial Sequence
  Description of Artificial Sequence: Synthetic oligonucleotide
  Antisense strand to SEQ ID NO: 270166
ugcuuaaacauagagaccu

SEQ ID NO: 270168 - RNA, 19 nt, Artificial Sequence
  Description of Artificial Sequence: Synthetic oligonucleotide
  Sense strand starting at position 861 of SEQ ID NO: 3471
ggucucuauguuuaagcaa

SEQ ID NO: 270169 - RNA, 19 nt, Artificial Sequence
  Description of Artificial Sequence: Synthetic oligonucleotide
  Antisense strand to SEQ ID NO: 270168
uugcuuaaacauagagacc

SEQ ID NO: 270170 - RNA, 19 nt, Artificial Sequence
  Description of Artificial Sequence: Synthetic oligonucleotide
  Sense strand starting at position 911 of SEQ ID NO: 3471
aucaguaucugguuauaac

SEQ ID NO: 270171 - RNA, 19 nt, Artificial Sequence
  Description of Artificial Sequence: Synthetic oligonucleotide
  Antisense strand to SEQ ID NO: 270170
guuauaaccagauacugau

SEQ ID NO: 270172 - RNA, 19 nt, Artificial Sequence
  Description of Artificial Sequence: Synthetic oligonucleotide
  Sense strand starting at position 912 of SEQ ID NO: 3471
ucaguaucugguuauaacu

SEQ ID NO: 270173 - RNA, 19 nt, Artificial Sequence
  Description of Artificial Sequence: Synthetic oligonucleotide
  Antisense strand to SEQ ID NO: 270172
aguuauaaccagauacuga

SEQ ID NO: 270174 - RNA, 19 nt, Artificial Sequence
  Description of Artificial Sequence: Synthetic oligonucleotide
  Sense strand starting at position 953 of SEQ ID NO: 3471
ccuugcagaugugucuaua

SEQ ID NO: 270175 - RNA, 19 nt, Artificial Sequence
  Description of Artificial Sequence: Synthetic oligonucleotide
  Antisense strand to SEQ ID NO: 270174
uauagacacaucugcaagg

SEQ ID NO: 270176 - RNA, 19 nt, Artificial Sequence
  Description of Artificial Sequence: Synthetic oligonucleotide
  Sense strand starting at position 2262 of SEQ ID NO: 3471
cguggugucccgagaucac

SEQ ID NO: 270177 - RNA, 19 nt, Artificial Sequence
  Description of Artificial Sequence: Synthetic oligonucleotide
  Antisense strand to SEQ ID NO: 270176
gugaucucgggacaccacg

SEQ ID NO: 270178 - RNA, 19 nt, Artificial Sequence
  Description of Artificial Sequence: Synthetic oligonucleotide
  Sense strand starting at position 2748 of SEQ ID NO: 3471
cggugugcagauuaaucua

SEQ ID NO: 270179 - RNA, 19 nt, Artificial Sequence
  Description of Artificial Sequence: Synthetic oligonucleotide
  Antisense strand to SEQ ID NO: 270178
uagauuaaucugcacaccg

SEQ ID NO: 270180 - RNA, 19 nt, Artificial Sequence
  Description of Artificial Sequence: Synthetic oligonucleotide
  Sense strand starting at position 2797 of SEQ ID NO: 3471
uguaaauauuuguacagac

SEQ ID NO: 270181 - RNA, 19 nt, Artificial Sequence
  Description of Artificial Sequence: Synthetic oligonucleotide
  Antisense strand to SEQ ID NO: 270180
gucuguacaaauauuuaca

SEQ ID NO: 270182 - RNA, 19 nt, Artificial Sequence
  Description of Artificial Sequence: Synthetic oligonucleotide
  Sense strand starting at position 2814 of SEQ ID NO: 3471
acauucuguaaacgaguga

SEQ ID NO: 270183 - RNA, 19 nt, Artificial Sequence
  Description of Artificial Sequence: Synthetic oligonucleotide
  Antisense strand to SEQ ID NO: 270182
ucacucguuuacagaaugu

SEQ ID NO: 270184 - RNA, 19 nt, Artificial Sequence
  Description of Artificial Sequence: Synthetic oligonucleotide
  Sense strand starting at position 2855 of SEQ ID NO: 3471
agacauuugugucaucauc

SEQ ID NO: 270185 - RNA, 19 nt, Artificial Sequence
  Description of Artificial Sequence: Synthetic oligonucleotide
  Antisense strand to SEQ ID NO: 270184
gaugaugacacaaaugucu

SEQ ID NO: 270186 - RNA, 19 nt, Artificial Sequence
  Description of Artificial Sequence: Synthetic oligonucleotide
  Sense strand starting at position 2906 of SEQ ID NO: 3471
aggacaucgacuggacuua

SEQ ID NO: 270187 - RNA, 19 nt, Artificial Sequence
  Description of Artificial Sequence: Synthetic oligonucleotide
  Antisense strand to SEQ ID NO: 270186
uaaguccagucgauguccu

SEQ ID NO: 270188 - RNA, 19 nt, Artificial Sequence
  Description of Artificial Sequence: Synthetic oligonucleotide
  Sense strand starting at position 2966 of SEQ ID NO: 3471
ggaagauauugcuuacuaa

SEQ ID NO: 270189 - RNA, 19 nt, Artificial Sequence
  Description of Artificial Sequence: Synthetic oligonucleotide
  Antisense strand to SEQ ID NO: 270188
uuaguaagcaauaucuucc

SEQ ID NO: 270190 - RNA, 19 nt, Artificial Sequence
  Description of Artificial Sequence: Synthetic oligonucleotide
  Sense strand starting at position 2969 of SEQ ID NO: 3471
agauauugcuuacuaauga

SEQ ID NO: 270191 - RNA, 19 nt, Artificial Sequence
  Description of Artificial Sequence: Synthetic oligonucleotide
  Antisense strand to SEQ ID NO: 270190
ucauuaguaagcaauaucu

SEQ ID NO: 270192 - RNA, 19 nt, Artificial Sequence
  Description of Artificial Sequence: Synthetic oligonucleotide
  Sense strand starting at position 3029 of SEQ ID NO: 3471
augauuugcuaugaaacau

SEQ ID NO: 270193 - RNA, 19 nt, Artificial Sequence
  Description of Artificial Sequence: Synthetic oligonucleotide
  Antisense strand to SEQ ID NO: 270192
auguuucauagcaaaucau

SEQ ID NO: 270194 - RNA, 19 nt, Artificial Sequence
  Description of Artificial Sequence: Synthetic oligonucleotide
  Sense strand starting at position 3038 of SEQ ID NO: 3471
uaugaaacauagucgacuu

SEQ ID NO: 270195 - RNA, 19 nt, Artificial Sequence
  Description of Artificial Sequence: Synthetic oligonucleotide
  Antisense strand to SEQ ID NO: 270194
aagucgacuauguuucaua

SEQ ID NO: 270196 - RNA, 19 nt, Artificial Sequence
  Description of Artificial Sequence: Synthetic oligonucleotide
  Sense strand starting at position 3040 of SEQ ID NO: 3471
ugaaacauagucgacuuua

SEQ ID NO: 270197 - RNA, 19 nt, Artificial Sequence
  Description of Artificial Sequence: Synthetic oligonucleotide
  Antisense strand to SEQ ID NO: 270196
uaaagucgacuauguuuca

SEQ ID NO: 270198 - RNA, 19 nt, Artificial Sequence
  Description of Artificial Sequence: Synthetic oligonucleotide
  Sense strand starting at position 3072 of SEQ ID NO: 3471
acaugcaguuucucuugaa

SEQ ID NO: 270199 - RNA, 19 nt, Artificial Sequence
  Description of Artificial Sequence: Synthetic oligonucleotide
  Antisense strand to SEQ ID NO: 270198
uucaagagaaacugcaugu

SEQ ID NO: 270200 - RNA, 19 nt, Artificial Sequence
  Description of Artificial Sequence: Synthetic oligonucleotide
  Sense strand starting at position 3205 of SEQ ID NO: 3471
auuccuuugcugugaagac

SEQ ID NO: 270201 - RNA, 19 nt, Artificial Sequence
  Description of Artificial Sequence: Synthetic oligonucleotide
  Antisense strand to SEQ ID NO: 270200
gucuucacagcaaaggaau

SEQ ID NO: 270202 - RNA, 19 nt, Artificial Sequence
  Description of Artificial Sequence: Synthetic oligonucleotide
  Sense strand starting at position 42 of SEQ ID NO: 3472
ugaccuuaguaacuaugua

SEQ ID NO: 270203 - RNA, 19 nt, Artificial Sequence
  Description of Artificial Sequence: Synthetic oligonucleotide
  Antisense strand to SEQ ID NO: 270202
uacauaguuacuaagguca

SEQ ID NO: 270204 - RNA, 19 nt, Artificial Sequence
  Description of Artificial Sequence: Synthetic oligonucleotide
  Sense strand starting at position 143 of SEQ ID NO: 3472
gugguauauuugaagugug

SEQ ID NO: 270205 - RNA, 19 nt, Artificial Sequence
  Description of Artificial Sequence: Synthetic oligonucleotide
  Antisense strand to SEQ ID NO: 270204
cacacuucaaauauaccac

SEQ ID NO: 270206 - RNA, 19 nt, Artificial Sequence
  Description of Artificial Sequence: Synthetic oligonucleotide
  Sense strand starting at position 214 of SEQ ID NO: 3472
agaauuaugugggucagaa

SEQ ID NO: 270207 - RNA, 19 nt, Artificial Sequence
  Description of Artificial Sequence: Synthetic oligonucleotide
  Antisense strand to SEQ ID NO: 270206
uucugacccacauaauucu

SEQ ID NO: 270208 - RNA, 19 nt, Artificial Sequence
  Description of Artificial Sequence: Synthetic oligonucleotide
  Sense strand starting at position 450 of SEQ ID NO: 3472
aacauuuagugagacauag

SEQ ID NO: 270209 - RNA, 19 nt, Artificial Sequence
  Description of Artificial Sequence: Synthetic oligonucleotide
  Antisense strand to SEQ ID NO: 270208
cuaugucucacuaaauguu

SEQ ID NO: 270210 - RNA, 19 nt, Artificial Sequence
  Description of Artificial Sequence: Synthetic oligonucleotide
  Sense strand starting at position 557 of SEQ ID NO: 3472
ccauuauuguaauuguaac

SEQ ID NO: 270211 - RNA, 19 nt, Artificial Sequence
  Description of Artificial Sequence: Synthetic oligonucleotide
  Antisense strand to SEQ ID NO: 270210
guuacaauuacaauaaugg

SEQ ID NO: 270212 - RNA, 19 nt, Artificial Sequence
  Description of Artificial Sequence: Synthetic oligonucleotide
  Sense strand starting at position 641 of SEQ ID NO: 3472
guagaaacucacgagucua

SEQ ID NO: 270213 - RNA, 19 nt, Artificial Sequence
  Description of Artificial Sequence: Synthetic oligonucleotide
  Antisense strand to SEQ ID NO: 270212
uagacucgugaguuucuac

SEQ ID NO: 270214 - RNA, 19 nt, Artificial Sequence
  Description of Artificial Sequence: Synthetic oligonucleotide
  Sense strand starting at position 884 of SEQ ID NO: 3472
uagauugagugcuccuuga

SEQ ID NO: 270215 - RNA, 19 nt, Artificial Sequence
  Description of Artificial Sequence: Synthetic oligonucleotide
  Antisense strand to SEQ ID NO: 270214
ucaaggagcacucaaucua

SEQ ID NO: 270216 - RNA, 19 nt, Artificial Sequence
  Description of Artificial Sequence: Synthetic oligonucleotide
  Sense strand starting at position 1362 of SEQ ID NO: 3472
ccagccuaucuuggaauua

SEQ ID NO: 270217 - RNA, 19 nt, Artificial Sequence
  Description of Artificial Sequence: Synthetic oligonucleotide
  Antisense strand to SEQ ID NO: 270216
uaauuccaagauaggcugg

SEQ ID NO: 270218 - RNA, 19 nt, Artificial Sequence
  Description of Artificial Sequence: Synthetic oligonucleotide
  Sense strand starting at position 1489 of SEQ ID NO: 3472
uaaagcuaugaguagucau

SEQ ID NO: 270219 - RNA, 19 nt, Artificial Sequence
  Description of Artificial Sequence: Synthetic oligonucleotide
  Antisense strand to SEQ ID NO: 270218
augacuacucauagcuuua

SEQ ID NO: 270220 - RNA, 19 nt, Artificial Sequence
  Description of Artificial Sequence: Synthetic oligonucleotide
  Sense strand starting at position 1492 of SEQ ID NO: 3472
agcuaugaguagucauuag

SEQ ID NO: 270221 - RNA, 19 nt, Artificial Sequence
  Description of Artificial Sequence: Synthetic oligonucleotide
  Antisense strand to SEQ ID NO: 270220
cuaaugacuacucauagcu

SEQ ID NO: 270222 - RNA, 19 nt, Artificial Sequence
  Description of Artificial Sequence: Synthetic oligonucleotide
  Sense strand starting at position 1565 of SEQ ID NO: 3472
ucauaaggcuuccuuuaag

SEQ ID NO: 270223 - RNA, 19 nt, Artificial Sequence
  Description of Artificial Sequence: Synthetic oligonucleotide
  Antisense strand to SEQ ID NO: 270222
cuuaaaggaagccuuauga

SEQ ID NO: 270224 - RNA, 19 nt, Artificial Sequence
  Description of Artificial Sequence: Synthetic oligonucleotide
  Sense strand starting at position 1683 of SEQ ID NO: 3472
uguuacacacauuauguaa

SEQ ID NO: 270225 - RNA, 19 nt, Artificial Sequence
  Description of Artificial Sequence: Synthetic oligonucleotide
  Antisense strand to SEQ ID NO: 270224
uuacauaauguguguaaca

SEQ ID NO: 270226 - RNA, 19 nt, Artificial Sequence
  Description of Artificial Sequence: Synthetic oligonucleotide
  Sense strand starting at position 2006 of SEQ ID NO: 3472
ccaacaugacuguagucua

SEQ ID NO: 270227 - RNA, 19 nt, Artificial Sequence
  Description of Artificial Sequence: Synthetic oligonucleotide
  Antisense strand to SEQ ID NO: 270226
uagacuacagucauguugg

SEQ ID NO: 270228 - RNA, 19 nt, Artificial Sequence
  Description of Artificial Sequence: Synthetic oligonucleotide
  Sense strand starting at position 2011 of SEQ ID NO: 3472
augacuguagucuaguuua

SEQ ID NO: 270229 - RNA, 19 nt, Artificial Sequence
  Description of Artificial Sequence: Synthetic oligonucleotide
  Antisense strand to SEQ ID NO: 270228
uaaacuagacuacagucau

SEQ ID NO: 270230 - RNA, 19 nt, Artificial Sequence
  Description of Artificial Sequence: Synthetic oligonucleotide
  Sense strand starting at position 2022 of SEQ ID NO: 3472
cuaguuuacuugguaucaa

SEQ ID NO: 270231 - RNA, 19 nt, Artificial Sequence
  Description of Artificial Sequence: Synthetic oligonucleotide
  Antisense strand to SEQ ID NO: 270230
uugauaccaaguaaacuag

SEQ ID NO: 270232 - RNA, 19 nt, Artificial Sequence
  Description of Artificial Sequence: Synthetic oligonucleotide
  Sense strand starting at position 2073 of SEQ ID NO: 3472
uuaauaauagcugaauggu

SEQ ID NO: 270233 - RNA, 19 nt, Artificial Sequence
  Description of Artificial Sequence: Synthetic oligonucleotide
  Antisense strand to SEQ ID NO: 270232
accauucagcuauuauuaa

SEQ ID NO: 270234 - RNA, 19 nt, Artificial Sequence
  Description of Artificial Sequence: Synthetic oligonucleotide
  Sense strand starting at position 2086 of SEQ ID NO: 3472
aaugguuuggugcaacuca

SEQ ID NO: 270235 - RNA, 19 nt, Artificial Sequence
  Description of Artificial Sequence: Synthetic oligonucleotide
  Antisense strand to SEQ ID NO: 270234
ugaguugcaccaaaccauu

SEQ ID NO: 270236 - RNA, 19 nt, Artificial Sequence
  Description of Artificial Sequence: Synthetic oligonucleotide
  Sense strand starting at position 2107 of SEQ ID NO: 3472
cggagagaaacgugauucu

SEQ ID NO: 270237 - RNA, 19 nt, Artificial Sequence
  Description of Artificial Sequence: Synthetic oligonucleotide
  Antisense strand to SEQ ID NO: 270236
agaaucacguuucucuccg

SEQ ID NO: 270238 - RNA, 19 nt, Artificial Sequence
  Description of Artificial Sequence: Synthetic oligonucleotide
  Sense strand starting at position 2110 of SEQ ID NO: 3472
agagaaacgugauucucaa

SEQ ID NO: 270239 - RNA, 19 nt, Artificial Sequence
  Description of Artificial Sequence: Synthetic oligonucleotide
  Antisense strand to SEQ ID NO: 270238
uugagaaucacguuucucu

SEQ ID NO: 270240 - RNA, 19 nt, Artificial Sequence
  Description of Artificial Sequence: Synthetic oligonucleotide
  Sense strand starting at position 2155 of SEQ ID NO: 3472
uagggaucuugucauuuac

SEQ ID NO: 270241 - RNA, 19 nt, Artificial Sequence
  Description of Artificial Sequence: Synthetic oligonucleotide
  Antisense strand to SEQ ID NO: 270240
guaaaugacaagaucccua

SEQ ID NO: 270242 - RNA, 19 nt, Artificial Sequence
  Description of Artificial Sequence: Synthetic oligonucleotide
  Sense strand starting at position 2261 of SEQ ID NO: 3472
cuauaaauuuaggacagua

SEQ ID NO: 270243 - RNA, 19 nt, Artificial Sequence
  Description of Artificial Sequence: Synthetic oligonucleotide
  Antisense strand to SEQ ID NO: 270242
uacuguccuaaauuuauag

SEQ ID NO: 270244 - RNA, 19 nt, Artificial Sequence
  Description of Artificial Sequence: Synthetic oligonucleotide
  Sense strand starting at position 2281 of SEQ ID NO: 3472
uaaagagaauugguccacu

SEQ ID NO: 270245 - RNA, 19 nt, Artificial Sequence
  Description of Artificial Sequence: Synthetic oligonucleotide
  Antisense strand to SEQ ID NO: 270244
aguggaccaauucucuuua

SEQ ID NO: 270246 - RNA, 19 nt, Artificial Sequence
  Description of Artificial Sequence: Synthetic oligonucleotide
  Sense strand starting at position 2284 of SEQ ID NO: 3472
agagaauugguccacugcu

SEQ ID NO: 270247 - RNA, 19 nt, Artificial Sequence
  Description of Artificial Sequence: Synthetic oligonucleotide
  Antisense strand to SEQ ID NO: 270246
agcaguggaccaauucucu

SEQ ID NO: 270248 - RNA, 19 nt, Artificial Sequence
  Description of Artificial Sequence: Synthetic oligonucleotide
  Sense strand starting at position 2514 of SEQ ID NO: 3472
cuaguaacuucuguaggau

SEQ ID NO: 270249 - RNA, 19 nt, Artificial Sequence
  Description of Artificial Sequence: Synthetic oligonucleotide
  Antisense strand to SEQ ID NO: 270248
auccuacagaaguuacuag

SEQ ID NO: 270250 - RNA, 19 nt, Artificial Sequence
  Description of Artificial Sequence: Synthetic oligonucleotide
  Sense strand starting at position 2515 of SEQ ID NO: 3472
uaguaacuucuguaggaua

SEQ ID NO: 270251 - RNA, 19 nt, Artificial Sequence
  Description of Artificial Sequence: Synthetic oligonucleotide
  Antisense strand to SEQ ID NO: 270250
uauccuacagaaguuacua

SEQ ID NO: 270252 - RNA, 19 nt, Artificial Sequence
  Description of Artificial Sequence: Synthetic oligonucleotide
  Sense strand starting at position 2517 of SEQ ID NO: 3472
guaacuucuguaggauagu

SEQ ID NO: 270253 - RNA, 19 nt, Artificial Sequence
  Description of Artificial Sequence: Synthetic oligonucleotide
  Antisense strand to SEQ ID NO: 270252
acuauccuacagaaguuac

SEQ ID NO: 270254 - RNA, 19 nt, Artificial Sequence
  Description of Artificial Sequence: Synthetic oligonucleotide
  Sense strand starting at position 2658 of SEQ ID NO: 3472
cugccugacugaccagaua

SEQ ID NO: 270255 - RNA, 19 nt, Artificial Sequence
  Description of Artificial Sequence: Synthetic oligonucleotide
  Antisense strand to SEQ ID NO: 270254
uaucuggucagucaggcag

SEQ ID NO: 270256 - RNA, 19 nt, Artificial Sequence
  Description of Artificial Sequence: Synthetic oligonucleotide
  Sense strand starting at position 2707 of SEQ ID NO: 3472
gucacuaaggguuggaguu

SEQ ID NO: 270257 - RNA, 19 nt, Artificial Sequence
  Description of Artificial Sequence: Synthetic oligonucleotide
  Antisense strand to SEQ ID NO: 270256
aacuccaacccuuagugac

SEQ ID NO: 270258 - RNA, 19 nt, Artificial Sequence
  Description of Artificial Sequence: Synthetic oligonucleotide
  Sense strand starting at position 2859 of SEQ ID NO: 3472
ccacaaucuucuguggaua

SEQ ID NO: 270259 - RNA, 19 nt, Artificial Sequence
  Description of Artificial Sequence: Synthetic oligonucleotide
  Antisense strand to SEQ ID NO: 270258
uauccacagaagauugugg

SEQ ID NO: 270260 - RNA, 19 nt, Artificial Sequence
  Description of Artificial Sequence: Synthetic oligonucleotide
  Sense strand starting at position 2956 of SEQ ID NO: 3472
cuuuguuacccuuacagca

SEQ ID NO: 270261 - RNA, 19 nt, Artificial Sequence
  Description of Artificial Sequence: Synthetic oligonucleotide
  Antisense strand to SEQ ID NO: 270260
ugcuguaaggguaacaaag

SEQ ID NO: 270262 - RNA, 19 nt, Artificial Sequence
  Description of Artificial Sequence: Synthetic oligonucleotide
  Sense strand starting at position 3092 of SEQ ID NO: 3472
ugguguauggugcagacaa

SEQ ID NO: 270263 - RNA, 19 nt, Artificial Sequence
  Description of Artificial Sequence: Synthetic oligonucleotide
  Antisense strand to SEQ ID NO: 270262
uugucugcaccauacacca

SEQ ID NO: 270264 - RNA, 19 nt, Artificial Sequence
  Description of Artificial Sequence: Synthetic oligonucleotide
  Sense strand starting at position 3552 of SEQ ID NO: 3472
uggugagagagcugucaac

SEQ ID NO: 270265 - RNA, 19 nt, Artificial Sequence
  Description of Artificial Sequence: Synthetic oligonucleotide
  Antisense strand to SEQ ID NO: 270264
guugacagcucucucacca

SEQ ID NO: 270266 - RNA, 19 nt, Artificial Sequence
  Description of Artificial Sequence: Synthetic oligonucleotide
  Sense strand starting at position 3565 of SEQ ID NO: 3472
gucaacgugaguugagaga

SEQ ID NO: 270267 - RNA, 19 nt, Artificial Sequence
  Description of Artificial Sequence: Synthetic oligonucleotide
  Antisense strand to SEQ ID NO: 270266
ucucucaacucacguugac

SEQ ID NO: 270268 - RNA, 19 nt, Artificial Sequence
  Description of Artificial Sequence: Synthetic oligonucleotide
  Sense strand starting at position 3586 of SEQ ID NO: 3472
uggccuagauauucucuaa

SEQ ID NO: 270269 - RNA, 19 nt, Artificial Sequence
  Description of Artificial Sequence: Synthetic oligonucleotide
  Antisense strand to SEQ ID NO: 270268
uuagagaauaucuaggcca

SEQ ID NO: 270270 - RNA, 19 nt, Artificial Sequence
  Description of Artificial Sequence: Synthetic oligonucleotide
  Sense strand starting at position 3589 of SEQ ID NO: 3472
ccuagauauucucuaaugg

SEQ ID NO: 270271 - RNA, 19 nt, Artificial Sequence
  Description of Artificial Sequence: Synthetic oligonucleotide
  Antisense strand to SEQ ID NO: 270270
ccauuagagaauaucuagg

SEQ ID NO: 270272 - RNA, 19 nt, Artificial Sequence
  Description of Artificial Sequence: Synthetic oligonucleotide
  Sense strand starting at position 3619 of SEQ ID NO: 3472
cagugauggcggcauagau

SEQ ID NO: 270273 - RNA, 19 nt, Artificial Sequence
  Description of Artificial Sequence: Synthetic oligonucleotide
  Antisense strand to SEQ ID NO: 270272
aucuaugccgccaucacug

SEQ ID NO: 270274 - RNA, 19 nt, Artificial Sequence
  Description of Artificial Sequence: Synthetic oligonucleotide
  Sense strand starting at position 3660 of SEQ ID NO: 3472
gcagaagaugcauguggau

SEQ ID NO: 270275 - RNA, 19 nt, Artificial Sequence
  Description of Artificial Sequence: Synthetic oligonucleotide
  Antisense strand to SEQ ID NO: 270274
auccacaugcaucuucugc

SEQ ID NO: 270276 - RNA, 19 nt, Artificial Sequence
  Description of Artificial Sequence: Synthetic oligonucleotide
  Sense strand starting at position 3804 of SEQ ID NO: 3472
gcagaagugcauuaacagu

SEQ ID NO: 270277 - RNA, 19 nt, Artificial Sequence
  Description of Artificial Sequence: Synthetic oligonucleotide
  Antisense strand to SEQ ID NO: 270276
acuguuaaugcacuucugc

SEQ ID NO: 270278 - RNA, 19 nt, Artificial Sequence
  Description of Artificial Sequence: Synthetic oligonucleotide
  Sense strand starting at position 3818 of SEQ ID NO: 3472
acaguaggucucuauauaa

SEQ ID NO: 270279 - RNA, 19 nt, Artificial Sequence
  Description of Artificial Sequence: Synthetic oligonucleotide
  Antisense strand to SEQ ID NO: 270278
uuauauagagaccuacugu

SEQ ID NO: 270280 - RNA, 19 nt, Artificial Sequence
  Description of Artificial Sequence: Synthetic oligonucleotide
  Sense strand starting at position 3896 of SEQ ID NO: 3472
acagcacaccugggaaauu

SEQ ID NO: 270281 - RNA, 19 nt, Artificial Sequence
  Description of Artificial Sequence: Synthetic oligonucleotide
  Antisense strand to SEQ ID NO: 270280
aauuucccaggugugcugu

SEQ ID NO: 270282 - RNA, 19 nt, Artificial Sequence
  Description of Artificial Sequence: Synthetic oligonucleotide
  Sense strand starting at position 66 of SEQ ID NO: 3473
ggaugaaguguuugagguu

SEQ ID NO: 270283 - RNA, 19 nt, Artificial Sequence
  Description of Artificial Sequence: Synthetic oligonucleotide
  Antisense strand to SEQ ID NO: 270282
aaccucaaacacuucaucc

SEQ ID NO: 270284 - RNA, 19 nt, Artificial Sequence
  Description of Artificial Sequence: Synthetic oligonucleotide
  Sense strand starting at position 194 of SEQ ID NO: 3473
ggaaaugacuaagauaaug

SEQ ID NO: 270285 - RNA, 19 nt, Artificial Sequence
  Description of Artificial Sequence: Synthetic oligonucleotide
  Antisense strand to SEQ ID NO: 270284
cauuaucuuagucauuucc

SEQ ID NO: 270286 - RNA, 19 nt, Artificial Sequence
  Description of Artificial Sequence: Synthetic oligonucleotide
  Sense strand starting at position 338 of SEQ ID NO: 3473
aagaaauaguguuccagga

SEQ ID NO: 270287 - RNA, 19 nt, Artificial Sequence
  Description of Artificial Sequence: Synthetic oligonucleotide
  Antisense strand to SEQ ID NO: 270286
uccuggaacacuauuucuu

SEQ ID NO: 270288 - RNA, 19 nt, Artificial Sequence
  Description of Artificial Sequence: Synthetic oligonucleotide
  Sense strand starting at position 342 of SEQ ID NO: 3473
aauaguguuccaggaugaa

SEQ ID NO: 270289 - RNA, 19 nt, Artificial Sequence
  Description of Artificial Sequence: Synthetic oligonucleotide
  Antisense strand to SEQ ID NO: 270288
uucauccuggaacacuauu

SEQ ID NO: 270290 - RNA, 19 nt, Artificial Sequence
  Description of Artificial Sequence: Synthetic oligonucleotide
  Sense strand starting at position 425 of SEQ ID NO: 3473
cuuagucaagauuagcaua

SEQ ID NO: 270291 - RNA, 19 nt, Artificial Sequence
  Description of Artificial Sequence: Synthetic oligonucleotide
  Antisense strand to SEQ ID NO: 270290
uaugcuaaucuugacuaag

SEQ ID NO: 270292 - RNA, 19 nt, Artificial Sequence
  Description of Artificial Sequence: Synthetic oligonucleotide
  Sense strand starting at position 573 of SEQ ID NO: 3473
guuuguaaaggcuauagca

SEQ ID NO: 270293 - RNA, 19 nt, Artificial Sequence
  Description of Artificial Sequence: Synthetic oligonucleotide
  Antisense strand to SEQ ID NO: 270292
ugcuauagccuuuacaaac

SEQ ID NO: 270294 - RNA, 19 nt, Artificial Sequence
  Description of Artificial Sequence: Synthetic oligonucleotide
  Sense strand starting at position 744 of SEQ ID NO: 3473
uugauagaguccucugaaa

SEQ ID NO: 270295 - RNA, 19 nt, Artificial Sequence
  Description of Artificial Sequence: Synthetic oligonucleotide
  Antisense strand to SEQ ID NO: 270294
uuucagaggacucuaucaa

SEQ ID NO: 270296 - RNA, 19 nt, Artificial Sequence
  Description of Artificial Sequence: Synthetic oligonucleotide
  Sense strand starting at position 1023 of SEQ ID NO: 3473
uugucauaacaaggaucuu

SEQ ID NO: 270297 - RNA, 19 nt, Artificial Sequence
  Description of Artificial Sequence: Synthetic oligonucleotide
  Antisense strand to SEQ ID NO: 270296
aagauccuuguuaugacaa

SEQ ID NO: 270298 - RNA, 19 nt, Artificial Sequence
  Description of Artificial Sequence: Synthetic oligonucleotide
  Sense strand starting at position 1128 of SEQ ID NO: 3473
cccagaucauccguucuaa

SEQ ID NO: 270299 - RNA, 19 nt, Artificial Sequence
  Description of Artificial Sequence: Synthetic oligonucleotide
  Antisense strand to SEQ ID NO: 270298
uuagaacggaugaucuggg

SEQ ID NO: 270300 - RNA, 19 nt, Artificial Sequence
  Description of Artificial Sequence: Synthetic oligonucleotide
  Sense strand starting at position 1146 of SEQ ID NO: 3473
aaacuuucuggguguuaaa

SEQ ID NO: 270301 - RNA, 19 nt, Artificial Sequence
  Description of Artificial Sequence: Synthetic oligonucleotide
  Antisense strand to SEQ ID NO: 270300
uuuaacacccagaaaguuu

SEQ ID NO: 270302 - RNA, 19 nt, Artificial Sequence
  Description of Artificial Sequence: Synthetic oligonucleotide
  Sense strand starting at position 1195 of SEQ ID NO: 3473
cacggcaucccagggauua

SEQ ID NO: 270303 - RNA, 19 nt, Artificial Sequence
  Description of Artificial Sequence: Synthetic oligonucleotide
  Antisense strand to SEQ ID NO: 270302
uaaucccugggaugccgug

SEQ ID NO: 270304 - RNA, 19 nt, Artificial Sequence
  Description of Artificial Sequence: Synthetic oligonucleotide
  Sense strand starting at position 1197 of SEQ ID NO: 3473
cggcaucccagggauuaga

SEQ ID NO: 270305 - RNA, 19 nt, Artificial Sequence
  Description of Artificial Sequence: Synthetic oligonucleotide
  Antisense strand to SEQ ID NO: 270304
ucuaaucccugggaugccg

SEQ ID NO: 270306 - RNA, 19 nt, Artificial Sequence
  Description of Artificial Sequence: Synthetic oligonucleotide
  Sense strand starting at position 1206 of SEQ ID NO: 3473
agggauuagagaugagcga

SEQ ID NO: 270307 - RNA, 19 nt, Artificial Sequence
  Description of Artificial Sequence: Synthetic oligonucleotide
  Antisense strand to SEQ ID NO: 270306
ucgcucaucucuaaucccu

SEQ ID NO: 270308 - RNA, 19 nt, Artificial Sequence
  Description of Artificial Sequence: Synthetic oligonucleotide
  Sense strand starting at position 1332 of SEQ ID NO: 3473
acccuuucgggccaagaaa

SEQ ID NO: 270309 - RNA, 19 nt, Artificial Sequence
  Description of Artificial Sequence: Synthetic oligonucleotide
  Antisense strand to SEQ ID NO: 270308
uuucuuggcccgaaagggu

SEQ ID NO: 270310 - RNA, 19 nt, Artificial Sequence
  Description of Artificial Sequence: Synthetic oligonucleotide
  Sense strand starting at position 1548 of SEQ ID NO: 3473
cccuuaucgcugcaggaga

SEQ ID NO: 270311 - RNA, 19 nt, Artificial Sequence
  Description of Artificial Sequence: Synthetic oligonucleotide
  Antisense strand to SEQ ID NO: 270310
ucuccugcagcgauaaggg

SEQ ID NO: 270312 - RNA, 19 nt, Artificial Sequence
  Description of Artificial Sequence: Synthetic oligonucleotide
  Sense strand starting at position 1786 of SEQ ID NO: 3473
cgaauacagguuugucuga

SEQ ID NO: 270313 - RNA, 19 nt, Artificial Sequence
  Description of Artificial Sequence: Synthetic oligonucleotide
  Antisense strand to SEQ ID NO: 270312
ucagacaaaccuguauucg

SEQ ID NO: 270314 - RNA, 19 nt, Artificial Sequence
  Description of Artificial Sequence: Synthetic oligonucleotide
  Sense strand starting at position 1788 of SEQ ID NO: 3473
aauacagguuugucugacu

SEQ ID NO: 270315 - RNA, 19 nt, Artificial Sequence
  Description of Artificial Sequence: Synthetic oligonucleotide
  Antisense strand to SEQ ID NO: 270314
agucagacaaaccuguauu

SEQ ID NO: 270316 - RNA, 19 nt, Artificial Sequence
  Description of Artificial Sequence: Synthetic oligonucleotide
  Sense strand starting at position 1793 of SEQ ID NO: 3473
agguuugucugacuacaca

SEQ ID NO: 270317 - RNA, 19 nt, Artificial Sequence
  Description of Artificial Sequence: Synthetic oligonucleotide
  Antisense strand to SEQ ID NO: 270316
uguguagucagacaaaccu

SEQ ID NO: 270318 - RNA, 19 nt, Artificial Sequence
  Description of Artificial Sequence: Synthetic oligonucleotide
  Sense strand starting at position 1956 of SEQ ID NO: 3473
gggugagguaccugauacu

SEQ ID NO: 270319 - RNA, 19 nt, Artificial Sequence
  Description of Artificial Sequence: Synthetic oligonucleotide
  Antisense strand to SEQ ID NO: 270318
aguaucagguaccucaccc

SEQ ID NO: 270320 - RNA, 19 nt, Artificial Sequence
  Description of Artificial Sequence: Synthetic oligonucleotide
  Sense strand starting at position 2040 of SEQ ID NO: 3473
uuucucaucggacagugua

SEQ ID NO: 270321 - RNA, 19 nt, Artificial Sequence
  Description of Artificial Sequence: Synthetic oligonucleotide
  Antisense strand to SEQ ID NO: 270320
uacacuguccgaugagaaa

SEQ ID NO: 270322 - RNA, 19 nt, Artificial Sequence
  Description of Artificial Sequence: Synthetic oligonucleotide
  Sense strand starting at position 2436 of SEQ ID NO: 3473
acagauuuauuccaagagu

SEQ ID NO: 270323 - RNA, 19 nt, Artificial Sequence
  Description of Artificial Sequence: Synthetic oligonucleotide
  Antisense strand to SEQ ID NO: 270322
acucuuggaauaaaucugu

SEQ ID NO: 270324 - RNA, 19 nt, Artificial Sequence
  Description of Artificial Sequence: Synthetic oligonucleotide
  Sense strand starting at position 2500 of SEQ ID NO: 3473
cuuagaauccacuguugua

SEQ ID NO: 270325 - RNA, 19 nt, Artificial Sequence
  Description of Artificial Sequence: Synthetic oligonucleotide
  Antisense strand to SEQ ID NO: 270324
uacaacaguggauucuaag

SEQ ID NO: 270326 - RNA, 19 nt, Artificial Sequence
  Description of Artificial Sequence: Synthetic oligonucleotide
  Sense strand starting at position 2539 of SEQ ID NO: 3473
gcacuuugcacguugugaa

SEQ ID NO: 270327 - RNA, 19 nt, Artificial Sequence
  Description of Artificial Sequence: Synthetic oligonucleotide
  Antisense strand to SEQ ID NO: 270326
uucacaacgugcaaagugc

SEQ ID NO: 270328 - RNA, 19 nt, Artificial Sequence
  Description of Artificial Sequence: Synthetic oligonucleotide
  Sense strand starting at position 2654 of SEQ ID NO: 3473
accagaauaugguugaggu

SEQ ID NO: 270329 - RNA, 19 nt, Artificial Sequence
  Description of Artificial Sequence: Synthetic oligonucleotide
  Antisense strand to SEQ ID NO: 270328
accucaaccauauucuggu

SEQ ID NO: 270330 - RNA, 19 nt, Artificial Sequence
  Description of Artificial Sequence: Synthetic oligonucleotide
  Sense strand starting at position 2655 of SEQ ID NO: 3473
ccagaauaugguugagguu

SEQ ID NO: 270331 - RNA, 19 nt, Artificial Sequence
  Description of Artificial Sequence: Synthetic oligonucleotide
  Antisense strand to SEQ ID NO: 270330
aaccucaaccauauucugg

SEQ ID NO: 270332 - RNA, 19 nt, Artificial Sequence
  Description of Artificial Sequence: Synthetic oligonucleotide
  Sense strand starting at position 2656 of SEQ ID NO: 3473
cagaauaugguugagguuu

SEQ ID NO: 270333 - RNA, 19 nt, Artificial Sequence
  Description of Artificial Sequence: Synthetic oligonucleotide
  Antisense strand to SEQ ID NO: 270332
aaaccucaaccauauucug

SEQ ID NO: 270334 - RNA, 19 nt, Artificial Sequence
  Description of Artificial Sequence: Synthetic oligonucleotide
  Sense strand starting at position 2747 of SEQ ID NO: 3473
aggcaccugcuguagauua

SEQ ID NO: 270335 - RNA, 19 nt, Artificial Sequence
  Description of Artificial Sequence: Synthetic oligonucleotide
  Antisense strand to SEQ ID NO: 270334
uaaucuacagcaggugccu

SEQ ID NO: 270336 - RNA, 19 nt, Artificial Sequence
  Description of Artificial Sequence: Synthetic oligonucleotide
  Sense strand starting at position 2749 of SEQ ID NO: 3473
gcaccugcuguagauuaau

SEQ ID NO: 270337 - RNA, 19 nt, Artificial Sequence
  Description of Artificial Sequence: Synthetic oligonucleotide
  Antisense strand to SEQ ID NO: 270336
auuaaucuacagcaggugc

SEQ ID NO: 270338 - RNA, 19 nt, Artificial Sequence
  Description of Artificial Sequence: Synthetic oligonucleotide
  Sense strand starting at position 2755 of SEQ ID NO: 3473
gcuguagauuaauuucuuu

SEQ ID NO: 270339 - RNA, 19 nt, Artificial Sequence
  Description of Artificial Sequence: Synthetic oligonucleotide
  Antisense strand to SEQ ID NO: 270338
aaagaaauuaaucuacagc

SEQ ID NO: 270340 - RNA, 19 nt, Artificial Sequence
  Description of Artificial Sequence: Synthetic oligonucleotide
  Sense strand starting at position 3013 of SEQ ID NO: 3473
uagucauacgguuagagag

SEQ ID NO: 270341 - RNA, 19 nt, Artificial Sequence
  Description of Artificial Sequence: Synthetic oligonucleotide
  Antisense strand to SEQ ID NO: 270340
cucucuaaccguaugacua

SEQ ID NO: 270342 - RNA, 19 nt, Artificial Sequence
  Description of Artificial Sequence: Synthetic oligonucleotide
  Sense strand starting at position 3019 of SEQ ID NO: 3473
uacgguuagagaggucaga

SEQ ID NO: 270343 - RNA, 19 nt, Artificial Sequence
  Description of Artificial Sequence: Synthetic oligonucleotide
  Antisense strand to SEQ ID NO: 270342
ucugaccucucuaaccgua

SEQ ID NO: 270344 - RNA, 19 nt, Artificial Sequence
  Description of Artificial Sequence: Synthetic oligonucleotide
  Sense strand starting at position 3032 of SEQ ID NO: 3473
gucagagcuuauuucuguu

SEQ ID NO: 270345 - RNA, 19 nt, Artificial Sequence
  Description of Artificial Sequence: Synthetic oligonucleotide
  Antisense strand to SEQ ID NO: 270344
aacagaaauaagcucugac

SEQ ID NO: 270346 - RNA, 19 nt, Artificial Sequence
  Description of Artificial Sequence: Synthetic oligonucleotide
  Sense strand starting at position 3045 of SEQ ID NO: 3473
ucuguuauacacuggaauc

SEQ ID NO: 270347 - RNA, 19 nt, Artificial Sequence
  Description of Artificial Sequence: Synthetic oligonucleotide
  Antisense strand to SEQ ID NO: 270346
gauuccaguguauaacaga

SEQ ID NO: 270348 - RNA, 19 nt, Artificial Sequence
  Description of Artificial Sequence: Synthetic oligonucleotide
  Sense strand starting at position 3057 of SEQ ID NO: 3473
uggaauccaguuugaacau

SEQ ID NO: 270349 - RNA, 19 nt, Artificial Sequence
  Description of Artificial Sequence: Synthetic oligonucleotide
  Antisense strand to SEQ ID NO: 270348
auguucaaacuggauucca

SEQ ID NO: 270350 - RNA, 19 nt, Artificial Sequence
  Description of Artificial Sequence: Synthetic oligonucleotide
  Sense strand starting at position 3270 of SEQ ID NO: 3473
ggcacauuaguauggaauu

SEQ ID NO: 270351 - RNA, 19 nt, Artificial Sequence
  Description of Artificial Sequence: Synthetic oligonucleotide
  Antisense strand to SEQ ID NO: 270350
aauuccauacuaaugugcc

SEQ ID NO: 270352 - RNA, 19 nt, Artificial Sequence
  Description of Artificial Sequence: Synthetic oligonucleotide
  Sense strand starting at position 3302 of SEQ ID NO: 3473
gaccgaauauauguaaagu

SEQ ID NO: 270353 - RNA, 19 nt, Artificial Sequence
  Description of Artificial Sequence: Synthetic oligonucleotide
  Antisense strand to SEQ ID NO: 270352
acuuuacauauauucgguc

SEQ ID NO: 270354 - RNA, 19 nt, Artificial Sequence
  Description of Artificial Sequence: Synthetic oligonucleotide
  Sense strand starting at position 3441 of SEQ ID NO: 3473
uuaugcagauaguuagaau

SEQ ID NO: 270355 - RNA, 19 nt, Artificial Sequence
  Description of Artificial Sequence: Synthetic oligonucleotide
  Antisense strand to SEQ ID NO: 270354
auucuaacuaucugcauaa

SEQ ID NO: 270356 - RNA, 19 nt, Artificial Sequence
  Description of Artificial Sequence: Synthetic oligonucleotide
  Sense strand starting at position 3482 of SEQ ID NO: 3473
aaauauggccuauguaagu

SEQ ID NO: 270357 - RNA, 19 nt, Artificial Sequence
  Description of Artificial Sequence: Synthetic oligonucleotide
  Antisense strand to SEQ ID NO: 270356
acuuacauaggccauauuu

SEQ ID NO: 270358 - RNA, 19 nt, Artificial Sequence
  Description of Artificial Sequence: Synthetic oligonucleotide
  Sense strand starting at position 3514 of SEQ ID NO: 3473
agaguuccagcugaaucua

SEQ ID NO: 270359 - RNA, 19 nt, Artificial Sequence
  Description of Artificial Sequence: Synthetic oligonucleotide
  Antisense strand to SEQ ID NO: 270358
uagauucagcuggaacucu

SEQ ID NO: 270360 - RNA, 19 nt, Artificial Sequence
  Description of Artificial Sequence: Synthetic oligonucleotide
  Sense strand starting at position 3559 of SEQ ID NO: 3473
gugugucuagcuuuccauu

SEQ ID NO: 270361 - RNA, 19 nt, Artificial Sequence
  Description of Artificial Sequence: Synthetic oligonucleotide
  Antisense strand to SEQ ID NO: 270360
aauggaaagcuagacacac

SEQ ID NO: 270362 - RNA, 19 nt, Artificial Sequence
  Description of Artificial Sequence: Synthetic oligonucleotide
  Sense strand starting at position 221 of SEQ ID NO: 3474
uccuaugcugggcauuaau

SEQ ID NO: 270363 - RNA, 19 nt, Artificial Sequence
  Description of Artificial Sequence: Synthetic oligonucleotide
  Antisense strand to SEQ ID NO: 270362
auuaaugcccagcauagga

SEQ ID NO: 270364 - RNA, 19 nt, Artificial Sequence
  Description of Artificial Sequence: Synthetic oligonucleotide
  Sense strand starting at position 224 of SEQ ID NO: 3474
uaugcugggcauuaaugaa

SEQ ID NO: 270365 - RNA, 19 nt, Artificial Sequence
  Description of Artificial Sequence: Synthetic oligonucleotide
  Antisense strand to SEQ ID NO: 270364
uucauuaaugcccagcaua

SEQ ID NO: 270366 - RNA, 19 nt, Artificial Sequence
  Description of Artificial Sequence: Synthetic oligonucleotide
  Sense strand starting at position 243 of SEQ ID NO: 3474
gugugcagagucuauuaaa

SEQ ID NO: 270367 - RNA, 19 nt, Artificial Sequence
  Description of Artificial Sequence: Synthetic oligonucleotide
  Antisense strand to SEQ ID NO: 270366
uuuaauagacucugcacac

SEQ ID NO: 270368 - RNA, 19 nt, Artificial Sequence
  Description of Artificial Sequence: Synthetic oligonucleotide
  Sense strand starting at position 251 of SEQ ID NO: 3474
agucuauuaaagugguuua

SEQ ID NO: 270369 - RNA, 19 nt, Artificial Sequence
  Description of Artificial Sequence: Synthetic oligonucleotide
  Antisense strand to SEQ ID NO: 270368
uaaaccacuuuaauagacu

SEQ ID NO: 270370 - RNA, 19 nt, Artificial Sequence
  Description of Artificial Sequence: Synthetic oligonucleotide
  Sense strand starting at position 252 of SEQ ID NO: 3474
gucuauuaaagugguuuau

SEQ ID NO: 270371 - RNA, 19 nt, Artificial Sequence
  Description of Artificial Sequence: Synthetic oligonucleotide
  Antisense strand to SEQ ID NO: 270370
auaaaccacuuuaauagac

SEQ ID NO: 270372 - RNA, 19 nt, Artificial Sequence
  Description of Artificial Sequence: Synthetic oligonucleotide
  Sense strand starting at position 254 of SEQ ID NO: 3474
cuauuaaagugguuuauuc

SEQ ID NO: 270373 - RNA, 19 nt, Artificial Sequence
  Description of Artificial Sequence: Synthetic oligonucleotide
  Antisense strand to SEQ ID NO: 270372
gaauaaaccacuuuaauag

SEQ ID NO: 270374 - RNA, 19 nt, Artificial Sequence
  Description of Artificial Sequence: Synthetic oligonucleotide
  Sense strand starting at position 447 of SEQ ID NO: 3474
cggauacuucuauagcauu

SEQ ID NO: 270375 - RNA, 19 nt, Artificial Sequence
  Description of Artificial Sequence: Synthetic oligonucleotide
  Antisense strand to SEQ ID NO: 270374
aaugcuauagaaguauccg

SEQ ID NO: 270376 - RNA, 19 nt, Artificial Sequence
  Description of Artificial Sequence: Synthetic oligonucleotide
  Sense strand starting at position 461 of SEQ ID NO: 3474
gcauucucccaacaaacga

SEQ ID NO: 270377 - RNA, 19 nt, Artificial Sequence
  Description of Artificial Sequence: Synthetic oligonucleotide
  Antisense strand to SEQ ID NO: 270376
ucguuuguugggagaaugc

SEQ ID NO: 270378 - RNA, 19 nt, Artificial Sequence
  Description of Artificial Sequence: Synthetic oligonucleotide
  Sense strand starting at position 570 of SEQ ID NO: 3474
cagcaauuaccucgaggag

SEQ ID NO: 270379 - RNA, 19 nt, Artificial Sequence
  Description of Artificial Sequence: Synthetic oligonucleotide
  Antisense strand to SEQ ID NO: 270378
cuccucgagguaauugcug

SEQ ID NO: 270380 - RNA, 19 nt, Artificial Sequence
  Description of Artificial Sequence: Synthetic oligonucleotide
  Sense strand starting at position 717 of SEQ ID NO: 3474
cucuuagccugggugaaau

SEQ ID NO: 270381 - RNA, 19 nt, Artificial Sequence
  Description of Artificial Sequence: Synthetic oligonucleotide
  Antisense strand to SEQ ID NO: 270380
auuucacccaggcuaagag

SEQ ID NO: 270382 - RNA, 19 nt, Artificial Sequence
  Description of Artificial Sequence: Synthetic oligonucleotide
  Sense strand starting at position 728 of SEQ ID NO: 3474
ggugaaauuuaccaaauug

SEQ ID NO: 270383 - RNA, 19 nt, Artificial Sequence
  Description of Artificial Sequence: Synthetic oligonucleotide
  Antisense strand to SEQ ID NO: 270382
caauuugguaaauuucacc

SEQ ID NO: 270384 - RNA, 19 nt, Artificial Sequence
  Description of Artificial Sequence: Synthetic oligonucleotide
  Sense strand starting at position 849 of SEQ ID NO: 3474
cgagacauuuccgaggaga

SEQ ID NO: 270385 - RNA, 19 nt, Artificial Sequence
  Description of Artificial Sequence: Synthetic oligonucleotide
  Antisense strand to SEQ ID NO: 270384
ucuccucggaaaugucucg

SEQ ID NO: 270386 - RNA, 19 nt, Artificial Sequence
  Description of Artificial Sequence: Synthetic oligonucleotide
  Sense strand starting at position 912 of SEQ ID NO: 3474
ucuccugacggcuggauua

SEQ ID NO: 270387 - RNA, 19 nt, Artificial Sequence
  Description of Artificial Sequence: Synthetic oligonucleotide
  Antisense strand to SEQ ID NO: 270386
uaauccagccgucaggaga

SEQ ID NO: 270388 - RNA, 19 nt, Artificial Sequence
  Description of Artificial Sequence: Synthetic oligonucleotide
  Sense strand starting at position 993 of SEQ ID NO: 3474
cagaguuuccacuagugcu

SEQ ID NO: 270389 - RNA, 19 nt, Artificial Sequence
  Description of Artificial Sequence: Synthetic oligonucleotide
  Antisense strand to SEQ ID NO: 270388
agcacuaguggaaacucug

SEQ ID NO: 270390 - RNA, 19 nt, Artificial Sequence
  Description of Artificial Sequence: Synthetic oligonucleotide
  Sense strand starting at position 1112 of SEQ ID NO: 3474
gcaaucauccuauggagaa

SEQ ID NO: 270391 - RNA, 19 nt, Artificial Sequence
  Description of Artificial Sequence: Synthetic oligonucleotide
  Antisense strand to SEQ ID NO: 270390
uucuccauaggaugauugc

SEQ ID NO: 270392 - RNA, 19 nt, Artificial Sequence
  Description of Artificial Sequence: Synthetic oligonucleotide
  Sense strand starting at position 1124 of SEQ ID NO: 3474
uggagaauaucccuaaguu

SEQ ID NO: 270393 - RNA, 19 nt, Artificial Sequence
  Description of Artificial Sequence: Synthetic oligonucleotide
  Antisense strand to SEQ ID NO: 270392
aacuuagggauauucucca

SEQ ID NO: 270394 - RNA, 19 nt, Artificial Sequence
  Description of Artificial Sequence: Synthetic oligonucleotide
  Sense strand starting at position 1128 of SEQ ID NO: 3474
gaauaucccuaaguuagag

SEQ ID NO: 270395 - RNA, 19 nt, Artificial Sequence
  Description of Artificial Sequence: Synthetic oligonucleotide
  Antisense strand to SEQ ID NO: 270394
cucuaacuuagggauauuc

SEQ ID NO: 270396 - RNA, 19 nt, Artificial Sequence
  Description of Artificial Sequence: Synthetic oligonucleotide
  Sense strand starting at position 1685 of SEQ ID NO: 3474
cccgcauucgcuuugcuga

SEQ ID NO: 270397 - RNA, 19 nt, Artificial Sequence
  Description of Artificial Sequence: Synthetic oligonucleotide
  Antisense strand to SEQ ID NO: 270396
ucagcaaagcgaaugcggg

SEQ ID NO: 270398 - RNA, 19 nt, Artificial Sequence
  Description of Artificial Sequence: Synthetic oligonucleotide
  Sense strand starting at position 2298 of SEQ ID NO: 3474
ggaaacggucccuagcaga

SEQ ID NO: 270399 - RNA, 19 nt, Artificial Sequence
  Description of Artificial Sequence: Synthetic oligonucleotide
  Antisense strand to SEQ ID NO: 270398
ucugcuagggaccguuucc

SEQ ID NO: 270400 - RNA, 19 nt, Artificial Sequence
  Description of Artificial Sequence: Synthetic oligonucleotide
  Sense strand starting at position 2335 of SEQ ID NO: 3474
gcacguuucgagguccuau

SEQ ID NO: 270401 - RNA, 19 nt, Artificial Sequence
  Description of Artificial Sequence: Synthetic oligonucleotide
  Antisense strand to SEQ ID NO: 270400
auaggaccucgaaacgugc

SEQ ID NO: 270402 - RNA, 19 nt, Artificial Sequence
  Description of Artificial Sequence: Synthetic oligonucleotide
  Sense strand starting at position 2572 of SEQ ID NO: 3474
caggcagcgcugguuaauu

SEQ ID NO: 270403 - RNA, 19 nt, Artificial Sequence
  Description of Artificial Sequence: Synthetic oligonucleotide
  Antisense strand to SEQ ID NO: 270402
aauuaaccagcgcugccug

SEQ ID NO: 270404 - RNA, 19 nt, Artificial Sequence
  Description of Artificial Sequence: Synthetic oligonucleotide
  Sense strand starting at position 2630 of SEQ ID NO: 3474
uguaacaucugagugcuua

SEQ ID NO: 270405 - RNA, 19 nt, Artificial Sequence
  Description of Artificial Sequence: Synthetic oligonucleotide
  Antisense strand to SEQ ID NO: 270404
uaagcacucagauguuaca

SEQ ID NO: 270406 - RNA, 19 nt, Artificial Sequence
  Description of Artificial Sequence: Synthetic oligonucleotide
  Sense strand starting at position 2631 of SEQ ID NO: 3474
guaacaucugagugcuuau

SEQ ID NO: 270407 - RNA, 19 nt, Artificial Sequence
  Description of Artificial Sequence: Synthetic oligonucleotide
  Antisense strand to SEQ ID NO: 270406
auaagcacucagauguuac

SEQ ID NO: 270408 - RNA, 19 nt, Artificial Sequence
  Description of Artificial Sequence: Synthetic oligonucleotide
  Sense strand starting at position 2634 of SEQ ID NO: 3474
acaucugagugcuuauggu

SEQ ID NO: 270409 - RNA, 19 nt, Artificial Sequence
  Description of Artificial Sequence: Synthetic oligonucleotide
  Antisense strand to SEQ ID NO: 270408
accauaagcacucagaugu

SEQ ID NO: 270410 - RNA, 19 nt, Artificial Sequence
  Description of Artificial Sequence: Synthetic oligonucleotide
  Sense strand starting at position 2735 of SEQ ID NO: 3474
cccagaacucucugagauu

SEQ ID NO: 270411 - RNA, 19 nt, Artificial Sequence
  Description of Artificial Sequence: Synthetic oligonucleotide
  Antisense strand to SEQ ID NO: 270410
aaucucagagaguucuggg

SEQ ID NO: 270412 - RNA, 19 nt, Artificial Sequence
  Description of Artificial Sequence: Synthetic oligonucleotide
  Sense strand starting at position 3101 of SEQ ID NO: 3474
ggacuuguguggguccaga

SEQ ID NO: 270413 - RNA, 19 nt, Artificial Sequence
  Description of Artificial Sequence: Synthetic oligonucleotide
  Antisense strand to SEQ ID NO: 270412
ucuggacccacacaagucc

SEQ ID NO: 270414 - RNA, 19 nt, Artificial Sequence
  Description of Artificial Sequence: Synthetic oligonucleotide
  Sense strand starting at position 3255 of SEQ ID NO: 3474
uugcaaagcuaaucugauu

SEQ ID NO: 270415 - RNA, 19 nt, Artificial Sequence
  Description of Artificial Sequence: Synthetic oligonucleotide
  Antisense strand to SEQ ID NO: 270414
aaucagauuagcuuugcaa

SEQ ID NO: 270416 - RNA, 19 nt, Artificial Sequence
  Description of Artificial Sequence: Synthetic oligonucleotide
  Sense strand starting at position 3273 of SEQ ID NO: 3474
uuucuugggaggugaagaa

SEQ ID NO: 270417 - RNA, 19 nt, Artificial Sequence
  Description of Artificial Sequence: Synthetic oligonucleotide
  Antisense strand to SEQ ID NO: 270416
uucuucaccucccaagaaa

SEQ ID NO: 270418 - RNA, 19 nt, Artificial Sequence
  Description of Artificial Sequence: Synthetic oligonucleotide
  Sense strand starting at position 3283 of SEQ ID NO: 3474
ggugaagaagguuguaaua

SEQ ID NO: 270419 - RNA, 19 nt, Artificial Sequence
  Description of Artificial Sequence: Synthetic oligonucleotide
  Antisense strand to SEQ ID NO: 270418
uauuacaaccuucuucacc

SEQ ID NO: 270420 - RNA, 19 nt, Artificial Sequence
  Description of Artificial Sequence: Synthetic oligonucleotide
  Sense strand starting at position 3293 of SEQ ID NO: 3474
guuguaauaccugaccuag

SEQ ID NO: 270421 - RNA, 19 nt, Artificial Sequence
  Description of Artificial Sequence: Synthetic oligonucleotide
  Antisense strand to SEQ ID NO: 270420
cuaggucagguauuacaac

SEQ ID NO: 270422 - RNA, 19 nt, Artificial Sequence
  Description of Artificial Sequence: Synthetic oligonucleotide
  Sense strand starting at position 3423 of SEQ ID NO: 3474
cuuguuugaggaggaguaa

SEQ ID NO: 270423 - RNA, 19 nt, Artificial Sequence
  Description of Artificial Sequence: Synthetic oligonucleotide
  Antisense strand to SEQ ID NO: 270422
uuacuccuccucaaacaag

SEQ ID NO: 270424 - RNA, 19 nt, Artificial Sequence
  Description of Artificial Sequence: Synthetic oligonucleotide
  Sense strand starting at position 3489 of SEQ ID NO: 3474
cagguuagugcagaaguaa

SEQ ID NO: 270425 - RNA, 19 nt, Artificial Sequence
  Description of Artificial Sequence: Synthetic oligonucleotide
  Antisense strand to SEQ ID NO: 270424
uuacuucugcacuaaccug

SEQ ID NO: 270426 - RNA, 19 nt, Artificial Sequence
  Description of Artificial Sequence: Synthetic oligonucleotide
  Sense strand starting at position 3563 of SEQ ID NO: 3474
gugacauucuugcuagagu

SEQ ID NO: 270427 - RNA, 19 nt, Artificial Sequence
  Description of Artificial Sequence: Synthetic oligonucleotide
  Antisense strand to SEQ ID NO: 270426
acucuagcaagaaugucac

SEQ ID NO: 270428 - RNA, 19 nt, Artificial Sequence
  Description of Artificial Sequence: Synthetic oligonucleotide
  Sense strand starting at position 3566 of SEQ ID NO: 3474
acauucuugcuagaguaag

SEQ ID NO: 270429 - RNA, 19 nt, Artificial Sequence
  Description of Artificial Sequence: Synthetic oligonucleotide
  Antisense strand to SEQ ID NO: 270428
cuuacucuagcaagaaugu

SEQ ID NO: 270430 - RNA, 19 nt, Artificial Sequence
  Description of Artificial Sequence: Synthetic oligonucleotide
  Sense strand starting at position 3581 of SEQ ID NO: 3474
uaagaacccuuggaagaga

SEQ ID NO: 270431 - RNA, 19 nt, Artificial Sequence
  Description of Artificial Sequence: Synthetic oligonucleotide
  Antisense strand to SEQ ID NO: 270430
ucucuuccaaggguucuua

SEQ ID NO: 270432 - RNA, 19 nt, Artificial Sequence
  Description of Artificial Sequence: Synthetic oligonucleotide
  Sense strand starting at position 3744 of SEQ ID NO: 3474
gccucaggcucuccaaaua

SEQ ID NO: 270433 - RNA, 19 nt, Artificial Sequence
  Description of Artificial Sequence: Synthetic oligonucleotide
  Antisense strand to SEQ ID NO: 270432
uauuuggagagccugaggc

SEQ ID NO: 270434 - RNA, 19 nt, Artificial Sequence
  Description of Artificial Sequence: Synthetic oligonucleotide
  Sense strand starting at position 3856 of SEQ ID NO: 3474
aggaauaguggcuggucau

SEQ ID NO: 270435 - RNA, 19 nt, Artificial Sequence
  Description of Artificial Sequence: Synthetic oligonucleotide
  Antisense strand to SEQ ID NO: 270434
augaccagccacuauuccu

SEQ ID NO: 270436 - RNA, 19 nt, Artificial Sequence
  Description of Artificial Sequence: Synthetic oligonucleotide
  Sense strand starting at position 3857 of SEQ ID NO: 3474
ggaauaguggcuggucauu

SEQ ID NO: 270437 - RNA, 19 nt, Artificial Sequence
  Description of Artificial Sequence: Synthetic oligonucleotide
  Antisense strand to SEQ ID NO: 270436
aaugaccagccacuauucc

SEQ ID NO: 270438 - RNA, 19 nt, Artificial Sequence
  Description of Artificial Sequence: Synthetic oligonucleotide
  Sense strand starting at position 3868 of SEQ ID NO: 3474
uggucauucaggugggaug

SEQ ID NO: 270439 - RNA, 19 nt, Artificial Sequence
  Description of Artificial Sequence: Synthetic oligonucleotide
  Antisense strand to SEQ ID NO: 270438
caucccaccugaaugacca

SEQ ID NO: 270440 - RNA, 19 nt, Artificial Sequence
  Description of Artificial Sequence: Synthetic oligonucleotide
  Sense strand starting at position 3897 of SEQ ID NO: 3474
ggguguaaauacccaaacu

SEQ ID NO: 270441 - RNA, 19 nt, Artificial Sequence
  Description of Artificial Sequence: Synthetic oligonucleotide
  Antisense strand to SEQ ID NO: 270440
aguuuggguauuuacaccc

SEQ ID NO: 270442 - RNA, 19 nt, Artificial Sequence
  Description of Artificial Sequence: Synthetic oligonucleotide
  Sense strand starting at position 133 of SEQ ID NO: 3475
uuaagaaucuagucccuga

SEQ ID NO: 270443 - RNA, 19 nt, Artificial Sequence
  Description of Artificial Sequence: Synthetic oligonucleotide
  Antisense strand to SEQ ID NO: 270442
ucagggacuagauucuuaa

SEQ ID NO: 270444 - RNA, 19 nt, Artificial Sequence
  Description of Artificial Sequence: Synthetic oligonucleotide
  Sense strand starting at position 236 of SEQ ID NO: 3475
gcugguuccagcgucaaac

SEQ ID NO: 270445 - RNA, 19 nt, Artificial Sequence
  Description of Artificial Sequence: Synthetic oligonucleotide
  Antisense strand to SEQ ID NO: 270444
guuugacgcuggaaccagc

SEQ ID NO: 270446 - RNA, 19 nt, Artificial Sequence
  Description of Artificial Sequence: Synthetic oligonucleotide
  Sense strand starting at position 923 of SEQ ID NO: 3475
agguguaguugcuuuguau

SEQ ID NO: 270447 - RNA, 19 nt, Artificial Sequence
  Description of Artificial Sequence: Synthetic oligonucleotide
  Antisense strand to SEQ ID NO: 270446
auacaaagcaacuacaccu

SEQ ID NO: 270448 - RNA, 19 nt, Artificial Sequence
  Description of Artificial Sequence: Synthetic oligonucleotide
  Sense strand starting at position 924 of SEQ ID NO: 3475
gguguaguugcuuuguaug

SEQ ID NO: 270449 - RNA, 19 nt, Artificial Sequence
  Description of Artificial Sequence: Synthetic oligonucleotide
  Antisense strand to SEQ ID NO: 270448
cauacaaagcaacuacacc

SEQ ID NO: 270450 - RNA, 19 nt, Artificial Sequence
  Description of Artificial Sequence: Synthetic oligonucleotide
  Sense strand starting at position 938 of SEQ ID NO: 3475
guauguugugauggguaga

SEQ ID NO: 270451 - RNA, 19 nt, Artificial Sequence
  Description of Artificial Sequence: Synthetic oligonucleotide
  Antisense strand to SEQ ID NO: 270450
ucuacccaucacaacauac

SEQ ID NO: 270452 - RNA, 19 nt, Artificial Sequence
  Description of Artificial Sequence: Synthetic oligonucleotide
  Sense strand starting at position 939 of SEQ ID NO: 3475
uauguugugauggguagaa

SEQ ID NO: 270453 - RNA, 19 nt, Artificial Sequence
  Description of Artificial Sequence: Synthetic oligonucleotide
  Antisense strand to SEQ ID NO: 270452
uucuacccaucacaacaua

SEQ ID NO: 270454 - RNA, 19 nt, Artificial Sequence
  Description of Artificial Sequence: Synthetic oligonucleotide
  Sense strand starting at position 960 of SEQ ID NO: 3475
gaugaagugaagugugaag

SEQ ID NO: 270455 - RNA, 19 nt, Artificial Sequence
  Description of Artificial Sequence: Synthetic oligonucleotide
  Antisense strand to SEQ ID NO: 270454
cuucacacuucacuucauc

SEQ ID NO: 270456 - RNA, 19 nt, Artificial Sequence
  Description of Artificial Sequence: Synthetic oligonucleotide
  Sense strand starting at position 1002 of SEQ ID NO: 3475
cucagacuauguccuggaa

SEQ ID NO: 270457 - RNA, 19 nt, Artificial Sequence
  Description of Artificial Sequence: Synthetic oligonucleotide
  Antisense strand to SEQ ID NO: 270456
uuccaggacauagucugag

SEQ ID NO: 270458 - RNA, 19 nt, Artificial Sequence
  Description of Artificial Sequence: Synthetic oligonucleotide
  Sense strand starting at position 1089 of SEQ ID NO: 3475
ggaaguaacgcccauccau

SEQ ID NO: 270459 - RNA, 19 nt, Artificial Sequence
  Description of Artificial Sequence: Synthetic oligonucleotide
  Antisense strand to SEQ ID NO: 270458
auggaugggcguuacuucc

SEQ ID NO: 270460 - RNA, 19 nt, Artificial Sequence
  Description of Artificial Sequence: Synthetic oligonucleotide
  Sense strand starting at position 1318 of SEQ ID NO: 3475
uuggaugguucccucggua

SEQ ID NO: 270461 - RNA, 19 nt, Artificial Sequence
  Description of Artificial Sequence: Synthetic oligonucleotide
  Antisense strand to SEQ ID NO: 270460
uaccgagggaaccauccaa

SEQ ID NO: 270462 - RNA, 19 nt, Artificial Sequence
  Description of Artificial Sequence: Synthetic oligonucleotide
  Sense strand starting at position 1354 of SEQ ID NO: 3475
gucagugccuccuuacaac

SEQ ID NO: 270463 - RNA, 19 nt, Artificial Sequence
  Description of Artificial Sequence: Synthetic oligonucleotide
  Antisense strand to SEQ ID NO: 270462
guuguaaggaggcacugac

SEQ ID NO: 270464 - RNA, 19 nt, Artificial Sequence
  Description of Artificial Sequence: Synthetic oligonucleotide
  Sense strand starting at position 1405 of SEQ ID NO: 3475
gacugugaggguuaggcaa

SEQ ID NO: 270465 - RNA, 19 nt, Artificial Sequence
  Description of Artificial Sequence: Synthetic oligonucleotide
  Antisense strand to SEQ ID NO: 270464
uugccuaacccucacaguc

SEQ ID NO: 270466 - RNA, 19 nt, Artificial Sequence
  Description of Artificial Sequence: Synthetic oligonucleotide
  Sense strand starting at position 1428 of SEQ ID NO: 3475
cucccauucuagcagggaa

SEQ ID NO: 270467 - RNA, 19 nt, Artificial Sequence
  Description of Artificial Sequence: Synthetic oligonucleotide
  Antisense strand to SEQ ID NO: 270466
uucccugcuagaaugggag

SEQ ID NO: 270468 - RNA, 19 nt, Artificial Sequence
  Description of Artificial Sequence: Synthetic oligonucleotide
  Sense strand starting at position 1500 of SEQ ID NO: 3475
ggcccaguucuggacugua

SEQ ID NO: 270469 - RNA, 19 nt, Artificial Sequence
  Description of Artificial Sequence: Synthetic oligonucleotide
  Antisense strand to SEQ ID NO: 270468
uacaguccagaacugggcc

SEQ ID NO: 270470 - RNA, 19 nt, Artificial Sequence
  Description of Artificial Sequence: Synthetic oligonucleotide
  Sense strand starting at position 1503 of SEQ ID NO: 3475
ccaguucuggacuguauca

SEQ ID NO: 270471 - RNA, 19 nt, Artificial Sequence
  Description of Artificial Sequence: Synthetic oligonucleotide
  Antisense strand to SEQ ID NO: 270470
ugauacaguccagaacugg

SEQ ID NO: 270472 - RNA, 19 nt, Artificial Sequence
  Description of Artificial Sequence: Synthetic oligonucleotide
  Sense strand starting at position 1532 of SEQ ID NO: 3475
gacacuuucugauuguaag

SEQ ID NO: 270473 - RNA, 19 nt, Artificial Sequence
  Description of Artificial Sequence: Synthetic oligonucleotide
  Antisense strand to SEQ ID NO: 270472
cuuacaaucagaaaguguc

SEQ ID NO: 270474 - RNA, 19 nt, Artificial Sequence
  Description of Artificial Sequence: Synthetic oligonucleotide
  Sense strand starting at position 1533 of SEQ ID NO: 3475
acacuuucugauuguaagu

SEQ ID NO: 270475 - RNA, 19 nt, Artificial Sequence
  Description of Artificial Sequence: Synthetic oligonucleotide
  Antisense strand to SEQ ID NO: 270474
acuuacaaucagaaagugu

SEQ ID NO: 270476 - RNA, 19 nt, Artificial Sequence
  Description of Artificial Sequence: Synthetic oligonucleotide
  Sense strand starting at position 1538 of SEQ ID NO: 3475
uucugauuguaaguuucga

SEQ ID NO: 270477 - RNA, 19 nt, Artificial Sequence
  Description of Artificial Sequence: Synthetic oligonucleotide
  Antisense strand to SEQ ID NO: 270476
ucgaaacuuacaaucagaa

SEQ ID NO: 270478 - RNA, 19 nt, Artificial Sequence
  Description of Artificial Sequence: Synthetic oligonucleotide
  Sense strand starting at position 1756 of SEQ ID NO: 3475
gugaucauccugcggagaa

SEQ ID NO: 270479 - RNA, 19 nt, Artificial Sequence
  Description of Artificial Sequence: Synthetic oligonucleotide
  Antisense strand to SEQ ID NO: 270478
uucuccgcaggaugaucac

SEQ ID NO: 270480 - RNA, 19 nt, Artificial Sequence
  Description of Artificial Sequence: Synthetic oligonucleotide
  Sense strand starting at position 2418 of SEQ ID NO: 3475
gguaggaggcguuguagaa

SEQ ID NO: 270481 - RNA, 19 nt, Artificial Sequence
  Description of Artificial Sequence: Synthetic oligonucleotide
  Antisense strand to SEQ ID NO: 270480
uucuacaacgccuccuacc

SEQ ID NO: 270482 - RNA, 19 nt, Artificial Sequence
  Description of Artificial Sequence: Synthetic oligonucleotide
  Sense strand starting at position 2484 of SEQ ID NO: 3475
cuuugugacccacaugcaa

SEQ ID NO: 270483 - RNA, 19 nt, Artificial Sequence
  Description of Artificial Sequence: Synthetic oligonucleotide
  Antisense strand to SEQ ID NO: 270482
uugcaugugggucacaaag

SEQ ID NO: 270484 - RNA, 19 nt, Artificial Sequence
  Description of Artificial Sequence: Synthetic oligonucleotide
  Sense strand starting at position 2581 of SEQ ID NO: 3475
ggaggugggcgucggaaau

SEQ ID NO: 270485 - RNA, 19 nt, Artificial Sequence
  Description of Artificial Sequence: Synthetic oligonucleotide
  Antisense strand to SEQ ID NO: 270484
auuuccgacgcccaccucc

SEQ ID NO: 270486 - RNA, 19 nt, Artificial Sequence
  Description of Artificial Sequence: Synthetic oligonucleotide
  Sense strand starting at position 2582 of SEQ ID NO: 3475
gaggugggcgucggaaaua

SEQ ID NO: 270487 - RNA, 19 nt, Artificial Sequence
  Description of Artificial Sequence: Synthetic oligonucleotide
  Antisense strand to SEQ ID NO: 270486
uauuuccgacgcccaccuc

SEQ ID NO: 270488 - RNA, 19 nt, Artificial Sequence
  Description of Artificial Sequence: Synthetic oligonucleotide
  Sense strand starting at position 2744 of SEQ ID NO: 3475
gacagauuaggucgccgaa

SEQ ID NO: 270489 - RNA, 19 nt, Artificial Sequence
  Description of Artificial Sequence: Synthetic oligonucleotide
  Antisense strand to SEQ ID NO: 270488
uucggcgaccuaaucuguc

SEQ ID NO: 270490 - RNA, 19 nt, Artificial Sequence
  Description of Artificial Sequence: Synthetic oligonucleotide
  Sense strand starting at position 2746 of SEQ ID NO: 3475
cagauuaggucgccgaaga

SEQ ID NO: 270491 - RNA, 19 nt, Artificial Sequence
  Description of Artificial Sequence: Synthetic oligonucleotide
  Antisense strand to SEQ ID NO: 270490
ucuucggcgaccuaaucug

SEQ ID NO: 270492 - RNA, 19 nt, Artificial Sequence
  Description of Artificial Sequence: Synthetic oligonucleotide
  Sense strand starting at position 3018 of SEQ ID NO: 3475
gcuucucggagccaaagaa

SEQ ID NO: 270493 - RNA, 19 nt, Artificial Sequence
  Description of Artificial Sequence: Synthetic oligonucleotide
  Antisense strand to SEQ ID NO: 270492
uucuuuggcuccgagaagc

SEQ ID NO: 270494 - RNA, 19 nt, Artificial Sequence
  Description of Artificial Sequence: Synthetic oligonucleotide
  Sense strand starting at position 3050 of SEQ ID NO: 3475
augcuaugggcuugggaca

SEQ ID NO: 270495 - RNA, 19 nt, Artificial Sequence
  Description of Artificial Sequence: Synthetic oligonucleotide
  Antisense strand to SEQ ID NO: 270494
ugucccaagcccauagcau

SEQ ID NO: 270496 - RNA, 19 nt, Artificial Sequence
  Description of Artificial Sequence: Synthetic oligonucleotide
  Sense strand starting at position 3199 of SEQ ID NO: 3475
gccuuuaguagucuguagu

SEQ ID NO: 270497 - RNA, 19 nt, Artificial Sequence
  Description of Artificial Sequence: Synthetic oligonucleotide
  Antisense strand to SEQ ID NO: 270496
acuacagacuacuaaaggc

SEQ ID NO: 270498 - RNA, 19 nt, Artificial Sequence
  Description of Artificial Sequence: Synthetic oligonucleotide
  Sense strand starting at position 3200 of SEQ ID NO: 3475
ccuuuaguagucuguaguu

SEQ ID NO: 270499 - RNA, 19 nt, Artificial Sequence
  Description of Artificial Sequence: Synthetic oligonucleotide
  Antisense strand to SEQ ID NO: 270498
aacuacagacuacuaaagg

SEQ ID NO: 270500 - RNA, 19 nt, Artificial Sequence
  Description of Artificial Sequence: Synthetic oligonucleotide
  Sense strand starting at position 3262 of SEQ ID NO: 3475
uucccagaagcuugauauu

SEQ ID NO: 270501 - RNA, 19 nt, Artificial Sequence
  Description of Artificial Sequence: Synthetic oligonucleotide
  Antisense strand to SEQ ID NO: 270500
aauaucaagcuucugggaa

SEQ ID NO: 270502 - RNA, 19 nt, Artificial Sequence
  Description of Artificial Sequence: Synthetic oligonucleotide
  Sense strand starting at position 3265 of SEQ ID NO: 3475
ccagaagcuugauauuuag

SEQ ID NO: 270503 - RNA, 19 nt, Artificial Sequence
  Description of Artificial Sequence: Synthetic oligonucleotide
  Antisense strand to SEQ ID NO: 270502
cuaaauaucaagcuucugg

SEQ ID NO: 270504 - RNA, 19 nt, Artificial Sequence
  Description of Artificial Sequence: Synthetic oligonucleotide
  Sense strand starting at position 3334 of SEQ ID NO: 3475
ccuuaugcaucccucagua

SEQ ID NO: 270505 - RNA, 19 nt, Artificial Sequence
  Description of Artificial Sequence: Synthetic oligonucleotide
  Antisense strand to SEQ ID NO: 270504
uacugagggaugcauaagg

SEQ ID NO: 270506 - RNA, 19 nt, Artificial Sequence
  Description of Artificial Sequence: Synthetic oligonucleotide
  Sense strand starting at position 3346 of SEQ ID NO: 3475
cucaguaagcggucuguuu

SEQ ID NO: 270507 - RNA, 19 nt, Artificial Sequence
  Description of Artificial Sequence: Synthetic oligonucleotide
  Antisense strand to SEQ ID NO: 270506
aaacagaccgcuuacugag

SEQ ID NO: 270508 - RNA, 19 nt, Artificial Sequence
  Description of Artificial Sequence: Synthetic oligonucleotide
  Sense strand starting at position 3381 of SEQ ID NO: 3475
agaguaagggucuaggucu

SEQ ID NO: 270509 - RNA, 19 nt, Artificial Sequence
  Description of Artificial Sequence: Synthetic oligonucleotide
  Antisense strand to SEQ ID NO: 270508
agaccuagacccuuacucu

SEQ ID NO: 270510 - RNA, 19 nt, Artificial Sequence
  Description of Artificial Sequence: Synthetic oligonucleotide
  Sense strand starting at position 3388 of SEQ ID NO: 3475
gggucuaggucuuaaggau

SEQ ID NO: 270511 - RNA, 19 nt, Artificial Sequence
  Description of Artificial Sequence: Synthetic oligonucleotide
  Antisense strand to SEQ ID NO: 270510
auccuuaagaccuagaccc

SEQ ID NO: 270512 - RNA, 19 nt, Artificial Sequence
  Description of Artificial Sequence: Synthetic oligonucleotide
  Sense strand starting at position 3395 of SEQ ID NO: 3475
ggucuuaaggauuacacgu

SEQ ID NO: 270513 - RNA, 19 nt, Artificial Sequence
  Description of Artificial Sequence: Synthetic oligonucleotide
  Antisense strand to SEQ ID NO: 270512
acguguaauccuuaagacc

SEQ ID NO: 270514 - RNA, 19 nt, Artificial Sequence
  Description of Artificial Sequence: Synthetic oligonucleotide
  Sense strand starting at position 3402 of SEQ ID NO: 3475
aggauuacacgucauuaug

SEQ ID NO: 270515 - RNA, 19 nt, Artificial Sequence
  Description of Artificial Sequence: Synthetic oligonucleotide
  Antisense strand to SEQ ID NO: 270514
cauaaugacguguaauccu

SEQ ID NO: 270516 - RNA, 19 nt, Artificial Sequence
  Description of Artificial Sequence: Synthetic oligonucleotide
  Sense strand starting at position 3404 of SEQ ID NO: 3475
gauuacacgucauuaugcu

SEQ ID NO: 270517 - RNA, 19 nt, Artificial Sequence
  Description of Artificial Sequence: Synthetic oligonucleotide
  Antisense strand to SEQ ID NO: 270516
agcauaaugacguguaauc

SEQ ID NO: 270518 - RNA, 19 nt, Artificial Sequence
  Description of Artificial Sequence: Synthetic oligonucleotide
  Sense strand starting at position 3540 of SEQ ID NO: 3475
aguuaaacuuucuagacug

SEQ ID NO: 270519 - RNA, 19 nt, Artificial Sequence
  Description of Artificial Sequence: Synthetic oligonucleotide
  Antisense strand to SEQ ID NO: 270518
cagucuagaaaguuuaacu

SEQ ID NO: 270520 - RNA, 19 nt, Artificial Sequence
  Description of Artificial Sequence: Synthetic oligonucleotide
  Sense strand starting at position 3569 of SEQ ID NO: 3475
gaaagcaagccuugaaagu

SEQ ID NO: 270521 - RNA, 19 nt, Artificial Sequence
  Description of Artificial Sequence: Synthetic oligonucleotide
  Antisense strand to SEQ ID NO: 270520
acuuucaaggcuugcuuuc

SEQ ID NO: 270522 - RNA, 19 nt, Artificial Sequence
  Description of Artificial Sequence: Synthetic oligonucleotide
  Sense strand starting at position 74 of SEQ ID NO: 3477
guccucacucacuggugua

SEQ ID NO: 270523 - RNA, 19 nt, Artificial Sequence
  Description of Artificial Sequence: Synthetic oligonucleotide
  Antisense strand to SEQ ID NO: 270522
uacaccagugagugaggac

SEQ ID NO: 270524 - RNA, 19 nt, Artificial Sequence
  Description of Artificial Sequence: Synthetic oligonucleotide
  Sense strand starting at position 854 of SEQ ID NO: 3477
ggaagagcgucuugaccuu

SEQ ID NO: 270525 - RNA, 19 nt, Artificial Sequence
  Description of Artificial Sequence: Synthetic oligonucleotide
  Antisense strand to SEQ ID NO: 270524
aaggucaagacgcucuucc

SEQ ID NO: 270526 - RNA, 19 nt, Artificial Sequence
  Description of Artificial Sequence: Synthetic oligonucleotide
  Sense strand starting at position 950 of SEQ ID NO: 3477
gcuuguuguugcucaucau

SEQ ID NO: 270527 - RNA, 19 nt, Artificial Sequence
  Description of Artificial Sequence: Synthetic oligonucleotide
  Antisense strand to SEQ ID NO: 270526
augaugagcaacaacaagc

SEQ ID NO: 270528 - RNA, 19 nt, Artificial Sequence
  Description of Artificial Sequence: Synthetic oligonucleotide
  Sense strand starting at position 953 of SEQ ID NO: 3477
uguuguugcucaucaucca

SEQ ID NO: 270529 - RNA, 19 nt, Artificial Sequence
  Description of Artificial Sequence: Synthetic oligonucleotide
  Antisense strand to SEQ ID NO: 270528
uggaugaugagcaacaaca

SEQ ID NO: 270530 - RNA, 19 nt, Artificial Sequence
  Description of Artificial Sequence: Synthetic oligonucleotide
  Sense strand starting at position 971 of SEQ ID NO: 3477
agaugaagaugucgggaau

SEQ ID NO: 270531 - RNA, 19 nt, Artificial Sequence
  Description of Artificial Sequence: Synthetic oligonucleotide
  Antisense strand to SEQ ID NO: 270530
auucccgacaucuucaucu

SEQ ID NO: 270532 - RNA, 19 nt, Artificial Sequence
  Description of Artificial Sequence: Synthetic oligonucleotide
  Sense strand starting at position 972 of SEQ ID NO: 3477
gaugaagaugucgggaaug

SEQ ID NO: 270533 - RNA, 19 nt, Artificial Sequence
  Description of Artificial Sequence: Synthetic oligonucleotide
  Antisense strand to SEQ ID NO: 270532
cauucccgacaucuucauc

SEQ ID NO: 270534 - RNA, 19 nt, Artificial Sequence
  Description of Artificial Sequence: Synthetic oligonucleotide
  Sense strand starting at position 974 of SEQ ID NO: 3477
ugaagaugucgggaaugcu

SEQ ID NO: 270535 - RNA, 19 nt, Artificial Sequence
  Description of Artificial Sequence: Synthetic oligonucleotide
  Antisense strand to SEQ ID NO: 270534
agcauucccgacaucuuca

SEQ ID NO: 270536 - RNA, 19 nt, Artificial Sequence
  Description of Artificial Sequence: Synthetic oligonucleotide
  Sense strand starting at position 1040 of SEQ ID NO: 3477
ggucuagccuccugauuga

SEQ ID NO: 270537 - RNA, 19 nt, Artificial Sequence
  Description of Artificial Sequence: Synthetic oligonucleotide
  Antisense strand to SEQ ID NO: 270536
ucaaucaggaggcuagacc

SEQ ID NO: 270538 - RNA, 19 nt, Artificial Sequence
  Description of Artificial Sequence: Synthetic oligonucleotide
  Sense strand starting at position 1436 of SEQ ID NO: 3477
gguccuugucagcgaggga

SEQ ID NO: 270539 - RNA, 19 nt, Artificial Sequence
  Description of Artificial Sequence: Synthetic oligonucleotide
  Antisense strand to SEQ ID NO: 270538
ucccucgcugacaaggacc

SEQ ID NO: 270540 - RNA, 19 nt, Artificial Sequence
  Description of Artificial Sequence: Synthetic oligonucleotide
  Sense strand starting at position 1512 of SEQ ID NO: 3477
ucuguagauucuuccucau

SEQ ID NO: 270541 - RNA, 19 nt, Artificial Sequence
  Description of Artificial Sequence: Synthetic oligonucleotide
  Antisense strand to SEQ ID NO: 270540
augaggaagaaucuacaga

SEQ ID NO: 270542 - RNA, 19 nt, Artificial Sequence
  Description of Artificial Sequence: Synthetic oligonucleotide
  Sense strand starting at position 1514 of SEQ ID NO: 3477
uguagauucuuccucaucu

SEQ ID NO: 270543 - RNA, 19 nt, Artificial Sequence
  Description of Artificial Sequence: Synthetic oligonucleotide
  Antisense strand to SEQ ID NO: 270542
agaugaggaagaaucuaca

SEQ ID NO: 270544 - RNA, 19 nt, Artificial Sequence
  Description of Artificial Sequence: Synthetic oligonucleotide
  Sense strand starting at position 1515 of SEQ ID NO: 3477
guagauucuuccucaucug

SEQ ID NO: 270545 - RNA, 19 nt, Artificial Sequence
  Description of Artificial Sequence: Synthetic oligonucleotide
  Antisense strand to SEQ ID NO: 270544
cagaugaggaagaaucuac

SEQ ID NO: 270546 - RNA, 19 nt, Artificial Sequence
  Description of Artificial Sequence: Synthetic oligonucleotide
  Sense strand starting at position 1673 of SEQ ID NO: 3477
uugaucaucuccuguaugu

SEQ ID NO: 270547 - RNA, 19 nt, Artificial Sequence
  Description of Artificial Sequence: Synthetic oligonucleotide
  Antisense strand to SEQ ID NO: 270546
acauacaggagaugaucaa

SEQ ID NO: 270548 - RNA, 19 nt, Artificial Sequence
  Description of Artificial Sequence: Synthetic oligonucleotide
  Sense strand starting at position 1696 of SEQ ID NO: 3477
caggccuucuuccugugaa

SEQ ID NO: 270549 - RNA, 19 nt, Artificial Sequence
  Description of Artificial Sequence: Synthetic oligonucleotide
  Antisense strand to SEQ ID NO: 270548
uucacaggaagaaggccug

SEQ ID NO: 270550 - RNA, 19 nt, Artificial Sequence
  Description of Artificial Sequence: Synthetic oligonucleotide
  Sense strand starting at position 1697 of SEQ ID NO: 3477
aggccuucuuccugugaau

SEQ ID NO: 270551 - RNA, 19 nt, Artificial Sequence
  Description of Artificial Sequence: Synthetic oligonucleotide
  Antisense strand to SEQ ID NO: 270550
auucacaggaagaaggccu

SEQ ID NO: 270552 - RNA, 19 nt, Artificial Sequence
  Description of Artificial Sequence: Synthetic oligonucleotide
  Sense strand starting at position 1699 of SEQ ID NO: 3477
gccuucuuccugugaauca

SEQ ID NO: 270553 - RNA, 19 nt, Artificial Sequence
  Description of Artificial Sequence: Synthetic oligonucleotide
  Antisense strand to SEQ ID NO: 270552
ugauucacaggaagaaggc

SEQ ID NO: 270554 - RNA, 19 nt, Artificial Sequence
  Description of Artificial Sequence: Synthetic oligonucleotide
  Sense strand starting at position 1832 of SEQ ID NO: 3477
uccugaguaucggucauca

SEQ ID NO: 270555 - RNA, 19 nt, Artificial Sequence
  Description of Artificial Sequence: Synthetic oligonucleotide
  Antisense strand to SEQ ID NO: 270554
ugaugaccgauacucagga

SEQ ID NO: 270556 - RNA, 19 nt, Artificial Sequence
  Description of Artificial Sequence: Synthetic oligonucleotide
  Sense strand starting at position 1834 of SEQ ID NO: 3477
cugaguaucggucaucaug

SEQ ID NO: 270557 - RNA, 19 nt, Artificial Sequence
  Description of Artificial Sequence: Synthetic oligonucleotide
  Antisense strand to SEQ ID NO: 270556
caugaugaccgauacucag

SEQ ID NO: 270558 - RNA, 19 nt, Artificial Sequence
  Description of Artificial Sequence: Synthetic oligonucleotide
  Sense strand starting at position 1836 of SEQ ID NO: 3477
gaguaucggucaucaugag

SEQ ID NO: 270559 - RNA, 19 nt, Artificial Sequence
  Description of Artificial Sequence: Synthetic oligonucleotide
  Antisense strand to SEQ ID NO: 270558
cucaugaugaccgauacuc

SEQ ID NO: 270560 - RNA, 19 nt, Artificial Sequence
  Description of Artificial Sequence: Synthetic oligonucleotide
  Sense strand starting at position 1871 of SEQ ID NO: 3477
cagguucuguucucagaac

SEQ ID NO: 270561 - RNA, 19 nt, Artificial Sequence
  Description of Artificial Sequence: Synthetic oligonucleotide
  Antisense strand to SEQ ID NO: 270560
guucugagaacagaaccug

SEQ ID NO: 270562 - RNA, 19 nt, Artificial Sequence
  Description of Artificial Sequence: Synthetic oligonucleotide
  Sense strand starting at position 1879 of SEQ ID NO: 3477
guucucagaaccuggagau

SEQ ID NO: 270563 - RNA, 19 nt, Artificial Sequence
  Description of Artificial Sequence: Synthetic oligonucleotide
  Antisense strand to SEQ ID NO: 270562
aucuccagguucugagaac

SEQ ID NO: 270564 - RNA, 19 nt, Artificial Sequence
  Description of Artificial Sequence: Synthetic oligonucleotide
  Sense strand starting at position 2054 of SEQ ID NO: 3477
ccaagauccugacgucacu

SEQ ID NO: 270565 - RNA, 19 nt, Artificial Sequence
  Description of Artificial Sequence: Synthetic oligonucleotide
  Antisense strand to SEQ ID NO: 270564
agugacgucaggaucuugg

SEQ ID NO: 270566 - RNA, 19 nt, Artificial Sequence
  Description of Artificial Sequence: Synthetic oligonucleotide
  Sense strand starting at position 2217 of SEQ ID NO: 3477
ggaagccuugcagauaacu

SEQ ID NO: 270567 - RNA, 19 nt, Artificial Sequence
  Description of Artificial Sequence: Synthetic oligonucleotide
  Antisense strand to SEQ ID NO: 270566
aguuaucugcaaggcuucc

SEQ ID NO: 270568 - RNA, 19 nt, Artificial Sequence
  Description of Artificial Sequence: Synthetic oligonucleotide
  Sense strand starting at position 2259 of SEQ ID NO: 3477
ggcuaugggcuuuaauugu

SEQ ID NO: 270569 - RNA, 19 nt, Artificial Sequence
  Description of Artificial Sequence: Synthetic oligonucleotide
  Antisense strand to SEQ ID NO: 270568
acaauuaaagcccauagcc

SEQ ID NO: 270570 - RNA, 19 nt, Artificial Sequence
  Description of Artificial Sequence: Synthetic oligonucleotide
  Sense strand starting at position 2265 of SEQ ID NO: 3477
gggcuuuaauugugguuau

SEQ ID NO: 270571 - RNA, 19 nt, Artificial Sequence
  Description of Artificial Sequence: Synthetic oligonucleotide
  Antisense strand to SEQ ID NO: 270570
auaaccacaauuaaagccc

SEQ ID NO: 270572 - RNA, 19 nt, Artificial Sequence
  Description of Artificial Sequence: Synthetic oligonucleotide
  Sense strand starting at position 2266 of SEQ ID NO: 3477
ggcuuuaauugugguuaua

SEQ ID NO: 270573 - RNA, 19 nt, Artificial Sequence
  Description of Artificial Sequence: Synthetic oligonucleotide
  Antisense strand to SEQ ID NO: 270572
uauaaccacaauuaaagcc

SEQ ID NO: 270574 - RNA, 19 nt, Artificial Sequence
  Description of Artificial Sequence: Synthetic oligonucleotide
  Sense strand starting at position 2268 of SEQ ID NO: 3477
cuuuaauugugguuauagu

SEQ ID NO: 270575 - RNA, 19 nt, Artificial Sequence
  Description of Artificial Sequence: Synthetic oligonucleotide
  Antisense strand to SEQ ID NO: 270574
acuauaaccacaauuaaag

SEQ ID NO: 270576 - RNA, 19 nt, Artificial Sequence
  Description of Artificial Sequence: Synthetic oligonucleotide
  Sense strand starting at position 2275 of SEQ ID NO: 3477
ugugguuauagucacaaga

SEQ ID NO: 270577 - RNA, 19 nt, Artificial Sequence
  Description of Artificial Sequence: Synthetic oligonucleotide
  Antisense strand to SEQ ID NO: 270576
ucuugugacuauaaccaca

SEQ ID NO: 270578 - RNA, 19 nt, Artificial Sequence
  Description of Artificial Sequence: Synthetic oligonucleotide
  Sense strand starting at position 2277 of SEQ ID NO: 3477
ugguuauagucacaagaca

SEQ ID NO: 270579 - RNA, 19 nt, Artificial Sequence
  Description of Artificial Sequence: Synthetic oligonucleotide
  Antisense strand to SEQ ID NO: 270578
ugucuugugacuauaacca

SEQ ID NO: 270580 - RNA, 19 nt, Artificial Sequence
  Description of Artificial Sequence: Synthetic oligonucleotide
  Sense strand starting at position 3139 of SEQ ID NO: 3477
cuuuguguguuccagggaa

SEQ ID NO: 270581 - RNA, 19 nt, Artificial Sequence
  Description of Artificial Sequence: Synthetic oligonucleotide
  Antisense strand to SEQ ID NO: 270580
uucccuggaacacacaaag

SEQ ID NO: 270582 - RNA, 19 nt, Artificial Sequence
  Description of Artificial Sequence: Synthetic oligonucleotide
  Sense strand starting at position 3231 of SEQ ID NO: 3477
ggcaaugugguccaugaug

SEQ ID NO: 270583 - RNA, 19 nt, Artificial Sequence
  Description of Artificial Sequence: Synthetic oligonucleotide
  Antisense strand to SEQ ID NO: 270582
caucauggaccacauugcc

SEQ ID NO: 270584 - RNA, 19 nt, Artificial Sequence
  Description of Artificial Sequence: Synthetic oligonucleotide
  Sense strand starting at position 3233 of SEQ ID NO: 3477
caaugugguccaugauguu

SEQ ID NO: 270585 - RNA, 19 nt, Artificial Sequence
  Description of Artificial Sequence: Synthetic oligonucleotide
  Antisense strand to SEQ ID NO: 270584
aacaucauggaccacauug

SEQ ID NO: 270586 - RNA, 19 nt, Artificial Sequence
  Description of Artificial Sequence: Synthetic oligonucleotide
  Sense strand starting at position 3242 of SEQ ID NO: 3477
ccaugauguuggcauugua

SEQ ID NO: 270587 - RNA, 19 nt, Artificial Sequence
  Description of Artificial Sequence: Synthetic oligonucleotide
  Antisense strand to SEQ ID NO: 270586
uacaaugccaacaucaugg

SEQ ID NO: 270588 - RNA, 19 nt, Artificial Sequence
  Description of Artificial Sequence: Synthetic oligonucleotide
  Sense strand starting at position 3245 of SEQ ID NO: 3477
ugauguuggcauuguagag

SEQ ID NO: 270589 - RNA, 19 nt, Artificial Sequence
  Description of Artificial Sequence: Synthetic oligonucleotide
  Antisense strand to SEQ ID NO: 270588
cucuacaaugccaacauca

SEQ ID NO: 270590 - RNA, 19 nt, Artificial Sequence
  Description of Artificial Sequence: Synthetic oligonucleotide
  Sense strand starting at position 3284 of SEQ ID NO: 3477
accagcucuugauguagau

SEQ ID NO: 270591 - RNA, 19 nt, Artificial Sequence
  Description of Artificial Sequence: Synthetic oligonucleotide
  Antisense strand to SEQ ID NO: 270590
aucuacaucaagagcuggu

SEQ ID NO: 270592 - RNA, 19 nt, Artificial Sequence
  Description of Artificial Sequence: Synthetic oligonucleotide
  Sense strand starting at position 3590 of SEQ ID NO: 3477
ucaacuucguucccauagu

SEQ ID NO: 270593 - RNA, 19 nt, Artificial Sequence
  Description of Artificial Sequence: Synthetic oligonucleotide
  Antisense strand to SEQ ID NO: 270592
acuaugggaacgaaguuga

SEQ ID NO: 270594 - RNA, 19 nt, Artificial Sequence
  Description of Artificial Sequence: Synthetic oligonucleotide
  Sense strand starting at position 3603 of SEQ ID NO: 3477
cauaguugccuggagcaga

SEQ ID NO: 270595 - RNA, 19 nt, Artificial Sequence
  Description of Artificial Sequence: Synthetic oligonucleotide
  Antisense strand to SEQ ID NO: 270594
ucugcuccaggcaacuaug

SEQ ID NO: 270596 - RNA, 19 nt, Artificial Sequence
  Description of Artificial Sequence: Synthetic oligonucleotide
  Sense strand starting at position 3683 of SEQ ID NO: 3477
cugccuuggguuugggaaa

SEQ ID NO: 270597 - RNA, 19 nt, Artificial Sequence
  Description of Artificial Sequence: Synthetic oligonucleotide
  Antisense strand to SEQ ID NO: 270596
uuucccaaacccaaggcag

SEQ ID NO: 270598 - RNA, 19 nt, Artificial Sequence
  Description of Artificial Sequence: Synthetic oligonucleotide
  Sense strand starting at position 3739 of SEQ ID NO: 3477
acacaucauuagccagaga

SEQ ID NO: 270599 - RNA, 19 nt, Artificial Sequence
  Description of Artificial Sequence: Synthetic oligonucleotide
  Antisense strand to SEQ ID NO: 270598
ucucuggcuaaugaugugu

SEQ ID NO: 270600 - RNA, 19 nt, Artificial Sequence
  Description of Artificial Sequence: Synthetic oligonucleotide
  Sense strand starting at position 3742 of SEQ ID NO: 3477
caucauuagccagagagca

SEQ ID NO: 270601 - RNA, 19 nt, Artificial Sequence
  Description of Artificial Sequence: Synthetic oligonucleotide
  Antisense strand to SEQ ID NO: 270600
ugcucucuggcuaaugaug

SEQ ID NO: 270602 - RNA, 19 nt, Artificial Sequence
  Description of Artificial Sequence: Synthetic oligonucleotide
  Sense strand starting at position 73 of SEQ ID NO: 3476
uugguuucucggccugcaa

SEQ ID NO: 270603 - RNA, 19 nt, Artificial Sequence
  Description of Artificial Sequence: Synthetic oligonucleotide
  Antisense strand to SEQ ID NO: 270602
uugcaggccgagaaaccaa

SEQ ID NO: 270604 - RNA, 19 nt, Artificial Sequence
  Description of Artificial Sequence: Synthetic oligonucleotide
  Sense strand starting at position 75 of SEQ ID NO: 3476
gguuucucggccugcaagu

SEQ ID NO: 270605 - RNA, 19 nt, Artificial Sequence
  Description of Artificial Sequence: Synthetic oligonucleotide
  Antisense strand to SEQ ID NO: 270604
acuugcaggccgagaaacc

SEQ ID NO: 270606 - RNA, 19 nt, Artificial Sequence
  Description of Artificial Sequence: Synthetic oligonucleotide
  Sense strand starting at position 472 of SEQ ID NO: 3476
gggcucuugcuggaauguu

SEQ ID NO: 270607 - RNA, 19 nt, Artificial Sequence
  Description of Artificial Sequence: Synthetic oligonucleotide
  Antisense strand to SEQ ID NO: 270606
aacauuccagcaagagccc

SEQ ID NO: 270608 - RNA, 19 nt, Artificial Sequence
  Description of Artificial Sequence: Synthetic oligonucleotide
  Sense strand starting at position 481 of SEQ ID NO: 3476
cuggaauguucugccaaug

SEQ ID NO: 270609 - RNA, 19 nt, Artificial Sequence
  Description of Artificial Sequence: Synthetic oligonucleotide
  Antisense strand to SEQ ID NO: 270608
cauuggcagaacauuccag

SEQ ID NO: 270610 - RNA, 19 nt, Artificial Sequence
  Description of Artificial Sequence: Synthetic oligonucleotide
  Sense strand starting at position 492 of SEQ ID NO: 3476
ugccaauggucucucccau

SEQ ID NO: 270611 - RNA, 19 nt, Artificial Sequence
  Description of Artificial Sequence: Synthetic oligonucleotide
  Antisense strand to SEQ ID NO: 270610
augggagagaccauuggca

SEQ ID NO: 270612 - RNA, 19 nt, Artificial Sequence
  Description of Artificial Sequence: Synthetic oligonucleotide
  Sense strand starting at position 559 of SEQ ID NO: 3476
ucacuuugcucuuuaguau

SEQ ID NO: 270613 - RNA, 19 nt, Artificial Sequence
  Description of Artificial Sequence: Synthetic oligonucleotide
  Antisense strand to SEQ ID NO: 270612
auacuaaagagcaaaguga

SEQ ID NO: 270614 - RNA, 19 nt, Artificial Sequence
  Description of Artificial Sequence: Synthetic oligonucleotide
  Sense strand starting at position 854 of SEQ ID NO: 3476
cucugagcuguagacacau

SEQ ID NO: 270615 - RNA, 19 nt, Artificial Sequence
  Description of Artificial Sequence: Synthetic oligonucleotide
  Antisense strand to SEQ ID NO: 270614
augugucuacagcucagag

SEQ ID NO: 270616 - RNA, 19 nt, Artificial Sequence
  Description of Artificial Sequence: Synthetic oligonucleotide
  Sense strand starting at position 982 of SEQ ID NO: 3476
ucggguauuagcugagugu

SEQ ID NO: 270617 - RNA, 19 nt, Artificial Sequence
  Description of Artificial Sequence: Synthetic oligonucleotide
  Antisense strand to SEQ ID NO: 270616
acacucagcuaauacccga

SEQ ID NO: 270618 - RNA, 19 nt, Artificial Sequence
  Description of Artificial Sequence: Synthetic oligonucleotide
  Sense strand starting at position 983 of SEQ ID NO: 3476
cggguauuagcugaguguu

SEQ ID NO: 270619 - RNA, 19 nt, Artificial Sequence
  Description of Artificial Sequence: Synthetic oligonucleotide
  Antisense strand to SEQ ID NO: 270618
aacacucagcuaauacccg

SEQ ID NO: 270620 - RNA, 19 nt, Artificial Sequence
  Description of Artificial Sequence: Synthetic oligonucleotide
  Sense strand starting at position 985 of SEQ ID NO: 3476
gguauuagcugaguguuac

SEQ ID NO: 270621 - RNA, 19 nt, Artificial Sequence
  Description of Artificial Sequence: Synthetic oligonucleotide
  Antisense strand to SEQ ID NO: 270620
guaacacucagcuaauacc

SEQ ID NO: 270622 - RNA, 19 nt, Artificial Sequence
  Description of Artificial Sequence: Synthetic oligonucleotide
  Sense strand starting at position 986 of SEQ ID NO: 3476
guauuagcugaguguuacu

SEQ ID NO: 270623 - RNA, 19 nt, Artificial Sequence
  Description of Artificial Sequence: Synthetic oligonucleotide
  Antisense strand to SEQ ID NO: 270622
aguaacacucagcuaauac

SEQ ID NO: 270624 - RNA, 19 nt, Artificial Sequence
  Description of Artificial Sequence: Synthetic oligonucleotide
  Sense strand starting at position 996 of SEQ ID NO: 3476
aguguuacuuccuccggga

SEQ ID NO: 270625 - RNA, 19 nt, Artificial Sequence
  Description of Artificial Sequence: Synthetic oligonucleotide
  Antisense strand to SEQ ID NO: 270624
ucccggaggaaguaacacu

SEQ ID NO: 270626 - RNA, 19 nt, Artificial Sequence
  Description of Artificial Sequence: Synthetic oligonucleotide
  Sense strand starting at position 1210 of SEQ ID NO: 3476
cauaauaaauggucgcuga

SEQ ID NO: 270627 - RNA, 19 nt, Artificial Sequence
  Description of Artificial Sequence: Synthetic oligonucleotide
  Antisense strand to SEQ ID NO: 270626
ucagcgaccauuuauuaug

SEQ ID NO: 270628 - RNA, 19 nt, Artificial Sequence
  Description of Artificial Sequence: Synthetic oligonucleotide
  Sense strand starting at position 1211 of SEQ ID NO: 3476
auaauaaauggucgcugaa

SEQ ID NO: 270629 - RNA, 19 nt, Artificial Sequence
  Description of Artificial Sequence: Synthetic oligonucleotide
  Antisense strand to SEQ ID NO: 270628
uucagcgaccauuuauuau

SEQ ID NO: 270630 - RNA, 19 nt, Artificial Sequence
  Description of Artificial Sequence: Synthetic oligonucleotide
  Sense strand starting at position 1213 of SEQ ID NO: 3476
aauaaauggucgcugaaua

SEQ ID NO: 270631 - RNA, 19 nt, Artificial Sequence
  Description of Artificial Sequence: Synthetic oligonucleotide
  Antisense strand to SEQ ID NO: 270630
uauucagcgaccauuuauu

SEQ ID NO: 270632 - RNA, 19 nt, Artificial Sequence
  Description of Artificial Sequence: Synthetic oligonucleotide
  Sense strand starting at position 1214 of SEQ ID NO: 3476
auaaauggucgcugaauac

SEQ ID NO: 270633 - RNA, 19 nt, Artificial Sequence
  Description of Artificial Sequence: Synthetic oligonucleotide
  Antisense strand to SEQ ID NO: 270632
guauucagcgaccauuuau

SEQ ID NO: 270634 - RNA, 19 nt, Artificial Sequence
  Description of Artificial Sequence: Synthetic oligonucleotide
  Sense strand starting at position 1223 of SEQ ID NO: 3476
cgcugaauacaggagugaa

SEQ ID NO: 270635 - RNA, 19 nt, Artificial Sequence
  Description of Artificial Sequence: Synthetic oligonucleotide
  Antisense strand to SEQ ID NO: 270634
uucacuccuguauucagcg

SEQ ID NO: 270636 - RNA, 19 nt, Artificial Sequence
  Description of Artificial Sequence: Synthetic oligonucleotide
  Sense strand starting at position 1416 of SEQ ID NO: 3476
cccugugcucaaggaaauc

SEQ ID NO: 270637 - RNA, 19 nt, Artificial Sequence
  Description of Artificial Sequence: Synthetic oligonucleotide
  Antisense strand to SEQ ID NO: 270636
gauuuccuugagcacaggg

SEQ ID NO: 270638 - RNA, 19 nt, Artificial Sequence
  Description of Artificial Sequence: Synthetic oligonucleotide
  Sense strand starting at position 1627 of SEQ ID NO: 3476
cagucagucccaggcagau

SEQ ID NO: 270639 - RNA, 19 nt, Artificial Sequence
  Description of Artificial Sequence: Synthetic oligonucleotide
  Antisense strand to SEQ ID NO: 270638
aucugccugggacugacug

SEQ ID NO: 270640 - RNA, 19 nt, Artificial Sequence
  Description of Artificial Sequence: Synthetic oligonucleotide
  Sense strand starting at position 1640 of SEQ ID NO: 3476
gcagaugacuaccugugaa

SEQ ID NO: 270641 - RNA, 19 nt, Artificial Sequence
  Description of Artificial Sequence: Synthetic oligonucleotide
  Antisense strand to SEQ ID NO: 270640
uucacagguagucaucugc

SEQ ID NO: 270642 - RNA, 19 nt, Artificial Sequence
  Description of Artificial Sequence: Synthetic oligonucleotide
  Sense strand starting at position 1845 of SEQ ID NO: 3476
acugucuugagguggauga

SEQ ID NO: 270643 - RNA, 19 nt, Artificial Sequence
  Description of Artificial Sequence: Synthetic oligonucleotide
  Antisense strand to SEQ ID NO: 270642
ucauccaccucaagacagu

SEQ ID NO: 270644 - RNA, 19 nt, Artificial Sequence
  Description of Artificial Sequence: Synthetic oligonucleotide
  Sense strand starting at position 2489 of SEQ ID NO: 3476
ugggaucccuguuucugaa

SEQ ID NO: 270645 - RNA, 19 nt, Artificial Sequence
  Description of Artificial Sequence: Synthetic oligonucleotide
  Antisense strand to SEQ ID NO: 270644
uucagaaacagggauccca

SEQ ID NO: 270646 - RNA, 19 nt, Artificial Sequence
  Description of Artificial Sequence: Synthetic oligonucleotide
  Sense strand starting at position 2501 of SEQ ID NO: 3476
uucugaaucucaggaagca

SEQ ID NO: 270647 - RNA, 19 nt, Artificial Sequence
  Description of Artificial Sequence: Synthetic oligonucleotide
  Antisense strand to SEQ ID NO: 270646
ugcuuccugagauucagaa

SEQ ID NO: 270648 - RNA, 19 nt, Artificial Sequence
  Description of Artificial Sequence: Synthetic oligonucleotide
  Sense strand starting at position 2698 of SEQ ID NO: 3476
ggcugauguuugcuuucca

SEQ ID NO: 270649 - RNA, 19 nt, Artificial Sequence
  Description of Artificial Sequence: Synthetic oligonucleotide
  Antisense strand to SEQ ID NO: 270648
uggaaagcaaacaucagcc

SEQ ID NO: 270650 - RNA, 19 nt, Artificial Sequence
  Description of Artificial Sequence: Synthetic oligonucleotide
  Sense strand starting at position 2702 of SEQ ID NO: 3476
gauguuugcuuuccagcca

SEQ ID NO: 270651 - RNA, 19 nt, Artificial Sequence
  Description of Artificial Sequence: Synthetic oligonucleotide
  Antisense strand to SEQ ID NO: 270650
uggcuggaaagcaaacauc

SEQ ID NO: 270652 - RNA, 19 nt, Artificial Sequence
  Description of Artificial Sequence: Synthetic oligonucleotide
  Sense strand starting at position 2725 of SEQ ID NO: 3476
agcagaauugaauggccuu

SEQ ID NO: 270653 - RNA, 19 nt, Artificial Sequence
  Description of Artificial Sequence: Synthetic oligonucleotide
  Antisense strand to SEQ ID NO: 270652
aaggccauucaauucugcu

SEQ ID NO: 270654 - RNA, 19 nt, Artificial Sequence
  Description of Artificial Sequence: Synthetic oligonucleotide
  Sense strand starting at position 2776 of SEQ ID NO: 3476
ggaugucuauagggaaauu

SEQ ID NO: 270655 - RNA, 19 nt, Artificial Sequence
  Description of Artificial Sequence: Synthetic oligonucleotide
  Antisense strand to SEQ ID NO: 270654
aauuucccuauagacaucc

SEQ ID NO: 270656 - RNA, 19 nt, Artificial Sequence
  Description of Artificial Sequence: Synthetic oligonucleotide
  Sense strand starting at position 2788 of SEQ ID NO: 3476
ggaaauuucuaaggaccaa

SEQ ID NO: 270657 - RNA, 19 nt, Artificial Sequence
  Description of Artificial Sequence: Synthetic oligonucleotide
  Antisense strand to SEQ ID NO: 270656
uugguccuuagaaauuucc

SEQ ID NO: 270658 - RNA, 19 nt, Artificial Sequence
  Description of Artificial Sequence: Synthetic oligonucleotide
  Sense strand starting at position 2823 of SEQ ID NO: 3476
ccugucuuccagcagcaua

SEQ ID NO: 270659 - RNA, 19 nt, Artificial Sequence
  Description of Artificial Sequence: Synthetic oligonucleotide
  Antisense strand to SEQ ID NO: 270658
uaugcugcuggaagacagg

SEQ ID NO: 270660 - RNA, 19 nt, Artificial Sequence
  Description of Artificial Sequence: Synthetic oligonucleotide
  Sense strand starting at position 2865 of SEQ ID NO: 3476
gccagaaucccugaugcug

SEQ ID NO: 270661 - RNA, 19 nt, Artificial Sequence
  Description of Artificial Sequence: Synthetic oligonucleotide
  Antisense strand to SEQ ID NO: 270660
cagcaucagggauucuggc

SEQ ID NO: 270662 - RNA, 19 nt, Artificial Sequence
  Description of Artificial Sequence: Synthetic oligonucleotide
  Sense strand starting at position 2904 of SEQ ID NO: 3476
gcagccuuguucuugcuau

SEQ ID NO: 270663 - RNA, 19 nt, Artificial Sequence
  Description of Artificial Sequence: Synthetic oligonucleotide
  Antisense strand to SEQ ID NO: 270662
auagcaagaacaaggcugc

SEQ ID NO: 270664 - RNA, 19 nt, Artificial Sequence
  Description of Artificial Sequence: Synthetic oligonucleotide
  Sense strand starting at position 3169 of SEQ ID NO: 3476
cccaauuacuguugaaagg

SEQ ID NO: 270665 - RNA, 19 nt, Artificial Sequence
  Description of Artificial Sequence: Synthetic oligonucleotide
  Antisense strand to SEQ ID NO: 270664
ccuuucaacaguaauuggg

SEQ ID NO: 270666 - RNA, 19 nt, Artificial Sequence
  Description of Artificial Sequence: Synthetic oligonucleotide
  Sense strand starting at position 3194 of SEQ ID NO: 3476
gagugagcucagggaucua

SEQ ID NO: 270667 - RNA, 19 nt, Artificial Sequence
  Description of Artificial Sequence: Synthetic oligonucleotide
  Antisense strand to SEQ ID NO: 270666
uagaucccugagcucacuc

SEQ ID NO: 270668 - RNA, 19 nt, Artificial Sequence
  Description of Artificial Sequence: Synthetic oligonucleotide
  Sense strand starting at position 3470 of SEQ ID NO: 3476
gucuuagaguauucuguuu

SEQ ID NO: 270669 - RNA, 19 nt, Artificial Sequence
  Description of Artificial Sequence: Synthetic oligonucleotide
  Antisense strand to SEQ ID NO: 270668
aaacagaauacucuaagac

SEQ ID NO: 270670 - RNA, 19 nt, Artificial Sequence
  Description of Artificial Sequence: Synthetic oligonucleotide
  Sense strand starting at position 3475 of SEQ ID NO: 3476
agaguauucuguuuauuga

SEQ ID NO: 270671 - RNA, 19 nt, Artificial Sequence
  Description of Artificial Sequence: Synthetic oligonucleotide
  Antisense strand to SEQ ID NO: 270670
ucaauaaacagaauacucu

SEQ ID NO: 270672 - RNA, 19 nt, Artificial Sequence
  Description of Artificial Sequence: Synthetic oligonucleotide
  Sense strand starting at position 3476 of SEQ ID NO: 3476
gaguauucuguuuauugaa

SEQ ID NO: 270673 - RNA, 19 nt, Artificial Sequence
  Description of Artificial Sequence: Synthetic oligonucleotide
  Antisense strand to SEQ ID NO: 270672
uucaauaaacagaauacuc

SEQ ID NO: 270674 - RNA, 19 nt, Artificial Sequence
  Description of Artificial Sequence: Synthetic oligonucleotide
  Sense strand starting at position 3483 of SEQ ID NO: 3476
cuguuuauugaauacaagu

SEQ ID NO: 270675 - RNA, 19 nt, Artificial Sequence
  Description of Artificial Sequence: Synthetic oligonucleotide
  Antisense strand to SEQ ID NO: 270674
acuuguauucaauaaacag

SEQ ID NO: 270676 - RNA, 19 nt, Artificial Sequence
  Description of Artificial Sequence: Synthetic oligonucleotide
  Sense strand starting at position 3523 of SEQ ID NO: 3476
gcuagauaaguuuaauguc

SEQ ID NO: 270677 - RNA, 19 nt, Artificial Sequence
  Description of Artificial Sequence: Synthetic oligonucleotide
  Antisense strand to SEQ ID NO: 270676
gacauuaaacuuaucuagc

SEQ ID NO: 270678 - RNA, 19 nt, Artificial Sequence
  Description of Artificial Sequence: Synthetic oligonucleotide
  Sense strand starting at position 3720 of SEQ ID NO: 3476
cccugugcaucuuuaggaa

SEQ ID NO: 270679 - RNA, 19 nt, Artificial Sequence
  Description of Artificial Sequence: Synthetic oligonucleotide
  Antisense strand to SEQ ID NO: 270678
uuccuaaagaugcacaggg

SEQ ID NO: 270680 - RNA, 19 nt, Artificial Sequence
  Description of Artificial Sequence: Synthetic oligonucleotide
  Sense strand starting at position 3765 of SEQ ID NO: 3476
ggcauugaucuaugcugaa

SEQ ID NO: 270681 - RNA, 19 nt, Artificial Sequence
  Description of Artificial Sequence: Synthetic oligonucleotide
  Antisense strand to SEQ ID NO: 270680
uucagcauagaucaaugcc

SEQ ID NO: 270682 - RNA, 19 nt, Artificial Sequence
  Description of Artificial Sequence: Synthetic oligonucleotide
  Sense strand starting at position 21 of SEQ ID NO: 3478
gugccuggacuagaaucua

SEQ ID NO: 270683 - RNA, 19 nt, Artificial Sequence
  Description of Artificial Sequence: Synthetic oligonucleotide
  Antisense strand to SEQ ID NO: 270682
uagauucuaguccaggcac

SEQ ID NO: 270684 - RNA, 19 nt, Artificial Sequence
  Description of Artificial Sequence: Synthetic oligonucleotide
  Sense strand starting at position 191 of SEQ ID NO: 3478
ugagccugcccaggauaua

SEQ ID NO: 270685 - RNA, 19 nt, Artificial Sequence
  Description of Artificial Sequence: Synthetic oligonucleotide
  Antisense strand to SEQ ID NO: 270684
uauauccugggcaggcuca

SEQ ID NO: 270686 - RNA, 19 nt, Artificial Sequence
  Description of Artificial Sequence: Synthetic oligonucleotide
  Sense strand starting at position 192 of SEQ ID NO: 3478
gagccugcccaggauauaa

SEQ ID NO: 270687 - RNA, 19 nt, Artificial Sequence
  Description of Artificial Sequence: Synthetic oligonucleotide
  Antisense strand to SEQ ID NO: 270686
uuauauccugggcaggcuc

SEQ ID NO: 270688 - RNA, 19 nt, Artificial Sequence
  Description of Artificial Sequence: Synthetic oligonucleotide
  Sense strand starting at position 218 of SEQ ID NO: 3478
uguugaugccaauguggau

SEQ ID NO: 270689 - RNA, 19 nt, Artificial Sequence
  Description of Artificial Sequence: Synthetic oligonucleotide
  Antisense strand to SEQ ID NO: 270688
auccacauuggcaucaaca

SEQ ID NO: 270690 - RNA, 19 nt, Artificial Sequence
  Description of Artificial Sequence: Synthetic oligonucleotide
  Sense strand starting at position 224 of SEQ ID NO: 3478
ugccaauguggauggaaau

SEQ ID NO: 270691 - RNA, 19 nt, Artificial Sequence
  Description of Artificial Sequence: Synthetic oligonucleotide
  Antisense strand to SEQ ID NO: 270690
auuuccauccacauuggca

SEQ ID NO: 270692 - RNA, 19 nt, Artificial Sequence
  Description of Artificial Sequence: Synthetic oligonucleotide
  Sense strand starting at position 243 of SEQ ID NO: 3478
guugcacauuuaugaaaga

SEQ ID NO: 270693 - RNA, 19 nt, Artificial Sequence
  Description of Artificial Sequence: Synthetic oligonucleotide
  Antisense strand to SEQ ID NO: 270692
ucuuucauaaaugugcaac

SEQ ID NO: 270694 - RNA, 19 nt, Artificial Sequence
  Description of Artificial Sequence: Synthetic oligonucleotide
  Sense strand starting at position 333 of SEQ ID NO: 3478
agcgcagcuguccuugaaa

SEQ ID NO: 270695 - RNA, 19 nt, Artificial Sequence
  Description of Artificial Sequence: Synthetic oligonucleotide
  Antisense strand to SEQ ID NO: 270694
uuucaaggacagcugcgcu

SEQ ID NO: 270696 - RNA, 19 nt, Artificial Sequence
  Description of Artificial Sequence: Synthetic oligonucleotide
  Sense strand starting at position 388 of SEQ ID NO: 3478
gaguuuauugagcgugaga

SEQ ID NO: 270697 - RNA, 19 nt, Artificial Sequence
  Description of Artificial Sequence: Synthetic oligonucleotide
  Antisense strand to SEQ ID NO: 270696
ucucacgcucaauaaacuc

SEQ ID NO: 270698 - RNA, 19 nt, Artificial Sequence
  Description of Artificial Sequence: Synthetic oligonucleotide
  Sense strand starting at position 391 of SEQ ID NO: 3478
uuuauugagcgugagacca

SEQ ID NO: 270699 - RNA, 19 nt, Artificial Sequence
  Description of Artificial Sequence: Synthetic oligonucleotide
  Antisense strand to SEQ ID NO: 270698
uggucucacgcucaauaaa

SEQ ID NO: 270700 - RNA, 19 nt, Artificial Sequence
  Description of Artificial Sequence: Synthetic oligonucleotide
  Sense strand starting at position 621 of SEQ ID NO: 3478
ggaagugcugcacauaguu

SEQ ID NO: 270701 - RNA, 19 nt, Artificial Sequence
  Description of Artificial Sequence: Synthetic oligonucleotide
  Antisense strand to SEQ ID NO: 270700
aacuaugugcagcacuucc

SEQ ID NO: 270702 - RNA, 19 nt, Artificial Sequence
  Description of Artificial Sequence: Synthetic oligonucleotide
  Sense strand starting at position 688 of SEQ ID NO: 3478
cgcguaagggucugaaaga

SEQ ID NO: 270703 - RNA, 19 nt, Artificial Sequence
  Description of Artificial Sequence: Synthetic oligonucleotide
  Antisense strand to SEQ ID NO: 270702
ucuuucagacccuuacgcg

SEQ ID NO: 270704 - RNA, 19 nt, Artificial Sequence
  Description of Artificial Sequence: Synthetic oligonucleotide
  Sense strand starting at position 917 of SEQ ID NO: 3478
cccuguccuguuugaggaa

SEQ ID NO: 270705 - RNA, 19 nt, Artificial Sequence
  Description of Artificial Sequence: Synthetic oligonucleotide
  Antisense strand to SEQ ID NO: 270704
uuccucaaacaggacaggg

SEQ ID NO: 270706 - RNA, 19 nt, Artificial Sequence
  Description of Artificial Sequence: Synthetic oligonucleotide
  Sense strand starting at position 1022 of SEQ ID NO: 3478
cguauaaccuguccuaaag

SEQ ID NO: 270707 - RNA, 19 nt, Artificial Sequence
  Description of Artificial Sequence: Synthetic oligonucleotide
  Antisense strand to SEQ ID NO: 270706
cuuuaggacagguuauacg

SEQ ID NO: 270708 - RNA, 19 nt, Artificial Sequence
  Description of Artificial Sequence: Synthetic oligonucleotide
  Sense strand starting at position 1031 of SEQ ID NO: 3478
uguccuaaagcuugggcaa

SEQ ID NO: 270709 - RNA, 19 nt, Artificial Sequence
  Description of Artificial Sequence: Synthetic oligonucleotide
  Antisense strand to SEQ ID NO: 270708
uugcccaagcuuuaggaca

SEQ ID NO: 270710 - RNA, 19 nt, Artificial Sequence
  Description of Artificial Sequence: Synthetic oligonucleotide
  Sense strand starting at position 1073 of SEQ ID NO: 3478
ugagcuagggcucagaguu

SEQ ID NO: 270711 - RNA, 19 nt, Artificial Sequence
  Description of Artificial Sequence: Synthetic oligonucleotide
  Antisense strand to SEQ ID NO: 270710
aacucugagcccuagcuca

SEQ ID NO: 270712 - RNA, 19 nt, Artificial Sequence
  Description of Artificial Sequence: Synthetic oligonucleotide
  Sense strand starting at position 1306 of SEQ ID NO: 3478
gucugcuugggauaagaag

SEQ ID NO: 270713 - RNA, 19 nt, Artificial Sequence
  Description of Artificial Sequence: Synthetic oligonucleotide
  Antisense strand to SEQ ID NO: 270712
cuucuuaucccaagcagac

SEQ ID NO: 270714 - RNA, 19 nt, Artificial Sequence
  Description of Artificial Sequence: Synthetic oligonucleotide
  Sense strand starting at position 1361 of SEQ ID NO: 3478
ccaguuacuuaugcaaaug

SEQ ID NO: 270715 - RNA, 19 nt, Artificial Sequence
  Description of Artificial Sequence: Synthetic oligonucleotide
  Antisense strand to SEQ ID NO: 270714
cauuugcauaaguaacugg

SEQ ID NO: 270716 - RNA, 19 nt, Artificial Sequence
  Description of Artificial Sequence: Synthetic oligonucleotide
  Sense strand starting at position 1681 of SEQ ID NO: 3478
cuuccugaucugcgacuca

SEQ ID NO: 270717 - RNA, 19 nt, Artificial Sequence
  Description of Artificial Sequence: Synthetic oligonucleotide
  Antisense strand to SEQ ID NO: 270716
ugagucgcagaucaggaag

SEQ ID NO: 270718 - RNA, 19 nt, Artificial Sequence
  Description of Artificial Sequence: Synthetic oligonucleotide
  Sense strand starting at position 1887 of SEQ ID NO: 3478
ugccucaauuggccuuaau

SEQ ID NO: 270719 - RNA, 19 nt, Artificial Sequence
  Description of Artificial Sequence: Synthetic oligonucleotide
  Antisense strand to SEQ ID NO: 270718
auuaaggccaauugaggca

SEQ ID NO: 270720 - RNA, 19 nt, Artificial Sequence
  Description of Artificial Sequence: Synthetic oligonucleotide
  Sense strand starting at position 2012 of SEQ ID NO: 3478
gcucaagaguccucuuuau

SEQ ID NO: 270721 - RNA, 19 nt, Artificial Sequence
  Description of Artificial Sequence: Synthetic oligonucleotide
  Antisense strand to SEQ ID NO: 270720
auaaagaggacucuugagc

SEQ ID NO: 270722 - RNA, 19 nt, Artificial Sequence
  Description of Artificial Sequence: Synthetic oligonucleotide
  Sense strand starting at position 2134 of SEQ ID NO: 3478
gcacaaucagagugucaau

SEQ ID NO: 270723 - RNA, 19 nt, Artificial Sequence
  Description of Artificial Sequence: Synthetic oligonucleotide
  Antisense strand to SEQ ID NO: 270722
auugacacucugauugugc

SEQ ID NO: 270724 - RNA, 19 nt, Artificial Sequence
  Description of Artificial Sequence: Synthetic oligonucleotide
  Sense strand starting at position 2144 of SEQ ID NO: 3478
agugucaauuucugggaau

SEQ ID NO: 270725 - RNA, 19 nt, Artificial Sequence
  Description of Artificial Sequence: Synthetic oligonucleotide
  Antisense strand to SEQ ID NO: 270724
auucccagaaauugacacu

SEQ ID NO: 270726 - RNA, 19 nt, Artificial Sequence
  Description of Artificial Sequence: Synthetic oligonucleotide
  Sense strand starting at position 2147 of SEQ ID NO: 3478
gucaauuucugggaaucug

SEQ ID NO: 270727 - RNA, 19 nt, Artificial Sequence
  Description of Artificial Sequence: Synthetic oligonucleotide
  Antisense strand to SEQ ID NO: 270726
cagauucccagaaauugac

SEQ ID NO: 270728 - RNA, 19 nt, Artificial Sequence
  Description of Artificial Sequence: Synthetic oligonucleotide
  Sense strand starting at position 2212 of SEQ ID NO: 3478
ugaaauuguuaggacugaa

SEQ ID NO: 270729 - RNA, 19 nt, Artificial Sequence
  Description of Artificial Sequence: Synthetic oligonucleotide
  Antisense strand to SEQ ID NO: 270728
uucaguccuaacaauuuca

SEQ ID NO: 270730 - RNA, 19 nt, Artificial Sequence
  Description of Artificial Sequence: Synthetic oligonucleotide
  Sense strand starting at position 2215 of SEQ ID NO: 3478
aauuguuaggacugaauuc

SEQ ID NO: 270731 - RNA, 19 nt, Artificial Sequence
  Description of Artificial Sequence: Synthetic oligonucleotide
  Antisense strand to SEQ ID NO: 270730
gaauucaguccuaacaauu

SEQ ID NO: 270732 - RNA, 19 nt, Artificial Sequence
  Description of Artificial Sequence: Synthetic oligonucleotide
  Sense strand starting at position 2233 of SEQ ID NO: 3478
cagcauugguacuugaaac

SEQ ID NO: 270733 - RNA, 19 nt, Artificial Sequence
  Description of Artificial Sequence: Synthetic oligonucleotide
  Antisense strand to SEQ ID NO: 270732
guuucaaguaccaaugcug

SEQ ID NO: 270734 - RNA, 19 nt, Artificial Sequence
  Description of Artificial Sequence: Synthetic oligonucleotide
  Sense strand starting at position 2258 of SEQ ID NO: 3478
aguuuacucuccgcaagga

SEQ ID NO: 270735 - RNA, 19 nt, Artificial Sequence
  Description of Artificial Sequence: Synthetic oligonucleotide
  Antisense strand to SEQ ID NO: 270734
uccuugcggagaguaaacu

SEQ ID NO: 270736 - RNA, 19 nt, Artificial Sequence
  Description of Artificial Sequence: Synthetic oligonucleotide
  Sense strand starting at position 2486 of SEQ ID NO: 3478
uccaaagugucagucugua

SEQ ID NO: 270737 - RNA, 19 nt, Artificial Sequence
  Description of Artificial Sequence: Synthetic oligonucleotide
  Antisense strand to SEQ ID NO: 270736
uacagacugacacuuugga

SEQ ID NO: 270738 - RNA, 19 nt, Artificial Sequence
  Description of Artificial Sequence: Synthetic oligonucleotide
  Sense strand starting at position 2569 of SEQ ID NO: 3478
gggccauucugacuacaca

SEQ ID NO: 270739 - RNA, 19 nt, Artificial Sequence
  Description of Artificial Sequence: Synthetic oligonucleotide
  Antisense strand to SEQ ID NO: 270738
uguguagucagaauggccc

SEQ ID NO: 270740 - RNA, 19 nt, Artificial Sequence
  Description of Artificial Sequence: Synthetic oligonucleotide
  Sense strand starting at position 2623 of SEQ ID NO: 3478
cugucuuuccaguacauag

SEQ ID NO: 270741 - RNA, 19 nt, Artificial Sequence
  Description of Artificial Sequence: Synthetic oligonucleotide
  Antisense strand to SEQ ID NO: 270740
cuauguacuggaaagacag

SEQ ID NO: 270742 - RNA, 19 nt, Artificial Sequence
  Description of Artificial Sequence: Synthetic oligonucleotide
  Sense strand starting at position 2746 of SEQ ID NO: 3478
guuuaaggacucugggaag

SEQ ID NO: 270743 - RNA, 19 nt, Artificial Sequence
  Description of Artificial Sequence: Synthetic oligonucleotide
  Antisense strand to SEQ ID NO: 270742
cuucccagaguccuuaaac

SEQ ID NO: 270744 - RNA, 19 nt, Artificial Sequence
  Description of Artificial Sequence: Synthetic oligonucleotide
  Sense strand starting at position 2987 of SEQ ID NO: 3478
ggauucuuucagggcaguu

SEQ ID NO: 270745 - RNA, 19 nt, Artificial Sequence
  Description of Artificial Sequence: Synthetic oligonucleotide
  Antisense strand to SEQ ID NO: 270744
aacugcccugaaagaaucc

SEQ ID NO: 270746 - RNA, 19 nt, Artificial Sequence
  Description of Artificial Sequence: Synthetic oligonucleotide
  Sense strand starting at position 3061 of SEQ ID NO: 3478
ggaggacucgugggacuca

SEQ ID NO: 270747 - RNA, 19 nt, Artificial Sequence
  Description of Artificial Sequence: Synthetic oligonucleotide
  Antisense strand to SEQ ID NO: 270746
ugagucccacgaguccucc

SEQ ID NO: 270748 - RNA, 19 nt, Artificial Sequence
  Description of Artificial Sequence: Synthetic oligonucleotide
  Sense strand starting at position 3130 of SEQ ID NO: 3478
uguggugacaccuguggaa

SEQ ID NO: 270749 - RNA, 19 nt, Artificial Sequence
  Description of Artificial Sequence: Synthetic oligonucleotide
  Antisense strand to SEQ ID NO: 270748
uuccacaggugucaccaca

SEQ ID NO: 270750 - RNA, 19 nt, Artificial Sequence
  Description of Artificial Sequence: Synthetic oligonucleotide
  Sense strand starting at position 3445 of SEQ ID NO: 3478
gcagcacacuuuccaguua

SEQ ID NO: 270751 - RNA, 19 nt, Artificial Sequence
  Description of Artificial Sequence: Synthetic oligonucleotide
  Antisense strand to SEQ ID NO: 270750
uaacuggaaagugugcugc

SEQ ID NO: 270752 - RNA, 19 nt, Artificial Sequence
  Description of Artificial Sequence: Synthetic oligonucleotide
  Sense strand starting at position 3583 of SEQ ID NO: 3478
ggaaccagucuucgaucua

SEQ ID NO: 270753 - RNA, 19 nt, Artificial Sequence
  Description of Artificial Sequence: Synthetic oligonucleotide
  Antisense strand to SEQ ID NO: 270752
uagaucgaagacugguucc

SEQ ID NO: 270754 - RNA, 19 nt, Artificial Sequence
  Description of Artificial Sequence: Synthetic oligonucleotide
  Sense strand starting at position 3624 of SEQ ID NO: 3478
agauuccacccugagcauu

SEQ ID NO: 270755 - RNA, 19 nt, Artificial Sequence
  Description of Artificial Sequence: Synthetic oligonucleotide
  Antisense strand to SEQ ID NO: 270754
aaugcucaggguggaaucu

SEQ ID NO: 270756 - RNA, 19 nt, Artificial Sequence
  Description of Artificial Sequence: Synthetic oligonucleotide
  Sense strand starting at position 3715 of SEQ ID NO: 3478
gugagcuugcuacaggaau

SEQ ID NO: 270757 - RNA, 19 nt, Artificial Sequence
  Description of Artificial Sequence: Synthetic oligonucleotide
  Antisense strand to SEQ ID NO: 270756
auuccuguagcaagcucac

SEQ ID NO: 270758 - RNA, 19 nt, Artificial Sequence
  Description of Artificial Sequence: Synthetic oligonucleotide
  Sense strand starting at position 3962 of SEQ ID NO: 3478
ggccuaucauccuucuguu

SEQ ID NO: 270759 - RNA, 19 nt, Artificial Sequence
  Description of Artificial Sequence: Synthetic oligonucleotide
  Antisense strand to SEQ ID NO: 270758
aacagaaggaugauaggcc

SEQ ID NO: 270760 - RNA, 19 nt, Artificial Sequence
  Description of Artificial Sequence: Synthetic oligonucleotide
  Sense strand starting at position 3979 of SEQ ID NO: 3478
uuaauaaccgcaugucuga

SEQ ID NO: 270761 - RNA, 19 nt, Artificial Sequence
  Description of Artificial Sequence: Synthetic oligonucleotide
  Antisense strand to SEQ ID NO: 270760
ucagacaugcgguuauuaa

SEQ ID NO: 270762 - RNA, 19 nt, Artificial Sequence
  Description of Artificial Sequence: Synthetic oligonucleotide
  Sense strand starting at position 49 of SEQ ID NO: 3479
gcgugcugccauccuugua

SEQ ID NO: 270763 - RNA, 19 nt, Artificial Sequence
  Description of Artificial Sequence: Synthetic oligonucleotide
  Antisense strand to SEQ ID NO: 270762
uacaaggauggcagcacgc

SEQ ID NO: 270764 - RNA, 19 nt, Artificial Sequence
  Description of Artificial Sequence: Synthetic oligonucleotide
  Sense strand starting at position 265 of SEQ ID NO: 3479
gcgggaucgcugugaagca

SEQ ID NO: 270765 - RNA, 19 nt, Artificial Sequence
  Description of Artificial Sequence: Synthetic oligonucleotide
  Antisense strand to SEQ ID NO: 270764
ugcuucacagcgaucccgc

SEQ ID NO: 270766 - RNA, 19 nt, Artificial Sequence
  Description of Artificial Sequence: Synthetic oligonucleotide
  Sense strand starting at position 266 of SEQ ID NO: 3479
cgggaucgcugugaagcaa

SEQ ID NO: 270767 - RNA, 19 nt, Artificial Sequence
  Description of Artificial Sequence: Synthetic oligonucleotide
  Antisense strand to SEQ ID NO: 270766
uugcuucacagcgaucccg

SEQ ID NO: 270768 - RNA, 19 nt, Artificial Sequence
  Description of Artificial Sequence: Synthetic oligonucleotide
  Sense strand starting at position 390 of SEQ ID NO: 3479
gggaguccagcuuguagga

SEQ ID NO: 270769 - RNA, 19 nt, Artificial Sequence
  Description of Artificial Sequence: Synthetic oligonucleotide
  Antisense strand to SEQ ID NO: 270768
uccuacaagcuggacuccc

SEQ ID NO: 270770 - RNA, 19 nt, Artificial Sequence
  Description of Artificial Sequence: Synthetic oligonucleotide
  Sense strand starting at position 1123 of SEQ ID NO: 3479
agagucacuuugcaaacua

SEQ ID NO: 270771 - RNA, 19 nt, Artificial Sequence
  Description of Artificial Sequence: Synthetic oligonucleotide
  Antisense strand to SEQ ID NO: 270770
uaguuugcaaagugacucu

SEQ ID NO: 270772 - RNA, 19 nt, Artificial Sequence
  Description of Artificial Sequence: Synthetic oligonucleotide
  Sense strand starting at position 1151 of SEQ ID NO: 3479
agcgauuuaccuugucgga

SEQ ID NO: 270773 - RNA, 19 nt, Artificial Sequence
  Description of Artificial Sequence: Synthetic oligonucleotide
  Antisense strand to SEQ ID NO: 270772
uccgacaagguaaaucgcu

SEQ ID NO: 270774 - RNA, 19 nt, Artificial Sequence
  Description of Artificial Sequence: Synthetic oligonucleotide
  Sense strand starting at position 1153 of SEQ ID NO: 3479
cgauuuaccuugucggagu

SEQ ID NO: 270775 - RNA, 19 nt, Artificial Sequence
  Description of Artificial Sequence: Synthetic oligonucleotide
  Antisense strand to SEQ ID NO: 270774
acuccgacaagguaaaucg

SEQ ID NO: 270776 - RNA, 19 nt, Artificial Sequence
  Description of Artificial Sequence: Synthetic oligonucleotide
  Sense strand starting at position 2152 of SEQ ID NO: 3479
ccacaugcugcguaaggau

SEQ ID NO: 270777 - RNA, 19 nt, Artificial Sequence
  Description of Artificial Sequence: Synthetic oligonucleotide
  Antisense strand to SEQ ID NO: 270776
auccuuacgcagcaugugg

SEQ ID NO: 270778 - RNA, 19 nt, Artificial Sequence
  Description of Artificial Sequence: Synthetic oligonucleotide
  Sense strand starting at position 2161 of SEQ ID NO: 3479
gcguaaggauccuccuuga

SEQ ID NO: 270779 - RNA, 19 nt, Artificial Sequence
  Description of Artificial Sequence: Synthetic oligonucleotide
  Antisense strand to SEQ ID NO: 270778
ucaaggaggauccuuacgc

SEQ ID NO: 270780 - RNA, 19 nt, Artificial Sequence
  Description of Artificial Sequence: Synthetic oligonucleotide
  Sense strand starting at position 2192 of SEQ ID NO: 3479
ggauuguucguacgggcga

SEQ ID NO: 270781 - RNA, 19 nt, Artificial Sequence
  Description of Artificial Sequence: Synthetic oligonucleotide
  Antisense strand to SEQ ID NO: 270780
ucgcccguacgaacaaucc

SEQ ID NO: 270782 - RNA, 19 nt, Artificial Sequence
  Description of Artificial Sequence: Synthetic oligonucleotide
  Sense strand starting at position 2193 of SEQ ID NO: 3479
gauuguucguacgggcgaa

SEQ ID NO: 270783 - RNA, 19 nt, Artificial Sequence
  Description of Artificial Sequence: Synthetic oligonucleotide
  Antisense strand to SEQ ID NO: 270782
uucgcccguacgaacaauc

SEQ ID NO: 270784 - RNA, 19 nt, Artificial Sequence
  Description of Artificial Sequence: Synthetic oligonucleotide
  Sense strand starting at position 2343 of SEQ ID NO: 3479
gcacuuuauucccuuucga

SEQ ID NO: 270785 - RNA, 19 nt, Artificial Sequence
  Description of Artificial Sequence: Synthetic oligonucleotide
  Antisense strand to SEQ ID NO: 270784
ucgaaagggaauaaagugc

SEQ ID NO: 270786 - RNA, 19 nt, Artificial Sequence
  Description of Artificial Sequence: Synthetic oligonucleotide
  Sense strand starting at position 2347 of SEQ ID NO: 3479
uuuauucccuuucgaggaa

SEQ ID NO: 270787 - RNA, 19 nt, Artificial Sequence
  Description of Artificial Sequence: Synthetic oligonucleotide
  Antisense strand to SEQ ID NO: 270786
uuccucgaaagggaauaaa

SEQ ID NO: 270788 - RNA, 19 nt, Artificial Sequence
  Description of Artificial Sequence: Synthetic oligonucleotide
  Sense strand starting at position 2348 of SEQ ID NO: 3479
uuauucccuuucgaggaau

SEQ ID NO: 270789 - RNA, 19 nt, Artificial Sequence
  Description of Artificial Sequence: Synthetic oligonucleotide
  Antisense strand to SEQ ID NO: 270788
auuccucgaaagggaauaa

SEQ ID NO: 270790 - RNA, 19 nt, Artificial Sequence
  Description of Artificial Sequence: Synthetic oligonucleotide
  Sense strand starting at position 2635 of SEQ ID NO: 3479
uccuuuggaguccgaauaa

SEQ ID NO: 270791 - RNA, 19 nt, Artificial Sequence
  Description of Artificial Sequence: Synthetic oligonucleotide
  Antisense strand to SEQ ID NO: 270790
uuauucggacuccaaagga

SEQ ID NO: 270792 - RNA, 19 nt, Artificial Sequence
  Description of Artificial Sequence: Synthetic oligonucleotide
  Sense strand starting at position 2693 of SEQ ID NO: 3479
uuaacugcuucucaaagga

SEQ ID NO: 270793 - RNA, 19 nt, Artificial Sequence
  Description of Artificial Sequence: Synthetic oligonucleotide
  Antisense strand to SEQ ID NO: 270792
uccuuugagaagcaguuaa

SEQ ID NO: 270794 - RNA, 19 nt, Artificial Sequence
  Description of Artificial Sequence: Synthetic oligonucleotide
  Sense strand starting at position 2715 of SEQ ID NO: 3479
gggagaucuucuuaggacc

SEQ ID NO: 270795 - RNA, 19 nt, Artificial Sequence
  Description of Artificial Sequence: Synthetic oligonucleotide
  Antisense strand to SEQ ID NO: 270794
gguccuaagaagaucuccc

SEQ ID NO: 270796 - RNA, 19 nt, Artificial Sequence
  Description of Artificial Sequence: Synthetic oligonucleotide
  Sense strand starting at position 2717 of SEQ ID NO: 3479
gagaucuucuuaggaccuu

SEQ ID NO: 270797 - RNA, 19 nt, Artificial Sequence
  Description of Artificial Sequence: Synthetic oligonucleotide
  Antisense strand to SEQ ID NO: 270796
aagguccuaagaagaucuc

SEQ ID NO: 270798 - RNA, 19 nt, Artificial Sequence
  Description of Artificial Sequence: Synthetic oligonucleotide
  Sense strand starting at position 2802 of SEQ ID NO: 3479
cugaaagcgagcuaauguu

SEQ ID NO: 270799 - RNA, 19 nt, Artificial Sequence
  Description of Artificial Sequence: Synthetic oligonucleotide
  Antisense strand to SEQ ID NO: 270798
aacauuagcucgcuuucag

SEQ ID NO: 270800 - RNA, 19 nt, Artificial Sequence
  Description of Artificial Sequence: Synthetic oligonucleotide
  Sense strand starting at position 2945 of SEQ ID NO: 3479
acaagauccuucucugguu

SEQ ID NO: 270801 - RNA, 19 nt, Artificial Sequence
  Description of Artificial Sequence: Synthetic oligonucleotide
  Antisense strand to SEQ ID NO: 270800
aaccagagaaggaucuugu

SEQ ID NO: 270802 - RNA, 19 nt, Artificial Sequence
  Description of Artificial Sequence: Synthetic oligonucleotide
  Sense strand starting at position 2983 of SEQ ID NO: 3479
ggcgcuucucuacagaaca

SEQ ID NO: 270803 - RNA, 19 nt, Artificial Sequence
  Description of Artificial Sequence: Synthetic oligonucleotide
  Antisense strand to SEQ ID NO: 270802
uguucuguagagaagcgcc

SEQ ID NO: 270804 - RNA, 19 nt, Artificial Sequence
  Description of Artificial Sequence: Synthetic oligonucleotide
  Sense strand starting at position 3246 of SEQ ID NO: 3479
cugugaucgugcugagguu

SEQ ID NO: 270805 - RNA, 19 nt, Artificial Sequence
  Description of Artificial Sequence: Synthetic oligonucleotide
  Antisense strand to SEQ ID NO: 270804
aaccucagcacgaucacag

SEQ ID NO: 270806 - RNA, 19 nt, Artificial Sequence
  Description of Artificial Sequence: Synthetic oligonucleotide
  Sense strand starting at position 3247 of SEQ ID NO: 3479
ugugaucgugcugagguuu

SEQ ID NO: 270807 - RNA, 19 nt, Artificial Sequence
  Description of Artificial Sequence: Synthetic oligonucleotide
  Antisense strand to SEQ ID NO: 270806
aaaccucagcacgaucaca

SEQ ID NO: 270808 - RNA, 19 nt, Artificial Sequence
  Description of Artificial Sequence: Synthetic oligonucleotide
  Sense strand starting at position 3248 of SEQ ID NO: 3479
gugaucgugcugagguuua

SEQ ID NO: 270809 - RNA, 19 nt, Artificial Sequence
  Description of Artificial Sequence: Synthetic oligonucleotide
  Antisense strand to SEQ ID NO: 270808
uaaaccucagcacgaucac

SEQ ID NO: 270810 - RNA, 19 nt, Artificial Sequence
  Description of Artificial Sequence: Synthetic oligonucleotide
  Sense strand starting at position 3253 of SEQ ID NO: 3479
cgugcugagguuuaaagaa

SEQ ID NO: 270811 - RNA, 19 nt, Artificial Sequence
  Description of Artificial Sequence: Synthetic oligonucleotide
  Antisense strand to SEQ ID NO: 270810
uucuuuaaaccucagcacg

SEQ ID NO: 270812 - RNA, 19 nt, Artificial Sequence
  Description of Artificial Sequence: Synthetic oligonucleotide
  Sense strand starting at position 3290 of SEQ ID NO: 3479
uuccuuagguuccgaggaa

SEQ ID NO: 270813 - RNA, 19 nt, Artificial Sequence
  Description of Artificial Sequence: Synthetic oligonucleotide
  Antisense strand to SEQ ID NO: 270812
uuccucggaaccuaaggaa

SEQ ID NO: 270814 - RNA, 19 nt, Artificial Sequence
  Description of Artificial Sequence: Synthetic oligonucleotide
  Sense strand starting at position 3291 of SEQ ID NO: 3479
uccuuagguuccgaggaaa

SEQ ID NO: 270815 - RNA, 19 nt, Artificial Sequence
  Description of Artificial Sequence: Synthetic oligonucleotide
  Antisense strand to SEQ ID NO: 270814
uuuccucggaaccuaagga

SEQ ID NO: 270816 - RNA, 19 nt, Artificial Sequence
  Description of Artificial Sequence: Synthetic oligonucleotide
  Sense strand starting at position 3622 of SEQ ID NO: 3479
ggcgcucucgguuccagau

SEQ ID NO: 270817 - RNA, 19 nt, Artificial Sequence
  Description of Artificial Sequence: Synthetic oligonucleotide
  Antisense strand to SEQ ID NO: 270816
aucuggaaccgagagcgcc

SEQ ID NO: 270818 - RNA, 19 nt, Artificial Sequence
  Description of Artificial Sequence: Synthetic oligonucleotide
  Sense strand starting at position 3657 of SEQ ID NO: 3479
gggaaguugggagguauca

SEQ ID NO: 270819 - RNA, 19 nt, Artificial Sequence
  Description of Artificial Sequence: Synthetic oligonucleotide
  Antisense strand to SEQ ID NO: 270818
ugauaccucccaacuuccc

SEQ ID NO: 270820 - RNA, 19 nt, Artificial Sequence
  Description of Artificial Sequence: Synthetic oligonucleotide
  Sense strand starting at position 3719 of SEQ ID NO: 3479
ucccaaauugcaggcgaau

SEQ ID NO: 270821 - RNA, 19 nt, Artificial Sequence
  Description of Artificial Sequence: Synthetic oligonucleotide
  Antisense strand to SEQ ID NO: 270820
auucgccugcaauuuggga

SEQ ID NO: 270822 - RNA, 19 nt, Artificial Sequence
  Description of Artificial Sequence: Synthetic oligonucleotide
  Sense strand starting at position 3829 of SEQ ID NO: 3479
augaaaguuucuugaaagc

SEQ ID NO: 270823 - RNA, 19 nt, Artificial Sequence
  Description of Artificial Sequence: Synthetic oligonucleotide
  Antisense strand to SEQ ID NO: 270822
gcuuucaagaaacuuucau

SEQ ID NO: 270824 - RNA, 19 nt, Artificial Sequence
  Description of Artificial Sequence: Synthetic oligonucleotide
  Sense strand starting at position 233 of SEQ ID NO: 3480
aauucugaauccggcagaa

SEQ ID NO: 270825 - RNA, 19 nt, Artificial Sequence
  Description of Artificial Sequence: Synthetic oligonucleotide
  Antisense strand to SEQ ID NO: 270824
uucugccggauucagaauu

SEQ ID NO: 270826 - RNA, 19 nt, Artificial Sequence
  Description of Artificial Sequence: Synthetic oligonucleotide
  Sense strand starting at position 312 of SEQ ID NO: 3480
gcaugaggcguuguuucau

SEQ ID NO: 270827 - RNA, 19 nt, Artificial Sequence
  Description of Artificial Sequence: Synthetic oligonucleotide
  Antisense strand to SEQ ID NO: 270826
augaaacaacgccucaugc

SEQ ID NO: 270828 - RNA, 19 nt, Artificial Sequence
  Description of Artificial Sequence: Synthetic oligonucleotide
  Sense strand starting at position 390 of SEQ ID NO: 3480
ugcacuucuuguccacuua

SEQ ID NO: 270829 - RNA, 19 nt, Artificial Sequence
  Description of Artificial Sequence: Synthetic oligonucleotide
  Antisense strand to SEQ ID NO: 270828
uaaguggacaagaagugca

SEQ ID NO: 270830 - RNA, 19 nt, Artificial Sequence
  Description of Artificial Sequence: Synthetic oligonucleotide
  Sense strand starting at position 410 of SEQ ID NO: 3480
acacuugguuccuuuaaag

SEQ ID NO: 270831 - RNA, 19 nt, Artificial Sequence
  Description of Artificial Sequence: Synthetic oligonucleotide
  Antisense strand to SEQ ID NO: 270830
cuuuaaaggaaccaagugu

SEQ ID NO: 270832 - RNA, 19 nt, Artificial Sequence
  Description of Artificial Sequence: Synthetic oligonucleotide
  Sense strand starting at position 502 of SEQ ID NO: 3480
aaagaucgcugacgcgaaa

SEQ ID NO: 270833 - RNA, 19 nt, Artificial Sequence
  Description of Artificial Sequence: Synthetic oligonucleotide
  Antisense strand to SEQ ID NO: 270832
uuucgcgucagcgaucuuu

SEQ ID NO: 270834 - RNA, 19 nt, Artificial Sequence
  Description of Artificial Sequence: Synthetic oligonucleotide
  Sense strand starting at position 794 of SEQ ID NO: 3480
gcgugcugccauccuugua

SEQ ID NO: 270835 - RNA, 19 nt, Artificial Sequence
  Description of Artificial Sequence: Synthetic oligonucleotide
  Antisense strand to SEQ ID NO: 270834
uacaaggauggcagcacgc

SEQ ID NO: 270836 - RNA, 19 nt, Artificial Sequence
  Description of Artificial Sequence: Synthetic oligonucleotide
  Sense strand starting at position 1010 of SEQ ID NO: 3480
gcgggaucgcugugaagca

SEQ ID NO: 270837 - RNA, 19 nt, Artificial Sequence
  Description of Artificial Sequence: Synthetic oligonucleotide
  Antisense strand to SEQ ID NO: 270836
ugcuucacagcgaucccgc

SEQ ID NO: 270838 - RNA, 19 nt, Artificial Sequence
  Description of Artificial Sequence: Synthetic oligonucleotide
  Sense strand starting at position 1011 of SEQ ID NO: 3480
cgggaucgcugugaagcaa

SEQ ID NO: 270839 - RNA, 19 nt, Artificial Sequence
  Description of Artificial Sequence: Synthetic oligonucleotide
  Antisense strand to SEQ ID NO: 270838
uugcuucacagcgaucccg

SEQ ID NO: 270840 - RNA, 19 nt, Artificial Sequence
  Description of Artificial Sequence: Synthetic oligonucleotide
  Sense strand starting at position 1135 of SEQ ID NO: 3480
gggaguccagcuuguagga

SEQ ID NO: 270841 - RNA, 19 nt, Artificial Sequence
  Description of Artificial Sequence: Synthetic oligonucleotide
  Antisense strand to SEQ ID NO: 270840
uccuacaagcuggacuccc

SEQ ID NO: 270842 - RNA, 19 nt, Artificial Sequence
  Description of Artificial Sequence: Synthetic oligonucleotide
  Sense strand starting at position 1868 of SEQ ID NO: 3480
agagucacuuugcaaacua

SEQ ID NO: 270843 - RNA, 19 nt, Artificial Sequence
  Description of Artificial Sequence: Synthetic oligonucleotide
  Antisense strand to SEQ ID NO: 270842
uaguuugcaaagugacucu

SEQ ID NO: 270844 - RNA, 19 nt, Artificial Sequence
  Description of Artificial Sequence: Synthetic oligonucleotide
  Sense strand starting at position 1896 of SEQ ID NO: 3480
agcgauuuaccuugucgga

SEQ ID NO: 270845 - RNA, 19 nt, Artificial Sequence
  Description of Artificial Sequence: Synthetic oligonucleotide
  Antisense strand to SEQ ID NO: 270844
uccgacaagguaaaucgcu

SEQ ID NO: 270846 - RNA, 19 nt, Artificial Sequence
  Description of Artificial Sequence: Synthetic oligonucleotide
  Sense strand starting at position 1898 of SEQ ID NO: 3480
cgauuuaccuugucggagu

SEQ ID NO: 270847 - RNA, 19 nt, Artificial Sequence
  Description of Artificial Sequence: Synthetic oligonucleotide
  Antisense strand to SEQ ID NO: 270846
acuccgacaagguaaaucg

SEQ ID NO: 270848 - RNA, 19 nt, Artificial Sequence
  Description of Artificial Sequence: Synthetic oligonucleotide
  Sense strand starting at position 2897 of SEQ ID NO: 3480
ccacaugcugcguaaggau

SEQ ID NO: 270849 - RNA, 19 nt, Artificial Sequence
  Description of Artificial Sequence: Synthetic oligonucleotide
  Antisense strand to SEQ ID NO: 270848
auccuuacgcagcaugugg

SEQ ID NO: 270850 - RNA, 19 nt, Artificial Sequence
  Description of Artificial Sequence: Synthetic oligonucleotide
  Sense strand starting at position 2906 of SEQ ID NO: 3480
gcguaaggauccuccuuga

SEQ ID NO: 270851 - RNA, 19 nt, Artificial Sequence
  Description of Artificial Sequence: Synthetic oligonucleotide
  Antisense strand to SEQ ID NO: 270850
ucaaggaggauccuuacgc

SEQ ID NO: 270852 - RNA, 19 nt, Artificial Sequence
  Description of Artificial Sequence: Synthetic oligonucleotide
  Sense strand starting at position 2937 of SEQ ID NO: 3480
ggauuguucguacgggcga

SEQ ID NO: 270853 - RNA, 19 nt, Artificial Sequence
  Description of Artificial Sequence: Synthetic oligonucleotide
  Antisense strand to SEQ ID NO: 270852
ucgcccguacgaacaaucc

SEQ ID NO: 270854 - RNA, 19 nt, Artificial Sequence
  Description of Artificial Sequence: Synthetic oligonucleotide
  Sense strand starting at position 2938 of SEQ ID NO: 3480
gauuguucguacgggcgaa

SEQ ID NO: 270855 - RNA, 19 nt, Artificial Sequence
  Description of Artificial Sequence: Synthetic oligonucleotide
  Antisense strand to SEQ ID NO: 270854
uucgcccguacgaacaauc

SEQ ID NO: 270856 - RNA, 19 nt, Artificial Sequence
  Description of Artificial Sequence: Synthetic oligonucleotide
  Sense strand starting at position 3088 of SEQ ID NO: 3480
gcacuuuauucccuuucga

SEQ ID NO: 270857 - RNA, 19 nt, Artificial Sequence
  Description of Artificial Sequence: Synthetic oligonucleotide
  Antisense strand to SEQ ID NO: 270856
ucgaaagggaauaaagugc

SEQ ID NO: 270858 - RNA, 19 nt, Artificial Sequence
  Description of Artificial Sequence: Synthetic oligonucleotide
  Sense strand starting at position 3092 of SEQ ID NO: 3480
uuuauucccuuucgaggaa

SEQ ID NO: 270859 - RNA, 19 nt, Artificial Sequence
  Description of Artificial Sequence: Synthetic oligonucleotide
  Antisense strand to SEQ ID NO: 270858
uuccucgaaagggaauaaa

SEQ ID NO: 270860 - RNA, 19 nt, Artificial Sequence
  Description of Artificial Sequence: Synthetic oligonucleotide
  Sense strand starting at position 3093 of SEQ ID NO: 3480
uuauucccuuucgaggaau

SEQ ID NO: 270861 - RNA, 19 nt, Artificial Sequence
  Description of Artificial Sequence: Synthetic oligonucleotide
  Antisense strand to SEQ ID NO: 270860
auuccucgaaagggaauaa

SEQ ID NO: 270862 - RNA, 19 nt, Artificial Sequence
  Description of Artificial Sequence: Synthetic oligonucleotide
  Sense strand starting at position 3380 of SEQ ID NO: 3480
uccuuuggaguccgaauaa

SEQ ID NO: 270863 - RNA, 19 nt, Artificial Sequence
  Description of Artificial Sequence: Synthetic oligonucleotide
  Antisense strand to SEQ ID NO: 270862
uuauucggacuccaaagga

SEQ ID NO: 270864 - RNA, 19 nt, Artificial Sequence
  Description of Artificial Sequence: Synthetic oligonucleotide
  Sense strand starting at position 3438 of SEQ ID NO: 3480
uuaacugcuucucaaagga

SEQ ID NO: 270865 - RNA, 19 nt, Artificial Sequence
  Description of Artificial Sequence: Synthetic oligonucleotide
  Antisense strand to SEQ ID NO: 270864
uccuuugagaagcaguuaa

SEQ ID NO: 270866 - RNA, 19 nt, Artificial Sequence
  Description of Artificial Sequence: Synthetic oligonucleotide
  Sense strand starting at position 3460 of SEQ ID NO: 3480
gggagaucuucuuaggacc

SEQ ID NO: 270867 - RNA, 19 nt, Artificial Sequence
  Description of Artificial Sequence: Synthetic oligonucleotide
  Antisense strand to SEQ ID NO: 270866
gguccuaagaagaucuccc

SEQ ID NO: 270868 - RNA, 19 nt, Artificial Sequence
  Description of Artificial Sequence: Synthetic oligonucleotide
  Sense strand starting at position 3462 of SEQ ID NO: 3480
gagaucuucuuaggaccuu

SEQ ID NO: 270869 - RNA, 19 nt, Artificial Sequence
  Description of Artificial Sequence: Synthetic oligonucleotide
  Antisense strand to SEQ ID NO: 270868
aagguccuaagaagaucuc

SEQ ID NO: 270870 - RNA, 19 nt, Artificial Sequence
  Description of Artificial Sequence: Synthetic oligonucleotide
  Sense strand starting at position 3547 of SEQ ID NO: 3480
cugaaagcgagcuaauguu

SEQ ID NO: 270871 - RNA, 19 nt, Artificial Sequence
  Description of Artificial Sequence: Synthetic oligonucleotide
  Antisense strand to SEQ ID NO: 270870
aacauuagcucgcuuucag

SEQ ID NO: 270872 - RNA, 19 nt, Artificial Sequence
  Description of Artificial Sequence: Synthetic oligonucleotide
  Sense strand starting at position 3690 of SEQ ID NO: 3480
acaagauccuucucugguu

SEQ ID NO: 270873 - RNA, 19 nt, Artificial Sequence
  Description of Artificial Sequence: Synthetic oligonucleotide
  Antisense strand to SEQ ID NO: 270872
aaccagagaaggaucuugu

SEQ ID NO: 270874 - RNA, 19 nt, Artificial Sequence
  Description of Artificial Sequence: Synthetic oligonucleotide
  Sense strand starting at position 3728 of SEQ ID NO: 3480
ggcgcuucucuacagaaca

SEQ ID NO: 270875 - RNA, 19 nt, Artificial Sequence
  Description of Artificial Sequence: Synthetic oligonucleotide
  Antisense strand to SEQ ID NO: 270874
uguucuguagagaagcgcc

SEQ ID NO: 270876 - RNA, 19 nt, Artificial Sequence
  Description of Artificial Sequence: Synthetic oligonucleotide
  Sense strand starting at position 187 of SEQ ID NO: 3481
cugacagucccagguuaga

SEQ ID NO: 270877 - RNA, 19 nt, Artificial Sequence
  Description of Artificial Sequence: Synthetic oligonucleotide
  Antisense strand to SEQ ID NO: 270876
ucuaaccugggacugucag

SEQ ID NO: 270878 - RNA, 19 nt, Artificial Sequence
  Description of Artificial Sequence: Synthetic oligonucleotide
  Sense strand starting at position 190 of SEQ ID NO: 3481
acagucccagguuagaauu

SEQ ID NO: 270879 - RNA, 19 nt, Artificial Sequence
  Description of Artificial Sequence: Synthetic oligonucleotide
  Antisense strand to SEQ ID NO: 270878
aauucuaaccugggacugu

SEQ ID NO: 270880 - RNA, 19 nt, Artificial Sequence
  Description of Artificial Sequence: Synthetic oligonucleotide
  Sense strand starting at position 216 of SEQ ID NO: 3481
gauauuuggucuugcaaau

SEQ ID NO: 270881 - RNA, 19 nt, Artificial Sequence
  Description of Artificial Sequence: Synthetic oligonucleotide
  Antisense strand to SEQ ID NO: 270880
auuugcaagaccaaauauc

SEQ ID NO: 270882 - RNA, 19 nt, Artificial Sequence
  Description of Artificial Sequence: Synthetic oligonucleotide
  Sense strand starting at position 256 of SEQ ID NO: 3481
uuauuaauauuggaaggga

SEQ ID NO: 270883 - RNA, 19 nt, Artificial Sequence
  Description of Artificial Sequence: Synthetic oligonucleotide
  Antisense strand to SEQ ID NO: 270882
ucccuuccaauauuaauaa

SEQ ID NO: 270884 - RNA, 19 nt, Artificial Sequence
  Description of Artificial Sequence: Synthetic oligonucleotide
  Sense strand starting at position 304 of SEQ ID NO: 3481
uccaauuucuaaggugacu

SEQ ID NO: 270885 - RNA, 19 nt, Artificial Sequence
  Description of Artificial Sequence: Synthetic oligonucleotide
  Antisense strand to SEQ ID NO: 270884
agucaccuuagaaauugga

SEQ ID NO: 270886 - RNA, 19 nt, Artificial Sequence
  Description of Artificial Sequence: Synthetic oligonucleotide
  Sense strand starting at position 317 of SEQ ID NO: 3481
gugacucugcugugacagu

SEQ ID NO: 270887 - RNA, 19 nt, Artificial Sequence
  Description of Artificial Sequence: Synthetic oligonucleotide
  Antisense strand to SEQ ID NO: 270886
acugucacagcagagucac

SEQ ID NO: 270888 - RNA, 19 nt, Artificial Sequence
  Description of Artificial Sequence: Synthetic oligonucleotide
  Sense strand starting at position 979 of SEQ ID NO: 3481
agaugaugcugggcaagaa

SEQ ID NO: 270889 - RNA, 19 nt, Artificial Sequence
  Description of Artificial Sequence: Synthetic oligonucleotide
  Antisense strand to SEQ ID NO: 270888
uucuugcccagcaucaucu

SEQ ID NO: 270890 - RNA, 19 nt, Artificial Sequence
  Description of Artificial Sequence: Synthetic oligonucleotide
  Sense strand starting at position 1357 of SEQ ID NO: 3481
gugcgauggcugugaggaa

SEQ ID NO: 270891 - RNA, 19 nt, Artificial Sequence
  Description of Artificial Sequence: Synthetic oligonucleotide
  Antisense strand to SEQ ID NO: 270890
uuccucacagccaucgcac

SEQ ID NO: 270892 - RNA, 19 nt, Artificial Sequence
  Description of Artificial Sequence: Synthetic oligonucleotide
  Sense strand starting at position 1405 of SEQ ID NO: 3481
gcaugaagagguugacuuu

SEQ ID NO: 270893 - RNA, 19 nt, Artificial Sequence
  Description of Artificial Sequence: Synthetic oligonucleotide
  Antisense strand to SEQ ID NO: 270892
aaagucaaccucuucaugc

SEQ ID NO: 270894 - RNA, 19 nt, Artificial Sequence
  Description of Artificial Sequence: Synthetic oligonucleotide
  Sense strand starting at position 1447 of SEQ ID NO: 3481
aggucucauggaggaggua

SEQ ID NO: 270895 - RNA, 19 nt, Artificial Sequence
  Description of Artificial Sequence: Synthetic oligonucleotide
  Antisense strand to SEQ ID NO: 270894
uaccuccuccaugagaccu

SEQ ID NO: 270896 - RNA, 19 nt, Artificial Sequence
  Description of Artificial Sequence: Synthetic oligonucleotide
  Sense strand starting at position 1811 of SEQ ID NO: 3481
gggccaugggccugagaga

SEQ ID NO: 270897 - RNA, 19 nt, Artificial Sequence
  Description of Artificial Sequence: Synthetic oligonucleotide
  Antisense strand to SEQ ID NO: 270896
ucucucaggcccauggccc

SEQ ID NO: 270898 - RNA, 19 nt, Artificial Sequence
  Description of Artificial Sequence: Synthetic oligonucleotide
  Sense strand starting at position 1812 of SEQ ID NO: 3481
ggccaugggccugagagaa

SEQ ID NO: 270899 - RNA, 19 nt, Artificial Sequence
  Description of Artificial Sequence: Synthetic oligonucleotide
  Antisense strand to SEQ ID NO: 270898
uucucucaggcccauggcc

SEQ ID NO: 270900 - RNA, 19 nt, Artificial Sequence
  Description of Artificial Sequence: Synthetic oligonucleotide
  Sense strand starting at position 1865 of SEQ ID NO: 3481
agggcaaagugggaugauu

SEQ ID NO: 270901 - RNA, 19 nt, Artificial Sequence
  Description of Artificial Sequence: Synthetic oligonucleotide
  Antisense strand to SEQ ID NO: 270900
aaucaucccacuuugcccu

SEQ ID NO: 270902 - RNA, 19 nt, Artificial Sequence
  Description of Artificial Sequence: Synthetic oligonucleotide
  Sense strand starting at position 1873 of SEQ ID NO: 3481
gugggaugauuggcacuau

SEQ ID NO: 270903 - RNA, 19 nt, Artificial Sequence
  Description of Artificial Sequence: Synthetic oligonucleotide
  Antisense strand to SEQ ID NO: 270902
auagugccaaucaucccac

SEQ ID NO: 270904 - RNA, 19 nt, Artificial Sequence
  Description of Artificial Sequence: Synthetic oligonucleotide
  Sense strand starting at position 1960 of SEQ ID NO: 3481
cccuguguuccuguuugca

SEQ ID NO: 270905 - RNA, 19 nt, Artificial Sequence
  Description of Artificial Sequence: Synthetic oligonucleotide
  Antisense strand to SEQ ID NO: 270904
ugcaaacaggaacacaggg

SEQ ID NO: 270906 - RNA, 19 nt, Artificial Sequence
  Description of Artificial Sequence: Synthetic oligonucleotide
  Sense strand starting at position 2285 of SEQ ID NO: 3481
ggacauuguccugagaggu

SEQ ID NO: 270907 - RNA, 19 nt, Artificial Sequence
  Description of Artificial Sequence: Synthetic oligonucleotide
  Antisense strand to SEQ ID NO: 270906
accucucaggacaaugucc

SEQ ID NO: 270908 - RNA, 19 nt, Artificial Sequence
  Description of Artificial Sequence: Synthetic oligonucleotide
  Sense strand starting at position 2351 of SEQ ID NO: 3481
gggaaccaguccuauuugu

SEQ ID NO: 270909 - RNA, 19 nt, Artificial Sequence
  Description of Artificial Sequence: Synthetic oligonucleotide
  Antisense strand to SEQ ID NO: 270908
acaaauaggacugguuccc

SEQ ID NO: 270910 - RNA, 19 nt, Artificial Sequence
  Description of Artificial Sequence: Synthetic oligonucleotide
  Sense strand starting at position 2379 of SEQ ID NO: 3481
gccugcugugugucugaaa

SEQ ID NO: 270911 - RNA, 19 nt, Artificial Sequence
  Description of Artificial Sequence: Synthetic oligonucleotide
  Antisense strand to SEQ ID NO: 270910
uuucagacacacagcaggc

SEQ ID NO: 270912 - RNA, 19 nt, Artificial Sequence
  Description of Artificial Sequence: Synthetic oligonucleotide
  Sense strand starting at position 2392 of SEQ ID NO: 3481
cugaaagcccacuguaguu

SEQ ID NO: 270913 - RNA, 19 nt, Artificial Sequence
  Description of Artificial Sequence: Synthetic oligonucleotide
  Antisense strand to SEQ ID NO: 270912
aacuacagugggcuuucag

SEQ ID NO: 270914 - RNA, 19 nt, Artificial Sequence
  Description of Artificial Sequence: Synthetic oligonucleotide
  Sense strand starting at position 2442 of SEQ ID NO: 3481
uuccgaagucugugauggu

SEQ ID NO: 270915 - RNA, 19 nt, Artificial Sequence
  Description of Artificial Sequence: Synthetic oligonucleotide
  Antisense strand to SEQ ID NO: 270914
accaucacagacuucggaa

SEQ ID NO: 270916 - RNA, 19 nt, Artificial Sequence
  Description of Artificial Sequence: Synthetic oligonucleotide
  Sense strand starting at position 2545 of SEQ ID NO: 3481
gggcuucucccgcaaauag

SEQ ID NO: 270917 - RNA, 19 nt, Artificial Sequence
  Description of Artificial Sequence: Synthetic oligonucleotide
  Antisense strand to SEQ ID NO: 270916
cuauuugcgggagaagccc

SEQ ID NO: 270918 - RNA, 19 nt, Artificial Sequence
  Description of Artificial Sequence: Synthetic oligonucleotide
  Sense strand starting at position 2709 of SEQ ID NO: 3481
agguauucucaugagccca

SEQ ID NO: 270919 - RNA, 19 nt, Artificial Sequence
  Description of Artificial Sequence: Synthetic oligonucleotide
  Antisense strand to SEQ ID NO: 270918
ugggcucaugagaauaccu

SEQ ID NO: 270920 - RNA, 19 nt, Artificial Sequence
  Description of Artificial Sequence: Synthetic oligonucleotide
  Sense strand starting at position 2948 of SEQ ID NO: 3481
ggcaaacaucccugggaga

SEQ ID NO: 270921 - RNA, 19 nt, Artificial Sequence
  Description of Artificial Sequence: Synthetic oligonucleotide
  Antisense strand to SEQ ID NO: 270920
ucucccagggauguuugcc

SEQ ID NO: 270922 - RNA, 19 nt, Artificial Sequence
  Description of Artificial Sequence: Synthetic oligonucleotide
  Sense strand starting at position 2949 of SEQ ID NO: 3481
gcaaacaucccugggagaa

SEQ ID NO: 270923 - RNA, 19 nt, Artificial Sequence
  Description of Artificial Sequence: Synthetic oligonucleotide
  Antisense strand to SEQ ID NO: 270922
uucucccagggauguuugc

SEQ ID NO: 270924 - RNA, 19 nt, Artificial Sequence
  Description of Artificial Sequence: Synthetic oligonucleotide
  Sense strand starting at position 3047 of SEQ ID NO: 3481
cucugagccugaucuguaa

SEQ ID NO: 270925 - RNA, 19 nt, Artificial Sequence
  Description of Artificial Sequence: Synthetic oligonucleotide
  Antisense strand to SEQ ID NO: 270924
uuacagaucaggcucagag

SEQ ID NO: 270926 - RNA, 19 nt, Artificial Sequence
  Description of Artificial Sequence: Synthetic oligonucleotide
  Sense strand starting at position 3499 of SEQ ID NO: 3481
augacuuucucucuggauu

SEQ ID NO: 270927 - RNA, 19 nt, Artificial Sequence
  Description of Artificial Sequence: Synthetic oligonucleotide
  Antisense strand to SEQ ID NO: 270926
aauccagagagaaagucau

SEQ ID NO: 270928 - RNA, 19 nt, Artificial Sequence
  Description of Artificial Sequence: Synthetic oligonucleotide
  Sense strand starting at position 3500 of SEQ ID NO: 3481
ugacuuucucucuggauua

SEQ ID NO: 270929 - RNA, 19 nt, Artificial Sequence
  Description of Artificial Sequence: Synthetic oligonucleotide
  Antisense strand to SEQ ID NO: 270928
uaauccagagagaaaguca

SEQ ID NO: 270930 - RNA, 19 nt, Artificial Sequence
  Description of Artificial Sequence: Synthetic oligonucleotide
  Sense strand starting at position 3513 of SEQ ID NO: 3481
ggauuaagcuugcccugca

SEQ ID NO: 270931 - RNA, 19 nt, Artificial Sequence
  Description of Artificial Sequence: Synthetic oligonucleotide
  Antisense strand to SEQ ID NO: 270930
ugcagggcaagcuuaaucc

SEQ ID NO: 270932 - RNA, 19 nt, Artificial Sequence
  Description of Artificial Sequence: Synthetic oligonucleotide
  Sense strand starting at position 3520 of SEQ ID NO: 3481
gcuugcccugcauaugaga

SEQ ID NO: 270933 - RNA, 19 nt, Artificial Sequence
  Description of Artificial Sequence: Synthetic oligonucleotide
  Antisense strand to SEQ ID NO: 270932
ucucauaugcagggcaagc

SEQ ID NO: 270934 - RNA, 19 nt, Artificial Sequence
  Description of Artificial Sequence: Synthetic oligonucleotide
  Sense strand starting at position 3528 of SEQ ID NO: 3481
ugcauaugagaguaaacuc

SEQ ID NO: 270935 - RNA, 19 nt, Artificial Sequence
  Description of Artificial Sequence: Synthetic oligonucleotide
  Antisense strand to SEQ ID NO: 270934
gaguuuacucucauaugca

SEQ ID NO: 270936 - RNA, 19 nt, Artificial Sequence
  Description of Artificial Sequence: Synthetic oligonucleotide
  Sense strand starting at position 3577 of SEQ ID NO: 3481
ggguccucccuggaacauu

SEQ ID NO: 270937 - RNA, 19 nt, Artificial Sequence
  Description of Artificial Sequence: Synthetic oligonucleotide
  Antisense strand to SEQ ID NO: 270936
aauguuccagggaggaccc

SEQ ID NO: 270938 - RNA, 19 nt, Artificial Sequence
  Description of Artificial Sequence: Synthetic oligonucleotide
  Sense strand starting at position 3588 of SEQ ID NO: 3481
ggaacauucuaugucuucu

SEQ ID NO: 270939 - RNA, 19 nt, Artificial Sequence
  Description of Artificial Sequence: Synthetic oligonucleotide
  Antisense strand to SEQ ID NO: 270938
agaagacauagaauguucc

SEQ ID NO: 270940 - RNA, 19 nt, Artificial Sequence
  Description of Artificial Sequence: Synthetic oligonucleotide
  Sense strand starting at position 3622 of SEQ ID NO: 3481
ggagcagugcauugcuaca

SEQ ID NO: 270941 - RNA, 19 nt, Artificial Sequence
  Description of Artificial Sequence: Synthetic oligonucleotide
  Antisense strand to SEQ ID NO: 270940
uguagcaaugcacugcucc

SEQ ID NO: 270942 - RNA, 19 nt, Artificial Sequence
  Description of Artificial Sequence: Synthetic oligonucleotide
  Sense strand starting at position 3673 of SEQ ID NO: 3481
gugccuauccuggaccauu

SEQ ID NO: 270943 - RNA, 19 nt, Artificial Sequence
  Description of Artificial Sequence: Synthetic oligonucleotide
  Antisense strand to SEQ ID NO: 270942
aaugguccaggauaggcac

SEQ ID NO: 270944 - RNA, 19 nt, Artificial Sequence
  Description of Artificial Sequence: Synthetic oligonucleotide
  Sense strand starting at position 3687 of SEQ ID NO: 3481
ccauuuguguuugaaggag

SEQ ID NO: 270945 - RNA, 19 nt, Artificial Sequence
  Description of Artificial Sequence: Synthetic oligonucleotide
  Antisense strand to SEQ ID NO: 270944
cuccuucaaacacaaaugg

SEQ ID NO: 270946 - RNA, 19 nt, Artificial Sequence
  Description of Artificial Sequence: Synthetic oligonucleotide
  Sense strand starting at position 3924 of SEQ ID NO: 3481
gggaccuguucuguccaga

SEQ ID NO: 270947 - RNA, 19 nt, Artificial Sequence
  Description of Artificial Sequence: Synthetic oligonucleotide
  Antisense strand to SEQ ID NO: 270946
ucuggacagaacagguccc

SEQ ID NO: 270948 - RNA, 19 nt, Artificial Sequence
  Description of Artificial Sequence: Synthetic oligonucleotide
  Sense strand starting at position 3927 of SEQ ID NO: 3481
accuguucuguccagaucu

SEQ ID NO: 270949 - RNA, 19 nt, Artificial Sequence
  Description of Artificial Sequence: Synthetic oligonucleotide
  Antisense strand to SEQ ID NO: 270948
agaucuggacagaacaggu

SEQ ID NO: 270950 - RNA, 19 nt, Artificial Sequence
  Description of Artificial Sequence: Synthetic oligonucleotide
  Sense strand starting at position 3929 of SEQ ID NO: 3481
cuguucuguccagaucugu

SEQ ID NO: 270951 - RNA, 19 nt, Artificial Sequence
  Description of Artificial Sequence: Synthetic oligonucleotide
  Antisense strand to SEQ ID NO: 270950
acagaucuggacagaacag

SEQ ID NO: 270952 - RNA, 19 nt, Artificial Sequence
  Description of Artificial Sequence: Synthetic oligonucleotide
  Sense strand starting at position 3938 of SEQ ID NO: 3481
ccagaucugucacucucau

SEQ ID NO: 270953 - RNA, 19 nt, Artificial Sequence
  Description of Artificial Sequence: Synthetic oligonucleotide
  Antisense strand to SEQ ID NO: 270952
augagagugacagaucugg

SEQ ID NO: 270954 - RNA, 19 nt, Artificial Sequence
  Description of Artificial Sequence: Synthetic oligonucleotide
  Sense strand starting at position 3966 of SEQ ID NO: 3481
cucauugacuucucacgga

SEQ ID NO: 270955 - RNA, 19 nt, Artificial Sequence
  Description of Artificial Sequence: Synthetic oligonucleotide
  Antisense strand to SEQ ID NO: 270954
uccgugagaagucaaugag

SEQ ID NO: 270956 - RNA, 19 nt, Artificial Sequence
  Description of Artificial Sequence: Synthetic oligonucleotide
  Sense strand starting at position 81 of SEQ ID NO: 3482
uaggcucuagugugauuua

SEQ ID NO: 270957 - RNA, 19 nt, Artificial Sequence
  Description of Artificial Sequence: Synthetic oligonucleotide
  Antisense strand to SEQ ID NO: 270956
uaaaucacacuagagccua

SEQ ID NO: 270958 - RNA, 19 nt, Artificial Sequence
  Description of Artificial Sequence: Synthetic oligonucleotide
  Sense strand starting at position 84 of SEQ ID NO: 3482
gcucuagugugauuuauua

SEQ ID NO: 270959 - RNA, 19 nt, Artificial Sequence
  Description of Artificial Sequence: Synthetic oligonucleotide
  Antisense strand to SEQ ID NO: 270958
uaauaaaucacacuagagc

SEQ ID NO: 270960 - RNA, 19 nt, Artificial Sequence
  Description of Artificial Sequence: Synthetic oligonucleotide
  Sense strand starting at position 92 of SEQ ID NO: 3482
gugauuuauuaacaaggcu

SEQ ID NO: 270961 - RNA, 19 nt, Artificial Sequence
  Description of Artificial Sequence: Synthetic oligonucleotide
  Antisense strand to SEQ ID NO: 270960
agccuuguuaauaaaucac

SEQ ID NO: 270962 - RNA, 19 nt, Artificial Sequence
  Description of Artificial Sequence: Synthetic oligonucleotide
  Sense strand starting at position 138 of SEQ ID NO: 3482
gccaccucagaguaaagau

SEQ ID NO: 270963 - RNA, 19 nt, Artificial Sequence
  Description of Artificial Sequence: Synthetic oligonucleotide
  Antisense strand to SEQ ID NO: 270962
aucuuuacucugagguggc

SEQ ID NO: 270964 - RNA, 19 nt, Artificial Sequence
  Description of Artificial Sequence: Synthetic oligonucleotide
  Sense strand starting at position 396 of SEQ ID NO: 3482
gaaacuaagcacugugaga

SEQ ID NO: 270965 - RNA, 19 nt, Artificial Sequence
  Description of Artificial Sequence: Synthetic oligonucleotide
  Antisense strand to SEQ ID NO: 270964
ucucacagugcuuaguuuc

SEQ ID NO: 270966 - RNA, 19 nt, Artificial Sequence
  Description of Artificial Sequence: Synthetic oligonucleotide
  Sense strand starting at position 426 of SEQ ID NO: 3482
uuuguaaaccuguauauuc

SEQ ID NO: 270967 - RNA, 19 nt, Artificial Sequence
  Description of Artificial Sequence: Synthetic oligonucleotide
  Antisense strand to SEQ ID NO: 270966
gaauauacagguuuacaaa

SEQ ID NO: 270968 - RNA, 19 nt, Artificial Sequence
  Description of Artificial Sequence: Synthetic oligonucleotide
  Sense strand starting at position 467 of SEQ ID NO: 3482
gccagaggagccuaucagu

SEQ ID NO: 270969 - RNA, 19 nt, Artificial Sequence
  Description of Artificial Sequence: Synthetic oligonucleotide
  Antisense strand to SEQ ID NO: 270968
acugauaggcuccucuggc

SEQ ID NO: 270970 - RNA, 19 nt, Artificial Sequence
  Description of Artificial Sequence: Synthetic oligonucleotide
  Sense strand starting at position 704 of SEQ ID NO: 3482
acgaauauacuaugaaggu

SEQ ID NO: 270971 - RNA, 19 nt, Artificial Sequence
  Description of Artificial Sequence: Synthetic oligonucleotide
  Antisense strand to SEQ ID NO: 270970
accuucauaguauauucgu

SEQ ID NO: 270972 - RNA, 19 nt, Artificial Sequence
  Description of Artificial Sequence: Synthetic oligonucleotide
  Sense strand starting at position 780 of SEQ ID NO: 3482
auagguugggugugaucga

SEQ ID NO: 270973 - RNA, 19 nt, Artificial Sequence
  Description of Artificial Sequence: Synthetic oligonucleotide
  Antisense strand to SEQ ID NO: 270972
ucgaucacacccaaccuau

SEQ ID NO: 270974 - RNA, 19 nt, Artificial Sequence
  Description of Artificial Sequence: Synthetic oligonucleotide
  Sense strand starting at position 783 of SEQ ID NO: 3482
gguugggugugaucgaauc

SEQ ID NO: 270975 - RNA, 19 nt, Artificial Sequence
  Description of Artificial Sequence: Synthetic oligonucleotide
  Antisense strand to SEQ ID NO: 270974
gauucgaucacacccaacc

SEQ ID NO: 270976 - RNA, 19 nt, Artificial Sequence
  Description of Artificial Sequence: Synthetic oligonucleotide
  Sense strand starting at position 814 of SEQ ID NO: 3482
acaacuaaguauguucuau

SEQ ID NO: 270977 - RNA, 19 nt, Artificial Sequence
  Description of Artificial Sequence: Synthetic oligonucleotide
  Antisense strand to SEQ ID NO: 270976
auagaacauacuuaguugu

SEQ ID NO: 270978 - RNA, 19 nt, Artificial Sequence
  Description of Artificial Sequence: Synthetic oligonucleotide
  Sense strand starting at position 889 of SEQ ID NO: 3482
aguuaagcuguuuaaagua

SEQ ID NO: 270979 - RNA, 19 nt, Artificial Sequence
  Description of Artificial Sequence: Synthetic oligonucleotide
  Antisense strand to SEQ ID NO: 270978
uacuuuaaacagcuuaacu

SEQ ID NO: 270980 - RNA, 19 nt, Artificial Sequence
  Description of Artificial Sequence: Synthetic oligonucleotide
  Sense strand starting at position 896 of SEQ ID NO: 3482
cuguuuaaaguauaaucca

SEQ ID NO: 270981 - RNA, 19 nt, Artificial Sequence
  Description of Artificial Sequence: Synthetic oligonucleotide
  Antisense strand to SEQ ID NO: 270980
uggauuauacuuuaaacag

SEQ ID NO: 270982 - RNA, 19 nt, Artificial Sequence
  Description of Artificial Sequence: Synthetic oligonucleotide
  Sense strand starting at position 1024 of SEQ ID NO: 3482
agauucuagagcggguaua

SEQ ID NO: 270983 - RNA, 19 nt, Artificial Sequence
  Description of Artificial Sequence: Synthetic oligonucleotide
  Antisense strand to SEQ ID NO: 270982
uauacccgcucuagaaucu

SEQ ID NO: 270984 - RNA, 19 nt, Artificial Sequence
  Description of Artificial Sequence: Synthetic oligonucleotide
  Sense strand starting at position 1025 of SEQ ID NO: 3482
gauucuagagcggguauaa

SEQ ID NO: 270985 - RNA, 19 nt, Artificial Sequence
  Description of Artificial Sequence: Synthetic oligonucleotide
  Antisense strand to SEQ ID NO: 270984
uuauacccgcucuagaauc

SEQ ID NO: 270986 - RNA, 19 nt, Artificial Sequence
  Description of Artificial Sequence: Synthetic oligonucleotide
  Sense strand starting at position 1035 of SEQ ID NO: 3482
cggguauaauggucaaaug

SEQ ID NO: 270987 - RNA, 19 nt, Artificial Sequence
  Description of Artificial Sequence: Synthetic oligonucleotide
  Antisense strand to SEQ ID NO: 270986
cauuugaccauuauacccg

SEQ ID NO: 270988 - RNA, 19 nt, Artificial Sequence
  Description of Artificial Sequence: Synthetic oligonucleotide
  Sense strand starting at position 1126 of SEQ ID NO: 3482
gcguauucugccucucuca

SEQ ID NO: 270989 - RNA, 19 nt, Artificial Sequence
  Description of Artificial Sequence: Synthetic oligonucleotide
  Antisense strand to SEQ ID NO: 270988
ugagagaggcagaauacgc

SEQ ID NO: 270990 - RNA, 19 nt, Artificial Sequence
  Description of Artificial Sequence: Synthetic oligonucleotide
  Sense strand starting at position 1274 of SEQ ID NO: 3482
gaacgucucccaggcaaau

SEQ ID NO: 270991 - RNA, 19 nt, Artificial Sequence
  Description of Artificial Sequence: Synthetic oligonucleotide
  Antisense strand to SEQ ID NO: 270990
auuugccugggagacguuc

SEQ ID NO: 270992 - RNA, 19 nt, Artificial Sequence
  Description of Artificial Sequence: Synthetic oligonucleotide
  Sense strand starting at position 1287 of SEQ ID NO: 3482
gcaaaugaggcaugaagaa

SEQ ID NO: 270993 - RNA, 19 nt, Artificial Sequence
  Description of Artificial Sequence: Synthetic oligonucleotide
  Antisense strand to SEQ ID NO: 270992
uucuucaugccucauuugc

SEQ ID NO: 270994 - RNA, 19 nt, Artificial Sequence
  Description of Artificial Sequence: Synthetic oligonucleotide
  Sense strand starting at position 1440 of SEQ ID NO: 3482
gggucaauuugccuagcau

SEQ ID NO: 270995 - RNA, 19 nt, Artificial Sequence
  Description of Artificial Sequence: Synthetic oligonucleotide
  Antisense strand to SEQ ID NO: 270994
augcuaggcaaauugaccc

SEQ ID NO: 270996 - RNA, 19 nt, Artificial Sequence
  Description of Artificial Sequence: Synthetic oligonucleotide
  Sense strand starting at position 1460 of SEQ ID NO: 3482
guugcaccuggguagaaau

SEQ ID NO: 270997 - RNA, 19 nt, Artificial Sequence
  Description of Artificial Sequence: Synthetic oligonucleotide
  Antisense strand to SEQ ID NO: 270996
auuucuacccaggugcaac

SEQ ID NO: 270998 - RNA, 19 nt, Artificial Sequence
  Description of Artificial Sequence: Synthetic oligonucleotide
  Sense strand starting at position 1864 of SEQ ID NO: 3482
ccacuccuccgagagcuua

SEQ ID NO: 270999 - RNA, 19 nt, Artificial Sequence
  Description of Artificial Sequence: Synthetic oligonucleotide
  Antisense strand to SEQ ID NO: 270998
uaagcucucggaggagugg

SEQ ID NO: 271000 - RNA, 19 nt, Artificial Sequence
  Description of Artificial Sequence: Synthetic oligonucleotide
  Sense strand starting at position 1980 of SEQ ID NO: 3482
gguuaucucuuacugcaca

SEQ ID NO: 271001 - RNA, 19 nt, Artificial Sequence
  Description of Artificial Sequence: Synthetic oligonucleotide
  Antisense strand to SEQ ID NO: 271000
ugugcaguaagagauaacc

SEQ ID NO: 271002 - RNA, 19 nt, Artificial Sequence
  Description of Artificial Sequence: Synthetic oligonucleotide
  Sense strand starting at position 2056 of SEQ ID NO: 3482
cgucuauugggccaaagaa

SEQ ID NO: 271003 - RNA, 19 nt, Artificial Sequence
  Description of Artificial Sequence: Synthetic oligonucleotide
  Antisense strand to SEQ ID NO: 271002
uucuuuggcccaauagacg

SEQ ID NO: 271004 - RNA, 19 nt, Artificial Sequence
  Description of Artificial Sequence: Synthetic oligonucleotide
  Sense strand starting at position 2245 of SEQ ID NO: 3482
cggcucugauuggcugaaa

SEQ ID NO: 271005 - RNA, 19 nt, Artificial Sequence
  Description of Artificial Sequence: Synthetic oligonucleotide
  Antisense strand to SEQ ID NO: 271004
uuucagccaaucagagccg

SEQ ID NO: 271006 - RNA, 19 nt, Artificial Sequence
  Description of Artificial Sequence: Synthetic oligonucleotide
  Sense strand starting at position 2246 of SEQ ID NO: 3482
ggcucugauuggcugaaag

SEQ ID NO: 271007 - RNA, 19 nt, Artificial Sequence
  Description of Artificial Sequence: Synthetic oligonucleotide
  Antisense strand to SEQ ID NO: 271006
cuuucagccaaucagagcc

SEQ ID NO: 271008 - RNA, 19 nt, Artificial Sequence
  Description of Artificial Sequence: Synthetic oligonucleotide
  Sense strand starting at position 2285 of SEQ ID NO: 3482
uaggcauugggccaaggau

SEQ ID NO: 271009 - RNA, 19 nt, Artificial Sequence
  Description of Artificial Sequence: Synthetic oligonucleotide
  Antisense strand to SEQ ID NO: 271008
auccuuggcccaaugccua

SEQ ID NO: 271010 - RNA, 19 nt, Artificial Sequence
  Description of Artificial Sequence: Synthetic oligonucleotide
  Sense strand starting at position 2465 of SEQ ID NO: 3482
ggauuucccucagcuguca

SEQ ID NO: 271011 - RNA, 19 nt, Artificial Sequence
  Description of Artificial Sequence: Synthetic oligonucleotide
  Antisense strand to SEQ ID NO: 271010
ugacagcugagggaaaucc

SEQ ID NO: 271012 - RNA, 19 nt, Artificial Sequence
  Description of Artificial Sequence: Synthetic oligonucleotide
  Sense strand starting at position 2526 of SEQ ID NO: 3482
gugcuauucucuguaggga

SEQ ID NO: 271013 - RNA, 19 nt, Artificial Sequence
  Description of Artificial Sequence: Synthetic oligonucleotide
  Antisense strand to SEQ ID NO: 271012
ucccuacagagaauagcac

SEQ ID NO: 271014 - RNA, 19 nt, Artificial Sequence
  Description of Artificial Sequence: Synthetic oligonucleotide
  Sense strand starting at position 2527 of SEQ ID NO: 3482
ugcuauucucuguagggaa

SEQ ID NO: 271015 - RNA, 19 nt, Artificial Sequence
  Description of Artificial Sequence: Synthetic oligonucleotide
  Antisense strand to SEQ ID NO: 271014
uucccuacagagaauagca

SEQ ID NO: 271016 - RNA, 19 nt, Artificial Sequence
  Description of Artificial Sequence: Synthetic oligonucleotide
  Sense strand starting at position 3034 of SEQ ID NO: 3482
aggacuucgaauuguauuc

SEQ ID NO: 271017 - RNA, 19 nt, Artificial Sequence
  Description of Artificial Sequence: Synthetic oligonucleotide
  Antisense strand to SEQ ID NO: 271016
gaauacaauucgaaguccu

SEQ ID NO: 271018 - RNA, 19 nt, Artificial Sequence
  Description of Artificial Sequence: Synthetic oligonucleotide
  Sense strand starting at position 3117 of SEQ ID NO: 3482
ucaagcugacuguauacau

SEQ ID NO: 271019 - RNA, 19 nt, Artificial Sequence
  Description of Artificial Sequence: Synthetic oligonucleotide
  Antisense strand to SEQ ID NO: 271018
auguauacagucagcuuga

SEQ ID NO: 271020 - RNA, 19 nt, Artificial Sequence
  Description of Artificial Sequence: Synthetic oligonucleotide
  Sense strand starting at position 3216 of SEQ ID NO: 3482
uuagcuguauacuuugaua

SEQ ID NO: 271021 - RNA, 19 nt, Artificial Sequence
  Description of Artificial Sequence: Synthetic oligonucleotide
  Antisense strand to SEQ ID NO: 271020
uaucaaaguauacagcuaa

SEQ ID NO: 271022 - RNA, 19 nt, Artificial Sequence
  Description of Artificial Sequence: Synthetic oligonucleotide
  Sense strand starting at position 3218 of SEQ ID NO: 3482
agcuguauacuuugauaug

SEQ ID NO: 271023 - RNA, 19 nt, Artificial Sequence
  Description of Artificial Sequence: Synthetic oligonucleotide
  Antisense strand to SEQ ID NO: 271022
cauaucaaaguauacagcu

SEQ ID NO: 271024 - RNA, 19 nt, Artificial Sequence
  Description of Artificial Sequence: Synthetic oligonucleotide
  Sense strand starting at position 3678 of SEQ ID NO: 3482
uguucuaggcucugaucau

SEQ ID NO: 271025 - RNA, 19 nt, Artificial Sequence
  Description of Artificial Sequence: Synthetic oligonucleotide
  Antisense strand to SEQ ID NO: 271024
augaucagagccuagaaca

SEQ ID NO: 271026 - RNA, 19 nt, Artificial Sequence
  Description of Artificial Sequence: Synthetic oligonucleotide
  Sense strand starting at position 3704 of SEQ ID NO: 3482
gguauaugauaugaauaag

SEQ ID NO: 271027 - RNA, 19 nt, Artificial Sequence
  Description of Artificial Sequence: Synthetic oligonucleotide
  Antisense strand to SEQ ID NO: 271026
cuuauucauaucauauacc

SEQ ID NO: 271028 - RNA, 19 nt, Artificial Sequence
  Description of Artificial Sequence: Synthetic oligonucleotide
  Sense strand starting at position 3743 of SEQ ID NO: 3482
guguuuauacuguagugaa

SEQ ID NO: 271029 - RNA, 19 nt, Artificial Sequence
  Description of Artificial Sequence: Synthetic oligonucleotide
  Antisense strand to SEQ ID NO: 271028
uucacuacaguauaaacac

SEQ ID NO: 271030 - RNA, 19 nt, Artificial Sequence
  Description of Artificial Sequence: Synthetic oligonucleotide
  Sense strand starting at position 3803 of SEQ ID NO: 3482
guauguugugaauaaaugc

SEQ ID NO: 271031 - RNA, 19 nt, Artificial Sequence
  Description of Artificial Sequence: Synthetic oligonucleotide
  Antisense strand to SEQ ID NO: 271030
gcauuuauucacaacauac

SEQ ID NO: 271032 - RNA, 19 nt, Artificial Sequence
  Description of Artificial Sequence: Synthetic oligonucleotide
  Sense strand starting at position 3876 of SEQ ID NO: 3482
guaggaugguuaguuuaag

SEQ ID NO: 271033 - RNA, 19 nt, Artificial Sequence
  Description of Artificial Sequence: Synthetic oligonucleotide
  Antisense strand to SEQ ID NO: 271032
cuuaaacuaaccauccuac

SEQ ID NO: 271034 - RNA, 19 nt, Artificial Sequence
  Description of Artificial Sequence: Synthetic oligonucleotide
  Sense strand starting at position 3877 of SEQ ID NO: 3482
uaggaugguuaguuuaaga

SEQ ID NO: 271035 - RNA, 19 nt, Artificial Sequence
  Description of Artificial Sequence: Synthetic oligonucleotide
  Antisense strand to SEQ ID NO: 271034
ucuuaaacuaaccauccua

SEQ ID NO: 271036 - RNA, 19 nt, Artificial Sequence
  Description of Artificial Sequence: Synthetic oligonucleotide
  Sense strand starting at position 52 of SEQ ID NO: 3483
guuuguguaauacauaugu

SEQ ID NO: 271037 - RNA, 19 nt, Artificial Sequence
  Description of Artificial Sequence: Synthetic oligonucleotide
  Antisense strand to SEQ ID NO: 271036
acauauguauuacacaaac

SEQ ID NO: 271038 - RNA, 19 nt, Artificial Sequence
  Description of Artificial Sequence: Synthetic oligonucleotide
  Sense strand starting at position 656 of SEQ ID NO: 3483
auacuauguugugcuaaag

SEQ ID NO: 271039 - RNA, 19 nt, Artificial Sequence
  Description of Artificial Sequence: Synthetic oligonucleotide
  Antisense strand to SEQ ID NO: 271038
cuuuagcacaacauaguau

SEQ ID NO: 271040 - RNA, 19 nt, Artificial Sequence
  Description of Artificial Sequence: Synthetic oligonucleotide
  Sense strand starting at position 662 of SEQ ID NO: 3483
uguugugcuaaagaaguua

SEQ ID NO: 271041 - RNA, 19 nt, Artificial Sequence
  Description of Artificial Sequence: Synthetic oligonucleotide
  Antisense strand to SEQ ID NO: 271040
uaacuucuuuagcacaaca

SEQ ID NO: 271042 - RNA, 19 nt, Artificial Sequence
  Description of Artificial Sequence: Synthetic oligonucleotide
  Sense strand starting at position 688 of SEQ ID NO: 3483
ccaagugugauacgaguua

SEQ ID NO: 271043 - RNA, 19 nt, Artificial Sequence
  Description of Artificial Sequence: Synthetic oligonucleotide
  Antisense strand to SEQ ID NO: 271042
uaacucguaucacacuugg

SEQ ID NO: 271044 - RNA, 19 nt, Artificial Sequence
  Description of Artificial Sequence: Synthetic oligonucleotide
  Sense strand starting at position 693 of SEQ ID NO: 3483
ugugauacgaguuauauaa

SEQ ID NO: 271045 - RNA, 19 nt, Artificial Sequence
  Description of Artificial Sequence: Synthetic oligonucleotide
  Antisense strand to SEQ ID NO: 271044
uuauauaacucguaucaca

SEQ ID NO: 271046 - RNA, 19 nt, Artificial Sequence
  Description of Artificial Sequence: Synthetic oligonucleotide
  Sense strand starting at position 731 of SEQ ID NO: 3483
cuaugccaguuauuaugaa

SEQ ID NO: 271047 - RNA, 19 nt, Artificial Sequence
  Description of Artificial Sequence: Synthetic oligonucleotide
  Antisense strand to SEQ ID NO: 271046
uucauaauaacuggcauag

SEQ ID NO: 271048 - RNA, 19 nt, Artificial Sequence
  Description of Artificial Sequence: Synthetic oligonucleotide
  Sense strand starting at position 738 of SEQ ID NO: 3483
aguuauuaugaacacaugu

SEQ ID NO: 271049 - RNA, 19 nt, Artificial Sequence
  Description of Artificial Sequence: Synthetic oligonucleotide
  Antisense strand to SEQ ID NO: 271048
acauguguucauaauaacu

SEQ ID NO: 271050 - RNA, 19 nt, Artificial Sequence
  Description of Artificial Sequence: Synthetic oligonucleotide
  Sense strand starting at position 748 of SEQ ID NO: 3483
aacacauguguauguagua

SEQ ID NO: 271051 - RNA, 19 nt, Artificial Sequence
  Description of Artificial Sequence: Synthetic oligonucleotide
  Antisense strand to SEQ ID NO: 271050
uacuacauacacauguguu

SEQ ID NO: 271052 - RNA, 19 nt, Artificial Sequence
  Description of Artificial Sequence: Synthetic oligonucleotide
  Sense strand starting at position 749 of SEQ ID NO: 3483
acacauguguauguaguaa

SEQ ID NO: 271053 - RNA, 19 nt, Artificial Sequence
  Description of Artificial Sequence: Synthetic oligonucleotide
  Antisense strand to SEQ ID NO: 271052
uuacuacauacacaugugu

SEQ ID NO: 271054 - RNA, 19 nt, Artificial Sequence
  Description of Artificial Sequence: Synthetic oligonucleotide
  Sense strand starting at position 791 of SEQ ID NO: 3483
ccaugauucgagggcggaa

SEQ ID NO: 271055 - RNA, 19 nt, Artificial Sequence
  Description of Artificial Sequence: Synthetic oligonucleotide
  Antisense strand to SEQ ID NO: 271054
uuccgcccucgaaucaugg

SEQ ID NO: 271056 - RNA, 19 nt, Artificial Sequence
  Description of Artificial Sequence: Synthetic oligonucleotide
  Sense strand starting at position 883 of SEQ ID NO: 3483
agagaugauugggaccaga

SEQ ID NO: 271057 - RNA, 19 nt, Artificial Sequence
  Description of Artificial Sequence: Synthetic oligonucleotide
  Antisense strand to SEQ ID NO: 271056
ucuggucccaaucaucucu

SEQ ID NO: 271058 - RNA, 19 nt, Artificial Sequence
  Description of Artificial Sequence: Synthetic oligonucleotide
  Sense strand starting at position 909 of SEQ ID NO: 3483
guaggagaguccuucagau

SEQ ID NO: 271059 - RNA, 19 nt, Artificial Sequence
  Description of Artificial Sequence: Synthetic oligonucleotide
  Antisense strand to SEQ ID NO: 271058
aucugaaggacucuccuac

SEQ ID NO: 271060 - RNA, 19 nt, Artificial Sequence
  Description of Artificial Sequence: Synthetic oligonucleotide
  Sense strand starting at position 911 of SEQ ID NO: 3483
aggagaguccuucagaugu

SEQ ID NO: 271061 - RNA, 19 nt, Artificial Sequence
  Description of Artificial Sequence: Synthetic oligonucleotide
  Antisense strand to SEQ ID NO: 271060
acaucugaaggacucuccu

SEQ ID NO: 271062 - RNA, 19 nt, Artificial Sequence
  Description of Artificial Sequence: Synthetic oligonucleotide
  Sense strand starting at position 961 of SEQ ID NO: 3483
auacacagauacguauaua

SEQ ID NO: 271063 - RNA, 19 nt, Artificial Sequence
  Description of Artificial Sequence: Synthetic oligonucleotide
  Antisense strand to SEQ ID NO: 271062
uauauacguaucuguguau

SEQ ID NO: 271064 - RNA, 19 nt, Artificial Sequence
  Description of Artificial Sequence: Synthetic oligonucleotide
  Sense strand starting at position 1057 of SEQ ID NO: 3483
acaaaugaugcuuauguua

SEQ ID NO: 271065 - RNA, 19 nt, Artificial Sequence
  Description of Artificial Sequence: Synthetic oligonucleotide
  Antisense strand to SEQ ID NO: 271064
uaacauaagcaucauuugu

SEQ ID NO: 271066 - RNA, 19 nt, Artificial Sequence
  Description of Artificial Sequence: Synthetic oligonucleotide
  Sense strand starting at position 1156 of SEQ ID NO: 3483
cgggaacuguuucugacuu

SEQ ID NO: 271067 - RNA, 19 nt, Artificial Sequence
  Description of Artificial Sequence: Synthetic oligonucleotide
  Antisense strand to SEQ ID NO: 271066
aagucagaaacaguucccg

SEQ ID NO: 271068 - RNA, 19 nt, Artificial Sequence
  Description of Artificial Sequence: Synthetic oligonucleotide
  Sense strand starting at position 1164 of SEQ ID NO: 3483
guuucugacuuaucaaagu

SEQ ID NO: 271069 - RNA, 19 nt, Artificial Sequence
  Description of Artificial Sequence: Synthetic oligonucleotide
  Antisense strand to SEQ ID NO: 271068
acuuugauaagucagaaac

SEQ ID NO: 271070 - RNA, 19 nt, Artificial Sequence
  Description of Artificial Sequence: Synthetic oligonucleotide
  Sense strand starting at position 1172 of SEQ ID NO: 3483
cuuaucaaagugugaacaa

SEQ ID NO: 271071 - RNA, 19 nt, Artificial Sequence
  Description of Artificial Sequence: Synthetic oligonucleotide
  Antisense strand to SEQ ID NO: 271070
uuguucacacuuugauaag

SEQ ID NO: 271072 - RNA, 19 nt, Artificial Sequence
  Description of Artificial Sequence: Synthetic oligonucleotide
  Sense strand starting at position 1191 of SEQ ID NO: 3483
gagguacagaccgguagau

SEQ ID NO: 271073 - RNA, 19 nt, Artificial Sequence
  Description of Artificial Sequence: Synthetic oligonucleotide
  Antisense strand to SEQ ID NO: 271072
aucuaccggucuguaccuc

SEQ ID NO: 271074 - RNA, 19 nt, Artificial Sequence
  Description of Artificial Sequence: Synthetic oligonucleotide
  Sense strand starting at position 1193 of SEQ ID NO: 3483
gguacagaccgguagaugu

SEQ ID NO: 271075 - RNA, 19 nt, Artificial Sequence
  Description of Artificial Sequence: Synthetic oligonucleotide
  Antisense strand to SEQ ID NO: 271074
acaucuaccggucuguacc

SEQ ID NO: 271076 - RNA, 19 nt, Artificial Sequence
  Description of Artificial Sequence: Synthetic oligonucleotide
  Sense strand starting at position 1373 of SEQ ID NO: 3483
ugguauuugcgccaaugca

SEQ ID NO: 271077 - RNA, 19 nt, Artificial Sequence
  Description of Artificial Sequence: Synthetic oligonucleotide
  Antisense strand to SEQ ID NO: 271076
ugcauuggcgcaaauacca

SEQ ID NO: 271078 - RNA, 19 nt, Artificial Sequence
  Description of Artificial Sequence: Synthetic oligonucleotide
  Sense strand starting at position 1427 of SEQ ID NO: 3483
aggcgagugaccgacaauu

SEQ ID NO: 271079 - RNA, 19 nt, Artificial Sequence
  Description of Artificial Sequence: Synthetic oligonucleotide
  Antisense strand to SEQ ID NO: 271078
aauugucggucacucgccu

SEQ ID NO: 271080 - RNA, 19 nt, Artificial Sequence
  Description of Artificial Sequence: Synthetic oligonucleotide
  Sense strand starting at position 2106 of SEQ ID NO: 3483
guugguucgaaggaguauu

SEQ ID NO: 271081 - RNA, 19 nt, Artificial Sequence
  Description of Artificial Sequence: Synthetic oligonucleotide
  Antisense strand to SEQ ID NO: 271080
aauacuccuucgaaccaac

SEQ ID NO: 271082 - RNA, 19 nt, Artificial Sequence
  Description of Artificial Sequence: Synthetic oligonucleotide
  Sense strand starting at position 2118 of SEQ ID NO: 3483
gaguauuuauuugguacuc

SEQ ID NO: 271083 - RNA, 19 nt, Artificial Sequence
  Description of Artificial Sequence: Synthetic oligonucleotide
  Antisense strand to SEQ ID NO: 271082
gaguaccaaauaaauacuc

SEQ ID NO: 271084 - RNA, 19 nt, Artificial Sequence
  Description of Artificial Sequence: Synthetic oligonucleotide
  Sense strand starting at position 2168 of SEQ ID NO: 3483
gaccgcuuggaaggaaauu

SEQ ID NO: 271085 - RNA, 19 nt, Artificial Sequence
  Description of Artificial Sequence: Synthetic oligonucleotide
  Antisense strand to SEQ ID NO: 271084
aauuuccuuccaagcgguc

SEQ ID NO: 271086 - RNA, 19 nt, Artificial Sequence
  Description of Artificial Sequence: Synthetic oligonucleotide
  Sense strand starting at position 2209 of SEQ ID NO: 3483
cucgaauggcagcauauau

SEQ ID NO: 271087 - RNA, 19 nt, Artificial Sequence
  Description of Artificial Sequence: Synthetic oligonucleotide
  Antisense strand to SEQ ID NO: 271086
auauaugcugccauucgag

SEQ ID NO: 271088 - RNA, 19 nt, Artificial Sequence
  Description of Artificial Sequence: Synthetic oligonucleotide
  Sense strand starting at position 2282 of SEQ ID NO: 3483
uccguuauccuacaucuuu

SEQ ID NO: 271089 - RNA, 19 nt, Artificial Sequence
  Description of Artificial Sequence: Synthetic oligonucleotide
  Antisense strand to SEQ ID NO: 271088
aaagauguaggauaacgga

SEQ ID NO: 271090 - RNA, 19 nt, Artificial Sequence
  Description of Artificial Sequence: Synthetic oligonucleotide
  Sense strand starting at position 2410 of SEQ ID NO: 3483
uuguaaauuggaggcuuaa

SEQ ID NO: 271091 - RNA, 19 nt, Artificial Sequence
  Description of Artificial Sequence: Synthetic oligonucleotide
  Antisense strand to SEQ ID NO: 271090
uuaagccuccaauuuacaa

SEQ ID NO: 271092 - RNA, 19 nt, Artificial Sequence
  Description of Artificial Sequence: Synthetic oligonucleotide
  Sense strand starting at position 2502 of SEQ ID NO: 3483
guagcuagcaguuugcaau

SEQ ID NO: 271093 - RNA, 19 nt, Artificial Sequence
  Description of Artificial Sequence: Synthetic oligonucleotide
  Antisense strand to SEQ ID NO: 271092
auugcaaacugcuagcuac

SEQ ID NO: 271094 - RNA, 19 nt, Artificial Sequence
  Description of Artificial Sequence: Synthetic oligonucleotide
  Sense strand starting at position 2508 of SEQ ID NO: 3483
agcaguuugcaauaggaua

SEQ ID NO: 271095 - RNA, 19 nt, Artificial Sequence
  Description of Artificial Sequence: Synthetic oligonucleotide
  Antisense strand to SEQ ID NO: 271094
uauccuauugcaaacugcu

SEQ ID NO: 271096 - RNA, 19 nt, Artificial Sequence
  Description of Artificial Sequence: Synthetic oligonucleotide
  Sense strand starting at position 2522 of SEQ ID NO: 3483
ggauaaaucccaggcugaa

SEQ ID NO: 271097 - RNA, 19 nt, Artificial Sequence
  Description of Artificial Sequence: Synthetic oligonucleotide
  Antisense strand to SEQ ID NO: 271096
uucagccugggauuuaucc

SEQ ID NO: 271098 - RNA, 19 nt, Artificial Sequence
  Description of Artificial Sequence: Synthetic oligonucleotide
  Sense strand starting at position 2566 of SEQ ID NO: 3483
uggaaaucauguucgaugu

SEQ ID NO: 271099 - RNA, 19 nt, Artificial Sequence
  Description of Artificial Sequence: Synthetic oligonucleotide
  Antisense strand to SEQ ID NO: 271098
acaucgaacaugauuucca

SEQ ID NO: 271100 - RNA, 19 nt, Artificial Sequence
  Description of Artificial Sequence: Synthetic oligonucleotide
  Sense strand starting at position 2567 of SEQ ID NO: 3483
ggaaaucauguucgaugug

SEQ ID NO: 271101 - RNA, 19 nt, Artificial Sequence
  Description of Artificial Sequence: Synthetic oligonucleotide
  Antisense strand to SEQ ID NO: 271100
cacaucgaacaugauuucc

SEQ ID NO: 271102 - RNA, 19 nt, Artificial Sequence
  Description of Artificial Sequence: Synthetic oligonucleotide
  Sense strand starting at position 2684 of SEQ ID NO: 3483
agaacugcuugcucuugaa

SEQ ID NO: 271103 - RNA, 19 nt, Artificial Sequence
  Description of Artificial Sequence: Synthetic oligonucleotide
  Antisense strand to SEQ ID NO: 271102
uucaagagcaagcaguucu

SEQ ID NO: 271104 - RNA, 19 nt, Artificial Sequence
  Description of Artificial Sequence: Synthetic oligonucleotide
  Sense strand starting at position 2688 of SEQ ID NO: 3483
cugcuugcucuugaacaua

SEQ ID NO: 271105 - RNA, 19 nt, Artificial Sequence
  Description of Artificial Sequence: Synthetic oligonucleotide
  Antisense strand to SEQ ID NO: 271104
uauguucaagagcaagcag

SEQ ID NO: 271106 - RNA, 19 nt, Artificial Sequence
  Description of Artificial Sequence: Synthetic oligonucleotide
  Sense strand starting at position 2726 of SEQ ID NO: 3483
agaggagauuacuugcuga

SEQ ID NO: 271107 - RNA, 19 nt, Artificial Sequence
  Description of Artificial Sequence: Synthetic oligonucleotide
  Antisense strand to SEQ ID NO: 271106
ucagcaaguaaucuccucu

SEQ ID NO: 271108 - RNA, 19 nt, Artificial Sequence
  Description of Artificial Sequence: Synthetic oligonucleotide
  Sense strand starting at position 2729 of SEQ ID NO: 3483
ggagauuacuugcugauua

SEQ ID NO: 271109 - RNA, 19 nt, Artificial Sequence
  Description of Artificial Sequence: Synthetic oligonucleotide
  Antisense strand to SEQ ID NO: 271108
uaaucagcaaguaaucucc

SEQ ID NO: 271110 - RNA, 19 nt, Artificial Sequence
  Description of Artificial Sequence: Synthetic oligonucleotide
  Sense strand starting at position 2731 of SEQ ID NO: 3483
agauuacuugcugauuaau

SEQ ID NO: 271111 - RNA, 19 nt, Artificial Sequence
  Description of Artificial Sequence: Synthetic oligonucleotide
  Antisense strand to SEQ ID NO: 271110
auuaaucagcaaguaaucu

SEQ ID NO: 271112 - RNA, 19 nt, Artificial Sequence
  Description of Artificial Sequence: Synthetic oligonucleotide
  Sense strand starting at position 2963 of SEQ ID NO: 3483
ggaggaucucuuugagucc

SEQ ID NO: 271113 - RNA, 19 nt, Artificial Sequence
  Description of Artificial Sequence: Synthetic oligonucleotide
  Antisense strand to SEQ ID NO: 271112
ggacucaaagagauccucc

SEQ ID NO: 271114 - RNA, 19 nt, Artificial Sequence
  Description of Artificial Sequence: Synthetic oligonucleotide
  Sense strand starting at position 3020 of SEQ ID NO: 3483
gcauuccagccagagugau

SEQ ID NO: 271115 - RNA, 19 nt, Artificial Sequence
  Description of Artificial Sequence: Synthetic oligonucleotide
  Antisense strand to SEQ ID NO: 271114
aucacucuggcuggaaugc

SEQ ID NO: 271116 - RNA, 19 nt, Artificial Sequence
  Description of Artificial Sequence: Synthetic oligonucleotide
  Sense strand starting at position 15 of SEQ ID NO: 3484
guuuaucucuuacuuggau

SEQ ID NO: 271117 - RNA, 19 nt, Artificial Sequence
  Description of Artificial Sequence: Synthetic oligonucleotide
  Antisense strand to SEQ ID NO: 271116
auccaaguaagagauaaac

SEQ ID NO: 271118 - RNA, 19 nt, Artificial Sequence
  Description of Artificial Sequence: Synthetic oligonucleotide
  Sense strand starting at position 113 of SEQ ID NO: 3484
guaagacaaucccucaaug

SEQ ID NO: 271119 - RNA, 19 nt, Artificial Sequence
  Description of Artificial Sequence: Synthetic oligonucleotide
  Antisense strand to SEQ ID NO: 271118
cauugagggauugucuuac

SEQ ID NO: 271120 - RNA, 19 nt, Artificial Sequence
  Description of Artificial Sequence: Synthetic oligonucleotide
  Sense strand starting at position 141 of SEQ ID NO: 3484
ucaauaaucugucuggagu

SEQ ID NO: 271121 - RNA, 19 nt, Artificial Sequence
  Description of Artificial Sequence: Synthetic oligonucleotide
  Antisense strand to SEQ ID NO: 271120
acuccagacagauuauuga

SEQ ID NO: 271122 - RNA, 19 nt, Artificial Sequence
  Description of Artificial Sequence: Synthetic oligonucleotide
  Sense strand starting at position 142 of SEQ ID NO: 3484
caauaaucugucuggagua

SEQ ID NO: 271123 - RNA, 19 nt, Artificial Sequence
  Description of Artificial Sequence: Synthetic oligonucleotide
  Antisense strand to SEQ ID NO: 271122
uacuccagacagauuauug

SEQ ID NO: 271124 - RNA, 19 nt, Artificial Sequence
  Description of Artificial Sequence: Synthetic oligonucleotide
  Sense strand starting at position 144 of SEQ ID NO: 3484
auaaucugucuggaguaau

SEQ ID NO: 271125 - RNA, 19 nt, Artificial Sequence
  Description of Artificial Sequence: Synthetic oligonucleotide
  Antisense strand to SEQ ID NO: 271124
auuacuccagacagauuau

SEQ ID NO: 271126 - RNA, 19 nt, Artificial Sequence
  Description of Artificial Sequence: Synthetic oligonucleotide
  Sense strand starting at position 147 of SEQ ID NO: 3484
aucugucuggaguaauguu

SEQ ID NO: 271127 - RNA, 19 nt, Artificial Sequence
  Description of Artificial Sequence: Synthetic oligonucleotide
  Antisense strand to SEQ ID NO: 271126
aacauuacuccagacagau

SEQ ID NO: 271128 - RNA, 19 nt, Artificial Sequence
  Description of Artificial Sequence: Synthetic oligonucleotide
  Sense strand starting at position 218 of SEQ ID NO: 3484
gacaauugguuacuuguuu

SEQ ID NO: 271129 - RNA, 19 nt, Artificial Sequence
  Description of Artificial Sequence: Synthetic oligonucleotide
  Antisense strand to SEQ ID NO: 271128
aaacaaguaaccaauuguc

SEQ ID NO: 271130 - RNA, 19 nt, Artificial Sequence
  Description of Artificial Sequence: Synthetic oligonucleotide
  Sense strand starting at position 219 of SEQ ID NO: 3484
acaauugguuacuuguuua

SEQ ID NO: 271131 - RNA, 19 nt, Artificial Sequence
  Description of Artificial Sequence: Synthetic oligonucleotide
  Antisense strand to SEQ ID NO: 271130
uaaacaaguaaccaauugu

SEQ ID NO: 271132 - RNA, 19 nt, Artificial Sequence
  Description of Artificial Sequence: Synthetic oligonucleotide
  Sense strand starting at position 222 of SEQ ID NO: 3484
auugguuacuuguuuaaac

SEQ ID NO: 271133 - RNA, 19 nt, Artificial Sequence
  Description of Artificial Sequence: Synthetic oligonucleotide
  Antisense strand to SEQ ID NO: 271132
guuuaaacaaguaaccaau

SEQ ID NO: 271134 - RNA, 19 nt, Artificial Sequence
  Description of Artificial Sequence: Synthetic oligonucleotide
  Sense strand starting at position 233 of SEQ ID NO: 3484
guuuaaacaucaguuaacu

SEQ ID NO: 271135 - RNA, 19 nt, Artificial Sequence
  Description of Artificial Sequence: Synthetic oligonucleotide
  Antisense strand to SEQ ID NO: 271134
aguuaacugauguuuaaac

SEQ ID NO: 271136 - RNA, 19 nt, Artificial Sequence
  Description of Artificial Sequence: Synthetic oligonucleotide
  Sense strand starting at position 457 of SEQ ID NO: 3484
ccuccaguucuugaguauc

SEQ ID NO: 271137 - RNA, 19 nt, Artificial Sequence
  Description of Artificial Sequence: Synthetic oligonucleotide
  Antisense strand to SEQ ID NO: 271136
gauacucaagaacuggagg

SEQ ID NO: 271138 - RNA, 19 nt, Artificial Sequence
  Description of Artificial Sequence: Synthetic oligonucleotide
  Sense strand starting at position 460 of SEQ ID NO: 3484
ccaguucuugaguauccaa

SEQ ID NO: 271139 - RNA, 19 nt, Artificial Sequence
  Description of Artificial Sequence: Synthetic oligonucleotide
  Antisense strand to SEQ ID NO: 271138
uuggauacucaagaacugg

SEQ ID NO: 271140 - RNA, 19 nt, Artificial Sequence
  Description of Artificial Sequence: Synthetic oligonucleotide
  Sense strand starting at position 492 of SEQ ID NO: 3484
uguaucuguccagagcuga

SEQ ID NO: 271141 - RNA, 19 nt, Artificial Sequence
  Description of Artificial Sequence: Synthetic oligonucleotide
  Antisense strand to SEQ ID NO: 271140
ucagcucuggacagauaca

SEQ ID NO: 271142 - RNA, 19 nt, Artificial Sequence
  Description of Artificial Sequence: Synthetic oligonucleotide
  Sense strand starting at position 606 of SEQ ID NO: 3484
uuaugcuuuggauaaccga

SEQ ID NO: 271143 - RNA, 19 nt, Artificial Sequence
  Description of Artificial Sequence: Synthetic oligonucleotide
  Antisense strand to SEQ ID NO: 271142
ucgguuauccaaagcauaa

SEQ ID NO: 271144 - RNA, 19 nt, Artificial Sequence
  Description of Artificial Sequence: Synthetic oligonucleotide
  Sense strand starting at position 609 of SEQ ID NO: 3484
ugcuuuggauaaccgauaa

SEQ ID NO: 271145 - RNA, 19 nt, Artificial Sequence
  Description of Artificial Sequence: Synthetic oligonucleotide
  Antisense strand to SEQ ID NO: 271144
uuaucgguuauccaaagca

SEQ ID NO: 271146 - RNA, 19 nt, Artificial Sequence
  Description of Artificial Sequence: Synthetic oligonucleotide
  Sense strand starting at position 864 of SEQ ID NO: 3484
ggcccaauguuacccaaau

SEQ ID NO: 271147 - RNA, 19 nt, Artificial Sequence
  Description of Artificial Sequence: Synthetic oligonucleotide
  Antisense strand to SEQ ID NO: 271146
auuuggguaacauugggcc

SEQ ID NO: 271148 - RNA, 19 nt, Artificial Sequence
  Description of Artificial Sequence: Synthetic oligonucleotide
  Sense strand starting at position 1041 of SEQ ID NO: 3484
cauaguaaauggucauaga

SEQ ID NO: 271149 - RNA, 19 nt, Artificial Sequence
  Description of Artificial Sequence: Synthetic oligonucleotide
  Antisense strand to SEQ ID NO: 271148
ucuaugaccauuuacuaug

SEQ ID NO: 271150 - RNA, 19 nt, Artificial Sequence
  Description of Artificial Sequence: Synthetic oligonucleotide
  Sense strand starting at position 1051 of SEQ ID NO: 3484
ggucauagaaucugugaca

SEQ ID NO: 271151 - RNA, 19 nt, Artificial Sequence
  Description of Artificial Sequence: Synthetic oligonucleotide
  Antisense strand to SEQ ID NO: 271150
ugucacagauucuaugacc

SEQ ID NO: 271152 - RNA, 19 nt, Artificial Sequence
  Description of Artificial Sequence: Synthetic oligonucleotide
  Sense strand starting at position 1052 of SEQ ID NO: 3484
gucauagaaucugugacau

SEQ ID NO: 271153 - RNA, 19 nt, Artificial Sequence
  Description of Artificial Sequence: Synthetic oligonucleotide
  Antisense strand to SEQ ID NO: 271152
augucacagauucuaugac

SEQ ID NO: 271154 - RNA, 19 nt, Artificial Sequence
  Description of Artificial Sequence: Synthetic oligonucleotide
  Sense strand starting at position 1137 of SEQ ID NO: 3484
ugcccaagucacugagaca

SEQ ID NO: 271155 - RNA, 19 nt, Artificial Sequence
  Description of Artificial Sequence: Synthetic oligonucleotide
  Antisense strand to SEQ ID NO: 271154
ugucucagugacuugggca

SEQ ID NO: 271156 - RNA, 19 nt, Artificial Sequence
  Description of Artificial Sequence: Synthetic oligonucleotide
  Sense strand starting at position 1212 of SEQ ID NO: 3484
gugucacuugcacaaucaa

SEQ ID NO: 271157 - RNA, 19 nt, Artificial Sequence
  Description of Artificial Sequence: Synthetic oligonucleotide
  Antisense strand to SEQ ID NO: 271156
uugauugugcaagugacac

SEQ ID NO: 271158 - RNA, 19 nt, Artificial Sequence
  Description of Artificial Sequence: Synthetic oligonucleotide
  Sense strand starting at position 2842 of SEQ ID NO: 3484
ccucgaggacacugaguau

SEQ ID NO: 271159 - RNA, 19 nt, Artificial Sequence
  Description of Artificial Sequence: Synthetic oligonucleotide
  Antisense strand to SEQ ID NO: 271158
auacucaguguccucgagg

SEQ ID NO: 271160 - RNA, 19 nt, Artificial Sequence
  Description of Artificial Sequence: Synthetic oligonucleotide
  Sense strand starting at position 2887 of SEQ ID NO: 3484
agauaugaucgcguguguu

SEQ ID NO: 271161 - RNA, 19 nt, Artificial Sequence
  Description of Artificial Sequence: Synthetic oligonucleotide
  Antisense strand to SEQ ID NO: 271160
aacacacgcgaucauaucu

SEQ ID NO: 271162 - RNA, 19 nt, Artificial Sequence
  Description of Artificial Sequence: Synthetic oligonucleotide
  Sense strand starting at position 2889 of SEQ ID NO: 3484
auaugaucgcguguguuga

SEQ ID NO: 271163 - RNA, 19 nt, Artificial Sequence
  Description of Artificial Sequence: Synthetic oligonucleotide
  Antisense strand to SEQ ID NO: 271162
ucaacacacgcgaucauau

SEQ ID NO: 271164 - RNA, 19 nt, Artificial Sequence
  Description of Artificial Sequence: Synthetic oligonucleotide
  Sense strand starting at position 2895 of SEQ ID NO: 3484
ucgcguguguugacacaua

SEQ ID NO: 271165 - RNA, 19 nt, Artificial Sequence
  Description of Artificial Sequence: Synthetic oligonucleotide
  Antisense strand to SEQ ID NO: 271164
uaugugucaacacacgcga

SEQ ID NO: 271166 - RNA, 19 nt, Artificial Sequence
  Description of Artificial Sequence: Synthetic oligonucleotide
  Sense strand starting at position 2982 of SEQ ID NO: 3484
ugauuuggcagguguguau

SEQ ID NO: 271167 - RNA, 19 nt, Artificial Sequence
  Description of Artificial Sequence: Synthetic oligonucleotide
  Antisense strand to SEQ ID NO: 271166
auacacaccugccaaauca

SEQ ID NO: 271168 - RNA, 19 nt, Artificial Sequence
  Description of Artificial Sequence: Synthetic oligonucleotide
  Sense strand starting at position 2993 of SEQ ID NO: 3484
guguguauccaucaccaau

SEQ ID NO: 271169 - RNA, 19 nt, Artificial Sequence
  Description of Artificial Sequence: Synthetic oligonucleotide
  Antisense strand to SEQ ID NO: 271168
auuggugauggauacacac

SEQ ID NO: 271170 - RNA, 19 nt, Artificial Sequence
  Description of Artificial Sequence: Synthetic oligonucleotide
  Sense strand starting at position 3103 of SEQ ID NO: 3484
ccgguagguagauauuauu

SEQ ID NO: 271171 - RNA, 19 nt, Artificial Sequence
  Description of Artificial Sequence: Synthetic oligonucleotide
  Antisense strand to SEQ ID NO: 271170
aauaauaucuaccuaccgg

SEQ ID NO: 271172 - RNA, 19 nt, Artificial Sequence
  Description of Artificial Sequence: Synthetic oligonucleotide
  Sense strand starting at position 3139 of SEQ ID NO: 3484
caagaauggugcucggaga

SEQ ID NO: 271173 - RNA, 19 nt, Artificial Sequence
  Description of Artificial Sequence: Synthetic oligonucleotide
  Antisense strand to SEQ ID NO: 271172
ucuccgagcaccauucuug

SEQ ID NO: 271174 - RNA, 19 nt, Artificial Sequence
  Description of Artificial Sequence: Synthetic oligonucleotide
  Sense strand starting at position 3331 of SEQ ID NO: 3484
acuuaaauugaacgugaau

SEQ ID NO: 271175 - RNA, 19 nt, Artificial Sequence
  Description of Artificial Sequence: Synthetic oligonucleotide
  Antisense strand to SEQ ID NO: 271174
auucacguucaauuuaagu

SEQ ID NO: 271176 - RNA, 19 nt, Artificial Sequence
  Description of Artificial Sequence: Synthetic oligonucleotide
  Sense strand starting at position 3333 of SEQ ID NO: 3484
uuaaauugaacgugaauug

SEQ ID NO: 271177 - RNA, 19 nt, Artificial Sequence
  Description of Artificial Sequence: Synthetic oligonucleotide
  Antisense strand to SEQ ID NO: 271176
caauucacguucaauuuaa

SEQ ID NO: 271178 - RNA, 19 nt, Artificial Sequence
  Description of Artificial Sequence: Synthetic oligonucleotide
  Sense strand starting at position 3342 of SEQ ID NO: 3484
acgugaauugccuaggaug

SEQ ID NO: 271179 - RNA, 19 nt, Artificial Sequence
  Description of Artificial Sequence: Synthetic oligonucleotide
  Antisense strand to SEQ ID NO: 271178
cauccuaggcaauucacgu

SEQ ID NO: 271180 - RNA, 19 nt, Artificial Sequence
  Description of Artificial Sequence: Synthetic oligonucleotide
  Sense strand starting at position 3460 of SEQ ID NO: 3484
gucuucuauguauagaaag

SEQ ID NO: 271181 - RNA, 19 nt, Artificial Sequence
  Description of Artificial Sequence: Synthetic oligonucleotide
  Antisense strand to SEQ ID NO: 271180
cuuucuauacauagaagac

SEQ ID NO: 271182 - RNA, 19 nt, Artificial Sequence
  Description of Artificial Sequence: Synthetic oligonucleotide
  Sense strand starting at position 3470 of SEQ ID NO: 3484
uauagaaagucaguggcaa

SEQ ID NO: 271183 - RNA, 19 nt, Artificial Sequence
  Description of Artificial Sequence: Synthetic oligonucleotide
  Antisense strand to SEQ ID NO: 271182
uugccacugacuuucuaua

SEQ ID NO: 271184 - RNA, 19 nt, Artificial Sequence
  Description of Artificial Sequence: Synthetic oligonucleotide
  Sense strand starting at position 3471 of SEQ ID NO: 3484
auagaaagucaguggcaaa

SEQ ID NO: 271185 - RNA, 19 nt, Artificial Sequence
  Description of Artificial Sequence: Synthetic oligonucleotide
  Antisense strand to SEQ ID NO: 271184
uuugccacugacuuucuau

SEQ ID NO: 271186 - RNA, 19 nt, Artificial Sequence
  Description of Artificial Sequence: Synthetic oligonucleotide
  Sense strand starting at position 3847 of SEQ ID NO: 3484
caggucaucugauuccaga

SEQ ID NO: 271187 - RNA, 19 nt, Artificial Sequence
  Description of Artificial Sequence: Synthetic oligonucleotide
  Antisense strand to SEQ ID NO: 271186
ucuggaaucagaugaccug

SEQ ID NO: 271188 - RNA, 19 nt, Artificial Sequence
  Description of Artificial Sequence: Synthetic oligonucleotide
  Sense strand starting at position 3878 of SEQ ID NO: 3484
acugcugugcuguuucuua

SEQ ID NO: 271189 - RNA, 19 nt, Artificial Sequence
  Description of Artificial Sequence: Synthetic oligonucleotide
  Antisense strand to SEQ ID NO: 271188
uaagaaacagcacagcagu

SEQ ID NO: 271190 - RNA, 19 nt, Artificial Sequence
  Description of Artificial Sequence: Synthetic oligonucleotide
  Sense strand starting at position 3880 of SEQ ID NO: 3484
ugcugugcuguuucuuaca

SEQ ID NO: 271191 - RNA, 19 nt, Artificial Sequence
  Description of Artificial Sequence: Synthetic oligonucleotide
  Antisense strand to SEQ ID NO: 271190
uguaagaaacagcacagca

SEQ ID NO: 271192 - RNA, 19 nt, Artificial Sequence
  Description of Artificial Sequence: Synthetic oligonucleotide
  Sense strand starting at position 3888 of SEQ ID NO: 3484
uguuucuuacaugagaagu

SEQ ID NO: 271193 - RNA, 19 nt, Artificial Sequence
  Description of Artificial Sequence: Synthetic oligonucleotide
  Antisense strand to SEQ ID NO: 271192
acuucucauguaagaaaca

SEQ ID NO: 271194 - RNA, 19 nt, Artificial Sequence
  Description of Artificial Sequence: Synthetic oligonucleotide
  Sense strand starting at position 3904 of SEQ ID NO: 3484
aguaccaaugagugaauca

SEQ ID NO: 271195 - RNA, 19 nt, Artificial Sequence
  Description of Artificial Sequence: Synthetic oligonucleotide
  Antisense strand to SEQ ID NO: 271194
ugauucacucauugguacu

SEQ ID NO: 271196 - RNA, 19 nt, Artificial Sequence
  Description of Artificial Sequence: Synthetic oligonucleotide
  Sense strand starting at position 161 of SEQ ID NO: 3485
uuguaaauguuacagaagu

SEQ ID NO: 271197 - RNA, 19 nt, Artificial Sequence
  Description of Artificial Sequence: Synthetic oligonucleotide
  Antisense strand to SEQ ID NO: 271196
acuucuguaacauuuacaa

SEQ ID NO: 271198 - RNA, 19 nt, Artificial Sequence
  Description of Artificial Sequence: Synthetic oligonucleotide
  Sense strand starting at position 172 of SEQ ID NO: 3485
acagaaguuucuuuguaaa

SEQ ID NO: 271199 - RNA, 19 nt, Artificial Sequence
  Description of Artificial Sequence: Synthetic oligonucleotide
  Antisense strand to SEQ ID NO: 271198
uuuacaaagaaacuucugu

SEQ ID NO: 271200 - RNA, 19 nt, Artificial Sequence
  Description of Artificial Sequence: Synthetic oligonucleotide
  Sense strand starting at position 233 of SEQ ID NO: 3485
aggguaagggcaugcaauu

SEQ ID NO: 271201 - RNA, 19 nt, Artificial Sequence
  Description of Artificial Sequence: Synthetic oligonucleotide
  Antisense strand to SEQ ID NO: 271200
aauugcaugcccuuacccu

SEQ ID NO: 271202 - RNA, 19 nt, Artificial Sequence
  Description of Artificial Sequence: Synthetic oligonucleotide
  Sense strand starting at position 287 of SEQ ID NO: 3485
acuaaaguuguggaaguuu

SEQ ID NO: 271203 - RNA, 19 nt, Artificial Sequence
  Description of Artificial Sequence: Synthetic oligonucleotide
  Antisense strand to SEQ ID NO: 271202
aaacuuccacaacuuuagu

SEQ ID NO: 271204 - RNA, 19 nt, Artificial Sequence
  Description of Artificial Sequence: Synthetic oligonucleotide
  Sense strand starting at position 296 of SEQ ID NO: 3485
guggaaguuuaauuagguu

SEQ ID NO: 271205 - RNA, 19 nt, Artificial Sequence
  Description of Artificial Sequence: Synthetic oligonucleotide
  Antisense strand to SEQ ID NO: 271204
aaccuaauuaaacuuccac

SEQ ID NO: 271206 - RNA, 19 nt, Artificial Sequence
  Description of Artificial Sequence: Synthetic oligonucleotide
  Sense strand starting at position 308 of SEQ ID NO: 3485
uuagguuacugagaguuac

SEQ ID NO: 271207 - RNA, 19 nt, Artificial Sequence
  Description of Artificial Sequence: Synthetic oligonucleotide
  Antisense strand to SEQ ID NO: 271206
guaacucucaguaaccuaa

SEQ ID NO: 271208 - RNA, 19 nt, Artificial Sequence
  Description of Artificial Sequence: Synthetic oligonucleotide
  Sense strand starting at position 380 of SEQ ID NO: 3485
gcaggaaagaugcauccuu

SEQ ID NO: 271209 - RNA, 19 nt, Artificial Sequence
  Description of Artificial Sequence: Synthetic oligonucleotide
  Antisense strand to SEQ ID NO: 271208
aaggaugcaucuuuccugc

SEQ ID NO: 271210 - RNA, 19 nt, Artificial Sequence
  Description of Artificial Sequence: Synthetic oligonucleotide
  Sense strand starting at position 439 of SEQ ID NO: 3485
ccaguuugucacugaacag

SEQ ID NO: 271211 - RNA, 19 nt, Artificial Sequence
  Description of Artificial Sequence: Synthetic oligonucleotide
  Antisense strand to SEQ ID NO: 271210
cuguucagugacaaacugg

SEQ ID NO: 271212 - RNA, 19 nt, Artificial Sequence
  Description of Artificial Sequence: Synthetic oligonucleotide
  Sense strand starting at position 557 of SEQ ID NO: 3485
cucagacguuaaccagaaa

SEQ ID NO: 271213 - RNA, 19 nt, Artificial Sequence
  Description of Artificial Sequence: Synthetic oligonucleotide
  Antisense strand to SEQ ID NO: 271212
uuucugguuaacgucugag

SEQ ID NO: 271214 - RNA, 19 nt, Artificial Sequence
  Description of Artificial Sequence: Synthetic oligonucleotide
  Sense strand starting at position 686 of SEQ ID NO: 3485
ccauauucccauugcuagu

SEQ ID NO: 271215 - RNA, 19 nt, Artificial Sequence
  Description of Artificial Sequence: Synthetic oligonucleotide
  Antisense strand to SEQ ID NO: 271214
acuagcaaugggaauaugg

SEQ ID NO: 271216 - RNA, 19 nt, Artificial Sequence
  Description of Artificial Sequence: Synthetic oligonucleotide
  Sense strand starting at position 769 of SEQ ID NO: 3485
ggagcaucucggcgaacuu

SEQ ID NO: 271217 - RNA, 19 nt, Artificial Sequence
  Description of Artificial Sequence: Synthetic oligonucleotide
  Antisense strand to SEQ ID NO: 271216
aaguucgccgagaugcucc

SEQ ID NO: 271218 - RNA, 19 nt, Artificial Sequence
  Description of Artificial Sequence: Synthetic oligonucleotide
  Sense strand starting at position 779 of SEQ ID NO: 3485
ggcgaacuucuagaagcaa

SEQ ID NO: 271219 - RNA, 19 nt, Artificial Sequence
  Description of Artificial Sequence: Synthetic oligonucleotide
  Antisense strand to SEQ ID NO: 271218
uugcuucuagaaguucgcc

SEQ ID NO: 271220 - RNA, 19 nt, Artificial Sequence
  Description of Artificial Sequence: Synthetic oligonucleotide
  Sense strand starting at position 1132 of SEQ ID NO: 3485
ggauucaaugcuuaggagu

SEQ ID NO: 271221 - RNA, 19 nt, Artificial Sequence
  Description of Artificial Sequence: Synthetic oligonucleotide
  Antisense strand to SEQ ID NO: 271220
acuccuaagcauugaaucc

SEQ ID NO: 271222 - RNA, 19 nt, Artificial Sequence
  Description of Artificial Sequence: Synthetic oligonucleotide
  Sense strand starting at position 1146 of SEQ ID NO: 3485
ggaguaacauggccagaua

SEQ ID NO: 271223 - RNA, 19 nt, Artificial Sequence
  Description of Artificial Sequence: Synthetic oligonucleotide
  Antisense strand to SEQ ID NO: 271222
uaucuggccauguuacucc

SEQ ID NO: 271224 - RNA, 19 nt, Artificial Sequence
  Description of Artificial Sequence: Synthetic oligonucleotide
  Sense strand starting at position 1380 of SEQ ID NO: 3485
ccugccguacucugggaaa

SEQ ID NO: 271225 - RNA, 19 nt, Artificial Sequence
  Description of Artificial Sequence: Synthetic oligonucleotide
  Antisense strand to SEQ ID NO: 271224
uuucccagaguacggcagg

SEQ ID NO: 271226 - RNA, 19 nt, Artificial Sequence
  Description of Artificial Sequence: Synthetic oligonucleotide
  Sense strand starting at position 1382 of SEQ ID NO: 3485
ugccguacucugggaaaga

SEQ ID NO: 271227 - RNA, 19 nt, Artificial Sequence
  Description of Artificial Sequence: Synthetic oligonucleotide
  Antisense strand to SEQ ID NO: 271226
ucuuucccagaguacggca

SEQ ID NO: 271228 - RNA, 19 nt, Artificial Sequence
  Description of Artificial Sequence: Synthetic oligonucleotide
  Sense strand starting at position 1421 of SEQ ID NO: 3485
ggcucaaguccaggucuuu

SEQ ID NO: 271229 - RNA, 19 nt, Artificial Sequence
  Description of Artificial Sequence: Synthetic oligonucleotide
  Antisense strand to SEQ ID NO: 271228
aaagaccuggacuugagcc

SEQ ID NO: 271230 - RNA, 19 nt, Artificial Sequence
  Description of Artificial Sequence: Synthetic oligonucleotide
  Sense strand starting at position 1782 of SEQ ID NO: 3485
gggucgggcuggucuaaga

SEQ ID NO: 271231 - RNA, 19 nt, Artificial Sequence
  Description of Artificial Sequence: Synthetic oligonucleotide
  Antisense strand to SEQ ID NO: 271230
ucuuagaccagcccgaccc

SEQ ID NO: 271232 - RNA, 19 nt, Artificial Sequence
  Description of Artificial Sequence: Synthetic oligonucleotide
  Sense strand starting at position 1784 of SEQ ID NO: 3485
gucgggcuggucuaagagu

SEQ ID NO: 271233 - RNA, 19 nt, Artificial Sequence
  Description of Artificial Sequence: Synthetic oligonucleotide
  Antisense strand to SEQ ID NO: 271232
acucuuagaccagcccgac

SEQ ID NO: 271234 - RNA, 19 nt, Artificial Sequence
  Description of Artificial Sequence: Synthetic oligonucleotide
  Sense strand starting at position 1897 of SEQ ID NO: 3485
gcagguaucucaccuggau

SEQ ID NO: 271235 - RNA, 19 nt, Artificial Sequence
  Description of Artificial Sequence: Synthetic oligonucleotide
  Antisense strand to SEQ ID NO: 271234
auccaggugagauaccugc

SEQ ID NO: 271236 - RNA, 19 nt, Artificial Sequence
  Description of Artificial Sequence: Synthetic oligonucleotide
  Sense strand starting at position 2050 of SEQ ID NO: 3485
ggacuaagcuagccagagu

SEQ ID NO: 271237 - RNA, 19 nt, Artificial Sequence
  Description of Artificial Sequence: Synthetic oligonucleotide
  Antisense strand to SEQ ID NO: 271236
acucuggcuagcuuagucc

SEQ ID NO: 271238 - RNA, 19 nt, Artificial Sequence
  Description of Artificial Sequence: Synthetic oligonucleotide
  Sense strand starting at position 3103 of SEQ ID NO: 3485
ggaacugcuccgugccuga

SEQ ID NO: 271239 - RNA, 19 nt, Artificial Sequence
  Description of Artificial Sequence: Synthetic oligonucleotide
  Antisense strand to SEQ ID NO: 271238
ucaggcacggagcaguucc

SEQ ID NO: 271240 - RNA, 19 nt, Artificial Sequence
  Description of Artificial Sequence: Synthetic oligonucleotide
  Sense strand starting at position 3456 of SEQ ID NO: 3485
ggagaagggucuucucuug

SEQ ID NO: 271241 - RNA, 19 nt, Artificial Sequence
  Description of Artificial Sequence: Synthetic oligonucleotide
  Antisense strand to SEQ ID NO: 271240
caagagaagacccuucucc

SEQ ID NO: 271242 - RNA, 19 nt, Artificial Sequence
  Description of Artificial Sequence: Synthetic oligonucleotide
  Sense strand starting at position 3462 of SEQ ID NO: 3485
gggucuucucuugaaaucg

SEQ ID NO: 271243 - RNA, 19 nt, Artificial Sequence
  Description of Artificial Sequence: Synthetic oligonucleotide
  Antisense strand to SEQ ID NO: 271242
cgauuucaagagaagaccc

SEQ ID NO: 271244 - RNA, 19 nt, Artificial Sequence
  Description of Artificial Sequence: Synthetic oligonucleotide
  Sense strand starting at position 3520 of SEQ ID NO: 3485
ugaguuacacaaggugaua

SEQ ID NO: 271245 - RNA, 19 nt, Artificial Sequence
  Description of Artificial Sequence: Synthetic oligonucleotide
  Antisense strand to SEQ ID NO: 271244
uaucaccuuguguaacuca

SEQ ID NO: 271246 - RNA, 19 nt, Artificial Sequence
  Description of Artificial Sequence: Synthetic oligonucleotide
  Sense strand starting at position 3637 of SEQ ID NO: 3485
auguuauacguacacaugu

SEQ ID NO: 271247 - RNA, 19 nt, Artificial Sequence
  Description of Artificial Sequence: Synthetic oligonucleotide
  Antisense strand to SEQ ID NO: 271246
acauguguacguauaacau

SEQ ID NO: 271248 - RNA, 19 nt, Artificial Sequence
  Description of Artificial Sequence: Synthetic oligonucleotide
  Sense strand starting at position 3644 of SEQ ID NO: 3485
acguacacauguguuuaua

SEQ ID NO: 271249 - RNA, 19 nt, Artificial Sequence
  Description of Artificial Sequence: Synthetic oligonucleotide
  Antisense strand to SEQ ID NO: 271248
uauaaacacauguguacgu

SEQ ID NO: 271250 - RNA, 19 nt, Artificial Sequence
  Description of Artificial Sequence: Synthetic oligonucleotide
  Sense strand starting at position 3666 of SEQ ID NO: 3485
uucugcauaucuguaggua

SEQ ID NO: 271251 - RNA, 19 nt, Artificial Sequence
  Description of Artificial Sequence: Synthetic oligonucleotide
  Antisense strand to SEQ ID NO: 271250
uaccuacagauaugcagaa

SEQ ID NO: 271252 - RNA, 19 nt, Artificial Sequence
  Description of Artificial Sequence: Synthetic oligonucleotide
  Sense strand starting at position 3670 of SEQ ID NO: 3485
gcauaucuguagguacagu

SEQ ID NO: 271253 - RNA, 19 nt, Artificial Sequence
  Description of Artificial Sequence: Synthetic oligonucleotide
  Antisense strand to SEQ ID NO: 271252
acuguaccuacagauaugc

SEQ ID NO: 271254 - RNA, 19 nt, Artificial Sequence
  Description of Artificial Sequence: Synthetic oligonucleotide
  Sense strand starting at position 3685 of SEQ ID NO: 3485
cagucauauacgugcacgu

SEQ ID NO: 271255 - RNA, 19 nt, Artificial Sequence
  Description of Artificial Sequence: Synthetic oligonucleotide
  Antisense strand to SEQ ID NO: 271254
acgugcacguauaugacug

SEQ ID NO: 271256 - RNA, 19 nt, Artificial Sequence
  Description of Artificial Sequence: Synthetic oligonucleotide
  Sense strand starting at position 3686 of SEQ ID NO: 3485
agucauauacgugcacgua

SEQ ID NO: 271257 - RNA, 19 nt, Artificial Sequence
  Description of Artificial Sequence: Synthetic oligonucleotide
  Antisense strand to SEQ ID NO: 271256
uacgugcacguauaugacu

SEQ ID NO: 271258 - RNA, 19 nt, Artificial Sequence
  Description of Artificial Sequence: Synthetic oligonucleotide
  Sense strand starting at position 3700 of SEQ ID NO: 3485
acguacaguauguguguaa

SEQ ID NO: 271259 - RNA, 19 nt, Artificial Sequence
  Description of Artificial Sequence: Synthetic oligonucleotide
  Antisense strand to SEQ ID NO: 271258
uuacacacauacuguacgu

SEQ ID NO: 271260 - RNA, 19 nt, Artificial Sequence
  Description of Artificial Sequence: Synthetic oligonucleotide
  Sense strand starting at position 3701 of SEQ ID NO: 3485
cguacaguauguguguaaa

SEQ ID NO: 271261 - RNA, 19 nt, Artificial Sequence
  Description of Artificial Sequence: Synthetic oligonucleotide
  Antisense strand to SEQ ID NO: 271260
uuuacacacauacuguacg

SEQ ID NO: 271262 - RNA, 19 nt, Artificial Sequence
  Description of Artificial Sequence: Synthetic oligonucleotide
  Sense strand starting at position 3750 of SEQ ID NO: 3485
ggaaucaguugugucauca

SEQ ID NO: 271263 - RNA, 19 nt, Artificial Sequence
  Description of Artificial Sequence: Synthetic oligonucleotide
  Antisense strand to SEQ ID NO: 271262
ugaugacacaacugauucc

SEQ ID NO: 271264 - RNA, 19 nt, Artificial Sequence
  Description of Artificial Sequence: Synthetic oligonucleotide
  Sense strand starting at position 3754 of SEQ ID NO: 3485
ucaguugugucaucagcuu

SEQ ID NO: 271265 - RNA, 19 nt, Artificial Sequence
  Description of Artificial Sequence: Synthetic oligonucleotide
  Antisense strand to SEQ ID NO: 271264
aagcugaugacacaacuga

SEQ ID NO: 271266 - RNA, 19 nt, Artificial Sequence
  Description of Artificial Sequence: Synthetic oligonucleotide
  Sense strand starting at position 3760 of SEQ ID NO: 3485
gugucaucagcuuaaguac

SEQ ID NO: 271267 - RNA, 19 nt, Artificial Sequence
  Description of Artificial Sequence: Synthetic oligonucleotide
  Antisense strand to SEQ ID NO: 271266
guacuuaagcugaugacac

SEQ ID NO: 271268 - RNA, 19 nt, Artificial Sequence
  Description of Artificial Sequence: Synthetic oligonucleotide
  Sense strand starting at position 3820 of SEQ ID NO: 3485
aagagcagucacugccuua

SEQ ID NO: 271269 - RNA, 19 nt, Artificial Sequence
  Description of Artificial Sequence: Synthetic oligonucleotide
  Antisense strand to SEQ ID NO: 271268
uaaggcagugacugcucuu

SEQ ID NO: 271270 - RNA, 19 nt, Artificial Sequence
  Description of Artificial Sequence: Synthetic oligonucleotide
  Sense strand starting at position 3825 of SEQ ID NO: 3485
cagucacugccuuauguga

SEQ ID NO: 271271 - RNA, 19 nt, Artificial Sequence
  Description of Artificial Sequence: Synthetic oligonucleotide
  Antisense strand to SEQ ID NO: 271270
ucacauaaggcagugacug

SEQ ID NO: 271272 - RNA, 19 nt, Artificial Sequence
  Description of Artificial Sequence: Synthetic oligonucleotide
  Sense strand starting at position 3892 of SEQ ID NO: 3485
gcaggaaggccugacaugu

SEQ ID NO: 271273 - RNA, 19 nt, Artificial Sequence
  Description of Artificial Sequence: Synthetic oligonucleotide
  Antisense strand to SEQ ID NO: 271272
acaugucaggccuuccugc

SEQ ID NO: 271274 - RNA, 19 nt, Artificial Sequence
  Description of Artificial Sequence: Synthetic oligonucleotide
  Sense strand starting at position 3916 of SEQ ID NO: 3485
aguggugacagcugcagaa

SEQ ID NO: 271275 - RNA, 19 nt, Artificial Sequence
  Description of Artificial Sequence: Synthetic oligonucleotide
  Antisense strand to SEQ ID NO: 271274
uucugcagcugucaccacu

SEQ ID NO: 271276 - RNA, 19 nt, Artificial Sequence
  Description of Artificial Sequence: Synthetic oligonucleotide
  Sense strand starting at position 82 of SEQ ID NO: 3486
cucagacguuaaccagaaa

SEQ ID NO: 271277 - RNA, 19 nt, Artificial Sequence
  Description of Artificial Sequence: Synthetic oligonucleotide
  Antisense strand to SEQ ID NO: 271276
uuucugguuaacgucugag

SEQ ID NO: 271278 - RNA, 19 nt, Artificial Sequence
  Description of Artificial Sequence: Synthetic oligonucleotide
  Sense strand starting at position 211 of SEQ ID NO: 3486
ccauauucccauugcuagu

SEQ ID NO: 271279 - RNA, 19 nt, Artificial Sequence
  Description of Artificial Sequence: Synthetic oligonucleotide
  Antisense strand to SEQ ID NO: 271278
acuagcaaugggaauaugg

SEQ ID NO: 271280 - RNA, 19 nt, Artificial Sequence
  Description of Artificial Sequence: Synthetic oligonucleotide
  Sense strand starting at position 294 of SEQ ID NO: 3486
ggagcaucucggcgaacuu

SEQ ID NO: 271281 - RNA, 19 nt, Artificial Sequence
  Description of Artificial Sequence: Synthetic oligonucleotide
  Antisense strand to SEQ ID NO: 271280
aaguucgccgagaugcucc

SEQ ID NO: 271282 - RNA, 19 nt, Artificial Sequence
  Description of Artificial Sequence: Synthetic oligonucleotide
  Sense strand starting at position 304 of SEQ ID NO: 3486
ggcgaacuucuagaagcaa

SEQ ID NO: 271283 - RNA, 19 nt, Artificial Sequence
  Description of Artificial Sequence: Synthetic oligonucleotide
  Antisense strand to SEQ ID NO: 271282
uugcuucuagaaguucgcc

SEQ ID NO: 271284 - RNA, 19 nt, Artificial Sequence
  Description of Artificial Sequence: Synthetic oligonucleotide
  Sense strand starting at position 657 of SEQ ID NO: 3486
ggauucaaugcuuaggagu

SEQ ID NO: 271285 - RNA, 19 nt, Artificial Sequence
  Description of Artificial Sequence: Synthetic oligonucleotide
  Antisense strand to SEQ ID NO: 271284
acuccuaagcauugaaucc

SEQ ID NO: 271286 - RNA, 19 nt, Artificial Sequence
  Description of Artificial Sequence: Synthetic oligonucleotide
  Sense strand starting at position 671 of SEQ ID NO: 3486
ggaguaacauggccagaua

SEQ ID NO: 271287 - RNA, 19 nt, Artificial Sequence
  Description of Artificial Sequence: Synthetic oligonucleotide
  Antisense strand to SEQ ID NO: 271286
uaucuggccauguuacucc

SEQ ID NO: 271288 - RNA, 19 nt, Artificial Sequence
  Description of Artificial Sequence: Synthetic oligonucleotide
  Sense strand starting at position 905 of SEQ ID NO: 3486
ccugccguacucugggaaa

SEQ ID NO: 271289 - RNA, 19 nt, Artificial Sequence
  Description of Artificial Sequence: Synthetic oligonucleotide
  Antisense strand to SEQ ID NO: 271288
uuucccagaguacggcagg

SEQ ID NO: 271290 - RNA, 19 nt, Artificial Sequence
  Description of Artificial Sequence: Synthetic oligonucleotide
  Sense strand starting at position 907 of SEQ ID NO: 3486
ugccguacucugggaaaga

SEQ ID NO: 271291 - RNA, 19 nt, Artificial Sequence
  Description of Artificial Sequence: Synthetic oligonucleotide
  Antisense strand to SEQ ID NO: 271290
ucuuucccagaguacggca

SEQ ID NO: 271292 - RNA, 19 nt, Artificial Sequence
  Description of Artificial Sequence: Synthetic oligonucleotide
  Sense strand starting at position 946 of SEQ ID NO: 3486
ggcucaaguccaggucuuu

SEQ ID NO: 271293 - RNA, 19 nt, Artificial Sequence
  Description of Artificial Sequence: Synthetic oligonucleotide
  Antisense strand to SEQ ID NO: 271292
aaagaccuggacuugagcc

SEQ ID NO: 271294 - RNA, 19 nt, Artificial Sequence
  Description of Artificial Sequence: Synthetic oligonucleotide
  Sense strand starting at position 1307 of SEQ ID NO: 3486
gggucgggcuggucuaaga

SEQ ID NO: 271295 - RNA, 19 nt, Artificial Sequence
  Description of Artificial Sequence: Synthetic oligonucleotide
  Antisense strand to SEQ ID NO: 271294
ucuuagaccagcccgaccc

SEQ ID NO: 271296 - RNA, 19 nt, Artificial Sequence
  Description of Artificial Sequence: Synthetic oligonucleotide
  Sense strand starting at position 1309 of SEQ ID NO: 3486
gucgggcuggucuaagagu

SEQ ID NO: 271297 - RNA, 19 nt, Artificial Sequence
  Description of Artificial Sequence: Synthetic oligonucleotide
  Antisense strand to SEQ ID NO: 271296
acucuuagaccagcccgac

SEQ ID NO: 271298 - RNA, 19 nt, Artificial Sequence
  Description of Artificial Sequence: Synthetic oligonucleotide
  Sense strand starting at position 1422 of SEQ ID NO: 3486
gcagguaucucaccuggau

SEQ ID NO: 271299 - RNA, 19 nt, Artificial Sequence
  Description of Artificial Sequence: Synthetic oligonucleotide
  Antisense strand to SEQ ID NO: 271298
auccaggugagauaccugc

SEQ ID NO: 271300 - RNA, 19 nt, Artificial Sequence
  Description of Artificial Sequence: Synthetic oligonucleotide
  Sense strand starting at position 1575 of SEQ ID NO: 3486
ggacuaagcuagccagagu

SEQ ID NO: 271301 - RNA, 19 nt, Artificial Sequence
  Description of Artificial Sequence: Synthetic oligonucleotide
  Antisense strand to SEQ ID NO: 271300
acucuggcuagcuuagucc

SEQ ID NO: 271302 - RNA, 19 nt, Artificial Sequence
  Description of Artificial Sequence: Synthetic oligonucleotide
  Sense strand starting at position 2628 of SEQ ID NO: 3486
ggaacugcuccgugccuga

SEQ ID NO: 271303 - RNA, 19 nt, Artificial Sequence
  Description of Artificial Sequence: Synthetic oligonucleotide
  Antisense strand to SEQ ID NO: 271302
ucaggcacggagcaguucc

SEQ ID NO: 271304 - RNA, 19 nt, Artificial Sequence
  Description of Artificial Sequence: Synthetic oligonucleotide
  Sense strand starting at position 2981 of SEQ ID NO: 3486
ggagaagggucuucucuug

SEQ ID NO: 271305 - RNA, 19 nt, Artificial Sequence
  Description of Artificial Sequence: Synthetic oligonucleotide
  Antisense strand to SEQ ID NO: 271304
caagagaagacccuucucc

SEQ ID NO: 271306 - RNA, 19 nt, Artificial Sequence
  Description of Artificial Sequence: Synthetic oligonucleotide
  Sense strand starting at position 2987 of SEQ ID NO: 3486
gggucuucucuugaaaucg

SEQ ID NO: 271307 - RNA, 19 nt, Artificial Sequence
  Description of Artificial Sequence: Synthetic oligonucleotide
  Antisense strand to SEQ ID NO: 271306
cgauuucaagagaagaccc

SEQ ID NO: 271308 - RNA, 19 nt, Artificial Sequence
  Description of Artificial Sequence: Synthetic oligonucleotide
  Sense strand starting at position 3045 of SEQ ID NO: 3486
ugaguuacacaaggugaua

SEQ ID NO: 271309 - RNA, 19 nt, Artificial Sequence
  Description of Artificial Sequence: Synthetic oligonucleotide
  Antisense strand to SEQ ID NO: 271308
uaucaccuuguguaacuca

SEQ ID NO: 271310 - RNA, 19 nt, Artificial Sequence
  Description of Artificial Sequence: Synthetic oligonucleotide
  Sense strand starting at position 3162 of SEQ ID NO: 3486
auguuauacguacacaugu

SEQ ID NO: 271311 - RNA, 19 nt, Artificial Sequence
  Description of Artificial Sequence: Synthetic oligonucleotide
  Antisense strand to SEQ ID NO: 271310
acauguguacguauaacau

SEQ ID NO: 271312 - RNA, 19 nt, Artificial Sequence
  Description of Artificial Sequence: Synthetic oligonucleotide
  Sense strand starting at position 3169 of SEQ ID NO: 3486
acguacacauguguuuaua

SEQ ID NO: 271313 - RNA, 19 nt, Artificial Sequence
  Description of Artificial Sequence: Synthetic oligonucleotide
  Antisense strand to SEQ ID NO: 271312
uauaaacacauguguacgu

SEQ ID NO: 271314 - RNA, 19 nt, Artificial Sequence
  Description of Artificial Sequence: Synthetic oligonucleotide
  Sense strand starting at position 3191 of SEQ ID NO: 3486
uucugcauaucuguaggua

SEQ ID NO: 271315 - RNA, 19 nt, Artificial Sequence
  Description of Artificial Sequence: Synthetic oligonucleotide
  Antisense strand to SEQ ID NO: 271314
uaccuacagauaugcagaa

SEQ ID NO: 271316 - RNA, 19 nt, Artificial Sequence
  Description of Artificial Sequence: Synthetic oligonucleotide
  Sense strand starting at position 3195 of SEQ ID NO: 3486
gcauaucuguagguacagu

SEQ ID NO: 271317 - RNA, 19 nt, Artificial Sequence
  Description of Artificial Sequence: Synthetic oligonucleotide
  Antisense strand to SEQ ID NO: 271316
acuguaccuacagauaugc

SEQ ID NO: 271318 - RNA, 19 nt, Artificial Sequence
  Description of Artificial Sequence: Synthetic oligonucleotide
  Sense strand starting at position 3211 of SEQ ID NO: 3486
agucauauacgugcacgua

SEQ ID NO: 271319 - RNA, 19 nt, Artificial Sequence
  Description of Artificial Sequence: Synthetic oligonucleotide
  Antisense strand to SEQ ID NO: 271318
uacgugcacguauaugacu

SEQ ID NO: 271320 - RNA, 19 nt, Artificial Sequence
  Description of Artificial Sequence: Synthetic oligonucleotide
  Sense strand starting at position 3225 of SEQ ID NO: 3486
acguacaguauguguguaa

SEQ ID NO: 271321 - RNA, 19 nt, Artificial Sequence
  Description of Artificial Sequence: Synthetic oligonucleotide
  Antisense strand to SEQ ID NO: 271320
uuacacacauacuguacgu

SEQ ID NO: 271322 - RNA, 19 nt, Artificial Sequence
  Description of Artificial Sequence: Synthetic oligonucleotide
  Sense strand starting at position 3226 of SEQ ID NO: 3486
cguacaguauguguguaaa

SEQ ID NO: 271323 - RNA, 19 nt, Artificial Sequence
  Description of Artificial Sequence: Synthetic oligonucleotide
  Antisense strand to SEQ ID NO: 271322
uuuacacacauacuguacg

SEQ ID NO: 271324 - RNA, 19 nt, Artificial Sequence
  Description of Artificial Sequence: Synthetic oligonucleotide
  Sense strand starting at position 3275 of SEQ ID NO: 3486
ggaaucaguugugucauca

SEQ ID NO: 271325 - RNA, 19 nt, Artificial Sequence
  Description of Artificial Sequence: Synthetic oligonucleotide
  Antisense strand to SEQ ID NO: 271324
ugaugacacaacugauucc

SEQ ID NO: 271326 - RNA, 19 nt, Artificial Sequence
  Description of Artificial Sequence: Synthetic oligonucleotide
  Sense strand starting at position 3279 of SEQ ID NO: 3486
ucaguugugucaucagcuu

SEQ ID NO: 271327 - RNA, 19 nt, Artificial Sequence
  Description of Artificial Sequence: Synthetic oligonucleotide
  Antisense strand to SEQ ID NO: 271326
aagcugaugacacaacuga

SEQ ID NO: 271328 - RNA, 19 nt, Artificial Sequence
  Description of Artificial Sequence: Synthetic oligonucleotide
  Sense strand starting at position 3285 of SEQ ID NO: 3486
gugucaucagcuuaaguac

SEQ ID NO: 271329 - RNA, 19 nt, Artificial Sequence
  Description of Artificial Sequence: Synthetic oligonucleotide
  Antisense strand to SEQ ID NO: 271328
guacuuaagcugaugacac

SEQ ID NO: 271330 - RNA, 19 nt, Artificial Sequence
  Description of Artificial Sequence: Synthetic oligonucleotide
  Sense strand starting at position 3345 of SEQ ID NO: 3486
aagagcagucacugccuua

SEQ ID NO: 271331 - RNA, 19 nt, Artificial Sequence
  Description of Artificial Sequence: Synthetic oligonucleotide
  Antisense strand to SEQ ID NO: 271330
uaaggcagugacugcucuu

SEQ ID NO: 271332 - RNA, 19 nt, Artificial Sequence
  Description of Artificial Sequence: Synthetic oligonucleotide
  Sense strand starting at position 3350 of SEQ ID NO: 3486
cagucacugccuuauguga

SEQ ID NO: 271333 - RNA, 19 nt, Artificial Sequence
  Description of Artificial Sequence: Synthetic oligonucleotide
  Antisense strand to SEQ ID NO: 271332
ucacauaaggcagugacug

SEQ ID NO: 271334 - RNA, 19 nt, Artificial Sequence
  Description of Artificial Sequence: Synthetic oligonucleotide
  Sense strand starting at position 3417 of SEQ ID NO: 3486
gcaggaaggccugacaugu

SEQ ID NO: 271335 - RNA, 19 nt, Artificial Sequence
  Description of Artificial Sequence: Synthetic oligonucleotide
  Antisense strand to SEQ ID NO: 271334
acaugucaggccuuccugc

SEQ ID NO: 271336 - RNA, 19 nt, Artificial Sequence
  Description of Artificial Sequence: Synthetic oligonucleotide
  Sense strand starting at position 3441 of SEQ ID NO: 3486
aguggugacagcugcagaa

SEQ ID NO: 271337 - RNA, 19 nt, Artificial Sequence
  Description of Artificial Sequence: Synthetic oligonucleotide
  Antisense strand to SEQ ID NO: 271336
uucugcagcugucaccacu

SEQ ID NO: 271338 - RNA, 19 nt, Artificial Sequence
  Description of Artificial Sequence: Synthetic oligonucleotide
  Sense strand starting at position 3578 of SEQ ID NO: 3486
ggaggagaguuugaccaaa

SEQ ID NO: 271339 - RNA, 19 nt, Artificial Sequence
  Description of Artificial Sequence: Synthetic oligonucleotide
  Antisense strand to SEQ ID NO: 271338
uuuggucaaacucuccucc

SEQ ID NO: 271340 - RNA, 19 nt, Artificial Sequence
  Description of Artificial Sequence: Synthetic oligonucleotide
  Sense strand starting at position 3705 of SEQ ID NO: 3486
uuuccaugucuugguaaau

SEQ ID NO: 271341 - RNA, 19 nt, Artificial Sequence
  Description of Artificial Sequence: Synthetic oligonucleotide
  Antisense strand to SEQ ID NO: 271340
auuuaccaagacauggaaa

SEQ ID NO: 271342 - RNA, 19 nt, Artificial Sequence
  Description of Artificial Sequence: Synthetic oligonucleotide
  Sense strand starting at position 3706 of SEQ ID NO: 3486
uuccaugucuugguaaaug

SEQ ID NO: 271343 - RNA, 19 nt, Artificial Sequence
  Description of Artificial Sequence: Synthetic oligonucleotide
  Antisense strand to SEQ ID NO: 271342
cauuuaccaagacauggaa

SEQ ID NO: 271344 - RNA, 19 nt, Artificial Sequence
  Description of Artificial Sequence: Synthetic oligonucleotide
  Sense strand starting at position 3711 of SEQ ID NO: 3486
ugucuugguaaaugacaga

SEQ ID NO: 271345 - RNA, 19 nt, Artificial Sequence
  Description of Artificial Sequence: Synthetic oligonucleotide
  Antisense strand to SEQ ID NO: 271344
ucugucauuuaccaagaca

SEQ ID NO: 271346 - RNA, 19 nt, Artificial Sequence
  Description of Artificial Sequence: Synthetic oligonucleotide
  Sense strand starting at position 3714 of SEQ ID NO: 3486
cuugguaaaugacagauau

SEQ ID NO: 271347 - RNA, 19 nt, Artificial Sequence
  Description of Artificial Sequence: Synthetic oligonucleotide
  Antisense strand to SEQ ID NO: 271346
auaucugucauuuaccaag

SEQ ID NO: 271348 - RNA, 19 nt, Artificial Sequence
  Description of Artificial Sequence: Synthetic oligonucleotide
  Sense strand starting at position 3769 of SEQ ID NO: 3486
auguccuguuagucaagga

SEQ ID NO: 271349 - RNA, 19 nt, Artificial Sequence
  Description of Artificial Sequence: Synthetic oligonucleotide
  Antisense strand to SEQ ID NO: 271348
uccuugacuaacaggacau

SEQ ID NO: 271350 - RNA, 19 nt, Artificial Sequence
  Description of Artificial Sequence: Synthetic oligonucleotide
  Sense strand starting at position 3869 of SEQ ID NO: 3486
ucaucaucucuaggcuaga

SEQ ID NO: 271351 - RNA, 19 nt, Artificial Sequence
  Description of Artificial Sequence: Synthetic oligonucleotide
  Antisense strand to SEQ ID NO: 271350
ucuagccuagagaugauga

SEQ ID NO: 271352 - RNA, 19 nt, Artificial Sequence
  Description of Artificial Sequence: Synthetic oligonucleotide
  Sense strand starting at position 3874 of SEQ ID NO: 3486
aucucuaggcuagauugau

SEQ ID NO: 271353 - RNA, 19 nt, Artificial Sequence
  Description of Artificial Sequence: Synthetic oligonucleotide
  Antisense strand to SEQ ID NO: 271352
aucaaucuagccuagagau

SEQ ID NO: 271354 - RNA, 19 nt, Artificial Sequence
  Description of Artificial Sequence: Synthetic oligonucleotide
  Sense strand starting at position 3884 of SEQ ID NO: 3486
uagauugauugucccuguu

SEQ ID NO: 271355 - RNA, 19 nt, Artificial Sequence
  Description of Artificial Sequence: Synthetic oligonucleotide
  Antisense strand to SEQ ID NO: 271354
aacagggacaaucaaucua

SEQ ID NO: 271356 - RNA, 19 nt, Artificial Sequence
  Description of Artificial Sequence: Synthetic oligonucleotide
  Sense strand starting at position 113 of SEQ ID NO: 3487
gggccaucuccacgaucuu

SEQ ID NO: 271357 - RNA, 19 nt, Artificial Sequence
  Description of Artificial Sequence: Synthetic oligonucleotide
  Antisense strand to SEQ ID NO: 271356
aagaucguggagauggccc

SEQ ID NO: 271358 - RNA, 19 nt, Artificial Sequence
  Description of Artificial Sequence: Synthetic oligonucleotide
  Sense strand starting at position 306 of SEQ ID NO: 3487
cuguccuauccucauguua

SEQ ID NO: 271359 - RNA, 19 nt, Artificial Sequence
  Description of Artificial Sequence: Synthetic oligonucleotide
  Antisense strand to SEQ ID NO: 271358
uaacaugaggauaggacag

SEQ ID NO: 271360 - RNA, 19 nt, Artificial Sequence
  Description of Artificial Sequence: Synthetic oligonucleotide
  Sense strand starting at position 338 of SEQ ID NO: 3487
gaaacugcucgacaucgga

SEQ ID NO: 271361 - RNA, 19 nt, Artificial Sequence
  Description of Artificial Sequence: Synthetic oligonucleotide
  Antisense strand to SEQ ID NO: 271360
uccgaugucgagcaguuuc

SEQ ID NO: 271362 - RNA, 19 nt, Artificial Sequence
  Description of Artificial Sequence: Synthetic oligonucleotide
  Sense strand starting at position 403 of SEQ ID NO: 3487
agcaauauagcgcauguaa

SEQ ID NO: 271363 - RNA, 19 nt, Artificial Sequence
  Description of Artificial Sequence: Synthetic oligonucleotide
  Antisense strand to SEQ ID NO: 271362
uuacaugcgcuauauugcu

SEQ ID NO: 271364 - RNA, 19 nt, Artificial Sequence
  Description of Artificial Sequence: Synthetic oligonucleotide
  Sense strand starting at position 412 of SEQ ID NO: 3487
gcgcauguaaucuugugua

SEQ ID NO: 271365 - RNA, 19 nt, Artificial Sequence
  Description of Artificial Sequence: Synthetic oligonucleotide
  Antisense strand to SEQ ID NO: 271364
uacacaagauuacaugcgc

SEQ ID NO: 271366 - RNA, 19 nt, Artificial Sequence
  Description of Artificial Sequence: Synthetic oligonucleotide
  Sense strand starting at position 416 of SEQ ID NO: 3487
auguaaucuuguguaaaga

SEQ ID NO: 271367 - RNA, 19 nt, Artificial Sequence
  Description of Artificial Sequence: Synthetic oligonucleotide
  Antisense strand to SEQ ID NO: 271366
ucuuuacacaagauuacau

SEQ ID NO: 271368 - RNA, 19 nt, Artificial Sequence
  Description of Artificial Sequence: Synthetic oligonucleotide
  Sense strand starting at position 417 of SEQ ID NO: 3487
uguaaucuuguguaaagac

SEQ ID NO: 271369 - RNA, 19 nt, Artificial Sequence
  Description of Artificial Sequence: Synthetic oligonucleotide
  Antisense strand to SEQ ID NO: 271368
gucuuuacacaagauuaca

SEQ ID NO: 271370 - RNA, 19 nt, Artificial Sequence
  Description of Artificial Sequence: Synthetic oligonucleotide
  Sense strand starting at position 530 of SEQ ID NO: 3487
ucuagcuugcucuagaaac

SEQ ID NO: 271371 - RNA, 19 nt, Artificial Sequence
  Description of Artificial Sequence: Synthetic oligonucleotide
  Antisense strand to SEQ ID NO: 271370
guuucuagagcaagcuaga

SEQ ID NO: 271372 - RNA, 19 nt, Artificial Sequence
  Description of Artificial Sequence: Synthetic oligonucleotide
  Sense strand starting at position 622 of SEQ ID NO: 3487
ugggaucucucccuuucua

SEQ ID NO: 271373 - RNA, 19 nt, Artificial Sequence
  Description of Artificial Sequence: Synthetic oligonucleotide
  Antisense strand to SEQ ID NO: 271372
uagaaagggagagauccca

SEQ ID NO: 271374 - RNA, 19 nt, Artificial Sequence
  Description of Artificial Sequence: Synthetic oligonucleotide
  Sense strand starting at position 950 of SEQ ID NO: 3487
ccgggauucccagaaucuu

SEQ ID NO: 271375 - RNA, 19 nt, Artificial Sequence
  Description of Artificial Sequence: Synthetic oligonucleotide
  Antisense strand to SEQ ID NO: 271374
aagauucugggaaucccgg

SEQ ID NO: 271376 - RNA, 19 nt, Artificial Sequence
  Description of Artificial Sequence: Synthetic oligonucleotide
  Sense strand starting at position 1008 of SEQ ID NO: 3487
acuucuagaugcuauuuga

SEQ ID NO: 271377 - RNA, 19 nt, Artificial Sequence
  Description of Artificial Sequence: Synthetic oligonucleotide
  Antisense strand to SEQ ID NO: 271376
ucaaauagcaucuagaagu

SEQ ID NO: 271378 - RNA, 19 nt, Artificial Sequence
  Description of Artificial Sequence: Synthetic oligonucleotide
  Sense strand starting at position 1015 of SEQ ID NO: 3487
gaugcuauuugagauacau

SEQ ID NO: 271379 - RNA, 19 nt, Artificial Sequence
  Description of Artificial Sequence: Synthetic oligonucleotide
  Antisense strand to SEQ ID NO: 271378
auguaucucaaauagcauc

SEQ ID NO: 271380 - RNA, 19 nt, Artificial Sequence
  Description of Artificial Sequence: Synthetic oligonucleotide
  Sense strand starting at position 1870 of SEQ ID NO: 3487
guacgagucugggcaaaug

SEQ ID NO: 271381 - RNA, 19 nt, Artificial Sequence
  Description of Artificial Sequence: Synthetic oligonucleotide
  Antisense strand to SEQ ID NO: 271380
cauuugcccagacucguac

SEQ ID NO: 271382 - RNA, 19 nt, Artificial Sequence
  Description of Artificial Sequence: Synthetic oligonucleotide
  Sense strand starting at position 2214 of SEQ ID NO: 3487
gaagguuggcccgguggaa

SEQ ID NO: 271383 - RNA, 19 nt, Artificial Sequence
  Description of Artificial Sequence: Synthetic oligonucleotide
  Antisense strand to SEQ ID NO: 271382
uuccaccgggccaaccuuc

SEQ ID NO: 271384 - RNA, 19 nt, Artificial Sequence
  Description of Artificial Sequence: Synthetic oligonucleotide
  Sense strand starting at position 2371 of SEQ ID NO: 3487
gucuuucucugaucacucu

SEQ ID NO: 271385 - RNA, 19 nt, Artificial Sequence
  Description of Artificial Sequence: Synthetic oligonucleotide
  Antisense strand to SEQ ID NO: 271384
agagugaucagagaaagac

SEQ ID NO: 271386 - RNA, 19 nt, Artificial Sequence
  Description of Artificial Sequence: Synthetic oligonucleotide
  Sense strand starting at position 2466 of SEQ ID NO: 3487
ugugauuuccugugucucu

SEQ ID NO: 271387 - RNA, 19 nt, Artificial Sequence
  Description of Artificial Sequence: Synthetic oligonucleotide
  Antisense strand to SEQ ID NO: 271386
agagacacaggaaaucaca

SEQ ID NO: 271388 - RNA, 19 nt, Artificial Sequence
  Description of Artificial Sequence: Synthetic oligonucleotide
  Sense strand starting at position 2698 of SEQ ID NO: 3487
uugucuucuccguccgcaa

SEQ ID NO: 271389 - RNA, 19 nt, Artificial Sequence
  Description of Artificial Sequence: Synthetic oligonucleotide
  Antisense strand to SEQ ID NO: 271388
uugcggacggagaagacaa

SEQ ID NO: 271390 - RNA, 19 nt, Artificial Sequence
  Description of Artificial Sequence: Synthetic oligonucleotide
  Sense strand starting at position 2753 of SEQ ID NO: 3487
gcccaagcacucguuaguu

SEQ ID NO: 271391 - RNA, 19 nt, Artificial Sequence
  Description of Artificial Sequence: Synthetic oligonucleotide
  Antisense strand to SEQ ID NO: 271390
aacuaacgagugcuugggc

SEQ ID NO: 271392 - RNA, 19 nt, Artificial Sequence
  Description of Artificial Sequence: Synthetic oligonucleotide
  Sense strand starting at position 2755 of SEQ ID NO: 3487
ccaagcacucguuaguuga

SEQ ID NO: 271393 - RNA, 19 nt, Artificial Sequence
  Description of Artificial Sequence: Synthetic oligonucleotide
  Antisense strand to SEQ ID NO: 271392
ucaacuaacgagugcuugg

SEQ ID NO: 271394 - RNA, 19 nt, Artificial Sequence
  Description of Artificial Sequence: Synthetic oligonucleotide
  Sense strand starting at position 2813 of SEQ ID NO: 3487
cuccucuucuugguguaaa

SEQ ID NO: 271395 - RNA, 19 nt, Artificial Sequence
  Description of Artificial Sequence: Synthetic oligonucleotide
  Antisense strand to SEQ ID NO: 271394
uuuacaccaagaagaggag

SEQ ID NO: 271396 - RNA, 19 nt, Artificial Sequence
  Description of Artificial Sequence: Synthetic oligonucleotide
  Sense strand starting at position 2842 of SEQ ID NO: 3487
gcaagcugcgguucuaaau

SEQ ID NO: 271397 - RNA, 19 nt, Artificial Sequence
  Description of Artificial Sequence: Synthetic oligonucleotide
  Antisense strand to SEQ ID NO: 271396
auuuagaaccgcagcuugc

SEQ ID NO: 271398 - RNA, 19 nt, Artificial Sequence
  Description of Artificial Sequence: Synthetic oligonucleotide
  Sense strand starting at position 2876 of SEQ ID NO: 3487
cccgaugcgucgacagaga

SEQ ID NO: 271399 - RNA, 19 nt, Artificial Sequence
  Description of Artificial Sequence: Synthetic oligonucleotide
  Antisense strand to SEQ ID NO: 271398
ucucugucgacgcaucggg

SEQ ID NO: 271400 - RNA, 19 nt, Artificial Sequence
  Description of Artificial Sequence: Synthetic oligonucleotide
  Sense strand starting at position 2878 of SEQ ID NO: 3487
cgaugcgucgacagagaug

SEQ ID NO: 271401 - RNA, 19 nt, Artificial Sequence
  Description of Artificial Sequence: Synthetic oligonucleotide
  Antisense strand to SEQ ID NO: 271400
caucucugucgacgcaucg

SEQ ID NO: 271402 - RNA, 19 nt, Artificial Sequence
  Description of Artificial Sequence: Synthetic oligonucleotide
  Sense strand starting at position 2890 of SEQ ID NO: 3487
agagaugugucuguauguu

SEQ ID NO: 271403 - RNA, 19 nt, Artificial Sequence
  Description of Artificial Sequence: Synthetic oligonucleotide
  Antisense strand to SEQ ID NO: 271402
aacauacagacacaucucu

SEQ ID NO: 271404 - RNA, 19 nt, Artificial Sequence
  Description of Artificial Sequence: Synthetic oligonucleotide
  Sense strand starting at position 2894 of SEQ ID NO: 3487
augugucuguauguuaaag

SEQ ID NO: 271405 - RNA, 19 nt, Artificial Sequence
  Description of Artificial Sequence: Synthetic oligonucleotide
  Antisense strand to SEQ ID NO: 271404
cuuuaacauacagacacau

SEQ ID NO: 271406 - RNA, 19 nt, Artificial Sequence
  Description of Artificial Sequence: Synthetic oligonucleotide
  Sense strand starting at position 2938 of SEQ ID NO: 3487
ucaggaauuuauuauggca

SEQ ID NO: 271407 - RNA, 19 nt, Artificial Sequence
  Description of Artificial Sequence: Synthetic oligonucleotide
  Antisense strand to SEQ ID NO: 271406
ugccauaauaaauuccuga

SEQ ID NO: 271408 - RNA, 19 nt, Artificial Sequence
  Description of Artificial Sequence: Synthetic oligonucleotide
  Sense strand starting at position 2940 of SEQ ID NO: 3487
aggaauuuauuauggcauu

SEQ ID NO: 271409 - RNA, 19 nt, Artificial Sequence
  Description of Artificial Sequence: Synthetic oligonucleotide
  Antisense strand to SEQ ID NO: 271408
aaugccauaauaaauuccu

SEQ ID NO: 271410 - RNA, 19 nt, Artificial Sequence
  Description of Artificial Sequence: Synthetic oligonucleotide
  Sense strand starting at position 3023 of SEQ ID NO: 3487
aggauaugacgccaggagu

SEQ ID NO: 271411 - RNA, 19 nt, Artificial Sequence
  Description of Artificial Sequence: Synthetic oligonucleotide
  Antisense strand to SEQ ID NO: 271410
acuccuggcgucauauccu

SEQ ID NO: 271412 - RNA, 19 nt, Artificial Sequence
  Description of Artificial Sequence: Synthetic oligonucleotide
  Sense strand starting at position 3048 of SEQ ID NO: 3487
aagacugucuguccuuaga

SEQ ID NO: 271413 - RNA, 19 nt, Artificial Sequence
  Description of Artificial Sequence: Synthetic oligonucleotide
  Antisense strand to SEQ ID NO: 271412
ucuaaggacagacagucuu

SEQ ID NO: 271414 - RNA, 19 nt, Artificial Sequence
  Description of Artificial Sequence: Synthetic oligonucleotide
  Sense strand starting at position 3050 of SEQ ID NO: 3487
gacugucuguccuuagaga

SEQ ID NO: 271415 - RNA, 19 nt, Artificial Sequence
  Description of Artificial Sequence: Synthetic oligonucleotide
  Antisense strand to SEQ ID NO: 271414
ucucuaaggacagacaguc

SEQ ID NO: 271416 - RNA, 19 nt, Artificial Sequence
  Description of Artificial Sequence: Synthetic oligonucleotide
  Sense strand starting at position 3051 of SEQ ID NO: 3487
acugucuguccuuagagaa

SEQ ID NO: 271417 - RNA, 19 nt, Artificial Sequence
  Description of Artificial Sequence: Synthetic oligonucleotide
  Antisense strand to SEQ ID NO: 271416
uucucuaaggacagacagu

SEQ ID NO: 271418 - RNA, 19 nt, Artificial Sequence
  Description of Artificial Sequence: Synthetic oligonucleotide
  Sense strand starting at position 3212 of SEQ ID NO: 3487
cgagguauucagggccuua

SEQ ID NO: 271419 - RNA, 19 nt, Artificial Sequence
  Description of Artificial Sequence: Synthetic oligonucleotide
  Antisense strand to SEQ ID NO: 271418
uaaggcccugaauaccucg

SEQ ID NO: 271420 - RNA, 19 nt, Artificial Sequence
  Description of Artificial Sequence: Synthetic oligonucleotide
  Sense strand starting at position 3244 of SEQ ID NO: 3487
augagaaucgggcagguuu

SEQ ID NO: 271421 - RNA, 19 nt, Artificial Sequence
  Description of Artificial Sequence: Synthetic oligonucleotide
  Antisense strand to SEQ ID NO: 271420
aaaccugcccgauucucau

SEQ ID NO: 271422 - RNA, 19 nt, Artificial Sequence
  Description of Artificial Sequence: Synthetic oligonucleotide
  Sense strand starting at position 3349 of SEQ ID NO: 3487
gagggaguucuccacuccu

SEQ ID NO: 271423 - RNA, 19 nt, Artificial Sequence
  Description of Artificial Sequence: Synthetic oligonucleotide
  Antisense strand to SEQ ID NO: 271422
aggaguggagaacucccuc

SEQ ID NO: 271424 - RNA, 19 nt, Artificial Sequence
  Description of Artificial Sequence: Synthetic oligonucleotide
  Sense strand starting at position 3606 of SEQ ID NO: 3487
ggagacaggucucaggaga

SEQ ID NO: 271425 - RNA, 19 nt, Artificial Sequence
  Description of Artificial Sequence: Synthetic oligonucleotide
  Antisense strand to SEQ ID NO: 271424
ucuccugagaccugucucc

SEQ ID NO: 271426 - RNA, 19 nt, Artificial Sequence
  Description of Artificial Sequence: Synthetic oligonucleotide
  Sense strand starting at position 3617 of SEQ ID NO: 3487
ucaggagacucccagaaau

SEQ ID NO: 271427 - RNA, 19 nt, Artificial Sequence
  Description of Artificial Sequence: Synthetic oligonucleotide
  Antisense strand to SEQ ID NO: 271426
auuucugggagucuccuga

SEQ ID NO: 271428 - RNA, 19 nt, Artificial Sequence
  Description of Artificial Sequence: Synthetic oligonucleotide
  Sense strand starting at position 3775 of SEQ ID NO: 3487
acuucucagcgauagcauu

SEQ ID NO: 271429 - RNA, 19 nt, Artificial Sequence
  Description of Artificial Sequence: Synthetic oligonucleotide
  Antisense strand to SEQ ID NO: 271428
aaugcuaucgcugagaagu

SEQ ID NO: 271430 - RNA, 19 nt, Artificial Sequence
  Description of Artificial Sequence: Synthetic oligonucleotide
  Sense strand starting at position 3869 of SEQ ID NO: 3487
gcgguaauugcugugugaa

SEQ ID NO: 271431 - RNA, 19 nt, Artificial Sequence
  Description of Artificial Sequence: Synthetic oligonucleotide
  Antisense strand to SEQ ID NO: 271430
uucacacagcaauuaccgc

SEQ ID NO: 271432 - RNA, 19 nt, Artificial Sequence
  Description of Artificial Sequence: Synthetic oligonucleotide
  Sense strand starting at position 3872 of SEQ ID NO: 3487
guaauugcugugugaagga

SEQ ID NO: 271433 - RNA, 19 nt, Artificial Sequence
  Description of Artificial Sequence: Synthetic oligonucleotide
  Antisense strand to SEQ ID NO: 271432
uccuucacacagcaauuac

SEQ ID NO: 271434 - RNA, 19 nt, Artificial Sequence
  Description of Artificial Sequence: Synthetic oligonucleotide
  Sense strand starting at position 3890 of SEQ ID NO: 3487
agguaccagaaguguaauu

SEQ ID NO: 271435 - RNA, 19 nt, Artificial Sequence
  Description of Artificial Sequence: Synthetic oligonucleotide
  Antisense strand to SEQ ID NO: 271434
aauuacacuucugguaccu

SEQ ID NO: 271436 - RNA, 19 nt, Artificial Sequence
  Description of Artificial Sequence: Synthetic oligonucleotide
  Sense strand starting at position 13 of SEQ ID NO: 3488
uggcgaugucugguaucgu

SEQ ID NO: 271437 - RNA, 19 nt, Artificial Sequence
  Description of Artificial Sequence: Synthetic oligonucleotide
  Antisense strand to SEQ ID NO: 271436
acgauaccagacaucgcca

SEQ ID NO: 271438 - RNA, 19 nt, Artificial Sequence
  Description of Artificial Sequence: Synthetic oligonucleotide
  Sense strand starting at position 64 of SEQ ID NO: 3488
accugauccugaccuuaga

SEQ ID NO: 271439 - RNA, 19 nt, Artificial Sequence
  Description of Artificial Sequence: Synthetic oligonucleotide
  Antisense strand to SEQ ID NO: 271438
ucuaaggucaggaucaggu

SEQ ID NO: 271440 - RNA, 19 nt, Artificial Sequence
  Description of Artificial Sequence: Synthetic oligonucleotide
  Sense strand starting at position 509 of SEQ ID NO: 3488
gacaucauauucgcggaga

SEQ ID NO: 271441 - RNA, 19 nt, Artificial Sequence
  Description of Artificial Sequence: Synthetic oligonucleotide
  Antisense strand to SEQ ID NO: 271440
ucuccgcgaauaugauguc

SEQ ID NO: 271442 - RNA, 19 nt, Artificial Sequence
  Description of Artificial Sequence: Synthetic oligonucleotide
  Sense strand starting at position 511 of SEQ ID NO: 3488
caucauauucgcggagaau

SEQ ID NO: 271443 - RNA, 19 nt, Artificial Sequence
  Description of Artificial Sequence: Synthetic oligonucleotide
  Antisense strand to SEQ ID NO: 271442
auucuccgcgaauaugaug

SEQ ID NO: 271444 - RNA, 19 nt, Artificial Sequence
  Description of Artificial Sequence: Synthetic oligonucleotide
  Sense strand starting at position 512 of SEQ ID NO: 3488
aucauauucgcggagaauu

SEQ ID NO: 271445 - RNA, 19 nt, Artificial Sequence
  Description of Artificial Sequence: Synthetic oligonucleotide
  Antisense strand to SEQ ID NO: 271444
aauucuccgcgaauaugau

SEQ ID NO: 271446 - RNA, 19 nt, Artificial Sequence
  Description of Artificial Sequence: Synthetic oligonucleotide
  Sense strand starting at position 564 of SEQ ID NO: 3488
ggcccaaaucgauagcgau

SEQ ID NO: 271447 - RNA, 19 nt, Artificial Sequence
  Description of Artificial Sequence: Synthetic oligonucleotide
  Antisense strand to SEQ ID NO: 271446
aucgcuaucgauuugggcc

SEQ ID NO: 271448 - RNA, 19 nt, Artificial Sequence
  Description of Artificial Sequence: Synthetic oligonucleotide
  Sense strand starting at position 1360 of SEQ ID NO: 3488
ugacgcucucgagauccaa

SEQ ID NO: 271449 - RNA, 19 nt, Artificial Sequence
  Description of Artificial Sequence: Synthetic oligonucleotide
  Antisense strand to SEQ ID NO: 271448
uuggaucucgagagcguca

SEQ ID NO: 271450 - RNA, 19 nt, Artificial Sequence
  Description of Artificial Sequence: Synthetic oligonucleotide
  Sense strand starting at position 1439 of SEQ ID NO: 3488
gcguucuuaccagaucuga

SEQ ID NO: 271451 - RNA, 19 nt, Artificial Sequence
  Description of Artificial Sequence: Synthetic oligonucleotide
  Antisense strand to SEQ ID NO: 271450
ucagaucugguaagaacgc

SEQ ID NO: 271452 - RNA, 19 nt, Artificial Sequence
  Description of Artificial Sequence: Synthetic oligonucleotide
  Sense strand starting at position 1705 of SEQ ID NO: 3488
acaggcuucccgggaggau

SEQ ID NO: 271453 - RNA, 19 nt, Artificial Sequence
  Description of Artificial Sequence: Synthetic oligonucleotide
  Antisense strand to SEQ ID NO: 271452
auccucccgggaagccugu

SEQ ID NO: 271454 - RNA, 19 nt, Artificial Sequence
  Description of Artificial Sequence: Synthetic oligonucleotide
  Sense strand starting at position 1780 of SEQ ID NO: 3488
uccgcugucccagucuuau

SEQ ID NO: 271455 - RNA, 19 nt, Artificial Sequence
  Description of Artificial Sequence: Synthetic oligonucleotide
  Antisense strand to SEQ ID NO: 271454
auaagacugggacagcgga

SEQ ID NO: 271456 - RNA, 19 nt, Artificial Sequence
  Description of Artificial Sequence: Synthetic oligonucleotide
  Sense strand starting at position 1987 of SEQ ID NO: 3488
ugaaguuuguucccaucca

SEQ ID NO: 271457 - RNA, 19 nt, Artificial Sequence
  Description of Artificial Sequence: Synthetic oligonucleotide
  Antisense strand to SEQ ID NO: 271456
uggaugggaacaaacuuca

SEQ ID NO: 271458 - RNA, 19 nt, Artificial Sequence
  Description of Artificial Sequence: Synthetic oligonucleotide
  Sense strand starting at position 2218 of SEQ ID NO: 3488
cucagcaggccuggaaaua

SEQ ID NO: 271459 - RNA, 19 nt, Artificial Sequence
  Description of Artificial Sequence: Synthetic oligonucleotide
  Antisense strand to SEQ ID NO: 271458
uauuuccaggccugcugag

SEQ ID NO: 271460 - RNA, 19 nt, Artificial Sequence
  Description of Artificial Sequence: Synthetic oligonucleotide
  Sense strand starting at position 2229 of SEQ ID NO: 3488
uggaaauauuggaggagug

SEQ ID NO: 271461 - RNA, 19 nt, Artificial Sequence
  Description of Artificial Sequence: Synthetic oligonucleotide
  Antisense strand to SEQ ID NO: 271460
cacuccuccaauauuucca

SEQ ID NO: 271462 - RNA, 19 nt, Artificial Sequence
  Description of Artificial Sequence: Synthetic oligonucleotide
  Sense strand starting at position 2320 of SEQ ID NO: 3488
agggauggucucuguagga

SEQ ID NO: 271463 - RNA, 19 nt, Artificial Sequence
  Description of Artificial Sequence: Synthetic oligonucleotide
  Antisense strand to SEQ ID NO: 271462
uccuacagagaccaucccu

SEQ ID NO: 271464 - RNA, 19 nt, Artificial Sequence
  Description of Artificial Sequence: Synthetic oligonucleotide
  Sense strand starting at position 2363 of SEQ ID NO: 3488
cugguuugcucaccaggaa

SEQ ID NO: 271465 - RNA, 19 nt, Artificial Sequence
  Description of Artificial Sequence: Synthetic oligonucleotide
  Antisense strand to SEQ ID NO: 271464
uuccuggugagcaaaccag

SEQ ID NO: 271466 - RNA, 19 nt, Artificial Sequence
  Description of Artificial Sequence: Synthetic oligonucleotide
  Sense strand starting at position 2425 of SEQ ID NO: 3488
augccugauucuuuaggua

SEQ ID NO: 271467 - RNA, 19 nt, Artificial Sequence
  Description of Artificial Sequence: Synthetic oligonucleotide
  Antisense strand to SEQ ID NO: 271466
uaccuaaagaaucaggcau

SEQ ID NO: 271468 - RNA, 19 nt, Artificial Sequence
  Description of Artificial Sequence: Synthetic oligonucleotide
  Sense strand starting at position 2541 of SEQ ID NO: 3488
cccucuguucuacacagau

SEQ ID NO: 271469 - RNA, 19 nt, Artificial Sequence
  Description of Artificial Sequence: Synthetic oligonucleotide
  Antisense strand to SEQ ID NO: 271468
aucuguguagaacagaggg

SEQ ID NO: 271470 - RNA, 19 nt, Artificial Sequence
  Description of Artificial Sequence: Synthetic oligonucleotide
  Sense strand starting at position 2627 of SEQ ID NO: 3488
gccucucuccucuggaaca

SEQ ID NO: 271471 - RNA, 19 nt, Artificial Sequence
  Description of Artificial Sequence: Synthetic oligonucleotide
  Antisense strand to SEQ ID NO: 271470
uguuccagaggagagaggc

SEQ ID NO: 271472 - RNA, 19 nt, Artificial Sequence
  Description of Artificial Sequence: Synthetic oligonucleotide
  Sense strand starting at position 2666 of SEQ ID NO: 3488
cuuucuugcuccuugagga

SEQ ID NO: 271473 - RNA, 19 nt, Artificial Sequence
  Description of Artificial Sequence: Synthetic oligonucleotide
  Antisense strand to SEQ ID NO: 271472
uccucaaggagcaagaaag

SEQ ID NO: 271474 - RNA, 19 nt, Artificial Sequence
  Description of Artificial Sequence: Synthetic oligonucleotide
  Sense strand starting at position 2667 of SEQ ID NO: 3488
uuucuugcuccuugaggau

SEQ ID NO: 271475 - RNA, 19 nt, Artificial Sequence
  Description of Artificial Sequence: Synthetic oligonucleotide
  Antisense strand to SEQ ID NO: 271474
auccucaaggagcaagaaa

SEQ ID NO: 271476 - RNA, 19 nt, Artificial Sequence
  Description of Artificial Sequence: Synthetic oligonucleotide
  Sense strand starting at position 2785 of SEQ ID NO: 3488
uggccuggucuguaggaau

SEQ ID NO: 271477 - RNA, 19 nt, Artificial Sequence
  Description of Artificial Sequence: Synthetic oligonucleotide
  Antisense strand to SEQ ID NO: 271476
auuccuacagaccaggcca

SEQ ID NO: 271478 - RNA, 19 nt, Artificial Sequence
  Description of Artificial Sequence: Synthetic oligonucleotide
  Sense strand starting at position 2909 of SEQ ID NO: 3488
accucuuuaccuuagugau

SEQ ID NO: 271479 - RNA, 19 nt, Artificial Sequence
  Description of Artificial Sequence: Synthetic oligonucleotide
  Antisense strand to SEQ ID NO: 271478
aucacuaagguaaagaggu

SEQ ID NO: 271480 - RNA, 19 nt, Artificial Sequence
  Description of Artificial Sequence: Synthetic oligonucleotide
  Sense strand starting at position 2985 of SEQ ID NO: 3488
guaagauugugagugggua

SEQ ID NO: 271481 - RNA, 19 nt, Artificial Sequence
  Description of Artificial Sequence: Synthetic oligonucleotide
  Antisense strand to SEQ ID NO: 271480
uacccacucacaaucuuac

SEQ ID NO: 271482 - RNA, 19 nt, Artificial Sequence
  Description of Artificial Sequence: Synthetic oligonucleotide
  Sense strand starting at position 2986 of SEQ ID NO: 3488
uaagauugugaguggguau

SEQ ID NO: 271483 - RNA, 19 nt, Artificial Sequence
  Description of Artificial Sequence: Synthetic oligonucleotide
  Antisense strand to SEQ ID NO: 271482
auacccacucacaaucuua

SEQ ID NO: 271484 - RNA, 19 nt, Artificial Sequence
  Description of Artificial Sequence: Synthetic oligonucleotide
  Sense strand starting at position 2997 of SEQ ID NO: 3488
guggguaugagugagcaaa

SEQ ID NO: 271485 - RNA, 19 nt, Artificial Sequence
  Description of Artificial Sequence: Synthetic oligonucleotide
  Antisense strand to SEQ ID NO: 271484
uuugcucacucauacccac

SEQ ID NO: 271486 - RNA, 19 nt, Artificial Sequence
  Description of Artificial Sequence: Synthetic oligonucleotide
  Sense strand starting at position 2999 of SEQ ID NO: 3488
ggguaugagugagcaaaug

SEQ ID NO: 271487 - RNA, 19 nt, Artificial Sequence
  Description of Artificial Sequence: Synthetic oligonucleotide
  Antisense strand to SEQ ID NO: 271486
cauuugcucacucauaccc

SEQ ID NO: 271488 - RNA, 19 nt, Artificial Sequence
  Description of Artificial Sequence: Synthetic oligonucleotide
  Sense strand starting at position 3007 of SEQ ID NO: 3488
gugagcaaauguccuggaa

SEQ ID NO: 271489 - RNA, 19 nt, Artificial Sequence
  Description of Artificial Sequence: Synthetic oligonucleotide
  Antisense strand to SEQ ID NO: 271488
uuccaggacauuugcucac

SEQ ID NO: 271490 - RNA, 19 nt, Artificial Sequence
  Description of Artificial Sequence: Synthetic oligonucleotide
  Sense strand starting at position 3010 of SEQ ID NO: 3488
agcaaauguccuggaacac

SEQ ID NO: 271491 - RNA, 19 nt, Artificial Sequence
  Description of Artificial Sequence: Synthetic oligonucleotide
  Antisense strand to SEQ ID NO: 271490
guguuccaggacauuugcu

SEQ ID NO: 271492 - RNA, 19 nt, Artificial Sequence
  Description of Artificial Sequence: Synthetic oligonucleotide
  Sense strand starting at position 3011 of SEQ ID NO: 3488
gcaaauguccuggaacacu

SEQ ID NO: 271493 - RNA, 19 nt, Artificial Sequence
  Description of Artificial Sequence: Synthetic oligonucleotide
  Antisense strand to SEQ ID NO: 271492
aguguuccaggacauuugc

SEQ ID NO: 271494 - RNA, 19 nt, Artificial Sequence
  Description of Artificial Sequence: Synthetic oligonucleotide
  Sense strand starting at position 3373 of SEQ ID NO: 3488
uuucucaauuuaggagaaa

SEQ ID NO: 271495 - RNA, 19 nt, Artificial Sequence
  Description of Artificial Sequence: Synthetic oligonucleotide
  Antisense strand to SEQ ID NO: 271494
uuucuccuaaauugagaaa

SEQ ID NO: 271496 - RNA, 19 nt, Artificial Sequence
  Description of Artificial Sequence: Synthetic oligonucleotide
  Sense strand starting at position 3374 of SEQ ID NO: 3488
uucucaauuuaggagaaau

SEQ ID NO: 271497 - RNA, 19 nt, Artificial Sequence
  Description of Artificial Sequence: Synthetic oligonucleotide
  Antisense strand to SEQ ID NO: 271496
auuucuccuaaauugagaa

SEQ ID NO: 271498 - RNA, 19 nt, Artificial Sequence
  Description of Artificial Sequence: Synthetic oligonucleotide
  Sense strand starting at position 3419 of SEQ ID NO: 3488
gaagauguguaucccuaca

SEQ ID NO: 271499 - RNA, 19 nt, Artificial Sequence
  Description of Artificial Sequence: Synthetic oligonucleotide
  Antisense strand to SEQ ID NO: 271498
uguagggauacacaucuuc

SEQ ID NO: 271500 - RNA, 19 nt, Artificial Sequence
  Description of Artificial Sequence: Synthetic oligonucleotide
  Sense strand starting at position 3421 of SEQ ID NO: 3488
agauguguaucccuacaug

SEQ ID NO: 271501 - RNA, 19 nt, Artificial Sequence
  Description of Artificial Sequence: Synthetic oligonucleotide
  Antisense strand to SEQ ID NO: 271500
cauguagggauacacaucu

SEQ ID NO: 271502 - RNA, 19 nt, Artificial Sequence
  Description of Artificial Sequence: Synthetic oligonucleotide
  Sense strand starting at position 3522 of SEQ ID NO: 3488
uuuaaauaucucugugguu

SEQ ID NO: 271503 - RNA, 19 nt, Artificial Sequence
  Description of Artificial Sequence: Synthetic oligonucleotide
  Antisense strand to SEQ ID NO: 271502
aaccacagagauauuuaaa

SEQ ID NO: 271504 - RNA, 19 nt, Artificial Sequence
  Description of Artificial Sequence: Synthetic oligonucleotide
  Sense strand starting at position 3523 of SEQ ID NO: 3488
uuaaauaucucugugguuu

SEQ ID NO: 271505 - RNA, 19 nt, Artificial Sequence
  Description of Artificial Sequence: Synthetic oligonucleotide
  Antisense strand to SEQ ID NO: 271504
aaaccacagagauauuuaa

SEQ ID NO: 271506 - RNA, 19 nt, Artificial Sequence
  Description of Artificial Sequence: Synthetic oligonucleotide
  Sense strand starting at position 3587 of SEQ ID NO: 3488
gagacaauccaaggguguu

SEQ ID NO: 271507 - RNA, 19 nt, Artificial Sequence
  Description of Artificial Sequence: Synthetic oligonucleotide
  Antisense strand to SEQ ID NO: 271506
aacacccuuggauugucuc

SEQ ID NO: 271508 - RNA, 19 nt, Artificial Sequence
  Description of Artificial Sequence: Synthetic oligonucleotide
  Sense strand starting at position 3598 of SEQ ID NO: 3488
aggguguugggauggaaau

SEQ ID NO: 271509 - RNA, 19 nt, Artificial Sequence
  Description of Artificial Sequence: Synthetic oligonucleotide
  Antisense strand to SEQ ID NO: 271508
auuuccaucccaacacccu

SEQ ID NO: 271510 - RNA, 19 nt, Artificial Sequence
  Description of Artificial Sequence: Synthetic oligonucleotide
  Sense strand starting at position 3754 of SEQ ID NO: 3488
ggcaaugcuccagggugaa

SEQ ID NO: 271511 - RNA, 19 nt, Artificial Sequence
  Description of Artificial Sequence: Synthetic oligonucleotide
  Antisense strand to SEQ ID NO: 271510
uucacccuggagcauugcc

SEQ ID NO: 271512 - RNA, 19 nt, Artificial Sequence
  Description of Artificial Sequence: Synthetic oligonucleotide
  Sense strand starting at position 3830 of SEQ ID NO: 3488
agguucugauacguaccaa

SEQ ID NO: 271513 - RNA, 19 nt, Artificial Sequence
  Description of Artificial Sequence: Synthetic oligonucleotide
  Antisense strand to SEQ ID NO: 271512
uugguacguaucagaaccu

SEQ ID NO: 271514 - RNA, 19 nt, Artificial Sequence
  Description of Artificial Sequence: Synthetic oligonucleotide
  Sense strand starting at position 3831 of SEQ ID NO: 3488
gguucugauacguaccaau

SEQ ID NO: 271515 - RNA, 19 nt, Artificial Sequence
  Description of Artificial Sequence: Synthetic oligonucleotide
  Antisense strand to SEQ ID NO: 271514
auugguacguaucagaacc

SEQ ID NO: 271516 - RNA, 19 nt, Artificial Sequence
  Description of Artificial Sequence: Synthetic oligonucleotide
  Sense strand starting at position 7 of SEQ ID NO: 3489
ccuuguuucuaccagagaa

SEQ ID NO: 271517 - RNA, 19 nt, Artificial Sequence
  Description of Artificial Sequence: Synthetic oligonucleotide
  Antisense strand to SEQ ID NO: 271516
uucucugguagaaacaagg

SEQ ID NO: 271518 - RNA, 19 nt, Artificial Sequence
  Description of Artificial Sequence: Synthetic oligonucleotide
  Sense strand starting at position 55 of SEQ ID NO: 3489
accucucugucccuggaaa

SEQ ID NO: 271519 - RNA, 19 nt, Artificial Sequence
  Description of Artificial Sequence: Synthetic oligonucleotide
  Antisense strand to SEQ ID NO: 271518
uuuccagggacagagaggu

SEQ ID NO: 271520 - RNA, 19 nt, Artificial Sequence
  Description of Artificial Sequence: Synthetic oligonucleotide
  Sense strand starting at position 57 of SEQ ID NO: 3489
cucucugucccuggaaaca

SEQ ID NO: 271521 - RNA, 19 nt, Artificial Sequence
  Description of Artificial Sequence: Synthetic oligonucleotide
  Antisense strand to SEQ ID NO: 271520
uguuuccagggacagagag

SEQ ID NO: 271522 - RNA, 19 nt, Artificial Sequence
  Description of Artificial Sequence: Synthetic oligonucleotide
  Sense strand starting at position 67 of SEQ ID NO: 3489
cuggaaacaucccaaagca

SEQ ID NO: 271523 - RNA, 19 nt, Artificial Sequence
  Description of Artificial Sequence: Synthetic oligonucleotide
  Antisense strand to SEQ ID NO: 271522
ugcuuugggauguuuccag

SEQ ID NO: 271524 - RNA, 19 nt, Artificial Sequence
  Description of Artificial Sequence: Synthetic oligonucleotide
  Sense strand starting at position 126 of SEQ ID NO: 3489
auggaaucuuaccgauaag

SEQ ID NO: 271525 - RNA, 19 nt, Artificial Sequence
  Description of Artificial Sequence: Synthetic oligonucleotide
  Antisense strand to SEQ ID NO: 271524
cuuaucgguaagauuccau

SEQ ID NO: 271526 - RNA, 19 nt, Artificial Sequence
  Description of Artificial Sequence: Synthetic oligonucleotide
  Sense strand starting at position 145 of SEQ ID NO: 3489
gugagaagagcuugagaga

SEQ ID NO: 271527 - RNA, 19 nt, Artificial Sequence
  Description of Artificial Sequence: Synthetic oligonucleotide
  Antisense strand to SEQ ID NO: 271526
ucucucaagcucuucucac

SEQ ID NO: 271528 - RNA, 19 nt, Artificial Sequence
  Description of Artificial Sequence: Synthetic oligonucleotide
  Sense strand starting at position 148 of SEQ ID NO: 3489
agaagagcuugagagaaua

SEQ ID NO: 271529 - RNA, 19 nt, Artificial Sequence
  Description of Artificial Sequence: Synthetic oligonucleotide
  Antisense strand to SEQ ID NO: 271528
uauucucucaagcucuucu

SEQ ID NO: 271530 - RNA, 19 nt, Artificial Sequence
  Description of Artificial Sequence: Synthetic oligonucleotide
  Sense strand starting at position 1985 of SEQ ID NO: 3489
gcgggaagcccgcuuucaa

SEQ ID NO: 271531 - RNA, 19 nt, Artificial Sequence
  Description of Artificial Sequence: Synthetic oligonucleotide
  Antisense strand to SEQ ID NO: 271530
uugaaagcgggcuucccgc

SEQ ID NO: 271532 - RNA, 19 nt, Artificial Sequence
  Description of Artificial Sequence: Synthetic oligonucleotide
  Sense strand starting at position 2172 of SEQ ID NO: 3489
cugugaguccggcaaaguu

SEQ ID NO: 271533 - RNA, 19 nt, Artificial Sequence
  Description of Artificial Sequence: Synthetic oligonucleotide
  Antisense strand to SEQ ID NO: 271532
aacuuugccggacucacag

SEQ ID NO: 271534 - RNA, 19 nt, Artificial Sequence
  Description of Artificial Sequence: Synthetic oligonucleotide
  Sense strand starting at position 2252 of SEQ ID NO: 3489
gcuguguaugcgggauaga

SEQ ID NO: 271535 - RNA, 19 nt, Artificial Sequence
  Description of Artificial Sequence: Synthetic oligonucleotide
  Antisense strand to SEQ ID NO: 271534
ucuaucccgcauacacagc

SEQ ID NO: 271536 - RNA, 19 nt, Artificial Sequence
  Description of Artificial Sequence: Synthetic oligonucleotide
  Sense strand starting at position 2255 of SEQ ID NO: 3489
guguaugcgggauagacau

SEQ ID NO: 271537 - RNA, 19 nt, Artificial Sequence
  Description of Artificial Sequence: Synthetic oligonucleotide
  Antisense strand to SEQ ID NO: 271536
augucuaucccgcauacac

SEQ ID NO: 271538 - RNA, 19 nt, Artificial Sequence
  Description of Artificial Sequence: Synthetic oligonucleotide
  Sense strand starting at position 2642 of SEQ ID NO: 3489
cuagaaacgugguccuaaa

SEQ ID NO: 271539 - RNA, 19 nt, Artificial Sequence
  Description of Artificial Sequence: Synthetic oligonucleotide
  Antisense strand to SEQ ID NO: 271538
uuuaggaccacguuucuag

SEQ ID NO: 271540 - RNA, 19 nt, Artificial Sequence
  Description of Artificial Sequence: Synthetic oligonucleotide
  Sense strand starting at position 2686 of SEQ ID NO: 3489
cuuuguuugcguuucgcaa

SEQ ID NO: 271541 - RNA, 19 nt, Artificial Sequence
  Description of Artificial Sequence: Synthetic oligonucleotide
  Antisense strand to SEQ ID NO: 271540
uugcgaaacgcaaacaaag

SEQ ID NO: 271542 - RNA, 19 nt, Artificial Sequence
  Description of Artificial Sequence: Synthetic oligonucleotide
  Sense strand starting at position 2694 of SEQ ID NO: 3489
gcguuucgcaaguuucuuu

SEQ ID NO: 271543 - RNA, 19 nt, Artificial Sequence
  Description of Artificial Sequence: Synthetic oligonucleotide
  Antisense strand to SEQ ID NO: 271542
aaagaaacuugcgaaacgc

SEQ ID NO: 271544 - RNA, 19 nt, Artificial Sequence
  Description of Artificial Sequence: Synthetic oligonucleotide
  Sense strand starting at position 2699 of SEQ ID NO: 3489
ucgcaaguuucuuucgguu

SEQ ID NO: 271545 - RNA, 19 nt, Artificial Sequence
  Description of Artificial Sequence: Synthetic oligonucleotide
  Antisense strand to SEQ ID NO: 271544
aaccgaaagaaacuugcga

SEQ ID NO: 271546 - RNA, 19 nt, Artificial Sequence
  Description of Artificial Sequence: Synthetic oligonucleotide
  Sense strand starting at position 2703 of SEQ ID NO: 3489
aaguuucuuucgguuaaag

SEQ ID NO: 271547 - RNA, 19 nt, Artificial Sequence
  Description of Artificial Sequence: Synthetic oligonucleotide
  Antisense strand to SEQ ID NO: 271546
cuuuaaccgaaagaaacuu

SEQ ID NO: 271548 - RNA, 19 nt, Artificial Sequence
  Description of Artificial Sequence: Synthetic oligonucleotide
  Sense strand starting at position 2802 of SEQ ID NO: 3489
uguggaggccucguuuguu

SEQ ID NO: 271549 - RNA, 19 nt, Artificial Sequence
  Description of Artificial Sequence: Synthetic oligonucleotide
  Antisense strand to SEQ ID NO: 271548
aacaaacgaggccuccaca

SEQ ID NO: 271550 - RNA, 19 nt, Artificial Sequence
  Description of Artificial Sequence: Synthetic oligonucleotide
  Sense strand starting at position 2979 of SEQ ID NO: 3489
gguucuucccgcugaggaa

SEQ ID NO: 271551 - RNA, 19 nt, Artificial Sequence
  Description of Artificial Sequence: Synthetic oligonucleotide
  Antisense strand to SEQ ID NO: 271550
uuccucagcgggaagaacc

SEQ ID NO: 271552 - RNA, 19 nt, Artificial Sequence
  Description of Artificial Sequence: Synthetic oligonucleotide
  Sense strand starting at position 2992 of SEQ ID NO: 3489
gaggaagugucgcucaaga

SEQ ID NO: 271553 - RNA, 19 nt, Artificial Sequence
  Description of Artificial Sequence: Synthetic oligonucleotide
  Antisense strand to SEQ ID NO: 271552
ucuugagcgacacuuccuc

SEQ ID NO: 271554 - RNA, 19 nt, Artificial Sequence
  Description of Artificial Sequence: Synthetic oligonucleotide
  Sense strand starting at position 3014 of SEQ ID NO: 3489
uggccuaugaguugugauu

SEQ ID NO: 271555 - RNA, 19 nt, Artificial Sequence
  Description of Artificial Sequence: Synthetic oligonucleotide
  Antisense strand to SEQ ID NO: 271554
aaucacaacucauaggcca

SEQ ID NO: 271556 - RNA, 19 nt, Artificial Sequence
  Description of Artificial Sequence: Synthetic oligonucleotide
  Sense strand starting at position 3016 of SEQ ID NO: 3489
gccuaugaguugugauuuc

SEQ ID NO: 271557 - RNA, 19 nt, Artificial Sequence
  Description of Artificial Sequence: Synthetic oligonucleotide
  Antisense strand to SEQ ID NO: 271556
gaaaucacaacucauaggc

SEQ ID NO: 271558 - RNA, 19 nt, Artificial Sequence
  Description of Artificial Sequence: Synthetic oligonucleotide
  Sense strand starting at position 3085 of SEQ ID NO: 3489
gcgcaacgugcuucacaau

SEQ ID NO: 271559 - RNA, 19 nt, Artificial Sequence
  Description of Artificial Sequence: Synthetic oligonucleotide
  Antisense strand to SEQ ID NO: 271558
auugugaagcacguugcgc

SEQ ID NO: 271560 - RNA, 19 nt, Artificial Sequence
  Description of Artificial Sequence: Synthetic oligonucleotide
  Sense strand starting at position 3167 of SEQ ID NO: 3489
ccgccauguuuccugaaca

SEQ ID NO: 271561 - RNA, 19 nt, Artificial Sequence
  Description of Artificial Sequence: Synthetic oligonucleotide
  Antisense strand to SEQ ID NO: 271560
uguucaggaaacauggcgg

SEQ ID NO: 271562 - RNA, 19 nt, Artificial Sequence
  Description of Artificial Sequence: Synthetic oligonucleotide
  Sense strand starting at position 3193 of SEQ ID NO: 3489
gcgacacgugguuagcauu

SEQ ID NO: 271563 - RNA, 19 nt, Artificial Sequence
  Description of Artificial Sequence: Synthetic oligonucleotide
  Antisense strand to SEQ ID NO: 271562
aaugcuaaccacgugucgc

SEQ ID NO: 271564 - RNA, 19 nt, Artificial Sequence
  Description of Artificial Sequence: Synthetic oligonucleotide
  Sense strand starting at position 3205 of SEQ ID NO: 3489
uagcauucgucgccaacga

SEQ ID NO: 271565 - RNA, 19 nt, Artificial Sequence
  Description of Artificial Sequence: Synthetic oligonucleotide
  Antisense strand to SEQ ID NO: 271564
ucguuggcgacgaaugcua

SEQ ID NO: 271566 - RNA, 19 nt, Artificial Sequence
  Description of Artificial Sequence: Synthetic oligonucleotide
  Sense strand starting at position 3207 of SEQ ID NO: 3489
gcauucgucgccaacgaga

SEQ ID NO: 271567 - RNA, 19 nt, Artificial Sequence
  Description of Artificial Sequence: Synthetic oligonucleotide
  Antisense strand to SEQ ID NO: 271566
ucucguuggcgacgaaugc

SEQ ID NO: 271568 - RNA, 19 nt, Artificial Sequence
  Description of Artificial Sequence: Synthetic oligonucleotide
  Sense strand starting at position 3209 of SEQ ID NO: 3489
auucgucgccaacgagaaa

SEQ ID NO: 271569 - RNA, 19 nt, Artificial Sequence
  Description of Artificial Sequence: Synthetic oligonucleotide
  Antisense strand to SEQ ID NO: 271568
uuucucguuggcgacgaau

SEQ ID NO: 271570 - RNA, 19 nt, Artificial Sequence
  Description of Artificial Sequence: Synthetic oligonucleotide
  Sense strand starting at position 3237 of SEQ ID NO: 3489
gcccgaaagcucuagaaug

SEQ ID NO: 271571 - RNA, 19 nt, Artificial Sequence
  Description of Artificial Sequence: Synthetic oligonucleotide
  Antisense strand to SEQ ID NO: 271570
cauucuagagcuuucgggc

SEQ ID NO: 271572 - RNA, 19 nt, Artificial Sequence
  Description of Artificial Sequence: Synthetic oligonucleotide
  Sense strand starting at position 3239 of SEQ ID NO: 3489
ccgaaagcucuagaaugca

SEQ ID NO: 271573 - RNA, 19 nt, Artificial Sequence
  Description of Artificial Sequence: Synthetic oligonucleotide
  Antisense strand to SEQ ID NO: 271572
ugcauucuagagcuuucgg

SEQ ID NO: 271574 - RNA, 19 nt, Artificial Sequence
  Description of Artificial Sequence: Synthetic oligonucleotide
  Sense strand starting at position 3456 of SEQ ID NO: 3489
ggcaguaucaagggauaau

SEQ ID NO: 271575 - RNA, 19 nt, Artificial Sequence
  Description of Artificial Sequence: Synthetic oligonucleotide
  Antisense strand to SEQ ID NO: 271574
auuaucccuugauacugcc

SEQ ID NO: 271576 - RNA, 19 nt, Artificial Sequence
  Description of Artificial Sequence: Synthetic oligonucleotide
  Sense strand starting at position 3527 of SEQ ID NO: 3489
ugagauaaguuacugcuuu

SEQ ID NO: 271577 - RNA, 19 nt, Artificial Sequence
  Description of Artificial Sequence: Synthetic oligonucleotide
  Antisense strand to SEQ ID NO: 271576
aaagcaguaacuuaucuca

SEQ ID NO: 271578 - RNA, 19 nt, Artificial Sequence
  Description of Artificial Sequence: Synthetic oligonucleotide
  Sense strand starting at position 3564 of SEQ ID NO: 3489
ggcuguugugcuggagaga

SEQ ID NO: 271579 - RNA, 19 nt, Artificial Sequence
  Description of Artificial Sequence: Synthetic oligonucleotide
  Antisense strand to SEQ ID NO: 271578
ucucuccagcacaacagcc

SEQ ID NO: 271580 - RNA, 19 nt, Artificial Sequence
  Description of Artificial Sequence: Synthetic oligonucleotide
  Sense strand starting at position 3565 of SEQ ID NO: 3489
gcuguugugcuggagagaa

SEQ ID NO: 271581 - RNA, 19 nt, Artificial Sequence
  Description of Artificial Sequence: Synthetic oligonucleotide
  Antisense strand to SEQ ID NO: 271580
uucucuccagcacaacagc

SEQ ID NO: 271582 - RNA, 19 nt, Artificial Sequence
  Description of Artificial Sequence: Synthetic oligonucleotide
  Sense strand starting at position 3626 of SEQ ID NO: 3489
ggacaguuggccggugaau

SEQ ID NO: 271583 - RNA, 19 nt, Artificial Sequence
  Description of Artificial Sequence: Synthetic oligonucleotide
  Antisense strand to SEQ ID NO: 271582
auucaccggccaacugucc

SEQ ID NO: 271584 - RNA, 19 nt, Artificial Sequence
  Description of Artificial Sequence: Synthetic oligonucleotide
  Sense strand starting at position 3628 of SEQ ID NO: 3489
acaguuggccggugaaucu

SEQ ID NO: 271585 - RNA, 19 nt, Artificial Sequence
  Description of Artificial Sequence: Synthetic oligonucleotide
  Antisense strand to SEQ ID NO: 271584
agauucaccggccaacugu

SEQ ID NO: 271586 - RNA, 19 nt, Artificial Sequence
  Description of Artificial Sequence: Synthetic oligonucleotide
  Sense strand starting at position 3637 of SEQ ID NO: 3489
cggugaaucuuauuaauag

SEQ ID NO: 271587 - RNA, 19 nt, Artificial Sequence
  Description of Artificial Sequence: Synthetic oligonucleotide
  Antisense strand to SEQ ID NO: 271586
cuauuaauaagauucaccg

SEQ ID NO: 271588 - RNA, 19 nt, Artificial Sequence
  Description of Artificial Sequence: Synthetic oligonucleotide
  Sense strand starting at position 3638 of SEQ ID NO: 3489
ggugaaucuuauuaauagu

SEQ ID NO: 271589 - RNA, 19 nt, Artificial Sequence
  Description of Artificial Sequence: Synthetic oligonucleotide
  Antisense strand to SEQ ID NO: 271588
acuauuaauaagauucacc

SEQ ID NO: 271590 - RNA, 19 nt, Artificial Sequence
  Description of Artificial Sequence: Synthetic oligonucleotide
  Sense strand starting at position 3783 of SEQ ID NO: 3489
ugagguagguguucuuauc

SEQ ID NO: 271591 - RNA, 19 nt, Artificial Sequence
  Description of Artificial Sequence: Synthetic oligonucleotide
  Antisense strand to SEQ ID NO: 271590
gauaagaacaccuaccuca

SEQ ID NO: 271592 - RNA, 19 nt, Artificial Sequence
  Description of Artificial Sequence: Synthetic oligonucleotide
  Sense strand starting at position 3975 of SEQ ID NO: 3489
aggugagcuugucauuuaa

SEQ ID NO: 271593 - RNA, 19 nt, Artificial Sequence
  Description of Artificial Sequence: Synthetic oligonucleotide
  Antisense strand to SEQ ID NO: 271592
uuaaaugacaagcucaccu

SEQ ID NO: 271594 - RNA, 19 nt, Artificial Sequence
  Description of Artificial Sequence: Synthetic oligonucleotide
  Sense strand starting at position 3977 of SEQ ID NO: 3489
gugagcuugucauuuaaau

SEQ ID NO: 271595 - RNA, 19 nt, Artificial Sequence
  Description of Artificial Sequence: Synthetic oligonucleotide
  Antisense strand to SEQ ID NO: 271594
auuuaaaugacaagcucac

SEQ ID NO: 271596 - RNA, 19 nt, Artificial Sequence
  Description of Artificial Sequence: Synthetic oligonucleotide
  Sense strand starting at position 58 of SEQ ID NO: 3490
auucuugucuuugccagaa

SEQ ID NO: 271597 - RNA, 19 nt, Artificial Sequence
  Description of Artificial Sequence: Synthetic oligonucleotide
  Antisense strand to SEQ ID NO: 271596
uucuggcaaagacaagaau

SEQ ID NO: 271598 - RNA, 19 nt, Artificial Sequence
  Description of Artificial Sequence: Synthetic oligonucleotide
  Sense strand starting at position 286 of SEQ ID NO: 3490
gcucaucauagcgauagua

SEQ ID NO: 271599 - RNA, 19 nt, Artificial Sequence
  Description of Artificial Sequence: Synthetic oligonucleotide
  Antisense strand to SEQ ID NO: 271598
uacuaucgcuaugaugagc

SEQ ID NO: 271600 - RNA, 19 nt, Artificial Sequence
  Description of Artificial Sequence: Synthetic oligonucleotide
  Sense strand starting at position 288 of SEQ ID NO: 3490
ucaucauagcgauaguagu

SEQ ID NO: 271601 - RNA, 19 nt, Artificial Sequence
  Description of Artificial Sequence: Synthetic oligonucleotide
  Antisense strand to SEQ ID NO: 271600
acuacuaucgcuaugauga

SEQ ID NO: 271602 - RNA, 19 nt, Artificial Sequence
  Description of Artificial Sequence: Synthetic oligonucleotide
  Sense strand starting at position 306 of SEQ ID NO: 3490
ugggcuuuagaguggucaa

SEQ ID NO: 271603 - RNA, 19 nt, Artificial Sequence
  Description of Artificial Sequence: Synthetic oligonucleotide
  Antisense strand to SEQ ID NO: 271602
uugaccacucuaaagccca

SEQ ID NO: 271604 - RNA, 19 nt, Artificial Sequence
  Description of Artificial Sequence: Synthetic oligonucleotide
  Sense strand starting at position 307 of SEQ ID NO: 3490
gggcuuuagaguggucaaa

SEQ ID NO: 271605 - RNA, 19 nt, Artificial Sequence
  Description of Artificial Sequence: Synthetic oligonucleotide
  Antisense strand to SEQ ID NO: 271604
uuugaccacucuaaagccc

SEQ ID NO: 271606 - RNA, 19 nt, Artificial Sequence
  Description of Artificial Sequence: Synthetic oligonucleotide
  Sense strand starting at position 353 of SEQ ID NO: 3490
cagugcuggcucugagaaa

SEQ ID NO: 271607 - RNA, 19 nt, Artificial Sequence
  Description of Artificial Sequence: Synthetic oligonucleotide
  Antisense strand to SEQ ID NO: 271606
uuucucagagccagcacug

SEQ ID NO: 271608 - RNA, 19 nt, Artificial Sequence
  Description of Artificial Sequence: Synthetic oligonucleotide
  Sense strand starting at position 527 of SEQ ID NO: 3490
cugguagaauucccgaauc

SEQ ID NO: 271609 - RNA, 19 nt, Artificial Sequence
  Description of Artificial Sequence: Synthetic oligonucleotide
  Antisense strand to SEQ ID NO: 271608
gauucgggaauucuaccag

SEQ ID NO: 271610 - RNA, 19 nt, Artificial Sequence
  Description of Artificial Sequence: Synthetic oligonucleotide
  Sense strand starting at position 568 of SEQ ID NO: 3490
ggugaaguaugagaauaaa

SEQ ID NO: 271611 - RNA, 19 nt, Artificial Sequence
  Description of Artificial Sequence: Synthetic oligonucleotide
  Antisense strand to SEQ ID NO: 271610
uuuauucucauacuucacc

SEQ ID NO: 271612 - RNA, 19 nt, Artificial Sequence
  Description of Artificial Sequence: Synthetic oligonucleotide
  Sense strand starting at position 991 of SEQ ID NO: 3490
agcaauuaguccucaagag

SEQ ID NO: 271613 - RNA, 19 nt, Artificial Sequence
  Description of Artificial Sequence: Synthetic oligonucleotide
  Antisense strand to SEQ ID NO: 271612
cucuugaggacuaauugcu

SEQ ID NO: 271614 - RNA, 19 nt, Artificial Sequence
  Description of Artificial Sequence: Synthetic oligonucleotide
  Sense strand starting at position 992 of SEQ ID NO: 3490
gcaauuaguccucaagagg

SEQ ID NO: 271615 - RNA, 19 nt, Artificial Sequence
  Description of Artificial Sequence: Synthetic oligonucleotide
  Antisense strand to SEQ ID NO: 271614
ccucuugaggacuaauugc

SEQ ID NO: 271616 - RNA, 19 nt, Artificial Sequence
  Description of Artificial Sequence: Synthetic oligonucleotide
  Sense strand starting at position 1029 of SEQ ID NO: 3490
gugacucacugucuugcaa

SEQ ID NO: 271617 - RNA, 19 nt, Artificial Sequence
  Description of Artificial Sequence: Synthetic oligonucleotide
  Antisense strand to SEQ ID NO: 271616
uugcaagacagugagucac

SEQ ID NO: 271618 - RNA, 19 nt, Artificial Sequence
  Description of Artificial Sequence: Synthetic oligonucleotide
  Sense strand starting at position 1111 of SEQ ID NO: 3490
cugugucucguggaucuua

SEQ ID NO: 271619 - RNA, 19 nt, Artificial Sequence
  Description of Artificial Sequence: Synthetic oligonucleotide
  Antisense strand to SEQ ID NO: 271618
uaagauccacgagacacag

SEQ ID NO: 271620 - RNA, 19 nt, Artificial Sequence
  Description of Artificial Sequence: Synthetic oligonucleotide
  Sense strand starting at position 1289 of SEQ ID NO: 3490
gcagucagcuuggugaaga

SEQ ID NO: 271621 - RNA, 19 nt, Artificial Sequence
  Description of Artificial Sequence: Synthetic oligonucleotide
  Antisense strand to SEQ ID NO: 271620
ucuucaccaagcugacugc

SEQ ID NO: 271622 - RNA, 19 nt, Artificial Sequence
  Description of Artificial Sequence: Synthetic oligonucleotide
  Sense strand starting at position 1932 of SEQ ID NO: 3490
gccucaucgcgaucgcaau

SEQ ID NO: 271623 - RNA, 19 nt, Artificial Sequence
  Description of Artificial Sequence: Synthetic oligonucleotide
  Antisense strand to SEQ ID NO: 271622
auugcgaucgcgaugaggc

SEQ ID NO: 271624 - RNA, 19 nt, Artificial Sequence
  Description of Artificial Sequence: Synthetic oligonucleotide
  Sense strand starting at position 2139 of SEQ ID NO: 3490
cugcucaauccguaauuaa

SEQ ID NO: 271625 - RNA, 19 nt, Artificial Sequence
  Description of Artificial Sequence: Synthetic oligonucleotide
  Antisense strand to SEQ ID NO: 271624
uuaauuacggauugagcag

SEQ ID NO: 271626 - RNA, 19 nt, Artificial Sequence
  Description of Artificial Sequence: Synthetic oligonucleotide
  Sense strand starting at position 2142 of SEQ ID NO: 3490
cucaauccguaauuaagga

SEQ ID NO: 271627 - RNA, 19 nt, Artificial Sequence
  Description of Artificial Sequence: Synthetic oligonucleotide
  Antisense strand to SEQ ID NO: 271626
uccuuaauuacggauugag

SEQ ID NO: 271628 - RNA, 19 nt, Artificial Sequence
  Description of Artificial Sequence: Synthetic oligonucleotide
  Sense strand starting at position 2522 of SEQ ID NO: 3490
ggacuugguagugaucuua

SEQ ID NO: 271629 - RNA, 19 nt, Artificial Sequence
  Description of Artificial Sequence: Synthetic oligonucleotide
  Antisense strand to SEQ ID NO: 271628
uaagaucacuaccaagucc

SEQ ID NO: 271630 - RNA, 19 nt, Artificial Sequence
  Description of Artificial Sequence: Synthetic oligonucleotide
  Sense strand starting at position 2588 of SEQ ID NO: 3490
gguuaaugaugaugauuua

SEQ ID NO: 271631 - RNA, 19 nt, Artificial Sequence
  Description of Artificial Sequence: Synthetic oligonucleotide
  Antisense strand to SEQ ID NO: 271630
uaaaucaucaucauuaacc

SEQ ID NO: 271632 - RNA, 19 nt, Artificial Sequence
  Description of Artificial Sequence: Synthetic oligonucleotide
  Sense strand starting at position 2787 of SEQ ID NO: 3490
gccggcucuggguacuuaa

SEQ ID NO: 271633 - RNA, 19 nt, Artificial Sequence
  Description of Artificial Sequence: Synthetic oligonucleotide
  Antisense strand to SEQ ID NO: 271632
uuaaguacccagagccggc

SEQ ID NO: 271634 - RNA, 19 nt, Artificial Sequence
  Description of Artificial Sequence: Synthetic oligonucleotide
  Sense strand starting at position 2810 of SEQ ID NO: 3490
ggauaaauuugcuaugagg

SEQ ID NO: 271635 - RNA, 19 nt, Artificial Sequence
  Description of Artificial Sequence: Synthetic oligonucleotide
  Antisense strand to SEQ ID NO: 271634
ccucauagcaaauuuaucc

SEQ ID NO: 271636 - RNA, 19 nt, Artificial Sequence
  Description of Artificial Sequence: Synthetic oligonucleotide
  Sense strand starting at position 2813 of SEQ ID NO: 3490
uaaauuugcuaugagguau

SEQ ID NO: 271637 - RNA, 19 nt, Artificial Sequence
  Description of Artificial Sequence: Synthetic oligonucleotide
  Antisense strand to SEQ ID NO: 271636
auaccucauagcaaauuua

SEQ ID NO: 271638 - RNA, 19 nt, Artificial Sequence
  Description of Artificial Sequence: Synthetic oligonucleotide
  Sense strand starting at position 2907 of SEQ ID NO: 3490
gugggacuuugggcacaau

SEQ ID NO: 271639 - RNA, 19 nt, Artificial Sequence
  Description of Artificial Sequence: Synthetic oligonucleotide
  Antisense strand to SEQ ID NO: 271638
auugugcccaaagucccac

SEQ ID NO: 271640 - RNA, 19 nt, Artificial Sequence
  Description of Artificial Sequence: Synthetic oligonucleotide
  Sense strand starting at position 2908 of SEQ ID NO: 3490
ugggacuuugggcacaauu

SEQ ID NO: 271641 - RNA, 19 nt, Artificial Sequence
  Description of Artificial Sequence: Synthetic oligonucleotide
  Antisense strand to SEQ ID NO: 271640
aauugugcccaaaguccca

SEQ ID NO: 271642 - RNA, 19 nt, Artificial Sequence
  Description of Artificial Sequence: Synthetic oligonucleotide
  Sense strand starting at position 3012 of SEQ ID NO: 3490
auuugagagugguaauaga

SEQ ID NO: 271643 - RNA, 19 nt, Artificial Sequence
  Description of Artificial Sequence: Synthetic oligonucleotide
  Antisense strand to SEQ ID NO: 271642
ucuauuaccacucucaaau

SEQ ID NO: 271644 - RNA, 19 nt, Artificial Sequence
  Description of Artificial Sequence: Synthetic oligonucleotide
  Sense strand starting at position 3040 of SEQ ID NO: 3490
gccauaaagaguugcgauu

SEQ ID NO: 271645 - RNA, 19 nt, Artificial Sequence
  Description of Artificial Sequence: Synthetic oligonucleotide
  Antisense strand to SEQ ID NO: 271644
aaucgcaacucuuuauggc

SEQ ID NO: 271646 - RNA, 19 nt, Artificial Sequence
  Description of Artificial Sequence: Synthetic oligonucleotide
  Sense strand starting at position 3098 of SEQ ID NO: 3490
aagggagguuauccuguga

SEQ ID NO: 271647 - RNA, 19 nt, Artificial Sequence
  Description of Artificial Sequence: Synthetic oligonucleotide
  Antisense strand to SEQ ID NO: 271646
ucacaggauaaccucccuu

SEQ ID NO: 271648 - RNA, 19 nt, Artificial Sequence
  Description of Artificial Sequence: Synthetic oligonucleotide
  Sense strand starting at position 3102 of SEQ ID NO: 3490
gagguuauccugugaaagc

SEQ ID NO: 271649 - RNA, 19 nt, Artificial Sequence
  Description of Artificial Sequence: Synthetic oligonucleotide
  Antisense strand to SEQ ID NO: 271648
gcuuucacaggauaaccuc

SEQ ID NO: 271650 - RNA, 19 nt, Artificial Sequence
  Description of Artificial Sequence: Synthetic oligonucleotide
  Sense strand starting at position 3146 of SEQ ID NO: 3490
agugaauugaagugaauau

SEQ ID NO: 271651 - RNA, 19 nt, Artificial Sequence
  Description of Artificial Sequence: Synthetic oligonucleotide
  Antisense strand to SEQ ID NO: 271650
auauucacuucaauucacu

SEQ ID NO: 271652 - RNA, 19 nt, Artificial Sequence
  Description of Artificial Sequence: Synthetic oligonucleotide
  Sense strand starting at position 3157 of SEQ ID NO: 3490
gugaauaugcagcaagaag

SEQ ID NO: 271653 - RNA, 19 nt, Artificial Sequence
  Description of Artificial Sequence: Synthetic oligonucleotide
  Antisense strand to SEQ ID NO: 271652
cuucuugcugcauauucac

SEQ ID NO: 271654 - RNA, 19 nt, Artificial Sequence
  Description of Artificial Sequence: Synthetic oligonucleotide
  Sense strand starting at position 3165 of SEQ ID NO: 3490
gcagcaagaaguuaugaga

SEQ ID NO: 271655 - RNA, 19 nt, Artificial Sequence
  Description of Artificial Sequence: Synthetic oligonucleotide
  Antisense strand to SEQ ID NO: 271654
ucucauaacuucuugcugc

SEQ ID NO: 271656 - RNA, 19 nt, Artificial Sequence
  Description of Artificial Sequence: Synthetic oligonucleotide
  Sense strand starting at position 3179 of SEQ ID NO: 3490
ugagauuagugauuaauca

SEQ ID NO: 271657 - RNA, 19 nt, Artificial Sequence
  Description of Artificial Sequence: Synthetic oligonucleotide
  Antisense strand to SEQ ID NO: 271656
ugauuaaucacuaaucuca

SEQ ID NO: 271658 - RNA, 19 nt, Artificial Sequence
  Description of Artificial Sequence: Synthetic oligonucleotide
  Sense strand starting at position 3327 of SEQ ID NO: 3490
guuucucagagcuagugau

SEQ ID NO: 271659 - RNA, 19 nt, Artificial Sequence
  Description of Artificial Sequence: Synthetic oligonucleotide
  Antisense strand to SEQ ID NO: 271658
aucacuagcucugagaaac

SEQ ID NO: 271660 - RNA, 19 nt, Artificial Sequence
  Description of Artificial Sequence: Synthetic oligonucleotide
  Sense strand starting at position 3333 of SEQ ID NO: 3490
cagagcuagugauucugau

SEQ ID NO: 271661 - RNA, 19 nt, Artificial Sequence
  Description of Artificial Sequence: Synthetic oligonucleotide
  Antisense strand to SEQ ID NO: 271660
aucagaaucacuagcucug

SEQ ID NO: 271662 - RNA, 19 nt, Artificial Sequence
  Description of Artificial Sequence: Synthetic oligonucleotide
  Sense strand starting at position 3385 of SEQ ID NO: 3490
uugagauguggauauguuu

SEQ ID NO: 271663 - RNA, 19 nt, Artificial Sequence
  Description of Artificial Sequence: Synthetic oligonucleotide
  Antisense strand to SEQ ID NO: 271662
aaacauauccacaucucaa

SEQ ID NO: 271664 - RNA, 19 nt, Artificial Sequence
  Description of Artificial Sequence: Synthetic oligonucleotide
  Sense strand starting at position 3388 of SEQ ID NO: 3490
agauguggauauguuuauu

SEQ ID NO: 271665 - RNA, 19 nt, Artificial Sequence
  Description of Artificial Sequence: Synthetic oligonucleotide
  Antisense strand to SEQ ID NO: 271664
aauaaacauauccacaucu

SEQ ID NO: 271666 - RNA, 19 nt, Artificial Sequence
  Description of Artificial Sequence: Synthetic oligonucleotide
  Sense strand starting at position 3421 of SEQ ID NO: 3490
gaugguaucauggguauau

SEQ ID NO: 271667 - RNA, 19 nt, Artificial Sequence
  Description of Artificial Sequence: Synthetic oligonucleotide
  Antisense strand to SEQ ID NO: 271666
auauacccaugauaccauc

SEQ ID NO: 271668 - RNA, 19 nt, Artificial Sequence
  Description of Artificial Sequence: Synthetic oligonucleotide
  Sense strand starting at position 3422 of SEQ ID NO: 3490
augguaucauggguauaua

SEQ ID NO: 271669 - RNA, 19 nt, Artificial Sequence
  Description of Artificial Sequence: Synthetic oligonucleotide
  Antisense strand to SEQ ID NO: 271668
uauauacccaugauaccau

SEQ ID NO: 271670 - RNA, 19 nt, Artificial Sequence
  Description of Artificial Sequence: Synthetic oligonucleotide
  Sense strand starting at position 3677 of SEQ ID NO: 3490
acuugaaaugcuuagguau

SEQ ID NO: 271671 - RNA, 19 nt, Artificial Sequence
  Description of Artificial Sequence: Synthetic oligonucleotide
  Antisense strand to SEQ ID NO: 271670
auaccuaagcauuucaagu

SEQ ID NO: 271672 - RNA, 19 nt, Artificial Sequence
  Description of Artificial Sequence: Synthetic oligonucleotide
  Sense strand starting at position 3680 of SEQ ID NO: 3490
ugaaaugcuuagguaucca

SEQ ID NO: 271673 - RNA, 19 nt, Artificial Sequence
  Description of Artificial Sequence: Synthetic oligonucleotide
  Antisense strand to SEQ ID NO: 271672
uggauaccuaagcauuuca

SEQ ID NO: 271674 - RNA, 19 nt, Artificial Sequence
  Description of Artificial Sequence: Synthetic oligonucleotide
  Sense strand starting at position 3944 of SEQ ID NO: 3490
auaagcuucucaguggcaa

SEQ ID NO: 271675 - RNA, 19 nt, Artificial Sequence
  Description of Artificial Sequence: Synthetic oligonucleotide
  Antisense strand to SEQ ID NO: 271674
uugccacugagaagcuuau

SEQ ID NO: 271676 - RNA, 19 nt, Artificial Sequence
  Description of Artificial Sequence: Synthetic oligonucleotide
  Sense strand starting at position 312 of SEQ ID NO: 3491
gcuguaauuccagauaacu

SEQ ID NO: 271677 - RNA, 19 nt, Artificial Sequence
  Description of Artificial Sequence: Synthetic oligonucleotide
  Antisense strand to SEQ ID NO: 271676
aguuaucuggaauuacagc

SEQ ID NO: 271678 - RNA, 19 nt, Artificial Sequence
  Description of Artificial Sequence: Synthetic oligonucleotide
  Sense strand starting at position 350 of SEQ ID NO: 3491
gucccauuacagcagaacu

SEQ ID NO: 271679 - RNA, 19 nt, Artificial Sequence
  Description of Artificial Sequence: Synthetic oligonucleotide
  Antisense strand to SEQ ID NO: 271678
aguucugcuguaaugggac

SEQ ID NO: 271680 - RNA, 19 nt, Artificial Sequence
  Description of Artificial Sequence: Synthetic oligonucleotide
  Sense strand starting at position 499 of SEQ ID NO: 3491
guaaucuggugagcuccaa

SEQ ID NO: 271681 - RNA, 19 nt, Artificial Sequence
  Description of Artificial Sequence: Synthetic oligonucleotide
  Antisense strand to SEQ ID NO: 271680
uuggagcucaccagauuac

SEQ ID NO: 271682 - RNA, 19 nt, Artificial Sequence
  Description of Artificial Sequence: Synthetic oligonucleotide
  Sense strand starting at position 729 of SEQ ID NO: 3491
cuccaauaaucgcuaugag

SEQ ID NO: 271683 - RNA, 19 nt, Artificial Sequence
  Description of Artificial Sequence: Synthetic oligonucleotide
  Antisense strand to SEQ ID NO: 271682
cucauagcgauuauuggag

SEQ ID NO: 271684 - RNA, 19 nt, Artificial Sequence
  Description of Artificial Sequence: Synthetic oligonucleotide
  Sense strand starting at position 732 of SEQ ID NO: 3491
caauaaucgcuaugaggga

SEQ ID NO: 271685 - RNA, 19 nt, Artificial Sequence
  Description of Artificial Sequence: Synthetic oligonucleotide
  Antisense strand to SEQ ID NO: 271684
ucccucauagcgauuauug

SEQ ID NO: 271686 - RNA, 19 nt, Artificial Sequence
  Description of Artificial Sequence: Synthetic oligonucleotide
  Sense strand starting at position 888 of SEQ ID NO: 3491
ggucuaacucccugaaucu

SEQ ID NO: 271687 - RNA, 19 nt, Artificial Sequence
  Description of Artificial Sequence: Synthetic oligonucleotide
  Antisense strand to SEQ ID NO: 271686
agauucagggaguuagacc

SEQ ID NO: 271688 - RNA, 19 nt, Artificial Sequence
  Description of Artificial Sequence: Synthetic oligonucleotide
  Sense strand starting at position 932 of SEQ ID NO: 3491
gcaguagauuaauuaacau

SEQ ID NO: 271689 - RNA, 19 nt, Artificial Sequence
  Description of Artificial Sequence: Synthetic oligonucleotide
  Antisense strand to SEQ ID NO: 271688
auguuaauuaaucuacugc

SEQ ID NO: 271690 - RNA, 19 nt, Artificial Sequence
  Description of Artificial Sequence: Synthetic oligonucleotide
  Sense strand starting at position 972 of SEQ ID NO: 3491
uuuccagaugcccaaagau

SEQ ID NO: 271691 - RNA, 19 nt, Artificial Sequence
  Description of Artificial Sequence: Synthetic oligonucleotide
  Antisense strand to SEQ ID NO: 271690
aucuuugggcaucuggaaa

SEQ ID NO: 271692 - RNA, 19 nt, Artificial Sequence
  Description of Artificial Sequence: Synthetic oligonucleotide
  Sense strand starting at position 991 of SEQ ID NO: 3491
ucucacaggucuuuaugga

SEQ ID NO: 271693 - RNA, 19 nt, Artificial Sequence
  Description of Artificial Sequence: Synthetic oligonucleotide
  Antisense strand to SEQ ID NO: 271692
uccauaaagaccugugaga

SEQ ID NO: 271694 - RNA, 19 nt, Artificial Sequence
  Description of Artificial Sequence: Synthetic oligonucleotide
  Sense strand starting at position 998 of SEQ ID NO: 3491
ggucuuuauggaggaacca

SEQ ID NO: 271695 - RNA, 19 nt, Artificial Sequence
  Description of Artificial Sequence: Synthetic oligonucleotide
  Antisense strand to SEQ ID NO: 271694
ugguuccuccauaaagacc

SEQ ID NO: 271696 - RNA, 19 nt, Artificial Sequence
  Description of Artificial Sequence: Synthetic oligonucleotide
  Sense strand starting at position 1067 of SEQ ID NO: 3491
ggaccuuuccagcacgcau

SEQ ID NO: 271697 - RNA, 19 nt, Artificial Sequence
  Description of Artificial Sequence: Synthetic oligonucleotide
  Antisense strand to SEQ ID NO: 271696
augcgugcuggaaaggucc

SEQ ID NO: 271698 - RNA, 19 nt, Artificial Sequence
  Description of Artificial Sequence: Synthetic oligonucleotide
  Sense strand starting at position 1101 of SEQ ID NO: 3491
ggccauuuaugccuagcuu

SEQ ID NO: 271699 - RNA, 19 nt, Artificial Sequence
  Description of Artificial Sequence: Synthetic oligonucleotide
  Antisense strand to SEQ ID NO: 271698
aagcuaggcauaaauggcc

SEQ ID NO: 271700 - RNA, 19 nt, Artificial Sequence
  Description of Artificial Sequence: Synthetic oligonucleotide
  Sense strand starting at position 1102 of SEQ ID NO: 3491
gccauuuaugccuagcuuu

SEQ ID NO: 271701 - RNA, 19 nt, Artificial Sequence
  Description of Artificial Sequence: Synthetic oligonucleotide
  Antisense strand to SEQ ID NO: 271700
aaagcuaggcauaaauggc

SEQ ID NO: 271702 - RNA, 19 nt, Artificial Sequence
  Description of Artificial Sequence: Synthetic oligonucleotide
  Sense strand starting at position 1117 of SEQ ID NO: 3491
cuuuguugugucuagauuc

SEQ ID NO: 271703 - RNA, 19 nt, Artificial Sequence
  Description of Artificial Sequence: Synthetic oligonucleotide
  Antisense strand to SEQ ID NO: 271702
gaaucuagacacaacaaag

SEQ ID NO: 271704 - RNA, 19 nt, Artificial Sequence
  Description of Artificial Sequence: Synthetic oligonucleotide
  Sense strand starting at position 1228 of SEQ ID NO: 3491
gcucuugacaguggaaaga

SEQ ID NO: 271705 - RNA, 19 nt, Artificial Sequence
  Description of Artificial Sequence: Synthetic oligonucleotide
  Antisense strand to SEQ ID NO: 271704
ucuuuccacugucaagagc

SEQ ID NO: 271706 - RNA, 19 nt, Artificial Sequence
  Description of Artificial Sequence: Synthetic oligonucleotide
  Sense strand starting at position 1246 of SEQ ID NO: 3491
agaacagauucuuucugca

SEQ ID NO: 271707 - RNA, 19 nt, Artificial Sequence
  Description of Artificial Sequence: Synthetic oligonucleotide
  Antisense strand to SEQ ID NO: 271706
ugcagaaagaaucuguucu

SEQ ID NO: 271708 - RNA, 19 nt, Artificial Sequence
  Description of Artificial Sequence: Synthetic oligonucleotide
  Sense strand starting at position 1267 of SEQ ID NO: 3491
uguguuaguccuaggcgga

SEQ ID NO: 271709 - RNA, 19 nt, Artificial Sequence
  Description of Artificial Sequence: Synthetic oligonucleotide
  Antisense strand to SEQ ID NO: 271708
uccgccuaggacuaacaca

SEQ ID NO: 271710 - RNA, 19 nt, Artificial Sequence
  Description of Artificial Sequence: Synthetic oligonucleotide
  Sense strand starting at position 1270 of SEQ ID NO: 3491
guuaguccuaggcggagaa

SEQ ID NO: 271711 - RNA, 19 nt, Artificial Sequence
  Description of Artificial Sequence: Synthetic oligonucleotide
  Antisense strand to SEQ ID NO: 271710
uucuccgccuaggacuaac

SEQ ID NO: 271712 - RNA, 19 nt, Artificial Sequence
  Description of Artificial Sequence: Synthetic oligonucleotide
  Sense strand starting at position 1379 of SEQ ID NO: 3491
gggucaacuuguuugcacu

SEQ ID NO: 271713 - RNA, 19 nt, Artificial Sequence
  Description of Artificial Sequence: Synthetic oligonucleotide
  Antisense strand to SEQ ID NO: 271712
agugcaaacaaguugaccc

SEQ ID NO: 271714 - RNA, 19 nt, Artificial Sequence
  Description of Artificial Sequence: Synthetic oligonucleotide
  Sense strand starting at position 1414 of SEQ ID NO: 3491
cugcgugagccuguuaauc

SEQ ID NO: 271715 - RNA, 19 nt, Artificial Sequence
  Description of Artificial Sequence: Synthetic oligonucleotide
  Antisense strand to SEQ ID NO: 271714
gauuaacaggcucacgcag

SEQ ID NO: 271716 - RNA, 19 nt, Artificial Sequence
  Description of Artificial Sequence: Synthetic oligonucleotide
  Sense strand starting at position 1454 of SEQ ID NO: 3491
gccagaacacuggagucuu

SEQ ID NO: 271717 - RNA, 19 nt, Artificial Sequence
  Description of Artificial Sequence: Synthetic oligonucleotide
  Antisense strand to SEQ ID NO: 271716
aagacuccaguguucuggc

SEQ ID NO: 271718 - RNA, 19 nt, Artificial Sequence
  Description of Artificial Sequence: Synthetic oligonucleotide
  Sense strand starting at position 1464 of SEQ ID NO: 3491
uggagucuucacggucagu

SEQ ID NO: 271719 - RNA, 19 nt, Artificial Sequence
  Description of Artificial Sequence: Synthetic oligonucleotide
  Antisense strand to SEQ ID NO: 271718
acugaccgugaagacucca

SEQ ID NO: 271720 - RNA, 19 nt, Artificial Sequence
  Description of Artificial Sequence: Synthetic oligonucleotide
  Sense strand starting at position 1477 of SEQ ID NO: 3491
gucaguguucaacgggaag

SEQ ID NO: 271721 - RNA, 19 nt, Artificial Sequence
  Description of Artificial Sequence: Synthetic oligonucleotide
  Antisense strand to SEQ ID NO: 271720
cuucccguugaacacugac

SEQ ID NO: 271722 - RNA, 19 nt, Artificial Sequence
  Description of Artificial Sequence: Synthetic oligonucleotide
  Sense strand starting at position 1480 of SEQ ID NO: 3491
aguguucaacgggaagaua

SEQ ID NO: 271723 - RNA, 19 nt, Artificial Sequence
  Description of Artificial Sequence: Synthetic oligonucleotide
  Antisense strand to SEQ ID NO: 271722
uaucuucccguugaacacu

SEQ ID NO: 271724 - RNA, 19 nt, Artificial Sequence
  Description of Artificial Sequence: Synthetic oligonucleotide
  Sense strand starting at position 2538 of SEQ ID NO: 3491
cccuaucuauuugggugaa

SEQ ID NO: 271725 - RNA, 19 nt, Artificial Sequence
  Description of Artificial Sequence: Synthetic oligonucleotide
  Antisense strand to SEQ ID NO: 271724
uucacccaaauagauaggg

SEQ ID NO: 271726 - RNA, 19 nt, Artificial Sequence
  Description of Artificial Sequence: Synthetic oligonucleotide
  Sense strand starting at position 2609 of SEQ ID NO: 3491
aaagaaugcgcacagcuaa

SEQ ID NO: 271727 - RNA, 19 nt, Artificial Sequence
  Description of Artificial Sequence: Synthetic oligonucleotide
  Antisense strand to SEQ ID NO: 271726
uuagcugugcgcauucuuu

SEQ ID NO: 271728 - RNA, 19 nt, Artificial Sequence
  Description of Artificial Sequence: Synthetic oligonucleotide
  Sense strand starting at position 2658 of SEQ ID NO: 3491
aguacuuacugagugauca

SEQ ID NO: 271729 - RNA, 19 nt, Artificial Sequence
  Description of Artificial Sequence: Synthetic oligonucleotide
  Antisense strand to SEQ ID NO: 271728
ugaucacucaguaaguacu

SEQ ID NO: 271730 - RNA, 19 nt, Artificial Sequence
  Description of Artificial Sequence: Synthetic oligonucleotide
  Sense strand starting at position 2659 of SEQ ID NO: 3491
guacuuacugagugaucac

SEQ ID NO: 271731 - RNA, 19 nt, Artificial Sequence
  Description of Artificial Sequence: Synthetic oligonucleotide
  Antisense strand to SEQ ID NO: 271730
gugaucacucaguaaguac

SEQ ID NO: 271732 - RNA, 19 nt, Artificial Sequence
  Description of Artificial Sequence: Synthetic oligonucleotide
  Sense strand starting at position 2682 of SEQ ID NO: 3491
uugcgagaacuguaagguu

SEQ ID NO: 271733 - RNA, 19 nt, Artificial Sequence
  Description of Artificial Sequence: Synthetic oligonucleotide
  Antisense strand to SEQ ID NO: 271732
aaccuuacaguucucgcaa

SEQ ID NO: 271734 - RNA, 19 nt, Artificial Sequence
  Description of Artificial Sequence: Synthetic oligonucleotide
  Sense strand starting at position 2690 of SEQ ID NO: 3491
acuguaagguucuccguga

SEQ ID NO: 271735 - RNA, 19 nt, Artificial Sequence
  Description of Artificial Sequence: Synthetic oligonucleotide
  Antisense strand to SEQ ID NO: 271734
ucacggagaaccuuacagu

SEQ ID NO: 271736 - RNA, 19 nt, Artificial Sequence
  Description of Artificial Sequence: Synthetic oligonucleotide
  Sense strand starting at position 2691 of SEQ ID NO: 3491
cuguaagguucuccgugaa

SEQ ID NO: 271737 - RNA, 19 nt, Artificial Sequence
  Description of Artificial Sequence: Synthetic oligonucleotide
  Antisense strand to SEQ ID NO: 271736
uucacggagaaccuuacag

SEQ ID NO: 271738 - RNA, 19 nt, Artificial Sequence
  Description of Artificial Sequence: Synthetic oligonucleotide
  Sense strand starting at position 2694 of SEQ ID NO: 3491
uaagguucuccgugaaugg

SEQ ID NO: 271739 - RNA, 19 nt, Artificial Sequence
  Description of Artificial Sequence: Synthetic oligonucleotide
  Antisense strand to SEQ ID NO: 271738
ccauucacggagaaccuua

SEQ ID NO: 271740 - RNA, 19 nt, Artificial Sequence
  Description of Artificial Sequence: Synthetic oligonucleotide
  Sense strand starting at position 2698 of SEQ ID NO: 3491
guucuccgugaauggguaa

SEQ ID NO: 271741 - RNA, 19 nt, Artificial Sequence
  Description of Artificial Sequence: Synthetic oligonucleotide
  Antisense strand to SEQ ID NO: 271740
uuacccauucacggagaac

SEQ ID NO: 271742 - RNA, 19 nt, Artificial Sequence
  Description of Artificial Sequence: Synthetic oligonucleotide
  Sense strand starting at position 2718 of SEQ ID NO: 3491
uggugcuaacuguaaagaa

SEQ ID NO: 271743 - RNA, 19 nt, Artificial Sequence
  Description of Artificial Sequence: Synthetic oligonucleotide
  Antisense strand to SEQ ID NO: 271742
uucuuuacaguuagcacca

SEQ ID NO: 271744 - RNA, 19 nt, Artificial Sequence
  Description of Artificial Sequence: Synthetic oligonucleotide
  Sense strand starting at position 2853 of SEQ ID NO: 3491
gccucuuuagccuaaggau

SEQ ID NO: 271745 - RNA, 19 nt, Artificial Sequence
  Description of Artificial Sequence: Synthetic oligonucleotide
  Antisense strand to SEQ ID NO: 271744
auccuuaggcuaaagaggc

SEQ ID NO: 271746 - RNA, 19 nt, Artificial Sequence
  Description of Artificial Sequence: Synthetic oligonucleotide
  Sense strand starting at position 2880 of SEQ ID NO: 3491
gccgaagacaauugagaag

SEQ ID NO: 271747 - RNA, 19 nt, Artificial Sequence
  Description of Artificial Sequence: Synthetic oligonucleotide
  Antisense strand to SEQ ID NO: 271746
cuucucaauugucuucggc

SEQ ID NO: 271748 - RNA, 19 nt, Artificial Sequence
  Description of Artificial Sequence: Synthetic oligonucleotide
  Sense strand starting at position 2911 of SEQ ID NO: 3491
uguagauacguggguggaa

SEQ ID NO: 271749 - RNA, 19 nt, Artificial Sequence
  Description of Artificial Sequence: Synthetic oligonucleotide
  Antisense strand to SEQ ID NO: 271748
uuccacccacguaucuaca

SEQ ID NO: 271750 - RNA, 19 nt, Artificial Sequence
  Description of Artificial Sequence: Synthetic oligonucleotide
  Sense strand starting at position 2912 of SEQ ID NO: 3491
guagauacguggguggaaa

SEQ ID NO: 271751 - RNA, 19 nt, Artificial Sequence
  Description of Artificial Sequence: Synthetic oligonucleotide
  Antisense strand to SEQ ID NO: 271750
uuuccacccacguaucuac

SEQ ID NO: 271752 - RNA, 19 nt, Artificial Sequence
  Description of Artificial Sequence: Synthetic oligonucleotide
  Sense strand starting at position 3449 of SEQ ID NO: 3491
gagccucgcuacuuauauu

SEQ ID NO: 271753 - RNA, 19 nt, Artificial Sequence
  Description of Artificial Sequence: Synthetic oligonucleotide
  Antisense strand to SEQ ID NO: 271752
aauauaaguagcgaggcuc

SEQ ID NO: 271754 - RNA, 19 nt, Artificial Sequence
  Description of Artificial Sequence: Synthetic oligonucleotide
  Sense strand starting at position 3809 of SEQ ID NO: 3491
ugaaguaaagcaggacaua

SEQ ID NO: 271755 - RNA, 19 nt, Artificial Sequence
  Description of Artificial Sequence: Synthetic oligonucleotide
  Antisense strand to SEQ ID NO: 271754
uauguccugcuuuacuuca

SEQ ID NO: 271756 - RNA, 19 nt, Artificial Sequence
  Description of Artificial Sequence: Synthetic oligonucleotide
  Sense strand starting at position 120 of SEQ ID NO: 3492
agcagaggcucuuauuuau

SEQ ID NO: 271757 - RNA, 19 nt, Artificial Sequence
  Description of Artificial Sequence: Synthetic oligonucleotide
  Antisense strand to SEQ ID NO: 271756
auaaauaagagccucugcu

SEQ ID NO: 271758 - RNA, 19 nt, Artificial Sequence
  Description of Artificial Sequence: Synthetic oligonucleotide
  Sense strand starting at position 258 of SEQ ID NO: 3492
gugaauagaucaggaggga

SEQ ID NO: 271759 - RNA, 19 nt, Artificial Sequence
  Description of Artificial Sequence: Synthetic oligonucleotide
  Antisense strand to SEQ ID NO: 271758
ucccuccugaucuauucac

SEQ ID NO: 271760 - RNA, 19 nt, Artificial Sequence
  Description of Artificial Sequence: Synthetic oligonucleotide
  Sense strand starting at position 404 of SEQ ID NO: 3492
aggcaugccaccugugaga

SEQ ID NO: 271761 - RNA, 19 nt, Artificial Sequence
  Description of Artificial Sequence: Synthetic oligonucleotide
  Antisense strand to SEQ ID NO: 271760
ucucacagguggcaugccu

SEQ ID NO: 271762 - RNA, 19 nt, Artificial Sequence
  Description of Artificial Sequence: Synthetic oligonucleotide
  Sense strand starting at position 406 of SEQ ID NO: 3492
gcaugccaccugugagagu

SEQ ID NO: 271763 - RNA, 19 nt, Artificial Sequence
  Description of Artificial Sequence: Synthetic oligonucleotide
  Antisense strand to SEQ ID NO: 271762
acucucacagguggcaugc

SEQ ID NO: 271764 - RNA, 19 nt, Artificial Sequence
  Description of Artificial Sequence: Synthetic oligonucleotide
  Sense strand starting at position 417 of SEQ ID NO: 3492
gugagagucuuguccggca

SEQ ID NO: 271765 - RNA, 19 nt, Artificial Sequence
  Description of Artificial Sequence: Synthetic oligonucleotide
  Antisense strand to SEQ ID NO: 271764
ugccggacaagacucucac

SEQ ID NO: 271766 - RNA, 19 nt, Artificial Sequence
  Description of Artificial Sequence: Synthetic oligonucleotide
  Sense strand starting at position 419 of SEQ ID NO: 3492
gagagucuuguccggcaca

SEQ ID NO: 271767 - RNA, 19 nt, Artificial Sequence
  Description of Artificial Sequence: Synthetic oligonucleotide
  Antisense strand to SEQ ID NO: 271766
ugugccggacaagacucuc

SEQ ID NO: 271768 - RNA, 19 nt, Artificial Sequence
  Description of Artificial Sequence: Synthetic oligonucleotide
  Sense strand starting at position 632 of SEQ ID NO: 3492
gcagucgucucccugggau

SEQ ID NO: 271769 - RNA, 19 nt, Artificial Sequence
  Description of Artificial Sequence: Synthetic oligonucleotide
  Antisense strand to SEQ ID NO: 271768
aucccagggagacgacugc

SEQ ID NO: 271770 - RNA, 19 nt, Artificial Sequence
  Description of Artificial Sequence: Synthetic oligonucleotide
  Sense strand starting at position 973 of SEQ ID NO: 3492
aggcuuggccugggugaaa

SEQ ID NO: 271771 - RNA, 19 nt, Artificial Sequence
  Description of Artificial Sequence: Synthetic oligonucleotide
  Antisense strand to SEQ ID NO: 271770
uuucacccaggccaagccu

SEQ ID NO: 271772 - RNA, 19 nt, Artificial Sequence
  Description of Artificial Sequence: Synthetic oligonucleotide
  Sense strand starting at position 1206 of SEQ ID NO: 3492
ccuggaaucugggcagaga

SEQ ID NO: 271773 - RNA, 19 nt, Artificial Sequence
  Description of Artificial Sequence: Synthetic oligonucleotide
  Antisense strand to SEQ ID NO: 271772
ucucugcccagauuccagg

SEQ ID NO: 271774 - RNA, 19 nt, Artificial Sequence
  Description of Artificial Sequence: Synthetic oligonucleotide
  Sense strand starting at position 1288 of SEQ ID NO: 3492
acagguacacuuuggauau

SEQ ID NO: 271775 - RNA, 19 nt, Artificial Sequence
  Description of Artificial Sequence: Synthetic oligonucleotide
  Antisense strand to SEQ ID NO: 271774
auauccaaaguguaccugu

SEQ ID NO: 271776 - RNA, 19 nt, Artificial Sequence
  Description of Artificial Sequence: Synthetic oligonucleotide
  Sense strand starting at position 1290 of SEQ ID NO: 3492
agguacacuuuggauauaa

SEQ ID NO: 271777 - RNA, 19 nt, Artificial Sequence
  Description of Artificial Sequence: Synthetic oligonucleotide
  Antisense strand to SEQ ID NO: 271776
uuauauccaaaguguaccu

SEQ ID NO: 271778 - RNA, 19 nt, Artificial Sequence
  Description of Artificial Sequence: Synthetic oligonucleotide
  Sense strand starting at position 1334 of SEQ ID NO: 3492
aaacuuugacgucguaaag

SEQ ID NO: 271779 - RNA, 19 nt, Artificial Sequence
  Description of Artificial Sequence: Synthetic oligonucleotide
  Antisense strand to SEQ ID NO: 271778
cuuuacgacgucaaaguuu

SEQ ID NO: 271780 - RNA, 19 nt, Artificial Sequence
  Description of Artificial Sequence: Synthetic oligonucleotide
  Sense strand starting at position 1345 of SEQ ID NO: 3492
ucguaaagccaagguuagu

SEQ ID NO: 271781 - RNA, 19 nt, Artificial Sequence
  Description of Artificial Sequence: Synthetic oligonucleotide
  Antisense strand to SEQ ID NO: 271780
acuaaccuuggcuuuacga

SEQ ID NO: 271782 - RNA, 19 nt, Artificial Sequence
  Description of Artificial Sequence: Synthetic oligonucleotide
  Sense strand starting at position 1605 of SEQ ID NO: 3492
aggaguucgagcugcccaa

SEQ ID NO: 271783 - RNA, 19 nt, Artificial Sequence
  Description of Artificial Sequence: Synthetic oligonucleotide
  Antisense strand to SEQ ID NO: 271782
uugggcagcucgaacuccu

SEQ ID NO: 271784 - RNA, 19 nt, Artificial Sequence
  Description of Artificial Sequence: Synthetic oligonucleotide
  Sense strand starting at position 1707 of SEQ ID NO: 3492
agugaaaggucccuccaga

SEQ ID NO: 271785 - RNA, 19 nt, Artificial Sequence
  Description of Artificial Sequence: Synthetic oligonucleotide
  Antisense strand to SEQ ID NO: 271784
ucuggagggaccuuucacu

SEQ ID NO: 271786 - RNA, 19 nt, Artificial Sequence
  Description of Artificial Sequence: Synthetic oligonucleotide
  Sense strand starting at position 2581 of SEQ ID NO: 3492
gacaacuguccauggcuaa

SEQ ID NO: 271787 - RNA, 19 nt, Artificial Sequence
  Description of Artificial Sequence: Synthetic oligonucleotide
  Antisense strand to SEQ ID NO: 271786
uuagccauggacaguuguc

SEQ ID NO: 271788 - RNA, 19 nt, Artificial Sequence
  Description of Artificial Sequence: Synthetic oligonucleotide
  Sense strand starting at position 2582 of SEQ ID NO: 3492
acaacuguccauggcuaau

SEQ ID NO: 271789 - RNA, 19 nt, Artificial Sequence
  Description of Artificial Sequence: Synthetic oligonucleotide
  Antisense strand to SEQ ID NO: 271788
auuagccauggacaguugu

SEQ ID NO: 271790 - RNA, 19 nt, Artificial Sequence
  Description of Artificial Sequence: Synthetic oligonucleotide
  Sense strand starting at position 2647 of SEQ ID NO: 3492
gccacaguuccagaucuuu

SEQ ID NO: 271791 - RNA, 19 nt, Artificial Sequence
  Description of Artificial Sequence: Synthetic oligonucleotide
  Antisense strand to SEQ ID NO: 271790
aaagaucuggaacuguggc

SEQ ID NO: 271792 - RNA, 19 nt, Artificial Sequence
  Description of Artificial Sequence: Synthetic oligonucleotide
  Sense strand starting at position 2658 of SEQ ID NO: 3492
agaucuuuccaccguguga

SEQ ID NO: 271793 - RNA, 19 nt, Artificial Sequence
  Description of Artificial Sequence: Synthetic oligonucleotide
  Antisense strand to SEQ ID NO: 271792
ucacacgguggaaagaucu

SEQ ID NO: 271794 - RNA, 19 nt, Artificial Sequence
  Description of Artificial Sequence: Synthetic oligonucleotide
  Sense strand starting at position 2850 of SEQ ID NO: 3492
ugugaaauggcuugcuuau

SEQ ID NO: 271795 - RNA, 19 nt, Artificial Sequence
  Description of Artificial Sequence: Synthetic oligonucleotide
  Antisense strand to SEQ ID NO: 271794
auaagcaagccauuucaca

SEQ ID NO: 271796 - RNA, 19 nt, Artificial Sequence
  Description of Artificial Sequence: Synthetic oligonucleotide
  Sense strand starting at position 2852 of SEQ ID NO: 3492
ugaaauggcuugcuuaucu

SEQ ID NO: 271797 - RNA, 19 nt, Artificial Sequence
  Description of Artificial Sequence: Synthetic oligonucleotide
  Antisense strand to SEQ ID NO: 271796
agauaagcaagccauuuca

SEQ ID NO: 271798 - RNA, 19 nt, Artificial Sequence
  Description of Artificial Sequence: Synthetic oligonucleotide
  Sense strand starting at position 2862 of SEQ ID NO: 3492
ugcuuaucuccuuguauuc

SEQ ID NO: 271799 - RNA, 19 nt, Artificial Sequence
  Description of Artificial Sequence: Synthetic oligonucleotide
  Antisense strand to SEQ ID NO: 271798
gaauacaaggagauaagca

SEQ ID NO: 271800 - RNA, 19 nt, Artificial Sequence
  Description of Artificial Sequence: Synthetic oligonucleotide
  Sense strand starting at position 2875 of SEQ ID NO: 3492
guauucugugcugagcauu

SEQ ID NO: 271801 - RNA, 19 nt, Artificial Sequence
  Description of Artificial Sequence: Synthetic oligonucleotide
  Antisense strand to SEQ ID NO: 271800
aaugcucagcacagaauac

SEQ ID NO: 271802 - RNA, 19 nt, Artificial Sequence
  Description of Artificial Sequence: Synthetic oligonucleotide
  Sense strand starting at position 2953 of SEQ ID NO: 3492
ucaggcucaucagcuuaaa

SEQ ID NO: 271803 - RNA, 19 nt, Artificial Sequence
  Description of Artificial Sequence: Synthetic oligonucleotide
  Antisense strand to SEQ ID NO: 271802
uuuaagcugaugagccuga

SEQ ID NO: 271804 - RNA, 19 nt, Artificial Sequence
  Description of Artificial Sequence: Synthetic oligonucleotide
  Sense strand starting at position 3126 of SEQ ID NO: 3492
gaagcucucguuuaugaac

SEQ ID NO: 271805 - RNA, 19 nt, Artificial Sequence
  Description of Artificial Sequence: Synthetic oligonucleotide
  Antisense strand to SEQ ID NO: 271804
guucauaaacgagagcuuc

SEQ ID NO: 271806 - RNA, 19 nt, Artificial Sequence
  Description of Artificial Sequence: Synthetic oligonucleotide
  Sense strand starting at position 3157 of SEQ ID NO: 3492
ccgggucucagagauguga

SEQ ID NO: 271807 - RNA, 19 nt, Artificial Sequence
  Description of Artificial Sequence: Synthetic oligonucleotide
  Antisense strand to SEQ ID NO: 271806
ucacaucucugagacccgg

SEQ ID NO: 271808 - RNA, 19 nt, Artificial Sequence
  Description of Artificial Sequence: Synthetic oligonucleotide
  Sense strand starting at position 3354 of SEQ ID NO: 3492
ggagaacuguugguuggua

SEQ ID NO: 271809 - RNA, 19 nt, Artificial Sequence
  Description of Artificial Sequence: Synthetic oligonucleotide
  Antisense strand to SEQ ID NO: 271808
uaccaaccaacaguucucc

SEQ ID NO: 271810 - RNA, 19 nt, Artificial Sequence
  Description of Artificial Sequence: Synthetic oligonucleotide
  Sense strand starting at position 3366 of SEQ ID NO: 3492
guugguaggugccuccaua

SEQ ID NO: 271811 - RNA, 19 nt, Artificial Sequence
  Description of Artificial Sequence: Synthetic oligonucleotide
  Antisense strand to SEQ ID NO: 271810
uauggaggcaccuaccaac

SEQ ID NO: 271812 - RNA, 19 nt, Artificial Sequence
  Description of Artificial Sequence: Synthetic oligonucleotide
  Sense strand starting at position 3434 of SEQ ID NO: 3492
ggcuguacuuguccugaag

SEQ ID NO: 271813 - RNA, 19 nt, Artificial Sequence
  Description of Artificial Sequence: Synthetic oligonucleotide
  Antisense strand to SEQ ID NO: 271812
cuucaggacaaguacagcc

SEQ ID NO: 271814 - RNA, 19 nt, Artificial Sequence
  Description of Artificial Sequence: Synthetic oligonucleotide
  Sense strand starting at position 3437 of SEQ ID NO: 3492
uguacuuguccugaaggca

SEQ ID NO: 271815 - RNA, 19 nt, Artificial Sequence
  Description of Artificial Sequence: Synthetic oligonucleotide
  Antisense strand to SEQ ID NO: 271814
ugccuucaggacaaguaca

SEQ ID NO: 271816 - RNA, 19 nt, Artificial Sequence
  Description of Artificial Sequence: Synthetic oligonucleotide
  Sense strand starting at position 3500 of SEQ ID NO: 3492
uguuccaaccucuguugaa

SEQ ID NO: 271817 - RNA, 19 nt, Artificial Sequence
  Description of Artificial Sequence: Synthetic oligonucleotide
  Antisense strand to SEQ ID NO: 271816
uucaacagagguuggaaca

SEQ ID NO: 271818 - RNA, 19 nt, Artificial Sequence
  Description of Artificial Sequence: Synthetic oligonucleotide
  Sense strand starting at position 3501 of SEQ ID NO: 3492
guuccaaccucuguugaau

SEQ ID NO: 271819 - RNA, 19 nt, Artificial Sequence
  Description of Artificial Sequence: Synthetic oligonucleotide
  Antisense strand to SEQ ID NO: 271818
auucaacagagguuggaac

SEQ ID NO: 271820 - RNA, 19 nt, Artificial Sequence
  Description of Artificial Sequence: Synthetic oligonucleotide
  Sense strand starting at position 3516 of SEQ ID NO: 3492
gaaugcugucucuguucca

SEQ ID NO: 271821 - RNA, 19 nt, Artificial Sequence
  Description of Artificial Sequence: Synthetic oligonucleotide
  Antisense strand to SEQ ID NO: 271820
uggaacagagacagcauuc

SEQ ID NO: 271822 - RNA, 19 nt, Artificial Sequence
  Description of Artificial Sequence: Synthetic oligonucleotide
  Sense strand starting at position 3558 of SEQ ID NO: 3492
ggcucugagcuuuguggga

SEQ ID NO: 271823 - RNA, 19 nt, Artificial Sequence
  Description of Artificial Sequence: Synthetic oligonucleotide
  Antisense strand to SEQ ID NO: 271822
ucccacaaagcucagagcc

SEQ ID NO: 271824 - RNA, 19 nt, Artificial Sequence
  Description of Artificial Sequence: Synthetic oligonucleotide
  Sense strand starting at position 3562 of SEQ ID NO: 3492
cugagcuuugugggacgaa

SEQ ID NO: 271825 - RNA, 19 nt, Artificial Sequence
  Description of Artificial Sequence: Synthetic oligonucleotide
  Antisense strand to SEQ ID NO: 271824
uucgucccacaaagcucag

SEQ ID NO: 271826 - RNA, 19 nt, Artificial Sequence
  Description of Artificial Sequence: Synthetic oligonucleotide
  Sense strand starting at position 3574 of SEQ ID NO: 3492
ggacgaagcuguccucuga

SEQ ID NO: 271827 - RNA, 19 nt, Artificial Sequence
  Description of Artificial Sequence: Synthetic oligonucleotide
  Antisense strand to SEQ ID NO: 271826
ucagaggacagcuucgucc

SEQ ID NO: 271828 - RNA, 19 nt, Artificial Sequence
  Description of Artificial Sequence: Synthetic oligonucleotide
  Sense strand starting at position 3578 of SEQ ID NO: 3492
gaagcuguccucugaggac

SEQ ID NO: 271829 - RNA, 19 nt, Artificial Sequence
  Description of Artificial Sequence: Synthetic oligonucleotide
  Antisense strand to SEQ ID NO: 271828
guccucagaggacagcuuc

SEQ ID NO: 271830 - RNA, 19 nt, Artificial Sequence
  Description of Artificial Sequence: Synthetic oligonucleotide
  Sense strand starting at position 3638 of SEQ ID NO: 3492
ggaggugggcucugagaug

SEQ ID NO: 271831 - RNA, 19 nt, Artificial Sequence
  Description of Artificial Sequence: Synthetic oligonucleotide
  Antisense strand to SEQ ID NO: 271830
caucucagagcccaccucc

SEQ ID NO: 271832 - RNA, 19 nt, Artificial Sequence
  Description of Artificial Sequence: Synthetic oligonucleotide
  Sense strand starting at position 3733 of SEQ ID NO: 3492
gacacauguccuggaguag

SEQ ID NO: 271833 - RNA, 19 nt, Artificial Sequence
  Description of Artificial Sequence: Synthetic oligonucleotide
  Antisense strand to SEQ ID NO: 271832
cuacuccaggacauguguc

SEQ ID NO: 271834 - RNA, 19 nt, Artificial Sequence
  Description of Artificial Sequence: Synthetic oligonucleotide
  Sense strand starting at position 3968 of SEQ ID NO: 3492
gccugauggucucuccaca

SEQ ID NO: 271835 - RNA, 19 nt, Artificial Sequence
  Description of Artificial Sequence: Synthetic oligonucleotide
  Antisense strand to SEQ ID NO: 271834
uguggagagaccaucaggc

SEQ ID NO: 271836 - RNA, 19 nt, Artificial Sequence
  Description of Artificial Sequence: Synthetic oligonucleotide
  Sense strand starting at position 146 of SEQ ID NO: 3493
ggaucauugucacaaagac

SEQ ID NO: 271837 - RNA, 19 nt, Artificial Sequence
  Description of Artificial Sequence: Synthetic oligonucleotide
  Antisense strand to SEQ ID NO: 271836
gucuuugugacaaugaucc

SEQ ID NO: 271838 - RNA, 19 nt, Artificial Sequence
  Description of Artificial Sequence: Synthetic oligonucleotide
  Sense strand starting at position 153 of SEQ ID NO: 3493
ugucacaaagacugaugua

SEQ ID NO: 271839 - RNA, 19 nt, Artificial Sequence
  Description of Artificial Sequence: Synthetic oligonucleotide
  Antisense strand to SEQ ID NO: 271838
uacaucagucuuugugaca

SEQ ID NO: 271840 - RNA, 19 nt, Artificial Sequence
  Description of Artificial Sequence: Synthetic oligonucleotide
  Sense strand starting at position 225 of SEQ ID NO: 3493
uggcaagaacacugcuaau

SEQ ID NO: 271841 - RNA, 19 nt, Artificial Sequence
  Description of Artificial Sequence: Synthetic oligonucleotide
  Antisense strand to SEQ ID NO: 271840
auuagcaguguucuugcca

SEQ ID NO: 271842 - RNA, 19 nt, Artificial Sequence
  Description of Artificial Sequence: Synthetic oligonucleotide
  Sense strand starting at position 249 of SEQ ID NO: 3493
ucaggcuugcuuuggaaua

SEQ ID NO: 271843 - RNA, 19 nt, Artificial Sequence
  Description of Artificial Sequence: Synthetic oligonucleotide
  Antisense strand to SEQ ID NO: 271842
uauuccaaagcaagccuga

SEQ ID NO: 271844 - RNA, 19 nt, Artificial Sequence
  Description of Artificial Sequence: Synthetic oligonucleotide
  Sense strand starting at position 296 of SEQ ID NO: 3493
ccgggauaaucggucucca

SEQ ID NO: 271845 - RNA, 19 nt, Artificial Sequence
  Description of Artificial Sequence: Synthetic oligonucleotide
  Antisense strand to SEQ ID NO: 271844
uggagaccgauuaucccgg

SEQ ID NO: 271846 - RNA, 19 nt, Artificial Sequence
  Description of Artificial Sequence: Synthetic oligonucleotide
  Sense strand starting at position 327 of SEQ ID NO: 3493
uguaacaguucugagauac

SEQ ID NO: 271847 - RNA, 19 nt, Artificial Sequence
  Description of Artificial Sequence: Synthetic oligonucleotide
  Antisense strand to SEQ ID NO: 271846
guaucucagaacuguuaca

SEQ ID NO: 271848 - RNA, 19 nt, Artificial Sequence
  Description of Artificial Sequence: Synthetic oligonucleotide
  Sense strand starting at position 673 of SEQ ID NO: 3493
agagcagaauccuuucuac

SEQ ID NO: 271849 - RNA, 19 nt, Artificial Sequence
  Description of Artificial Sequence: Synthetic oligonucleotide
  Antisense strand to SEQ ID NO: 271848
guagaaaggauucugcucu

SEQ ID NO: 271850 - RNA, 19 nt, Artificial Sequence
  Description of Artificial Sequence: Synthetic oligonucleotide
  Sense strand starting at position 676 of SEQ ID NO: 3493
gcagaauccuuucuacagg

SEQ ID NO: 271851 - RNA, 19 nt, Artificial Sequence
  Description of Artificial Sequence: Synthetic oligonucleotide
  Antisense strand to SEQ ID NO: 271850
ccuguagaaaggauucugc

SEQ ID NO: 271852 - RNA, 19 nt, Artificial Sequence
  Description of Artificial Sequence: Synthetic oligonucleotide
  Sense strand starting at position 1129 of SEQ ID NO: 3493
ugccacuaagcagagauua

SEQ ID NO: 271853 - RNA, 19 nt, Artificial Sequence
  Description of Artificial Sequence: Synthetic oligonucleotide
  Antisense strand to SEQ ID NO: 271852
uaaucucugcuuaguggca

SEQ ID NO: 271854 - RNA, 19 nt, Artificial Sequence
  Description of Artificial Sequence: Synthetic oligonucleotide
  Sense strand starting at position 1168 of SEQ ID NO: 3493
aucuuuggacagugacaaa

SEQ ID NO: 271855 - RNA, 19 nt, Artificial Sequence
  Description of Artificial Sequence: Synthetic oligonucleotide
  Antisense strand to SEQ ID NO: 271854
uuugucacuguccaaagau

SEQ ID NO: 271856 - RNA, 19 nt, Artificial Sequence
  Description of Artificial Sequence: Synthetic oligonucleotide
  Sense strand starting at position 1219 of SEQ ID NO: 3493
ugcccauuuccaugguguu

SEQ ID NO: 271857 - RNA, 19 nt, Artificial Sequence
  Description of Artificial Sequence: Synthetic oligonucleotide
  Antisense strand to SEQ ID NO: 271856
aacaccauggaaaugggca

SEQ ID NO: 271858 - RNA, 19 nt, Artificial Sequence
  Description of Artificial Sequence: Synthetic oligonucleotide
  Sense strand starting at position 1220 of SEQ ID NO: 3493
gcccauuuccaugguguuu

SEQ ID NO: 271859 - RNA, 19 nt, Artificial Sequence
  Description of Artificial Sequence: Synthetic oligonucleotide
  Antisense strand to SEQ ID NO: 271858
aaacaccauggaaaugggc

SEQ ID NO: 271860 - RNA, 19 nt, Artificial Sequence
  Description of Artificial Sequence: Synthetic oligonucleotide
  Sense strand starting at position 1262 of SEQ ID NO: 3493
accaaauuccgcuaguaaa

SEQ ID NO: 271861 - RNA, 19 nt, Artificial Sequence
  Description of Artificial Sequence: Synthetic oligonucleotide
  Antisense strand to SEQ ID NO: 271860
uuuacuagcggaauuuggu

SEQ ID NO: 271862 - RNA, 19 nt, Artificial Sequence
  Description of Artificial Sequence: Synthetic oligonucleotide
  Sense strand starting at position 1485 of SEQ ID NO: 3493
cugcuuuacgugcggaaga

SEQ ID NO: 271863 - RNA, 19 nt, Artificial Sequence
  Description of Artificial Sequence: Synthetic oligonucleotide
  Antisense strand to SEQ ID NO: 271862
ucuuccgcacguaaagcag

SEQ ID NO: 271864 - RNA, 19 nt, Artificial Sequence
  Description of Artificial Sequence: Synthetic oligonucleotide
  Sense strand starting at position 1636 of SEQ ID NO: 3493
aagacauagucccggagga

SEQ ID NO: 271865 - RNA, 19 nt, Artificial Sequence
  Description of Artificial Sequence: Synthetic oligonucleotide
  Antisense strand to SEQ ID NO: 271864
uccuccgggacuaugucuu

SEQ ID NO: 271866 - RNA, 19 nt, Artificial Sequence
  Description of Artificial Sequence: Synthetic oligonucleotide
  Sense strand starting at position 2155 of SEQ ID NO: 3493
ucugguggcugccuuauua

SEQ ID NO: 271867 - RNA, 19 nt, Artificial Sequence
  Description of Artificial Sequence: Synthetic oligonucleotide
  Antisense strand to SEQ ID NO: 271866
uaauaaggcagccaccaga

SEQ ID NO: 271868 - RNA, 19 nt, Artificial Sequence
  Description of Artificial Sequence: Synthetic oligonucleotide
  Sense strand starting at position 2611 of SEQ ID NO: 3493
gaugcagggucuucuggaa

SEQ ID NO: 271869 - RNA, 19 nt, Artificial Sequence
  Description of Artificial Sequence: Synthetic oligonucleotide
  Antisense strand to SEQ ID NO: 271868
uuccagaagacccugcauc

SEQ ID NO: 271870 - RNA, 19 nt, Artificial Sequence
  Description of Artificial Sequence: Synthetic oligonucleotide
  Sense strand starting at position 2824 of SEQ ID NO: 3493
gcagcaaucugacuuguaa

SEQ ID NO: 271871 - RNA, 19 nt, Artificial Sequence
  Description of Artificial Sequence: Synthetic oligonucleotide
  Antisense strand to SEQ ID NO: 271870
uuacaagucagauugcugc

SEQ ID NO: 271872 - RNA, 19 nt, Artificial Sequence
  Description of Artificial Sequence: Synthetic oligonucleotide
  Sense strand starting at position 2903 of SEQ ID NO: 3493
auuccuaccugguauggaa

SEQ ID NO: 271873 - RNA, 19 nt, Artificial Sequence
  Description of Artificial Sequence: Synthetic oligonucleotide
  Antisense strand to SEQ ID NO: 271872
uuccauaccagguaggaau

SEQ ID NO: 271874 - RNA, 19 nt, Artificial Sequence
  Description of Artificial Sequence: Synthetic oligonucleotide
  Sense strand starting at position 3027 of SEQ ID NO: 3493
guggcuaugcauuagaauc

SEQ ID NO: 271875 - RNA, 19 nt, Artificial Sequence
  Description of Artificial Sequence: Synthetic oligonucleotide
  Antisense strand to SEQ ID NO: 271874
gauucuaaugcauagccac

SEQ ID NO: 271876 - RNA, 19 nt, Artificial Sequence
  Description of Artificial Sequence: Synthetic oligonucleotide
  Sense strand starting at position 3098 of SEQ ID NO: 3493
auuaaauccuuggaaauga

SEQ ID NO: 271877 - RNA, 19 nt, Artificial Sequence
  Description of Artificial Sequence: Synthetic oligonucleotide
  Antisense strand to SEQ ID NO: 271876
ucauuuccaaggauuuaau

SEQ ID NO: 271878 - RNA, 19 nt, Artificial Sequence
  Description of Artificial Sequence: Synthetic oligonucleotide
  Sense strand starting at position 3161 of SEQ ID NO: 3493
agugcacagucguugauau

SEQ ID NO: 271879 - RNA, 19 nt, Artificial Sequence
  Description of Artificial Sequence: Synthetic oligonucleotide
  Antisense strand to SEQ ID NO: 271878
auaucaacgacugugcacu

SEQ ID NO: 271880 - RNA, 19 nt, Artificial Sequence
  Description of Artificial Sequence: Synthetic oligonucleotide
  Sense strand starting at position 3162 of SEQ ID NO: 3493
gugcacagucguugauaua

SEQ ID NO: 271881 - RNA, 19 nt, Artificial Sequence
  Description of Artificial Sequence: Synthetic oligonucleotide
  Antisense strand to SEQ ID NO: 271880
uauaucaacgacugugcac

SEQ ID NO: 271882 - RNA, 19 nt, Artificial Sequence
  Description of Artificial Sequence: Synthetic oligonucleotide
  Sense strand starting at position 3163 of SEQ ID NO: 3493
ugcacagucguugauauag

SEQ ID NO: 271883 - RNA, 19 nt, Artificial Sequence
  Description of Artificial Sequence: Synthetic oligonucleotide
  Antisense strand to SEQ ID NO: 271882
cuauaucaacgacugugca

SEQ ID NO: 271884 - RNA, 19 nt, Artificial Sequence
  Description of Artificial Sequence: Synthetic oligonucleotide
  Sense strand starting at position 3169 of SEQ ID NO: 3493
gucguugauauagagugaa

SEQ ID NO: 271885 - RNA, 19 nt, Artificial Sequence
  Description of Artificial Sequence: Synthetic oligonucleotide
  Antisense strand to SEQ ID NO: 271884
uucacucuauaucaacgac

SEQ ID NO: 271886 - RNA, 19 nt, Artificial Sequence
  Description of Artificial Sequence: Synthetic oligonucleotide
  Sense strand starting at position 3172 of SEQ ID NO: 3493
guugauauagagugaauca

SEQ ID NO: 271887 - RNA, 19 nt, Artificial Sequence
  Description of Artificial Sequence: Synthetic oligonucleotide
  Antisense strand to SEQ ID NO: 271886
ugauucacucuauaucaac

SEQ ID NO: 271888 - RNA, 19 nt, Artificial Sequence
  Description of Artificial Sequence: Synthetic oligonucleotide
  Sense strand starting at position 3187 of SEQ ID NO: 3493
aucaaaugauugcuugaga

SEQ ID NO: 271889 - RNA, 19 nt, Artificial Sequence
  Description of Artificial Sequence: Synthetic oligonucleotide
  Antisense strand to SEQ ID NO: 271888
ucucaagcaaucauuugau

SEQ ID NO: 271890 - RNA, 19 nt, Artificial Sequence
  Description of Artificial Sequence: Synthetic oligonucleotide
  Sense strand starting at position 3188 of SEQ ID NO: 3493
ucaaaugauugcuugagag

SEQ ID NO: 271891 - RNA, 19 nt, Artificial Sequence
  Description of Artificial Sequence: Synthetic oligonucleotide
  Antisense strand to SEQ ID NO: 271890
cucucaagcaaucauuuga

SEQ ID NO: 271892 - RNA, 19 nt, Artificial Sequence
  Description of Artificial Sequence: Synthetic oligonucleotide
  Sense strand starting at position 3190 of SEQ ID NO: 3493
aaaugauugcuugagagca

SEQ ID NO: 271893 - RNA, 19 nt, Artificial Sequence
  Description of Artificial Sequence: Synthetic oligonucleotide
  Antisense strand to SEQ ID NO: 271892
ugcucucaagcaaucauuu

SEQ ID NO: 271894 - RNA, 19 nt, Artificial Sequence
  Description of Artificial Sequence: Synthetic oligonucleotide
  Sense strand starting at position 3283 of SEQ ID NO: 3493
gggauuuauuaauguaucu

SEQ ID NO: 271895 - RNA, 19 nt, Artificial Sequence
  Description of Artificial Sequence: Synthetic oligonucleotide
  Antisense strand to SEQ ID NO: 271894
agauacauuaauaaauccc

SEQ ID NO: 271896 - RNA, 19 nt, Artificial Sequence
  Description of Artificial Sequence: Synthetic oligonucleotide
  Sense strand starting at position 3303 of SEQ ID NO: 3493
gcagcacaauguuuguuaa

SEQ ID NO: 271897 - RNA, 19 nt, Artificial Sequence
  Description of Artificial Sequence: Synthetic oligonucleotide
  Antisense strand to SEQ ID NO: 271896
uuaacaaacauugugcugc

SEQ ID NO: 271898 - RNA, 19 nt, Artificial Sequence
  Description of Artificial Sequence: Synthetic oligonucleotide
  Sense strand starting at position 3305 of SEQ ID NO: 3493
agcacaauguuuguuaaug

SEQ ID NO: 271899 - RNA, 19 nt, Artificial Sequence
  Description of Artificial Sequence: Synthetic oligonucleotide
  Antisense strand to SEQ ID NO: 271898
cauuaacaaacauugugcu

SEQ ID NO: 271900 - RNA, 19 nt, Artificial Sequence
  Description of Artificial Sequence: Synthetic oligonucleotide
  Sense strand starting at position 3358 of SEQ ID NO: 3493
uggaacuaacuuugaguuu

SEQ ID NO: 271901 - RNA, 19 nt, Artificial Sequence
  Description of Artificial Sequence: Synthetic oligonucleotide
  Antisense strand to SEQ ID NO: 271900
aaacucaaaguuaguucca

SEQ ID NO: 271902 - RNA, 19 nt, Artificial Sequence
  Description of Artificial Sequence: Synthetic oligonucleotide
  Sense strand starting at position 3373 of SEQ ID NO: 3493
guuugauccugugcuucuu

SEQ ID NO: 271903 - RNA, 19 nt, Artificial Sequence
  Description of Artificial Sequence: Synthetic oligonucleotide
  Antisense strand to SEQ ID NO: 271902
aagaagcacaggaucaaac

SEQ ID NO: 271904 - RNA, 19 nt, Artificial Sequence
  Description of Artificial Sequence: Synthetic oligonucleotide
  Sense strand starting at position 3540 of SEQ ID NO: 3493
gccaauccauccugaauag

SEQ ID NO: 271905 - RNA, 19 nt, Artificial Sequence
  Description of Artificial Sequence: Synthetic oligonucleotide
  Antisense strand to SEQ ID NO: 271904
cuauucaggauggauuggc

SEQ ID NO: 271906 - RNA, 19 nt, Artificial Sequence
  Description of Artificial Sequence: Synthetic oligonucleotide
  Sense strand starting at position 3579 of SEQ ID NO: 3493
gagaccuacuggguuguau

SEQ ID NO: 271907 - RNA, 19 nt, Artificial Sequence
  Description of Artificial Sequence: Synthetic oligonucleotide
  Antisense strand to SEQ ID NO: 271906
auacaacccaguaggucuc

SEQ ID NO: 271908 - RNA, 19 nt, Artificial Sequence
  Description of Artificial Sequence: Synthetic oligonucleotide
  Sense strand starting at position 3588 of SEQ ID NO: 3493
uggguuguauucccagaag

SEQ ID NO: 271909 - RNA, 19 nt, Artificial Sequence
  Description of Artificial Sequence: Synthetic oligonucleotide
  Antisense strand to SEQ ID NO: 271908
cuucugggaauacaaccca

SEQ ID NO: 271910 - RNA, 19 nt, Artificial Sequence
  Description of Artificial Sequence: Synthetic oligonucleotide
  Sense strand starting at position 3591 of SEQ ID NO: 3493
guuguauucccagaagguu

SEQ ID NO: 271911 - RNA, 19 nt, Artificial Sequence
  Description of Artificial Sequence: Synthetic oligonucleotide
  Antisense strand to SEQ ID NO: 271910
aaccuucugggaauacaac

SEQ ID NO: 271912 - RNA, 19 nt, Artificial Sequence
  Description of Artificial Sequence: Synthetic oligonucleotide
  Sense strand starting at position 3610 of SEQ ID NO: 3493
acgcaugcuuagucacaga

SEQ ID NO: 271913 - RNA, 19 nt, Artificial Sequence
  Description of Artificial Sequence: Synthetic oligonucleotide
  Antisense strand to SEQ ID NO: 271912
ucugugacuaagcaugcgu

SEQ ID NO: 271914 - RNA, 19 nt, Artificial Sequence
  Description of Artificial Sequence: Synthetic oligonucleotide
  Sense strand starting at position 3667 of SEQ ID NO: 3493
auggccugguguccugaaa

SEQ ID NO: 271915 - RNA, 19 nt, Artificial Sequence
  Description of Artificial Sequence: Synthetic oligonucleotide
  Antisense strand to SEQ ID NO: 271914
uuucaggacaccaggccau

SEQ ID NO: 271916 - RNA, 19 nt, Artificial Sequence
  Description of Artificial Sequence: Synthetic oligonucleotide
  Sense strand starting at position 310 of SEQ ID NO: 3494
ucuagcuugguguaauauu

SEQ ID NO: 271917 - RNA, 19 nt, Artificial Sequence
  Description of Artificial Sequence: Synthetic oligonucleotide
  Antisense strand to SEQ ID NO: 271916
aauauuacaccaagcuaga

SEQ ID NO: 271918 - RNA, 19 nt, Artificial Sequence
  Description of Artificial Sequence: Synthetic oligonucleotide
  Sense strand starting at position 318 of SEQ ID NO: 3494
gguguaauauuacuacaua

SEQ ID NO: 271919 - RNA, 19 nt, Artificial Sequence
  Description of Artificial Sequence: Synthetic oligonucleotide
  Antisense strand to SEQ ID NO: 271918
uauguaguaauauuacacc

SEQ ID NO: 271920 - RNA, 19 nt, Artificial Sequence
  Description of Artificial Sequence: Synthetic oligonucleotide
  Sense strand starting at position 436 of SEQ ID NO: 3494
gaaagaaagcaauggcaua

SEQ ID NO: 271921 - RNA, 19 nt, Artificial Sequence
  Description of Artificial Sequence: Synthetic oligonucleotide
  Antisense strand to SEQ ID NO: 271920
uaugccauugcuuucuuuc

SEQ ID NO: 271922 - RNA, 19 nt, Artificial Sequence
  Description of Artificial Sequence: Synthetic oligonucleotide
  Sense strand starting at position 603 of SEQ ID NO: 3494
aucagagauugauagauga

SEQ ID NO: 271923 - RNA, 19 nt, Artificial Sequence
  Description of Artificial Sequence: Synthetic oligonucleotide
  Antisense strand to SEQ ID NO: 271922
ucaucuaucaaucucugau

SEQ ID NO: 271924 - RNA, 19 nt, Artificial Sequence
  Description of Artificial Sequence: Synthetic oligonucleotide
  Sense strand starting at position 1124 of SEQ ID NO: 3494
ugccuagugcacuauaaag

SEQ ID NO: 271925 - RNA, 19 nt, Artificial Sequence
  Description of Artificial Sequence: Synthetic oligonucleotide
  Antisense strand to SEQ ID NO: 271924
cuuuauagugcacuaggca

SEQ ID NO: 271926 - RNA, 19 nt, Artificial Sequence
  Description of Artificial Sequence: Synthetic oligonucleotide
  Sense strand starting at position 1255 of SEQ ID NO: 3494
ggagacuucuagucaugua

SEQ ID NO: 271927 - RNA, 19 nt, Artificial Sequence
  Description of Artificial Sequence: Synthetic oligonucleotide
  Antisense strand to SEQ ID NO: 271926
uacaugacuagaagucucc

SEQ ID NO: 271928 - RNA, 19 nt, Artificial Sequence
  Description of Artificial Sequence: Synthetic oligonucleotide
  Sense strand starting at position 1263 of SEQ ID NO: 3494
cuagucauguaaguuaaua

SEQ ID NO: 271929 - RNA, 19 nt, Artificial Sequence
  Description of Artificial Sequence: Synthetic oligonucleotide
  Antisense strand to SEQ ID NO: 271928
uauuaacuuacaugacuag

SEQ ID NO: 271930 - RNA, 19 nt, Artificial Sequence
  Description of Artificial Sequence: Synthetic oligonucleotide
  Sense strand starting at position 1329 of SEQ ID NO: 3494
gcaggagucacccaaauug

SEQ ID NO: 271931 - RNA, 19 nt, Artificial Sequence
  Description of Artificial Sequence: Synthetic oligonucleotide
  Antisense strand to SEQ ID NO: 271930
caauuugggugacuccugc

SEQ ID NO: 271932 - RNA, 19 nt, Artificial Sequence
  Description of Artificial Sequence: Synthetic oligonucleotide
  Sense strand starting at position 1396 of SEQ ID NO: 3494
ggaauuugcuaagcugcua

SEQ ID NO: 271933 - RNA, 19 nt, Artificial Sequence
  Description of Artificial Sequence: Synthetic oligonucleotide
  Antisense strand to SEQ ID NO: 271932
uagcagcuuagcaaauucc

SEQ ID NO: 271934 - RNA, 19 nt, Artificial Sequence
  Description of Artificial Sequence: Synthetic oligonucleotide
  Sense strand starting at position 1911 of SEQ ID NO: 3494
caugcaugucaggacuuua

SEQ ID NO: 271935 - RNA, 19 nt, Artificial Sequence
  Description of Artificial Sequence: Synthetic oligonucleotide
  Antisense strand to SEQ ID NO: 271934
uaaaguccugacaugcaug

SEQ ID NO: 271936 - RNA, 19 nt, Artificial Sequence
  Description of Artificial Sequence: Synthetic oligonucleotide
  Sense strand starting at position 2038 of SEQ ID NO: 3494
ggauauauuucccaagcac

SEQ ID NO: 271937 - RNA, 19 nt, Artificial Sequence
  Description of Artificial Sequence: Synthetic oligonucleotide
  Antisense strand to SEQ ID NO: 271936
gugcuugggaaauauaucc

SEQ ID NO: 271938 - RNA, 19 nt, Artificial Sequence
  Description of Artificial Sequence: Synthetic oligonucleotide
  Sense strand starting at position 2068 of SEQ ID NO: 3494
acgaccucuucuguaauau

SEQ ID NO: 271939 - RNA, 19 nt, Artificial Sequence
  Description of Artificial Sequence: Synthetic oligonucleotide
  Antisense strand to SEQ ID NO: 271938
auauuacagaagaggucgu

SEQ ID NO: 271940 - RNA, 19 nt, Artificial Sequence
  Description of Artificial Sequence: Synthetic oligonucleotide
  Sense strand starting at position 2069 of SEQ ID NO: 3494
cgaccucuucuguaauaug

SEQ ID NO: 271941 - RNA, 19 nt, Artificial Sequence
  Description of Artificial Sequence: Synthetic oligonucleotide
  Antisense strand to SEQ ID NO: 271940
cauauuacagaagaggucg

SEQ ID NO: 271942 - RNA, 19 nt, Artificial Sequence
  Description of Artificial Sequence: Synthetic oligonucleotide
  Sense strand starting at position 2356 of SEQ ID NO: 3494
ugcugugcucuucuuugua

SEQ ID NO: 271943 - RNA, 19 nt, Artificial Sequence
  Description of Artificial Sequence: Synthetic oligonucleotide
  Antisense strand to SEQ ID NO: 271942
uacaaagaagagcacagca

SEQ ID NO: 271944 - RNA, 19 nt, Artificial Sequence
  Description of Artificial Sequence: Synthetic oligonucleotide
  Sense strand starting at position 2411 of SEQ ID NO: 3494
cuaugaguuuggcuuuaaa

SEQ ID NO: 271945 - RNA, 19 nt, Artificial Sequence
  Description of Artificial Sequence: Synthetic oligonucleotide
  Antisense strand to SEQ ID NO: 271944
uuuaaagccaaacucauag

SEQ ID NO: 271946 - RNA, 19 nt, Artificial Sequence
  Description of Artificial Sequence: Synthetic oligonucleotide
  Sense strand starting at position 2478 of SEQ ID NO: 3494
guagauauugcccauuguc

SEQ ID NO: 271947 - RNA, 19 nt, Artificial Sequence
  Description of Artificial Sequence: Synthetic oligonucleotide
  Antisense strand to SEQ ID NO: 271946
gacaaugggcaauaucuac

SEQ ID NO: 271948 - RNA, 19 nt, Artificial Sequence
  Description of Artificial Sequence: Synthetic oligonucleotide
  Sense strand starting at position 2514 of SEQ ID NO: 3494
gcaacuagguagucuaaca

SEQ ID NO: 271949 - RNA, 19 nt, Artificial Sequence
  Description of Artificial Sequence: Synthetic oligonucleotide
  Antisense strand to SEQ ID NO: 271948
uguuagacuaccuaguugc

SEQ ID NO: 271950 - RNA, 19 nt, Artificial Sequence
  Description of Artificial Sequence: Synthetic oligonucleotide
  Sense strand starting at position 2612 of SEQ ID NO: 3494
gucuauuaacaccaaaugu

SEQ ID NO: 271951 - RNA, 19 nt, Artificial Sequence
  Description of Artificial Sequence: Synthetic oligonucleotide
  Antisense strand to SEQ ID NO: 271950
acauuugguguuaauagac

SEQ ID NO: 271952 - RNA, 19 nt, Artificial Sequence
  Description of Artificial Sequence: Synthetic oligonucleotide
  Sense strand starting at position 2636 of SEQ ID NO: 3494
agugcuaagcagucgguau

SEQ ID NO: 271953 - RNA, 19 nt, Artificial Sequence
  Description of Artificial Sequence: Synthetic oligonucleotide
  Antisense strand to SEQ ID NO: 271952
auaccgacugcuuagcacu

SEQ ID NO: 271954 - RNA, 19 nt, Artificial Sequence
  Description of Artificial Sequence: Synthetic oligonucleotide
  Sense strand starting at position 2769 of SEQ ID NO: 3494
ccauguucucuuuagaguu

SEQ ID NO: 271955 - RNA, 19 nt, Artificial Sequence
  Description of Artificial Sequence: Synthetic oligonucleotide
  Antisense strand to SEQ ID NO: 271954
aacucuaaagagaacaugg

SEQ ID NO: 271956 - RNA, 19 nt, Artificial Sequence
  Description of Artificial Sequence: Synthetic oligonucleotide
  Sense strand starting at position 2777 of SEQ ID NO: 3494
ucuuuagaguugcccagaa

SEQ ID NO: 271957 - RNA, 19 nt, Artificial Sequence
  Description of Artificial Sequence: Synthetic oligonucleotide
  Antisense strand to SEQ ID NO: 271956
uucugggcaacucuaaaga

SEQ ID NO: 271958 - RNA, 19 nt, Artificial Sequence
  Description of Artificial Sequence: Synthetic oligonucleotide
  Sense strand starting at position 2779 of SEQ ID NO: 3494
uuuagaguugcccagaaua

SEQ ID NO: 271959 - RNA, 19 nt, Artificial Sequence
  Description of Artificial Sequence: Synthetic oligonucleotide
  Antisense strand to SEQ ID NO: 271958
uauucugggcaacucuaaa

SEQ ID NO: 271960 - RNA, 19 nt, Artificial Sequence
  Description of Artificial Sequence: Synthetic oligonucleotide
  Sense strand starting at position 2781 of SEQ ID NO: 3494
uagaguugcccagaauacu

SEQ ID NO: 271961 - RNA, 19 nt, Artificial Sequence
  Description of Artificial Sequence: Synthetic oligonucleotide
  Antisense strand to SEQ ID NO: 271960
aguauucugggcaacucua

SEQ ID NO: 271962 - RNA, 19 nt, Artificial Sequence
  Description of Artificial Sequence: Synthetic oligonucleotide
  Sense strand starting at position 2790 of SEQ ID NO: 3494
ccagaauacuuaguuugga

SEQ ID NO: 271963 - RNA, 19 nt, Artificial Sequence
  Description of Artificial Sequence: Synthetic oligonucleotide
  Antisense strand to SEQ ID NO: 271962
uccaaacuaaguauucugg

SEQ ID NO: 271964 - RNA, 19 nt, Artificial Sequence
  Description of Artificial Sequence: Synthetic oligonucleotide
  Sense strand starting at position 2806 of SEQ ID NO: 3494
ggaccucuguuauucugau

SEQ ID NO: 271965 - RNA, 19 nt, Artificial Sequence
  Description of Artificial Sequence: Synthetic oligonucleotide
  Antisense strand to SEQ ID NO: 271964
aucagaauaacagaggucc

SEQ ID NO: 271966 - RNA, 19 nt, Artificial Sequence
  Description of Artificial Sequence: Synthetic oligonucleotide
  Sense strand starting at position 2882 of SEQ ID NO: 3494
uuuauuauuugugugccua

SEQ ID NO: 271967 - RNA, 19 nt, Artificial Sequence
  Description of Artificial Sequence: Synthetic oligonucleotide
  Antisense strand to SEQ ID NO: 271966
uaggcacacaaauaauaaa

SEQ ID NO: 271968 - RNA, 19 nt, Artificial Sequence
  Description of Artificial Sequence: Synthetic oligonucleotide
  Sense strand starting at position 2883 of SEQ ID NO: 3494
uuauuauuugugugccuaa

SEQ ID NO: 271969 - RNA, 19 nt, Artificial Sequence
  Description of Artificial Sequence: Synthetic oligonucleotide
  Antisense strand to SEQ ID NO: 271968
uuaggcacacaaauaauaa

SEQ ID NO: 271970 - RNA, 19 nt, Artificial Sequence
  Description of Artificial Sequence: Synthetic oligonucleotide
  Sense strand starting at position 3188 of SEQ ID NO: 3494
uggaguaucuuugcaugag

SEQ ID NO: 271971 - RNA, 19 nt, Artificial Sequence
  Description of Artificial Sequence: Synthetic oligonucleotide
  Antisense strand to SEQ ID NO: 271970
cucaugcaaagauacucca

SEQ ID NO: 271972 - RNA, 19 nt, Artificial Sequence
  Description of Artificial Sequence: Synthetic oligonucleotide
  Sense strand starting at position 3222 of SEQ ID NO: 3494
cuuuguuguguguuagugu

SEQ ID NO: 271973 - RNA, 19 nt, Artificial Sequence
  Description of Artificial Sequence: Synthetic oligonucleotide
  Antisense strand to SEQ ID NO: 271972
acacuaacacacaacaaag

SEQ ID NO: 271974 - RNA, 19 nt, Artificial Sequence
  Description of Artificial Sequence: Synthetic oligonucleotide
  Sense strand starting at position 3230 of SEQ ID NO: 3494
uguguuaguguuuaaauga

SEQ ID NO: 271975 - RNA, 19 nt, Artificial Sequence
  Description of Artificial Sequence: Synthetic oligonucleotide
  Antisense strand to SEQ ID NO: 271974
ucauuuaaacacuaacaca

SEQ ID NO: 271976 - RNA, 19 nt, Artificial Sequence
  Description of Artificial Sequence: Synthetic oligonucleotide
  Sense strand starting at position 3324 of SEQ ID NO: 3494
guguguucucaccaacacu

SEQ ID NO: 271977 - RNA, 19 nt, Artificial Sequence
  Description of Artificial Sequence: Synthetic oligonucleotide
  Antisense strand to SEQ ID NO: 271976
aguguuggugagaacacac

SEQ ID NO: 271978 - RNA, 19 nt, Artificial Sequence
  Description of Artificial Sequence: Synthetic oligonucleotide
  Sense strand starting at position 3486 of SEQ ID NO: 3494
ugccauuuguguuccuauu

SEQ ID NO: 271979 - RNA, 19 nt, Artificial Sequence
  Description of Artificial Sequence: Synthetic oligonucleotide
  Antisense strand to SEQ ID NO: 271978
aauaggaacacaaauggca

SEQ ID NO: 271980 - RNA, 19 nt, Artificial Sequence
  Description of Artificial Sequence: Synthetic oligonucleotide
  Sense strand starting at position 3492 of SEQ ID NO: 3494
uuguguuccuauuuauccu

SEQ ID NO: 271981 - RNA, 19 nt, Artificial Sequence
  Description of Artificial Sequence: Synthetic oligonucleotide
  Antisense strand to SEQ ID NO: 271980
aggauaaauaggaacacaa

SEQ ID NO: 271982 - RNA, 19 nt, Artificial Sequence
  Description of Artificial Sequence: Synthetic oligonucleotide
  Sense strand starting at position 3524 of SEQ ID NO: 3494
ccuuguuuccaggaugacu

SEQ ID NO: 271983 - RNA, 19 nt, Artificial Sequence
  Description of Artificial Sequence: Synthetic oligonucleotide
  Antisense strand to SEQ ID NO: 271982
agucauccuggaaacaagg

SEQ ID NO: 271984 - RNA, 19 nt, Artificial Sequence
  Description of Artificial Sequence: Synthetic oligonucleotide
  Sense strand starting at position 3533 of SEQ ID NO: 3494
caggaugacuugucugcaa

SEQ ID NO: 271985 - RNA, 19 nt, Artificial Sequence
  Description of Artificial Sequence: Synthetic oligonucleotide
  Antisense strand to SEQ ID NO: 271984
uugcagacaagucauccug

SEQ ID NO: 271986 - RNA, 19 nt, Artificial Sequence
  Description of Artificial Sequence: Synthetic oligonucleotide
  Sense strand starting at position 3535 of SEQ ID NO: 3494
ggaugacuugucugcaacu

SEQ ID NO: 271987 - RNA, 19 nt, Artificial Sequence
  Description of Artificial Sequence: Synthetic oligonucleotide
  Antisense strand to SEQ ID NO: 271986
aguugcagacaagucaucc

SEQ ID NO: 271988 - RNA, 19 nt, Artificial Sequence
  Description of Artificial Sequence: Synthetic oligonucleotide
  Sense strand starting at position 3537 of SEQ ID NO: 3494
augacuugucugcaacuuu

SEQ ID NO: 271989 - RNA, 19 nt, Artificial Sequence
  Description of Artificial Sequence: Synthetic oligonucleotide
  Antisense strand to SEQ ID NO: 271988
aaaguugcagacaagucau

SEQ ID NO: 271990 - RNA, 19 nt, Artificial Sequence
  Description of Artificial Sequence: Synthetic oligonucleotide
  Sense strand starting at position 3661 of SEQ ID NO: 3494
gcaaguauacaugacuuau

SEQ ID NO: 271991 - RNA, 19 nt, Artificial Sequence
  Description of Artificial Sequence: Synthetic oligonucleotide
  Antisense strand to SEQ ID NO: 271990
auaagucauguauacuugc

SEQ ID NO: 271992 - RNA, 19 nt, Artificial Sequence
  Description of Artificial Sequence: Synthetic oligonucleotide
  Sense strand starting at position 3882 of SEQ ID NO: 3494
ggguccagauuggucuuua

SEQ ID NO: 271993 - RNA, 19 nt, Artificial Sequence
  Description of Artificial Sequence: Synthetic oligonucleotide
  Antisense strand to SEQ ID NO: 271992
uaaagaccaaucuggaccc

SEQ ID NO: 271994 - RNA, 19 nt, Artificial Sequence
  Description of Artificial Sequence: Synthetic oligonucleotide
  Sense strand starting at position 3883 of SEQ ID NO: 3494
gguccagauuggucuuuaa

SEQ ID NO: 271995 - RNA, 19 nt, Artificial Sequence
  Description of Artificial Sequence: Synthetic oligonucleotide
  Antisense strand to SEQ ID NO: 271994
uuaaagaccaaucuggacc

SEQ ID NO: 271996 - RNA, 19 nt, Artificial Sequence
  Description of Artificial Sequence: Synthetic oligonucleotide
  Sense strand starting at position 331 of SEQ ID NO: 3496
ucgcaagauccagaaacgu

SEQ ID NO: 271997 - RNA, 19 nt, Artificial Sequence
  Description of Artificial Sequence: Synthetic oligonucleotide
  Antisense strand to SEQ ID NO: 271996
acguuucuggaucuugcga

SEQ ID NO: 271998 - RNA, 19 nt, Artificial Sequence
  Description of Artificial Sequence: Synthetic oligonucleotide
  Sense strand starting at position 345 of SEQ ID NO: 3496
aacguagcauauuuguauu

SEQ ID NO: 271999 - RNA, 19 nt, Artificial Sequence
  Description of Artificial Sequence: Synthetic oligonucleotide
  Antisense strand to SEQ ID NO: 271998
aauacaaauaugcuacguu

SEQ ID NO: 272000 - RNA, 19 nt, Artificial Sequence
  Description of Artificial Sequence: Synthetic oligonucleotide
  Sense strand starting at position 347 of SEQ ID NO: 3496
cguagcauauuuguauuaa

SEQ ID NO: 272001 - RNA, 19 nt, Artificial Sequence
  Description of Artificial Sequence: Synthetic oligonucleotide
  Antisense strand to SEQ ID NO: 272000
uuaauacaaauaugcuacg

SEQ ID NO: 272002 - RNA, 19 nt, Artificial Sequence
  Description of Artificial Sequence: Synthetic oligonucleotide
  Sense strand starting at position 496 of SEQ ID NO: 3496
uauuauuuaugaugggaug

SEQ ID NO: 272003 - RNA, 19 nt, Artificial Sequence
  Description of Artificial Sequence: Synthetic oligonucleotide
  Antisense strand to SEQ ID NO: 272002
caucccaucauaaauaaua

SEQ ID NO: 272004 - RNA, 19 nt, Artificial Sequence
  Description of Artificial Sequence: Synthetic oligonucleotide
  Sense strand starting at position 499 of SEQ ID NO: 3496
uauuuaugaugggaugcau

SEQ ID NO: 272005 - RNA, 19 nt, Artificial Sequence
  Description of Artificial Sequence: Synthetic oligonucleotide
  Antisense strand to SEQ ID NO: 272004
augcaucccaucauaaaua

SEQ ID NO: 272006 - RNA, 19 nt, Artificial Sequence
  Description of Artificial Sequence: Synthetic oligonucleotide
  Sense strand starting at position 687 of SEQ ID NO: 3496
gaguaugcuccugauagga

SEQ ID NO: 272007 - RNA, 19 nt, Artificial Sequence
  Description of Artificial Sequence: Synthetic oligonucleotide
  Antisense strand to SEQ ID NO: 272006
uccuaucaggagcauacuc

SEQ ID NO: 272008 - RNA, 19 nt, Artificial Sequence
  Description of Artificial Sequence: Synthetic oligonucleotide
  Sense strand starting at position 752 of SEQ ID NO: 3496
uuacgagucugauuggaag

SEQ ID NO: 272009 - RNA, 19 nt, Artificial Sequence
  Description of Artificial Sequence: Synthetic oligonucleotide
  Antisense strand to SEQ ID NO: 272008
cuuccaaucagacucguaa

SEQ ID NO: 272010 - RNA, 19 nt, Artificial Sequence
  Description of Artificial Sequence: Synthetic oligonucleotide
  Sense strand starting at position 754 of SEQ ID NO: 3496
acgagucugauuggaagau

SEQ ID NO: 272011 - RNA, 19 nt, Artificial Sequence
  Description of Artificial Sequence: Synthetic oligonucleotide
  Antisense strand to SEQ ID NO: 272010
aucuuccaaucagacucgu

SEQ ID NO: 272012 - RNA, 19 nt, Artificial Sequence
  Description of Artificial Sequence: Synthetic oligonucleotide
  Sense strand starting at position 779 of SEQ ID NO: 3496
uccauagacuaguuucuga

SEQ ID NO: 272013 - RNA, 19 nt, Artificial Sequence
  Description of Artificial Sequence: Synthetic oligonucleotide
  Antisense strand to SEQ ID NO: 272012
ucagaaacuagucuaugga

SEQ ID NO: 272014 - RNA, 19 nt, Artificial Sequence
  Description of Artificial Sequence: Synthetic oligonucleotide
  Sense strand starting at position 782 of SEQ ID NO: 3496
auagacuaguuucugacuu

SEQ ID NO: 272015 - RNA, 19 nt, Artificial Sequence
  Description of Artificial Sequence: Synthetic oligonucleotide
  Antisense strand to SEQ ID NO: 272014
aagucagaaacuagucuau

SEQ ID NO: 272016 - RNA, 19 nt, Artificial Sequence
  Description of Artificial Sequence: Synthetic oligonucleotide
  Sense strand starting at position 894 of SEQ ID NO: 3496
cuuguauaucugcaucaag

SEQ ID NO: 272017 - RNA, 19 nt, Artificial Sequence
  Description of Artificial Sequence: Synthetic oligonucleotide
  Antisense strand to SEQ ID NO: 272016
cuugaugcagauauacaag

SEQ ID NO: 272018 - RNA, 19 nt, Artificial Sequence
  Description of Artificial Sequence: Synthetic oligonucleotide
  Sense strand starting at position 897 of SEQ ID NO: 3496
guauaucugcaucaagaug

SEQ ID NO: 272019 - RNA, 19 nt, Artificial Sequence
  Description of Artificial Sequence: Synthetic oligonucleotide
  Antisense strand to SEQ ID NO: 272018
caucuugaugcagauauac

SEQ ID NO: 272020 - RNA, 19 nt, Artificial Sequence
  Description of Artificial Sequence: Synthetic oligonucleotide
  Sense strand starting at position 908 of SEQ ID NO: 3496
ucaagauguugagugaacu

SEQ ID NO: 272021 - RNA, 19 nt, Artificial Sequence
  Description of Artificial Sequence: Synthetic oligonucleotide
  Antisense strand to SEQ ID NO: 272020
aguucacucaacaucuuga

SEQ ID NO: 272022 - RNA, 19 nt, Artificial Sequence
  Description of Artificial Sequence: Synthetic oligonucleotide
  Sense strand starting at position 909 of SEQ ID NO: 3496
caagauguugagugaacug

SEQ ID NO: 272023 - RNA, 19 nt, Artificial Sequence
  Description of Artificial Sequence: Synthetic oligonucleotide
  Antisense strand to SEQ ID NO: 272022
caguucacucaacaucuug

SEQ ID NO: 272024 - RNA, 19 nt, Artificial Sequence
  Description of Artificial Sequence: Synthetic oligonucleotide
  Sense strand starting at position 1051 of SEQ ID NO: 3496
ggacuucuucccuagcuac

SEQ ID NO: 272025 - RNA, 19 nt, Artificial Sequence
  Description of Artificial Sequence: Synthetic oligonucleotide
  Antisense strand to SEQ ID NO: 272024
guagcuagggaagaagucc

SEQ ID NO: 272026 - RNA, 19 nt, Artificial Sequence
  Description of Artificial Sequence: Synthetic oligonucleotide
  Sense strand starting at position 1065 of SEQ ID NO: 3496
gcuacaucccaagaauguc

SEQ ID NO: 272027 - RNA, 19 nt, Artificial Sequence
  Description of Artificial Sequence: Synthetic oligonucleotide
  Antisense strand to SEQ ID NO: 272026
gacauucuugggauguagc

SEQ ID NO: 272028 - RNA, 19 nt, Artificial Sequence
  Description of Artificial Sequence: Synthetic oligonucleotide
  Sense strand starting at position 1396 of SEQ ID NO: 3496
aagaucuguguguauccaa

SEQ ID NO: 272029 - RNA, 19 nt, Artificial Sequence
  Description of Artificial Sequence: Synthetic oligonucleotide
  Antisense strand to SEQ ID NO: 272028
uuggauacacacagaucuu

SEQ ID NO: 272030 - RNA, 19 nt, Artificial Sequence
  Description of Artificial Sequence: Synthetic oligonucleotide
  Sense strand starting at position 1494 of SEQ ID NO: 3496
cacccucuugacgaguuaa

SEQ ID NO: 272031 - RNA, 19 nt, Artificial Sequence
  Description of Artificial Sequence: Synthetic oligonucleotide
  Antisense strand to SEQ ID NO: 272030
uuaacucgucaagagggug

SEQ ID NO: 272032 - RNA, 19 nt, Artificial Sequence
  Description of Artificial Sequence: Synthetic oligonucleotide
  Sense strand starting at position 1675 of SEQ ID NO: 3496
uuucucuuccaagaggagu

SEQ ID NO: 272033 - RNA, 19 nt, Artificial Sequence
  Description of Artificial Sequence: Synthetic oligonucleotide
  Antisense strand to SEQ ID NO: 272032
acuccucuuggaagagaaa

SEQ ID NO: 272034 - RNA, 19 nt, Artificial Sequence
  Description of Artificial Sequence: Synthetic oligonucleotide
  Sense strand starting at position 1686 of SEQ ID NO: 3496
agaggaguauaucuuagug

SEQ ID NO: 272035 - RNA, 19 nt, Artificial Sequence
  Description of Artificial Sequence: Synthetic oligonucleotide
  Antisense strand to SEQ ID NO: 272034
cacuaagauauacuccucu

SEQ ID NO: 272036 - RNA, 19 nt, Artificial Sequence
  Description of Artificial Sequence: Synthetic oligonucleotide
  Sense strand starting at position 1690 of SEQ ID NO: 3496
gaguauaucuuagugaagg

SEQ ID NO: 272037 - RNA, 19 nt, Artificial Sequence
  Description of Artificial Sequence: Synthetic oligonucleotide
  Antisense strand to SEQ ID NO: 272036
ccuucacuaagauauacuc

SEQ ID NO: 272038 - RNA, 19 nt, Artificial Sequence
  Description of Artificial Sequence: Synthetic oligonucleotide
  Sense strand starting at position 1692 of SEQ ID NO: 3496
guauaucuuagugaaggca

SEQ ID NO: 272039 - RNA, 19 nt, Artificial Sequence
  Description of Artificial Sequence: Synthetic oligonucleotide
  Antisense strand to SEQ ID NO: 272038
ugccuucacuaagauauac

SEQ ID NO: 272040 - RNA, 19 nt, Artificial Sequence
  Description of Artificial Sequence: Synthetic oligonucleotide
  Sense strand starting at position 1707 of SEQ ID NO: 3496
ggcaccaucuugccacaaa

SEQ ID NO: 272041 - RNA, 19 nt, Artificial Sequence
  Description of Artificial Sequence: Synthetic oligonucleotide
  Antisense strand to SEQ ID NO: 272040
uuuguggcaagauggugcc

SEQ ID NO: 272042 - RNA, 19 nt, Artificial Sequence
  Description of Artificial Sequence: Synthetic oligonucleotide
  Sense strand starting at position 2110 of SEQ ID NO: 3496
ucugucagacucuacuuau

SEQ ID NO: 272043 - RNA, 19 nt, Artificial Sequence
  Description of Artificial Sequence: Synthetic oligonucleotide
  Antisense strand to SEQ ID NO: 272042
auaaguagagucugacaga

SEQ ID NO: 272044 - RNA, 19 nt, Artificial Sequence
  Description of Artificial Sequence: Synthetic oligonucleotide
  Sense strand starting at position 2694 of SEQ ID NO: 3496
ggucauuguugacccaauc

SEQ ID NO: 272045 - RNA, 19 nt, Artificial Sequence
  Description of Artificial Sequence: Synthetic oligonucleotide
  Antisense strand to SEQ ID NO: 272044
gauugggucaacaaugacc

SEQ ID NO: 272046 - RNA, 19 nt, Artificial Sequence
  Description of Artificial Sequence: Synthetic oligonucleotide
  Sense strand starting at position 2738 of SEQ ID NO: 3496
cuaguagacuuagccagaa

SEQ ID NO: 272047 - RNA, 19 nt, Artificial Sequence
  Description of Artificial Sequence: Synthetic oligonucleotide
  Antisense strand to SEQ ID NO: 272046
uucuggcuaagucuacuag

SEQ ID NO: 272048 - RNA, 19 nt, Artificial Sequence
  Description of Artificial Sequence: Synthetic oligonucleotide
  Sense strand starting at position 2772 of SEQ ID NO: 3496
augauugagcuuugaguag

SEQ ID NO: 272049 - RNA, 19 nt, Artificial Sequence
  Description of Artificial Sequence: Synthetic oligonucleotide
  Antisense strand to SEQ ID NO: 272048
cuacucaaagcucaaucau

SEQ ID NO: 272050 - RNA, 19 nt, Artificial Sequence
  Description of Artificial Sequence: Synthetic oligonucleotide
  Sense strand starting at position 2778 of SEQ ID NO: 3496
gagcuuugaguagagcuuu

SEQ ID NO: 272051 - RNA, 19 nt, Artificial Sequence
  Description of Artificial Sequence: Synthetic oligonucleotide
  Antisense strand to SEQ ID NO: 272050
aaagcucuacucaaagcuc

SEQ ID NO: 272052 - RNA, 19 nt, Artificial Sequence
  Description of Artificial Sequence: Synthetic oligonucleotide
  Sense strand starting at position 2813 of SEQ ID NO: 3496
acaagauaguucuccagag

SEQ ID NO: 272053 - RNA, 19 nt, Artificial Sequence
  Description of Artificial Sequence: Synthetic oligonucleotide
  Antisense strand to SEQ ID NO: 272052
cucuggagaacuaucuugu

SEQ ID NO: 272054 - RNA, 19 nt, Artificial Sequence
  Description of Artificial Sequence: Synthetic oligonucleotide
  Sense strand starting at position 2854 of SEQ ID NO: 3496
gaugcugaauguccaagau

SEQ ID NO: 272055 - RNA, 19 nt, Artificial Sequence
  Description of Artificial Sequence: Synthetic oligonucleotide
  Antisense strand to SEQ ID NO: 272054
aucuuggacauucagcauc

SEQ ID NO: 272056 - RNA, 19 nt, Artificial Sequence
  Description of Artificial Sequence: Synthetic oligonucleotide
  Sense strand starting at position 3012 of SEQ ID NO: 3496
gaauguuaggcugauguuu

SEQ ID NO: 272057 - RNA, 19 nt, Artificial Sequence
  Description of Artificial Sequence: Synthetic oligonucleotide
  Antisense strand to SEQ ID NO: 272056
aaacaucagccuaacauuc

SEQ ID NO: 272058 - RNA, 19 nt, Artificial Sequence
  Description of Artificial Sequence: Synthetic oligonucleotide
  Sense strand starting at position 3329 of SEQ ID NO: 3496
gaauaugagccauggcuuu

SEQ ID NO: 272059 - RNA, 19 nt, Artificial Sequence
  Description of Artificial Sequence: Synthetic oligonucleotide
  Antisense strand to SEQ ID NO: 272058
aaagccauggcucauauuc

SEQ ID NO: 272060 - RNA, 19 nt, Artificial Sequence
  Description of Artificial Sequence: Synthetic oligonucleotide
  Sense strand starting at position 3398 of SEQ ID NO: 3496
cccaaauuguacuuuggau

SEQ ID NO: 272061 - RNA, 19 nt, Artificial Sequence
  Description of Artificial Sequence: Synthetic oligonucleotide
  Antisense strand to SEQ ID NO: 272060
auccaaaguacaauuuggg

SEQ ID NO: 272062 - RNA, 19 nt, Artificial Sequence
  Description of Artificial Sequence: Synthetic oligonucleotide
  Sense strand starting at position 3570 of SEQ ID NO: 3496
uacgaauaucucuggcaga

SEQ ID NO: 272063 - RNA, 19 nt, Artificial Sequence
  Description of Artificial Sequence: Synthetic oligonucleotide
  Antisense strand to SEQ ID NO: 272062
ucugccagagauauucgua

SEQ ID NO: 272064 - RNA, 19 nt, Artificial Sequence
  Description of Artificial Sequence: Synthetic oligonucleotide
  Sense strand starting at position 3600 of SEQ ID NO: 3496
aaguuaguuugauuccaug

SEQ ID NO: 272065 - RNA, 19 nt, Artificial Sequence
  Description of Artificial Sequence: Synthetic oligonucleotide
  Antisense strand to SEQ ID NO: 272064
cauggaaucaaacuaacuu

SEQ ID NO: 272066 - RNA, 19 nt, Artificial Sequence
  Description of Artificial Sequence: Synthetic oligonucleotide
  Sense strand starting at position 3606 of SEQ ID NO: 3496
guuugauuccaugacuucu

SEQ ID NO: 272067 - RNA, 19 nt, Artificial Sequence
  Description of Artificial Sequence: Synthetic oligonucleotide
  Antisense strand to SEQ ID NO: 272066
agaagucauggaaucaaac

SEQ ID NO: 272068 - RNA, 19 nt, Artificial Sequence
  Description of Artificial Sequence: Synthetic oligonucleotide
  Sense strand starting at position 3767 of SEQ ID NO: 3496
gggcacaaucucugguaca

SEQ ID NO: 272069 - RNA, 19 nt, Artificial Sequence
  Description of Artificial Sequence: Synthetic oligonucleotide
  Antisense strand to SEQ ID NO: 272068
uguaccagagauugugccc

SEQ ID NO: 272070 - RNA, 19 nt, Artificial Sequence
  Description of Artificial Sequence: Synthetic oligonucleotide
  Sense strand starting at position 3778 of SEQ ID NO: 3496
cugguacaaugcuucucaa

SEQ ID NO: 272071 - RNA, 19 nt, Artificial Sequence
  Description of Artificial Sequence: Synthetic oligonucleotide
  Antisense strand to SEQ ID NO: 272070
uugagaagcauuguaccag

SEQ ID NO: 272072 - RNA, 19 nt, Artificial Sequence
  Description of Artificial Sequence: Synthetic oligonucleotide
  Sense strand starting at position 3781 of SEQ ID NO: 3496
guacaaugcuucucaagaa

SEQ ID NO: 272073 - RNA, 19 nt, Artificial Sequence
  Description of Artificial Sequence: Synthetic oligonucleotide
  Antisense strand to SEQ ID NO: 272072
uucuugagaagcauuguac

SEQ ID NO: 272074 - RNA, 19 nt, Artificial Sequence
  Description of Artificial Sequence: Synthetic oligonucleotide
  Sense strand starting at position 3842 of SEQ ID NO: 3496
ucuuuauggcuuuauaugu

SEQ ID NO: 272075 - RNA, 19 nt, Artificial Sequence
  Description of Artificial Sequence: Synthetic oligonucleotide
  Antisense strand to SEQ ID NO: 272074
acauauaaagccauaaaga

SEQ ID NO: 272076 - RNA, 19 nt, Artificial Sequence
  Description of Artificial Sequence: Synthetic oligonucleotide
  Sense strand starting at position 373 of SEQ ID NO: 3497
ucaucuuaacaccggaauu

SEQ ID NO: 272077 - RNA, 19 nt, Artificial Sequence
  Description of Artificial Sequence: Synthetic oligonucleotide
  Antisense strand to SEQ ID NO: 272076
aauuccgguguuaagauga

SEQ ID NO: 272078 - RNA, 19 nt, Artificial Sequence
  Description of Artificial Sequence: Synthetic oligonucleotide
  Sense strand starting at position 383 of SEQ ID NO: 3497
accggaauucuggagcaca

SEQ ID NO: 272079 - RNA, 19 nt, Artificial Sequence
  Description of Artificial Sequence: Synthetic oligonucleotide
  Antisense strand to SEQ ID NO: 272078
ugugcuccagaauuccggu

SEQ ID NO: 272080 - RNA, 19 nt, Artificial Sequence
  Description of Artificial Sequence: Synthetic oligonucleotide
  Sense strand starting at position 508 of SEQ ID NO: 3497
aagacaaagugucuugaca

SEQ ID NO: 272081 - RNA, 19 nt, Artificial Sequence
  Description of Artificial Sequence: Synthetic oligonucleotide
  Antisense strand to SEQ ID NO: 272080
ugucaagacacuuugucuu

SEQ ID NO: 272082 - RNA, 19 nt, Artificial Sequence
  Description of Artificial Sequence: Synthetic oligonucleotide
  Sense strand starting at position 539 of SEQ ID NO: 3497
guguuauugggugauauau

SEQ ID NO: 272083 - RNA, 19 nt, Artificial Sequence
  Description of Artificial Sequence: Synthetic oligonucleotide
  Antisense strand to SEQ ID NO: 272082
auauaucacccaauaacac

SEQ ID NO: 272084 - RNA, 19 nt, Artificial Sequence
  Description of Artificial Sequence: Synthetic oligonucleotide
  Sense strand starting at position 627 of SEQ ID NO: 3497
cuagucuaaacucgggaau

SEQ ID NO: 272085 - RNA, 19 nt, Artificial Sequence
  Description of Artificial Sequence: Synthetic oligonucleotide
  Antisense strand to SEQ ID NO: 272084
auucccgaguuuagacuag

SEQ ID NO: 272086 - RNA, 19 nt, Artificial Sequence
  Description of Artificial Sequence: Synthetic oligonucleotide
  Sense strand starting at position 628 of SEQ ID NO: 3497
uagucuaaacucgggaauu

SEQ ID NO: 272087 - RNA, 19 nt, Artificial Sequence
  Description of Artificial Sequence: Synthetic oligonucleotide
  Antisense strand to SEQ ID NO: 272086
aauucccgaguuuagacua

SEQ ID NO: 272088 - RNA, 19 nt, Artificial Sequence
  Description of Artificial Sequence: Synthetic oligonucleotide
  Sense strand starting at position 665 of SEQ ID NO: 3497
uuguaaagagccuaaauua

SEQ ID NO: 272089 - RNA, 19 nt, Artificial Sequence
  Description of Artificial Sequence: Synthetic oligonucleotide
  Antisense strand to SEQ ID NO: 272088
uaauuuaggcucuuuacaa

SEQ ID NO: 272090 - RNA, 19 nt, Artificial Sequence
  Description of Artificial Sequence: Synthetic oligonucleotide
  Sense strand starting at position 692 of SEQ ID NO: 3497
cuggaugccagaugauaac

SEQ ID NO: 272091 - RNA, 19 nt, Artificial Sequence
  Description of Artificial Sequence: Synthetic oligonucleotide
  Antisense strand to SEQ ID NO: 272090
guuaucaucuggcauccag

SEQ ID NO: 272092 - RNA, 19 nt, Artificial Sequence
  Description of Artificial Sequence: Synthetic oligonucleotide
  Sense strand starting at position 703 of SEQ ID NO: 3497
augauaaccgaaggcuuau

SEQ ID NO: 272093 - RNA, 19 nt, Artificial Sequence
  Description of Artificial Sequence: Synthetic oligonucleotide
  Antisense strand to SEQ ID NO: 272092
auaagccuucgguuaucau

SEQ ID NO: 272094 - RNA, 19 nt, Artificial Sequence
  Description of Artificial Sequence: Synthetic oligonucleotide
  Sense strand starting at position 770 of SEQ ID NO: 3497
ccugguaggcaucaggaau

SEQ ID NO: 272095 - RNA, 19 nt, Artificial Sequence
  Description of Artificial Sequence: Synthetic oligonucleotide
  Antisense strand to SEQ ID NO: 272094
auuccugaugccuaccagg

SEQ ID NO: 272096 - RNA, 19 nt, Artificial Sequence
  Description of Artificial Sequence: Synthetic oligonucleotide
  Sense strand starting at position 855 of SEQ ID NO: 3497
auuugaguucucugugcug

SEQ ID NO: 272097 - RNA, 19 nt, Artificial Sequence
  Description of Artificial Sequence: Synthetic oligonucleotide
  Antisense strand to SEQ ID NO: 272096
cagcacagagaacucaaau

SEQ ID NO: 272098 - RNA, 19 nt, Artificial Sequence
  Description of Artificial Sequence: Synthetic oligonucleotide
  Sense strand starting at position 1031 of SEQ ID NO: 3497
ggucaaggucauuggagau

SEQ ID NO: 272099 - RNA, 19 nt, Artificial Sequence
  Description of Artificial Sequence: Synthetic oligonucleotide
  Antisense strand to SEQ ID NO: 272098
aucuccaaugaccuugacc

SEQ ID NO: 272100 - RNA, 19 nt, Artificial Sequence
  Description of Artificial Sequence: Synthetic oligonucleotide
  Sense strand starting at position 1705 of SEQ ID NO: 3497
cuguuuacacgugaaccaa

SEQ ID NO: 272101 - RNA, 19 nt, Artificial Sequence
  Description of Artificial Sequence: Synthetic oligonucleotide
  Antisense strand to SEQ ID NO: 272100
uugguucacguguaaacag

SEQ ID NO: 272102 - RNA, 19 nt, Artificial Sequence
  Description of Artificial Sequence: Synthetic oligonucleotide
  Sense strand starting at position 1805 of SEQ ID NO: 3497
uggagauuauucccagcag

SEQ ID NO: 272103 - RNA, 19 nt, Artificial Sequence
  Description of Artificial Sequence: Synthetic oligonucleotide
  Antisense strand to SEQ ID NO: 272102
cugcugggaauaaucucca

SEQ ID NO: 272104 - RNA, 19 nt, Artificial Sequence
  Description of Artificial Sequence: Synthetic oligonucleotide
  Sense strand starting at position 2157 of SEQ ID NO: 3497
gcgguuccuggaagagucu

SEQ ID NO: 272105 - RNA, 19 nt, Artificial Sequence
  Description of Artificial Sequence: Synthetic oligonucleotide
  Antisense strand to SEQ ID NO: 272104
agacucuuccaggaaccgc

SEQ ID NO: 272106 - RNA, 19 nt, Artificial Sequence
  Description of Artificial Sequence: Synthetic oligonucleotide
  Sense strand starting at position 2311 of SEQ ID NO: 3497
uccguuagcguuucgagga

SEQ ID NO: 272107 - RNA, 19 nt, Artificial Sequence
  Description of Artificial Sequence: Synthetic oligonucleotide
  Antisense strand to SEQ ID NO: 272106
uccucgaaacgcuaacgga

SEQ ID NO: 272108 - RNA, 19 nt, Artificial Sequence
  Description of Artificial Sequence: Synthetic oligonucleotide
  Sense strand starting at position 2347 of SEQ ID NO: 3497
gugggaguccgagauacaa

SEQ ID NO: 272109 - RNA, 19 nt, Artificial Sequence
  Description of Artificial Sequence: Synthetic oligonucleotide
  Antisense strand to SEQ ID NO: 272108
uuguaucucggacucccac

SEQ ID NO: 272110 - RNA, 19 nt, Artificial Sequence
  Description of Artificial Sequence: Synthetic oligonucleotide
  Sense strand starting at position 2349 of SEQ ID NO: 3497
gggaguccgagauacaagu

SEQ ID NO: 272111 - RNA, 19 nt, Artificial Sequence
  Description of Artificial Sequence: Synthetic oligonucleotide
  Antisense strand to SEQ ID NO: 272110
acuuguaucucggacuccc

SEQ ID NO: 272112 - RNA, 19 nt, Artificial Sequence
  Description of Artificial Sequence: Synthetic oligonucleotide
  Sense strand starting at position 2359 of SEQ ID NO: 3497
gauacaaguguugauguuu

SEQ ID NO: 272113 - RNA, 19 nt, Artificial Sequence
  Description of Artificial Sequence: Synthetic oligonucleotide
  Antisense strand to SEQ ID NO: 272112
aaacaucaacacuuguauc

SEQ ID NO: 272114 - RNA, 19 nt, Artificial Sequence
  Description of Artificial Sequence: Synthetic oligonucleotide
  Sense strand starting at position 2457 of SEQ ID NO: 3497
cugggaugugacuguggau

SEQ ID NO: 272115 - RNA, 19 nt, Artificial Sequence
  Description of Artificial Sequence: Synthetic oligonucleotide
  Antisense strand to SEQ ID NO: 272114
auccacagucacaucccag

SEQ ID NO: 272116 - RNA, 19 nt, Artificial Sequence
  Description of Artificial Sequence: Synthetic oligonucleotide
  Sense strand starting at position 2485 of SEQ ID NO: 3497
ccaggauuccugggacuug

SEQ ID NO: 272117 - RNA, 19 nt, Artificial Sequence
  Description of Artificial Sequence: Synthetic oligonucleotide
  Antisense strand to SEQ ID NO: 272116
caagucccaggaauccugg

SEQ ID NO: 272118 - RNA, 19 nt, Artificial Sequence
  Description of Artificial Sequence: Synthetic oligonucleotide
  Sense strand starting at position 2496 of SEQ ID NO: 3497
gggacuugcucacuaacac

SEQ ID NO: 272119 - RNA, 19 nt, Artificial Sequence
  Description of Artificial Sequence: Synthetic oligonucleotide
  Antisense strand to SEQ ID NO: 272118
guguuagugagcaaguccc

SEQ ID NO: 272120 - RNA, 19 nt, Artificial Sequence
  Description of Artificial Sequence: Synthetic oligonucleotide
  Sense strand starting at position 2497 of SEQ ID NO: 3497
ggacuugcucacuaacacu

SEQ ID NO: 272121 - RNA, 19 nt, Artificial Sequence
  Description of Artificial Sequence: Synthetic oligonucleotide
  Antisense strand to SEQ ID NO: 272120
aguguuagugagcaagucc

SEQ ID NO: 272122 - RNA, 19 nt, Artificial Sequence
  Description of Artificial Sequence: Synthetic oligonucleotide
  Sense strand starting at position 2543 of SEQ ID NO: 3497
auauuaauggaauggcauu

SEQ ID NO: 272123 - RNA, 19 nt, Artificial Sequence
  Description of Artificial Sequence: Synthetic oligonucleotide
  Antisense strand to SEQ ID NO: 272122
aaugccauuccauuaauau

SEQ ID NO: 272124 - RNA, 19 nt, Artificial Sequence
  Description of Artificial Sequence: Synthetic oligonucleotide
  Sense strand starting at position 2679 of SEQ ID NO: 3497
aagaguuuaccagguagag

SEQ ID NO: 272125 - RNA, 19 nt, Artificial Sequence
  Description of Artificial Sequence: Synthetic oligonucleotide
  Antisense strand to SEQ ID NO: 272124
cucuaccugguaaacucuu

SEQ ID NO: 272126 - RNA, 19 nt, Artificial Sequence
  Description of Artificial Sequence: Synthetic oligonucleotide
  Sense strand starting at position 2698 of SEQ ID NO: 3497
gaaguaagugcugaagagu

SEQ ID NO: 272127 - RNA, 19 nt, Artificial Sequence
  Description of Artificial Sequence: Synthetic oligonucleotide
  Antisense strand to SEQ ID NO: 272126
acucuucagcacuuacuuc

SEQ ID NO: 272128 - RNA, 19 nt, Artificial Sequence
  Description of Artificial Sequence: Synthetic oligonucleotide
  Sense strand starting at position 2770 of SEQ ID NO: 3497
auagaauccugguaauuug

SEQ ID NO: 272129 - RNA, 19 nt, Artificial Sequence
  Description of Artificial Sequence: Synthetic oligonucleotide
  Antisense strand to SEQ ID NO: 272128
caaauuaccaggauucuau

SEQ ID NO: 272130 - RNA, 19 nt, Artificial Sequence
  Description of Artificial Sequence: Synthetic oligonucleotide
  Sense strand starting at position 2794 of SEQ ID NO: 3497
gcugguuuccaagaaggug

SEQ ID NO: 272131 - RNA, 19 nt, Artificial Sequence
  Description of Artificial Sequence: Synthetic oligonucleotide
  Antisense strand to SEQ ID NO: 272130
caccuucuuggaaaccagc

SEQ ID NO: 272132 - RNA, 19 nt, Artificial Sequence
  Description of Artificial Sequence: Synthetic oligonucleotide
  Sense strand starting at position 2803 of SEQ ID NO: 3497
caagaaggugaguggugau

SEQ ID NO: 272133 - RNA, 19 nt, Artificial Sequence
  Description of Artificial Sequence: Synthetic oligonucleotide
  Antisense strand to SEQ ID NO: 272132
aucaccacucaccuucuug

SEQ ID NO: 272134 - RNA, 19 nt, Artificial Sequence
  Description of Artificial Sequence: Synthetic oligonucleotide
  Sense strand starting at position 2810 of SEQ ID NO: 3497
gugaguggugaucaagauu

SEQ ID NO: 272135 - RNA, 19 nt, Artificial Sequence
  Description of Artificial Sequence: Synthetic oligonucleotide
  Antisense strand to SEQ ID NO: 272134
aaucuugaucaccacucac

SEQ ID NO: 272136 - RNA, 19 nt, Artificial Sequence
  Description of Artificial Sequence: Synthetic oligonucleotide
  Sense strand starting at position 2919 of SEQ ID NO: 3497
auuauucuaaggugacgau

SEQ ID NO: 272137 - RNA, 19 nt, Artificial Sequence
  Description of Artificial Sequence: Synthetic oligonucleotide
  Antisense strand to SEQ ID NO: 272136
aucgucaccuuagaauaau

SEQ ID NO: 272138 - RNA, 19 nt, Artificial Sequence
  Description of Artificial Sequence: Synthetic oligonucleotide
  Sense strand starting at position 2923 of SEQ ID NO: 3497
uucuaaggugacgauguau

SEQ ID NO: 272139 - RNA, 19 nt, Artificial Sequence
  Description of Artificial Sequence: Synthetic oligonucleotide
  Antisense strand to SEQ ID NO: 272138
auacaucgucaccuuagaa

SEQ ID NO: 272140 - RNA, 19 nt, Artificial Sequence
  Description of Artificial Sequence: Synthetic oligonucleotide
  Sense strand starting at position 2972 of SEQ ID NO: 3497
ggucacuugagugaucuau

SEQ ID NO: 272141 - RNA, 19 nt, Artificial Sequence
  Description of Artificial Sequence: Synthetic oligonucleotide
  Antisense strand to SEQ ID NO: 272140
auagaucacucaagugacc

SEQ ID NO: 272142 - RNA, 19 nt, Artificial Sequence
  Description of Artificial Sequence: Synthetic oligonucleotide
  Sense strand starting at position 2974 of SEQ ID NO: 3497
ucacuugagugaucuauca

SEQ ID NO: 272143 - RNA, 19 nt, Artificial Sequence
  Description of Artificial Sequence: Synthetic oligonucleotide
  Antisense strand to SEQ ID NO: 272142
ugauagaucacucaaguga

SEQ ID NO: 272144 - RNA, 19 nt, Artificial Sequence
  Description of Artificial Sequence: Synthetic oligonucleotide
  Sense strand starting at position 2981 of SEQ ID NO: 3497
agugaucuaucaguaaaga

SEQ ID NO: 272145 - RNA, 19 nt, Artificial Sequence
  Description of Artificial Sequence: Synthetic oligonucleotide
  Antisense strand to SEQ ID NO: 272144
ucuuuacugauagaucacu

SEQ ID NO: 272146 - RNA, 19 nt, Artificial Sequence
  Description of Artificial Sequence: Synthetic oligonucleotide
  Sense strand starting at position 2991 of SEQ ID NO: 3497
caguaaagaugguuaguga

SEQ ID NO: 272147 - RNA, 19 nt, Artificial Sequence
  Description of Artificial Sequence: Synthetic oligonucleotide
  Antisense strand to SEQ ID NO: 272146
ucacuaaccaucuuuacug

SEQ ID NO: 272148 - RNA, 19 nt, Artificial Sequence
  Description of Artificial Sequence: Synthetic oligonucleotide
  Sense strand starting at position 3220 of SEQ ID NO: 3497
auguccaucagcugaggaa

SEQ ID NO: 272149 - RNA, 19 nt, Artificial Sequence
  Description of Artificial Sequence: Synthetic oligonucleotide
  Antisense strand to SEQ ID NO: 272148
uuccucagcugauggacau

SEQ ID NO: 272150 - RNA, 19 nt, Artificial Sequence
  Description of Artificial Sequence: Synthetic oligonucleotide
  Sense strand starting at position 3538 of SEQ ID NO: 3497
gugauaguugcacaaucug

SEQ ID NO: 272151 - RNA, 19 nt, Artificial Sequence
  Description of Artificial Sequence: Synthetic oligonucleotide
  Antisense strand to SEQ ID NO: 272150
cagauugugcaacuaucac

SEQ ID NO: 272152 - RNA, 19 nt, Artificial Sequence
  Description of Artificial Sequence: Synthetic oligonucleotide
  Sense strand starting at position 3553 of SEQ ID NO: 3497
ucugaauaugcugaaauuc

SEQ ID NO: 272153 - RNA, 19 nt, Artificial Sequence
  Description of Artificial Sequence: Synthetic oligonucleotide
  Antisense strand to SEQ ID NO: 272152
gaauuucagcauauucaga

SEQ ID NO: 272154 - RNA, 19 nt, Artificial Sequence
  Description of Artificial Sequence: Synthetic oligonucleotide
  Sense strand starting at position 3857 of SEQ ID NO: 3497
agcaguuguuuggcauuua

SEQ ID NO: 272155 - RNA, 19 nt, Artificial Sequence
  Description of Artificial Sequence: Synthetic oligonucleotide
  Antisense strand to SEQ ID NO: 272154
uaaaugccaaacaacugcu

SEQ ID NO: 272156 - RNA, 19 nt, Artificial Sequence
  Description of Artificial Sequence: Synthetic oligonucleotide
  Sense strand starting at position 670 of SEQ ID NO: 3495
aaguaaauguugcuaguaa

SEQ ID NO: 272157 - RNA, 19 nt, Artificial Sequence
  Description of Artificial Sequence: Synthetic oligonucleotide
  Antisense strand to SEQ ID NO: 272156
uuacuagcaacauuuacuu

SEQ ID NO: 272158 - RNA, 19 nt, Artificial Sequence
  Description of Artificial Sequence: Synthetic oligonucleotide
  Sense strand starting at position 756 of SEQ ID NO: 3495
uaaagucacguguaacaua

SEQ ID NO: 272159 - RNA, 19 nt, Artificial Sequence
  Description of Artificial Sequence: Synthetic oligonucleotide
  Antisense strand to SEQ ID NO: 272158
uauguuacacgugacuuua

SEQ ID NO: 272160 - RNA, 19 nt, Artificial Sequence
  Description of Artificial Sequence: Synthetic oligonucleotide
  Sense strand starting at position 764 of SEQ ID NO: 3495
cguguaacauauuuccauu

SEQ ID NO: 272161 - RNA, 19 nt, Artificial Sequence
  Description of Artificial Sequence: Synthetic oligonucleotide
  Antisense strand to SEQ ID NO: 272160
aauggaaauauguuacacg

SEQ ID NO: 272162 - RNA, 19 nt, Artificial Sequence
  Description of Artificial Sequence: Synthetic oligonucleotide
  Sense strand starting at position 949 of SEQ ID NO: 3495
agaauaucuuaagaaggac

SEQ ID NO: 272163 - RNA, 19 nt, Artificial Sequence
  Description of Artificial Sequence: Synthetic oligonucleotide
  Antisense strand to SEQ ID NO: 272162
guccuucuuaagauauucu

SEQ ID NO: 272164 - RNA, 19 nt, Artificial Sequence
  Description of Artificial Sequence: Synthetic oligonucleotide
  Sense strand starting at position 1064 of SEQ ID NO: 3495
agauguggcaucuaguaug

SEQ ID NO: 272165 - RNA, 19 nt, Artificial Sequence
  Description of Artificial Sequence: Synthetic oligonucleotide
  Antisense strand to SEQ ID NO: 272164
cauacuagaugccacaucu

SEQ ID NO: 272166 - RNA, 19 nt, Artificial Sequence
  Description of Artificial Sequence: Synthetic oligonucleotide
  Sense strand starting at position 1093 of SEQ ID NO: 3495
uucuuccaagaaugaagua

SEQ ID NO: 272167 - RNA, 19 nt, Artificial Sequence
  Description of Artificial Sequence: Synthetic oligonucleotide
  Antisense strand to SEQ ID NO: 272166
uacuucauucuuggaagaa

SEQ ID NO: 272168 - RNA, 19 nt, Artificial Sequence
  Description of Artificial Sequence: Synthetic oligonucleotide
  Sense strand starting at position 1145 of SEQ ID NO: 3495
auuuguaugugcuuaguau

SEQ ID NO: 272169 - RNA, 19 nt, Artificial Sequence
  Description of Artificial Sequence: Synthetic oligonucleotide
  Antisense strand to SEQ ID NO: 272168
auacuaagcacauacaaau

SEQ ID NO: 272170 - RNA, 19 nt, Artificial Sequence
  Description of Artificial Sequence: Synthetic oligonucleotide
  Sense strand starting at position 1160 of SEQ ID NO: 3495
guaugugacaggcauauuc

SEQ ID NO: 272171 - RNA, 19 nt, Artificial Sequence
  Description of Artificial Sequence: Synthetic oligonucleotide
  Antisense strand to SEQ ID NO: 272170
gaauaugccugucacauac

SEQ ID NO: 272172 - RNA, 19 nt, Artificial Sequence
  Description of Artificial Sequence: Synthetic oligonucleotide
  Sense strand starting at position 1162 of SEQ ID NO: 3495
augugacaggcauauucua

SEQ ID NO: 272173 - RNA, 19 nt, Artificial Sequence
  Description of Artificial Sequence: Synthetic oligonucleotide
  Antisense strand to SEQ ID NO: 272172
uagaauaugccugucacau

SEQ ID NO: 272174 - RNA, 19 nt, Artificial Sequence
  Description of Artificial Sequence: Synthetic oligonucleotide
  Sense strand starting at position 1283 of SEQ ID NO: 3495
gaaauuaagugacuuguuu

SEQ ID NO: 272175 - RNA, 19 nt, Artificial Sequence
  Description of Artificial Sequence: Synthetic oligonucleotide
  Antisense strand to SEQ ID NO: 272174
aaacaagucacuuaauuuc

SEQ ID NO: 272176 - RNA, 19 nt, Artificial Sequence
  Description of Artificial Sequence: Synthetic oligonucleotide
  Sense strand starting at position 1295 of SEQ ID NO: 3495
cuuguuuacggucacagau

SEQ ID NO: 272177 - RNA, 19 nt, Artificial Sequence
  Description of Artificial Sequence: Synthetic oligonucleotide
  Antisense strand to SEQ ID NO: 272176
aucugugaccguaaacaag

SEQ ID NO: 272178 - RNA, 19 nt, Artificial Sequence
  Description of Artificial Sequence: Synthetic oligonucleotide
  Sense strand starting at position 1312 of SEQ ID NO: 3495
auuggugagcaguggagaa

SEQ ID NO: 272179 - RNA, 19 nt, Artificial Sequence
  Description of Artificial Sequence: Synthetic oligonucleotide
  Antisense strand to SEQ ID NO: 272178
uucuccacugcucaccaau

SEQ ID NO: 272180 - RNA, 19 nt, Artificial Sequence
  Description of Artificial Sequence: Synthetic oligonucleotide
  Sense strand starting at position 1711 of SEQ ID NO: 3495
cccuguguugaacacaaua

SEQ ID NO: 272181 - RNA, 19 nt, Artificial Sequence
  Description of Artificial Sequence: Synthetic oligonucleotide
  Antisense strand to SEQ ID NO: 272180
uauuguguucaacacaggg

SEQ ID NO: 272182 - RNA, 19 nt, Artificial Sequence
  Description of Artificial Sequence: Synthetic oligonucleotide
  Sense strand starting at position 1762 of SEQ ID NO: 3495
cccaacugagagugcuuaa

SEQ ID NO: 272183 - RNA, 19 nt, Artificial Sequence
  Description of Artificial Sequence: Synthetic oligonucleotide
  Antisense strand to SEQ ID NO: 272182
uuaagcacucucaguuggg

SEQ ID NO: 272184 - RNA, 19 nt, Artificial Sequence
  Description of Artificial Sequence: Synthetic oligonucleotide
  Sense strand starting at position 1765 of SEQ ID NO: 3495
aacugagagugcuuaaaga

SEQ ID NO: 272185 - RNA, 19 nt, Artificial Sequence
  Description of Artificial Sequence: Synthetic oligonucleotide
  Antisense strand to SEQ ID NO: 272184
ucuuuaagcacucucaguu

SEQ ID NO: 272186 - RNA, 19 nt, Artificial Sequence
  Description of Artificial Sequence: Synthetic oligonucleotide
  Sense strand starting at position 1782 of SEQ ID NO: 3495
gaggaauagguggguacau

SEQ ID NO: 272187 - RNA, 19 nt, Artificial Sequence
  Description of Artificial Sequence: Synthetic oligonucleotide
  Antisense strand to SEQ ID NO: 272186
auguacccaccuauuccuc

SEQ ID NO: 272188 - RNA, 19 nt, Artificial Sequence
  Description of Artificial Sequence: Synthetic oligonucleotide
  Sense strand starting at position 1794 of SEQ ID NO: 3495
gguacauaccauugcuaug

SEQ ID NO: 272189 - RNA, 19 nt, Artificial Sequence
  Description of Artificial Sequence: Synthetic oligonucleotide
  Antisense strand to SEQ ID NO: 272188
cauagcaaugguauguacc

SEQ ID NO: 272190 - RNA, 19 nt, Artificial Sequence
  Description of Artificial Sequence: Synthetic oligonucleotide
  Sense strand starting at position 2361 of SEQ ID NO: 3495
agauguaugucaucaaguu

SEQ ID NO: 272191 - RNA, 19 nt, Artificial Sequence
  Description of Artificial Sequence: Synthetic oligonucleotide
  Antisense strand to SEQ ID NO: 272190
aacuugaugacauacaucu

SEQ ID NO: 272192 - RNA, 19 nt, Artificial Sequence
  Description of Artificial Sequence: Synthetic oligonucleotide
  Sense strand starting at position 2362 of SEQ ID NO: 3495
gauguaugucaucaaguug

SEQ ID NO: 272193 - RNA, 19 nt, Artificial Sequence
  Description of Artificial Sequence: Synthetic oligonucleotide
  Antisense strand to SEQ ID NO: 272192
caacuugaugacauacauc

SEQ ID NO: 272194 - RNA, 19 nt, Artificial Sequence
  Description of Artificial Sequence: Synthetic oligonucleotide
  Sense strand starting at position 2368 of SEQ ID NO: 3495
ugucaucaaguugaaucaa

SEQ ID NO: 272195 - RNA, 19 nt, Artificial Sequence
  Description of Artificial Sequence: Synthetic oligonucleotide
  Antisense strand to SEQ ID NO: 272194
uugauucaacuugaugaca

SEQ ID NO: 272196 - RNA, 19 nt, Artificial Sequence
  Description of Artificial Sequence: Synthetic oligonucleotide
  Sense strand starting at position 2515 of SEQ ID NO: 3495
cuacguuaucaguagacag

SEQ ID NO: 272197 - RNA, 19 nt, Artificial Sequence
  Description of Artificial Sequence: Synthetic oligonucleotide
  Antisense strand to SEQ ID NO: 272196
cugucuacugauaacguag

SEQ ID NO: 272198 - RNA, 19 nt, Artificial Sequence
  Description of Artificial Sequence: Synthetic oligonucleotide
  Sense strand starting at position 2517 of SEQ ID NO: 3495
acguuaucaguagacagua

SEQ ID NO: 272199 - RNA, 19 nt, Artificial Sequence
  Description of Artificial Sequence: Synthetic oligonucleotide
  Antisense strand to SEQ ID NO: 272198
uacugucuacugauaacgu

SEQ ID NO: 272200 - RNA, 19 nt, Artificial Sequence
  Description of Artificial Sequence: Synthetic oligonucleotide
  Sense strand starting at position 2536 of SEQ ID NO: 3495
gccuuacagaugggucaaa

SEQ ID NO: 272201 - RNA, 19 nt, Artificial Sequence
  Description of Artificial Sequence: Synthetic oligonucleotide
  Antisense strand to SEQ ID NO: 272200
uuugacccaucuguaaggc

SEQ ID NO: 272202 - RNA, 19 nt, Artificial Sequence
  Description of Artificial Sequence: Synthetic oligonucleotide
  Sense strand starting at position 2643 of SEQ ID NO: 3495
uugcaaauagggcgaaaua

SEQ ID NO: 272203 - RNA, 19 nt, Artificial Sequence
  Description of Artificial Sequence: Synthetic oligonucleotide
  Antisense strand to SEQ ID NO: 272202
uauuucgcccuauuugcaa

SEQ ID NO: 272204 - RNA, 19 nt, Artificial Sequence
  Description of Artificial Sequence: Synthetic oligonucleotide
  Sense strand starting at position 2644 of SEQ ID NO: 3495
ugcaaauagggcgaaauau

SEQ ID NO: 272205 - RNA, 19 nt, Artificial Sequence
  Description of Artificial Sequence: Synthetic oligonucleotide
  Antisense strand to SEQ ID NO: 272204
auauuucgcccuauuugca

SEQ ID NO: 272206 - RNA, 19 nt, Artificial Sequence
  Description of Artificial Sequence: Synthetic oligonucleotide
  Sense strand starting at position 2705 of SEQ ID NO: 3495
cuaaguaagccucauugua

SEQ ID NO: 272207 - RNA, 19 nt, Artificial Sequence
  Description of Artificial Sequence: Synthetic oligonucleotide
  Antisense strand to SEQ ID NO: 272206
uacaaugaggcuuacuuag

SEQ ID NO: 272208 - RNA, 19 nt, Artificial Sequence
  Description of Artificial Sequence: Synthetic oligonucleotide
  Sense strand starting at position 2863 of SEQ ID NO: 3495
acaaacaugugugcacauu

SEQ ID NO: 272209 - RNA, 19 nt, Artificial Sequence
  Description of Artificial Sequence: Synthetic oligonucleotide
  Antisense strand to SEQ ID NO: 272208
aaugugcacacauguuugu

SEQ ID NO: 272210 - RNA, 19 nt, Artificial Sequence
  Description of Artificial Sequence: Synthetic oligonucleotide
  Sense strand starting at position 3071 of SEQ ID NO: 3495
uuuggucauugagugauga

SEQ ID NO: 272211 - RNA, 19 nt, Artificial Sequence
  Description of Artificial Sequence: Synthetic oligonucleotide
  Antisense strand to SEQ ID NO: 272210
ucaucacucaaugaccaaa

SEQ ID NO: 272212 - RNA, 19 nt, Artificial Sequence
  Description of Artificial Sequence: Synthetic oligonucleotide
  Sense strand starting at position 3072 of SEQ ID NO: 3495
uuggucauugagugaugaa

SEQ ID NO: 272213 - RNA, 19 nt, Artificial Sequence
  Description of Artificial Sequence: Synthetic oligonucleotide
  Antisense strand to SEQ ID NO: 272212
uucaucacucaaugaccaa

SEQ ID NO: 272214 - RNA, 19 nt, Artificial Sequence
  Description of Artificial Sequence: Synthetic oligonucleotide
  Sense strand starting at position 3169 of SEQ ID NO: 3495
gagugaauuguaugaugua

SEQ ID NO: 272215 - RNA, 19 nt, Artificial Sequence
  Description of Artificial Sequence: Synthetic oligonucleotide
  Antisense strand to SEQ ID NO: 272214
uacaucauacaauucacuc

SEQ ID NO: 272216 - RNA, 19 nt, Artificial Sequence
  Description of Artificial Sequence: Synthetic oligonucleotide
  Sense strand starting at position 3275 of SEQ ID NO: 3495
ucgagauugcccuaggcaa

SEQ ID NO: 272217 - RNA, 19 nt, Artificial Sequence
  Description of Artificial Sequence: Synthetic oligonucleotide
  Antisense strand to SEQ ID NO: 272216
uugccuagggcaaucucga

SEQ ID NO: 272218 - RNA, 19 nt, Artificial Sequence
  Description of Artificial Sequence: Synthetic oligonucleotide
  Sense strand starting at position 3277 of SEQ ID NO: 3495
gagauugcccuaggcaaca

SEQ ID NO: 272219 - RNA, 19 nt, Artificial Sequence
  Description of Artificial Sequence: Synthetic oligonucleotide
  Antisense strand to SEQ ID NO: 272218
uguugccuagggcaaucuc

SEQ ID NO: 272220 - RNA, 19 nt, Artificial Sequence
  Description of Artificial Sequence: Synthetic oligonucleotide
  Sense strand starting at position 3611 of SEQ ID NO: 3495
accaaucaguagucuuauu

SEQ ID NO: 272221 - RNA, 19 nt, Artificial Sequence
  Description of Artificial Sequence: Synthetic oligonucleotide
  Antisense strand to SEQ ID NO: 272220
aauaagacuacugauuggu

SEQ ID NO: 272222 - RNA, 19 nt, Artificial Sequence
  Description of Artificial Sequence: Synthetic oligonucleotide
  Sense strand starting at position 3638 of SEQ ID NO: 3495
aauagagauugcccaguca

SEQ ID NO: 272223 - RNA, 19 nt, Artificial Sequence
  Description of Artificial Sequence: Synthetic oligonucleotide
  Antisense strand to SEQ ID NO: 272222
ugacugggcaaucucuauu

SEQ ID NO: 272224 - RNA, 19 nt, Artificial Sequence
  Description of Artificial Sequence: Synthetic oligonucleotide
  Sense strand starting at position 3774 of SEQ ID NO: 3495
gauuguuguggguaggaaa

SEQ ID NO: 272225 - RNA, 19 nt, Artificial Sequence
  Description of Artificial Sequence: Synthetic oligonucleotide
  Antisense strand to SEQ ID NO: 272224
uuuccuacccacaacaauc

SEQ ID NO: 272226 - RNA, 19 nt, Artificial Sequence
  Description of Artificial Sequence: Synthetic oligonucleotide
  Sense strand starting at position 3816 of SEQ ID NO: 3495
agauacuuccuagaguugu

SEQ ID NO: 272227 - RNA, 19 nt, Artificial Sequence
  Description of Artificial Sequence: Synthetic oligonucleotide
  Antisense strand to SEQ ID NO: 272226
acaacucuaggaaguaucu

SEQ ID NO: 272228 - RNA, 19 nt, Artificial Sequence
  Description of Artificial Sequence: Synthetic oligonucleotide
  Sense strand starting at position 3908 of SEQ ID NO: 3495
ugcuaaauccagggugaca

SEQ ID NO: 272229 - RNA, 19 nt, Artificial Sequence
  Description of Artificial Sequence: Synthetic oligonucleotide
  Antisense strand to SEQ ID NO: 272228
ugucacccuggauuuagca

SEQ ID NO: 272230 - RNA, 19 nt, Artificial Sequence
  Description of Artificial Sequence: Synthetic oligonucleotide
  Sense strand starting at position 3936 of SEQ ID NO: 3495
cccugacucucaguaguca

SEQ ID NO: 272231 - RNA, 19 nt, Artificial Sequence
  Description of Artificial Sequence: Synthetic oligonucleotide
  Antisense strand to SEQ ID NO: 272230
ugacuacugagagucaggg

SEQ ID NO: 272232 - RNA, 19 nt, Artificial Sequence
  Description of Artificial Sequence: Synthetic oligonucleotide
  Sense strand starting at position 3937 of SEQ ID NO: 3495
ccugacucucaguagucau

SEQ ID NO: 272233 - RNA, 19 nt, Artificial Sequence
  Description of Artificial Sequence: Synthetic oligonucleotide
  Antisense strand to SEQ ID NO: 272232
augacuacugagagucagg

SEQ ID NO: 272234 - RNA, 19 nt, Artificial Sequence
  Description of Artificial Sequence: Synthetic oligonucleotide
  Sense strand starting at position 3944 of SEQ ID NO: 3495
cucaguagucaucacacaa

SEQ ID NO: 272235 - RNA, 19 nt, Artificial Sequence
  Description of Artificial Sequence: Synthetic oligonucleotide
  Antisense strand to SEQ ID NO: 272234
uugugugaugacuacugag

SEQ ID NO: 272236 - RNA, 19 nt, Artificial Sequence
  Description of Artificial Sequence: Synthetic oligonucleotide
  Sense strand starting at position 9 of SEQ ID NO: 3500
aaauguuacugucuugaga

SEQ ID NO: 272237 - RNA, 19 nt, Artificial Sequence
  Description of Artificial Sequence: Synthetic oligonucleotide
  Antisense strand to SEQ ID NO: 272236
ucucaagacaguaacauuu

SEQ ID NO: 272238 - RNA, 19 nt, Artificial Sequence
  Description of Artificial Sequence: Synthetic oligonucleotide
  Sense strand starting at position 12 of SEQ ID NO: 3500
uguuacugucuugagauac

SEQ ID NO: 272239 - RNA, 19 nt, Artificial Sequence
  Description of Artificial Sequence: Synthetic oligonucleotide
  Antisense strand to SEQ ID NO: 272238
guaucucaagacaguaaca

SEQ ID NO: 272240 - RNA, 19 nt, Artificial Sequence
  Description of Artificial Sequence: Synthetic oligonucleotide
  Sense strand starting at position 176 of SEQ ID NO: 3500
gggacugagucagucugaa

SEQ ID NO: 272241 - RNA, 19 nt, Artificial Sequence
  Description of Artificial Sequence: Synthetic oligonucleotide
  Antisense strand to SEQ ID NO: 272240
uucagacugacucaguccc

SEQ ID NO: 272242 - RNA, 19 nt, Artificial Sequence
  Description of Artificial Sequence: Synthetic oligonucleotide
  Sense strand starting at position 295 of SEQ ID NO: 3500
caaggauugcaaugggauu

SEQ ID NO: 272243 - RNA, 19 nt, Artificial Sequence
  Description of Artificial Sequence: Synthetic oligonucleotide
  Antisense strand to SEQ ID NO: 272242
aaucccauugcaauccuug

SEQ ID NO: 272244 - RNA, 19 nt, Artificial Sequence
  Description of Artificial Sequence: Synthetic oligonucleotide
  Sense strand starting at position 433 of SEQ ID NO: 3500
acgaauagacuugagcauu

SEQ ID NO: 272245 - RNA, 19 nt, Artificial Sequence
  Description of Artificial Sequence: Synthetic oligonucleotide
  Antisense strand to SEQ ID NO: 272244
aaugcucaagucuauucgu

SEQ ID NO: 272246 - RNA, 19 nt, Artificial Sequence
  Description of Artificial Sequence: Synthetic oligonucleotide
  Sense strand starting at position 666 of SEQ ID NO: 3500
guguaucuuaaguauagua

SEQ ID NO: 272247 - RNA, 19 nt, Artificial Sequence
  Description of Artificial Sequence: Synthetic oligonucleotide
  Antisense strand to SEQ ID NO: 272246
uacuauacuuaagauacac

SEQ ID NO: 272248 - RNA, 19 nt, Artificial Sequence
  Description of Artificial Sequence: Synthetic oligonucleotide
  Sense strand starting at position 668 of SEQ ID NO: 3500
guaucuuaaguauaguaca

SEQ ID NO: 272249 - RNA, 19 nt, Artificial Sequence
  Description of Artificial Sequence: Synthetic oligonucleotide
  Antisense strand to SEQ ID NO: 272248
uguacuauacuuaagauac

SEQ ID NO: 272250 - RNA, 19 nt, Artificial Sequence
  Description of Artificial Sequence: Synthetic oligonucleotide
  Sense strand starting at position 742 of SEQ ID NO: 3500
uuggauaaguaccucuaaa

SEQ ID NO: 272251 - RNA, 19 nt, Artificial Sequence
  Description of Artificial Sequence: Synthetic oligonucleotide
  Antisense strand to SEQ ID NO: 272250
uuuagagguacuuauccaa

SEQ ID NO: 272252 - RNA, 19 nt, Artificial Sequence
  Description of Artificial Sequence: Synthetic oligonucleotide
  Sense strand starting at position 901 of SEQ ID NO: 3500
gagcucucauggguuuaga

SEQ ID NO: 272253 - RNA, 19 nt, Artificial Sequence
  Description of Artificial Sequence: Synthetic oligonucleotide
  Antisense strand to SEQ ID NO: 272252
ucuaaacccaugagagcuc

SEQ ID NO: 272254 - RNA, 19 nt, Artificial Sequence
  Description of Artificial Sequence: Synthetic oligonucleotide
  Sense strand starting at position 934 of SEQ ID NO: 3500
aaaucaacccagugaguga

SEQ ID NO: 272255 - RNA, 19 nt, Artificial Sequence
  Description of Artificial Sequence: Synthetic oligonucleotide
  Antisense strand to SEQ ID NO: 272254
ucacucacuggguugauuu

SEQ ID NO: 272256 - RNA, 19 nt, Artificial Sequence
  Description of Artificial Sequence: Synthetic oligonucleotide
  Sense strand starting at position 943 of SEQ ID NO: 3500
cagugagugagguagugaa

SEQ ID NO: 272257 - RNA, 19 nt, Artificial Sequence
  Description of Artificial Sequence: Synthetic oligonucleotide
  Antisense strand to SEQ ID NO: 272256
uucacuaccucacucacug

SEQ ID NO: 272258 - RNA, 19 nt, Artificial Sequence
  Description of Artificial Sequence: Synthetic oligonucleotide
  Sense strand starting at position 1016 of SEQ ID NO: 3500
cuggacugcugaguaauaa

SEQ ID NO: 272259 - RNA, 19 nt, Artificial Sequence
  Description of Artificial Sequence: Synthetic oligonucleotide
  Antisense strand to SEQ ID NO: 272258
uuauuacucagcaguccag

SEQ ID NO: 272260 - RNA, 19 nt, Artificial Sequence
  Description of Artificial Sequence: Synthetic oligonucleotide
  Sense strand starting at position 1017 of SEQ ID NO: 3500
uggacugcugaguaauaac

SEQ ID NO: 272261 - RNA, 19 nt, Artificial Sequence
  Description of Artificial Sequence: Synthetic oligonucleotide
  Antisense strand to SEQ ID NO: 272260
guuauuacucagcagucca

SEQ ID NO: 272262 - RNA, 19 nt, Artificial Sequence
  Description of Artificial Sequence: Synthetic oligonucleotide
  Sense strand starting at position 1332 of SEQ ID NO: 3500
uaacgauuaugagcuaaug

SEQ ID NO: 272263 - RNA, 19 nt, Artificial Sequence
  Description of Artificial Sequence: Synthetic oligonucleotide
  Antisense strand to SEQ ID NO: 272262
cauuagcucauaaucguua

SEQ ID NO: 272264 - RNA, 19 nt, Artificial Sequence
  Description of Artificial Sequence: Synthetic oligonucleotide
  Sense strand starting at position 1334 of SEQ ID NO: 3500
acgauuaugagcuaauguu

SEQ ID NO: 272265 - RNA, 19 nt, Artificial Sequence
  Description of Artificial Sequence: Synthetic oligonucleotide
  Antisense strand to SEQ ID NO: 272264
aacauuagcucauaaucgu

SEQ ID NO: 272266 - RNA, 19 nt, Artificial Sequence
  Description of Artificial Sequence: Synthetic oligonucleotide
  Sense strand starting at position 1376 of SEQ ID NO: 3500
acaugcuaaugccucagaa

SEQ ID NO: 272267 - RNA, 19 nt, Artificial Sequence
  Description of Artificial Sequence: Synthetic oligonucleotide
  Antisense strand to SEQ ID NO: 272266
uucugaggcauuagcaugu

SEQ ID NO: 272268 - RNA, 19 nt, Artificial Sequence
  Description of Artificial Sequence: Synthetic oligonucleotide
  Sense strand starting at position 1378 of SEQ ID NO: 3500
augcuaaugccucagaaac

SEQ ID NO: 272269 - RNA, 19 nt, Artificial Sequence
  Description of Artificial Sequence: Synthetic oligonucleotide
  Antisense strand to SEQ ID NO: 272268
guuucugaggcauuagcau

SEQ ID NO: 272270 - RNA, 19 nt, Artificial Sequence
  Description of Artificial Sequence: Synthetic oligonucleotide
  Sense strand starting at position 1602 of SEQ ID NO: 3500
gguauuaaauaagcaugaa

SEQ ID NO: 272271 - RNA, 19 nt, Artificial Sequence
  Description of Artificial Sequence: Synthetic oligonucleotide
  Antisense strand to SEQ ID NO: 272270
uucaugcuuauuuaauacc

SEQ ID NO: 272272 - RNA, 19 nt, Artificial Sequence
  Description of Artificial Sequence: Synthetic oligonucleotide
  Sense strand starting at position 1666 of SEQ ID NO: 3500
ucacaaagauacguguaua

SEQ ID NO: 272273 - RNA, 19 nt, Artificial Sequence
  Description of Artificial Sequence: Synthetic oligonucleotide
  Antisense strand to SEQ ID NO: 272272
uauacacguaucuuuguga

SEQ ID NO: 272274 - RNA, 19 nt, Artificial Sequence
  Description of Artificial Sequence: Synthetic oligonucleotide
  Sense strand starting at position 1669 of SEQ ID NO: 3500
caaagauacguguauacau

SEQ ID NO: 272275 - RNA, 19 nt, Artificial Sequence
  Description of Artificial Sequence: Synthetic oligonucleotide
  Antisense strand to SEQ ID NO: 272274
auguauacacguaucuuug

SEQ ID NO: 272276 - RNA, 19 nt, Artificial Sequence
  Description of Artificial Sequence: Synthetic oligonucleotide
  Sense strand starting at position 1671 of SEQ ID NO: 3500
aagauacguguauacauau

SEQ ID NO: 272277 - RNA, 19 nt, Artificial Sequence
  Description of Artificial Sequence: Synthetic oligonucleotide
  Antisense strand to SEQ ID NO: 272276
auauguauacacguaucuu

SEQ ID NO: 272278 - RNA, 19 nt, Artificial Sequence
  Description of Artificial Sequence: Synthetic oligonucleotide
  Sense strand starting at position 1677 of SEQ ID NO: 3500
cguguauacauauaacgau

SEQ ID NO: 272279 - RNA, 19 nt, Artificial Sequence
  Description of Artificial Sequence: Synthetic oligonucleotide
  Antisense strand to SEQ ID NO: 272278
aucguuauauguauacacg

SEQ ID NO: 272280 - RNA, 19 nt, Artificial Sequence
  Description of Artificial Sequence: Synthetic oligonucleotide
  Sense strand starting at position 1953 of SEQ ID NO: 3500
agugaucagauacagugua

SEQ ID NO: 272281 - RNA, 19 nt, Artificial Sequence
  Description of Artificial Sequence: Synthetic oligonucleotide
  Antisense strand to SEQ ID NO: 272280
uacacuguaucugaucacu

SEQ ID NO: 272282 - RNA, 19 nt, Artificial Sequence
  Description of Artificial Sequence: Synthetic oligonucleotide
  Sense strand starting at position 1993 of SEQ ID NO: 3500
aucauugugguguaaucuu

SEQ ID NO: 272283 - RNA, 19 nt, Artificial Sequence
  Description of Artificial Sequence: Synthetic oligonucleotide
  Antisense strand to SEQ ID NO: 272282
aagauuacaccacaaugau

SEQ ID NO: 272284 - RNA, 19 nt, Artificial Sequence
  Description of Artificial Sequence: Synthetic oligonucleotide
  Sense strand starting at position 2058 of SEQ ID NO: 3500
agcuaaucuccuuagaaug

SEQ ID NO: 272285 - RNA, 19 nt, Artificial Sequence
  Description of Artificial Sequence: Synthetic oligonucleotide
  Antisense strand to SEQ ID NO: 272284
cauucuaaggagauuagcu

SEQ ID NO: 272286 - RNA, 19 nt, Artificial Sequence
  Description of Artificial Sequence: Synthetic oligonucleotide
  Sense strand starting at position 2230 of SEQ ID NO: 3500
uacuuaggaggcuggaaau

SEQ ID NO: 272287 - RNA, 19 nt, Artificial Sequence
  Description of Artificial Sequence: Synthetic oligonucleotide
  Antisense strand to SEQ ID NO: 272286
auuuccagccuccuaagua

SEQ ID NO: 272288 - RNA, 19 nt, Artificial Sequence
  Description of Artificial Sequence: Synthetic oligonucleotide
  Sense strand starting at position 2496 of SEQ ID NO: 3500
auuuaaaugucgcugugaa

SEQ ID NO: 272289 - RNA, 19 nt, Artificial Sequence
  Description of Artificial Sequence: Synthetic oligonucleotide
  Antisense strand to SEQ ID NO: 272288
uucacagcgacauuuaaau

SEQ ID NO: 272290 - RNA, 19 nt, Artificial Sequence
  Description of Artificial Sequence: Synthetic oligonucleotide
  Sense strand starting at position 2576 of SEQ ID NO: 3500
cuaaauuauggguaagccu

SEQ ID NO: 272291 - RNA, 19 nt, Artificial Sequence
  Description of Artificial Sequence: Synthetic oligonucleotide
  Antisense strand to SEQ ID NO: 272290
aggcuuacccauaauuuag

SEQ ID NO: 272292 - RNA, 19 nt, Artificial Sequence
  Description of Artificial Sequence: Synthetic oligonucleotide
  Sense strand starting at position 2583 of SEQ ID NO: 3500
auggguaagccucaucuaa

SEQ ID NO: 272293 - RNA, 19 nt, Artificial Sequence
  Description of Artificial Sequence: Synthetic oligonucleotide
  Antisense strand to SEQ ID NO: 272292
uuagaugaggcuuacccau

SEQ ID NO: 272294 - RNA, 19 nt, Artificial Sequence
  Description of Artificial Sequence: Synthetic oligonucleotide
  Sense strand starting at position 2952 of SEQ ID NO: 3500
accaguguagguuauaaau

SEQ ID NO: 272295 - RNA, 19 nt, Artificial Sequence
  Description of Artificial Sequence: Synthetic oligonucleotide
  Antisense strand to SEQ ID NO: 272294
auuuauaaccuacacuggu

SEQ ID NO: 272296 - RNA, 19 nt, Artificial Sequence
  Description of Artificial Sequence: Synthetic oligonucleotide
  Sense strand starting at position 3301 of SEQ ID NO: 3500
gaggaaguauuaguuauag

SEQ ID NO: 272297 - RNA, 19 nt, Artificial Sequence
  Description of Artificial Sequence: Synthetic oligonucleotide
  Antisense strand to SEQ ID NO: 272296
cuauaacuaauacuuccuc

SEQ ID NO: 272298 - RNA, 19 nt, Artificial Sequence
  Description of Artificial Sequence: Synthetic oligonucleotide
  Sense strand starting at position 3307 of SEQ ID NO: 3500
guauuaguuauaggaaagu

SEQ ID NO: 272299 - RNA, 19 nt, Artificial Sequence
  Description of Artificial Sequence: Synthetic oligonucleotide
  Antisense strand to SEQ ID NO: 272298
acuuuccuauaacuaauac

SEQ ID NO: 272300 - RNA, 19 nt, Artificial Sequence
  Description of Artificial Sequence: Synthetic oligonucleotide
  Sense strand starting at position 3338 of SEQ ID NO: 3500
uguucuaucuauuccagau

SEQ ID NO: 272301 - RNA, 19 nt, Artificial Sequence
  Description of Artificial Sequence: Synthetic oligonucleotide
  Antisense strand to SEQ ID NO: 272300
aucuggaauagauagaaca

SEQ ID NO: 272302 - RNA, 19 nt, Artificial Sequence
  Description of Artificial Sequence: Synthetic oligonucleotide
  Sense strand starting at position 3478 of SEQ ID NO: 3500
ggcaaacauagguauaagu

SEQ ID NO: 272303 - RNA, 19 nt, Artificial Sequence
  Description of Artificial Sequence: Synthetic oligonucleotide
  Antisense strand to SEQ ID NO: 272302
acuuauaccuauguuugcc

SEQ ID NO: 272304 - RNA, 19 nt, Artificial Sequence
  Description of Artificial Sequence: Synthetic oligonucleotide
  Sense strand starting at position 3487 of SEQ ID NO: 3500
agguauaaguaagcuaaua

SEQ ID NO: 272305 - RNA, 19 nt, Artificial Sequence
  Description of Artificial Sequence: Synthetic oligonucleotide
  Antisense strand to SEQ ID NO: 272304
uauuagcuuacuuauaccu

SEQ ID NO: 272306 - RNA, 19 nt, Artificial Sequence
  Description of Artificial Sequence: Synthetic oligonucleotide
  Sense strand starting at position 3537 of SEQ ID NO: 3500
aauggcaggucauugaauu

SEQ ID NO: 272307 - RNA, 19 nt, Artificial Sequence
  Description of Artificial Sequence: Synthetic oligonucleotide
  Antisense strand to SEQ ID NO: 272306
aauucaaugaccugccauu

SEQ ID NO: 272308 - RNA, 19 nt, Artificial Sequence
  Description of Artificial Sequence: Synthetic oligonucleotide
  Sense strand starting at position 3538 of SEQ ID NO: 3500
auggcaggucauugaauua

SEQ ID NO: 272309 - RNA, 19 nt, Artificial Sequence
  Description of Artificial Sequence: Synthetic oligonucleotide
  Antisense strand to SEQ ID NO: 272308
uaauucaaugaccugccau

SEQ ID NO: 272310 - RNA, 19 nt, Artificial Sequence
  Description of Artificial Sequence: Synthetic oligonucleotide
  Sense strand starting at position 3660 of SEQ ID NO: 3500
uuaguuaacugagcacaau

SEQ ID NO: 272311 - RNA, 19 nt, Artificial Sequence
  Description of Artificial Sequence: Synthetic oligonucleotide
  Antisense strand to SEQ ID NO: 272310
auugugcucaguuaacuaa

SEQ ID NO: 272312 - RNA, 19 nt, Artificial Sequence
  Description of Artificial Sequence: Synthetic oligonucleotide
  Sense strand starting at position 3718 of SEQ ID NO: 3500
caaagaccguaauugguau

SEQ ID NO: 272313 - RNA, 19 nt, Artificial Sequence
  Description of Artificial Sequence: Synthetic oligonucleotide
  Antisense strand to SEQ ID NO: 272312
auaccaauuacggucuuug

SEQ ID NO: 272314 - RNA, 19 nt, Artificial Sequence
  Description of Artificial Sequence: Synthetic oligonucleotide
  Sense strand starting at position 3734 of SEQ ID NO: 3500
uauugaguuggguaucauu

SEQ ID NO: 272315 - RNA, 19 nt, Artificial Sequence
  Description of Artificial Sequence: Synthetic oligonucleotide
  Antisense strand to SEQ ID NO: 272314
aaugauacccaacucaaua

SEQ ID NO: 272316 - RNA, 19 nt, Artificial Sequence
  Description of Artificial Sequence: Synthetic oligonucleotide
  Sense strand starting at position 46 of SEQ ID NO: 3499
gcauaaaucaguggugaaa

SEQ ID NO: 272317 - RNA, 19 nt, Artificial Sequence
  Description of Artificial Sequence: Synthetic oligonucleotide
  Antisense strand to SEQ ID NO: 272316
uuucaccacugauuuaugc

SEQ ID NO: 272318 - RNA, 19 nt, Artificial Sequence
  Description of Artificial Sequence: Synthetic oligonucleotide
  Sense strand starting at position 112 of SEQ ID NO: 3499
agaugauggcuagguggau

SEQ ID NO: 272319 - RNA, 19 nt, Artificial Sequence
  Description of Artificial Sequence: Synthetic oligonucleotide
  Antisense strand to SEQ ID NO: 272318
auccaccuagccaucaucu

SEQ ID NO: 272320 - RNA, 19 nt, Artificial Sequence
  Description of Artificial Sequence: Synthetic oligonucleotide
  Sense strand starting at position 199 of SEQ ID NO: 3499
ugguguugaguuuagaauc

SEQ ID NO: 272321 - RNA, 19 nt, Artificial Sequence
  Description of Artificial Sequence: Synthetic oligonucleotide
  Antisense strand to SEQ ID NO: 272320
gauucuaaacucaacacca

SEQ ID NO: 272322 - RNA, 19 nt, Artificial Sequence
  Description of Artificial Sequence: Synthetic oligonucleotide
  Sense strand starting at position 212 of SEQ ID NO: 3499
agaaucaucugggcaacua

SEQ ID NO: 272323 - RNA, 19 nt, Artificial Sequence
  Description of Artificial Sequence: Synthetic oligonucleotide
  Antisense strand to SEQ ID NO: 272322
uaguugcccagaugauucu

SEQ ID NO: 272324 - RNA, 19 nt, Artificial Sequence
  Description of Artificial Sequence: Synthetic oligonucleotide
  Sense strand starting at position 302 of SEQ ID NO: 3499
ggaaauaugguaggugaau

SEQ ID NO: 272325 - RNA, 19 nt, Artificial Sequence
  Description of Artificial Sequence: Synthetic oligonucleotide
  Antisense strand to SEQ ID NO: 272324
auucaccuaccauauuucc

SEQ ID NO: 272326 - RNA, 19 nt, Artificial Sequence
  Description of Artificial Sequence: Synthetic oligonucleotide
  Sense strand starting at position 572 of SEQ ID NO: 3499
auuauauuccucgaggucu

SEQ ID NO: 272327 - RNA, 19 nt, Artificial Sequence
  Description of Artificial Sequence: Synthetic oligonucleotide
  Antisense strand to SEQ ID NO: 272326
agaccucgaggaauauaau

SEQ ID NO: 272328 - RNA, 19 nt, Artificial Sequence
  Description of Artificial Sequence: Synthetic oligonucleotide
  Sense strand starting at position 1050 of SEQ ID NO: 3499
ucugauauuccugagcgag

SEQ ID NO: 272329 - RNA, 19 nt, Artificial Sequence
  Description of Artificial Sequence: Synthetic oligonucleotide
  Antisense strand to SEQ ID NO: 272328
cucgcucaggaauaucaga

SEQ ID NO: 272330 - RNA, 19 nt, Artificial Sequence
  Description of Artificial Sequence: Synthetic oligonucleotide
  Sense strand starting at position 1131 of SEQ ID NO: 3499
uccagaaagguguaguauu

SEQ ID NO: 272331 - RNA, 19 nt, Artificial Sequence
  Description of Artificial Sequence: Synthetic oligonucleotide
  Antisense strand to SEQ ID NO: 272330
aauacuacaccuuucugga

SEQ ID NO: 272332 - RNA, 19 nt, Artificial Sequence
  Description of Artificial Sequence: Synthetic oligonucleotide
  Sense strand starting at position 1197 of SEQ ID NO: 3499
agcacaacguuuccuauuu

SEQ ID NO: 272333 - RNA, 19 nt, Artificial Sequence
  Description of Artificial Sequence: Synthetic oligonucleotide
  Antisense strand to SEQ ID NO: 272332
aaauaggaaacguugugcu

SEQ ID NO: 272334 - RNA, 19 nt, Artificial Sequence
  Description of Artificial Sequence: Synthetic oligonucleotide
  Sense strand starting at position 1198 of SEQ ID NO: 3499
gcacaacguuuccuauuua

SEQ ID NO: 272335 - RNA, 19 nt, Artificial Sequence
  Description of Artificial Sequence: Synthetic oligonucleotide
  Antisense strand to SEQ ID NO: 272334
uaaauaggaaacguugugc

SEQ ID NO: 272336 - RNA, 19 nt, Artificial Sequence
  Description of Artificial Sequence: Synthetic oligonucleotide
  Sense strand starting at position 1242 of SEQ ID NO: 3499
acagcuagagauugcauaa

SEQ ID NO: 272337 - RNA, 19 nt, Artificial Sequence
  Description of Artificial Sequence: Synthetic oligonucleotide
  Antisense strand to SEQ ID NO: 272336
uuaugcaaucucuagcugu

SEQ ID NO: 272338 - RNA, 19 nt, Artificial Sequence
  Description of Artificial Sequence: Synthetic oligonucleotide
  Sense strand starting at position 1475 of SEQ ID NO: 3499
gagaaacuauuguuccuga

SEQ ID NO: 272339 - RNA, 19 nt, Artificial Sequence
  Description of Artificial Sequence: Synthetic oligonucleotide
  Antisense strand to SEQ ID NO: 272338
ucaggaacaauaguuucuc

SEQ ID NO: 272340 - RNA, 19 nt, Artificial Sequence
  Description of Artificial Sequence: Synthetic oligonucleotide
  Sense strand starting at position 1537 of SEQ ID NO: 3499
ugggucuuuggagauguuu

SEQ ID NO: 272341 - RNA, 19 nt, Artificial Sequence
  Description of Artificial Sequence: Synthetic oligonucleotide
  Antisense strand to SEQ ID NO: 272340
aaacaucuccaaagaccca

SEQ ID NO: 272342 - RNA, 19 nt, Artificial Sequence
  Description of Artificial Sequence: Synthetic oligonucleotide
  Sense strand starting at position 1546 of SEQ ID NO: 3499
ggagauguuucuuccugau

SEQ ID NO: 272343 - RNA, 19 nt, Artificial Sequence
  Description of Artificial Sequence: Synthetic oligonucleotide
  Antisense strand to SEQ ID NO: 272342
aucaggaagaaacaucucc

SEQ ID NO: 272344 - RNA, 19 nt, Artificial Sequence
  Description of Artificial Sequence: Synthetic oligonucleotide
  Sense strand starting at position 1564 of SEQ ID NO: 3499
uugugacauggucauccau

SEQ ID NO: 272345 - RNA, 19 nt, Artificial Sequence
  Description of Artificial Sequence: Synthetic oligonucleotide
  Antisense strand to SEQ ID NO: 272344
auggaugaccaugucacaa

SEQ ID NO: 272346 - RNA, 19 nt, Artificial Sequence
  Description of Artificial Sequence: Synthetic oligonucleotide
  Sense strand starting at position 1582 of SEQ ID NO: 3499
uuuaaaggugaagguuuaa

SEQ ID NO: 272347 - RNA, 19 nt, Artificial Sequence
  Description of Artificial Sequence: Synthetic oligonucleotide
  Antisense strand to SEQ ID NO: 272346
uuaaaccuucaccuuuaaa

SEQ ID NO: 272348 - RNA, 19 nt, Artificial Sequence
  Description of Artificial Sequence: Synthetic oligonucleotide
  Sense strand starting at position 1838 of SEQ ID NO: 3499
cguugauccaggcaagaga

SEQ ID NO: 272349 - RNA, 19 nt, Artificial Sequence
  Description of Artificial Sequence: Synthetic oligonucleotide
  Antisense strand to SEQ ID NO: 272348
ucucuugccuggaucaacg

SEQ ID NO: 272350 - RNA, 19 nt, Artificial Sequence
  Description of Artificial Sequence: Synthetic oligonucleotide
  Sense strand starting at position 1911 of SEQ ID NO: 3499
gugucauccagguaggaac

SEQ ID NO: 272351 - RNA, 19 nt, Artificial Sequence
  Description of Artificial Sequence: Synthetic oligonucleotide
  Antisense strand to SEQ ID NO: 272350
guuccuaccuggaugacac

SEQ ID NO: 272352 - RNA, 19 nt, Artificial Sequence
  Description of Artificial Sequence: Synthetic oligonucleotide
  Sense strand starting at position 1922 of SEQ ID NO: 3499
guaggaacucccuaaguua

SEQ ID NO: 272353 - RNA, 19 nt, Artificial Sequence
  Description of Artificial Sequence: Synthetic oligonucleotide
  Antisense strand to SEQ ID NO: 272352
uaacuuagggaguuccuac

SEQ ID NO: 272354 - RNA, 19 nt, Artificial Sequence
  Description of Artificial Sequence: Synthetic oligonucleotide
  Sense strand starting at position 1936 of SEQ ID NO: 3499
aguuauugcagccaugaga

SEQ ID NO: 272355 - RNA, 19 nt, Artificial Sequence
  Description of Artificial Sequence: Synthetic oligonucleotide
  Antisense strand to SEQ ID NO: 272354
ucucauggcugcaauaacu

SEQ ID NO: 272356 - RNA, 19 nt, Artificial Sequence
  Description of Artificial Sequence: Synthetic oligonucleotide
  Sense strand starting at position 2278 of SEQ ID NO: 3499
ugaaguugaagaugccaua

SEQ ID NO: 272357 - RNA, 19 nt, Artificial Sequence
  Description of Artificial Sequence: Synthetic oligonucleotide
  Antisense strand to SEQ ID NO: 272356
uauggcaucuucaacuuca

SEQ ID NO: 272358 - RNA, 19 nt, Artificial Sequence
  Description of Artificial Sequence: Synthetic oligonucleotide
  Sense strand starting at position 2372 of SEQ ID NO: 3499
gugacauuauacccagaug

SEQ ID NO: 272359 - RNA, 19 nt, Artificial Sequence
  Description of Artificial Sequence: Synthetic oligonucleotide
  Antisense strand to SEQ ID NO: 272358
caucuggguauaaugucac

SEQ ID NO: 272360 - RNA, 19 nt, Artificial Sequence
  Description of Artificial Sequence: Synthetic oligonucleotide
  Sense strand starting at position 2383 of SEQ ID NO: 3499
cccagaugucuguacccaa

SEQ ID NO: 272361 - RNA, 19 nt, Artificial Sequence
  Description of Artificial Sequence: Synthetic oligonucleotide
  Antisense strand to SEQ ID NO: 272360
uuggguacagacaucuggg

SEQ ID NO: 272362 - RNA, 19 nt, Artificial Sequence
  Description of Artificial Sequence: Synthetic oligonucleotide
  Sense strand starting at position 2386 of SEQ ID NO: 3499
agaugucuguacccaaaug

SEQ ID NO: 272363 - RNA, 19 nt, Artificial Sequence
  Description of Artificial Sequence: Synthetic oligonucleotide
  Antisense strand to SEQ ID NO: 272362
cauuuggguacagacaucu

SEQ ID NO: 272364 - RNA, 19 nt, Artificial Sequence
  Description of Artificial Sequence: Synthetic oligonucleotide
  Sense strand starting at position 2404 of SEQ ID NO: 3499
gugguuuccaacuaagagg

SEQ ID NO: 272365 - RNA, 19 nt, Artificial Sequence
  Description of Artificial Sequence: Synthetic oligonucleotide
  Antisense strand to SEQ ID NO: 272364
ccucuuaguuggaaaccac

SEQ ID NO: 272366 - RNA, 19 nt, Artificial Sequence
  Description of Artificial Sequence: Synthetic oligonucleotide
  Sense strand starting at position 2508 of SEQ ID NO: 3499
gagccuaugguuuauauau

SEQ ID NO: 272367 - RNA, 19 nt, Artificial Sequence
  Description of Artificial Sequence: Synthetic oligonucleotide
  Antisense strand to SEQ ID NO: 272366
auauauaaaccauaggcuc

SEQ ID NO: 272368 - RNA, 19 nt, Artificial Sequence
  Description of Artificial Sequence: Synthetic oligonucleotide
  Sense strand starting at position 2712 of SEQ ID NO: 3499
gagaccuuccuguaucuga

SEQ ID NO: 272369 - RNA, 19 nt, Artificial Sequence
  Description of Artificial Sequence: Synthetic oligonucleotide
  Antisense strand to SEQ ID NO: 272368
ucagauacaggaaggucuc

SEQ ID NO: 272370 - RNA, 19 nt, Artificial Sequence
  Description of Artificial Sequence: Synthetic oligonucleotide
  Sense strand starting at position 2872 of SEQ ID NO: 3499
augccuuuaguugaaugau

SEQ ID NO: 272371 - RNA, 19 nt, Artificial Sequence
  Description of Artificial Sequence: Synthetic oligonucleotide
  Antisense strand to SEQ ID NO: 272370
aucauucaacuaaaggcau

SEQ ID NO: 272372 - RNA, 19 nt, Artificial Sequence
  Description of Artificial Sequence: Synthetic oligonucleotide
  Sense strand starting at position 2875 of SEQ ID NO: 3499
ccuuuaguugaaugaucca

SEQ ID NO: 272373 - RNA, 19 nt, Artificial Sequence
  Description of Artificial Sequence: Synthetic oligonucleotide
  Antisense strand to SEQ ID NO: 272372
uggaucauucaacuaaagg

SEQ ID NO: 272374 - RNA, 19 nt, Artificial Sequence
  Description of Artificial Sequence: Synthetic oligonucleotide
  Sense strand starting at position 2878 of SEQ ID NO: 3499
uuaguugaaugauccauaa

SEQ ID NO: 272375 - RNA, 19 nt, Artificial Sequence
  Description of Artificial Sequence: Synthetic oligonucleotide
  Antisense strand to SEQ ID NO: 272374
uuauggaucauucaacuaa

SEQ ID NO: 272376 - RNA, 19 nt, Artificial Sequence
  Description of Artificial Sequence: Synthetic oligonucleotide
  Sense strand starting at position 2920 of SEQ ID NO: 3499
ggaggauacuaucuguagu

SEQ ID NO: 272377 - RNA, 19 nt, Artificial Sequence
  Description of Artificial Sequence: Synthetic oligonucleotide
  Antisense strand to SEQ ID NO: 272376
acuacagauaguauccucc

SEQ ID NO: 272378 - RNA, 19 nt, Artificial Sequence
  Description of Artificial Sequence: Synthetic oligonucleotide
  Sense strand starting at position 2922 of SEQ ID NO: 3499
aggauacuaucuguaguua

SEQ ID NO: 272379 - RNA, 19 nt, Artificial Sequence
  Description of Artificial Sequence: Synthetic oligonucleotide
  Antisense strand to SEQ ID NO: 272378
uaacuacagauaguauccu

SEQ ID NO: 272380 - RNA, 19 nt, Artificial Sequence
  Description of Artificial Sequence: Synthetic oligonucleotide
  Sense strand starting at position 2923 of SEQ ID NO: 3499
ggauacuaucuguaguuau

SEQ ID NO: 272381 - RNA, 19 nt, Artificial Sequence
  Description of Artificial Sequence: Synthetic oligonucleotide
  Antisense strand to SEQ ID NO: 272380
auaacuacagauaguaucc

SEQ ID NO: 272382 - RNA, 19 nt, Artificial Sequence
  Description of Artificial Sequence: Synthetic oligonucleotide
  Sense strand starting at position 3082 of SEQ ID NO: 3499
uuaugagagcauugaacua

SEQ ID NO: 272383 - RNA, 19 nt, Artificial Sequence
  Description of Artificial Sequence: Synthetic oligonucleotide
  Antisense strand to SEQ ID NO: 272382
uaguucaaugcucucauaa

SEQ ID NO: 272384 - RNA, 19 nt, Artificial Sequence
  Description of Artificial Sequence: Synthetic oligonucleotide
  Sense strand starting at position 3640 of SEQ ID NO: 3499
acaggucuucugggaggga

SEQ ID NO: 272385 - RNA, 19 nt, Artificial Sequence
  Description of Artificial Sequence: Synthetic oligonucleotide
  Antisense strand to SEQ ID NO: 272384
ucccucccagaagaccugu

SEQ ID NO: 272386 - RNA, 19 nt, Artificial Sequence
  Description of Artificial Sequence: Synthetic oligonucleotide
  Sense strand starting at position 3681 of SEQ ID NO: 3499
caauuucuguagucauggu

SEQ ID NO: 272387 - RNA, 19 nt, Artificial Sequence
  Description of Artificial Sequence: Synthetic oligonucleotide
  Antisense strand to SEQ ID NO: 272386
accaugacuacagaaauug

SEQ ID NO: 272388 - RNA, 19 nt, Artificial Sequence
  Description of Artificial Sequence: Synthetic oligonucleotide
  Sense strand starting at position 3898 of SEQ ID NO: 3499
acggcaagcaaguaugaaa

SEQ ID NO: 272389 - RNA, 19 nt, Artificial Sequence
  Description of Artificial Sequence: Synthetic oligonucleotide
  Antisense strand to SEQ ID NO: 272388
uuucauacuugcuugccgu

SEQ ID NO: 272390 - RNA, 19 nt, Artificial Sequence
  Description of Artificial Sequence: Synthetic oligonucleotide
  Sense strand starting at position 3912 of SEQ ID NO: 3499
ugaaauauagcuugaaguc

SEQ ID NO: 272391 - RNA, 19 nt, Artificial Sequence
  Description of Artificial Sequence: Synthetic oligonucleotide
  Antisense strand to SEQ ID NO: 272390
gacuucaagcuauauuuca

SEQ ID NO: 272392 - RNA, 19 nt, Artificial Sequence
  Description of Artificial Sequence: Synthetic oligonucleotide
  Sense strand starting at position 3956 of SEQ ID NO: 3499
aucugaaaguuguuaauca

SEQ ID NO: 272393 - RNA, 19 nt, Artificial Sequence
  Description of Artificial Sequence: Synthetic oligonucleotide
  Antisense strand to SEQ ID NO: 272392
ugauuaacaacuuucagau

SEQ ID NO: 272394 - RNA, 19 nt, Artificial Sequence
  Description of Artificial Sequence: Synthetic oligonucleotide
  Sense strand starting at position 3960 of SEQ ID NO: 3499
gaaaguuguuaaucauagg

SEQ ID NO: 272395 - RNA, 19 nt, Artificial Sequence
  Description of Artificial Sequence: Synthetic oligonucleotide
  Antisense strand to SEQ ID NO: 272394
ccuaugauuaacaacuuuc

SEQ ID NO: 272396 - RNA, 19 nt, Artificial Sequence
  Description of Artificial Sequence: Synthetic oligonucleotide
  Sense strand starting at position 236 of SEQ ID NO: 3501
gcuaauguuuaauuugcau

SEQ ID NO: 272397 - RNA, 19 nt, Artificial Sequence
  Description of Artificial Sequence: Synthetic oligonucleotide
  Antisense strand to SEQ ID NO: 272396
augcaaauuaaacauuagc

SEQ ID NO: 272398 - RNA, 19 nt, Artificial Sequence
  Description of Artificial Sequence: Synthetic oligonucleotide
  Sense strand starting at position 272 of SEQ ID NO: 3501
gagagcuguuauuugcuuu

SEQ ID NO: 272399 - RNA, 19 nt, Artificial Sequence
  Description of Artificial Sequence: Synthetic oligonucleotide
  Antisense strand to SEQ ID NO: 272398
aaagcaaauaacagcucuc

SEQ ID NO: 272400 - RNA, 19 nt, Artificial Sequence
  Description of Artificial Sequence: Synthetic oligonucleotide
  Sense strand starting at position 275 of SEQ ID NO: 3501
agcuguuauuugcuuugau

SEQ ID NO: 272401 - RNA, 19 nt, Artificial Sequence
  Description of Artificial Sequence: Synthetic oligonucleotide
  Antisense strand to SEQ ID NO: 272400
aucaaagcaaauaacagcu

SEQ ID NO: 272402 - RNA, 19 nt, Artificial Sequence
  Description of Artificial Sequence: Synthetic oligonucleotide
  Sense strand starting at position 276 of SEQ ID NO: 3501
gcuguuauuugcuuugaua

SEQ ID NO: 272403 - RNA, 19 nt, Artificial Sequence
  Description of Artificial Sequence: Synthetic oligonucleotide
  Antisense strand to SEQ ID NO: 272402
uaucaaagcaaauaacagc

SEQ ID NO: 272404 - RNA, 19 nt, Artificial Sequence
  Description of Artificial Sequence: Synthetic oligonucleotide
  Sense strand starting at position 287 of SEQ ID NO: 3501
cuuugauaggauuacuugu

SEQ ID NO: 272405 - RNA, 19 nt, Artificial Sequence
  Description of Artificial Sequence: Synthetic oligonucleotide
  Antisense strand to SEQ ID NO: 272404
acaaguaauccuaucaaag

SEQ ID NO: 272406 - RNA, 19 nt, Artificial Sequence
  Description of Artificial Sequence: Synthetic oligonucleotide
  Sense strand starting at position 301 of SEQ ID NO: 3501
cuuguuccgcuagagaaca

SEQ ID NO: 272407 - RNA, 19 nt, Artificial Sequence
  Description of Artificial Sequence: Synthetic oligonucleotide
  Antisense strand to SEQ ID NO: 272406
uguucucuagcggaacaag

SEQ ID NO: 272408 - RNA, 19 nt, Artificial Sequence
  Description of Artificial Sequence: Synthetic oligonucleotide
  Sense strand starting at position 457 of SEQ ID NO: 3501
acacuaaugcacuguaaag

SEQ ID NO: 272409 - RNA, 19 nt, Artificial Sequence
  Description of Artificial Sequence: Synthetic oligonucleotide
  Antisense strand to SEQ ID NO: 272408
cuuuacagugcauuagugu

SEQ ID NO: 272410 - RNA, 19 nt, Artificial Sequence
  Description of Artificial Sequence: Synthetic oligonucleotide
  Sense strand starting at position 668 of SEQ ID NO: 3501
guguaaauacagcauuaga

SEQ ID NO: 272411 - RNA, 19 nt, Artificial Sequence
  Description of Artificial Sequence: Synthetic oligonucleotide
  Antisense strand to SEQ ID NO: 272410
ucuaaugcuguauuuacac

SEQ ID NO: 272412 - RNA, 19 nt, Artificial Sequence
  Description of Artificial Sequence: Synthetic oligonucleotide
  Sense strand starting at position 1012 of SEQ ID NO: 3501
acaucccauguuugacaua

SEQ ID NO: 272413 - RNA, 19 nt, Artificial Sequence
  Description of Artificial Sequence: Synthetic oligonucleotide
  Antisense strand to SEQ ID NO: 272412
uaugucaaacaugggaugu

SEQ ID NO: 272414 - RNA, 19 nt, Artificial Sequence
  Description of Artificial Sequence: Synthetic oligonucleotide
  Sense strand starting at position 1084 of SEQ ID NO: 3501
cuguacucucaggagaagu

SEQ ID NO: 272415 - RNA, 19 nt, Artificial Sequence
  Description of Artificial Sequence: Synthetic oligonucleotide
  Antisense strand to SEQ ID NO: 272414
acuucuccugagaguacag

SEQ ID NO: 272416 - RNA, 19 nt, Artificial Sequence
  Description of Artificial Sequence: Synthetic oligonucleotide
  Sense strand starting at position 1095 of SEQ ID NO: 3501
ggagaagugaacugugaac

SEQ ID NO: 272417 - RNA, 19 nt, Artificial Sequence
  Description of Artificial Sequence: Synthetic oligonucleotide
  Antisense strand to SEQ ID NO: 272416
guucacaguucacuucucc

SEQ ID NO: 272418 - RNA, 19 nt, Artificial Sequence
  Description of Artificial Sequence: Synthetic oligonucleotide
  Sense strand starting at position 1102 of SEQ ID NO: 3501
ugaacugugaacugguuaa

SEQ ID NO: 272419 - RNA, 19 nt, Artificial Sequence
  Description of Artificial Sequence: Synthetic oligonucleotide
  Antisense strand to SEQ ID NO: 272418
uuaaccaguucacaguuca

SEQ ID NO: 272420 - RNA, 19 nt, Artificial Sequence
  Description of Artificial Sequence: Synthetic oligonucleotide
  Sense strand starting at position 1136 of SEQ ID NO: 3501
cuccaauaaguuugauaug

SEQ ID NO: 272421 - RNA, 19 nt, Artificial Sequence
  Description of Artificial Sequence: Synthetic oligonucleotide
  Antisense strand to SEQ ID NO: 272420
cauaucaaacuuauuggag

SEQ ID NO: 272422 - RNA, 19 nt, Artificial Sequence
  Description of Artificial Sequence: Synthetic oligonucleotide
  Sense strand starting at position 1292 of SEQ ID NO: 3501
guaucagucuuauuucucu

SEQ ID NO: 272423 - RNA, 19 nt, Artificial Sequence
  Description of Artificial Sequence: Synthetic oligonucleotide
  Antisense strand to SEQ ID NO: 272422
agagaaauaagacugauac

SEQ ID NO: 272424 - RNA, 19 nt, Artificial Sequence
  Description of Artificial Sequence: Synthetic oligonucleotide
  Sense strand starting at position 1311 of SEQ ID NO: 3501
cucugcuuaccugagggaa

SEQ ID NO: 272425 - RNA, 19 nt, Artificial Sequence
  Description of Artificial Sequence: Synthetic oligonucleotide
  Antisense strand to SEQ ID NO: 272424
uucccucagguaagcagag

SEQ ID NO: 272426 - RNA, 19 nt, Artificial Sequence
  Description of Artificial Sequence: Synthetic oligonucleotide
  Sense strand starting at position 1314 of SEQ ID NO: 3501
ugcuuaccugagggaaauu

SEQ ID NO: 272427 - RNA, 19 nt, Artificial Sequence
  Description of Artificial Sequence: Synthetic oligonucleotide
  Antisense strand to SEQ ID NO: 272426
aauuucccucagguaagca

SEQ ID NO: 272428 - RNA, 19 nt, Artificial Sequence
  Description of Artificial Sequence: Synthetic oligonucleotide
  Sense strand starting at position 1451 of SEQ ID NO: 3501
gugacuucuccagaaguua

SEQ ID NO: 272429 - RNA, 19 nt, Artificial Sequence
  Description of Artificial Sequence: Synthetic oligonucleotide
  Antisense strand to SEQ ID NO: 272428
uaacuucuggagaagucac

SEQ ID NO: 272430 - RNA, 19 nt, Artificial Sequence
  Description of Artificial Sequence: Synthetic oligonucleotide
  Sense strand starting at position 1477 of SEQ ID NO: 3501
uuaauaacaugugcaagua

SEQ ID NO: 272431 - RNA, 19 nt, Artificial Sequence
  Description of Artificial Sequence: Synthetic oligonucleotide
  Antisense strand to SEQ ID NO: 272430
uacuugcacauguuauuaa

SEQ ID NO: 272432 - RNA, 19 nt, Artificial Sequence
  Description of Artificial Sequence: Synthetic oligonucleotide
  Sense strand starting at position 1590 of SEQ ID NO: 3501
ggcggauagcaccaacaau

SEQ ID NO: 272433 - RNA, 19 nt, Artificial Sequence
  Description of Artificial Sequence: Synthetic oligonucleotide
  Antisense strand to SEQ ID NO: 272432
auuguuggugcuauccgcc

SEQ ID NO: 272434 - RNA, 19 nt, Artificial Sequence
  Description of Artificial Sequence: Synthetic oligonucleotide
  Sense strand starting at position 1698 of SEQ ID NO: 3501
ucuguucuccuguaagaua

SEQ ID NO: 272435 - RNA, 19 nt, Artificial Sequence
  Description of Artificial Sequence: Synthetic oligonucleotide
  Antisense strand to SEQ ID NO: 272434
uaucuuacaggagaacaga

SEQ ID NO: 272436 - RNA, 19 nt, Artificial Sequence
  Description of Artificial Sequence: Synthetic oligonucleotide
  Sense strand starting at position 1905 of SEQ ID NO: 3501
ggaagacucugacagauuu

SEQ ID NO: 272437 - RNA, 19 nt, Artificial Sequence
  Description of Artificial Sequence: Synthetic oligonucleotide
  Antisense strand to SEQ ID NO: 272436
aaaucugucagagucuucc

SEQ ID NO: 272438 - RNA, 19 nt, Artificial Sequence
  Description of Artificial Sequence: Synthetic oligonucleotide
  Sense strand starting at position 2014 of SEQ ID NO: 3501
aagaacaauccguacaugu

SEQ ID NO: 272439 - RNA, 19 nt, Artificial Sequence
  Description of Artificial Sequence: Synthetic oligonucleotide
  Antisense strand to SEQ ID NO: 272438
acauguacggauuguucuu

SEQ ID NO: 272440 - RNA, 19 nt, Artificial Sequence
  Description of Artificial Sequence: Synthetic oligonucleotide
  Sense strand starting at position 2016 of SEQ ID NO: 3501
gaacaauccguacauguga

SEQ ID NO: 272441 - RNA, 19 nt, Artificial Sequence
  Description of Artificial Sequence: Synthetic oligonucleotide
  Antisense strand to SEQ ID NO: 272440
ucacauguacggauuguuc

SEQ ID NO: 272442 - RNA, 19 nt, Artificial Sequence
  Description of Artificial Sequence: Synthetic oligonucleotide
  Sense strand starting at position 2153 of SEQ ID NO: 3501
gcacaagagaaacgugaau

SEQ ID NO: 272443 - RNA, 19 nt, Artificial Sequence
  Description of Artificial Sequence: Synthetic oligonucleotide
  Antisense strand to SEQ ID NO: 272442
auucacguuucucuugugc

SEQ ID NO: 272444 - RNA, 19 nt, Artificial Sequence
  Description of Artificial Sequence: Synthetic oligonucleotide
  Sense strand starting at position 2159 of SEQ ID NO: 3501
gagaaacgugaaugacuuu

SEQ ID NO: 272445 - RNA, 19 nt, Artificial Sequence
  Description of Artificial Sequence: Synthetic oligonucleotide
  Antisense strand to SEQ ID NO: 272444
aaagucauucacguuucuc

SEQ ID NO: 272446 - RNA, 19 nt, Artificial Sequence
  Description of Artificial Sequence: Synthetic oligonucleotide
  Sense strand starting at position 2264 of SEQ ID NO: 3501
gcagcaccaccaugagaaa

SEQ ID NO: 272447 - RNA, 19 nt, Artificial Sequence
  Description of Artificial Sequence: Synthetic oligonucleotide
  Antisense strand to SEQ ID NO: 272446
uuucucaugguggugcugc

SEQ ID NO: 272448 - RNA, 19 nt, Artificial Sequence
  Description of Artificial Sequence: Synthetic oligonucleotide
  Sense strand starting at position 2441 of SEQ ID NO: 3501
uuguuauugcaagaauaug

SEQ ID NO: 272449 - RNA, 19 nt, Artificial Sequence
  Description of Artificial Sequence: Synthetic oligonucleotide
  Antisense strand to SEQ ID NO: 272448
cauauucuugcaauaacaa

SEQ ID NO: 272450 - RNA, 19 nt, Artificial Sequence
  Description of Artificial Sequence: Synthetic oligonucleotide
  Sense strand starting at position 3105 of SEQ ID NO: 3501
uuacaagaugccugugaga

SEQ ID NO: 272451 - RNA, 19 nt, Artificial Sequence
  Description of Artificial Sequence: Synthetic oligonucleotide
  Antisense strand to SEQ ID NO: 272450
ucucacaggcaucuuguaa

SEQ ID NO: 272452 - RNA, 19 nt, Artificial Sequence
  Description of Artificial Sequence: Synthetic oligonucleotide
  Sense strand starting at position 3107 of SEQ ID NO: 3501
acaagaugccugugagaua

SEQ ID NO: 272453 - RNA, 19 nt, Artificial Sequence
  Description of Artificial Sequence: Synthetic oligonucleotide
  Antisense strand to SEQ ID NO: 272452
uaucucacaggcaucuugu

SEQ ID NO: 272454 - RNA, 19 nt, Artificial Sequence
  Description of Artificial Sequence: Synthetic oligonucleotide
  Sense strand starting at position 3116 of SEQ ID NO: 3501
cugugagauaggcaauacu

SEQ ID NO: 272455 - RNA, 19 nt, Artificial Sequence
  Description of Artificial Sequence: Synthetic oligonucleotide
  Antisense strand to SEQ ID NO: 272454
aguauugccuaucucacag

SEQ ID NO: 272456 - RNA, 19 nt, Artificial Sequence
  Description of Artificial Sequence: Synthetic oligonucleotide
  Sense strand starting at position 3273 of SEQ ID NO: 3501
cuaguagucaguuauaaug

SEQ ID NO: 272457 - RNA, 19 nt, Artificial Sequence
  Description of Artificial Sequence: Synthetic oligonucleotide
  Antisense strand to SEQ ID NO: 272456
cauuauaacugacuacuag

SEQ ID NO: 272458 - RNA, 19 nt, Artificial Sequence
  Description of Artificial Sequence: Synthetic oligonucleotide
  Sense strand starting at position 3331 of SEQ ID NO: 3501
ggcuucugauuugcaaauu

SEQ ID NO: 272459 - RNA, 19 nt, Artificial Sequence
  Description of Artificial Sequence: Synthetic oligonucleotide
  Antisense strand to SEQ ID NO: 272458
aauuugcaaaucagaagcc

SEQ ID NO: 272460 - RNA, 19 nt, Artificial Sequence
  Description of Artificial Sequence: Synthetic oligonucleotide
  Sense strand starting at position 3356 of SEQ ID NO: 3501
ggguaaaucaagugaggcu

SEQ ID NO: 272461 - RNA, 19 nt, Artificial Sequence
  Description of Artificial Sequence: Synthetic oligonucleotide
  Antisense strand to SEQ ID NO: 272460
agccucacuugauuuaccc

SEQ ID NO: 272462 - RNA, 19 nt, Artificial Sequence
  Description of Artificial Sequence: Synthetic oligonucleotide
  Sense strand starting at position 3357 of SEQ ID NO: 3501
gguaaaucaagugaggcuu

SEQ ID NO: 272463 - RNA, 19 nt, Artificial Sequence
  Description of Artificial Sequence: Synthetic oligonucleotide
  Antisense strand to SEQ ID NO: 272462
aagccucacuugauuuacc

SEQ ID NO: 272464 - RNA, 19 nt, Artificial Sequence
  Description of Artificial Sequence: Synthetic oligonucleotide
  Sense strand starting at position 3420 of SEQ ID NO: 3501
auguaaugucuuuagcuag

SEQ ID NO: 272465 - RNA, 19 nt, Artificial Sequence
  Description of Artificial Sequence: Synthetic oligonucleotide
  Antisense strand to SEQ ID NO: 272464
cuagcuaaagacauuacau

SEQ ID NO: 272466 - RNA, 19 nt, Artificial Sequence
  Description of Artificial Sequence: Synthetic oligonucleotide
  Sense strand starting at position 3480 of SEQ ID NO: 3501
uuaccagaguugucagaaa

SEQ ID NO: 272467 - RNA, 19 nt, Artificial Sequence
  Description of Artificial Sequence: Synthetic oligonucleotide
  Antisense strand to SEQ ID NO: 272466
uuucugacaacucugguaa

SEQ ID NO: 272468 - RNA, 19 nt, Artificial Sequence
  Description of Artificial Sequence: Synthetic oligonucleotide
  Sense strand starting at position 3501 of SEQ ID NO: 3501
agugaaucuuugcccugaa

SEQ ID NO: 272469 - RNA, 19 nt, Artificial Sequence
  Description of Artificial Sequence: Synthetic oligonucleotide
  Antisense strand to SEQ ID NO: 272468
uucagggcaaagauucacu

SEQ ID NO: 272470 - RNA, 19 nt, Artificial Sequence
  Description of Artificial Sequence: Synthetic oligonucleotide
  Sense strand starting at position 3502 of SEQ ID NO: 3501
gugaaucuuugcccugaaa

SEQ ID NO: 272471 - RNA, 19 nt, Artificial Sequence
  Description of Artificial Sequence: Synthetic oligonucleotide
  Antisense strand to SEQ ID NO: 272470
uuucagggcaaagauucac

SEQ ID NO: 272472 - RNA, 19 nt, Artificial Sequence
  Description of Artificial Sequence: Synthetic oligonucleotide
  Sense strand starting at position 3708 of SEQ ID NO: 3501
accuaaguccuugaggcua

SEQ ID NO: 272473 - RNA, 19 nt, Artificial Sequence
  Description of Artificial Sequence: Synthetic oligonucleotide
  Antisense strand to SEQ ID NO: 272472
uagccucaaggacuuaggu

SEQ ID NO: 272474 - RNA, 19 nt, Artificial Sequence
  Description of Artificial Sequence: Synthetic oligonucleotide
  Sense strand starting at position 3936 of SEQ ID NO: 3501
uucggucacuuacuagaaa

SEQ ID NO: 272475 - RNA, 19 nt, Artificial Sequence
  Description of Artificial Sequence: Synthetic oligonucleotide
  Antisense strand to SEQ ID NO: 272474
uuucuaguaagugaccgaa

SEQ ID NO: 272476 - RNA, 19 nt, Artificial Sequence
  Description of Artificial Sequence: Synthetic oligonucleotide
  Sense strand starting at position 36 of SEQ ID NO: 3498
gagagcuguuauuugcuuu

SEQ ID NO: 272477 - RNA, 19 nt, Artificial Sequence
  Description of Artificial Sequence: Synthetic oligonucleotide
  Antisense strand to SEQ ID NO: 272476
aaagcaaauaacagcucuc

SEQ ID NO: 272478 - RNA, 19 nt, Artificial Sequence
  Description of Artificial Sequence: Synthetic oligonucleotide
  Sense strand starting at position 39 of SEQ ID NO: 3498
agcuguuauuugcuuugau

SEQ ID NO: 272479 - RNA, 19 nt, Artificial Sequence
  Description of Artificial Sequence: Synthetic oligonucleotide
  Antisense strand to SEQ ID NO: 272478
aucaaagcaaauaacagcu

SEQ ID NO: 272480 - RNA, 19 nt, Artificial Sequence
  Description of Artificial Sequence: Synthetic oligonucleotide
  Sense strand starting at position 40 of SEQ ID NO: 3498
gcuguuauuugcuuugaua

SEQ ID NO: 272481 - RNA, 19 nt, Artificial Sequence
  Description of Artificial Sequence: Synthetic oligonucleotide
  Antisense strand to SEQ ID NO: 272480
uaucaaagcaaauaacagc

SEQ ID NO: 272482 - RNA, 19 nt, Artificial Sequence
  Description of Artificial Sequence: Synthetic oligonucleotide
  Sense strand starting at position 51 of SEQ ID NO: 3498
cuuugauaggauuacuugu

SEQ ID NO: 272483 - RNA, 19 nt, Artificial Sequence
  Description of Artificial Sequence: Synthetic oligonucleotide
  Antisense strand to SEQ ID NO: 272482
acaaguaauccuaucaaag

SEQ ID NO: 272484 - RNA, 19 nt, Artificial Sequence
  Description of Artificial Sequence: Synthetic oligonucleotide
  Sense strand starting at position 65 of SEQ ID NO: 3498
cuuguuccgcuagagaaca

SEQ ID NO: 272485 - RNA, 19 nt, Artificial Sequence
  Description of Artificial Sequence: Synthetic oligonucleotide
  Antisense strand to SEQ ID NO: 272484
uguucucuagcggaacaag

SEQ ID NO: 272486 - RNA, 19 nt, Artificial Sequence
  Description of Artificial Sequence: Synthetic oligonucleotide
  Sense strand starting at position 221 of SEQ ID NO: 3498
acacuaaugcacuguaaag

SEQ ID NO: 272487 - RNA, 19 nt, Artificial Sequence
  Description of Artificial Sequence: Synthetic oligonucleotide
  Antisense strand to SEQ ID NO: 272486
cuuuacagugcauuagugu

SEQ ID NO: 272488 - RNA, 19 nt, Artificial Sequence
  Description of Artificial Sequence: Synthetic oligonucleotide
  Sense strand starting at position 432 of SEQ ID NO: 3498
guguaaauacagcauuaga

SEQ ID NO: 272489 - RNA, 19 nt, Artificial Sequence
  Description of Artificial Sequence: Synthetic oligonucleotide
  Antisense strand to SEQ ID NO: 272488
ucuaaugcuguauuuacac

SEQ ID NO: 272490 - RNA, 19 nt, Artificial Sequence
  Description of Artificial Sequence: Synthetic oligonucleotide
  Sense strand starting at position 776 of SEQ ID NO: 3498
acaucccauguuugacaua

SEQ ID NO: 272491 - RNA, 19 nt, Artificial Sequence
  Description of Artificial Sequence: Synthetic oligonucleotide
  Antisense strand to SEQ ID NO: 272490
uaugucaaacaugggaugu

SEQ ID NO: 272492 - RNA, 19 nt, Artificial Sequence
  Description of Artificial Sequence: Synthetic oligonucleotide
  Sense strand starting at position 848 of SEQ ID NO: 3498
cuguacucucaggagaagu

SEQ ID NO: 272493 - RNA, 19 nt, Artificial Sequence
  Description of Artificial Sequence: Synthetic oligonucleotide
  Antisense strand to SEQ ID NO: 272492
acuucuccugagaguacag

SEQ ID NO: 272494 - RNA, 19 nt, Artificial Sequence
  Description of Artificial Sequence: Synthetic oligonucleotide
  Sense strand starting at position 859 of SEQ ID NO: 3498
ggagaagugaacugugaac

SEQ ID NO: 272495 - RNA, 19 nt, Artificial Sequence
  Description of Artificial Sequence: Synthetic oligonucleotide
  Antisense strand to SEQ ID NO: 272494
guucacaguucacuucucc

SEQ ID NO: 272496 - RNA, 19 nt, Artificial Sequence
  Description of Artificial Sequence: Synthetic oligonucleotide
  Sense strand starting at position 866 of SEQ ID NO: 3498
ugaacugugaacugguuaa

SEQ ID NO: 272497 - RNA, 19 nt, Artificial Sequence
  Description of Artificial Sequence: Synthetic oligonucleotide
  Antisense strand to SEQ ID NO: 272496
uuaaccaguucacaguuca

SEQ ID NO: 272498 - RNA, 19 nt, Artificial Sequence
  Description of Artificial Sequence: Synthetic oligonucleotide
  Sense strand starting at position 900 of SEQ ID NO: 3498
cuccaauaaguuugauaug

SEQ ID NO: 272499 - RNA, 19 nt, Artificial Sequence
  Description of Artificial Sequence: Synthetic oligonucleotide
  Antisense strand to SEQ ID NO: 272498
cauaucaaacuuauuggag

SEQ ID NO: 272500 - RNA, 19 nt, Artificial Sequence
  Description of Artificial Sequence: Synthetic oligonucleotide
  Sense strand starting at position 1056 of SEQ ID NO: 3498
guaucagucuuauuucucu

SEQ ID NO: 272501 - RNA, 19 nt, Artificial Sequence
  Description of Artificial Sequence: Synthetic oligonucleotide
  Antisense strand to SEQ ID NO: 272500
agagaaauaagacugauac

SEQ ID NO: 272502 - RNA, 19 nt, Artificial Sequence
  Description of Artificial Sequence: Synthetic oligonucleotide
  Sense strand starting at position 1075 of SEQ ID NO: 3498
cucugcuuaccugagggaa
